United States Patent Application Publication US 2013/0332133 A1 - sequence listing, part 11

SEQ ID NO: 131751 - protein, 178 aa, Unknown
  Bacterial polypetide isolated from the Sargasso Sea
MNNLFITFEGGDGSGKSTQVNLLKDYLDNLNFETIKTREPGGTPSAEILRDLLTTGEVEKWTPMSEALLMWAARYEHLIQVIEPALNSGKNVICDRFYDSTYAYQGIAHNLGIDEMEKLKKIIIGNIEPDVTFVLDIDPKVGLKRSLDRPNQENRFESYNIDFHNKIRSAFLEIAKKK

SEQ ID NO: 131752 - protein, 205 aa, Unknown
  Bacterial polypetide isolated from the Sargasso Sea
MFITFEGIEGSGKSTQIELLRSSLKEEGNAVEILREPGTTQLGEKIRDIFLEKTNEKVDPITEAFLLYASRKHLDQNFLQEHLKNRSIVIADRYSDATIAYQCFGKGLSEDFVQYIHEKSDLLSPDLTFYLDITAEASKARINDRELDRMESESLDFFNKVRAGYLEIAKLNADRVIVLDAELSVKDLQDQIFKEVKNRLDASLG

SEQ ID NO: 131753 - protein, 365 aa, Unknown
  Bacterial polypetide isolated from the Sargasso Sea
MKKIVSALFAAFLVFGFISNANAAKTLKCQTVISAKGDEAVMLKDFTDNVTKLTGGSLKFEIMPAGTVVGVKETLDAVDKGLIDCGFAWTHYWSGEHPAAMLFGSPVAGGGVGIDNIAFLSWFLYGGGEQLYDRLWGEMKRDIKGFMLQPVGPEALGWFPRKIKDMDDFRTFKFRTPPGIPGQTYKDIGIASVAMGGGDILPALEAGTIDAAEWCCPQPDKVFGIHKVLKHYYLQGLHQVVVNADFYLNKSTYDKFTDHEKFSMKMAADASLMRALAYRINTNGLALKDLTENHGVILEDTPADYFPAYMAAAKATLEKNAKENAFFKEVYDSMISFANTAVPFWSGAQTSNAKLGMAYANSLKK

SEQ ID NO: 131754 - protein, 364 aa, Unknown
  Bacterial polypetide isolated from the Sargasso Sea
MRKIISLFLGIAVFIGFTVSANAAKTLKCQTVISAKADEVVMLKDFGQTVTDLTGGSVKFEILPAGTVVGVKETLDAVDKGLIDCGFAWTHYWSGEHPAAMLFGSPVAGAGVGIDNIAFLSWFQYGGGKELYDQLWKEMKRDVKGLMLQPVGPEALGWFKEPINSMDDFRKYKFRTPPGIPGQTYKDIGVASVAMGGGDILPALEAGTIDAAEWCCPKPDMTFGFQKVLKHYYLQGLHQVVVNADVYINGKVYRSLTDLQKKAFEVASNASLSKSMSYRIYENGKALAELTGKHGVILHDTPADYFPAYMAAAKKSLETNAAKNKFFAKVWQSQKDFADIAVPFWSGAQMSNAKLGMAHAATLK

SEQ ID NO: 131755 - protein, 319 aa, Unknown
  Bacterial polypetide isolated from the Sargasso Sea
MKKIISMLFAVAMVFGFISNANAAKTLKCQTVLNTKADEVKMLKDFTDTVTELTGGSLKFEILPAGAVVGVKETLDAVDKGLIDCGFAWTHYWSGEHPAAMLFGSPVAGGGIGIDNLAFLSWFQYGGGKALYDQLWKEMNRDIKGFMLQPVGPEALGWFPKPIKDMADFRKYKFRTPPGIPGQTYKDIGIASVAMGGGDILPALEAGTIDAAEWCCPKPDLTFGFQKVLKHYYLQGLHQVVVNADFYITGKTYDAMTAHEKKSLEVAADASLIKSLSYRILSNGEALQELTTKHGVILEDTPSDYFTEYMAAAKATLNK

SEQ ID NO: 131756 - protein, 363 aa, Unknown
  Bacterial polypetide isolated from the Sargasso Sea
MKKIISMLFGVVLVASFASSAYAKTLKCQTVLNTKADEVKMLKDFTDTVTTLTDGSLKFEILPAGAVVGVKETLDAVDKGLIDCGFAWTHYWSGDHPAAMLFGSPVAGGGVGIDNLAFLSWFQYGGGKELYDQLWKEMGRDIKGFMLQPVGPEALGWFPKPIKNMADFRKYKFRTPPGIPGQTYKDIGIASVAMGGGDILPALEAGTIDAAEWCCPKPDLTFGFQKVLKHYYLQGLHQVVVNADFYITGKTYDAMSAHEKKSLEVAANASLAKSLSYRIYENGKALRELTTKHGVILEDTPTDYFTEYMAAAKATLNKNAEKNAFFKKVYDSMKEFADVAVPFWAGAQMSNAKLGMAHAATLK

SEQ ID NO: 131757 - protein, 364 aa, Unknown
  Bacterial polypetide isolated from the Sargasso Sea
MKKIISTLFAVFFLMGLFNSANAATTFKCQTVLNAKGDEVKMLKDFTDNVTKLTSGSLKFEIMPAGTVVGVKETLDAVDKGLIDCGFAWTHYWSGEHPAAMLFGSPVAGGGVGIDNIAFLSWFLMGGGEQLYDRLWKEMDRDIKGFMLQPVGPEALGWFPRKIKNMDDFRTFKFRTPPGIPGQTYKDIGIASVAMGGGDILPALEAGTIDAAEWCCPKPDMVFGIHKVLKHYYLQGLHQVVVNADFYINGSKYKKLSDHEKNALKVAADASLMRSLAYRIKVNGEALKELTTKHGVILEDTPADYFPEYMAAAKATLDKNSKENAFFKEVYDSMVNFANVAVPFWSGAQSSNAKLGMAYANSLK

SEQ ID NO: 131758 - protein, 346 aa, Unknown
  Bacterial polypetide isolated from the Sargasso Sea
MIFGVILVASFASSANAKTLKCQTVLNTKADEVKMLKDFTDTVTTLTDGSLKFEILPAGAVVGVKETLDAVDKGLIDCGFAWTHYWSGDHPAAMLFGSPVAGGGVGIDNLAFLSWFQYGGGKELYDQLWKEMGRDIKGFMLQPVGPEALGWFPKPIKDMADFRKYKFRTPPGIPGQTYKDIGIASVAMGGGDILPALEAGTIDAAEWCCPKPDMVFGFQKVLKHYYLQGLHQVVVNADFYITGKTYNAMSDHEKKSLEVAANASLAKSLSYRIYENGKALQQLTTKHGVILEDTPSDYFVEYMAAAKATLNKNAEKNAFFKKVYDSMKEFADVAVSFWSGAQMSNA

SEQ ID NO: 131759 - protein, 228 aa, Unknown
  Bacterial polypetide isolated from the Sargasso Sea
MKKIISMLFATFLVFGFISNANAAKTLKCQTVLNTKADEVKMLKDFTDTVTELTAGSLKFEILPAGAVVGVKETLDAVDKGLIDCGFAWTHYWSGDHPAAMLFGSPVAGGGVGIDNIAFLSWFQYGGGKELYDQLWKEMGRDIKGFMIQPVGPEALGWFPKPIKDMADFRKYKFRTPPGIPGQTYKDIGIASVAMGGGDILPALEAGTIDAAEWCCPKPDLTFGFQKY

SEQ ID NO: 131760 - protein, 323 aa, Unknown
  Bacterial polypetide isolated from the Sargasso Sea
MLKDFTDTVTTLTGGSLKFEIMPAGTVVGGKETLDAVDKGLIDCGFAWTHYWSGDHPAAMLFGSPVAGGGVGIDNLAFLSWFQYGGGKELYDRLWDEMGRDIKGFMLQPVGPEALGWFPKPIKNMADFRKYKFRTPPGIPGQTYKDIGIASVAMGGGDILPALEAGTIDAAEWCCPKPDLVFGFQKVLKHYYLQGLHQVVVNADFYITGKTYDAMTDHEKKSLEVAANASLNKSLSRRIYENGLALRELTTKHGVILEDTPTDYFTEYMAAAKATLNKNAAENAFFKEVYDSMKEFADIAVPFWSGAQMSNAKLGMAHAATLK

SEQ ID NO: 131761 - protein, 363 aa, Unknown
  Bacterial polypetide isolated from the Sargasso Sea
MKKIISILFTAFLVFGFVSNASAKTLKCQTVLNTKADEVKMLKDFTDTVTALTDGSLKFEILPAGAVVGVKETLDAVDKGLIDCGFAWTHYWSGDHPAAMLFGSPVAGGGVGIDNLAFLSWFQYGGGKELYDQLWKEMGRDIKGFMLQPVGPEALGWFPKPIKDMADFRKYKFRTPPGIPGQTYKDIGIASVAMGGGDILPALEAGTIDAAEWCCPKPDLTFGFQKVLKHYYLQGLHQVVVNADFYITGKTYNAMTAHEKKSLEVAANASLAKSLSYRIYENGKALQELTTKHGVKLEDTPSDYFVEYMAAAKATLNKNAEKNAFFKKVYDSMKEFADVAVPFWSGAQMSNAKLGMAHAATLK

SEQ ID NO: 131762 - protein, 229 aa, Unknown
  Bacterial polypetide isolated from the Sargasso Sea
MKKIISMLFASVLVLGFISNANAAKTLKCQTVLNTKADEVKMLKDFTDTVTTLTSGSLKFEILPAGAVVGVKETLDAVDKGLIDCGFAWTHYWSGDHPAAMLFGSPVAGGGVGIDNIAFLSWFQYGGGKELYDQLWKEMGRDIKGFMIQPVGPEALGWFPKPIKDMADFRKYKFRTPPGIPGQTYKDIGIASVAMGGGDILPALEAGTIDAAEWCCPKPDLTFGFQKVL

SEQ ID NO: 131763 - protein, 434 aa, Unknown
  Bacterial polypetide isolated from the Sargasso Sea
FPIRLAKTHPAEPAPFIIKSNFSILSFIAKFLSIYHLIKAFFNTNKVKCNLYILIFFGWIWLIKFNLREEIMKKIISLMFAAFLVLGFISNANAKTLKCQTVLNTKADEVKMLKDFTDTVTALTDGSLKFEILPAGAVVGVKETLDAVDKGLIDCGFAWTHYWSGDHPAAMLFGSPVAGGGVGIDNLAFLSWFQYGGGKELYDQLWKEMGRDIKGFMLQPVGPEALGWFPKPIKDMADFRKYKFRTPPGIPGQTYKDIGIASVAMGGGDILPALEAGTIDAAEWCCPKPDLTFGFQKVLKHYYLQGLHQVVVNADFYITGKTYKAMTAHEKKSLEVAANASLAKSLSYRIYENGKALQELTTKHGVILEDTPSDYFKEYMAAAKATLNKNAEQNKFFKEVYDSMKEFADVAVPFWSGAQMSNAKLGMAHAATLK

SEQ ID NO: 131764 - protein, 353 aa, Unknown
  Bacterial polypetide isolated from the Sargasso Sea
MQICRSLNLTIRGIIMKKIVSMLFAVTLVFGFISNANAAKTFKCQTVLNAKGDEVIMLKDFTDTVTKLTGGSLKFEIMPAGTVVGVKETLDAVDKGLIDCGFAWTHYWSGEHPAAMLFGSPVAGAGVGIDNIAFLSWFLSGGGEQLYDQLWKEMKRDIKGFMLQPVGPEALGWFPEPIKNMDDFRKLKFRTPPGIPGQTYKDIGIASVAMGGGDILPALEAGTIDAAEWCCPKPDMVFGFQKVLKHYYLQGLHQVVVNADFYINGTKYNKLSDHEKTSLKVAADASLMKSLARRILVNGEALHELTTKHGVQLHDTPKDYFVEYMAAANATLNKNAEKNAFFQKSMGILRKNC

SEQ ID NO: 131765 - protein, 384 aa, Unknown
  Bacterial polypetide isolated from the Sargasso Sea
MFWISIFEKLIFLKIKRGKKMKKIISMLFAVAMVFGFISNANAAKTLKCQTVLNTKADEVKMLKDFTDTVTTLTAGSLKFEILPAGAVVGVKETLDAVDKGLIDCGFAWTHYWSGDHPAAMLFGSPVAGGGVGIDNIAFLSWFQYGGGKELYDQLWKEMGRDIKGFMIQPVGPEALGWFPKPIKDMADFRKYKFRTPPGIPGQTYKDIGIASVAMGGGDILPALEAGTIDAAEWCCPKPDLTFGFQKVLKHYYLQGLHQVVVNADFYITGKTYNAMSDHEKKSLEVAANASLAKSLSYRIYENGKALRELTTQHGVILEDTPSDYFTEYMAAAKASLNKNAAENKFFNEVYTSMKNFADIAVPFWSGAQMSNAKLGMAHAATLK

SEQ ID NO: 131766 - protein, 206 aa, Unknown
  Bacterial polypetide isolated from the Sargasso Sea
RGFFISLEGAEGVGKSTNLEFIRTILEDNGQKVVVTREPGGTPLAEDIRQLLLTNRDETVDVHTETLLMFAARAQHARTVIEPLVQRGDTVLCDRFTHSTYAYQGGGRGVLIRELEFLAQFAHSNLWPDLTIYLDAPVDRAFARIRDREQDRIEQSGREFFERVRYKYLEMAENDSRISVVDANQELSTVQDDLRSLLSSFLSEQK

SEQ ID NO: 131767 - protein, 152 aa, Unknown
  Bacterial polypetide isolated from the Sargasso Sea
MKKFITFEGIDASGKSTQIKIIYKILKKKNKKVFITREPGGTTFAEKIRNLIINNNLTPITELMLFYAARYDHFKKINYYLKKKYIVLCDRYIHSTYAYQHHEQKIDKNLINFLQNIIGKNSYPDLTFLIDLPTVLAKKRIKLRRKSKDKFD

SEQ ID NO: 131768 - protein, 210 aa, Unknown
  Bacterial polypetide isolated from the Sargasso Sea
METSSRFITIEGAEGVGKSTCIAVVESWLEGQGLSYVSTREPGGTPLGEKLRALLLDPASGTIDTLAELMMMFASRAQHVSEVIKPALARGQWVVCDRFTDSTYAYQGGGRGLSMEVIRQIEQVALQGFTPDLTLVLDLPVDDGLERVVNRGERDRFEREQRVFFERVRNAFMQRAAGGDHYRVIDASGTEKVVGSRVRRTLKEFLGSVD

SEQ ID NO: 131769 - protein, 196 aa, Unknown
  Bacterial polypetide isolated from the Sargasso Sea
MAARGRFITFEGTEGVGKSTQLQNAADTLTSLGIDVVVTREPGGTPMAEKIRELLLAPREEPVHETTELLLMFAARAQHLHNRILPALAAGKWVLCDRFTDATFAYQGGGRGVPEERIALLETLVQGDVRPDHVVLLDAPVETGMARAKKRGELDRFEQEELAFFQRIRDTYLARATAAPMQYHVVNAALPLAQVR

SEQ ID NO: 131770 - protein, 199 aa, Unknown
  Bacterial polypetide isolated from the Sargasso Sea
MKTKVKRGKFITIEGGEGSGKSTQISILVNRLQEEGVSAVKTREPGGAPTSDAIRSLLVSGEISFWEPISETMLHFAARHEHIIKTINPSLDKGLWVISDRFSDSTMAYQGYGQGVSKSIIDSLYTITADNIEPDLTLILDLEPEVGLKRAVDRNVSLSSNEDRYERMDIEFHRKLRKGFLDIAKNNPTRCRVIKAQGS

SEQ ID NO: 131771 - protein, 111 aa, Unknown
  Bacterial polypetide isolated from the Sargasso Sea
DLSSQAYQGGGRGISSNTLASLSSMVLKGLKPDLTIYLDIDPVIGLERAKGRGELDRIEQEAIEFFQRTRMRYLELASDDNSIKTVDANQEIDKVHRDITNVLRTFFEELK

SEQ ID NO: 131772 - protein, 120 aa, Unknown
  Bacterial polypetide isolated from the Sargasso Sea
MTGVFVTLEGPEGAGKSTNLGYVADALRRAGCEPLLTREPGGTPIAERMRGILLEHHEEPMDPDAELLLVFAARAQHLNRVIKPALAQGRVVISDRFTDATYAYQGGGRGIDAARIAALE

SEQ ID NO: 131773 - protein, 108 aa, Unknown
  Bacterial polypetide isolated from the Sargasso Sea
MDKLNYKKSNKKGLFITFEGGEGSGKSTQIKLISKTLSKDKLSYILTREPGGTPVSEEIRKILVSGKVEKLDSYSELLCFTAARRQHLKEIIIPALDSGQIVICDKVY

SEQ ID NO: 131774 - protein, 207 aa, Unknown
  Bacterial polypetide isolated from the Sargasso Sea
MFITFEGGEGTGKSTQINLLSKFLISNLYKVFVTREPGGSIGAETIRKLLVTGNPNRWDAHTEALLMYAARRDNFKRIIKPKLAEGNIVISDRFSDSTKVYQGHVGGISDTNIDLLHKFSLDNFYPDLTFVLDLDVSEGLKRANTRKSNEKRFESKGFEFHENVRKSYLKLASDEPNRIYIIDASKSISKIQNEIIKVVEKFLTKNK

SEQ ID NO: 131775 - protein, 206 aa, Unknown
  Bacterial polypetide isolated from the Sargasso Sea
MSRGCFFSFEGIDGCGKSTQIEYLSESLLNSGKEIIKIREPGSTDISEEIRSILLNPNNEMINDACEALLMAASRVQLVKEIIVPEIISGKIILCDRYVDSSLAYQVGGRGLSESWVREINRYSFQLAMPDKTFFLNISVQDAIDRLKDRDRDRIELSGIKFLEKVNDCFVALAEEEPSRYITLDGSKEPDLLAKEIFDEVRKFVE

SEQ ID NO: 131776 - protein, 41 aa, Unknown
  Bacterial polypetide isolated from the Sargasso Sea
MFITFEGGEGSGKSTQINLLSKYLISKSYNVFVTREPGGSL

SEQ ID NO: 131777 - protein, 208 aa, Unknown
  Bacterial polypetide isolated from the Sargasso Sea
MKPKFIVVEGLEGAGKSTAISLCQDFLNKKQIDYINVREPGGTPLAESLRTLVKAEHEEEIAFETELLIMYAARSQLMHNVINPALEQGKWILADRHDLSSQAYQGGGRGISSNTLASLSSMVLKGLKPDLTIYLDIDPVIGLERAKGRGELDRIEQEAIEFFQRTRMRYLELASDDNSIKTVDANQEIDKVHRDITNVLRTFFEELK

SEQ ID NO: 131778 - protein, 205 aa, Unknown
  Bacterial polypetide isolated from the Sargasso Sea
MFITFEGIEGSGKSTQIKMLKEALLGKGHEVIVLREPGGTILGEKVREAFLEKTIEKISVETETFLLYASRKHLDQNLLKPSLAAKKFVICDRYYDATEAYQCYGKGLSHDFFKSLNKVCNLSIPEITFYIDITSEISKERISNRERDRMEAEEIDFFNKVREGYLKIAEENRERIYKVNGIDTIENIHKRILEHVGEKIGSSLG

SEQ ID NO: 131779 - protein, 205 aa, Unknown
  Bacterial polypetide isolated from the Sargasso Sea
MFITFEGIEGSGKSTQIKMLKEALRVEGHEVIVLREPGGTILGEKVREAFLEKTIEKISVETETFLLYASRKHLDQNLLKPSLAAKKFVICDRYYDATEAYQCYGKGLSHDFFKSLNKVCNLSIPEITFYIDITSEISKERISNRERDRMEAEEIDFFNKVREGYLKIAEENRERIYKIDGIDTIENIHKRILEHVGEKIGSSLG

SEQ ID NO: 131780 - protein, 86 aa, Unknown
  Bacterial polypetide isolated from the Sargasso Sea
MSKFIVIEGLEGAGKSSAVRYVTDYLHGHGVARIECTREPGGTPLAERMRAIVKEVHDERLTIEAELLLMYASRVQLVETRIKPAL

SEQ ID NO: 131781 - protein, 132 aa, Unknown
  Bacterial polypetide isolated from the Sargasso Sea
MFITFEGGEGSGKSTQINLLSKFLLSNLHKVFVTREPGGSVGAETIRQLLVTGNPNRWDAHTEALLMYAARRDNFIRIIKPKLSEGNIVISDRFSDSTKVYQGYVGGVSDANIDLLHKFSLDNFYPRPYFFS

SEQ ID NO: 131782 - protein, 190 aa, Unknown
  Bacterial polypetide isolated from the Sargasso Sea
MRGKFIVVEGLEGAGKSSVIGLIVQALKGAGKRVEQTREPGGTPMAEAIRECVKHDWDETVSEETELLLMYAARVQLLANKILPSLDAGAWVVGDRHDLSSQAYQGGGRGVSGKTMSAISDIALKGFKPDLTLYLDVEPAVGLERARGRGELDRIEQAGLAFFERTRAKYLSLAKQDESIVVVSAMQPME

SEQ ID NO: 131783 - protein, 224 aa, Unknown
  Bacterial polypetide isolated from the Sargasso Sea
MRGKFIVVEGLEGAGKSSVIGLIVQALKGAGKRVEQTREPGGTPMAEAIRECVKHDWDETVSEETELLLMYAARVQLLTNKILPSLDAGAWVVGDRHDLSSQAYQGGGRGVSGKTMSAISDIALKGFKPDLTLYLDVEPAVGLERARGRGELDRIEQAGLAFFERTRAKYLSLAKQDESIVVVSAMQPMEKVQQDVIAVINDYVTNTSSESSSMARNESQQGKG

SEQ ID NO: 131784 - protein, 172 aa, Unknown
  Bacterial polypetide isolated from the Sargasso Sea
MTAKFIVIEGLEGAGKSTAIAVCQAYLENKQVDFINVREPGGTAMAEELRNIVKQAHQETVTGETELLIMYAARSQLVANVINPALEKGTWVLGDRHDLSSQAYQGGGRGIEQTKLSFLADMVLNGLKPDLTIYLDIDPAVGLARAKGRGELDRIEQEALGFFERTRARYLE

SEQ ID NO: 131785 - protein, 222 aa, Unknown
  Bacterial polypetide isolated from the Sargasso Sea
MRGKFIVVEGLEGAGKSSVIGLIVKALTDAGMRVEQTREPGGTPMAEAIRECVKHDWDETVSEETELLLMYAARVQLLTNKIYPSLNAGAWVVGDRHDLSSQAYQGGGRGVSEKTMTAISDIALNGFKPDLTLYLDVDPAVGLERARGRGELDRIEQAGLGFFERTRARYLSLAENDESIIVVNAMQPMEQVHQDVISIIANYVSQHIDEGSESHKTDQGNN

SEQ ID NO: 131786 - protein, 196 aa, Unknown
  Bacterial polypetide isolated from the Sargasso Sea
MEGAGKSSAIALIRDFIEKHTGLAPVCTREPGGTPLAERIRDLVKIADPNDPLCDESECLLIYAARAQLVANVIKPALAEGKWVLGDRHNLSSLAYQGGGRGLMPLVEAVSNATLKGFKPDLTLYLDLDPKLGLQRAAKRGELDRIEQQAIDFFERARATYLKLASEDERIVVIDASQTMAEVHKDILAVLQAMAW

SEQ ID NO: 131787 - protein, 219 aa, Unknown
  Bacterial polypetide isolated from the Sargasso Sea
MTTLGRFIVVEGLEGAGKTSAIRTIQQWLNEHHIKFISTREPGGTPLAEQIRTLVKQVQDELVAPETELLLMYASRVQLVKTVIQPALQQGSWVLGDRHDLSSRAYQGGGRQLDESLINSIRQVVLGDLKPDLTLYLDIDPAIGLQRAQARGELDRIEQEQLAFFQRTRAKYLQIAATEANIVTIDASQSMEQVQQQILNALQQAYQSGSLNPGLLSDV

SEQ ID NO: 131788 - protein, 209 aa, Unknown
  Bacterial polypetide isolated from the Sargasso Sea
MTQASAKFIVVEGLEGAGKSSAIALIRDFIEKHTGLAPVCTREPGGTPLAERIRDLVKIADPSDPLCDESECLLIYAARAQLVANVIKPALAEGKWVLGDRHNLSSLAYQGGGRGLMPLVEAVSNATLKAFKPDLTLYLDLDPKLGLQRAAKRGELDRIEQQAIDFFERARATYLKLASEDERIVVIDASQTMAEVHKDILAVLQAMAW

SEQ ID NO: 131789 - protein, 223 aa, Unknown
  Bacterial polypetide isolated from the Sargasso Sea
MTIQGRFIVVEGLEGAGKTSAILTIQQWLSEHNIKFISTREPGGTALAEQIRTLVKQVQDEIVAPETELLLMYASRVQLIKTVIQPALKQGIWVVGDRHDLSSRAYQGGGRQLDESLINSIRQVVLGDLTPDLTLYLDIDPAIGLQRAQARGELDRIEQEQLAFFQRTRAKYLQIAAAEPNIVTIDASQSMARVQQQILNALQQAYQSGSLNTGVSADLSSNV

SEQ ID NO: 131790 - protein, 179 aa, Unknown
  Bacterial polypetide isolated from the Sargasso Sea
MARGKFITFEGIDGAGKTTHLSWFRERLEEKVASTGRSVVMTREPGGTALGEQIREIVLHQKMDLETEALLMFALRRQHLAEVIEPALARGDWVLSDRFTDATFAYQGGGRGLPRDKLETLERWVQGGFQPDLTVLFDLAPEIANERRSAARDPDRFESESEAFFNRTRTEYLRRAEEA

SEQ ID NO: 131791 - protein, 206 aa, Unknown
  Bacterial polypetide isolated from the Sargasso Sea
MASGKFITFEGIDGAGKTTHLQWFCERLQGKLAAAGRQVVVTREPGGTQLGEKLREILLNQPMDLETEALLMFAARREHLALVIEPALARGDWVVSDRFTDATFAYQGGGRGLPRDKLETLERWVQGGFQPDLTVLFDVAPQVASERRGAARMPDKFESESDAFFSRTRSEYLRRAEEAPHRFAIVDATQTIPEIRQQLERVLAAL

SEQ ID NO: 131792 - protein, 63 aa, Unknown
  Bacterial polypetide isolated from the Sargasso Sea
MNNTLKIFSGRSNPILSKRIVDHLGLKLGDVTIRTFADGELWVKFEENIRGKDVFIIQSTNGP

SEQ ID NO: 131793 - protein, 266 aa, Unknown
  Bacterial polypetide isolated from the Sargasso Sea
PYIKTEKKVFPDGESKITINQIPKKSIVVVVQSTYPPVDSNLLELLSIVSKVQKFSSKVYAVIPYMGYARQDREFLGGEIITIGVVGKLLKAAGVKKVLTVDIHSKLALKELKISSENVSAMEVLVKHFKKMKMKNPVIVSPDLGGKERAVKFSELLKTDFIALKKQRDRKTGKVKILSGKVDVKDRDLILVDDMISTGGSIIKATQFLKKQKCRRVFVACTHALLVNDAAKKIKNAGVSQIISTNTIPGESAKVDVSKVISDALK

SEQ ID NO: 131794 - protein, 293 aa, Unknown
  Bacterial polypetide isolated from the Sargasso Sea
MASELGWEHHSLEVRRFPDSEGYIRIPENAINAVRSEPVVLVSNTFPDSGIVETLLLLEALNDVRKGNMANLREIEPQKMEPIGPGLFLAIPYFGYSRQDKRFKPGEAISAKAIGRLLSSHCDGIVVFDLHAPVALENMSVPVAFTSAMPEIASHLKETVNPDFILSPDKGAIERASQVAETIGLPFSYLEKTRIDAHTIVHKAKNLDVEGKIVAIVDDMIATGGTICKAADALRNQGAKEVHAACTHGLFTGGAIKRLIGHVDGVHATSSLSNSRSVISGGPALARGVRELL

SEQ ID NO: 131795 - protein, 244 aa, Unknown
  Bacterial polypetide isolated from the Sargasso Sea
MSDLLSIGSGAAHLYRQALATVSNNIANLNTDGYSRQDVSMAQNNPSQKGTMFLGTGARVEGVSRAYDEFVENSLRDSGSEYSTQAPIIEYANRVVDLLGSESSGLSNVLDKFFASAHELSTNAASTTHRTVFLRDADSVADRFRELSTHLDSLDLTVQENIKYQVDSINNYAEKLLAVNKQLGRKTEASQQSPALLDERDKLLRELSNVAKINVLEDQSGQVTVSLDGGNSQSAIVRKDSTTI

SEQ ID NO: 131796 - protein, 73 aa, Unknown
  Bacterial polypetide isolated from the Sargasso Sea
MKLLTGNSNKNLSVKISKFLKTKLVHSSIKKFSDGEIYIEIKENIRGNSIFIVQSVSSPANDNLMELLLCIDA

SEQ ID NO: 131797 - protein, 71 aa, Unknown
  Bacterial polypetide isolated from the Sargasso Sea
MKIIACNSSKSLAEKISKHIDVPLADASVRTFNDREIFVEINENIRGEDVFIIQSTSHPANDHFNGTFNYN

SEQ ID NO: 131798 - protein, 118 aa, Unknown
  Bacterial polypetide isolated from the Sargasso Sea
DEANKSEVMNVIGDVSKKDCLLYDDMADTCGTLCNAADALKAKDARSVSAYITHPVLSGEAIEKINQSSLDQLVVTDTIPLSEEAKSCKKIRCISLAPTLAEAIKRLNKEESISEMLM

SEQ ID NO: 131799 - protein, 72 aa, Unknown
  Bacterial polypetide isolated from the Sargasso Sea
DVYVYITHAVLSGQAVDKIEKSKIKKLITTDTIDNSKKIGKSKKIEIISIAPMISEAMKRIANSTSVSSLFK

SEQ ID NO: 131800 - protein, 71 aa, Unknown
  Bacterial polypetide isolated from the Sargasso Sea
VKAYITHPVLSGPVIERLNNSSIDELVVTNSIPLNKEAQKCSKIRVISLASTIAECIKRLSNEESLSEMFL

SEQ ID NO: 131801 - protein, 83 aa, Unknown
  Bacterial polypetide isolated from the Sargasso Sea
MKILSGTSNPSLSKSISKHLKLKLVNTNIKNFADGEIYVEINENIRGNSVFVIQSTATPANDNLMELLLCIDALRRSSAKNIT

SEQ ID NO: 131802 - protein, 84 aa, Unknown
  Bacterial polypetide isolated from the Sargasso Sea
MKILSGTSNLSLSKSISKHLKLKLVNTNIKNFADGEIYVEINENIRGNSVFVIQSTATPANDNLMELLLCIDALKRSSAKILLL

SEQ ID NO: 131803 - protein, 59 aa, Unknown
  Bacterial polypetide isolated from the Sargasso Sea
IYIEINENIRGNSIFVIQSVSSPANDNLMELLLCIDALKRSSCKKYYCCHSLFWICKTR

SEQ ID NO: 131804 - protein, 133 aa, Unknown
  Bacterial polypetide isolated from the Sargasso Sea
GKFLNAGLAIIDKRRPAPGKSEVMNVVGYVKGKTCIVVDDIIDSGGTIVNASKALIERGAKEVHVYVTHGVLSGKAVEKIKNSRIKRLIITDTIDNSHRVKAAKNIEILTISHLVGEAIKRISNSTSVSDLFR

SEQ ID NO: 131805 - protein, 99 aa, Unknown
  Bacterial polypetide isolated from the Sargasso Sea
MAKFTVVGGEASSDLAKRIARKIKSPYIKTEKKVFPDGESKITINQIPKKSIVVVVQSTYPPVDSNLLELLSIVSKVQKFSSKVYAVIPYMGYARQDRE

SEQ ID NO: 131806 - protein, 126 aa, Unknown
  Bacterial polypetide isolated from the Sargasso Sea
LAIIDKRRPTPGKSQVMNVIGNVKGKTCIIVDDIIDSGGTIVNAAAALIKRGAKEAHVYVTHGVLSGDAVEKIKKSKIKKLIVTDTINNLEKVKKAKNIEVLSISNLLAEAIKRISNSTSVSDLFK

SEQ ID NO: 131807 - protein, 58 aa, Unknown
  Bacterial polypetide isolated from the Sargasso Sea
MKIIACNSSKSLAEKISKHIDVPLADASVRTFNDREIFVEINENIRGEDVFIIQSTSH

SEQ ID NO: 131808 - protein, 71 aa, Unknown
  Bacterial polypetide isolated from the Sargasso Sea
MKILSGTSNLKLSKDISKQLKLKLVNTNIRRFADGEIYIEINENIRGNSVFVIQSTSNPANDNLMELLLVI

SEQ ID NO: 131809 - protein, 159 aa, Unknown
  Bacterial polypetide isolated from the Sargasso Sea
AKKNIKSKNIICVAPDVGGTERARALGKYLNANLAIVDKRRPAPGKSKVMNVIGNVRDKTCIIVDDIIDSGGTIVNAAKALKDRGAREVFVYITHGVLSGEAVQKIKKSVIKKLVITDSIDNGERVKKARNIEVLTISNLMGEAIKRISNSTSVSDLFK

SEQ ID NO: 131810 - protein, 80 aa, Unknown
  Bacterial polypetide isolated from the Sargasso Sea
RHACKAAQVLKERGAKQVFSYCTHPVLSGGAAARIADSALDEVVVTDTIPAARRRHQVRQDPSALDRPAAGRDLHAHRAR

SEQ ID NO: 131811 - protein, 235 aa, Unknown
  Bacterial polypetide isolated from the Sargasso Sea
QSTYPPVDSNLLELLSIVSKVQKFSSKVYAVIPYMGYARQDREFLGGEIVTIGVVGKLLKAAGVKKVLTVDIHSKLALKELKISSENVSAMDVLVKHFKKLKMKEPLVVSPDMGGQERAKKFANLLKTDYIALKKHRDRKTGKVNILSDRVNVKNRDLVLVDDMISTGGSIVKATQFLKKQKCRRVFVACTHALLVNDAAKKIKKAGVSQIVSTNTIPSESAKVDVSRVIADALK

SEQ ID NO: 131812 - protein, 227 aa, Unknown
  Bacterial polypetide isolated from the Sargasso Sea
PYSRQDKKALPREPITARLIADMYIAAGVDRLVSIDLHTQQIQGFVDQPFDHLTAMPLFVDYFKEKFNGPISIISPDAGGVGRATTFAKHLGAYVGFVHKKRDPKIHNEVKSFTVIGEVEDRHVIILDDIIDTGGTIAAASRIIKEKGVKSVNVVATHGIFSDGSVEELKDAPIDKIIVTDTLTQNGNSKQIGKVEVLSVSTIIANALTSIFTDDSVSALFMGENVL

SEQ ID NO: 131813 - protein, 116 aa, Unknown
  Bacterial polypetide isolated from the Sargasso Sea
PGKSEVMNIVGNVKNKTCVIVDDIIDSGGTIVNAAQALMDKGAKDVYVYITHAVLSGSAVEKIEKSKIKKLMTTDTIDNSKKINKSKKIEIISLAPMISEAMKRIANSTSVSSLFK

SEQ ID NO: 131814 - protein, 271 aa, Unknown
  Bacterial polypetide isolated from the Sargasso Sea
MIERAGKKKMLLFSGSSNSELADKVAKELGTELAEVDKTQFANGEIYIRLQESVRGADCFVMQSHSGQVNFTIMEQLLLVDALKRASAKRITAVLPFYPYSRQDKKALPREPISARLVADLFIAAGADRIVSIDLHTQQIQGFIDQPFDHLTAMPLFVNYFQEKFQEPITIISPDAGGVRRATTFAKNMEAYVGFVHKKRDPKIHNEVKAFTVIGEVEDRHAILFDDIIDTGGTIAAASRALIERGAKSVSVAATHGIFSDESVEKLKTPL

SEQ ID NO: 131815 - protein, 134 aa, Unknown
  Bacterial polypetide isolated from the Sargasso Sea
SWKLLGVGLAIVDKRRPKPGQSKVMNVIGDVKNQTCIIVDDIIDSGGTIVNAARALKERGAKEVYVYITHGVLSGDAVKKIKNSVIKNLVITDTIDNGAKTINVKNIEVLPISGLMGEAIKRISNSTSVSDLFK

SEQ ID NO: 131816 - protein, 84 aa, Unknown
  Bacterial polypetide isolated from the Sargasso Sea
YAAKALKDKGAKAVKAYITHPVLSGPAIERLNKSEIDELIVTNSIPLNKDAKKCSKIRVISITNIIAECITRLSNEESLSEMFL

SEQ ID NO: 131817 - protein, 194 aa, Unknown
  Bacterial polypetide isolated from the Sargasso Sea
MSKYVVVGGNSSQALARKIAKKLKAGYVNTSTRTFPDGESKITIKKIPKKKIIVVVQSTFPPVDSNLLQLLSIVSQARKYSSKVYAVIPYLGYARQDREFLGGEVVTVSIVGKMLKSVGAKKVIVVDIHSKLALKQIGISSENISAVSNLANYIKRLKLKDPLVVSPDQGGTERAKKFAHVLKTDFIALKKNRD

SEQ ID NO: 131818 - protein, 59 aa, Unknown
  Bacterial polypetide isolated from the Sargasso Sea
MKIIACNSSKSLAEKISKHIDVPLADASVRTFNDREIFVEINENIRGEDVFIIQSTSHP

SEQ ID NO: 131819 - protein, 88 aa, Unknown
  Bacterial polypetide isolated from the Sargasso Sea
RSIVNAAKALKEKGAKDVYVYITHAVLSGEAVQKIERSRIKKLITTDTIDNSKKIGRSKKIEIISLAPMISEAMKRIANSTSVSSLFK

SEQ ID NO: 131820 - protein, 75 aa, Unknown
  Bacterial polypetide isolated from the Sargasso Sea
GANSVSAYITHGVLSGPATKRIQNSKLNELVITDSIAPTKLILDASNIRILNLAPLIAEAIRRISSHNSVSSLFD

SEQ ID NO: 131821 - protein, 270 aa, Unknown
  Bacterial polypetide isolated from the Sargasso Sea
MGFRVLTGLFAHETNTFSQWNTTLENYRDFVLAFGDDVPDAIAGSMLEPNGVIQVAEEADWDLVHTVAGWATPSGPVEREVWDVGAGAIFEAAQTQGPFDGIVLALHGAMTTVDHADAEGVLLQELRDIVGPDIPIAITLDLHANVTRLMARHANIICAFRTYPHTDQVATAARASRILDRTMKGEVVPRVHLARRNMLVGLDHGRTTVDNPMTQLMARAEALEEKDPGVLTVSLHAGFTPADFPEVGPSVAVTGDGPAARYRTIAEAYM

SEQ ID NO: 131822 - protein, 69 aa, Unknown
  Bacterial polypetide isolated from the Sargasso Sea
MKILSGTSNLKLSKSIAKNLKLKLINTNIRRFADGEIYIEINENIRGNSVFVIQSTSNQANDNLMELLL

SEQ ID NO: 131823 - protein, 261 aa, Unknown
  Bacterial polypetide isolated from the Sargasso Sea
MVVRSVQKLNQSYIKSLVKKALDEDLKPRGDITTKLIKFKNKKVKAQIIAKQSGVISGLDFCKTAFELIGKETVFVGKVKDGSKVKKNKAIAEIKAKTKTILIAERTALNFLNHASGISTLTNLFVQKVNKKTKICCTRKTTPNLRLLEKYAVKIGGGHNHRYNLSDEILIKDNHINIEESLKNLVKKAIKTKKIVTVEIENVKQLNQVLGLKFKRILFDNMSIKQLRKCLKLCKKKYETEYSGNANLKNVKKISNTGVKR

SEQ ID NO: 131824 - protein, 153 aa, Unknown
  Bacterial polypetide isolated from the Sargasso Sea
NKKLICVSPDVGGVARTRDLANRIKADLAIIDKRRPAPGKSEVMNILGNVKNKTCIIVDDIIDSGGTIVNAVNALKKSGANEVYVFISHGVLSGDASKKIKNSKIKKLIVTDTIDNTKKIHNNNKIEVLSISSLMSEAIKRIANSNSVSDLFN

SEQ ID NO: 131825 - protein, 127 aa, Unknown
  Bacterial polypetide isolated from the Sargasso Sea
MIEQPGKKKMLLFSGSSNDELAQKVASNLGTQLSDVERKEFANGEIYLRIGESVRGADCFVMQSHSGDINRTIMEQLLMIDALKRASAKRITAVLPFYPYSRQDKKALPQRTNICKINKRYVCCSWS

SEQ ID NO: 131826 - protein, 220 aa, Unknown
  Bacterial polypetide isolated from the Sargasso Sea
SIVSKVQKFSSKVYAVIPYMGYARQDREFLGGEIVTIGVVGKLLRAAGVKKVLTVDIHSKMALKELKISSENVSAMDVLVKYFKKLKMKEPLIVSPDMGGQERAKKFANLLKTDFIALKKHRDRKTGKVNILSDRVNVKNRDLILVDDMISTGGSIVKATQFLKNQKCRRVFVACTHALLVNDAAKKIKKAGVSQIVSTNTIPGESAKVDVSRVIADALK

SEQ ID NO: 131827 - protein, 110 aa, Unknown
  Bacterial polypetide isolated from the Sargasso Sea
MNIIGEVKNKDCVIVDDIIDSGGTIVNAAEALIKKGARDIYVFITHAVLSGEAINKIKKSKIKKLIITDSIDNAKRVKNINKIQVLSIAPLMAEAIKRISNSTSVSDLFN

SEQ ID NO: 131828 - protein, 99 aa, Unknown
  Bacterial polypetide isolated from the Sargasso Sea
CLIVDDMADTCGTLCNAAKALKEKGAKTVTAYITHPVLSGNAIKKINESTLDQLVVTDTIPLSKEAEDCEKIRVMTLAPTLAEAIRRINKEQSISAMMR

SEQ ID NO: 131829 - protein, 178 aa, Unknown
  Bacterial polypetide isolated from the Sargasso Sea
GFFDMPVDNLYTAPLFAKYIKKKLSNKKLICVSPDVGGVARTRDLANRIKADLAIIDKRRPAPGKSEVMNILGDVKNKTCIIVDDIIDSGGTIINAVNALIKSGANEVYVFISHGVLSGDAAKKIKNSKIKKLVVTDTIDNSKKINNNSKIEVLSISSLMSEAIKRIANSNSVSDLFN

SEQ ID NO: 131830 - protein, 83 aa, Unknown
  Bacterial polypetide isolated from the Sargasso Sea
MKILTGNSNKQLSNKISKNLKNKLVNTSIRKFADGEIYIEINENIRGNSIFIIQSVSSPANDNLMELLLCIDALKRSSAKNIT

SEQ ID NO: 131831 - protein, 69 aa, Unknown
  Bacterial polypetide isolated from the Sargasso Sea
MKILTGNSNKLLSEKISKYLKNKLVNSSIRKFSDGEIYIEINENIRGNSIFIIQSISSPANDNLMELLL

SEQ ID NO: 131832 - protein, 77 aa, Unknown
  Bacterial polypetide isolated from the Sargasso Sea
GAVQVKACCTHPVLSGQAIERIEASELDEVVVTNSIPLSDEARKYSTKIRQISVASLLAESIRRIATGDSVSSLFME

SEQ ID NO: 131833 - protein, 83 aa, Unknown
  Bacterial polypetide isolated from the Sargasso Sea
NAAVTAIDNGATSVTAIATHPVLSGAAVQRLEESPIDKVIVSDTIALSKDKIFKKIEIISIAQIFAETIKRINSGESVSSLFK

SEQ ID NO: 131834 - protein, 128 aa, Unknown
  Bacterial polypetide isolated from the Sargasso Sea
MNIKSPQTLISEASEQIKTISADEALKLNNENKCNLIDLREESELINSGSIENSTHIPRGLLEFSLNSNSPLIQNNVIDINKEIVLFCAAGGRSALAAKTLKDMGFKNVSHIDGGFGAMRNDGFKVKK

SEQ ID NO: 131835 - protein, 253 aa, Unknown
  Bacterial polypetide isolated from the Sargasso Sea
ESKITINQIPKKSVVVVIQSTYPPVDSNLLELLSIVSKVQKFSSKVFAVIPYMGYARQDREFLGGEIVTIEVVGRLLKAAGVKKVLTVDIHSRLALKKLKISSENVSAMDVLVKHFKKLKMKEPLVVSPDMGGQERAEKFANLLKTDFIALKKHRDRKTGKVNILSDKVDVKNRDLILVDDMISTGGSIVKATQFLKKQKCRRVFVACTHALLVNDAAKKIKKAGVSQIVSTNTIPGESAKVDVSRVIADALK

SEQ ID NO: 131836 - protein, 83 aa, Unknown
  Bacterial polypetide isolated from the Sargasso Sea
MKLLTGNSNKSLSQRISKHLKTKLVHSSIRKFADGEIYIEINENIRGNSIFLIQSSSAPANDNLMELLLCIDALKRSSAKNIT

SEQ ID NO: 131837 - protein, 84 aa, Unknown
  Bacterial polypetide isolated from the Sargasso Sea
YFFCCHGLFSRNALERIEHSCFTKVIVTNTIPNNNIINKSELIDIIDVSWLCSQSVYRHLNGISISELYDEQMFNKRLKDITLI

SEQ ID NO: 131838 - protein, 256 aa, Unknown
  Bacterial polypetide isolated from the Sargasso Sea
MEARRFPDTEGYFRVPEKSIEKIRSSPVILVSNTFPDSCIIETILLLEAINDVREGKLEDIRGKGIDCEPTGPGIFLAIPYFGYSRQDKRFNQGEAVSARAIGMLLSSKCDGITVLDLHAPEVLENLPVQVSFASSMSEIAFYLQSEINPDFILSPDKGAIERASFVAETIGCKFSYLEKTRIDAHTIVHKAKDLDVKNAIVTIVDDMISTGGTICRASEALRDQGAKAVYAACSHGLFTGGAISKLDKFVDGIIA

SEQ ID NO: 131839 - protein, 247 aa, Unknown
  Bacterial polypetide isolated from the Sargasso Sea
MSKYVVIGGNSSQDLGRKIAKKLKAGYVSTSTRTFPDGESKITIKKIPKKKIMVVVQSTFPPVDSNLLHLLSIVSQARKYSSKIYAIIPYLGYARQDREFLNGEVVTVSVVGKMLKSVGTKKVIVVDIHSKLALKQLGISAENVSAVSNLANYTKKLRLKDPLVVSPDQGGKERASEFASELKTDFIALKKHRDRKNGKINILTSKVSVKNRDLILVDDMISTGGSIIKAVRFLKKQKCRRIYVACT

SEQ ID NO: 131840 - protein, 132 aa, Unknown
  Bacterial polypetide isolated from the Sargasso Sea
SAPGEINSMTIIGEVSGQTCILVDDICDTAGTLIKSAELLIEKGAKEVHAYITHGVLSGEAIDRISNSNLSSMVITDTIEPTEVVSKCPKIRIITAAPLLAHAMLNISNESSVSSLFSEESLKPIYEGLYSN

SEQ ID NO: 131841 - protein, 157 aa, Unknown
  Bacterial polypetide isolated from the Sargasso Sea
KKIKSKKIICIVPDVGGTERARALGKLLNVGLAIVDKRRPKPGQSQVMNVIGDVKDKTCVIVDDIIDSGGTIVNAAKALKARGAKEVYVYITHGVLSGEAVKKIKSSVIKNLVITDTINNVEKTKNVKNIEVLPISGLMGEAIKRISNSTSVSDLFK

SEQ ID NO: 131842 - protein, 252 aa, Unknown
  Bacterial polypetide isolated from the Sargasso Sea
MLIYADDISYDQENNIIAKGSAKILYKNNIISSKLIIYSQKNDSITLPTEFSLKDEGNNYYYGSSGFLESNLKYGNINNVKILLNDGSRIVGKTVKRENNIDIITKAVYSPCKSKIKFGNFICPIWEVEGEKILHDYDDLFLYQKHAKINILNTPVFYTPYLVTPSPLRKKRKSGFLTPSINLNFFDTKISQSTSFPYYFNLSIDKELTFTPTINYGGGVDSSQRFNFDYNQILSGGELKTNLTFDSSFENQ

SEQ ID NO: 131843 - protein, 76 aa, Unknown
  Bacterial polypetide isolated from the Sargasso Sea
MKILTGNSNKQLSNKISKNLKNKLVNTSIRKFADGEIYIEINENIRGNSIFIIQSISSPANDNLMELLLCIDALKD

SEQ ID NO: 131844 - protein, 71 aa, Unknown
  Bacterial polypetide isolated from the Sargasso Sea
MKIIACNSNKQLAEAISSYIGVKLSDASIRKFADDEIFVEINEHIRGEDVFIIQSTSHPANDHLLELLIAI

SEQ ID NO: 131845 - protein, 186 aa, Unknown
  Bacterial polypetide isolated from the Sargasso Sea
MRIISGKLKGKKFEFFKSTSTRPIKDSVKENIFNILKHSNQININIEESKVLDLYSGFGSFGLECISRLADKVIFMEKDKKVVSVIKKNLKNLSIENKAQIIEGDINLSLKEFKKNKFNIFFFDPPYADNNYLANLEIIKNKKYFSKNHIVVIHRDRKSNEDLQFLLDILLIKNYGRSKIIFGKFN

SEQ ID NO: 131846 - protein, 96 aa, Unknown
  Bacterial polypetide isolated from the Sargasso Sea
MKLLAGNSNKNLSQKISKYLKTRLVNSKIKKFSDGEIYVEINENIRGNNIFIIQSISSPANDNLLEMLLCIDALKRSSAKNITAVIPYFGYMQTDR

SEQ ID NO: 131847 - protein, 110 aa, Unknown
  Bacterial polypetide isolated from the Sargasso Sea
MNIIGDVKNKICIMVDDIIDSGGTIVNAAKMLKSKGAKEIHVYITHGVLSGDAVKKIRNSPIKNLVITDTIDNSKKLKNAKNIEVLSISNLLGEALKRISNSTSVSDLFK

SEQ ID NO: 131848 - protein, 75 aa, Unknown
  Bacterial polypetide isolated from the Sargasso Sea
MKLLSGNSNKPLSKNIAKYLKSKLVNSSIRNFSDGEIYVEINENIRGNSIFLIQSISSPANDNLMELLLCIDALK

SEQ ID NO: 131849 - protein, 77 aa, Unknown
  Bacterial polypetide isolated from the Sargasso Sea
MKILTGNSNKKLSQKISGFLKNKLINSSIRKFSDGEIYIEINENIRGNSIFLIQSISSPANDNLMELLLCIDALKRS

SEQ ID NO: 131850 - protein, 187 aa, Unknown
  Bacterial polypetide isolated from the Sargasso Sea
MRNNIFKITGLTIASALLSYVLITYFDELNKADEFNQFLSDAATISEIHNSNSANFKDLLDFSEVSRERFENNINNIRTNSQEAYQLLNSSNTRYTSKEKQLLEIAVNSWLEGIELFEVSIITLIDNPNSINIEESIAQSIIDLSIGDEAYSEFLFLLRQNASIDGTFLPNFYQIEYIGIEDNSYQF

SEQ ID NO: 131851 - protein, 197 aa, Unknown
  Bacterial polypetide isolated from the Sargasso Sea
INIEESIAQSIIDLSIGDEAYSEFLFLLRQNASIDGTFLPNFYQIEYIGIEDNSYQFADLLVDKAKRSTGGLFLQKNLAVAGTEFVPMPIAFTEDNVAVLLDEPAVLQVVISNEGNIDSYDIVVLILVTDEFGETVYESQNKISSIGPKESKIFLTDPINIEKGIQHEWFIKIEEIEDEEELTDNLLSVYGFIPPES

SEQ ID NO: 131852 - protein, 369 aa, Unknown
  Bacterial polypetide isolated from the Sargasso Sea
MEKLDLFIEESLSNYSTRRNYDYGPDNRSNTSCLSPYITHGVLSESEIIKKALNKYSYSKIEKFIQEVLWRTYWKGWLERRPTVWTSYVNDFNSLISKYKNDETYNKVINSESSIECMNDWVSELKETGYLHNHTRMIFASIWIFTLKLPWQLGAGLFLKYLFDGDPASNTLSWRWVGGIQTKGKHYIAQNWNIEKFTNGKYSNVELNESPECLVEEISHEPIEPVMINADFKLFKDLIIFENTLYPELVDFINENFKQITVIMSESSDDYDTISENLLNFKAKLITNFLSKINKDISINILKIEQLQYFKDTNLCAIYPQIGKNLNYIKSKDLNFNYLYKKIDIISNKYCKKGYFVFKKNINTILKAL

SEQ ID NO: 131853 - protein, 384 aa, Unknown
  Bacterial polypetide isolated from the Sargasso Sea
MILNMGPQHPSTHGVLSFQVELEGEVVRRVQPVIGYLHTGMEKTGEELNYFQGPTNTTRMDYLSPFFNELVFSLATEKLLDIEVPERASTIRILMTELNRVSSHLVALATGGMDIGALSMMIFGFRERELILDFFEKTTGLRMNHNFIRPGGVAADLPDNWQKDVEQILKIIPEKLKDYDEMLLDNPIWQGRLKNVGILTTEECFAYGITGPSLRASGYAWDLRKMQPYSGIDKYEFDVPVLKEGDVFARWRIKVLEIFESLKIVEQVMGDMPKGPFKIQDKKITPPPRKRLDESMEALIHHFKIYTEGFKVPPGQVYTTVESPRGELGCFIVSDGSPKPYRMHVRGPSFCNLQALPVVMSDSPIADAVAAIASLDPVLGDVDR

SEQ ID NO: 131854 - protein, 215 aa, Unknown
  Bacterial polypetide isolated from the Sargasso Sea
MPPALRADLLARAALRRLPAGHALFRRGDPPCGLYAVLAGSLTIGAVDPQGKEALLTVAEPVTWFGEIALFDGQPRTHDAIALDDALLLHVPQAALLAILDATPQYWRQFALLMAQKLRLSFLTVESMSVMPAAQRLAARLLMIADGYGGISAGRTRIRLSQEKLAAMLSLTRQTTNQLLKALQADGVVRLHVGEIELVDVDALRRASGLPDGMR

SEQ ID NO: 131855 - protein, 291 aa, Unknown
  Bacterial polypetide isolated from the Sargasso Sea
MAKFTVVSGNASTDLAKRIARKLKSPYIKTEKKVFPDGESKITINQIPKKSIMVVVQSTYPPVDSNLLELLSIVSKIQKFSSKVYAIIPYMGYARQDREFLGGEIVTIGVVGRLLKSAGVKKVLTVDIHSKLALKELKISSENVSAMDVLVKHFKKLKMKEPLVVSPDMGGQERAKKFANLLKTDFVALKKHRDRKTGKVNILSDKVDVKNRDLVLVDDMISTGGSIVKATLFLKKQKCRRVFVACTHALLVNDARKKIKKAGVSQIVSTNTIPGETAKVDVSRVIADALK

SEQ ID NO: 131856 - protein, 429 aa, Unknown
  Bacterial polypetide isolated from the Sargasso Sea
SVVSGFMSGIGFIILILQIGPFIGVTTTGGVVGCLTTLAELPLPNPAALSIGVMTLAVVFLTPARIRQWVPSPLLALLIVTPLSLLLFNDDRLQSLGLEPLNRIGTIPEGGLRFVMPNFSQHLPELIKAGLVLALLGAIDSLLTSLVADNITQTNHDSNRELIGQGIANTISGLLSGLPGAGATMRTVINIKSGGATPLSGMTHSLVLLLVLLGAGTFAAEIPTALLAGILIKVGLDIIDWGFLLRAHRLSVKTAALMYAVMLMTVFWDLIWGVLVGMFVANLLTVDAITQTQLQGMDEDNPQKGDKLQIENLSEQEQRLMESCGEQLMLFRLRGPLSFGAAKGISARMGLVSNYQVLILDITDVPRMGVTAALAIERMVQEAQMLGRVAFVAGANQRLKERLERFGVNAVMTDRLDALRRASDHLSLK

SEQ ID NO: 131857 - protein, 126 aa, Unknown
  Bacterial polypetide isolated from the Sargasso Sea
MAKFTVVGGDASSDLAKRIARKIKSPYIKTEKKVFPDGESKITINQIPKKSIVVVVQSTYPPVDSNLLELLSIVSKVQKFSSKVYAVIPYMGYARQDREFLGGEIITIGVVGKLLKAAGVKKSLDR

SEQ ID NO: 131858 - protein, 145 aa, Unknown
  Bacterial polypetide isolated from the Sargasso Sea
MNDQLKIFSGRSNPALSKDIANYLGKDLGKLTIKTFSDGELWLQFEENIRGCDVFIIQPTNSPAENIMELILIIDAAVRASAKTVTAVIPYFGYGRQDRKDNPRVPISSRVMVDLITATGADRIITMDLHSAQIQGFATIPFDHL

SEQ ID NO: 131859 - protein, 315 aa, Unknown
  Bacterial polypetide isolated from the Sargasso Sea
MPVLSGASGVDIASGLAPILGMEYVALESRRFPDGEAYVRIPPESIESVRSESVVLVSNTFPDSGIMQTLFLLGAIRDVRRGDLSSLKGEWEGETHDVGPGIFLAIPYYGYARQDKRFGFGESVSAKLVADLLSELCDGIAILDLHAPEVLGDMETDIEFVSSMPEIAESLQRDVSPDFILSPDKGAISRATEVAELIGCDFSYLEKKRIDAHTIEHTPKDLDVSGKVVAIVDDMISTGGTICRASDALRRQGAVEVHAACTHGLFTGGALSRLANHVDGVYTTDSLPNPRASVSAAPALARGLSRMIGRAPDNG

SEQ ID NO: 131860 - protein, 147 aa, Unknown
  Bacterial polypetide isolated from the Sargasso Sea
VAPDVGGTERARALGKLLNVGLAIVDKRRPKPGQSQVMNVIGDVKDKTCIIVDDIIDSGGTIVNAAKALKDRGAKEVYVYITHGVLSGEAVKKIKKSVIKNLVITDTIDNNDKIKGTKNIEVLSISGLMGEAIKRISNSTSVSDLFK

SEQ ID NO: 131861 - protein, 118 aa, Unknown
  Bacterial polypetide isolated from the Sargasso Sea
MLLFSGSSNVELAQQVASNLGTELSEVERKEFASGEIYLRLGESVRGADCFVMQSHSGDINRTIMEQLLMIDALKRASAKRITAVLPFYPYSRQDKKALPREPISARLISDMVRCCRC

SEQ ID NO: 131862 - protein, 349 aa, Unknown
  Bacterial polypetide isolated from the Sargasso Sea
MGLNETQNIITLTADSIKKFVSQIDDDQDSDGDPDTAIYILGDNEGSFRDLVVVSPDDGWTYLKSSLAYDFYQSADGETYFITRKGMGVYEVPSGAIISISNQTLRENIVNGEVGTISISGSKKLSPDDDVAKYTLSGADADKFEITDEYILRLKPGTKADFEAQSSYSLTITIGDIATELVITVTDAEENNISGSTAAETLNGTDVDDIIDSKGGEDDIDGKDGIDTLLILDQSSNYEIETLAGITKITALDSASGSYLGQTITLRNVENIEFSDTVISIDTTLNDATYFYGNGSSETLNGTDGDDVFDPDGGSDEIDGKDGDDTVLIFDQRDNYEITISNSVVSIKA

SEQ ID NO: 131863 - protein, 137 aa, Unknown
  Bacterial polypetide isolated from the Sargasso Sea
TRALARKLDVGIGIIDKRRPAPGKSQVMNVIGNVKNKTCIIIDDIIDSGGTIVNAAQALINRGAKDVHVYITHGVLSGEAVEKIRKSKIKNLVITDTIDNSDKIKKAKNIEVLSISILLGEAIKRISNSTSVSDLFK

SEQ ID NO: 131864 - protein, 449 aa, Unknown
  Bacterial polypetide isolated from the Sargasso Sea
FAVARCGRLGRQRPCVPPVKTATTKGASSPASGSPCPTPAAEDSYAPSASRWGRRRSPQPSWHHRAVSHSPADRSALIELVRQWHQDAIPWIPSGLGEHLEWGPRLDPTHGVLSCRHLDRVIDHAVDDLTLSVEAGMPLDRLQALLAKQGQWLPVDLPRDGRPGSIGGLVARGLSGGLRQRHLGVRDQIIGIGLLRADGVEARAGGKVVKNVAGYDLMRLLCGSWGSLALITDVTLRLQPIRPHQAALALHGTLSDLERCRAELVRSTLTPERCDWQGCVEEGWQLQIMVSSVSDAAVDEQLQRLEQLGQNHGLTSEQQPCSDPRDNGLTCSAPTWLVRLVLPPAKVTQLLQSPAISSLKGWTWDIAAGAGCGDGWSSGPSEPFKVEALRRSVVELGGGLTVLVQPKPGSIPAWLDSPARPVIEAVKRQFDPRQQLCRGRLPGVNQDTA

SEQ ID NO: 131865 - protein, 325 aa, Unknown
  Bacterial polypetide isolated from the Sargasso Sea
MIERTGKKKMLIFSGSSNPELADKVAKELGTELAEVDKTQFANGEIYIRLQESVRGADCFVMQSHSGQVNFTIMEQLLLVDALKRASAKRITAVLPFYPYSRQDKKALPREPISARLVADLFIAAGADRIVSIDLHTQQIQGFVDQPFDHLTAMPLFVNYFKEKFQEPITIISPDAGGVRRATTFAKNMEAYVGFVHKKRDPKIHNEVKAFTVIGEVEDRHAILFDDIIDTGGTIAAASRALIERGAKSVSVAATHGIFSDESVEKLQDTPIEEIVVTDTLKQNGNIEKIGNVNILSVSSIIATALTSIFADDSVSAIFMGENVL

SEQ ID NO: 131866 - protein, 109 aa, Unknown
  Bacterial polypetide isolated from the Sargasso Sea
TVIGDVSGKTAVLVDDMIDTGGTISQGAKLLRQQGAKRVIACATHAVFSPPAVERLSEPGLFEEVVVTNSIPIAPEDRFPQLQMLSVANMLGETIWRIHEESSVSSMFR

SEQ ID NO: 131867 - protein, 180 aa, Unknown
  Bacterial polypetide isolated from the Sargasso Sea
MLRPRIIPCLLIDNEDVVKTTRFENQTYIGDPLNIVRLFNEKKSDEILIIDITASLQKKSPNFKLIENIAEEARMPVAYGGGIKTADQALRIFNSGIEKISVSSLFFENKSEIKRIIKSVGSQSLVLTLDIKLFDNQYSIFILNGKKFLTNDIKGVISEAQDLGVGEIIVNNIDKDGTMT

SEQ ID NO: 131868 - protein, 1059 aa, Unknown
  Bacterial polypetide isolated from the Sargasso Sea
MINIIDYIMAARKTTVFLMLILITIGTFTFISIPKDAEPDIDVPFVYVSVVLPGISPEDSERLIVRPLETELKNIEGLKEISGMASQNYGSVLLEFDISFDKDKVLSDVREKVDLAKSEFPQDAEEPQVLEFNMATMPVMTVSLSGKVPNRTLIYHAKELQNQIERVPGILEAPIVGDKEELLEILVSPSKLENYDVSLADLIRSITGNNRIVAAGTINKGQGKFSVKVPAVYESAQDVYNIGIITRGEGTVKLGDIAEIRSTFKENETYARIDGKPAIHLDVKKRIGENVILINKEIRKVGNKYKQDNLSNNIYIDFSADTSDYINEMLGSLSNAISNAIISVMLLVIASLGIRSALMVGISIPTSFLMAITLLAVSGGYINMMVMFGLLVSVGLLVDGSIVMVEYADRKMAEGLDRKAAYTQAYKRMIWPIISSTATTLAAFLPLVLWPGIPGQFMKWMPFMVSLVLVSSLLSALIFIPVMGSLFGRTENKNKIKLDEEFSFNNLKGITLTYAKLLEKCLKRPMAVLLSAVLVVFTLIILYSNFNAGSQYSVDTDSNQMLVHVNARGNLSPEEKLDLSIDVEEIVMGTDGVDRVLTSIGSGDGFNVYSAMGGSGNRTDQIASLMVELKPVHERRSADKIKDDILSKSKLLPGIIVEAYKIENKPDTGKDIQMEITSNNKNNLEKVTKLITAKLENMDGIQEVDNTMPLPGIEWIINVDRELAGRFGADISTIGAIVQLVTNGILVDKYRPDNSDDEVDIRVRFPEEYRMIEEFDQLRIPTSEGAVPLSNFVTRTPNSKVSTIERLDGLRIFKIRANTSIDPSTGKKYLAVDKSNELKKWISQESLPKNVFIKFAGSDEEREESAAFLGNAMIGALFLMFIILLTQFNSFYQAAITLSTVILSTIGALTGLMIVGQYFSVIMTGLGIVSLAGIIVNNSIVLIDTYNRLRVQHEDPIETILHSSVQRFRPIVLTTATTMIALIPVALQVTIGWFDRSIEFGGLMAAWWVPFSTAVIWGLGFSSVLTLFLVPTLLSMPIYFERNKHKILKFFTNKIQPAE

SEQ ID NO: 131869 - protein, 465 aa, Unknown
  Bacterial polypetide isolated from the Sargasso Sea
RLWYFTGDSAFGDNGDDTFYYDSNDFALISGGAGRDRLDISSQLEDNPIFDLASIQGEIEAVEEVYLGLNETQNIIKVTVDSIKNFVSQIDDDQDSDGDPDTAIYILGDNEGSFRDLVVVSPDEGWTYLKSSLAYDFYQSADGETYFITRIGMGVYEVSSDAGIIISNQTLRENIVNGEVGTISLSGTKKLSPDDDVIKFTLSGADADKFEITDEYILRLKPGTKADFENQSSYSLTITIGDVTSELVITVTDAEENNISGSTAAETLNGTDVDDIIDSKGGEDDIDGKDGIDTLLILDQSSNYEIETLAGITKIKALDSASGPYLGQTITVRNVENIEFSDTMISIDATLNDATYFYGNGSSETLNGTDGDDVFDPDGGSDEIDGKDGVDTVLIFDQRDNYEITISDNVVSIIALDSATGDYAGNTIKLTNIETIIFSDQTVQVSDLTSKNSTSRLVDGEDNQE

SEQ ID NO: 131870 - protein, 183 aa, Unknown
  Bacterial polypetide isolated from the Sargasso Sea
RWPIQGFFDIPVDNLFATPIFARHVKKNLNKKNLICVAPDVGGVERTRALARKLDIGIAIIDKRRPAPGKSQVMNVIGNVNGKTCIIIDDIIDSGGTIVNAAQALINRGAKEVHVYITHGVLSGEAVNKIKNSKIKNLVITDTIDNSDKIKKAKNIEVLTISNLLAEAIKRISNSTSVSDLFK

SEQ ID NO: 131871 - protein, 153 aa, Unknown
  Bacterial polypetide isolated from the Sargasso Sea
SKNLICVAPEVGGTERARTLGKLLKVGLAIVDKRRPKPGQSQVMNVIGDVKGKTCIIVDDIIDSGGTIVNAAKALKDRGAKEVYVYITHGVLSGEAVKKIKNSVIKNLVITDTIDNISRTKGAKNIEVLSISGLMGEAIKRISNSTSVSDLFK

SEQ ID NO: 131872 - protein, 164 aa, Unknown
  Bacterial polypetide isolated from the Sargasso Sea
KHFHNLSGKNSNCTVLIPDMGSSKLGQSYAKRLEMSFALVDKRRNAHNQSEVVSVVGELKNQHILIIDDMIDTAGTISNAAKIAKEKGALSVTVAATHGIFSSNALDKLSDDIVDTIFITDTIDMSNKKDCKKLKKISSAKIFAETINRIHNGESVSQLFRKVT

SEQ ID NO: 131873 - protein, 242 aa, Unknown
  Bacterial polypetide isolated from the Sargasso Sea
MNDQLKIFSGRSNPALSKDIANYLGKDLGKLTIKTFSDGELWLQFEDNIRGCDVFIIQPTNSPAENIMELILIIDAAVRASAKTVTAVIPYFGYGRQDRKDNPRVPISSRVMVDLITATGADRIITMDLHSTQIQGFATIPFDHLYSRMVLLDAIKSLNFDQENSAVLSPDVGSARMSQSYAKKLGMHFALIDKRRYAPNKAQVMHLIGDLKNKDVLIIDDMIDTAGTTVNAANSAIENGAK

SEQ ID NO: 131874 - protein, 248 aa, Unknown
  Bacterial polypetide isolated from the Sargasso Sea
MKLFTGRSNPGLASGIAEYLNIPLGKIDIQTFSDGELLVAFEENIRNEDVFIVQSTNPPAENILELLLMLDAARRASASNVVAVIPYFGYGRQDRKDRPRVPISARLMLDMITAVGVSRIITMDLHSPQIQGFVNVPFDHLYSRMVLLNKLKELNLSESSGVVLAPDVGSAKMSQSYAKKLNIGFALIDKRRPKPNQAEVANLIGDLKNKDVIIIDDMIDTAGTLCNAADTAINEGAKSVIAVATHPV

SEQ ID NO: 131875 - protein, 99 aa, Unknown
  Bacterial polypetide isolated from the Sargasso Sea
CIVPDDLIDTAGTLCNAADALKEKGAKAVKAYITHPVLSGPAIERLNNSSIDELVVTNSIPLNKEAQKCSKIRVISLASTIAECIKRLSNEESLSEMFL

SEQ ID NO: 131876 - protein, 75 aa, Unknown
  Bacterial polypetide isolated from the Sargasso Sea
MKTKLVHSSITKFADGEIYIEINENIRGNSIFLIQSSSTPANDNLMELLLCVDALKRSSAKNITAVIPYFGYARQ

SEQ ID NO: 131877 - protein, 267 aa, Unknown
  Bacterial polypetide isolated from the Sargasso Sea
NVRGTDVFIIQPTNSPAENIMELVLIIDAAVRASARNVTAVVPYFGYGRQDRKDRPRVPVSSKVMVDLFTTTGAARIITMDLHSTQIQGFATIPFDHIYSRLVLLDAIKSLNLDSDNSVVLSPDVGSARISQSYAKKLGMHFALIDKRRYAPNKAEVMHLIGDLDKKDVLIIDDMIDTAGTTVNAAEAAIKNGARSVTAVATHALLSGNACEKIENSVINKLIVTDTVDIPDKKKIAKIEVVTVANVFAEAIERVYKGKSVSELFEF

SEQ ID NO: 131878 - protein, 187 aa, Unknown
  Bacterial polypetide isolated from the Sargasso Sea
RFTPSGQIQGFFDIPVDNLFATPIFARHIKRKIKTKNMICVAPDVGGTARARALGKMLNVGLAIVDKRRPAPGKSVVMNIIGNVKGKTCIIVDDIIDSGGTIVNAAKILKQRGARDVHVYVSHGVLSGDAVEKIRKSQIKNLVITDTIDNSQKVKKAKNIEILTISNLVGEAIKRISNSTSVSDLFN

SEQ ID NO: 131879 - protein, 79 aa, Unknown
  Bacterial polypetide isolated from the Sargasso Sea
CNSSKSLAEKISKHIDVPLADASVRPFNDREIFVEINENIRGEDVFIIQSTSHPANDHLMELLITIDAARRGSAKRITG

SEQ ID NO: 131880 - protein, 112 aa, Unknown
  Bacterial polypetide isolated from the Sargasso Sea
MQRNKLKIFSGRSNPRLAESIAKSLDRHLGEISIRTFSDGEIWVKYEENIRGCDVFIIQSTNGPSENIMELALLVDAAVRASADTVTVVIPYFGYGRQDRKDQPRVPISSRV

SEQ ID NO: 131881 - protein, 137 aa, Unknown
  Bacterial polypetide isolated from the Sargasso Sea
MARRVKILSCSSSRVLAEKIAKSFGQPLAKCELQQFSDGEFQVSVNETVRGCDVFIVQSTIPPANNLMELLLMIDAVKRASARRIIAVVPYFGWARQDRKDQPRVAIGAKLVANLLETAGIDRVMTMDLHADQIQGF

SEQ ID NO: 131882 - protein, 142 aa, Unknown
  Bacterial polypetide isolated from the Sargasso Sea
GGVARTRALATRLKADLAIIDKRRPAPGKSEVMNIIGDVKNKTCIIVDDIIDSGGTIINAVDALKKKGAKEVYVFITHAVLSGEAAKKIKNSKVKRLIITDSIDNSDKIKNNNKIEVLSISSLMSEAIKRIANSNSVSDLFN

SEQ ID NO: 131883 - protein, 146 aa, Unknown
  Bacterial polypetide isolated from the Sargasso Sea
MPGRFGEIKVFSGTSHQQLSLDVCTNLGIELSKAEVFKFENDNTFVRIMNNIREQDVFIIQPTDKPANDNIMELLLCLDAAKRASAGRLTAVIPYFGYGRTDKKDQPRVPISARLIADIITTAGADRILTIDLHAPQIQGFFNIPV

SEQ ID NO: 131884 - protein, 165 aa, Unknown
  Bacterial polypetide isolated from the Sargasso Sea
MGKYVKKIFAGSSNPRLATKIAEECGVSLGKVSIKRFSDGEIWVKFEENLRGNDVYLIQSTNAPADNIVELALLIDAAKRASAQRINVIIPYFGYSRQDRKDEPRVPISAKVMMDIFIKAGANRVVTMDLHSTQIQGFSSKPVDNIYGSLVLMPELEKHFKDLSS

SEQ ID NO: 131885 - protein, 242 aa, Unknown
  Bacterial polypetide isolated from the Sargasso Sea
MVDAAVRASADTVTVLIPYFGYGRQDRKDQPRVPISSRVMIDILTAMGANRIITLDLHSTQIQGFAKIPFDNLYSRSVLFEAIQDEKFSTDATAVLAPDVGSVKMSQGYAKNLGMHFALIDKRRFAPNQAEVNHLIGDLKGMDVLIIDDMIDTAGTTVNAAEAAMDEGARSVTVVATHGVLSGSAIERLNKSTIKKIIVTDTIAIPKEKQINKMKIVTVANIFGQAVNRVHNGESVSALFEF

SEQ ID NO: 131886 - protein, 96 aa, Unknown
  Bacterial polypetide isolated from the Sargasso Sea
MNADNLKIFSGRSSKRLAAKIANNLNVSLGDISIKTFSDGELWVKYEENIRGSDVFIIQSTNGPSENIIELALMIDAAVRASADTVTVIMPYFGYG

SEQ ID NO: 131887 - protein, 118 aa, Unknown
  Bacterial polypetide isolated from the Sargasso Sea
MTGFSGRVVGFTSVVPNPEVASIQLTRDLQEHAERFAGGGQAVTFAGMEGYINARICVDALRRASAAGMVDARGVLAAMNTMGSVDLGGFTANFSASPSAASDRVDIVVRSRSGHLLK

SEQ ID NO: 131888 - protein, 176 aa, Unknown
  Bacterial polypetide isolated from the Sargasso Sea
MIFQLITFFATPIFARHVKKNIKGKNLICVSPDVGGVERTKALARKLDIGIAIIDKRRPAPGKSQVMNVIGNVNNKTCIIVDDIIDSGGTIVNAAQALINRGAKEVHVYITHGVLSGEAVEKIRKSKIKKLVITDTIDNLDKIKKAKNIEVLSICNLLGEAIKRISNSTSVSDLFK

SEQ ID NO: 131889 - protein, 224 aa, Unknown
  Bacterial polypetide isolated from the Sargasso Sea
YFGYGRQDRKDQPRVPISSRVIVDILTVMGTDRIITLDLHSTQIQGFAKIPFDNLYSRSVILNAIHDEGFNPNSSVVLAPDIGSAKMSQGYAKNLGMHFALIDKRRFAPNQVEINHLIGDLKNMDVLIIDDMIDTAGTLVNAANAALEKGAKSVTAIATHGVLSDPAIDRIKKSDINKIIITDTISIAKHKLIDKLKIMSVSGIFGQAIDRVHNGESVSALFEY

SEQ ID NO: 131890 - protein, 72 aa, Unknown
  Bacterial polypetide isolated from the Sargasso Sea
SVYAYITHGVLSYPAIERIQRSPIDKMIITDSIIARDDVKKCKKIIQLSIAHLIGEAIGRITDNRSVSSLFA

SEQ ID NO: 131891 - protein, 258 aa, Unknown
  Bacterial polypetide isolated from the Sargasso Sea
DINKTIMEQLVLVDALKRASAKRITAVLPFYPYSRQDKKALPREPITARLVADMYIAAGVDRLVSIDLHTQQIQGFVDQPFDHLTAMPLFVEYFKEKFDGPISVISPDAGGVGRATTFAKHLEAYVGFVHKKRDPKIHNEVKSFTVIGEVEDRHVIILDDIIDTGGTIAAASRIIKEKGVKSVNVVATHGIFSDGSVEQLKDAPIDRIIVTDTLTQNGNSKEIGKVEVLSVSTIIANALTSIFTDDSVSALFMGENVL

SEQ ID NO: 131892 - protein, 35 aa, Unknown
  Bacterial polypetide isolated from the Sargasso Sea
MKQIGKVKQLTLSEMLAETIRRISNEESISAMFEY

SEQ ID NO: 131893 - protein, 92 aa, Unknown
  Bacterial polypetide isolated from the Sargasso Sea
RGHDTFIIQSTCFPADKHLMELMLLADALKRSSASKITAVVPYYGYARQDRRVRSSRVPISAKVVSDMFSSVGINRVLTLDLHSETIQGFFE

SEQ ID NO: 131894 - protein, 185 aa, Unknown
  Bacterial polypetide isolated from the Sargasso Sea
MHAGQIQGFFDIPVDNLFSTPIFARHVKKNIKSKNIVCIAPDVGGTERARALGKILNVGLAIVDKRRPKPGQSQVMNVIGEVKDKTCVIVDDIIDSGGTIVNAAKALKDRGAKEVYVYITHGVLTGEAVKKIKNSVIKKLVITDTIDNKDKTKSAKNIEVLSISALMGEAIKRISNSTSVSDLFK

SEQ ID NO: 131895 - protein, 213 aa, Unknown
  Bacterial polypetide isolated from the Sargasso Sea
VVPRTSISAKLVSNLITKAGADRVVTVDLHAGQIQGFFDIPVDNLFSTPIFARHVKKNIKSKNIVCVAPDVGGTERARALGKILNIGLAIVDKRRPKPGQSQVMNVIGEVKDKTCVIVDDIIDSGGTIVNAAKALKDRGAKEVYVYITHGVLTGEAVKKIKNSVIKKLVITDTIDNKNKTKSAKNIEVLSISALMGEAIKRISNSTSVSDLFK

SEQ ID NO: 131896 - protein, 240 aa, Unknown
  Bacterial polypetide isolated from the Sargasso Sea
SIRVILPIFPYQRQDRKDYIRAPISSKMVASFLETQGVDRVITFDLHAGQIQGFFDKTRLDNIYTEPYFIHYIKNEILTQVKADDLIIVSPDEGGVKTATRIADKLGCGAAILYKERLQAGVVNKMILMGNVQGKVCFIMDDIIDTAGTACKAAQVLHENGADQIYMGACHGILSDPATTRIYNSPFKKVIVSNTVEIANRFTENFSQLDKIEVIDVSKICAAAIERSLVGQSLSELMVL

SEQ ID NO: 131897 - protein, 76 aa, Unknown
  Bacterial polypetide isolated from the Sargasso Sea
MKVLAGTSNLKLCRQIARQLKLKLVNSHIKRFADGEVYIEINENIRGNSIFVVQSTSNPANDNLMELLICIDALRR

SEQ ID NO: 131898 - protein, 66 aa, Unknown
  Bacterial polypetide isolated from the Sargasso Sea
THPVLSGPAIERISNSEIDELVVTNSIPLTKDGQKCSKIRVISIASLISECIKRLSNEESLSAVFL

SEQ ID NO: 131899 - protein, 284 aa, Unknown
  Bacterial polypetide isolated from the Sargasso Sea
MNEQLKIFSGRSNIKLSKEIASYLGKDLGELTIKTFSDGELWLQFEENIRGCDVFIIQPTNSPSENIMELILIIDAAVRASAKTVTAVIPYFGYGRQDRKDNPRVPISSRVMVDLFTATGADRIITMDLHSTQIQGFATIPFDHLYSRMVLLDAIKSLDLNKESSVVLSPDVGSARMSQSYAKKLGMHFALIDKRRYAPNKAEVMHLIGDLNNKDVLIIDDMIDTAGTTVNAANAAMENGANSVTAVATHAILSGPAIDRIQDSKISKLIVTDTVAIPESKKLE

SEQ ID NO: 131900 - protein, 90 aa, Unknown
  Bacterial polypetide isolated from the Sargasso Sea
MKLLSGTSNKPLSKDIAKFLKSKLVNSSIRNFSDGEIYVELNENIRGNSIFIIQSISSPANDNLMELLLCIDALKRSSAKNITAVIPYFG

SEQ ID NO: 131901 - protein, 139 aa, Unknown
  Bacterial polypetide isolated from the Sargasso Sea
QRTRGLATRIKADLAIIDKRRPKPGQSQVMNIIGNVKGKTCIIVDDIIDSGGTIVNAVGALKKAGAIDVYVFITHAVLSGEAVSKIKKSKIKKLIITDTIDNSKKIKNNNKIEVLSISPLMAEAIKRISNSNSVSDLFN

SEQ ID NO: 131902 - protein, 166 aa, Unknown
  Bacterial polypetide isolated from the Sargasso Sea
TPIFARYIKKNIKSKNIICVSPDAGGIERTRGLAKKINADLAIIDKRRPQAGKSQVMNIIGDVKNKDCVIVDDIIDSGGTIVNAADALIKKGAISVSVFVTHAVLSGDAINKIKRSKIKKLVITDSIDNSNRVKNISKIQVLTIAPLMAEAIKRISNSTSVSDLFN

SEQ ID NO: 131903 - protein, 165 aa, Unknown
  Bacterial polypetide isolated from the Sargasso Sea
MKVFSGTAHQTLSEEIANYLGIGLGKATIKRFADGEIYVQIKESIRGSDVFLVQPTCPPTNDSLMELLVMIDACRRASCRSITAVIPYFGYARADRRTAGRESIAAKLVANLITEAGATRCVLMDIHSLQTIGYYDIPVDHIYGESVILDYLTSKDFAHDEIVIV

SEQ ID NO: 131904 - protein, 148 aa, Unknown
  Bacterial polypetide isolated from the Sargasso Sea
MPGRFGEIKVFSGTSHQQLSLDVCTNLGIELSKAEVFKFENDNTFVRIMNNIREQDVFIIQPTDKPANDNIMELLLSLDAAKRASAGRLTAVIPYFGYGRTDKKDQPRVPISARLIADIITTAGADRILTIDLHAPQIQGFFNIPVDE

SEQ ID NO: 131905 - protein, 225 aa, Unknown
  Bacterial polypetide isolated from the Sargasso Sea
MADFKELRVLSGTSHIKLTDSICEYLGISNGRLNIHKFANDNTFVQIEENIRERDVFIVQPFSNPVNDKIMETLIMIDAAKRASAGRITTVIPYFAYGRTDKKDQPRVPITARLIADLISTAGADRVLTIDLHAGQIQGFFNIPVDELTAIPILTRYIKEKNIPNLVVVAVDMGATKRARNVAAGLGVPLAIMEKRRTGNNDTTEALNIIGEVEKKSALTVDDEL

SEQ ID NO: 131906 - protein, 205 aa, Unknown
  Bacterial polypetide isolated from the Sargasso Sea
AKVVSNLITKAGANRIVTVDLHAGQIQGFFDMPVDNLFTTPLFARYIKKNIKSKNLTCVSPDAGGIERTRGLAKKINADLAIIDKRRPQAGKSQVMNVIGEIKNKNCIIVDDIIDSGGTIVNAVEALIKKGAKDVHVFVTHAVLSGDAVNKIKKSKIKKLIITDTIDNSRRIKNVSKIEVLSIAPLMAEAIKRISNSTSVSDLFN

SEQ ID NO: 131907 - protein, 157 aa, Unknown
  Bacterial polypetide isolated from the Sargasso Sea
KNIKSKNFICVSPDAGGIERTRGLAKKINADLAIIDKRRPQAGKSQVMNIIGQVKDKDCIIVDDIIDSGGTIVNAADALIKKGAKDVYVFVTHAVLSGEAINKIKKSKIKKLVITDSIDNSKRIKNINKIQVLSIAPLMAEAIKRISNSTSVSDLFN

SEQ ID NO: 131908 - protein, 179 aa, Unknown
  Bacterial polypetide isolated from the Sargasso Sea
MTEAKIFSCSQSHDLAFNIAKDFGAKLGKIKFSNFSDGEFQPSFEESVRGSRVFIIGSTNPNSDHLMEMLLMLDAAKRSSARHVTAVLPYFGWARQDRKDKPRVPIGAKLVAKLLEAAGATRIITMDLHADQIQGFFEKPVDHLYASTIFVPHIKNLRLKNLTIASPDMGGSKRAYAYS

SEQ ID NO: 131909 - protein, 134 aa, Unknown
  Bacterial polypetide isolated from the Sargasso Sea
LATRIKADLAIIDKRRPAPGKSEVMNIIGNVKDKTCIIVDDIIDSGGTIVNAVDALKKNGANEVYVFITHAVLSGDAVKKIKNSKIKKLVITDTINNAKKIKNNNKIEVLSIASLMSEAIKRIANSNSVSDLFN

SEQ ID NO: 131910 - protein, 67 aa, Unknown
  Bacterial polypetide isolated from the Sargasso Sea
MKIIACNSSKSLAEKISKHIDVPLADASVRTFNDREIFVEINENIRGEDVFIIQSTSHPANDHLMEL

SEQ ID NO: 131911 - protein, 142 aa, Unknown
  Bacterial polypetide isolated from the Sargasso Sea
MKNKLKIFSGRSNPELALKIAKSAKCELGKISIKTFSDGELWVKYEENIRGHDVFLIQSTNGPAENILEIALMADAAVRASAERVSVIIPYFGYARQDRKDQPRVPISSRVMIDIITSMGADRIVTMDLHSTQIQGFAKIPF

SEQ ID NO: 131912 - protein, 102 aa, Unknown
  Bacterial polypetide isolated from the Sargasso Sea
MGKYVKKIFAGSSNPRLAAKIADECGVSLGDVTIKRFSDGEIWVKFEENLRGNDVYLIQSTNAPADNIVELALLIDAAKRASAQRINVIIPYFGYSRQDRKD

SEQ ID NO: 131913 - protein, 112 aa, Unknown
  Bacterial polypetide isolated from the Sargasso Sea
EVMNIIGDVKGQTCILVDDIIDSGGTIVNAAKALKSRGAKDVYVYITHGVLSGDAIKKIKSSTIKNLVITDTIDNVHKTKNVKNIEVLPVSGLMGEAIKRISNSTSVSDLFK

SEQ ID NO: 131914 - protein, 177 aa, Unknown
  Bacterial polypetide isolated from the Sargasso Sea
AKIPFDNLYSRSIIFQAIKNENLDPKNSVVLAPDIGSVKMSQGYAKNLGMHFALIDKRRFAPNKTEINHLIGELKGMDVLIIDDMIDTAGTLVNASESAFEQGAKSVTAIATHGVLSEPAIVRLDKSRIKKIIVTDTIVLNNEKLIDKLEVVSVSSIFGQAVGRVHNGESVSALFEF

SEQ ID NO: 131915 - protein, 166 aa, Unknown
  Bacterial polypetide isolated from the Sargasso Sea
TPIFARHVKRNIKGGNLICVSPDVGGVERSRALARKLDIGIAIIDKRRPAPGKSQVMNVIGNVKNKTCIIIDDIIDSGGTIVNAAQALINRGAKEVHVYITHGVLSGEAVEKIKKSKIKKLVITDTIDNSDKVKKAKNIEVLSIANLLGEAIKRISNSTSVSDLFK

SEQ ID NO: 131916 - protein, 165 aa, Unknown
  Bacterial polypetide isolated from the Sargasso Sea
PIIDDVKERFNGNKDLVVASPDVGGVVRARAFAKRLEAGLAIADKRREKAGESEVMNIIGDVKDKTCILLDDIADSAGTLCNAAEALSKNGAKEIYSYIVHGVLSGDALKKIENSSIKELVLTDTIEPSKEVKSTKNIRHISIAPLMGDAIKRINTDTSVSALFD

SEQ ID NO: 131917 - protein, 152 aa, Unknown
  Bacterial polypetide isolated from the Sargasso Sea
KNLICVSPDVGGVERSRALARKLDIGIAIIDKRRPAPGKSQVMNVIGNVNNKTCIIIDDIIDSGGTIVNAAQALINRGAKEVHVYITHGVLSGEAVEKIKKSKIKNLVITDTIDNSDKIKKAKNIEVLSICNLLGEAIKRISNSTSVSDLFK

SEQ ID NO: 131918 - protein, 218 aa, Unknown
  Bacterial polypetide isolated from the Sargasso Sea
ILESLKVDRIITFDLHAGQIQGFFSCHTPFDNLYVEKYFIDHIKTNIINGSPDDVIIVSPDEGGAKRAIRIANKLGLCSTIIYKERNKDNSINRMCIMGHIKQKIAILVDDMIDTAGTACKAAEILKENGVEAIYMYACHGLFSGPAIERIENSSFNRVIVTNTIEQKKNMENLKKYNCNKIEVMDVSKMCAEAIRRSLYGESLKELYDTPFDDNLYR

SEQ ID NO: 131919 - protein, 84 aa, Unknown
  Bacterial polypetide isolated from the Sargasso Sea
MVVSPDVGGVARARELAKRINAPLSIVDKRRERAGEVAEMTIIGDVTGKKCIIVDDICDTAGTLCKAAEVLIENGAAEVHSYIT

SEQ ID NO: 131920 - protein, 154 aa, Unknown
  Bacterial polypetide isolated from the Sargasso Sea
KSKKIVCVAPDVGGTERARALGKLLNVGLAIVDKRRPKPGQSQVMNVIGDVKGQTCIIVDDIIDSGGTIVNAAKALKAKGAKEVFVYITHGVLSGDAVKKIKNSVIKNLVITDTIDNSEKIRNVKNIEVLPISGLIGEAIKRISNSTSVSDLFK

SEQ ID NO: 131921 - protein, 162 aa, Unknown
  Bacterial polypetide isolated from the Sargasso Sea
MNETLKIFSGRSNPILAKGIVDHLGLKLGDVTIRTFSDGELWVKFEENIRGADVFIIQSTSGPAENLIELFLLLDAAVRASAKRVTAVIPYFGYGRQDRKDQPRVPISSRVMVDIITATGADRIISMDLHSTQIQGFASIPFDHIYSRMVLLDTLKSLNLNS

SEQ ID NO: 131922 - protein, 176 aa, Unknown
  Bacterial polypetide isolated from the Sargasso Sea
FDIPVDNLFATPIFARHVKKKIKSKNMICVAPDVGGTERARSLGKLLNVGLAIVDKRRPKPGQSQVMNVIGDVKGKTCIIVDDIIDSGGTIVNAAKALKDRGAKEVYVYITHGVLSGEAVKKIKKSVIKNLVITDTIDNSDKIKGAKNIEVLSISGLMGEAIKRISNSTSVSDLFA

SEQ ID NO: 131923 - protein, 266 aa, Unknown
  Bacterial polypetide isolated from the Sargasso Sea
AIYKTEKKVFPDGESKITINQIPKKSIVVVVQSTYPPVDSNLLELLSIVSKVQKFSSKVYAVIPYMGYARQDREFLGGEIITIGVVGKLLKAAGVKKVLTVDIHSKLALKELKISSENVSAMEVLVKHFKKMKMKNPVVVSPDLGGKDRAVKFSELLKTDFIALKKQRDRKTGKVKILSGKVDVKDRDLILVDDMISTGGSIIKATQFLKKQKCRRVFVACTHALLVNDAAKKIKNAGVSQIISTNTIPGESAKVDVSKVISDALK

SEQ ID NO: 131924 - protein, 82 aa, Unknown
  Bacterial polypetide isolated from the Sargasso Sea
MKIIACNSNKILAEAICSYIGVSLANSSLRRFADREIFVEINENIRGEDVFIIQSTSHPANDHLMELLISIDAAKRGSAKRI

SEQ ID NO: 131925 - protein, 174 aa, Unknown
  Bacterial polypetide isolated from the Sargasso Sea
IPVDNLFATPIFARHIKKKIKSKNIICIAPDVGGTERARALGKLLNVGLAIVDKRRPKPGQSQVMNIIGNVKDKTCIIVDDIIDSGGTIINSAKALKEKGAKEVYVYITHGVLSGDAVKKIKNSVIKNLVITDTIDNGEKVKTVKNIEILPISGLMGEAIKRISNSTSVSDLFK

SEQ ID NO: 131926 - protein, 194 aa, Unknown
  Bacterial polypetide isolated from the Sargasso Sea
GAIELLLSICMLGQIQGFFDMPVDNLFTTPLFARYIKKNIKNKNLICVSPDAGGIERTRGLAKKINADLAIIDKRRPQAGKSQVMNIIGNVKNKSCVIVDDIIDSGGTIVNAAEALRKNGAKDVFVFVTHAVLSGEAIKKIQNSKIKKLVITDSIDNSKRVKNINKIQVLSIASLMAEAIKRISNSTSVSDLFN

SEQ ID NO: 131927 - protein, 199 aa, Unknown
  Bacterial polypetide isolated from the Sargasso Sea
ADRVVTMDLHSTQIQGFSSKPVDNIYGSLVLMPELEKHFKGLSSDDNFTVLIPDMGSSKLGQSYAKRLGMSFALIDKRRNAHNQSEVVSVVGELKNQHVLIIDDMIDTAGTISNAAKVAKEKGAISVTVAATHGILSSNAIEKLSDDIVDFIFITDTIDMSHIDNCEKLKTISSAKIFAETINRIHSGESVSQLFRKVT

SEQ ID NO: 131928 - protein, 174 aa, Unknown
  Bacterial polypetide isolated from the Sargasso Sea
MGKYVKKIFAGSSNPQLAMQIANECGTSLGDLSVKRFSDGEIWVKFEENLRGNDIYLVQSTNPPADNIVELALMIDAAKRASAKRINVIMPYFGYSRQDRKDEPRVPISAKVMMDIFIKAGANRVVTMDLHSTQIQGFSSKPVDNIYGSLVLMPELEKHFHSLSDKNNCTVLIP

SEQ ID NO: 131929 - protein, 270 aa, Unknown
  Bacterial polypetide isolated from the Sargasso Sea
MNDQLKIFSGRSNPALSKDIANYLGKDLGKLTIKTFSDGELWLQFEENIRGCDVFIIQPTNSPAENIMELILIIDAAVRASAKTVTAVIPYFGYGRQDRKDNPRVPISSRVMVDLITATGADRIITMDLHSTQIQGFATIPFDHLYSRMVLLDAIKSLNFDQENSAVLSPDVGSARMSQSYAKKLGMHFALIDKRRYAPNKAQVMHLIGDLKNKDVLIIDDMIDTAGTTVNAANSAIENGAKSVTAVATHAILSGPAIDRIKDSAISKLI

SEQ ID NO: 131930 - protein, 152 aa, Unknown
  Bacterial polypetide isolated from the Sargasso Sea
MPIVVALDVGGVVRARAIAKQIGDLDLAIIDKRRPRANETEVMTVIGDVAGKTCIIVDDIVDTAGTLCTAAAALKKEGAEKVVAYITHAVFSGSAIDRISNSELDEIVVTDTIPLHAKAQECSKIEQLSLANLLAESIRRVSNEESISAMFR

SEQ ID NO: 131931 - protein, 157 aa, Unknown
  Bacterial polypetide isolated from the Sargasso Sea
RNIKSKNLICVSPDVGGVERSRALARKLDIGIAIIDKRRPAPGKSQVMNVIGNVKNKTCIIIDDIIDSGGTIVNAAQALINRGAKEVHVYITHGVLSGEAVEKIKKSKIKKLVITDTIDNSDKVKKAKNIEVLSIANLLGEAIKRISNSTSVSDLFK

SEQ ID NO: 131932 - protein, 291 aa, Unknown
  Bacterial polypetide isolated from the Sargasso Sea
MAKFTVVGGDASSDLAKRIARKIKSPYIKTEKKVFPDGESKITINQIPKKSIVVVVQSTYPPVDSNLLELLSIVSKVQKFSSKVYAVIPYMGYARQDREFLGGEIITIGVVGKLLKAAGVKKVLTVDIHSKLALKELKISSENVSAMEVLVKHFKKMKMKNPVVVSPDMGGKERAEKFSKLLKTDFIALKKQRNRKTGKVKILSEKVEVKDRDLILVDDMISTGGSIIKATQFLKKQKCRRVFVACTHALLVNDAAKKIKNAGVSQIISTNTIPGESAKVDVSKVISDALK

SEQ ID NO: 131933 - protein, 325 aa, Unknown
  Bacterial polypetide isolated from the Sargasso Sea
MIEQSTKKRMLIYSGSSNSELAKKVANELGTELAEVEKEQFASGEIYIRLADSARGADCFVLQSHSGGINFTIMEQLLIVDALKRASAKRITAVLPFYPYSRQDKKALPREPISARLIGDLFIAAGANRLVSIDLHTQQIQGFIHAPFDHLTAMPLFVDYFKNKYEESVSVISPDAGGVKRATTFAKHLEAYVGFVHKKRDPSKHNEVKAFTVIGEVEDRHAILIDDIIDTGGTIAAASRILKERGAKTVSVVATHGIFSDGSVETLKDAPIDEIVVTDTLAQNGNSEALGNVEVLSVSGIIANALTSIFADDSVSALFMGENVL

SEQ ID NO: 131934 - protein, 214 aa, Unknown
  Bacterial polypetide isolated from the Sargasso Sea
QKFSSKVYAVIPYMGYARQDREFLGGEIITIGVVGKLLKAAGVKKVLTVDIHSKLALKELKISSENVSAMEVLVKHFKKMKMKNPVVVSPDLGGKDRAVKFSELLKTDFIALKKQRDRKTGKVKILSGKVDVKDRDLILVDDMISTGGSIIKATQFLKKQKCRRVFVACTHALLVNDAAKKIKNAGVSQIISTNTIPGESAKVDVSKVISDALK

SEQ ID NO: 131935 - protein, 73 aa, Unknown
  Bacterial polypetide isolated from the Sargasso Sea
MKILSGTSNIKLSRNIAKNLKLKLINTNIKRFADGEIYIEINENIRGNSVFVIQSTSNPANDNLMELLLVIDA

SEQ ID NO: 131936 - protein, 265 aa, Unknown
  Bacterial polypetide isolated from the Sargasso Sea
MAKFTVVGGDASSDLAKRIARKIKSPYIKTEKKVFPDGESKITINQIPKKSIVVVVQSTYPPVDSNLLELLSIVSKVQKFSSKVYAVIPYMGYARQDREFLGGEIITIGVVGKLLKAAGVKKVLTVDIHSKLALKELKISSENVSAVEVLVKHFKKMKMKNPVVVSPDMGGKERAEKFSKLLKTDFIALKKQRDRKTGKVKILSEKVDVKDRDLILVDDMISTGGSIIKATQFLKKQKCRRVFVACTHALLVNDAAKKIKNAGVS

SEQ ID NO: 131937 - protein, 295 aa, Unknown
  Bacterial polypetide isolated from the Sargasso Sea
IASSLGKDLGALSIKTFSDGELWLQFEENVRGTDVFIIQPTNSPAENIMELVLIIDAAVRASARNVTAVVPYFGYGRQDRKDRPRVPVSSKVMVDLFTTTGAARIITMDLHSTQIQGFATIPFDHIYSRLVLLDAIKSLNLDPDNSVVLSPDVGSARISQSYAKKLGMHFALIDKRRYAPNKAEVMHLIGDLDNKDVLIIDDMIDTAGTTVNAAEAAIKNGARSVTAVATHALLSGNACEKVENSVINKLIVTDTVDIPDKKKIAKIEVVTVANVFAEAIERVYKGKSVSELFEF

SEQ ID NO: 131938 - protein, 287 aa, Unknown
  Bacterial polypetide isolated from the Sargasso Sea
MSGRFGEIKVFSGTSHPQLTQDICTNLGIEPSKAEIFKFENDNTFVRILNNVREQDVFIVQPTDKPSNDNIMELLICMDAARRASAGRVTAVIPYFGYGRTDKKDQPRVPISARLIADLITTSGADRILTMDLHAPQIQGFFNIPVDELTATPILIEHFKKMKKEFVVVATDVGISKKARDFAARLSSPLAIIEKRRSDNKGNVELLNVIGDVDGKTALTFDDEIDTGGSLAQAIAALSMAGVNEVYSCATHGIFSGNAIEKLSSIKILKQVVVTDSVSKKSGNGKI

SEQ ID NO: 131939 - protein, 316 aa, Unknown
  Bacterial polypetide isolated from the Sargasso Sea
MLIYSGSSNTELAKKVAKDLGTEIAEVEKEQFASGEIYIRLADSARGADCFVLQSHSGGINFTIMEQLLIVDALKRASAKRITAVLPFYPYSRQDKKALPREPISARLIGDLFIAAGANRLVSIDLHTQQIQGFIHAPFDHLTAMPLFVDYFKNKYDESVSVISPDAGGVKRATTFAKHLEAYVGFVHKKRDPSKHNEVKAFTVIGEVEDRHAILIDDIIDTGGTIAAASRILKERGAKTVSVVATHGIFSDGSVETLKDAPIDEIVVTDTLKQNGNSESLGNVQVLSVSEIIANALTSIFADDSVSALFMGENVL

SEQ ID NO: 131940 - protein, 212 aa, Unknown
  Bacterial polypetide isolated from the Sargasso Sea
VPRTSISAKLVSNLITNAGADRVVTVDLHAGQIQGFFDIPVDNLFATPIFAKHIKRKIKSNNIICVAPDVGGVERARALGKKLDVGLAIVDKRRPSPGKSQVMNVIGNVKNKICILTDDIIDSGGTIVNAADALLKRGAKEVHVYATHGVFSGDAVKKIKNSKIKNLVITDSIDSSDKFKKVRNIEVLSISILLAEAIKRISNSTSVSDLFK

SEQ ID NO: 131941 - protein, 117 aa, Unknown
  Bacterial polypetide isolated from the Sargasso Sea
MNNKLKIFSGRSNPALALGIAKSLDQDLGSISIRTFSDGELWVKYEENVRGCDVFIIQSTNGPSENIIELALMVDAAVRASADTVTVLIPYFGYGRQDRKDQPRVPISSRVMIDIFT

SEQ ID NO: 131942 - protein, 289 aa, Unknown
  Bacterial polypetide isolated from the Sargasso Sea
PSIWSSLGNVEFQRYSDGEFQPSFEESVRGSRVFLIGSTNPSSDNLMEMLLMLDAAKRASARHITAVIPYFGWARQDRKDKPRVPIGAKLIAKLIESAGATRIITMDLHADQIQGFFEKPVDHLYASAIFVPYIQSLKIDNLTIASPDMGGSKRAYAYSKFLDSDVVICYKQRSKGNIITHMELIGDVNGKNVILIDDMVDTAGTLTTAADLMIERGAESVIAICTHALLSGDAYEKIENSKLKNLIITDSIDSIKKTNKIEVLSCSKIFGEAMYNVHHNKSIDELFIT

SEQ ID NO: 131943 - protein, 314 aa, Unknown
  Bacterial polypetide isolated from the Sargasso Sea
MNDKLKIFSGRSNVPLSNDIANHLGKELGQLSIKTFSDGELWLQFEENIRGCDVFIIQPTNSPSENIMELILIIDAAVRASAKTVTAVVPYFGYGRQDRKDNPRVPISSRVMVDLITATGADRIITMDLHSTQIQGFATIPFDHLYSRMVLLDAIKSIGLEEKNSVVLSPDVGSARMSQSYAKKLGMHFALIDKRRYAPNKAEVMHLIGDLNKKDVLIIDDMIDTAGTTVNAASAAIENGANSVTAIATHAILSGPAIDRIKESKISKLIVTDTISIPDNKKLDNMQIVTVAEVFAEAIKRVYEGKSVSALFEF

SEQ ID NO: 131944 - protein, 190 aa, Unknown
  Bacterial polypetide isolated from the Sargasso Sea
LLFDLHSTQIQGFAKIPFDNLYSRSVLFEAIKDEKFSSDTTAVLAPDVGSVKMSQGYAKNLGMHFALIDKRRFAPNQAEVNHLIGDLEGMDVLIIDDMIDTAGTTVNAAQAAMDEGARSVTVVATHGVLSGPAIERLNESTIKKIIVTDTISIPKEKQIDKMKIVTVASIFGEAINRVHNGESVSALFEF

SEQ ID NO: 131945 - protein, 318 aa, Unknown
  Bacterial polypetide isolated from the Sargasso Sea
MNGFNGKPVIFSGNSHGVLVQDICKYLDQDVGKIEVFKFANDNTFVKILENVRQKDVFILQSTVEPVNDNIMELLIMIDAAKRASAGRITAVVPFYSYARTDKKDQPRVPITGRLVADLLETAGADRVVMVDLHAGQVQGFFKVPVDELTAMPRLVEYFQDKSVEDCVVVATDIGISKKARDFANWINVPLAIVEKRRMGNNDKVQSLNVIGDVSSKNIILFDDEISSGETMIAAAEAIHKAGAKDIYAVATHGVLPGDSANKLVKNSYIKEFVVTDTVPINAKKQHEKIKVISIAPLLGEAIRRIHEGKSVGQLFTH

SEQ ID NO: 131946 - protein, 70 aa, Unknown
  Bacterial polypetide isolated from the Sargasso Sea
MKIIACNSSKSLAEKISKHIDVPLADASVRTFNDREIFVEINENIRGEDVFIIQSTSHPANDHLMELFIT

SEQ ID NO: 131947 - protein, 206 aa, Unknown
  Bacterial polypetide isolated from the Sargasso Sea
AKVIADMLSEVGISRIITLDIHSEQIQGFFSFPVDNIYTANIMVKGLLEKYDVEDLQVVSPDTGGVIRARSVAKTLGVQDLAIIDKRREKANESEVINLIGDVEGKVCIVPDDLIDTAGTLSNASHALKDKGAKEIIAYITHPVLSGDAIKNLNNSAIDKLVVSNSIDIGDKSKKCPKIDVFDISPILSEAITRIATGDSISELFK

SEQ ID NO: 131948 - protein, 155 aa, Unknown
  Bacterial polypetide isolated from the Sargasso Sea
KYDKPIVVSPDVGGVVRARALAKQLNCDLAIVDKRRQEANVSEVMQIIGDVDSKTCIIVDDIVDTAGTLCNAAAALKEKGAKSVFSYITHPIFSGKACQNIASSKLDGIIVTDTIPLNEKTAKANKIRQITVSEMLAETIRRIHNKESVSTLFMD

SEQ ID NO: 131949 - protein, 240 aa, Unknown
  Bacterial polypetide isolated from the Sargasso Sea
MKILSGTSNLKLSKDISKKLKLKLVNTNIRRFADGEIYIEINENIRGNSVFVIQSTSNPANDNLMELLLVVDALKRSSAKNVTAVIPYFGYARQDRKVAPRTSISAKVVANLITNAGASRVVTVDLHAGQIQGFFDMPVDNLFTTPLFAKYIKKKLNNKKLICVSPDVGGVQRTRGLATRIKADLAIIDKRRPAPGKSQVMNIIGDVKNKTCIIVDDIIDSGGTIVNAVDALKKSGANEV

SEQ ID NO: 131950 - protein, 187 aa, Unknown
  Bacterial polypetide isolated from the Sargasso Sea
MDLHAGQIQGFFDIPTDNLFAAPILLSDIENKIGSNDAMVVSPDVGGVVRARLIASRINSDLAIVDKRREKAGESEVMNIIGDVSDRSCFMIDDIVDSAGTLCNAAEALINSGAKEVFAHVTHGVLSGEAIKRVNDSALTKLVITDTINETDDIKNSNKIETVSVVHLLGEAIRRISEERSVSSLFD

SEQ ID NO: 131951 - protein, 159 aa, Unknown
  Bacterial polypetide isolated from the Sargasso Sea
MKILTGNSNKHLSQKISKFLKNRLVNSNIRKFADGEIYIEINENIRGNSIFLIQSVSSPANDNLMELLLSIDALKRSSAKNITAVIPYFGYARQDRKVVPRTSISAKLVSNLIAKAGADRVVTVDLHSGQIQGFFDIPVDNLFATPIFARHIKKKLKKI

SEQ ID NO: 131952 - protein, 276 aa, Unknown
  Bacterial polypetide isolated from the Sargasso Sea
MEKQLLFSGNSNKELAELVAKNLGKKLAPIKVSTFSDGEVNVEIDINVRGSDTFIIQSTDFPAEKNLMELVLIADALKRASANSITAVIPYFGYARQDRRVRSARVPISARVIAEVLTSVGISRVITLDIHSEQIQGFFSFPVDNIYTSNIMCKEIIGKYKVEDLQVVSPDTGGVIRARSVAKTLGVKDLAIIDKRREKANESEVINLIGGVKDKVCIVPDDLIDTAGTLSNASHALKAEGAREVIAYITHPVLSGNAIENLNKSAIDRLVVSNSM

SEQ ID NO: 131953 - protein, 259 aa, Unknown
  Bacterial polypetide isolated from the Sargasso Sea
FYSSVSSPANDNLMELLLSIDALKRSSAKNITAVIPYFGYARQDRKVVPRTSISAKLVSNLIAKAGADRVVTVDLHSGQIQGFFDIPVDNLFATPIFARHIKKKLKKNNIICVAPDVGGTARARALGKLLNVDLAIVDKRRPAPGKSEVMNVIGNVKNKTCILVDDIIDSGGTIVNAASELKKRGAKDVHVYVTHGVLSGNAVEKIKKSSIKNLVVTDTIDNSMKVKKARNIEVLTISNLVGEAIKRISNSTSVSDLFK

SEQ ID NO: 131954 - protein, 110 aa, Unknown
  Bacterial polypetide isolated from the Sargasso Sea
MKLLTGNSNKVLSKNIAKYLKTKLVNSSIRKFADGEIYIEINENIRGNSIFIVQSISSPANDNLMELLLCIDALKRSSAKNITAVIPYFGYARQDRKVVPRTSISAKLVS

SEQ ID NO: 131955 - protein, 274 aa, Unknown
  Bacterial polypetide isolated from the Sargasso Sea
VEVNENVRGKDTFIIQSTSNPAEKNLMELILMVDALKRASARSVTAVIPYFGYSRQDRRVRSARVPISAKVIADMLSEVGISRIITLDIHSEQIQGFFSFPVDNIYTANIMVKGLLEKYDVEDLQVVSPDTGGVIRARSVAKTLGVQDLAIIDKRREKANESEVINLIGDVEGKVCIVPDDLIDTAGTLSNASHALKDKGAKEIIAYITHPVLSGDAIKNLNNSAIDKLVVSNSIDIGDKSKKCPKIDIFDISPILSEAITRIATGDSISELFK

SEQ ID NO: 131956 - protein, 213 aa, Unknown
  Bacterial polypetide isolated from the Sargasso Sea
VVPRTSISAKLVSNLITKAGADRIVTVDLHAGQIQGFFDIPVDNLFATPIFSRHIKRKIKTKNLICVAPDVGGVERARALGRKLDIGLAIIDKRRPAPGKSQVMNVIGNVKGKTCIIVDDIIDSGGTIVNAADALLKRGAKEVHVYITHGVLSGEAVEKIKKSRIKNLVVTDTIDNSDKVKKSRNIEILSISNLLAEAMKRIANSTSVSDLFK

SEQ ID NO: 131957 - protein, 302 aa, Unknown
  Bacterial polypetide isolated from the Sargasso Sea
KVLAESISSYIGVPLANASIRKFADHEIFVEINENIRGEDVFIIQSTSHPANDHLMELLICIDAAKRGSAKRITAVIPYYGYARQDRKTGPRTPITAKLVANLITSSGADRVLTMDLHAGQIQGFFDIPLDNIFSAPPIIKDMKKKFKNNSNLVIASPDVGGVVRARAFAKRLNAGLAIADKRREKAGESDVMNIIGDVNNKTCILLDDIADSAGTLCNAAKALKNKGAKEIFSYIAHGVLSGKALERIQNSAIEELVLTDSIQASDLIKNIKNIRHISIAPLMGEAIKRISSDSSVSALFD

SEQ ID NO: 131958 - protein, 300 aa, Unknown
  Bacterial polypetide isolated from the Sargasso Sea
MNNKFDIFTGTANPELANDISKILGIEISKADVGYFSDGEIRVEIEDNVRGHDTFIIQSTCTPQNKNLMELMLLADALKRSSASKITAIIPYYAYARQDRRVRSARVPISAKVVANMFSSVGIDRVLTVDLHSETIQGFFDMPADNVYATKLMVEDIKSNNPKNNIVVVSPDVGGVVRSRALAKQLNDADLAIIDKRRAAANQSEVMNIIGDIKDKVCIVPDDIIDTAGTLCNAAKALKDQGALEVKAYITHPVLSGPAIERLNNSEIDELVVTNSIPLSQEGKKCSKIRVISLSATIAE

SEQ ID NO: 131959 - protein, 207 aa, Unknown
  Bacterial polypetide isolated from the Sargasso Sea
YLGKVVANLITNAGANRVLTVDLHAGQIQGFFDMPVDNLYTTPLFAKYIRKKLNNKKLICVSPDVGGVQRTRGLATRIKADLAIIDKRRPAPGKSQVMNIIGDVKNKTCIIVDDIIDSGGTIVNAVDALKKNGANEVFVFITHAVLSGDAVKKIKNSKIKKLIITDTIDNSQKIKNNNKIEVLSISSLMSEAIKRIANSNSVSDLFN

SEQ ID NO: 131960 - protein, 311 aa, Unknown
  Bacterial polypetide isolated from the Sargasso Sea
IMKLLTGNSNKNLSQKISKFLKTKLVHSSIKKFSDGEIYIEINENIRGNSIFLIQSVSSPANDNLMELLLCIDALKRSSAKNITAVIPYFGYARQDRKVAPRTSISAKLVSNLITKAGADRVVTVDLHAGQIQGFFDIPVDNLFATPIFARHIKKNVKRKNLICVAPDVGGVERTRALARKLDIGIAIIDKRRPAPGKSQVMNVIGNVNNKTCIIIDDIIDSGGTIVNAAQALINRGAKEVHVYITHGVLSGEAVEKIKKSRIKNLVVTDTIDNSNKLKKAKNIEVLSICNLLGEAIKRISNSTSVSDLFK

SEQ ID NO: 131961 - protein, 119 aa, Unknown
  Bacterial polypetide isolated from the Sargasso Sea
MKILSCNSNKALSKSIADYIGIKLANASIRKFSDDEIFVEINENIRGEDVFIIQSTSHPANDHLMELLITIDAVKRGSAKRITAVMPYYGYARQDRKTGPRTPITAKLVANLITSAGAD

SEQ ID NO: 131962 - protein, 257 aa, Unknown
  Bacterial polypetide isolated from the Sargasso Sea
MKIITGNSNKNLSLKISKYLKNRLVRSSIRKFSDGEIYVEINENIRGNSIFVIQSVSSPANDNLMELLLCIDALKRSSAKNITAVIPYFGYARQDRKVVPRTSISAKLVSNLITKAGADRVVTIDLHAGQIQGFFDIPVDNLFATPIFARHVRKKIKNKNLICVAPDVGGTERARALGKFLHAGLAIIDKRRPAPGKSEVMNVIGNVKGKTCIIVDDIIDSGGTIVNAANALTDRGAKEVHVYVTHGVLSGKAVQKI

SEQ ID NO: 131963 - protein, 188 aa, Unknown
  Bacterial polypetide isolated from the Sargasso Sea
MSTKILSCNSNRPLADAISKYMELPLTKADVRRFSDMEVFVEIQENVRGEDVFIIQSTSSPTNDNLMELLVALDALKRGSANRITAVIPYYGYARQDRKSGPRTPISAKLVANLITVAGAHRVLTVDLHAGQIQGFFDIPTDNLFAAPVFQSDIKEKYGDKSLVIVSPDVGGVVRARALARSLDADLA

SEQ ID NO: 131964 - protein, 290 aa, Unknown
  Bacterial polypetide isolated from the Sargasso Sea
SKSYGQKLGNIAISKYSDGEFQPSFEESIRGARIFIIGSTHPNSENLMQLLLMLDAAKRSSARHITAVIPYFGWARQDRKDKPRVPIGAKLIAKLIEAAGATRIITMDLHADQIQGFFEKPVDHLYASSIFIPYVESLRLNNLTMASPDMGGSKRAYAYSKFLKSDVVICYKQRAKSNIVTHMEVIGDVKGKNIILVDDMVDTAGTLTKAADLMIERGASSVRAICTHAILSGNAIEKIENSNLLELIVTDSIPSNQSSPKIRILSCAPLFAEVMKNVHNNLSISSNFIT

SEQ ID NO: 131965 - protein, 112 aa, Unknown
  Bacterial polypetide isolated from the Sargasso Sea
MKVLAGTSNSRLCKNIARHLKLKLVNSNIKRFADGEVYIEINENIRGNSIFVIQSTSNPANDNLMELLICIDALRRSSAKNITAVIPYFGYARQDRKVVPRTAISAKLVSNL

SEQ ID NO: 131966 - protein, 103 aa, Unknown
  Bacterial polypetide isolated from the Sargasso Sea
MKILSGTSNLKLSKDISKNLKLKLINTNIRRFADGEIYIEINENIRGNSVFVVQSTSNPANDNIMELLLVIDALRRSSAKTITAVIPYFGYARQDRKVAPRTS

SEQ ID NO: 131967 - protein, 212 aa, Unknown
  Bacterial polypetide isolated from the Sargasso Sea
SRTPISAKLVANLITTAGADRVLTMDLHAGQIQGFFDIPTDNLYAAPVFGRDIEEAFDDDQETIIVSPDVGGVVRARSIARRIDADLAIIDKRREKAGVSEVMNIIGDVKGKRCILVDDIVDSAGTLCNAAVALTDAGATSVCAYVTHGVLSGGAVARVSSSPLEMMVTTDSILATEAVRVAQNIRQITIAPLLAEAIIRISSSQSVSSLFD

SEQ ID NO: 131968 - protein, 198 aa, Unknown
  Bacterial polypetide isolated from the Sargasso Sea
LTSMGVERLLTIDLHADQIQGFFDIPVDNIYATPLFLADIHKQNYDDVIVVSPDVGGVVRARALAKQLNTDLAIVDKRRPEANVSEVMQIIGDVKDKCCVIVDDICDTAGTLCHAADALKDKGASAVYAYITHPIFSGKADQNIIESTIDSIIVTDTIKLSKKIVDTEKIRQITVSEMLAETLRRIDNKESVSSLFVE

SEQ ID NO: 131969 - protein, 250 aa, Unknown
  Bacterial polypetide isolated from the Sargasso Sea
NDNLMELLLCIDALKRSSAKNITAVIPYFGYARQDRKVVPRTSISAKLVSNLITKAGADRVVTVDLHAGQIQGFFDIPVDNLFSTPIFARHARKKIKSKKIICVAPDVGGTERARALGKLLNVGLAIVDKRRPKPGQSQVMNVIGDVKGQTCIIVDDIIDSGGTIVNAAKALKSRGAKDVYVYITHGVLSGDAIKKIKSSVIKNLVITDTIDNVHKTKNVKNIEVLPISGLMGEAIKRISNSTSVSDLFK

SEQ ID NO: 131970 - protein, 126 aa, Unknown
  Bacterial polypetide isolated from the Sargasso Sea
FAIIDKRRAAANESEVMNIIGDVKGKTCIVPDDIIDTAGTLCNAAQALKEAGASKVKAYITHPVLSGPAIERINDSSIDELVVTNSIPLSQEAEKCSKIRVISLAPTIAECIRRLNNEESLSALFL

SEQ ID NO: 131971 - protein, 136 aa, Unknown
  Bacterial polypetide isolated from the Sargasso Sea
MKILSGTSNPKLSKEISKLLKLKLVNTNIKRFSDGEIYIEINENIRGNSVFVIQSTSHPANDNLMELLLCIDALRRSSAKNITAVIPYYGYARQDRKVVPRTSISAKVVANLITNAGASRVVTVDLHAGPIQGFFD

SEQ ID NO: 131972 - protein, 269 aa, Unknown
  Bacterial polypetide isolated from the Sargasso Sea
NENIRGNSIFVVQSTSNPANDNLMELLICIDALRRSSAKNITAVIPYFGYARQDRKVVPRTAISAKLVSNLITNAGANRILSVDLHAGQIQGFFDIPVDNLFATPIFARHIKNKSKLKNVICVAPDVGGVERTRALSRRINSSIAIIDKRRPTPGKSEVMNLVGNVKNKNCIIVDDIIDSGGTIVNAARALKEKGAKDVYVYITHAVLSGNAVEKINDSKIKKLITTDTIDNSKKIAKSNKIEIISIAPMISEAMKRIANSTSVSSLFK

SEQ ID NO: 131973 - protein, 194 aa, Unknown
  Bacterial polypetide isolated from the Sargasso Sea
MRIIAGTSNLPLSKKVAKYLGDKITDASIRRFADEEVYVEIKENIRGEDVFIIESLSYPANDNLMELLVIIDALKRASAKRITAVIPYYGYARQDRKPGPRTPISAKLVANLITTAGADRVLTLDLHAEQIQGFFDIPTDNLFAGPVFAKDIKEKYNINNLTAVSPDIGGVVRARAIANKLGASIAIVDKRRPK

SEQ ID NO: 131974 - protein, 270 aa, Unknown
  Bacterial polypetide isolated from the Sargasso Sea
INENIRGNSIFLIQSVSSPANDNLMELLLCIDALKRSSAKNITAVVPYFGYARQDRKVAPRTSISAKLVSNLITKAGADRVVTVDLHAGQIQGFFDIPVDNLFATPIFARHVKKKIKSKNLICVAPDVGGTERARALGKLLNVGLAIVDKRRPKPGQSQVMNIIGDVKGKTCILVDDIIDSGGTIVNAAKALKDRGAKEVYVYITHGVLSGEAVNKIKNSVIKNLVITDTIDNINRVKGAKNIEVLSISSLMGEAIKRISNSTSVSDLFK

SEQ ID NO: 131975 - protein, 270 aa, Unknown
  Bacterial polypetide isolated from the Sargasso Sea
INENIRGNSIFIIQSISYPANDNLMELLLCIDALKRSSAKNITAVIPYFGYARQDRKVVPRTSISAKLVSNLITMAGANRIVTVDLHAGQIQGFFDIPVDNLFSTPIFARHIKRKIKNKNLICVAPDVGGVERARALGRKLDVGLSIIDKRRPSPGKSQVMNVIGNVKGKTCIIVDDIIDSGGTIVNAADALKKRGAKEVHVYVTHGVLSGEAVEKIKKSKIKNLVVTDTINNSDKAKKARNIEVLTISNLLAEAMKRISNSTSVSDLFK

SEQ ID NO: 131976 - protein, 140 aa, Unknown
  Bacterial polypetide isolated from the Sargasso Sea
MKLLTGNSNKVLSKNIAKYLKTKLVNSSIKKFADGEIYIEINENIRGNSIFIVQSISSPANDNLMELLLCIDALKRSSAKNITAVIPYFGYARQDRKVVPRTSISAKLVSNLITKAGADRIVTVDLHAGQIQGFFDIPVD

SEQ ID NO: 131977 - protein, 220 aa, Unknown
  Bacterial polypetide isolated from the Sargasso Sea
YARQDRKPGPRTPISAKLVANLITTAGADRVLTLDLHAGQIQGFFDIPVDNLISAPVMEADIKLQFPGESLVVVSPDVGGVVRARAIANRIDADLAIVDKRRERAGISEVMNIIGDVEGRRCILVDDIIDSAGTVCNAANALREAGATSVVAYVTHGVLSGGAVARVASSSLEKLVITDSIQATQPVELAENIRVLSIADLIAEAMKRISEETSVSSLFK

SEQ ID NO: 131978 - protein, 247 aa, Unknown
  Bacterial polypetide isolated from the Sargasso Sea
EIMLIADALKRSSASRITAVVPYYGYARQDRRVRSARVPISAKVVADMFASVGIDRVLTIDLHSETIQGFFDMPADNVYATKFMVDDIKDNNDRNEVVVVSPDVGGVVRSRALAKLLDDTDLAIIDKRRAVANESEVMNIIGEVEGKVCIVPDDIIDTAGTLCNAAKALKDNGAKAVKAYITHPVLSGPAIERLNKSEIDELIVTNSIPLNKDAKKCSKIRVISIANIIAECITRLSNEESLSEMFL

SEQ ID NO: 131979 - protein, 272 aa, Unknown
  Bacterial polypetide isolated from the Sargasso Sea
MKIIACNSSKSLAEKISKHIDVPLADASVRTFNDREIFVEINENIRGEDVFIIQSTSHPANDHLMELLITIDAARRGSAKRITAVIPYYGYARQDRKTGPRTPITAKLVANLITSAGADRVLTMDLHAGQIQGFFDIPLDNIFSVRPIIDDVKERFNGNKDLVVASPDVGGVVRARAFAKRLEAGLAIADKRREKAGESEVMNIIGDVKDKTCILLDDIADSAGTLCNAAEALSKNGAKEIYSYIVHGVLSGDALKKIENSSIKELVLTDTN

SEQ ID NO: 131980 - protein, 319 aa, Unknown
  Bacterial polypetide isolated from the Sargasso Sea
DLVDARIERFNDQEIFVEVFENVRGEDMFIIQSTSNPANDNLMELLIMVDALRRSSASRITAVIPYFGYARQDRRSKARTPISAKLVANLLVEAGVERILTLDLHATQIQGFFDIPVDNLYAAPVFALDIIHQFSNKLNDVMVVSPDVGGVARARELAKRINAPLSIVDKRRERAGEVAEMTIIGDVTGKKCIIVDDICDTAGTLCKAAEVLIENGAAEVHSYITHGVLSGPAVERISNSVMKSLVITDSIQATGPVAKATNIRIVPTAPIFAQAILNIWNGTSVSSLFETETLEPIYDGQLQRLLYQIDKRQILVTKI

SEQ ID NO: 131981 - protein, 291 aa, Unknown
  Bacterial polypetide isolated from the Sargasso Sea
MKIIACNSNKILAESISTYIGVKLANTSLRKFADREIFVEINENIRGEDVFIIQSTSHPANDHLMELLITIDAAKRGSAKRITAVIPYYGYARQDRKTGPRTPITAKLVANLITSAGADRVLTMDLHAGQIQGFFDIPLDNIFSAPPIIKDMKNNFSNNSDLVITSPDVGGVVRARAFAKRLNAGLAIADKRREKAGESEVMNIIGDIKHKTCILLDDIADSAGTLCNAAKALKENGAKEIYSYIAHGVLSGEALKRIENSAIKELVLTDSIQASNEVKNTKNIRHISIAP

SEQ ID NO: 131982 - protein, 263 aa, Unknown
  Bacterial polypetide isolated from the Sargasso Sea
MKILTGNSNKQLSNKISKNLKNKLVNTSIRKFADGEIYIEINENIRGNSIFIIQSVSSPANDNLMELLLCIDALKRSSAKNITTVIPYFGYARQDRKVVPRTSISAKLVSNLITNAGADRVVTVDLHAGQIQGFFDIPVDNLFATPIFAKHIKRKVKSKNIICVAPDVGGVERARALGKKLDVGLAIVDKRRPSPGKSQVMNVIGNVKNKVCILTDDIIDSGGTIVNASDVLLKRGAKEVHVYATHGVFSGDAVKKIKNSKIK

SEQ ID NO: 131983 - protein, 184 aa, Unknown
  Bacterial polypetide isolated from the Sargasso Sea
MKLLTGNSNKVLSKNIAKYLKSKLVNSSIKKFADGEIYVEINENIRGNSIFIIQSISSPANDNLMELLLCIDALKRSSAKNITAVIPYFGYARQDRKVVPRTSISAKLVSNLITKAGADRVVTVDLHAGQIQGFFDIPVDNLFATPIFARHARKKIKSKKIVCVAPDVGGTERARALGKLLGVG

SEQ ID NO: 131984 - protein, 261 aa, Unknown
  Bacterial polypetide isolated from the Sargasso Sea
ENIRGTSVFVIQSTSNPANDNLMELLLVIDALRRSSAKNITAVIPYFGYARQDRKVVPRTSISAKVASNIITQAGASRVVTVDLHAGQIQGFFDVPVDNLFTTPLFARYIKKKLKNKNLICVSPDVGGVQRTRGLATKINADLAIIDKRRSAPGKSEVMNIIGDVKKKTCIIVDDIIDSGGTIVNAVEALKKSGADDVYVFITHGVLSGEAVSKIKKSKIKKLIITDTIDNSKKIKNINKIELISIASLMAEAIKRISNST

SEQ ID NO: 131985 - protein, 160 aa, Unknown
  Bacterial polypetide isolated from the Sargasso Sea
MKIIACNSSKSLAEKISKHIDIPLADASVRTFNDREIFVEINENIRGEDVFIIQSTSHPANDHLMELLITIDAARRGSAKRITAVIPYYGYARQDRKTGPRTPITAKLVANLITSAGADRVLTMDLHAGQIQGFFDIPLDNIFSVRPIIDDVKERLTETK

SEQ ID NO: 131986 - protein, 254 aa, Unknown
  Bacterial polypetide isolated from the Sargasso Sea
NSIFIIQSISSPANDNLMELLLCIDALKRSSAKNITAVIPYFGYARQDRKVVPRTSISAKLVSNLITKAGADRVVTLDLHSGQIQGFFDIPVDNLYATPIFARHIKKKIKTNNLICVAPDVGGTARARALGKMLNIDLAIIDKRRPKPGKSEVMNVIGKVNNKTCIIVDDIIDSGGTIVNAAKALKNNGAKDVHVYCSHGVLSGNAVEKIKNSKVKNLVITDTIDNIDKVKKAKNIEILTISQLVGEAIKRISN

SEQ ID NO: 131987 - protein, 138 aa, Unknown
  Bacterial polypetide isolated from the Sargasso Sea
MKLVSGNSNINLAENIGKYLDTPLADCTVKKFSDKEIFVEMNENCRGEDVFIIQSTSFPANDNLMELLILIDTLKRASAKRITAVIPYYGYARQDRKPGPRTPITAKLVANLIAKSGADRVLSMDLHAGQIQGFFDIP

SEQ ID NO: 131988 - protein, 273 aa, Unknown
  Bacterial polypetide isolated from the Sargasso Sea
MANQDPIAKIFSCTQSTDLSKKIAKYFGTELGNVNFSHYSDGEFQPSFEESVRGARLFIIGSTQPNSENLMELLLMIDAAKRSSARHITAVIPYFGWARQDRKDKPRVPIGAKLIANLIEAAGATRLITMDLHADQIQGFFEKPVDHLYASTIFIPYIQSLNLKKLTIASPDMGGSKRAYAYSRFLKSNVVICYKQRKKANVVSHMELIGKVEGKNVIIVDDMVDTAGTLTKAADLMVERGAKSVRAICTHGILSGKAYENIEKSKLKELIVT

SEQ ID NO: 131989 - protein, 300 aa, Unknown
  Bacterial polypetide isolated from the Sargasso Sea
MKLLTGNSNKVLSKNIAKYLKSKLVNSSIRKFADGEIYVEINENIRGNSIFIIQSISSPANDNLMELLLVIDALKRSSAKNITAVIPYFGYARQDRKVVPRTSISAKLVSNLITKAGADRVVTVDLHAGQIQGFFDIPVDNLFATPIFARHVKKKVKSKKIICVAPDVGGTERARALGKLLNVGLAIVDKRRPKPGQSQVMNVIGDVNNKTCIIVDDIIDSGGTIVNAAKALKERGAKEVYVYITHGVLSGEAVKKIKKSVIKNLVITDTIDNGEKTKNVKNIEVLPISGLMGEAIKKNS

SEQ ID NO: 131990 - protein, 154 aa, Unknown
  Bacterial polypetide isolated from the Sargasso Sea
PKDTPIIVSPDVGGVVRARIIAKRIGADLAIVDKRRERAGESEVMNIIGDVEGRECFMIDDIVDSAGTLCNASDALIKQGATKVYSYVTHGVLSGKAVERVNNSSLTKLLITDTIEESDAVKKSDKIDVISISPLLGEAIKRISDEKSVSSLFD

SEQ ID NO: 131991 - protein, 269 aa, Unknown
  Bacterial polypetide isolated from the Sargasso Sea
MSKKISKYLINKLVNSSIKKFSDGEIYIEINENIRGNSIFIIQAISSPANDNLMELLLCIDALKRSSAKNITAVIPYFGYARQDRKVVPRTSISAKLVSNLITKAGADRIVTVDLHAGQIQGFFDIPVDNLFSTPIFARHIKRKIKSKNLICVAPDVGGVERTRALGRKLDVGLAIIDKRRPSPGKSQVMNVIGNVKGKTCIITDDIIDSGGTIVNAADALIKRGAKEVYVYVTHGVLSGEAVEKIKNSKIKNLVVTDTIDNSDKVKKS

SEQ ID NO: 131992 - protein, 222 aa, Unknown
  Bacterial polypetide isolated from the Sargasso Sea
FGYARQDRKVVPRTSISAKLVSNLITKAGADRVVTVDLHAGQIQGFFDIPVDNLFATPIFARHAKKKIKSKNLICVAPDVGGTERARALGKLLNVGLAIVDKRRPKPGQSQVMNVIGDVKGKTCIIVDDIIDSGGTIVNAAKALKDRGAKEVYVYITHGVLSGEAVKKIKNSVIKNLVITDTIDNMSRTKGVKNIEVLSISGLMGEAIKRISNSTSVSDLFK

SEQ ID NO: 131993 - protein, 228 aa, Unknown
  Bacterial polypetide isolated from the Sargasso Sea
MKIIACNSNKILAKAICTYIGVDLANASLRKFADREIFVEINENIRGEDVFIIQSTSHPANDHLMELLITIDAAKRGSAKRITAVIPYYGYARQDRKTGPRTPITAKLVANLITSAGAHRVLTMDLHAGQIQGFFDIPLDNIFSAPPIIKDMKEKFSKNSNLVITSPDVGGVVRARAFAKRLNAGLAIADKRREKAGESEVMNIIGDVKGKTCILLDDIADSAGTLCN

SEQ ID NO: 131994 - protein, 127 aa, Unknown
  Bacterial polypetide isolated from the Sargasso Sea
GLAIVDKRRPKPGQSQVMNIIGDVKGKTCILVDDIIDSGGTIVNAAKALRDRGAKEVYVYITHGVLSGEAVKKIKNSVIKNLVITDTIDNMKRVKGAKNIEVLSISSLMGEAIKRISNSTSVSDLFK

SEQ ID NO: 131995 - protein, 276 aa, Unknown
  Bacterial polypetide isolated from the Sargasso Sea
KVEILENVRGHEAYIIQSTCAPTNSNLMELMLITDALKRSSASRITAILPYYGYARQDRRVRSARVPISAKVIADMMNSVGVDRVLTVDLHSESIQGFFDMPADNVYATKIMHDDIKARSSQDEEILVVSPDVGGVVRARALAKFLDESDLAIIDKRRATANESEVMNIIGDVQGKCCIVPDDIIDTAGTLCNAAQALKDAGAAMVKAYITHPVLSGPAIERISKSSIDELVVTNSISLSPEAEKCSKIRVISLAPTIAECIRRLNNEESLSALFL

SEQ ID NO: 131996 - protein, 272 aa, Unknown
  Bacterial polypetide isolated from the Sargasso Sea
IEINENIRGNSIFVIQSVSSPANDNLMELLLCIDALKRSSAKNITAVIPYFGYARQDRKVVPRTSISAKLVSNLITKAGADRVVTIDLHAGQIQGFFDIPVDNLFATPIFARHVRKKIKNKNIICVAPDVGGTERARALGKFLHAGLAIIDKRRPAPGRSEVMNVIGNVKGKTCIIVDDIIDSGGTIVNAANALTERGAKEVHVYVTHGVLSGKAVQNIKSSKIKRLVITDTIDNSDRVKGAKNIEILTISQLVGEAIKRISNSTSVSDLFR

SEQ ID NO: 131997 - protein, 288 aa, Unknown
  Bacterial polypetide isolated from the Sargasso Sea
KMFSGRSNPRLAENIAKFLDRHLGEISIRTFSDGEIWVKYEENIRGCDVFIIQSTNGPSENIMELALLVDAAVRASADTVTVVIPYFGYGRQDRKDQPRVPISSRVIVDILTALGTDRIITLDLHSTQIQGFANIPFDNLYSRTVLYNAIKEEGFNPEETVVLAPDIGSVKMSQSYAKTLGMHFALIDKRRFAPNQAEVNHLIGELKDLDVLIIDDMIDTAGTTVNAAKAAIDKGAKSVTAVATHGVLSGPAIKRLNDSSIKKVIITDTITIDKDKKIDKIKIVSVAK

SEQ ID NO: 131998 - protein, 174 aa, Unknown
  Bacterial polypetide isolated from the Sargasso Sea
MYKEIVLMKILSGTSNPTLSKSISRHLRTKLVNTNIKKFADGEIYVEINENIRGNSVFVIQSSANPANDNLMELLLCIDALRRSSAKSITAVIPYFGYARQDRKVVPRTSISAKLVSNLITDAGAHRVVTVDLHAGQIQGFFDMPVDNLFTTPLFARFIKKNIKSKNFICVSPD

SEQ ID NO: 131999 - protein, 171 aa, Unknown
  Bacterial polypetide isolated from the Sargasso Sea
MKVLAGTSNLKLCRDIARQLKLKLVNSNIKRFADGEVYIEINENIRGNSIFVVQSTSNPANDNLMELLICIDALRRSSAKNITAVIPYFGYARQDRKVVPRTAISAKLVSNLITNAGANRILSVDLHAGQIQGFFDIPVDNLFATPIFARHIKKKMKLNNLICVSPDSWWC

SEQ ID NO: 132000 - protein, 261 aa, Unknown
  Bacterial polypetide isolated from the Sargasso Sea
IIQSTDSPAEKNLMELVLIADALKRASANSITAVIPYFGYARQDRRVRSARVPISARVIAEVLTSVGISRVITLDIHSEQIQGFFSFPVDNIYTSNIMCKEIIGKYKVEDLQVVSPDTGGVIRARSVAKTLGVKDLAIIDKRREKANESEVINLIGDVKDKVCIVPDDLIDTAGTLSNASHALKKEGAREVIAYITHPVLSGNAIENLNKSAIDRLVVSNSIDIGDKSEKCPKIDVFDISPIIAESIKRITTGDSISELFK

SEQ ID NO: 132001 - protein, 215 aa, Unknown
  Bacterial polypetide isolated from the Sargasso Sea
MKYSQKMKILTGNSNKKLSNKISKNLKNKLVNTSIRKFADGEIYIEINENIRGNSIFIIQSVSSPANDNLMELLLCIDALKRSSAKNITTVIPYFGYARQDRKVVPRTSISAKLVSNLITNAGADRVVTVDLHAGQIQGFFDIPVDNLFATPIFAKHIKRKIKRNNIICVAPDVGGVERARALGKKLDVGLAIVDKRRPSPGKSQVMNVIGNVKT

SEQ ID NO: 132002 - protein, 240 aa, Unknown
  Bacterial polypetide isolated from the Sargasso Sea
MKVLAGTSNLKLCKDIARQLKLKLVNSHIRRFADGEVYIEINENIRGNSIFVVQSTSNPANDNLMELLICIDALRRSSAKNITAVIPYFGYARQDRKVVPRTAISAKLVSNLITNAGANRILSVDLHAGQIQGFFDIPVDNLFATPIFARHIKNKTKLKNLVCVAPDVGGVERTRALSRRINSSIAIIDKRRPSPGKSEVMNLVGNVKNKNCVIVDDIIDSGGTIVNAAKALKDKGAKDV

SEQ ID NO: 132003 - protein, 268 aa, Unknown
  Bacterial polypetide isolated from the Sargasso Sea
ILKNRLVRSSIKKFSDGEIYIEINENIRGNSIFVIQSVSSPANDNLMELLLCIDALKRSSAKNITAVIPYFGYARQDRKVVPRTSISAKLVSNLITKAGADRVVTIDLHAGQIQGFFDIPVDNLFATPIFARHVKNKIKNKNLICVAPDVGGTERARALGKFLHAGLAIIDKRRPAPGKSEVMNVIGNVKGKVCIIVDDIIDSGGTIVNASKALIDRGAKEVHVYVTHGVLSGKAVEKIKSSKIKRLVITDTINNSDRVKSTKNMKYY

SEQ ID NO: 132004 - protein, 292 aa, Unknown
  Bacterial polypetide isolated from the Sargasso Sea
ALRLKLVNTNIKRFSDGEIYVEINENIRGNSVFVIQSTSTPANDNLMELLLVIDALRRSSAKNITAVIPYFGYARQDRKVAPRTSISAKVVSNLIANAGANRVVTVDLHAGQIQGFFDIPVDNLFTTPLFARYIKKKWKNKNLICVSPDVGGVQRARGLATKLKADLAIIDKRRPKPGKAQVMNIVGDVKGKVCLIVDDIIDSGGTIVSAAKALKENGALDVYVFITHAVLSNDAADKIQKSKVKKLIITDSIDNSKKIKNNNKIEVLSISSLMAEAIKRISNSTSVSDLFN

SEQ ID NO: 132005 - protein, 205 aa, Unknown
  Bacterial polypetide isolated from the Sargasso Sea
MKILSGTSNQTLSKSISKHLRLKLVNTNIKNFADGEIYVEINENIRGNSVFVIQSTSTPANDNLMELLLCIDALKRSSAKNITAVIPYFGYARQDRKVVPRTSISAKLVSNLITNAGANRIVTVDLHAGQIQGFFDMPVDNLFTTPIFTRYIKKNIKSKNFICVSPDAGGIERTRGLAKKINADLAIIDKRRPQAGKSQVMNIIG

SEQ ID NO: 132006 - protein, 197 aa, Unknown
  Bacterial polypetide isolated from the Sargasso Sea
TSAGADRVLTLDLHAGQIQGFFDIPVDNIFSARQMIPDIKKNFENDDLVIASPDVGGVVRARAFAKRLGAGLAIADKRREKAGVSEVMNIIGDVKDKTCILLDDIVDSAGTLCNAAKALKKHGAKDIYSYIVHGVLSGKALELIQSSKIKELVLTDSIQPTKIVKNTKNIRHISIAPLMGEAIKRINSDSSVSALFD

SEQ ID NO: 132007 - protein, 166 aa, Unknown
  Bacterial polypetide isolated from the Sargasso Sea
MKLLTGNSNKNLSQKISKFLKTKLVHSSIKKFSDGEIYIEINENIRGNSIFLIQSVSSPANDNLMELLLCIDALKRSSAKNITAVIPYFGYARQDRKVAPRTSISAKLVSNLITKAGADRVVTVDLHAGQIQGFFDIPVDNLFATPIFSRHIKRNVKGKNLICVAL

SEQ ID NO: 132008 - protein, 209 aa, Unknown
  Bacterial polypetide isolated from the Sargasso Sea
PITAKLVANLITSAGAHRVLTMDLHAGQIQGFFDIPLDNIFSAPPILKDIKEKFISNNDLVVASPDVGGVVRARAFAKRLNAGLAIADKRREKAGESEVMNIIGDVNGKTCILLDDIADSAGTLCNAAEALNNNGAKDIYSYIVHGVLSGKALERISNSSIKELVLTDTIEPTKEVKNTKNIRHITIAPLMGEAIKRISSDASVSALFE

SEQ ID NO: 132009 - protein, 257 aa, Unknown
  Bacterial polypetide isolated from the Sargasso Sea
TDALRRSSAKRITAVIPYFGYARQDRRTKARTPISAKLIANLLTEAGIERILTLDLHAAQIQGFFDIPVDNLYASPIFALDARHHFKDMSNITVVSPDVGGVTRARELAERIDADLAIVDKRRPAPGEVSQMTIIGEVKNRKCIIVDDICDTAGTLVKAVDLLLGKGATEVHAYITHGVLSGKAIERIEGSNIRSLVVTDSIEATSTVKSNSKIRSVATAPILAQAMLNIANGSSISSLFEDETLGPIYEAFYPEKH

SEQ ID NO: 132010 - protein, 213 aa, Unknown
  Bacterial polypetide isolated from the Sargasso Sea
MKLLTGNSNKSLSQKISKHLKTKLVHSSIRKFADGEIYIEINENIRGNSIFLIQSSSAPANDNLMELLLCIDALKRSSAKSITAVIPYFGYARQDRKVAPRTSISAKLVSNLITKAGADRIVTVDLHAGQIQGFFDIPVDNLFATPIFARHIKKRLNKKKLICVAPDVGGVERTRALARKLDIGIAIIDKRRPTPGKSQVMNVIGNVNGKTCV

SEQ ID NO: 132011 - protein, 141 aa, Unknown
  Bacterial polypetide isolated from the Sargasso Sea
MKIIAGNSNKSLAEAICAYNGVSLADTSLRRFADREIFVEINENIRGEDVFIIQSTSHPANDHLMELLITIDAAKRGSAKRITAVIPYYGYARQDRKTGPRTPITAKLVANLITSAGADRVLTMDLHAGQIQGFFDIPLDN

SEQ ID NO: 132012 - protein, 235 aa, Unknown
  Bacterial polypetide isolated from the Sargasso Sea
RSSAKNITAVIPYFGYARQDRKVVPRTSISAKLVSNLITKAGADRIVTVDLHAGQIQGFFDIPVDNLFSTPIFARHVKKKVKSKNLICVAPDVGGVERTRALGRKLDVGLAIIDKRRPTPGKSQVMNVVGNVKGKTCLIVDDIIDSGGTIVNAAEALIKRGAKEVHVYVTHGVLSGEAVEKIQKSKIKNLVVTDTIDNSDKVKKSRNIEVLSISNLLAEAMKRISNSTSVSDLFK

SEQ ID NO: 132013 - protein, 208 aa, Unknown
  Bacterial polypetide isolated from the Sargasso Sea
TPISAKLVANLITTSGADRVLTIDLHAGQIQGFFDIPVDNLYAATILLEDIKKNYNLDRTVIISPDVGGVVRARYVANRLNIGLAIVDKRREAANISEVLNIIGDVKEKDCILIDDIVDTAGTLTKAGKALMNVGAKTVSAYVSHGVLSGNALEKINKSVLKEIVTTNTISSLLGEDKNKIRRLSVAPLIAEAVKRIDNHSSVSSLFN

SEQ ID NO: 132014 - protein, 115 aa, Unknown
  Bacterial polypetide isolated from the Sargasso Sea
MKLFAGNAVPELAQKVADRLYTKLGNAKVGRFSDGEISVEIHENVRGSDVFIIQSTCAPTNDNLMELIVMIDALRRASAGRITAVIPYFGYARQDRRVRSARVPITARVVADFLS

SEQ ID NO: 132015 - protein, 233 aa, Unknown
  Bacterial polypetide isolated from the Sargasso Sea
MGKYVKKIFAGSSNPQLAMKIANECGTSLGDLSIKRFSDGEIWIKFEENLRGNDIYLVQSTNPPADNIVELALMIDAAKRASAKRINVIMPYFGYSRQDRKDEPRVPISAKVMMDIFIKAGANRIVTMDLHSTQIQGFSSKPVDNIYGSLVLMPELEKHFHNLSGKNSNCTVLIPDMGSSKLGQSYAKRLEMSFALVDKRRNAHNQSEAVSVVGELKNQHILIIDDMIDTAGT

SEQ ID NO: 132016 - protein, 134 aa, Unknown
  Bacterial polypetide isolated from the Sargasso Sea
MKLLTGNSNKSLSQKISKHLKTKLVHSSIRKFADGEIYIEINENIRGNSIFLIQSISSPANDNLMELLLCVDALKRSSAKNITTVIPYFGYARQDRKVAPRTSISAKLVSNLITKAGADRVVTVDLHAGQIQGF

SEQ ID NO: 132017 - protein, 217 aa, Unknown
  Bacterial polypetide isolated from the Sargasso Sea
MYKENVLMKILSGTSNLSLSKSISKQLKLKLVNTNIKNFADGEIYVEINENIRGNSVFVIQSTSTPANDNLMELLLCIDALKRSSAKNVTAVIPYFGYARQDRKVVPRTSISAKLVSNLITNAGANRIVTVDLHAGQIQGFFDMPVDNLFTTPIFARYIKKNIKSKNFICVSPDAGGIERTRGLAKKINADLAIIDKRRPQAGKSQVMNIIGEVNNK

SEQ ID NO: 132018 - protein, 256 aa, Unknown
  Bacterial polypetide isolated from the Sargasso Sea
MYKELHFMKILSGTSNLKLSKDIAKKLKLKLVNTNIRRFADGEIYIEINENIRGNSVFVIQSTSNPANDNLMELLLVIDALKRSSAKNVTAVIPYFGYARQDRKVAPRTSISAKVVANLITNAGASRVVTVDLHAGQIQGFFDMPVDNLFTTPLFAKYIKKKLNNKKLICVSPDVGGVQRTRALATRIKADLAIIDKRRPAPGKSQVMNIIGDVKNKTCIIVDDIIDSGGTIINAVDALKKSGANEVYVFITHAVL

SEQ ID NO: 132019 - protein, 143 aa, Unknown
  Bacterial polypetide isolated from the Sargasso Sea
MKLLTGNSNKVLSKNIAKYLKSKLVNSSIRKFSDGEIYVEINENIRGNSIFIIQSISSPANDNLMELLLCIDALKRSSAKNITAVIPYFGYARQDRKVVPRTSISAKLVSNLITKAGADRVVTVDLHAGQIQGFFDIPVDNLF

SEQ ID NO: 132020 - protein, 248 aa, Unknown
  Bacterial polypetide isolated from the Sargasso Sea
MKIIACNSSKSLSDKISKHIGVPLADASIRTFNDREIFVEINENIRGEDVFIIQSTSHPANDHLMELLITIDAARRGSAKRITAVIPYYGYARQDRKTGPRTPITAKLVANLITSAGAHRVLTMDLHAGQIQGFFDIPLDNIFSAPPILKDIKDKFNETTNLVVASPDVGGVVRARAFAKRLNAGLAIADKRREKAGESEVMNIIGDVDNKVCILLDDIADSAGTLCNAAEALKENGASEIYSYMYME

SEQ ID NO: 132021 - protein, 112 aa, Unknown
  Bacterial polypetide isolated from the Sargasso Sea
MKILSGTSNLKLSKDISKKLKLKLVNTNIRRFADGEIYIEINENIRGNSVFVVQSTSNPANDNLMELLLVIDALKRSSAKNVTAVIPYFGYARQDRKVAPRTSISAKVVANL

SEQ ID NO: 132022 - protein, 175 aa, Unknown
  Bacterial polypetide isolated from the Sargasso Sea
MPADNVYATKLMVEDISKHYSKDNLVIVSPDVGGVVRSRALAKYLDGLDLAIIDKRRDVANESEVMNIIGDVAGKECIVPDDIIDTAGTLCNAAKALKDAGASKVSAYITHPVLSGPAIERISNSEIDELVVTNSIPLTQDGQKCSKIRVISIAPIISECIKRLSNEESLSAVFL

SEQ ID NO: 132023 - protein, 284 aa, Unknown
  Bacterial polypetide isolated from the Sargasso Sea
SSIRKFSDGEIYIEINENIRGNSIFIIQSVSSPANDNLMELLLCIDALKRSSAKNITAVIPYFGYARQDRKVVPRTSISAKLVSNLITNSGADRVVTLDLHSGQIQGFFDIPVDNLFATPIFARHIKRKIRTKNMICVAPDVGGTARARALGKMLNVGLAIVDKRRPAPGKSVVMNVIGNVKDKTCIIVDDIIDSGGTIVNAAKILKQRGARDVHVYVSHGVLSGDAVEKIRKSQIKNLVITDTIDNSQKVKKAKNIEILTISNLVGEAIKRISNSTSVSDLFN

SEQ ID NO: 132024 - protein, 268 aa, Unknown
  Bacterial polypetide isolated from the Sargasso Sea
SDGEIYVEINENIRGNSIFLIQSVSSPANDNLMELLLCIDALKRSSAKNITAVIPYFGYARQDRKVAPRTSISAKLVSNLITKAGADRVVTVDLHAGQIQGFFDIPVDNLFATPIFARHVKKKIKNKNLICVAPDVGGTERARALGKLLNVGLAIVDKRRPKPGQSQVMNIIGDVKGKTCILVDDIIDSGGTIVNAAKALKDRGAKEVYVYITHGVLSGEAVNKIKNSVIKNLVITDTIDNINRVKGAKNIEVLSISGLMGEAIKRIS

SEQ ID NO: 132025 - protein, 242 aa, Unknown
  Bacterial polypetide isolated from the Sargasso Sea
KVLSKNIAKYLKTKLVNSSIRKFADGEIYIEINENIRGNSIFIVQSISSPANDNLMELLLCIDALKRSSAKNITAVIPYFGYARQDRKVVPRTSISAKLVSNLITQAGADRVVTVDLHAGQIQGFFDIPVDNLFSTPIFARHVRKKIKSKKIICVAPDVGGTERARALGKLLNVGLAIVDKRRPKPGQSEVMNIIGDVKGQTCILVDDIIDSGGTIINAAKALKSRGAKDVYVYITHGVLSG

SEQ ID NO: 132026 - protein, 270 aa, Unknown
  Bacterial polypetide isolated from the Sargasso Sea
INENIRGNNIFIIQSISSPANDNLLEMLICIDALKRSSAKNITAVIPYFGYARQDRKVVPRTSISAKLISNLITKAGADRVVTVDLHAGQIQGFFDIPVDNLFTTPIFYRHIKKRLKLNNLVCVSPDAGGINRTRGLSKLLDVGLAIVDKRRPSPGKSEVMNIIGNIKNKVCIIVDDIIDSGGTIVNAAKMLKNKGAKEIHVYITHGVLSGDAIKKIKHSPIKNLVITDTIDNSKKINSAKNIEILSISNLLGEALRRISNSTSVSDLFK

SEQ ID NO: 132027 - protein, 193 aa, Unknown
  Bacterial polypetide isolated from the Sargasso Sea
RVLTVDLHAEQIQGFFTVPVDNVYASSILNADIVRCEHENLIVVSPDIGGVVRARAIAKQLDDADLAIIDKRRPRANEAEVMNLIGDVEGRTAILVDDMVDTAGTLCTAANALKERDALKVVSYCTHAVLSGKALENIKNSQIDELVVTDTIPLSAEALALGKIRQLTIADLLAESIRRVSNEESISALFDLT

SEQ ID NO: 132028 - protein, 232 aa, Unknown
  Bacterial polypetide isolated from the Sargasso Sea
ARLSLAVIPYFGYARQDRKVAPRTSISAKVMANLITNAGATRVVTVDLHAGQIQGFFDMPVDNLYTAPLFAKYIKKKLSNKKLICVSPDVGGVARTRDLANRIKADLAIIDKRRPSPGKSEVMNILGNVQNKTCIIVDDIIDSGGTIVNAVNALKKSGANEVYVFISHGVLSGDAAKKIKDSKIKKLIVTDTIDNTKKIHNNSKIEVLSISSLMSEAIKRIANSNSVSDLFN

SEQ ID NO: 132029 - protein, 286 aa, Unknown
  Bacterial polypetide isolated from the Sargasso Sea
MIFAGNANPELARDIARKLHIPMGQATVGRFSDGETTVEINENVRGHDVFIIQPTCYPTNDNLMELIVMADALRRASATRITAVIPYYGYARQDRRVRSTRVAISAKVVADMISSIGVDRVLTVDLHADQIQGFFDIPVDNIYATPVLLEDIEKQRFENFVVVSPDVGGVVRARAVAKRLDDADLAIIDKRRPKANVSQVMHIIGDVRDKTCILVDDIVDTAGTLCKAANALKEHGASRVVAYITHPVLSGPAIENINNSELDELVVCDTIPLGDKAKNCDRIRPL

SEQ ID NO: 132030 - protein, 245 aa, Unknown
  Bacterial polypetide isolated from the Sargasso Sea
GLLLCIDALKRSSAKNITAVIPYFGYARQDRKVVPRTSISAKLVSNLITKAGADRIVTVDLHSGQIQGFFDIPVDNLFATPIFARHARKKIKKKNVICVAPDVGGTARARALGKMLNVGLAIVDKRRPSPGKSEVMNIIGNVKGKVCLIVDDIIDSGGTIVNAAKALVERGAQEVHVYVTHGVLSGDAVEKIKKSKIKNLVITDTIDNVNKVKKAKNIEVLTISNLVGEAIKRISNSTSVSDLFK

SEQ ID NO: 132031 - protein, 293 aa, Unknown
  Bacterial polypetide isolated from the Sargasso Sea
RLLKLKLVNTNIKNFSDGEIYVEINENIRGNSVFVIQSTATPANDNLMELLLCIDALRRSSAKNITAVIPYFGYARQDRKVVPRTSISAKLVSNLITNAGANRVVTVDLHAGQIQGFFDMPVDNLFTSPIFARYVKKNIKSKNFICVSPDAGGIERTRGLAKKINADLAIIDKRRPQAGKSQVMNIIGEVKNKDCIIVDDIMDSGGTIVNAAEALKKKGAKDIYVFITHAVLSGDAINKIKKSKIKKLIITDTIDNANRIKNVSKIQVLSVAPLMAEAIKRISNSTSVSDLFN

SEQ ID NO: 132032 - protein, 199 aa, Unknown
  Bacterial polypetide isolated from the Sargasso Sea
RLRLVSGTTNPKLAEEIASYLGIENVPLISKRFADGELYVQIQQSIRGCDVFLIQPTCAPVNDSLMELMIMVDACKRASARQITAVIPYFGYARADRKTSGRESITAKLTANLLEKSGVDRVLAMDLHSAQIQGYFDIPCDHIYGSPVLIDYLESLDLEEIVVVSPDVGGVARARAFAKLMNDAPLAIKDKRRAAHNIA

SEQ ID NO: 132033 - protein, 202 aa, Unknown
  Bacterial polypetide isolated from the Sargasso Sea
MKLLTGNSNKNLSLKISKFLKTKLVHSSIRKFSDGEIYIEIKENIRGNSIFLIQSVSSPANDNLMELLLCIDALKRSSAKNITAVIPYFGYARQDRKVAPRTSISAKLVSNLITKAGADRVVTVDLHAGQIQGFFDIPVDNLFATPIFARHVKKNIKGKNLICVSPDVGGVERTRALARKLDIGIAIIDKRRPAPGKSQVMN

SEQ ID NO: 132034 - protein, 218 aa, Unknown
  Bacterial polypetide isolated from the Sargasso Sea
RQDRKVVPRTSISAKLVSNLITKAGADRVVTVDLHAGQIQGFFDIPVDNLFSTPIFARHVKKNIKSKNIVCIAPDVGGTERARALGKILNVGLAIVDKRRPKPGQSQVMNIIGEVKGKTCIIVDDIIDSGGTIVNAAKALKNRGAKEVYVYITHGVLSGDAVKKIKNSVIKNLVITDTIDNKSKIKSAKNIEVLSISGLMGEAIKRISNSTSVSDLFK

SEQ ID NO: 132035 - protein, 234 aa, Unknown
  Bacterial polypetide isolated from the Sargasso Sea
ASKITAVVPYFFYARQDRRVRSSRVPISAKVVSDMFSSVGINRVLTLDLHSETIQGFFDMPADNVYATKLMVEDISKHYSKDNLVIVSPDVGGVVRSRALAKYLDGLDLAIIDKRRDVANESEVMNIIGDVAGKECIVPDDIIDTAGTLCNAAKALKDAGASKVSAYITHPVLSGPAIERISNSEIDELVVTNSIPLTQDGQKCSKIRVISIAPIISECIKRLSNEESLSAVFL

SEQ ID NO: 132036 - protein, 112 aa, Unknown
  Bacterial polypetide isolated from the Sargasso Sea
VDLHAGQIQGFFDIPTDNLFAAPVFITDIKKKFDNNETIIVSPDVGGVVRARAIAKRLDCELAIIDKRREKASVSEVMNIIGEVENKNCILIDDICDTAGTLTNAANALNKK

SEQ ID NO: 132037 - protein, 309 aa, Unknown
  Bacterial polypetide isolated from the Sargasso Sea
GLVLFSGNGNPDLSKEIARELSVDLGNAKVTTFSDGEISISINENVRGKDVFLIQPTCAPAGDNLLELIIMVDALRRSSAGRITAVIPYYGYARQDRRVRSERVPISAKVMADILERSGIDRVLTVELHSEQIQGFFDIPVDNVYGTKVMRDDIQKLNSDKHLIVSPDVGGVVRSRALGKVLGLSDLAIIDKRRDEANQSEVMNVIGEVKDKECIIVDDIADTAGTLCNAADALKSKGALKVYAYIVHPVLSGEAIEKISQSKLDQLVVTDTIPLSEEARDCEKIRKITMAPTLAEAIRRVNNEESISA

SEQ ID NO: 132038 - protein, 131 aa, Unknown
  Bacterial polypetide isolated from the Sargasso Sea
DDSDLAIIDKRRPQANVAQVMHIIGDVQGRDCIIVDDMIDTGGTLCKAAEALKEHGANRVFAYATHPVFSGKAAENITNSVIDEVIVTDTVPLSPEMLKVAKVTQLTMSAVLAEAIRRVSNEESISAMFSH

SEQ ID NO: 132039 - protein, 302 aa, Unknown
  Bacterial polypetide isolated from the Sargasso Sea
QTHVGVELDEPNLAEFANGEIHCRFSESVRGGDVFIIQSHSAATDMTINDSIMEQLIMVDAARRASAKRITVVCPFYGYARQDRKSEGREPITARLLANLFIAAGVSRMVSVDLHAGQIQGFFDKPVDHLTAMPVLVDYMRTLGDDLVIVSPDTGRVKVAERYASELTADLAIVHKRRIKSQKNRVEAGDVLGDVDGRVCVLIDDMIDTGGTIVGAAEQLADRGAKEVYACTTHGVFSDPAIERLENSVIKEVAMTNTLPLPEEKNISKIKMLSVASIIANALDAVFEDTSVSEIFGGKHLS

SEQ ID NO: 132040 - protein, 257 aa, Unknown
  Bacterial polypetide isolated from the Sargasso Sea
SKESNFNLTNSRLRLVSGTTNPKLAEEIASYLGIENVPLISKRFADGELYVQIQQSIRGCDVFLIQPTCAPVNDSLMELMIMVDACKRASARQITAVIPYFGYARADRKTSGRESITAKLTANLLEKSGVDRVLAMDLHSAQIQGYFDIPCDHIYGSPVLIDYLETLDLEEIVVVSPDVGGVARARAFAKLMKDAPLAIIDKRRSAHNIAESLTVIGEVKGKTAILIDDMIDTGGTICSGANLLKQEGANRIFACAS

SEQ ID NO: 132041 - protein, 236 aa, Unknown
  Bacterial polypetide isolated from the Sargasso Sea
RRGSARRITAVIPYFGYARQDRKSSPRSPISAKLVANLITEAGADRVLTLDLHAGQIQGFFDIPLDNLFASPVFNKDISERYNGDGIMMVSPDVGGVVRARAIAKRLDADLAIIDKRRERAGESEVMNIIGDVQDRRCILIDDIVDSAGTLCNAATALMDSGAKSVSAYVTHGVLSGGAVARVTASPLEKLVTTDSIMATEAVRVAHNIEQLTVAPLIAEAMQRISLENSVSSLFD

SEQ ID NO: 132042 - protein, 258 aa, Unknown
  Bacterial polypetide isolated from the Sargasso Sea
MTPLEPVAKIFSCTQSIELSKKIAREYGTELGNVNFSHYSDGEFQPSFEESVRGARLFIIGSTQPNSENLMELLLMIDAAKRSSARHITAVIPYFGWARQDRKDKPRVPIGAKLIANLIEAAGATRLITMDLHADQIQGFFEKPVDHLYASTIFIPYIQSLNLNKLTIASPDMGGSKRAYAYSRFLKSNVVICYKQRKKANVVSHMELIGKVEGKNVIIVDDMVDTAGTLTKAADLMVQRGAKSVRAICTHGILSGNA

SEQ ID NO: 132043 - protein, 143 aa, Unknown
  Bacterial polypetide isolated from the Sargasso Sea
MKLLTGNSNKNLSKKIAKYLKSKLVNSSIKKFADGEIYIEINENIRGNTIFIIQSISSPANDNLMELLLCIDALKRSSAKNITVVIPYFGYARQDRKVVPRTSISAKLVSNLITKAGADRIVTVDLHAGQIQGFFDIPVDNLF

SEQ ID NO: 132044 - protein, 146 aa, Unknown
  Bacterial polypetide isolated from the Sargasso Sea
MKILSCNSNQPLAEAISAYLNQPLTKAEVKRFSDMEVFVEIQENVRGEDAFIVQSTSYPTNDHLMELLVAIDALKRGSARRITAVIPYFGYARQDRKSGPRTPISAKLVANMITTAGADRVLTLDLHAAQIQGFFDIPTDNLFAAP

SEQ ID NO: 132045 - protein, 112 aa, Unknown
  Bacterial polypetide isolated from the Sargasso Sea
MKLVSGNSNINLAENIGKYLDTPLADCTVKKFSDKEIFVEMNENCRGEDVFIIQSTSFPANDNLMELLILIDTLKRASAKRITAVIPYFGYARQDRKPGPRTPITAKLVCYL

SEQ ID NO: 132046 - protein, 296 aa, Unknown
  Bacterial polypetide isolated from the Sargasso Sea
SCAGSNPATPANKKENDYKPTVGIFSGSASTSLSEEVAKILGLKLGNIDLGKFSDGEIKVEILENVRGHEAYIIQSTCAPTNSNLMELMLITDALKRSSASRITAILPYYGYARQDRRVRSARVPISAKVIADMMNSVGVDRVLTVDLHSESIQGFFDMPADNVYATKIMHDDIKSKSANDEKILVVSPDVGGVVRARALAKFLDESDLAIIDKRRATANESEVMNIIGDVQGKSCIVPDDIIDTAGTLCNAAQALKDAGAAKVKAYITHPVLSGPAIERISKSSIDELVVTNSIS

SEQ ID NO: 132047 - protein, 172 aa, Unknown
  Bacterial polypetide isolated from the Sargasso Sea
DNVYATKLMVEDISKHYSKDNLVIVSPDVGGVVRSRALAKYLDGLDLAIIDKRRDVANESEVMNIIGDVAGKECIVPDDIIDTAGTLCNAAKALKDAGASKVSAYITHPVLSGPAIERISNSEIDELVVSNSIPLTQDGQKCSKIRVISIAPIISECIKRLSNEESLSAVFL

SEQ ID NO: 132048 - protein, 226 aa, Unknown
  Bacterial polypetide isolated from the Sargasso Sea
VIPYFGYARQDRKVVPRTSISAKLVSNLITNAGADRVVTVDLHAGQIQGFFDIPVDNLFATPIFAKHIKRKIKSKNIICVAPDVGGVERARALGKKLDVGLAIVDKRRPSPGKSQVMNVIGNVKNKVCILTDDIIDSGGTIVNAADALLKRGAKEVHVYATHGVFSGDAVKKIKNSKIKNLVITDSIDSSDKLKKARNIEVLSISILLAEAIKRISNSTSVSDLFK

SEQ ID NO: 132049 - protein, 217 aa, Unknown
  Bacterial polypetide isolated from the Sargasso Sea
MIERLPGRESITAKLTANLLEKAGVDRVLAMDLHSAQIQGYFDIPCDHIYGSPVLIDYLESLNLEDVVVVSPDVGGVARARAFAKLMNDAPLAIIDKRRSAHNIAESLTVIGEVKGKTAILIDDMIDTGGTICSGANLLKKEGANRIFACASHAVFSPPSYERLSTKDLFEQVIVTNSIPVLVKDNFPQLKVLSVANMLGEAIWRIHEESSVSSMFR

SEQ ID NO: 132050 - protein, 247 aa, Unknown
  Bacterial polypetide isolated from the Sargasso Sea
MEIMLIIDALRRSSAGRITAAIPYFGYARQDRRVRSSRVPISAKVVANMLESAGVNRILTMDLHSDQIQGFFDIPVDNIYATPIMLGDICKNHFNDPVVVSPDVGGVVRARAFAKELNTDLAIIDKRRARANESEVMNIIGDVGGRPCLIMDDVVDTAGTLTRAAEALKNHGASKVVAYCTHPVLSGNAIEKIKQSALDELVVTDTIPLSEIAQASDKIRQISCSGLLAETILRISKSDSVSSLFLS

SEQ ID NO: 132051 - protein, 191 aa, Unknown
  Bacterial polypetide isolated from the Sargasso Sea
MKLLTGNSNKNLSLKISKFLKTKLVHSSIRKFSDGEIYIEIKENIRGNSIFLIQSVSSPANDNLMELLLCIDALKRSSAKNITAVIPYFGYARQDRKVAPRTSISAKLVSNLITKAGADRVVTVDLHAGQIQGFFDIPVDNLFATPIFARHVKKNIKGKNLICVSPDVGGVERTRALARKLDIGIAIIIKE

SEQ ID NO: 132052 - protein, 230 aa, Unknown
  Bacterial polypetide isolated from the Sargasso Sea
MKLLTGNSNKTLSKNIAKYLKSKLVNSSIRKFADGEIYIEINENIRGNSIFIIQSISSPANDNLMELLLCIDALKRSSAKNITAVIPYFGYARQDRKVVPRTSISAKLVSNLITKAGADRIVTVDLHAGQIQGFFDIPVDNLFATPIFARHVRKRIKSKKIICVAPDVGGTERARALGKLLNAELAIVDKRRPKPGQSQVMNVIGDVKNKTCILVDDIIDSGGTIVNAAA

SEQ ID NO: 132053 - protein, 264 aa, Unknown
  Bacterial polypetide isolated from the Sargasso Sea
MKLLSGNSNKPLSKSISKYLKSKLVNSSIRKFSDGEIYVEINENIRGNSIFIIQSVSSPANDNLMELLLCIDALKRSSAKNITAVIPYFGYARQDRKVVPRTSISAKLVSNLITKAGADRVVTVDLHAGQIQGFFDIPVDNLFATPIFARHAKKKIKSKNLICVAPDVGGTERARALGKILNVGLAIVDKRRPKPGQSQVMNIVGDVKEKTCIIVDDIIDSGGTIVNAAKALKDRGAKEVYVYITHGVLSGEAVRKIKNSVIKN

SEQ ID NO: 132054 - protein, 148 aa, Unknown
  Bacterial polypetide isolated from the Sargasso Sea
VGGVVRARALAKSLDADLAIIDKRRERAGVSEVMNIIGDVSNRHCILVDDIVDSGGTLCNAAEALMAAGGLSVSAYISHGVLSGGAVARVKNSPLKELVTTDSIKATEAMLEAKNMRQISIAPLLGEAILRIAESRSVSSLFNYNNSD

SEQ ID NO: 132055 - protein, 180 aa, Unknown
  Bacterial polypetide isolated from the Sargasso Sea
MKLLTGNSNKILSKNIAKYLKSKLVNSSIRKFADGEIYIEINENIRGNSIFIIQSISSPANDNLMELLLCIDALKRSSAKNITAVIPYFGYARQDRKVVPRTSISAKLVSNLITKAGADRVVTVDLHAGQIQGFFDIPVDNLFSTPIFARHVKKKIKNKNLICVAPRCWWNGASESTCKI

SEQ ID NO: 132056 - protein, 295 aa, Unknown
  Bacterial polypetide isolated from the Sargasso Sea
WISDEILSCNSNRPLAEAIAACLDVPLTKADVRRFADMEVFVEIGENVRGEDVFVIQSTCFPANDNVMELLVALDALRRGSARRITAVLPYYGYARQDRKSGPRTPISAKLLANLITSAGADRVLTIDLHAGQIQGFFDIPTDNLFAAPVFIEDIRTRYDGSELMIVSPDVGGVVRARSLARRLEADLAIIDKRRPKAGVSEVMNIIGDVDKRHCIMVDDIVDSGGTLCNAAAALMDAGAISVDAYVTHGVLSGGAVSRVASSPLSSLVTTDSIPATEAVRVARNVRHLSVAPLL

SEQ ID NO: 132057 - protein, 124 aa, Unknown
  Bacterial polypetide isolated from the Sargasso Sea
MKIVSGNSNIPLAEEISKYLNVKLLKATIKKFPDKEIFVEIQENVRGEDVFVIQSTSFPANDHLMELLVTIDALKRGSAKRIAAIVPYYGYARQDRKSGPRTPISAKLVANLMSTAGADRALMV

SEQ ID NO: 132058 - protein, 239 aa, Unknown
  Bacterial polypetide isolated from the Sargasso Sea
RRTKARTPISAKLIANLLSGAGIERILTLDLHSAQIQGFFDIPVDNLYASPIFELDISHYFEKQELLTVVSPDVGGVARARGLAKTINADLAIVDKRRNQPGEIASMTVIGEVKNKICIIVDDICDTAGTLVKASDLLINEGAIEVHAYISHGVLSDPAIDRIEKSSLSSLVVTDSISIIPKIKNSNKIRIVPTAPLFAQALLNIANGNSVSSLFDSERLRPIYKPYYPKYHIEKKRKA

SEQ ID NO: 132059 - protein, 203 aa, Unknown
  Bacterial polypetide isolated from the Sargasso Sea
MKLLSGTSNKPLSKEIAKFLKSKLVHSSIRNFADGEIYIELNENIRGNSIFIIQSISSPANDNLMELLLCIDALKRSSAKNITAVIPYFGYARQDRKVVPRTSISAKLVSNLITKAGADRVVTVDLHAGQIQGFFDIPVDNLFSTPIFARHIKKNIKSKNIVCVAPDVGGTERARALGRILNVGLAIVDKRRPKPGQSQVMNV

SEQ ID NO: 132060 - protein, 244 aa, Unknown
  Bacterial polypetide isolated from the Sargasso Sea
LLLCIDALKRSSAKNITAVIPYFGYARQDRKVVPRTSISAKLVSNLITKAGADRIVTVDLHAGQIQGFFDIPVDNLFATPIFARHAKKKIKSKKIVCVAPDVGGTERARALGKLLNVGLAIVDKRRPKPGQSQVMNVIGDVKGQTCIIVDDIIDSGGTIVNAAKALKAKGAKEVFVYITHGVLTGDAVKKIKNSVIKNLVITDTIDNSEKTRNVKNIEVLPISGLIGEAIKRISNSTSVSDLFK

SEQ ID NO: 132061 - protein, 183 aa, Unknown
  Bacterial polypetide isolated from the Sargasso Sea
MKLLTGNSNKALSKNIAKYLKTKIVNSSIRKFADGEIYIEINENIRGNSIFIIQSISSPANDNLMELLLCIDALKRSSAKNITAVIPYFGYARQDRKVVPRTSISAKLVSNLITKAGADRVVTVDLHAGQIQGFFDIPVDNLFATPIFCKHVKKKIKNKNIILCRFQMLGGTGKSEGLFGKNF

SEQ ID NO: 132062 - protein, 116 aa, Unknown
  Bacterial polypetide isolated from the Sargasso Sea
  misc_feature (111)..(111): Xaa can be any naturally occurring amino acid
MKLLSGNSNKPLSKNIAKFLKSKLVNSSIRNFSDGEIYVEINENIRGNSIFLIQSVSSPANDNLMELLLCIDALKRSSAKNITAVIPYFGYARQDRKVAPRTSISAKLVSXLITKA

SEQ ID NO: 132063 - protein, 196 aa, Unknown
  Bacterial polypetide isolated from the Sargasso Sea
KAGADRVVTVDLHAGQIQGFFDLPVDNLFATPIFARHVKRNIKGKNLICVSPDVGGVERSRALARKLDIGIAIIDKRRPAPGKSQVMNVIGNVKNKTCIIIDDIIDSGGTIVNAAQALINRGAEEVHVYITHGVLSGEAVEKIKKSKIKKLVITDTIDNSEKVKKAKNIEVLSIANLLGEAIKRISNSTSVSDLFK

SEQ ID NO: 132064 - protein, 236 aa, Unknown
  Bacterial polypetide isolated from the Sargasso Sea
VFVIESLSYPANDNIMELLVMIDALKRASAKRITAVIPYYGYARQDRKPGPRTPISAKLVANLITTAGADRVLTLDLHAEQIQGFFDIPTDNLFAGPVFSKDIKEKYEISNLVAVSPDIGGVVRARAIANKIGASIAIVDKRRPRAGESEVMNIIGDVKGKDCIILDDIIDSAGTICNAADKIIDLGANSITSYVTHGVLTGNALEKISGSKLTELVITDSINNQEKLKACEKIRS

SEQ ID NO: 132065 - protein, 171 aa, Unknown
  Bacterial polypetide isolated from the Sargasso Sea
MKLLSGNSNKPLSKKIAKYLKSKLVNSSIRNFSDGEIYVEINENIRGNSIFIIQSVSSPANDNLMQLLLCIDALKRSSAKNITAVIPYFGYARQDRKVVPRTSISAKLVSNLITKAGADRVVTVDLHAGQIQGFFDIPVDNLFATPIFARHVKKKIKSKNMICVAPRCGWN

SEQ ID NO: 132066 - protein, 139 aa, Unknown
  Bacterial polypetide isolated from the Sargasso Sea
MKILTGNSNKQLSNKISKNLKNKLVNTSIRKFADGEIYIEINENIRGNSIFIIQSVSSPANDNLMELLLCIDALKRSSAKNITTVIPYFGYARQDRKVVPRTSISAKLVSNLITNAGADRVVTVDLHAGQIQGFFDIPS

SEQ ID NO: 132067 - protein, 80 aa, Unknown
  Bacterial polypetide isolated from the Sargasso Sea
VYIEINENIRGNSIFVIQSTSNPANDNLMELLICIDALRRSSAKNITAVIPYFGYARQDRKVVPRTAISAKLVSNLITNA

SEQ ID NO: 132068 - protein, 174 aa, Unknown
  Bacterial polypetide isolated from the Sargasso Sea
VQSTSNPANDNLMELLICIDALRRSSAKNITAVIPYFGYARQDRKVVPRTAISAKLVSNLITMAGANRILSVDLHAGQIQGFFDIPVDNLFATPIFARHIKKKMKLNNIVCVSPDVGGVERTRALSRRINSGIAIIDKRRPSPGKSEVMNIVGNIKNKNCVIVDDIIDSGGTIV

SEQ ID NO: 132069 - protein, 210 aa, Unknown
  Bacterial polypetide isolated from the Sargasso Sea
RTPITAKLVANLIAKSGADRVLSMDLHAGQIQGFFDIPTDNLFAAPILLSDIENKIGSNDTMVVSPDVGGVVRARLIASRINSDLAIVDKRREKAGESEVMNIIGDVSDRSCFMIDDIVDSAGTLCNAAEALINSGAKEVFAHVTHGVLSGEAIKRVNDSALTKLVITDTINETDDIKNSNKIETVSVVRLLGEAIRRISEERSVSSLFD

SEQ ID NO: 132070 - protein, 248 aa, Unknown
  Bacterial polypetide isolated from the Sargasso Sea
YIEINENIRGNSIFLIQSTSAPANDNLMELLLCIDALKRSSAKNITAVIPYFGYARQDRKVAPRTSISAKLVSNLITNAGANRVVTVDLHAGQIQGFFDIPVDNLFATPIFARHVKKNLGKKNLICVAPDVGGVERTRALARKLDIGIAIIDKRRPAPGKSEVMNIIGNVKNKTCIIIDDIIDSGGTIVNAAQALINRGAKEIHVYITHGVLSGEAVNKIKKSKIKKLVITDTIDNYDKIKKTKNIQV

SEQ ID NO: 132071 - protein, 238 aa, Unknown
  Bacterial polypetide isolated from the Sargasso Sea
KFADGEIYIEINENIRGNSIFLLQSVSSPANDNLMELLLCIDALKRSSAKNITAVIPYFGYARQDRKVAPRTSISAKLVSNLITKAGADRIVTVDLHAGQIQGFFDIPVDNLFSTPIFARHIKKKLNNKNLICVAPDVGGVERTRALARKLDIGIAIIDKRRPTPGKSQVMNVIGNVKGKTCVIVDDIIDSGGTIVNAAQALINRGAKEVHVYITHGVLSGEAVEKIKRSKIKNLVLT

SEQ ID NO: 132072 - protein, 172 aa, Unknown
  Bacterial polypetide isolated from the Sargasso Sea
DNIYSSTILMSDMWRQGYPDQVIVSPDVGGVQRARAIARRLGNASLAIIDKRREAANKSEVMNIIGDVDQKTAIIFDDMVDTAGTLCNAAAALKDKGALKTVAYAAHPVLSGPAIERIADSELDELVVTDTIPLTQDAKDTGKIRQLTIAELLGETIERIVADQSVSSLYAE

SEQ ID NO: 132073 - protein, 259 aa, Unknown
  Bacterial polypetide isolated from the Sargasso Sea
NPPADNIVELALMIDAAKRASAKRINVIMPYFGYSRQDRKDEPRVPISAKVMMDIFIKAGANRIVTMDLHSTQIQGFSSKPVDNIYGSLVLMPELEKHFHNLSDKNNCTVLIPDMGSSKLGQSYAKRLEMSFALVDKRRNAHNQSEVVSVVGDLKNQHILIIDDMIDTAGTISNAAKIAKEKGALSVTVAATHGIFSSNALDKLSDDIVDTIFITDTIDISNKEGCKKLKKISSAKIFAETINRIHNGESVSQLFRKVT

SEQ ID NO: 132074 - protein, 193 aa, Unknown
  Bacterial polypetide isolated from the Sargasso Sea
MKIIACNSSKSLADKISNHIDVPLADASVRTFNDREIFVEINENIRGEDVFIIQSTSHPANDHLMELLITIDAARRGSAKRITAVIPYYGYARQDRKTGPRTPITAKLVANLITSAGADRVLTMDLHAGQIQGFFDIPLDNIFSVRPIIDDVKERFNGNKDLVVASPDVGGVVRARAFAKRLEAGLAIADKRR

SEQ ID NO: 132075 - protein, 201 aa, Unknown
  Bacterial polypetide isolated from the Sargasso Sea
SNLITKAGADRVVTVDLHAGQIQGFFDIPVDNLFATPIFARHVRKKIKNKKIICVAPDVGGTERARALGKLLNVGLAIVDKRRPKPGQSQVMNIIGDVKDQTCIIVDDIIDSGGTIINAANALKKRGAKEVYVYITHGVLSGDAVKKIKNSVIKNLVITDTIDNVEKTKNVKNIEVLPISGLMGEAIKRISNSTSVSDLFK

SEQ ID NO: 132076 - protein, 268 aa, Unknown
  Bacterial polypetide isolated from the Sargasso Sea
MSINNLDIFTGTANPELAEEVSKILGIPLSSADVGYFSDGEIKVEIEDNVRGHDTFIIQSTCTPQNKNVMELMLLADALKRSSASKITAIVPYYGYARQDRRVRSARVPISAKVVADMFASVGIDRVLTIDLHSETIQGFFDMPADNVYATKLMMEDIKANNERDEIVVVSPDVGGVVRSRALAKFLDDTDLAIIDKRRAAANQSEVMNIIGEIEGKVCIVPDDIIDTAGTLCNAANALKEKGAKAVKAYITHPVLSGPAIERLEESQ

SEQ ID NO: 132077 - protein, 170 aa, Unknown
  Bacterial polypetide isolated from the Sargasso Sea
MLPQPNLFYQRTEEPLVPDMKLFAGNAVPELAQKVADRLYTKLGNAKVGRFSDGEISVEIHENVRGSDVFIIQSTCAPTNDNLMELIVMIDALRRASAGRITAVIPYFGYARQDRRVRSARVPITAKVVADFLSNVGVDRVLTIDLHAEQIQGFFDVPVDNAFGTPILLA

SEQ ID NO: 132078 - protein, 136 aa, Unknown
  Bacterial polypetide isolated from the Sargasso Sea
MKLLTGNSNKPLSKKISKFLKSKLINSSIRKFADGEIYIEINENIRGNSIFIIQSVSSPANDNLMELLLCIDALKRSSAKNITAVIPYFGYARQDRKVVPRTSISAKLVSNLITKAGADRVVTVDCMQDKFKVFLI

SEQ ID NO: 132079 - protein, 171 aa, Unknown
  Bacterial polypetide isolated from the Sargasso Sea
MKLLTGNSNKVLSKNIARYLKTKLVNSSIRKFSDGEVYVEINENIRGNSIFIVQSISSPANDNLMELLLCIDALKRSSAKNITAVIPYFGYARQDRKVVPRTSISAKLVSNLITKAGADRVVTVDLHAGQIQGFFDIPVDNLFATPIFARHVRKKIKSKKIICVAPRCWRN

SEQ ID NO: 132080 - protein, 214 aa, Unknown
  Bacterial polypetide isolated from the Sargasso Sea
MKILSGTSNPSLSKSISKYLKTKLVNTNIKKFADGEIYVEINENIRGNSVFVIQSSATPANDNLMELLLCIDALRRSSAKNITAVIPYFGYARQDRKVVPRTSISAKLVSNLITNAGAHRVVTVDLHAGQIQGFFDMPVDNLFTTPLFARYIKKNIRSKNLICVSPDAGAIERTRGLATKINADLAIIDKRRPEPGKSKVMNIIGDVKDKDCMI

SEQ ID NO: 132081 - protein, 130 aa, Unknown
  Bacterial polypetide isolated from the Sargasso Sea
MKLLSGTSNKPLSKDIAKFLKSKLVNSSIKNFADGEIYVELNENIRGNSIFIIQSISSPANDNLMELLLCIDALKRSSAKNITAVIPYFGYARQDRKVVPRTSISAKLVSNLITKAGAGVSRSRLRRFRT

SEQ ID NO: 132082 - protein, 108 aa, Unknown
  Bacterial polypetide isolated from the Sargasso Sea
AKNITAVIPYFGYARQDRKVVPRTSISAKLVSNLITKAGADRVVTVDLHAGQIQGFFDIPVDNLFATPIFARHIKKKIKSKNIICVAPDVGGTERARALGKILNVGLA

SEQ ID NO: 132083 - protein, 95 aa, Unknown
  Bacterial polypetide isolated from the Sargasso Sea
MKIIACNSNKILAEAICSYIGVSLANASLRRFADREIFVEINENIRGEDVFIIQSTSHPANDHLMELLITIDAVKRGSAKRITAVIPYYGYARPR

SEQ ID NO: 132084 - protein, 236 aa, Unknown
  Bacterial polypetide isolated from the Sargasso Sea
KDLQQKILLAVIPYFGYARQDRKVAPRTSISAKLVSNLITKAGADRVVTVDLHAGQIQGFFDIPVDNLFATPIFARHVKKNIKGKNLICVSPDVGGVERTRALARKLDIGIAIIDKRRPSPGKSQVMNVIGNVNNKTCIIVDDIIDSGGTIVNAAQALINRGAKEVHVYITHGVLSGEAVEKIRKSKIKKLVITDTIDNLDKIKKAKNIEVLSICNLLGEAIKRISNSTSVSDLFK

SEQ ID NO: 132085 - protein, 136 aa, Unknown
  Bacterial polypetide isolated from the Sargasso Sea
MKIIAGNSNLPLSSDVGKYLQIDLAKASIRRFADEEVYVEIKENIRGEDVFVIESTSYPANDNLMELLVIIDALKRASAKRITAVLPYFGYARQDRKPGPRTPISAKLVANLISTAGADRVLTVDLHAEQIQGFFD

SEQ ID NO: 132086 - protein, 201 aa, Unknown
  Bacterial polypetide isolated from the Sargasso Sea
FNLITKAGADRVVTVDLHAGQIQGFFDLPVDNLFATPIFARHVKRNIKGKNLICVSPDVGGVERSRALARKLDIGIAIIDKRRPAPGKSQVMNVIGNVKNKTCIIIDDIIDSGGTIVNAAQALINRGAKEVHVYITHGVLSGEAVEKIKKSKIKKLVITDTIDNSDKVKKAKNIEVLSIANLLGEAIKRISNSTSVSDLFK

SEQ ID NO: 132087 - protein, 245 aa, Unknown
  Bacterial polypetide isolated from the Sargasso Sea
MKIIAGNSNKSLAEAICAYNGVSLSDTSLRRFADREIFVEINENIRGEDVFIIQSTSHPANDHLMELLITIDAAKRGSAKRITAVIPYYGYARQDRKTGPRTPITAKLVANLITSAGADRVLTMDLHAGQIQGFFDIPLDNIFSAPPIIKDMKQKFSNESNLVIASPDVGGVVRARAFAKRMNAGLAIADKRREKAGESEVMNIIGDVKDKTCILLDDIADSAGTLCNAAKALKDSGAKEIYSYI

SEQ ID NO: 132088 - protein, 276 aa, Unknown
  Bacterial polypetide isolated from the Sargasso Sea
YWIPLANASIRKFADNEIFVEINENIRGEDVFIVQSTSHPANDHLLELLICIDAAKRGSARRITAVIPYYGYARQDRKSGPRTPITAKLVANLITSSGADRVLTMDLHAGQIQGFFDIPLDNIFSAPPIIKDMKEKFKNNKNLVIASPDVGGVVRARAFAKRLNAGLAIADKRREKAGESDVMNIIGDVENKTCILLDDIADSAGTLCNAAKALKNEGAKEIFSYIAHGVLSGKALERIQNSDIEELVLTDSIQASNEIKNTKNIRHISIAPLMGE

SEQ ID NO: 132089 - protein, 109 aa, Unknown
  Bacterial polypetide isolated from the Sargasso Sea
MKLLTGNSNKNLSLKISKFLKTKLVHSSIRKFSDGEIYIEVKENIRGNSIFIVQSVSSPANDNLMELLLCIDALKRSSAKNITAVIPYFGYARQDRKVAPRTSISAKLV

SEQ ID NO: 132090 - protein, 166 aa, Unknown
  Bacterial polypetide isolated from the Sargasso Sea
MKILSGTSNLKLSKDISKNLKLKLINTNIRRFADGEIYIEINENIRGNSVFVIQSTSNPANDNIMELLLVIDALKRSSAKTVTAVIPYFGYARQDRKVAPRTSISAKVVANLISNAGATRVVTVDLHAGQIQGFFDMPVDNLYTAPLFAKYIKKKLSTKKLICVSL

SEQ ID NO: 132091 - protein, 233 aa, Unknown
  Bacterial polypetide isolated from the Sargasso Sea
MTHSRRHIKPAALLTGLTNCPEDPTVPDMKIFAGNAIPELAKKIASRLYIKLGDAEVGRFSDGEVCVQINENVRGSDVFIIQSTCAPTNDNLMELIVMVDALRRASAGRITAVIPYFGYARQDRRVRSARVPITAKVVADFLSSVGVDRVLTVDLHAEQIQGFFDVPVDNVFGSPVLLEDMRKREFVAPVVVSPDIGGVVRARAIAKLLNDADLAIIDKRRPKANVSQVMHII

SEQ ID NO: 132092 - protein, 143 aa, Unknown
  Bacterial polypetide isolated from the Sargasso Sea
MITNGKLKIISGNSNISLAKSICKRIGLLFGTKVKPVKARVERFSDQEIFVEVFENVRGEDMFIVQSTSNPANDNLMELLIIADALKRSSASRVTAIISYFGYARQDRRTKARTPISAKLVANLLCAAGINRVLTLDLHAAQI

SEQ ID NO: 132093 - protein, 213 aa, Unknown
  Bacterial polypetide isolated from the Sargasso Sea
VAPRTSISAKLVSNLITKAGADRVVTVDLHAGQIQGFFDIPVDNLFATPIFSRHIKKNLKKNNLICVAPDVGGVERTRALARKLDIGLAIIDKRRPAPGKSQVMNVIGNVNNKTCIIVDDIIDSGGTIVNAANALMNRGAKEVHVYITHGVLSGEAVNKIKKSKIKKLIVTDTIDNSDKVKKASNIEVLTISNLLAEAIKRISNSTSVSDLFK

SEQ ID NO: 132094 - protein, 162 aa, Unknown
  Bacterial polypetide isolated from the Sargasso Sea
MKIVSCNSNQPLAEGISAYLNQPLTKAIVRRFSDMEVFVEIQENVRGEDTFIIQSTSYPANDNLMELLVAIDALRRGSARRITAVIPYFGYARQDRKSGPRTPISAKLVANLITVAGADRVLTLDLHAAQIQGFFDIPTDNLFSVPVFIENILKSYNPKDLC

SEQ ID NO: 132095 - protein, 276 aa, Unknown
  Bacterial polypetide isolated from the Sargasso Sea
MKVLAGTSNSKLCKDIARQLKLKLVNSNIKRFADGEVYIEINENIRGNSIFVIQSTSNPANDNLMELLICIDALRRSSAKNITAVIPYFGYARQDRKVVPRTAISAKLVSNLITNAGANRILSVDLHAGQIQGFFDIPVDNLFATPIFARYIKNRIKLKNMICVAPDVGGVERTRALSRRLNSSIAIIDKRRPVPGKSEVMNIVGNVKNKNCVIVDDIIDSGGTIVNAAKALKEKGAKDVYVFITHAVLSGQAVNKIEGSQIKKLVTTDTIDNSKK

SEQ ID NO: 132096 - protein, 121 aa, Unknown
  Bacterial polypetide isolated from the Sargasso Sea
MSKKNLDIFTGTANPEFAIEVSKILGIEISDADVGYFSDGELKVEIEENVRGHDTFIIQSTCSPTNKNVMEIMLIADALKRSSASKITAIVPYYGYARQDRRVRSARVPISAKVVADMFAS

SEQ ID NO: 132097 - protein, 154 aa, Unknown
  Bacterial polypetide isolated from the Sargasso Sea
MKLLTGNSNKVLSKNIAKYLKTKLVNSSIRKFADGEIYTEINENIRGNSIFIVQSISSPANDNLMELLLCIDALKRSSAKNITAVIPYFGYARQDRKVVPRTSISAKLVSNLITKAGADRVVTVDLHAGQIQGFFDIPVDNLFSTPIFARHARK

SEQ ID NO: 132098 - protein, 288 aa, Unknown
  Bacterial polypetide isolated from the Sargasso Sea
IAVFSGTANLELAEKICKKLALKQGKADIGRFSDGEISVKINENVRGKDVYIIQPTCSPSHVNLIELILMVDALRWSSAGRITAVIPYYGYARQDRRVRSQRVPISAKVIAGILERSGIDRVLTVELHSEQIQGFFDIPVDNIYGTKVIYEDIKKQKFKDILVVSPDVGGVVRSRALSKFLDIGDLAIIDKRRDEANKSEVMNVIGDVSKKDCLLYDDMADTCGTLCNAADALKAKDARSVSAYITHPVLSGEAIEKINQSSLDQLVVTDTIPLSEEAKSCKKIRCIS

SEQ ID NO: 132099 - protein, 173 aa, Unknown
  Bacterial polypetide isolated from the Sargasso Sea
MKILSGTSNQKLSKDISKQLKLKLVNTNIKRFADGEIYIEINENIRGNSVFVVQSTSNPANDNLMELLLVIDALKRSSAKNITAVIPYYGYARQDRKVAPRTSISAKVVANLLTNAGASRVVTVDLHAGQIQGFFDMPVDNLFTTPLFAKYIKKKLKSKKLICVSPDVGGVQR

SEQ ID NO: 132100 - protein, 280 aa, Unknown
  Bacterial polypetide isolated from the Sargasso Sea
RFSDMEVFVESKENVRGEDMFVIQSTSYPANDNLMELLVTLDALRRASAKRITAVIPYFGYARQDRKSGPRTPISAKLVANLITSAGADRVLTMDLHAGQIQGFFDIPTDNLFAAPVFVKDVKDRYSDIPTIVVSPDVGGVLRARAIARRINAGLAIIDKRREKPGASEVMNIIGDVSKHHCILVDDIVDSGGTLCNAAQALVSAGAISVDAYVTHGVLSGSAVSRILNSPLQNLVTTDSIQATEPIKLASNIRQISIASILGEAIRRVHTESSVSSLFD

SEQ ID NO: 132101 - protein, 118 aa, Unknown
  Bacterial polypetide isolated from the Sargasso Sea
MTAARAEQEKLTPDTRRLRLFSGTSNPGLTREIAAYLGVPDGPRVCKRFADGELYVQIQESIRGCDVFLIQPTCAPVNDHLMELLIMVDACRRASARQITAVVPYYGYARADRKTAGR

SEQ ID NO: 132102 - protein, 216 aa, Unknown
  Bacterial polypetide isolated from the Sargasso Sea
MNDLKIFSGLANEPLTEGICRYLNLPMGKIALGRFPDGEISCKIEEDVRGRDVFIVQPTCPPVNEHIMELLVMIDSFKRASSFRVTAVIPYFGYARQDRKDAGRVPITAKLVANLITRAGADRVLAMDLHAAQIQGFFDVPVDHLYAAPVLNNYFRAMDLSNDDLVVVAADAGSIKRTLGHAARLNVPLAIVDKRRVNAETTKSANVIGANVEGKT

SEQ ID NO: 132103 - protein, 308 aa, Unknown
  Bacterial polypetide isolated from the Sargasso Sea
MKLLTGNSNKNLSQKISKFLKTKLVHSSIKKFSDGEIYIEINENIRGNSIFLIQSISSPANDNLMELLLCVDALKRSSAKNITAVIPYFGYARQDRKVAPRTSISAKLVSNLITKAGADRVVTVDLHAGQIQGFFDIPVDNLFATPIFSRHIKKNVKGKNLICVAPDVGGVERTRALAKKLNIGIAIIDKRRPTPGKSQVMNVIGNVNNKTCIIVDDIIDSGGTIVNAAQALINRGAKEVHVYITHGVLSGEAVEKIKKSHIKNLVITDTIDNSNKLKKAKNIEVLSICNLLGEAIKRISNSTSGQIY

SEQ ID NO: 132104 - protein, 142 aa, Unknown
  Bacterial polypetide isolated from the Sargasso Sea
MSHRVKILACSASDKLANEIANKYGQSIAEYERQSFSDGEFQISINETVRGCDVFIIQSTIPPADNLMEMLLMIDAAKRASAHKIIAVIPYFGWARQDRKDKPRVAIGAKLVANMLVSAGVDRVMTMDLHADQIQGFFEVPV

SEQ ID NO: 132105 - protein, 97 aa, Unknown
  Bacterial polypetide isolated from the Sargasso Sea
GATRVVTVDLHAGQIQGFFDMPVDNLYTAPLFAKYIKKKLNSKKLICVSPDVGGVARTRALATRIKADLSIIDKRRPAPGKSEVMNIIGNVKNKTCI

SEQ ID NO: 132106 - protein, 238 aa, Unknown
  Bacterial polypetide isolated from the Sargasso Sea
LRRSSAGRITAVIPYYGYARQDRRVRSGRVPISAKVMADILERSGIDRVLTVELHSEQIQGFFDIPVDNVYGTKVMRDDVQKLNSDKHLVVSPDVGGVVRSRALAKVLGLSDLAIIDKRRDEANKSEVMNVIGEVKDKECIIVDDIADTAGTLCNAAEALKEQGALKVYAYIVHPVLSGNAIEKISKSKLDQLVVTDTIPLSEDAQNCEKIRIITMAPTLAEAIRRVNNEESISAMFL

SEQ ID NO: 132107 - protein, 271 aa, Unknown
  Bacterial polypetide isolated from the Sargasso Sea
LCRDIARQLKLKLVNSHIKRFADGEVYVEINENIRGNSIFVVQSTSNPANDNLMELLICIDALRRSSAKNITAVIPYFGYARQDRKVVPRTAISAKLVSNLITNAGANRILSVDLHAGQIQGFFDIPVDNLFATPIFARHIKNKIKLNNLTCVSPDVGGVERTRALSRRINSSIAIIDKRRPAPGKSEVMNIVGNVKNKNCVIVDDIIDSGGTIVNAAKALKLKGAKDVYVYITHAVLSGEAINKIEKSQIKKLITTDTIDNSKKMEEAKK

SEQ ID NO: 132108 - protein, 228 aa, Unknown
  Bacterial polypetide isolated from the Sargasso Sea
TAVIPYFGYARQDRKVVPRTSISAKLISNLITKAGADRVVTVDLHAGQIQGFFDIPVDNLYATPIFYRHIKKNLKMNNLVCVSPDVGGVARTRGLSKLLNVNLAIVDKRRPAPGKSEVMNIIGNIKNKICIIVDDIIDSGGTIVNAAKMLKSRGAKEIHVYITHGVLSGDAVKKIKNSPIKNLVITDTIDNSKKINNVKNIQILSISNLLGEALKRISNSTSVSDLFK

SEQ ID NO: 132109 - protein, 143 aa, Unknown
  Bacterial polypetide isolated from the Sargasso Sea
MKLLTGNSNKVLSKNIAKYLKTKLVNSSIRKFADGEIYIEINENIRGNSIFIVQSISSPANDNLMELLLCIDALKRSSAKNITAVIPYFGYARQDRKVVPRTSISAKLVSNLITQAGADRVVTVDLHAGQIQGFFDIPVDNLI

SEQ ID NO: 132110 - protein, 243 aa, Unknown
  Bacterial polypetide isolated from the Sargasso Sea
MKLLSGNSNKPLSKNIAKYLKSKLVNSSIKNFSDGEIYVEINENIRGNSIFLIQSISSPANDNLMELLLCIDALKRSSAKNITAVIPYFGYARQDRKVAPRTSISAKLVSNLITKAGADRVVTVDLHAGQIQGFFDIPVDNLFATPIFARHAKKNIKSKNLICVAPDVGGTERARALGKILNVGIAIVDKRRPKQGQSQVMNIVGDVKGKTCIIVDDIIDSGGTIVKKAKALKNRGAKEVYVY

SEQ ID NO: 132111 - protein, 164 aa, Unknown
  Bacterial polypetide isolated from the Sargasso Sea
MKIVACNSNLELARAISSYIGVKLADASIRKFADHEIFVEINENIRGEDVFIIQSTSHPANDHLMELLIAIDTAKRGSAKRITAVIPYYGYARQDRKTGPRTPITAKLVANLITSAGADRVLTMDLHAGQIQGFFDIPLDNIFSAPPIIKDMKTNFPNSENLVI

SEQ ID NO: 132112 - protein, 256 aa, Unknown
  Bacterial polypetide isolated from the Sargasso Sea
MKKEKLILFAGPASKDLGSQIARYLNEPLGYIQVGAFSDGETSIEVSQNIRGMDIFLVQSTYQPGNEHLMQLLLMADACKRASANSVSAVIPYFGYSRQDRRPRNTRGPVSAKLVADLIETADIKRVITVDLHADQIEGFFSIPVDNIYSSTILMSDMWKQGYPDQVIVSPDVGGVQRARAIARRLGNASLAIIDKRREAANKSEVMNIIGDVDQKTAIIFDDMVDTAGTLCNAAAALKEKGALKTVAYAAHPVLS

SEQ ID NO: 132113 - protein, 167 aa, Unknown
  Bacterial polypetide isolated from the Sargasso Sea
AVPVFIENILQNYNPKDLCIIAPDVGGVLRARAIAKRLNTDLAIIDKRREAPGQSEVMNIIGEVKNRHCLLVDDIVDSGGTLCNAAETLIESGAITVDAYVTHGVLSGGAVARVASSPLNSLVTTDSIAATEAFRVAKNVRHISIAPLLGEAVKRIHMERSVSSLFD

SEQ ID NO: 132114 - protein, 179 aa, Unknown
  Bacterial polypetide isolated from the Sargasso Sea
KNITAVIPYFGYARQDRKVVPRTSISAKLVSNLITNAGANRVVTVDLHAGQIQGFFDMPVDNLFTTPLFSRYIKKNIKSRNFICVSPDAGAIERTRALATKINADLAIIDKRRPEPGKSKVMNIIGNVKGKDCIIIDDIIDSGGTIINAADALMKKGAKSVYVFISHAVLSGNAIKNIQ

SEQ ID NO: 132115 - protein, 186 aa, Unknown
  Bacterial polypetide isolated from the Sargasso Sea
MINSSRSGLVLFSGNGNPALSEEISKQLGVKLGQANVTTFSDGEISISIDENVRGKDVFLIQPTCAPAGDNLLELIIMVDALRRSSAGRITAVIPYYGYARQDRRVRSERVPISAKVMADILERSGIDRVLTVELHSEQIQGFFDIPVDNVYGTKVMRDDILRNNSKNNLVVSPDVGGVVRSRALA

SEQ ID NO: 132116 - protein, 118 aa, Unknown
  Bacterial polypetide isolated from the Sargasso Sea
MKILACNSNIDLAESISKKLNSQLVKAEVKRFSDMEVFVEVQENVRGEDMFIIQSTSYPANDNLMELLVSLDALRRASARRITAVIPYYGYARQDRKSGPRTPISAKLVANLITKAGA

SEQ ID NO: 132117 - protein, 243 aa, Unknown
  Bacterial polypetide isolated from the Sargasso Sea
MPTVKLFSGTGSKYLAEEIAEYYGRRLGKLDINKFSDGEFQPVIKESVRGATIFLVQSSFSPSENLFELLMMIDAAKRASADYIVAVMPYFGFARQDRKDKPRVSIAAKLIANMLTTAGANRIMTMDLHAAQIQGFFDIPFDHLDSSYIFVPYIKKLKLKDVIIAAPDVGGSHRARVYSMHLNTGFVICDKYRKKANEVAEMTVIGDVEGKNVVMIDDLIDTGNTLAKAAKMLKEKGAKSVRA

SEQ ID NO: 132118 - protein, 233 aa, Unknown
  Bacterial polypetide isolated from the Sargasso Sea
AQKVIAVIPYFGYARQDRKVSDRSPITAKLICDLLVKSGIEEVILMDIHAGQIQGFFDVPVNHLYAFPIARDYFIKKYSKKNLIIASPDAGGMERARAFAKRSNIVDLAMTDKRRAAPNVAEITNVIGNVKGKYVLLIDDIIDTGGTAAKSAEALIKAGAKGVSMFCTHGVLSGNAIQNIQNSSIDELIITDTINNQAKLKKVKKIRVLSVADLFAKALRRIIDKKSISNLFS

SEQ ID NO: 132119 - protein, 232 aa, Unknown
  Bacterial polypetide isolated from the Sargasso Sea
MINKQTVGIFSGSASKVLSEEVAKILGIKLGEIDLGKFSDGEIKVEVLENVRGHEAYIIQSTCAPSNANLMELMLITDALKRSSASRITAILPYYGYARQDRRVRSARVPISAKVIADMLNSVGVDRVLTVDLHSESIQGFFDMPADNVYATKIMHDDIKSRTAKDEQILVVSPDVGGVVRARALAKFLDESDLAIIDKRRSSSNESEVMNIIGDVKGKSCIVPDDIIDTAG

SEQ ID NO: 132120 - protein, 277 aa, Unknown
  Bacterial polypetide isolated from the Sargasso Sea
IYVKIEENVRGGDVFVVQSTCFPGNTNLMELLIMIDAFRRASAERITAVIPYYGYARQDRKNEPRVPITSKLIADLVVTAGADRVLTVDLHAGQIQGFFNIPLDHLFAINVLIDYIKEQKLKDLIVISPDAGGVERARAYAKRLNSSLAIIDKRRDIPNEAKAMNIIGDVKGKIAFIVDDMIDTAGTLIEATDALLAAGAREVHACCSHPVLSGPAGERITSSPIKTVITTNTIPLNGELEKNSKIKVLSVASLLGEAIIRIHQETSVSSLFDSTKD

SEQ ID NO: 132121 - protein, 232 aa, Unknown
  Bacterial polypetide isolated from the Sargasso Sea
ACKRASAASVTALIPYFGYSRQDRRPRASRVPISAKLVAKLIGTAGIDRILTVDLHADQIQGFFDIPVDNVYASPVLLGDAWKQKYDDIVVVSPDVGGVARARALAKRLADADLAIIDKRRPQANMSEVMNVIGEVENKVCILIDDMVDTAGTLCQACATLKERGATRVVAYITHPVLSGPAIERINGSVMDELVVTDTIPLNEDAKACKKIRQLSVAELLAETVRRISDAE

SEQ ID NO: 132122 - protein, 197 aa, Unknown
  Bacterial polypetide isolated from the Sargasso Sea
MKLLSGNSNKPLSKNIAKYLKSKLVNSSIRNFSDGEIYVEINENIRGNSIFLIQSVSSPANDNLMELLLCIDALKRSSAKNITAVIPYFGYARQDRKVAPRTSISAKLVSNLITKAGADRVVTVDLHAGQIQGFFDIPVDNLFATPIFARHVKKKIKSKNLICVAPDVGGTERARALGKIFNVGLAIVDKRRPKPGQ

SEQ ID NO: 132123 - protein, 264 aa, Unknown
  Bacterial polypetide isolated from the Sargasso Sea
MVFTGNANPALADAIAKNIGVPLGRASISKFSDGEVSVELNENVRGKDVFVIQPTCAPTNDSIMEVLLMSDALHRASANRITAVIPYFGYARQDRRVRSARVAISAKVVADMIGAVGVNRVLTVDLHAEQIQGFFSIPVDNVYGSPVLTDDIERQNYSNLTVVSPDVGGVVRARAVAKQINADLAIIDKRRPTANEAQIMHIIGDVKGKSCLIVDDMVDTAGTLCKAADALKDHGATKVVAYCTHPVLSGPAIQNIEGSNLDSL

SEQ ID NO: 132124 - protein, 178 aa, Unknown
  Bacterial polypetide isolated from the Sargasso Sea
GYFDIPCDHIYGSPVLIDYLESLNLEEVVVVSPDVGGVARARAFAKLMKDAPLAIIDKRRSAHNIAESLTVIGEVKGKTAILIDDMIDTGGTICSGANLLKKEGAKRIFACASHAVFSPPSYERLSTKDLFEQVIVTNSIPVLVKDNFPQLKVLSVANMLGEAIWRIHEESSVSSMFR

SEQ ID NO: 132125 - protein, 110 aa, Unknown
  Bacterial polypetide isolated from the Sargasso Sea
MSELVHPKIISGNSNITLSKGIASWASSLSRSQIDLVKARVEQFNDQEIFVEVFENVRNEDMFIIQSTSNPANDNIMELLIIADALSRSSAQRITAVIPYFGYARQDRRT

SEQ ID NO: 132126 - protein, 297 aa, Unknown
  Bacterial polypetide isolated from the Sargasso Sea
MNNTMLFCGNTNKLLAQSVAEHLKMPLAKATIDRFKDGEVMVEILENVRGKDTFIIQSTCSPVNDSIMEILMIADALKRASVASVTAVIPYFGYGRQDRRPRSARVPISAKLIADLIMSSGINRIITVDLHADQIQGFFNIPADNIYFSRVISDDIKENQIGPCAIVSPDVGGVVRARAVVKKIEGSHLVIVDKRRQAPNKTEVMNIIGDVEGLDCILIDDIIDTAGTLTQAAKALKAAGARRIFAYCTHAVLSGPALERIENSEIDLYTVSDSIPLQPKVKKSTKIKVLPFRVFTR

SEQ ID NO: 132127 - protein, 120 aa, Unknown
  Bacterial polypetide isolated from the Sargasso Sea
MKILSGTSNLKLSKDISKNLKLKLINTNIRRFADGEIYIEINENIRGNSVFVIQSTSNPANDNIMELLLVIDALKRSSAKTITAVIPYFGYARQDRKVAPRTSISAKVVANLISNAGATR

SEQ ID NO: 132128 - protein, 272 aa, Unknown
  Bacterial polypetide isolated from the Sargasso Sea
MKLLTGNSNKILSKNIAKYLRSKLVNSSIRKFSDGEIYVEINENIRGNSIFIIQSVSSPANDNLMELLLSIDALKRSSAKNITAVIPYFGYARQDRKVVPRTSISAKLVSNLITQAGADRVVTVDLHAGQIQGFFDIPVDNLFATPIFARHIKKKIKSKKIICVAPDVGGTERARSLGKLLNVGLAIVDKRRPKPGQSQVMNVIGDVKGKTCIIVDDIIDSGGTIVNAAKALKARGAKEVYVYITHGVLSGDAVKKIKNSVIKNLVITDTID

SEQ ID NO: 132129 - protein, 225 aa, Unknown
  Bacterial polypetide isolated from the Sargasso Sea
IPYFGYARQDRKVVPRTSISAKLVSNLITKAGADRVVTVDLHAGQIQGFFDIPVDNLFATPIFARHIKKRIKNKNLICVAPDVGGVERARALARKLDVGLSIIDKRRPVPGKSQVMNVVGSVSGKTCIIVDDIIDSGGTIVNAADALIKRGAKEVHVYITHGVLSGEAVKKIKKSKIKKLVITDTINNSDKLKNSTNIEVLTISNLLAEAIKRISNSTSVSDLFK

SEQ ID NO: 132130 - protein, 270 aa, Unknown
  Bacterial polypetide isolated from the Sargasso Sea
KILSQKISKFLKNRLVNSSIRKFSDGEIYTEINENIRGNSIFVIQSISSPANDNLMELLLCIDALKRSSAKNITAVIPYFGYARQDRKVVPRTSISAKLVSNLITKAGADRVVTVDLHAGQIQGFFDIPVDNLFATPIFARHVKKKIKTKNLICIAPDVGGTERARALGKLLNVGLAIVDKRRPKAGQSQVMNIIGDVRGKTCIIVDDIIDSGGTIVNAAAALKKRGAKDVHVYVTHGVLSGGAENKIKKSNIKNLVITDTIDNTVKVKN

SEQ ID NO: 132131 - protein, 295 aa, Unknown
  Bacterial polypetide isolated from the Sargasso Sea
ISKYLKNRLVHSTIKKFSDGEIYVEINENIRGNSIFVIQSVSSPANDNLMELLIIIDALKRSSAKNITAVIPYFGYARQDRKVVPRTSISAKLVSNLITKAGADRVVTIDLHAGQIQGFFDIPVDNLFATPIFARHIKRKIKNKNLICVAPDVGGTERARALGKFLNAGLAIIDKRRPAPGKSEVMNVIGYVKGKTCIIVDDIIDSGGTIVNASNALIERGAKEVHVYVTHGVLSGKAVEKIKNSKIKRLIITDTINNSDRVKGAKNIEILTISQLVGEAIKRISNSTSVSDLFR

SEQ ID NO: 132132 - protein, 158 aa, Unknown
  Bacterial polypetide isolated from the Sargasso Sea
MAIYEELKVFSGNSNNPLATRVAEYLDIDLGTIEVFKFSNDNTFVRIQENIRERDVFLIQSFCMPVNDSIMEMLIMIDAAKRASAGRITAVIPYYGYGRTDKKDQPRVPITSRLVADLLTTAGANRVLTMDLHAGQIQGFFNIPVDELTALPNYCALF

SEQ ID NO: 132133 - protein, 232 aa, Unknown
  Bacterial polypetide isolated from the Sargasso Sea
AKNITAVIPYFGYARQDRKVAPRTSISAKLVSNLITKAGADRVVTVDLHAGQIQGFFDIPVDNLFATPIFARHVKKNIKSKNIICVAPDVGGTERARALGKILDVGLAIVDKRRPKPGQAKVMNIVGNVKDKTCIIVDDIIDSGGTIVSAAKALKDKGAKEVYVYITHGVLSGEAVQKIKKSAIKNLVITDTINNLERVKKAKNIEVLTISNLMGEAIKRISNSTSVSDLFK

SEQ ID NO: 132134 - protein, 310 aa, Unknown
  Bacterial polypetide isolated from the Sargasso Sea
LFAGPASKDLGSQIARYLNEPLGYIQVGAFSDGETSIEVSQNIRGMDIFLVQSTYQPGNEHLMQLLLMADACKRASAKSVSAVIPYFGYSRQDRRPRNIRGPVSAKLVADLIETADIKRLITVDLHADQIEGFFSIPVDNIYSSTILMSDMWRQGYPDQVIVSPDVGGVQRARAIARRLGNASLAIIDKRREAANKSEVMNIIGDVDQKTAIIFDDMVDTAGTLCNAAAALKEKGALKTVAYAAHPVLSGPAIERIADSELDELVVTDTIPLTQEAKDTGKIRQLSIAELLGETIERIVADQSVSSLYAE

SEQ ID NO: 132135 - protein, 273 aa, Unknown
  Bacterial polypetide isolated from the Sargasso Sea
MKLLTGNSNKALSKNIAKYLKTKIVNSSIRKFADGEIYIEINENIRGNSIFIIQSISSPANDNLMELLLCIDALKRSSAKNITAVIPYFGYARQDRKVVPRTSISAKLVSNLITKAGADRVVTVDLHAGQIQGFFDIPVDNLFATPIFARHVKKKVKSKKMICVAPDVGGTERARALGKILNVGLAIVDKRRPKPGQSQVMNIIGDVKGKTCILVDDIIDSGGTIVNAATALKKRGAKEVYVYITHGVLSGEAVKKIKNSVIKNLVITDTIDN

SEQ ID NO: 132136 - protein, 250 aa, Unknown
  Bacterial polypetide isolated from the Sargasso Sea
NDNLMELLLCIDALKRSSAKNITAVIPYYGYARQDRKVVPRTSISAKLVSNLITKAGADRVVTIDLHAGQIQGFFDIPVDNLFGTPIFARHAKKNIKDKNIICVAPDVGGVERARALGKLLDVELAIIDKRRPSPGKSKVMNIIGNVKDKTCIMVDDIIDSGGTIVNAAKALKDRGAKDVYVYVTHGVLSGEAVQKIKKSLIKKLVITDSIDNNAKVKRAQNIEVLTVSNLMGEAIKRISNSTSVSDLFK

SEQ ID NO: 132137 - protein, 275 aa, Unknown
  Bacterial polypetide isolated from the Sargasso Sea
KLKLINTNIRRFSDGEIYIEINENIRGNSVFVIQSTSNPANDNIMELLLVIDALRRSSAKTVTAVIPYFGYARQDRKVAPRTSISAKVVANLISNAGATRVVTVDLHAGQIQGFFDMPVDNLYTAPLFSKYIKKKLGSKKLICVSPDVGGVARTRALATRIKADLAIIDKRRPAPGKSEVMNIIGDVKNKTCIIVDDIIDSGGTIVNAVDALKRNGANEVYVFITHAVLSGDAVKKIKNSKIKKLIITDTIDNAQKIKNNNKIEVLSIASLMSEA

SEQ ID NO: 132138 - protein, 134 aa, Unknown
  Bacterial polypetide isolated from the Sargasso Sea
MKNKSVDIFTGTANPEFAQEVSDILGIKISAADVGYFSDGELKVEIEENVRGHDTFIIQSTCSPTNKNVMEIMLIADALKRSSASRITAVVPYYGYARQDRRVRSARVPISAKVVADMFASVGIDRVLTIDLHS

SEQ ID NO: 132139 - protein, 209 aa, Unknown
  Bacterial polypetide isolated from the Sargasso Sea
PITAKVVADFLSSVGVDRVLTVDLHAEQIQGFFDVPVDNVFGSPVLLEDMKERHFDDVVIVSPDIGGVVRARAIAKLLDDTDLAIIDKRRPQANVSQVMHIIGDVEGRDCIIVDDMIDTGGTLCKAAEALKEHGAKRVFAYATHPILSGKAAENLRDSVIDEVIVTDSIPLSDELKALDKVKVLTLADMLAETIRRISNEESISAMFEH

SEQ ID NO: 132140 - protein, 202 aa, Unknown
  Bacterial polypetide isolated from the Sargasso Sea
ISCTNNRDLSKEIAKKLNKKLVDTKIIRFADGEVYVEINENMRGQDVFVIQSTCTPVNDSIMELLICIDALRRASAKSITAVLPYFAYARQDRKVSPRSPISAKLFANLLMGSGASRVLTMDLHANQIQGFFDIPVDNLFAAPTFVQHVKKNIKSKNLVCVAPDVGGVERARAIAKRLSADLAIIDKRRSGPGTSEVMNVIG

SEQ ID NO: 132141 - protein, 160 aa, Unknown
  Bacterial polypetide isolated from the Sargasso Sea
MKIIAGNSNLPLSSDVGKYLQIDLAKATIRRFADEEVYVEIKENIRGEDVFVIESTSYPANDNLMELLVIIDALKRASAKRITAVLPYFGYARQDRKPGPRTPISAKLVANLISTAGADRVLTVDLHAEQIQGFFDIPTDNLFASPVFSRDIKINLIYQI

SEQ ID NO: 132142 - protein, 235 aa, Unknown
  Bacterial polypetide isolated from the Sargasso Sea
GSAKRITAVIPYYGYARQDRKTGPRTPITAKLVANLITSAGADRVLTMDLHAGQIQGFFDIPLDNIFSAPPIIKDMKEKFSNNDNLVIASPDVGGVVRARAFAKRMSAGLAIADKRREKAGESEVMNIIGDVKDKTCILLDDIADSAGTLCNAAKALKDNGAKEIFSYIAHGVLSGEALKRIENSAIKELVLTDSIEASNDVKNTKNIRHISIAPLMGEAIKRINSDSSVSALFD

SEQ ID NO: 132143 - protein, 260 aa, Unknown
  Bacterial polypetide isolated from the Sargasso Sea
FIIQSTNGPSENIIELALMVDAAVRASADTVTVVMPYFGYGRQDRKDQPRVPISARVMIDIMTTMGANRIITMDLHSTQIQGFAKIPLDNLYSRAVLFSAIKDQEFSPDQTTVLAPDIGSAKMSQGYARNLGMHFAVIDKRRFSPNKAEVSHLIGDMQDKDVLIIDDMIDTAGTIINASHAALENGAKSVTVVATHGVFSGDSINNLNNSDIKKIIITDTIQIPKEKFFDKLTIVSVKDVFSEAVSRIHNGESVSALFQF

SEQ ID NO: 132144 - protein, 108 aa, Unknown
  Bacterial polypetide isolated from the Sargasso Sea
MKIIACNSNKILAEAICSYNGVKLANASLRRFADREIFVEINENIRGEDVFIIQSTSHPANDHLMELLITIDAAKRGSAKRITAVIPYYGYARQDRKTGPRTPITAKL

SEQ ID NO: 132145 - protein, 208 aa, Unknown
  Bacterial polypetide isolated from the Sargasso Sea
MKIISGNSNLELAQEIANYTKNSLAETTMTRFSDKEIFVEIGENVRGEDVFLIQSTSFPANDNLMELLVAIDALKRGSAARITAVLPYFGYARQDRKTGPRTPISAKLVANLITTAGANRVLTMDLHAGQIQGFFDIPLDNLYASNLFIADIKEKKREDNLVFVSPDVGGVLRARSFAKKLNADLAIIDKRRDAPGVSNAMNVIGSVE

SEQ ID NO: 132146 - protein, 207 aa, Unknown
  Bacterial polypetide isolated from the Sargasso Sea
SAKLLANLISTAGADRALMVDLHAGQIQGFFDIPTDNLFAAPVLIEDIKQKFSGKDFVIISPDVGGVVRARAIAKRLDCDLAIIDKRREKASVSEVVNIIGEIKNKHCILIDDICDTAGTLTNAAKALKVEKAKSVYAYITHGVLSGPALERINNSPIDKMVITDSILAREDVRSSEKIEQLSIAPLIGEAIGRITENRSVSSLFAL

SEQ ID NO: 132147 - protein, 195 aa, Unknown
  Bacterial polypetide isolated from the Sargasso Sea
MKIIAGNSNKSLAEAICTHNGVSLADTSLRRFADREIFVEINENIRGEDVFIIQSTSHPANDHLMELLITIDAAKRGSAKRITAVIPYYGYARQDRKTGPRTPITAKLVANLITSAGADRVLTMDLHAGQIQGFFDIPLDNIFSAPPIIKDMKEKFSNESNLVIASPDVGGVVRARAFAKKMNAGLAIADKRREK

SEQ ID NO: 132148 - protein, 238 aa, Unknown
  Bacterial polypetide isolated from the Sargasso Sea
MKLLTGNSNKNLSQKISKFLKTKLVHSSIKKFSDGEIYIEINENIRGNSIFLIQSVSSPANDNLMELLLCIDALKRSSAKNITAVIPYFGYARQDRKVAPRTSISAKLVSNLITKAGADRVVTVDLHAGQIQGFFDIPVDNLFATPIFSRHIKKNIKGKNLICVAPDVGGVERTRALARKLDLGIAIIDKRRPTPGKSQVMNVVGNVNNKTCIIVDDIIDSGGTIVNAAQALLDRGAK

SEQ ID NO: 132149 - protein, 251 aa, Unknown
  Bacterial polypetide isolated from the Sargasso Sea
SPANDNLMELLLCIDALKRSSAKNITAVIPYFGYARQDRKVVPRTSISAKLVSNLITKAGADRIVTVDLHAGQIQGFFDLPVDNLFSTPIFARHAKKRIKSRKIICVAPDVGGTERARALGKLLNVGLAIVDKRRPKPGQSQVMNVIGDVKGQTCIIVDDIIDSGGTIVNAAKALKNRGAKEVYVYITHGVLSGEAVKKIKNSVIKNLVITDTIDNVEKTKNVKNIEVLSISSLMGEAIKRISNSTSVSDL

SEQ ID NO: 132150 - protein, 155 aa, Unknown
  Bacterial polypetide isolated from the Sargasso Sea
MKILSGTSNPSLSKSISKQLKLKLVNTNIKNFADGEIYVEINENIRGNSVFVIQSTSRPANDNLMELLLCIDALRRSSAKNITAVIPYFGYARQDRKVVPRTSISAKLVSNLITNAGAHRVVTVDLHAGQIQGFFDMPVDNLFTTPIFARYIKKN

SEQ ID NO: 132151 - protein, 114 aa, Unknown
  Bacterial polypetide isolated from the Sargasso Sea
MRIIAGTSNLPLSEKVAKYLGDKLTDASIRRFADEEVYVEIKENIRGEDVFIIESLSFPANDNLMELLVTIDALKRASAKRITAVIPYYGYARQDRKPGPRTPISAKLVANLIT

SEQ ID NO: 132152 - protein, 227 aa, Unknown
  Bacterial polypetide isolated from the Sargasso Sea
VFPYYGYARQDRKTGPRTPITAKLVANLITSAGAHRVLTMDLHAGQIQGFFDIPLDNIFSAPPILKDIKEKFNGNTDLVVASPDVGGVVRARAFAKRLNAGLAIADKRREKAGESEVMNIIGDVKNKICILLDDIADSAGTLCNAAEALQKSGAKEIYSYIVHGVLSGQALTKISSSAIKELVLTDTIEPSNDVKNTKNIRHISIAPLMGEAIKRISSDASVSALFD

SEQ ID NO: 132153 - protein, 265 aa, Unknown
  Bacterial polypetide isolated from the Sargasso Sea
MDVFLVQSTYQPGNEHLMQLLLMADACKRASAKSVSAVIPYFGYSRQDRRPRSTRGPVSAKLVADLIETADIKRLITVDLHADQIEGFFSIPVDNIYSSTILMSDMWRQGYQDQVIVSPDVGGVQRARAIARRLGNASLAIIDKRREAANKSEVMNIIGDVDQKTVIIFDDMVDTAGTLCNAAAALKEKGALKTVAYAVHPVLSGPAIERIADSELDELVVTDTIPLTQEAKDSGKIRQLSIAELLGETIERIVADQSVSSLYAE

SEQ ID NO: 132154 - protein, 218 aa, Unknown
  Bacterial polypetide isolated from the Sargasso Sea
MKLLTGNSNKVLSKNIAKYLKTKLVNSSIRKFSDGEIYVEINENIRGNSIFIIQSISSPANDNLMELLLCIDALKRSSAKNITAVIPYFGYARQDRKVVPRTSISAKLVSNLITKAGADRVVTVDLHAGQIQGFFDIPVDNLFATPIFARHARKKIKSKKIICVAPDVGGTERARALGKLLNVGLAIVDKRRPKPGQSQVMNVIGDVKDQTCIIVDDI

SEQ ID NO: 132155 - protein, 146 aa, Unknown
  Bacterial polypetide isolated from the Sargasso Sea
MKLLTGNSNKTLSKDIAKYLKSKLVNSSIRKFADGEIYIEINENIRGNSIFIIQSVSSPANDNLMELLLCIDALKRSSAKNITAVIPYFGYARQDRKVVPRTSISAKLVSNLITKAGADRIVTVDLHAGQIQGFFDIPVDNLFATP

SEQ ID NO: 132156 - protein, 244 aa, Unknown
  Bacterial polypetide isolated from the Sargasso Sea
MKILSGTSNLKLSKDISRKLKLKLVNTNIRRFSDGEIYIEINENIRGNSVFVIQSTSNPANDNLMELLLVIDALKRSSAKNITAVIPYFGYARQDRKVAPRTSISAKVVANLITNAGASRVVTVDLHAGQIQGFFDMPVDNLFTTPLFAKYIKKKFNNKKLICVSPDVGGVQRTRGLATRLKADLAIIDKRRPVPGKSQVMNIIGNVKNKTCIIVDDIIDSGGTIVNAVDALKKNGAQEVYVFI

SEQ ID NO: 132157 - protein, 129 aa, Unknown
  Bacterial polypetide isolated from the Sargasso Sea
MKLLTGNSNKILSKNIAKYLKSKLVNSSIRKFSDGEIYIEINENIRGNSIFIIQSVSSPANDNLMELLLSIDALKRSSAKNITAVIPYFGYARQDRKVVPRTSISAKLVSNLITQAGADRVVTVDLHAG

SEQ ID NO: 132158 - protein, 135 aa, Unknown
  Bacterial polypetide isolated from the Sargasso Sea
AKQINTDLAIIDKRRPTANEAQIMHIIGDVEEKSCLIVDDMVDTAGTLCKAADALKDHGATRVFAYCTHPVLSGPAIENIEKSSLDSLVVTDTIPLNDTARNCKRIRQLSMAKLLGESIRRVSNEESISAMFDNT

SEQ ID NO: 132159 - protein, 245 aa, Unknown
  Bacterial polypetide isolated from the Sargasso Sea
EFATEVSEILGIKISKADVGYFSDGELKVEIEENVRGHDTFIIQSTCSPTNKNVMEIMLIADALKRSSASRITAVVPYYGYARQDRRVRSARVPISAKVVADMFASVGIDRVLTIDLHSETIQGFFDMPADNVYATKFMVDDIKDNNDRNEVVVVSPDVGGVVRSRALAKLLDDTDLAIIDKRRAVANESEVMNIIGEVEGKVCIVPDDIIDTAGTLCNAAKALKDKGAKAVKAYITHPVLSGPA

SEQ ID NO: 132160 - protein, 165 aa, Unknown
  Bacterial polypetide isolated from the Sargasso Sea
MKLLSGTSNKPLSKDIAKFLKSKLVHSSIRNFADGEIYIELNENIRGNSIFIIQSISSPANDNLMELLLCIDALKRSSAKNITAVIPYFGYARQDRKVVPRTSISAKLVSNLITKAGADRVVTVDLHAGQIQGFFDIPVDNLFSTPIFARHIKKNIKSKNIVCVA

SEQ ID NO: 132161 - protein, 190 aa, Unknown
  Bacterial polypetide isolated from the Sargasso Sea
MKILTGNSNKNLSKKISKYLKNKLVNSSIKKFSDGEIYIEINENIRGNSIFIIQGISSPANDNLMELLLCIDALKRSSAKNITAVIPYFGYARQDRKVVPRTSISAKLVSNLITKAGADRIVTVDLHAGQIQGFFDIPVDNLFATPIFARHIKRKIKSKNLICVAPDVGGVERARALGRKLDVGLAIIDK

SEQ ID NO: 132162 - protein, 109 aa, Unknown
  Bacterial polypetide isolated from the Sargasso Sea
MKIIACNSNKFLAEAISSYIGVKLANTSLRRFADREIFVEINENIRGEDVFIIQSTSHPANDHLMELLITIDAAKRGSAKRITAVIPYYGYARQDRKTGPRTPITAKLV

SEQ ID NO: 132163 - protein, 185 aa, Unknown
  Bacterial polypetide isolated from the Sargasso Sea
MSDYESLKVFSGNSNKELSDKIAKKIGIPIGKAFVGRFSDGEVQIELHEDVRGKDIFVIQSTCNPTDENLMELLILVDALKRSSAARVTTVIPYFGYSRQDRRVRSMRVPISAKVVANLISTVGTDRLLTVDLHSDQEQGFFDIPVDNIYGSPILISDMWKKKYPNIVVVSPDTGGVVRARAVAK

SEQ ID NO: 132164 - protein, 133 aa, Unknown
  Bacterial polypetide isolated from the Sargasso Sea
ARRINANLAIIDKRREKPGSSEVMNIIGDVSNHHCLIVDDIIDSGGTICNAAQALIDVGAISVDAYVTHGVLSGSAVSNISNSPLSSLVTTNSIKATEAVKMSGNIRQISIAPIIGEAIRRVHMEQSVSSLFE

SEQ ID NO: 132165 - protein, 258 aa, Unknown
  Bacterial polypetide isolated from the Sargasso Sea
CKYLDIPLGECEVFKFSNDNTFVKFKENIRERDVFVVQTFSDPVNDHIMELLIMIDAAKRASAGRITAVIPHYSYGRSDKKDQPRIPITARLVANLLTVAGADRVLTVDLHAGQIQGFFNIPVDELTAVPMLAGYFKDNHVDIEVASATDAGDVKRTRDTGRYLNVPISLVEKHRIGNEDKVESMSLVGDVTNKSTLIVDDEVGTGGTVIATAEALANHGAREIYCAATHGVMSGDAREILESSSIKEIVVTDTLPVN

SEQ ID NO: 132166 - protein, 215 aa, Unknown
  Bacterial polypetide isolated from the Sargasso Sea
RKVVPRTSISAKLVSNLITQAGADRVVTVDLHAGQIQGFFDIPVDNLFSTPIFARHARKKIKSKKIICVAPDVGGTERARALGKLLNVGLAIVDKRRPKPGQSEVMNIIGDVKGQTCILVDDIIDSGGTIVNAAKALKSRGAKDVYVYITHGVLSGDAIKKIKSSVIKNLVITDTIDNVHKTKNVKNIEVLPISGLMGEAIKRISNSTSVSDLFK

SEQ ID NO: 132167 - protein, 129 aa, Unknown
  Bacterial polypetide isolated from the Sargasso Sea
MKILSGTSNLKLSKDISKKLKLKLVNTNIRRFADGEIYIEINENIRGNSVFVIQSTSNPANDNLMELLLVVDALKRSSAKNITAVIPYFGYARQDRKVAPRTSISAKVVANLITNAGASRVVTVDLHAG

SEQ ID NO: 132168 - protein, 233 aa, Unknown
  Bacterial polypetide isolated from the Sargasso Sea
MKLLSGNSNKPLSKNIAKYLKSKLVNSSIRKFSDGEIYVEINENIRGNSIFIIQSVSSPANDNLMELLLCIDALKRSSAKNITAVIPYFGYARQDRKVVPRTSISAKLVSNLITKAGADRVVTVDLHAGQIQGFFDIPVDNLFATPIFARHAKKKIKSKNLICVAPDVGGTERARALGKILNVGLAIVDKRRPKPGQSQVMNIVGDVKGKTCIIVDDIIDSGGTIVNSAKALK

SEQ ID NO: 132169 - protein, 164 aa, Unknown
  Bacterial polypetide isolated from the Sargasso Sea
MLNFIQSQAIKNPVVVSPDMGGVARARALAKSLDCDLAIIDKRRPKPNEAQVMNIIGDVQDRHCLILDDIVDTAGTLCKAAGALMKKGASAVSAYCVHPILSGPALENIAASSLSDLVVTDSIPLSAAAQKMPVIKQLSLSNMLGEIISRVSLEKSLSDVFAEE

SEQ ID NO: 132170 - protein, 113 aa, Unknown
  Bacterial polypetide isolated from the Sargasso Sea
MKLLTGNSNKNLSQKISKYLKTKLVHSSIKKFADGEIYIEINENIRGNSIFLIQSISSPANDNLMELLLCIDALKRSSAKNITAVIPYFGYARQDRKVAPRTSISAKLVSNLI

SEQ ID NO: 132171 - protein, 176 aa, Unknown
  Bacterial polypetide isolated from the Sargasso Sea
MYKESVLMKILSGTSNPTLSKNISRHLKSKLVNTNIKKFADGEIYVEINENIRGNSVFVIQSSATPANDNLMELLLCIDALRRSSAKSITAVIPYFGYARQDRKVVPRTSISAKLVSNLITNAGAHRVVTVDLHAGQIQGFFDMPVDNLFTTPLFARYIKKNIKSKNFICVSPDAG

SEQ ID NO: 132172 - protein, 196 aa, Unknown
  Bacterial polypetide isolated from the Sargasso Sea
NAGASRVLTVDLHAGQIQGFFDMPVDNLFTTPLFARYIKKRLKSKKIICVSPDVGGVQRTRGLANRINADLAIIDKRRPKPGKSKVMNIIGNVRGKTCIIVDDIIDSGGTIVNAVDALKKSGATEVYVFITHAVLSGDAVAKIKRSKIKKLIITDTIDNSQKIKNNNKIEVLSISSLMAEAIKRISNSTSVSDLFN

SEQ ID NO: 132173 - protein, 221 aa, Unknown
  Bacterial polypetide isolated from the Sargasso Sea
GYARQDRKVAPRTSISAKLVSNLITKAGADRVVTVDLHAGQIQGFFDIPVDNLFATPIFARHVKRNLNKRNLICVSPDVGGVERTRALAKKLNVGIGIIDKRRPAPGKSQVMNVIGNVKGKTCIIIDDIIDSGGTIVNAAQALINRGANEVHVYITHGVLSGEAVDKIKKSRIKKLVITDTIDNSSKIKKAKNIEVLTISNLLAEAIKRISNSTSVSDLFK

SEQ ID NO: 132174 - protein, 164 aa, Unknown
  Bacterial polypetide isolated from the Sargasso Sea
MKILSGTSNLKLSKDISKNLKLKLINTNIKRFADGEIYIEVNENIRGNSVFVIQSTANPANDNIMELLLVIDALRRSSAKTITAVIPYFGYARQDRKVAPRTSISAKVVANLISNAGASRVVTVDLHAGQIQGFFDMPVDNLYTAPLFAKYIKKKLNNKKLICV

SEQ ID NO: 132175 - protein, 152 aa, Unknown
  Bacterial polypetide isolated from the Sargasso Sea
MKILSCNSNLTISKKISEYLNINLIDANITKFADKEVFVEVNENVRGEDIFVIQSTQYPVNDNIMELLITIDALKRASAKRITAVIPYFGYARQDRKSSPRTPISAKLVANLITVAGVDRVLTLDLHAGQIQGFFDIPLDNLTSAPVFSRHI

SEQ ID NO: 132176 - protein, 214 aa, Unknown
  Bacterial polypetide isolated from the Sargasso Sea
MKILSGTSNLKLSKSIAKNLKLKLINTNIRRFADGEIYIEINENIRGNSVFVVQSTSHPANDNIMELLLVIDALKRSSAKTITAVIPYFGYARQDRKVAPRTSISAKVMANLITNAGATRVVTVDLHAGQIQGFFDMPVDNLYTAPLFAKYIKKKLNNKKLICVSPDVGGVARTRDLANRIKADLAIIDKRRPAPGKSEVMNILGEVKNKTCII

SEQ ID NO: 132177 - protein, 171 aa, Unknown
  Bacterial polypetide isolated from the Sargasso Sea
DHIYGSPVLIDYLESLDLEEIVVVSPDVGGVARARAFAKLMNDAPLAIIDKRRAAHNIAESLTVIGEVKGKTAILIDDMIDTGGTICSGANLLKKEGANRIFACASHAVFSPPSHERLSSKNLFEQVIVTNSIPVIYKDNFPQLKVLSVANMLGEAIWRIHEESSVSSMFR

SEQ ID NO: 132178 - protein, 119 aa, Unknown
  Bacterial polypetide isolated from the Sargasso Sea
MKLLTGNSNKKLSEKIAKYLKESLVNSSIRKFKDGEIYIEINENIRGNNIFIIQSISSPANDNLMEMLLCIDALKRSSAKNITAVIPYFGYARQDRKVVPRTSISAKLVSNLITKAGRR

SEQ ID NO: 132179 - protein, 268 aa, Unknown
  Bacterial polypetide isolated from the Sargasso Sea
MKILSGTSNLKLSKDISKNLKLKLINTNIRRFSDGEIYIEINENIRGNSVFVIQSTSNPANDNIMELLLVIDALKRSSAKTITAVIPYFGYARQDRKVAPRTSISAKVVANLISNAGATRVVTVDLHAGQIQGFFDMPVDNLYTAPLFAKYIKKKLNTKKLICVSPDVGGVARTRALATRIKADLAIIDKRRPAPGKSEVMNIIGNVKNKTCIIVDDIIDSGGTIVNAVDALKKSGANEVYVFITHAVLSGDAVIKIKKSKIKKLVIT

SEQ ID NO: 132180 - protein, 114 aa, Unknown
  Bacterial polypetide isolated from the Sargasso Sea
MKILTGTGNPKLAELIATSVGVSLCETNITRFPDGEIFVKIVDNVRGEDLFIIQSVSIEPNNMLMELLIMIDAAKRASAKRITAVLPYYGYARQDRKDQPRVPITAKLVANLLV

SEQ ID NO: 132181 - protein, 308 aa, Unknown
  Bacterial polypetide isolated from the Sargasso Sea
MKIISGNSNIELSKEISEYLKIQLSETTMTRFSDKEIFVEIGENVRGEDVFLVQSTSFPANDNLMELLVAIDALKRGSAKRITAVLPYFGYARQDRKTGPRTPISAKLVANLITTAGANRVLTMDLHAGQIQGFFDIPLDNLYATNMFMNDIKSNKRDENLVFVSPDVGGVLRARAFAKKLDADLAIIDKRRDAPGVSNAMNVIGSVDGKKCIIVDDLVDSGGTICNAAKALKENGATEVYGYCSHGVYSGKALDNINNSVLEEMVCTNTIKPTFEVPSSMRYLSVAPLFGEAIKRINNETSISSLFD

SEQ ID NO: 132182 - protein, 324 aa, Unknown
  Bacterial polypetide isolated from the Sargasso Sea
MDATPRFQTVPDMKLFAGNATPELAQKIADRLFIKLGNAAVGRFSDGEISVQINENVRGGDIFIIQSTCAPTNDNLMELIVMVDALRRASAGRITAVIPYFGYARQDRRVRSARVPITAKVVADFLSSVGVDRVLTVDLHAEQIQGFFDVPVDNVFGSPVLLEDMKSKNLESPVVVSPDIGGVVRARAIAKLLDDTDIAIIDKRRPRPNVSQVMHLIGDVAGRDCIIVDDMIDTGGTLCKAAEALKERGAKRVFAYATHPVFSGSAVENIKNSVIDELIITDSIPLTAEMKAVDKVKQLTLSSVLAEAIRRISNEESISAMFEH

SEQ ID NO: 132183 - protein, 146 aa, Unknown
  Bacterial polypetide isolated from the Sargasso Sea
GVVRARALARSLDADLAIIDKRRERAGVSEVMNIIGEVDDRHCILVDDIVDSGGTLCNAAEALMVAGGLSVSAYISHGVLSGGAAARIKDSPLTELVTTDSIQATEAVLAAPNMRQITIAPLLGEAILRIAESRSVSSLFDYNTSN

SEQ ID NO: 132184 - protein, 108 aa, Unknown
  Bacterial polypetide isolated from the Sargasso Sea
MTAARAEQEKLTPDTRRLRLFSGTSNPGLAREIAAYLGVPDGPRVCKRFADGELYVQIQESIRGCDVFLIQPTCAPVNDHLMELLIMVDACRRASARQITAVVPYYGY

SEQ ID NO: 132185 - protein, 204 aa, Unknown
  Bacterial polypetide isolated from the Sargasso Sea
MSSRVNFDIFSGSSVPDLARGIAEILDTDIGHIDVSKFSDGEIKVELMENVRGHETFIVQSTSYPANDNLMELILIADALKRSSASKITAVIPYFGYARQDRRVRSARVPISAKVVADILYKAGIHRILTVDLHSETIQGFFDMPADNVYATKVMLNDIKNNYRDDLSKVTVVSPDVGGVVRSRALAKFIDDADLAIIDKRRSA

SEQ ID NO: 132186 - protein, 317 aa, Unknown
  Bacterial polypetide isolated from the Sargasso Sea
MYKVNVLMKILSGTSNPTLSKNISRYLRTKLVNTNIKKFADGEIYVEINENIRGNSVFVIQSSANPANDNLMELLLCIDALRRSSAKNITAVIPYFGYARQDRKVVPRTSISAKLVSNLITNAGANRIVTVDLHAGQIQGFFDMPVDNLFTTPLFARFIKKNIKSKNFICVSPDAGAIERTRALATKINADLAIIDKRRPEPGKSKVMNIIGNVKGKDCIIIDDIIDSGGTIINAADALMKKGAKSVYVFISHAVLSGNAVKNIQKSKIKKLIITDTIDNTKKINKANKIQVLSIAQLMAEAIKRISNSTSVSSLFN

SEQ ID NO: 132187 - protein, 264 aa, Unknown
  Bacterial polypetide isolated from the Sargasso Sea
GNSIFIVQSISSPANDNLMELLLCIDALKRSSAKNITAVIPYFGYARQDRKVVPRTSISAKLVSNLITMAGADRVVTVDLHAGQIQGFFDIPVDNLFSTPIFARHAKKKIKSKKIICVAPDVGGTERARALGKLLNVGLAIVDKRRPKPGQSEVMNVIGNVQGQTCIIVDDIIDSGGTIVNAAKALKSRGAKEVYVYITHGVLSGDAVKKIKSSVIKNLVITDTIDNVVKTKNVKNIEVLPISGLMGEAIKRISNSTSVSDLFK

SEQ ID NO: 132188 - protein, 226 aa, Unknown
  Bacterial polypetide isolated from the Sargasso Sea
YFGYARQDRRVRSARVPISAKVVADTMVGVGVDRVLTVDLHAEQIQGFFTVPVDNVYASSILNADIVRCDYENLIVVSPDIGGVVRARAIAKQLDDADLAIIDKRRPRANEAEVMNLIGDVEGRTAILVDDMVDTAGTLCTAANALKERGALKVVSYCTHAVLSGKALENIKNSQIDELVVTDTIPLSGEAQAVGKIRQLTIADLLAESIRRVSNEESISALFDLS

SEQ ID NO: 132189 - protein, 310 aa, Unknown
  Bacterial polypetide isolated from the Sargasso Sea
MKLLTGNSNKILSKNIAKYLKTKLVNSSIRKFADGEIYIEINENIRGNSIFIVQSISSPANDNLMELLLCIDALKRSSAKNITAVIPYFGYARQDRKVVPRTSISAKLVSNLITKAGADRVVTVDLHAGQIQGFFDIPVDNLFSTPIFARHAKKKIKSKKIICVAPDVGGTERARALGKLLNVGLAIVDKRRPKPGQSQVMNVIGDVKGQTCIIVDDIIDSGGTIVNAAKALKSHGAKDVYVYITHGVLSGDAIKKIKNSVIKNLVITDTIDNVHKTKNVKNIEVLPVSGLMGEAIKRISNSTSVSDLFK

SEQ ID NO: 132190 - protein, 310 aa, Unknown
  Bacterial polypetide isolated from the Sargasso Sea
MKILTGNSNKVLSDKISKYLKNRLVNSSIKKFADGEIYIEINENIRGNSIFIIQSISSPANDNLMELLICIDALKRSSAKNITAVIPYFGYARQDRKVVPRTSISAKLVSNLITKAGADRIVTVDLHAGQIQGFFDIPVDNLFATPIFSRHIKKKIKSKNLICVAPDVGGVERARALGRKLDVGLAIIDKRRPTPGKSQVMNVIGNVKGKSCIIVDDIIDSGGTIVNAAAALIKRGAKEVHVYVTHGVLSGESVEKIKKSKIKNLVVTDTINNSDKVKKSRNIEVLSISNLLAEAMRRISNSTSVSDLFK

SEQ ID NO: 132191 - protein, 251 aa, Unknown
  Bacterial polypetide isolated from the Sargasso Sea
MKIITGNSNKNLSLRISKYLKNRLVHSTIKKFSDGEIYIEINENIRGNSIFVIQSVSSPANDNLMELLLCIDALKRSSAKNITAVIPYFGYARQDRKVVPRTSISAKLVSNLITKAGADRVVTIDLHAGQIQGFFDIPVDNLFATPIFARHVKKKIKKKNLICVAPDVGGTERARALGKFLNAGLAIIDKRRPAPGKSVVMNVVGYVKGKTCIIVDDIIDSGGTIVNASNALIERGAKEVHVYVTHGGAKV

SEQ ID NO: 132192 - protein, 311 aa, Unknown
  Bacterial polypetide isolated from the Sargasso Sea
MKIIACNSSKSLSEKISKHIGVPLADASLRTFNDREIFVEINENIRGEDVFIVQSTSHPANDHLMELLITIDAAKRGSAKRITAVIPYYGYARQDRKTGPRTPITAKLVANLITSAGADRVLTMDLHAGQIQGFFDIPLDNIFSAPPILKDIKEKFNTNKELVVASPDVGGVVRARAFAKRLNAGLAIADKRREKAGESEVMNIIGDVNDKICILLDDIADSAGTLCNAAEALKNNGAKEIYSYIVHGVLSGKAIERISNSSIKELILTDTIEPSKDVKNTKNIRHISIAPLMGEAIKRISSDASVSALFD

SEQ ID NO: 132193 - protein, 317 aa, Unknown
  Bacterial polypetide isolated from the Sargasso Sea
MSNGTIDIFSGSSCIDLSNEVAKLLNNELSSIELGTFSDGEIQVEINENVRGHDTFIIQSTCFPADKHLMELMLLADALKRSSASKITAVVPYYGYARQDRRVRSSRVPISAKVVSDMFSSVGINRVLTLDLHSETIQGFFDMPADNVYATKLMIEDISKHYSKDNLVIVSPDVGGVVRSRALAKYLDGLDLAIIDKRRDMANESEVMNIIGDVAGKECIVPDDIIDTAGTICNAAKALKDAGASKVSAYITHPVLSGPAIERISNSEIDELVVTNSIPLTQDGQKCSKIRVISIAPIISECIKRLSNEESLSAVFL

SEQ ID NO: 132194 - protein, 196 aa, Unknown
  Bacterial polypetide isolated from the Sargasso Sea
MKILSGTSNLNLSKDIAKKLKLKLVNTNIRRFADGEIYIEINENIRGNSVFVIQSTSNPANDNLMELLLVVDALKRSSAKNVTAVIPYFGYARQDRKVAPRTSISAKVVANLITNAGASRVVTVDLHAGQIQGFFDMPVDNLFTTPLFAKHIKKKLNNKRLVCVSPDVGGVQRTRALATRIKADLAIIDKRRPAPG

SEQ ID NO: 132195 - protein, 150 aa, Unknown
  Bacterial polypetide isolated from the Sargasso Sea
VVVSPDVGGVARARAFAKQMNDAPLAIIDKRRTGHNLAESLTVIGDVSGRTAILIDDMIDTGGTICAGARLLRQQGAKRVIACATHAVFSPPASERLSADGLFEQVVVTNSIPIQQERTFPQLQVLSVANMLGEAIWRIHEESSVSSMFR

SEQ ID NO: 132196 - protein, 245 aa, Unknown
  Bacterial polypetide isolated from the Sargasso Sea
MKILTGNSNKLLSEKISKHLKTKLVNNNIKKFADSEIYVEINENIRGNSIFIIQSISSPANDNLMELLLCIDALKRSSAKNITAVIPYFGYARQDRKVVPRTSISAKLVSNLITKAGADRVVTVDLHAGQIQGFFDIPVDNLFATPIFARHIKKRIKNKNLICVAPDVGGVERTRALARKLDIGLSIIDKRRPTPGKSQVMNVVGNVGGKTCIIVDDIIDSGGTIVNAADALIKRGAKEVHVYIT

SEQ ID NO: 132197 - protein, 126 aa, Unknown
  Bacterial polypetide isolated from the Sargasso Sea
MKLVSGNSNINLAENIGKYLDTPLADCTVKKFSDKEIFVEMNENCRGEDVFIIQSTSFPANDNLMELLILIDTLKRASAKRITAVIPYFGYARQDRKPGPRTPITAKLVANLIAKSGADRVLSMDL

SEQ ID NO: 132198 - protein, 132 aa, Unknown
  Bacterial polypetide isolated from the Sargasso Sea
MFSKSSLDIFSGNATPALASEVASILGQDLGKVEVSKFSDGEIRVELLENVRGHETFIIQSTCQPSNANIMELMLLADALKRSSASRITAIIPYFGYARQDRRVRSARVPISAKVVADMLNQVGIQRVLTVD

SEQ ID NO: 132199 - protein, 310 aa, Unknown
  Bacterial polypetide isolated from the Sargasso Sea
MKLLTGNSNKILSKNIAKYLKSKLVNSSIRKFADGEIYIEINENIRGNSIFIIQSISSPANDNLMELLLCIDALKRSSAKNITAVIPYFGYARQDRKVVPRTSISAKLVSNLITQAGADRVVTVDLHAGQIQGFFDIPVDNLFATPIFARHIKKKIKSKNIICVAPDVGGTERARALGKILNIGLAIVDKRRPKPGQSQVMNIIGDVKGKTCILVDDIIDSGGTIVNAAKALKQRGAKEVYVYITHGVLSGDAVKKIKNSVIKNLVITDTIDNNEKTKNVKNIEVLPISALMGEAIKRISNSTSVSDLFK

SEQ ID NO: 132200 - protein, 235 aa, Unknown
  Bacterial polypetide isolated from the Sargasso Sea
MGPVIDDLKIFSGNAHKQLAQDVCDYLNIPLGKAEVFKFANDNTFTNIQENVRQRDVFIVQPITFPVNDHLMELLIMIDACKRASAGRITAVVPYYGYGRTDKKDQPRVPITARLVADLLTTAGADRILTMDLHAGQIQGFFNIPVDELTALPILTDYVKSKEIDDLVVVAVDIGISKKARDVAARLNAPLAIIEKRRVGNNDTTETLNIIGDVKGKTALTFDNEIDTGGTIVGA

SEQ ID NO: 132201 - protein, 254 aa, Unknown
  Bacterial polypetide isolated from the Sargasso Sea
GPVNENLMELFIIVDALKRAAVNEITAVIPYFGYSRQDRKVTDRSPITARLVCDLLIKSGIQKIVTMDLHAGQIQGFFDIPVDHLYSSPIAINYIKKKFKNKDFIIASPDAGGMERARAFAKKLNDADLAMTDKRRPAPNVAEITNVIGEVQNKHVILIDDLIDTGGTAAKSAEALVKSGAKSVSMFCTHGVLSGNAIENIANSCIDELIITDTIDNQEKLKKSNKIKVLTVSTLIAEAINRIRNNKSISQLFS

SEQ ID NO: 132202 - protein, 303 aa, Unknown
  Bacterial polypetide isolated from the Sargasso Sea
MKKEKLILFAGPASKDLGSQIARYLNEPLGFIQVGAFSDGETSIEISQNIRGMDVFLVQSTYQPGNEHLMQLLLMADACKRASAKSVSAVIPYFGYSRQDRRPRNTRGPVSAKLVADLIETADIKRVITVDLHADQIEGFFSIPVDNIYSSTILMSDMWRQGYPDQVIVSPDVGGVQRARAIARRLGNAGLAIIDKRREAANKSEVMNIIGDVDQKTAIIFDDMVDTAGTLCNAAGALKEKGALKTVAYAAHPVLSGPAIERIADSELDELVVTDTIPLTQEAKDTGKIRQLTIAELLGETIE

SEQ ID NO: 132203 - protein, 310 aa, Unknown
  Bacterial polypetide isolated from the Sargasso Sea
MKILTCNSNRPIAEAISAYLNLPLTSASVRRFSDMEVFVEINENVRGEDVFVIQSTSYPANDNLMELLVTMDALRRGSARRITAVIPYFGYARQDRKSSPRSPISAKLVANLITEAGADRVLTLDLHAGQIQGFFDIPLDNLFASPGFSKDISEKYNSGNITMISPDVGGVVRARAIAKRLDADLAIIDKRREKAGESEVMNIIGDVSGQRCIIIDDIVDSAGTLCNAAVALMDSGADSVSAYVTHGVLSGGAVARVSSSPLDRLVTTDSIMATEAVRVSHNIEQLTIAPLIGEAIKRISMENSVSSLFD

SEQ ID NO: 132204 - protein, 207 aa, Unknown
  Bacterial polypetide isolated from the Sargasso Sea
VQKVVADMFASVGIDRVLTIDLHSETIQGFFDMPADNVYATKFMVDDIKDNNDRNEVVVVSPDVGGVVRSRALAKLLDDTDLAIIDKRRAVANESEVMNIIGEVEGKVCIVPDDIIDTAGTLCNAAKALKDKGAKAVKAYITHPVLSGQAIERLNKSGIDELIVTNSIPLNKDAKKCSKIRVISIANIIAECITRLSNEESLSEMFL

SEQ ID NO: 132205 - protein, 262 aa, Unknown
  Bacterial polypetide isolated from the Sargasso Sea
MKIIAGNSNKILAEAICSYIGVSLANTSLRKFADREIFVEINENIRGEDVFIIQSTSHPANDHLMELLITIDAAKRGSAKRITAVIPYYGYARQDRKTGPRTPITAKLVANLITSAGADRVLTMDLHAGQIQGFFDIPLDNIFSAPPIIRDMKEKFSNHSNLVIASPDVGGVVRARAFAKRMNAGLAIADKRREKAGESEVMNIIGDVKDKTCILLDDIADSAGTLCNAAKALKDNGAKEICSYIAHGVLSGEALKRIEGSA

SEQ ID NO: 132206 - protein, 278 aa, Unknown
  Bacterial polypetide isolated from the Sargasso Sea
MNKQNLDIFTGTANPDFAKEVSDLLGIKISSADVGYFSDGELRVEIEENVRGHDTFIIQSTCSPTNKNVMEIMLIADALKRSSASKITAVVPYYGYARQDRRVRSARVPISAKVVADMFRSVGIDRVLTIDLHSETIQGFFDMPADNVYATKLMVDDIKSNNERIEIVVVSPDVGGVVRSRALAKLLDQTDLAIIDKRRPTANQSEVMNIIGEVEGKVCIVPDDIIDTAGTLCNAANALKEKGAKAVKAYITHPVLSGPAIERLEKSEIDELVVTNSI

SEQ ID NO: 132207 - protein, 291 aa, Unknown
  Bacterial polypetide isolated from the Sargasso Sea
MTEHNNNLVLFSGSSNPNLAHRVAKELGKNLGDAYVGRFSDQELNVRIDEHVRGMDVFILQSTCFPANENLMELLIMIDALRRSSASRITAVIPYFGYARQDRRVRSERVPISAKLVAEMLQNAGADRILTIELHSDQIQGFFNVPVDNIYGTNVTFEHIDKANYENLIIVSPDVGGVVRARALAKLLNDADLAIIDKRREKDNQSQVMNVIGDVAEKTCVLVDDIVDTAGTICNAAEALKNAGAKKVISYATHPVLSGPALKRIEKSGLDEIIVTDTIPLSEKASKLNKL

SEQ ID NO: 132208 - protein, 315 aa, Unknown
  Bacterial polypetide isolated from the Sargasso Sea
MSNRVLFTGNSNIDLANKVAKNLETDLGPMKVGTFSDGEINVEVNENVRGKDTFIIQSTNNPAEKNLMELVLMVDALKRASARSITAVIPYFGYSRQDRRVRSARVPISAKVIADMLSEVGISRIITLDIHSEQIQGFFSFPVDNIYTANIMVKGLLEKYDVEDLQVVSPDTGGVIRARSVAKTLGVQDLAIIDKRREKANESEVINLIGDVEGKVCIVPDDLIDTAGTLSNASHALKDKGAKEIIAYITHPVLSGDAIKNLNNSAIDKLVVSNSIDIGDKSKKCPKIDVFDISPILSEAITRIATGDSISELFK

SEQ ID NO: 132209 - protein, 242 aa, Unknown
  Bacterial polypetide isolated from the Sargasso Sea
MVDALRRASAGRITAVIPYFGYARQDRRVRSARVPITAKVVADFLSSVGVDRVLTVDLHAEQIQGFFDVPVDNVFGSPVLLEDMRKREFVAPVVVSPDIGGVVRARAIAKLLNDADLAIIDKRRPKANVSQVMHIIGDVKDRDCIIVDDMIDTGGTLCKAAEALKEQGAKRVFAYATHPIFSGSAAENIRNSVIDELIITDTIPLTAEMRAVSKVKQLTLSDMLAECIRRISNEESISSMFD

SEQ ID NO: 132210 - protein, 311 aa, Unknown
  Bacterial polypetide isolated from the Sargasso Sea
MRIIAGNSNLPLSKSVAEYLGENLTNASITRFADDEVYVEIKENIRGEDVFVMESLSYPANDNIMELLVMIDALKRASAKRITAVIPYYGYARQDRKPGPRTPISAKLVANLITTAGADRVLTLDLHAEQIQGFFDIPTDNLFAGPVFSKDIKEKYEISNLVAVSPDIGGVVRARAIANKIGASIAIVDKRRPRAGESEVMNIIGDVKGKDCIILDDIIDSAGTICNAADKIIDLGANSITSYVTHGVLTGKALEKISASKLTELVITDSINNQEKLKACEKIRSISISDLLGEAIKRISEASSVSSLFEF

SEQ ID NO: 132211 - protein, 213 aa, Unknown
  Bacterial polypetide isolated from the Sargasso Sea
MSSHDGLMVFTGNANPALAQEVVKILGIPLGKAMVSRFSDGEIQVEIQENVRGKDVFVLQSTCAPANDNLMELMIMVDALKRASAGRITAAIPYFGYARQDRRPRSARVAISAKIVANMLEIAGVERIITMDLHADQIQGFFDIPVDNIYATPVLLGDLRKQNYENLLVVSPDVGGVVRARALAKQLNCDLAIIDKRRPKANVAEVMNIIGEV

SEQ ID NO: 132212 - protein, 327 aa, Unknown
  Bacterial polypetide isolated from the Sargasso Sea
MTAARAEQERLQQESRRLRLFSGTSNPGLAREIAAYLGVPDGPRVCKRFADGELYVQIQESIRGCDVFLIQPTCAPVNDHLMELLIMVDACRRASARQITAVVPYYGYARADRKTAGRESITAKLTANLLVKSGVNRVLAMDLHSSQIQGYFDIPCDHIYGSPVLVDYLSTQNLGDIVVVSPDVGGVARARAFAKQMNDAPLAIIDKRRTGHNMAESLTVIGDVSGRTAVLIDDMIDTGGTICAGARLLRQQGAKRVIACATHAVFSPPASERLSAEGLFEQVVVTNSIPIEPDRTFPQLHVLSVANMLGEAIWRIHEESSVSSMFR

SEQ ID NO: 132213 - protein, 215 aa, Unknown
  Bacterial polypetide isolated from the Sargasso Sea
MKILTGNSNKQLSNKISKNLKNKLVNTSIRKFADGEIYIEINENIRGNSIFIIQSVSSPANDNLMELLLCIDALKRSSAKNITAVIPYFGYARQDRKVVPRTSISAKLVSNLITNAGADRVVTVDLHAGQIQGFFDIPVDNLFATPIFAKHIKRKIKSNNIICVAPDVGGVERARALGKKLDVGLAIVDKRRPSPGKSEVMNVIGNVKNKNLYFN

SEQ ID NO: 132214 - protein, 283 aa, Unknown
  Bacterial polypetide isolated from the Sargasso Sea
MKLLTGNSNKVLSKNIAKYLKTKLVNSSIRKFADGEIYIEINENIRGNSIFIVQSISSPANDNLMELLLCIDALKRSSAKNITAVIPYFGYARQDRKVVPRTSISAKLVSNLITQAGADRVVTVDLHAGQIQGFFDIPVDNLFSTPIFARHARKKIKSKKIICVAPDVGGTERARALGKLLNVGLAIVDKRRPKPGQSEVMNIIGDVKGQTCILVDDIIDSGGTIVNAAKALKSRGAKDVYVYITHGVLSGDAIKKIKSSVIKNLVITDTIDNVHKTKNVKNI

SEQ ID NO: 132215 - protein, 310 aa, Unknown
  Bacterial polypetide isolated from the Sargasso Sea
MKIVSCNSNQPLAEGISAYLNQPLTKAVVRRFSDMEVFVEIQENVRGEDAFIVQSTSYPANDHLMELLVTIDALKRGSARRITAVIPYFGYARQDRKSGPRTPISAKLVANLITVAGADRVLTIDLHAAQIQGFFDIPTDNLFAVPVFIENILQNYNPKDLCIIAPDVGGVLRARAIAKRLNTDLAIIDKRREAPGQSEVMNIIGEVKNRHCLLVDDIVDSGGTLCNAAETLIDSGAITVDAYVTHGVLSGGAVARVASSPLNSLVTTDSIAATEAFRVAKNLKHISISPLLGEAVKRIHMERSVSSLFD

SEQ ID NO: 132216 - protein, 317 aa, Unknown
  Bacterial polypetide isolated from the Sargasso Sea
MSISNIMIFSGNANPNLALKTVEFLNMPLGKITAGKFSDGEVMVEVNENVRGRDIYIMQPICAPTNDNLMELLVISDALRRASAERITAVIPYLGYARQDRRTRSSRVPITAKMVANMISSAGIDRVLTVDLHADQIQGFFDIPLDNVYGSPVLLGDIWKHKYPDLMVISPDVGGVVRARALAKRLDDTDLAIIDKRRPNPNESEVMNIIGDVDGRTCVIIDDLVDTAGTLGNAAGALKDFGAKKVVAYCTHAVLSGNAVKNIENSKLDELVVTDTIPLRSEAKTSDRIRQLSVAGMLAESIRRVAEGESLSSMFLD

SEQ ID NO: 132217 - protein, 204 aa, Unknown
  Bacterial polypetide isolated from the Sargasso Sea
MNKINKGLDIFTGTANPEFASEVSEILGIKISKADVGYFSDGELKVEIEENVRGHDTFIIQSTCSPTNKNVMEIMLIADALKRSSASRITAVVPYYGYARQDRRVRSARVPISAKVVADMFATVGIDRVLTIDLHSETIQGFFDMPADNVYATKFMVDDIKDNNDRNEVVVVSPDVGGVVRSRALAKLLDDTDLAIIDKRRAVA

SEQ ID NO: 132218 - protein, 231 aa, Unknown
  Bacterial polypetide isolated from the Sargasso Sea
MKLLTGNSNKSLSQKISKHLKTKLVHSSIKRFADGEIYIEINENIRGNSIFLIQSISSPANDNLMELLLCVDALKRSSAKNITTVIPYFGYARQDRKVAPRTSISAKLVSNLITKAGADRVVTVDLHAGQIQGFFDIPVDNLFATPIFARHVKKHLNRKNLICVAPDVGGVERTRALARKLDIGIAIIDKRRPTPGKSQVMNVIGNVKGKTCIIIDDIIDSGGTIVNAAQA

SEQ ID NO: 132219 - protein, 314 aa, Unknown
  Bacterial polypetide isolated from the Sargasso Sea
MKRERKIFSGRSNLELAKKIAISADCQLGDISIKTFSDGEIWVKYEENIREQDVFIIQSTNGPSENIIELALMTDAAVRASASTVNIIMPYFGYGRQDRKDQPRVPISSRVMIDIFTSMGADRIVTMDLHSTQIQGFAKIPFDHLYSRMVLMKAISDLGLDPKRSVVLAPDVGSAAISQAYAKRLKMHFALIDKRRFAPNQAKVSHLIGDLDSMDVLIIDDMIDTAGTTVGAANAAMEKGAKSVTAIATHGVLSGPATERLKSAPIKNLVVTDTIQIPEEKILSNMKIITVADVFAAAINRIHNGESVSALFEF

SEQ ID NO: 132220 - protein, 196 aa, Unknown
  Bacterial polypetide isolated from the Sargasso Sea
MKLLSGTSNKPLSKDIAKFLKSKLVNSSIKNFADGEIYVELNENIRGNSIFIIQSISSPANDNLMELLLCIDALKRSSAKNITAVIPYFGYARQDRKVVPRTSISAKLVSNLITKAGADRVVTVDLHAGQIQGFFDIPVDNLFSTPIFARHVKKNIKSKNIVCIAPDVGGTERARALGKILNVGLAIVDKRRPKPG

SEQ ID NO: 132221 - protein, 314 aa, Unknown
  Bacterial polypetide isolated from the Sargasso Sea
MKETLKIFSGRSNLTLSKGIVEHLGLDLGKVTIRTFSDGELWVKFEENIRGNDVFIIQSTCGPAENLIELFLLLDAAVRASARRVTAVIPYFGYGRQDRKDQPRVPISSRVMVDIITATGADRIISMDLHSTQIQGFASIPFDHIYSRMVLLDTLKSLNLDPENCAVLAPDVGSAAMGQSYAKRLGFHFALIDKRRYAPNKAEVSHLIGELKGKDVLIVDDMIDTAGTTVSAAIAAIDKGANSVIAVATHGVLSGEAIERLDSAPINKIIITDTIFVDDNKQISKMHIVSVADVFGEAIKRIHRGESVSALFNL

SEQ ID NO: 132222 - protein, 340 aa, Unknown
  Bacterial polypetide isolated from the Sargasso Sea
MPALNEPKLISGNANKNLAKAITRRMTVHRGLNVDLVDARIERFNDQEIFIEVYENVRGEDMFIIQSTSNPANDNLMELLIMADALRRSSASRITAVIPYFGYARQDRRTKARTPISAKLVANLLVEAGVERILTLDLHATQIQGFFDIPVDNLYAAPVFALDIIHQFSDKLNDVMVVSPDVGGVARARELAKRINAPLSIVDKRRERAGEVAEMTIIGDVTGKKCIIVDDICDTAGTLCKAAEVLIENGAAEVHSYITHGVLSGPAVERISNSVMKSLVITDSIQATDPIAKASNIRIVPTAPIFAQAILNIWNGTSVSSLFETETLEPIYDGQLQRLL

SEQ ID NO: 132223 - protein, 311 aa, Unknown
  Bacterial polypetide isolated from the Sargasso Sea
MKIIACNSSKSLAKKISNHIDVQLADASVRTFNDREIFVEINENIRGEDVFIIQSTSHPANDHLMELLITIDAARRGSAKRITAVIPYYGYARQDRKTGPRTPITAKLVANLITSAGADRVLTMDLHAGQIQGFFDIPLDNIFSVRPIIDDVKEKFNGNKDLVVASPDVGGVVRARAFAKRLDAGLAIADKRRERPGESEVMNIIGDVKDKTCILLDDIADSAGTLCNAADALSKSGAKDIYSYIVHGVLSGEALKKIENSSIKELVLTDTIEPTKEVKSTKNIRHISIAPLMGDAIKRINTDTSVSALFD

SEQ ID NO: 132224 - protein, 119 aa, Unknown
  Bacterial polypetide isolated from the Sargasso Sea
MKKQDQNIKIVAGNSNMRLATDIASYLKIPLTECNVRRFADMEVFVEILENVRGEDVFVIQSTSYPANDHLMELLILIDALKRSSARRITAVIPYYGYARQDRRTSGRTPISAKLVANL

SEQ ID NO: 132225 - protein, 308 aa, Unknown
  Bacterial polypetide isolated from the Sargasso Sea
ILSGTSNLKLSKDIAKHLKLRLVNTNIRRFSDGEIYIEINENIRGNSVFVIQSTSNPANDNLMELLLVIDALKRSSAKNITAVIPYYGYARQDRKVAPRTSISAKVVANLITNAGASRVVTVDLHAGQIQGFFDMPVDNLFTTPLFAKHIKKKLKNKKLICVSPDVGGVQRTRGLATRLKADLAIIDKRRPAPGKSEVMNIIGDVKGKTCIIVDDIIDSGGTIVNAANALKRSGASDVYVFITHAVLSGDAVNKIKKSKIKKLVITDTINNSSKIKNNNKIEVLSIAQLMAEAIKRISNSNSVSDLFN

SEQ ID NO: 132226 - protein, 219 aa, Unknown
  Bacterial polypetide isolated from the Sargasso Sea
MNSNGKLKIISGNSNILLAKAISKRVGLHIGEKIPLVKARVERFKDQEIFVEVFENVRGEDMFIIQSTSNPANDNLMELLIIADALKRSSAKRITAIIPYFGYARQDRRTKARTPISSKLVANLLAESGINRVLTLDLHASQIQGFFDIPVDNLYASPIFAIDIRHHFSRDGSLMIVSPDVGGVGRARELAEKINIDLAVVDKRRKAPGEINSMTIMET

SEQ ID NO: 132227 - protein, 246 aa, Unknown
  Bacterial polypetide isolated from the Sargasso Sea
MELLLCIDALKRSSAKNITAVIPYFGYARQDRKVAPRTSISAKLVSNLITKAGADRIVTVDLHAGQIQGFFDIPVDNLFATPIFSRHIKKNIKGKNLICVSPDVGGVERTRALARKLDIGIAIIDKRRPAPGKSQVMNVIGNVSNKTCVIVDDIIDSGGTIVNAAQALINRGAKEVHVYITHGVLSGEAVEKIKKSKIKKLVITDTIDNSSKVKKAKNIEVLSICNLLGEAIKRISNSTSVSDLFK

SEQ ID NO: 132228 - protein, 286 aa, Unknown
  Bacterial polypetide isolated from the Sargasso Sea
MKLLTGNSNKLLSKKIAKFLRSKLVNSSIRKFSDGEIYAEINENIRGNSIFILQSISSPANDNLMELLLCIDALKRSSAKNITAVIPYFGYARQDRKVAPRTSISAKLVSNLITKAGADRVVTVDLHAGQIQGFFDIPVDNLFSTPIFARHAKKKIKSKNIICVAPDVGGTERARALGKALNVGLAIVDKRRPKPGQSQVMNVIGNVKNKTCIIVDDIIDSGGTIVNAAKALRNRGAKEVYVYITHGVLSGEAVKKIKNSLIKNLVIKDTIDNSEKIKNVKNIEVL

SEQ ID NO: 132229 - protein, 317 aa, Unknown
  Bacterial polypetide isolated from the Sargasso Sea
MSNSNFDIFTGSANPELATEVSKILGIDISHADIGQFSDGEIKVQIEDNVRGHDTFIIQSTCAPTNKNVMEIMLIADALKRSSASKVTAIVPYYGYARQDRRVRSARVPISAKVVADMFASVGIDRVLTIDLHSETIQGFFDMPADNVYATKLMVDHIKDNNERKEVVVVSPDVGGVVRSRALAKLLDDTDLAIIDKRRAIANQSEVMNIIGDIDGKVCIVPDDLIDTAGTLCNAADALKEKGAKAVKAYITHPVLSGPAIERLNNSSIDELVVTNSIPLNKEAQKCSKIRVISLASTIAECIKRLSNEESLSEMFL

SEQ ID NO: 132230 - protein, 164 aa, Unknown
  Bacterial polypetide isolated from the Sargasso Sea
MKKEKLILFAGPASKDLGSQIARYLNEPLGYIQVGAFSDGETSIEVSQNIRGMDVFLVQSTYQPGNEHLMQLLLMADACKRASAKSVSAVIPYFGYSRQDRRPRNIRGPVSAKLVADLIETADIKRLITLDLHADQIEGFFSIPVDNIYSSTILMSDMWRQGYP

SEQ ID NO: 132231 - protein, 256 aa, Unknown
  Bacterial polypetide isolated from the Sargasso Sea
SISSPANDNLMELLLCIDALKRSSAKNITAVIPYFGYARQDRKVVPRTSISAKLVSNLITKAGADRVVTLDLHAGQIQGFFDIPVDNLFATPIFARHIKKNIKNRDMICVAPDVGGTERARALGKILDVGLAIVDKRRPAPGKSKVMNVIGNVKNKVCILVDDIIDSGGTIVNAAKELKDRGAKEVYVYITHGVLSGDAVKKIQKSNIKKLVITDSIDNNERVKNSRNIEVLSISNLLGEAMKRISNSTSVSDLFK

SEQ ID NO: 132232 - protein, 218 aa, Unknown
  Bacterial polypetide isolated from the Sargasso Sea
MKDNAFDIFTGTANPELAEEVSKILKIDIAPADVGYFSDGELNVQIQENVRGHDTFIIQSTCSPTNKNVMEIMLIADALKRSSASKITAIVPYFGYARQDRRVRSARVPISAKVVADMFASVGIDRVLTIDLHSETIQGFFDMPADNVYATKFMVDDIKDNNERDEVVVVSPDVGGVVRARALAKLLDDTDLAIIDKRRAAANQSEVMNIIGDIQGKV

SEQ ID NO: 132233 - protein, 213 aa, Unknown
  Bacterial polypetide isolated from the Sargasso Sea
MKILSGTSNLKLSKDISKNLKLKLINTNIRRFADGEIYIEINENIRGNSVFVIQSTSNPANDNIMELLLVIDALKRSSAKTVTAVIPYFGYARQDRKVAPRTSISAKVVANLISNAGATRVVTVDLHAGQIQGFFDMPVDNLYTAPLFAKYIKKKLGSKKLICVSPDVGGVARTRALATRIKADLAIIDKRRPAPGKSEVMNIIGDVKNKTCI

SEQ ID NO: 132234 - protein, 193 aa, Unknown
  Bacterial polypetide isolated from the Sargasso Sea
MKILTGNSNKHLSGKISKYLKNKLVNSSIRKFSDGEIYIEINENIRGNSIFIIQAISSPANDNLMELLLCIDALKRSSAKNITAVIPYFGYARQDRKVVPRTSISAKLVSNLITKAGADRIVTVDLHAGQIQGFFDIPVDNLFSTPIFARHIKKKIKSKNLICVAPDVGGVERTRALGRKLDVGLAIIDKRRP

SEQ ID NO: 132235 - protein, 310 aa, Unknown
  Bacterial polypetide isolated from the Sargasso Sea
MKLLSGTSNKPLSKDIARFLKSKLVNSSIKNFADGEIYVELNENIRGNSIFIIQSISSPANDNLMELLLCIDALKRSSAKNITAVIPYFGYARQDRKVVPRTSISAKLVSNLITKAGADRVVTVDLHAGQIQGFFDIPVDNLFSTPIFARHVKKNIKSKNIVCIAPDVGGTERARALGKILNVGLAIVDKRRPKPGQSQVMNVIGEVKDKTCVIVDDIIDSGGTIVNAAKALKDRGAKEVYVYITHGVLTGEAVKKIKNSVIKKLVITDTIDNKDKTKSAKNIEVLSISALMGEAIKRISNSTSVSDLFK

SEQ ID NO: 132236 - protein, 136 aa, Unknown
  Bacterial polypetide isolated from the Sargasso Sea
RALGKLLNVGLAIVDKRRPKPGQSEVMNIIGDVKGQTCILVDDIIDSGGTIVNAAKALKSRGAKDVYVYITHGVLSGDAIKKIKSSVIKNLVITDTIDNVHKTKNVKNIEVLPISGLMGEAIKRISNSTSVSDLFK

SEQ ID NO: 132237 - protein, 159 aa, Unknown
  Bacterial polypetide isolated from the Sargasso Sea
MKILTGNSNKQLSNKISKNLKNKLVNTSIRKFADGEIYIEINENIRGNSIFIIQSVSSPANDNLMELLLCIDALKRSSAKNITAVIPYFGYARQDRKVVPRTSISAKLVSNLITNAGADRVVTVDLHAGQIQGFFDIPVDNLFATPIFAKHIKRKIKSN

SEQ ID NO: 132238 - protein, 310 aa, Unknown
  Bacterial polypetide isolated from the Sargasso Sea
MKLVSGNSNINLAENIGKYLDTPLADCTVKKFSDKEIFVEMNENCRGEDVFIIQSTSFPANDNLMELLILIDTLKRASAKRITAVIPYFGYARQDRKPGPRTPITAKLVANLIAKSGADRVLSMDLHAGQIQGFFDIPTDNLFAAPILLSDIENKIGSNDAMVVSPDVGGVVRARLIASRINSDLAIVDKRREKAGESEVMNIIGDVSDRSCFMIDDIVDSAGTLCNAAEALINSGAKEVFAHVTHGVLSGEAIKRVNDSALTKLVITDTINETDDIKNSNKIETVSVVHLLGEAIRRISEERSVSSLFD

SEQ ID NO: 132239 - protein, 310 aa, Unknown
  Bacterial polypetide isolated from the Sargasso Sea
MKILSGTSNLQLSKDISKKLKLKLVNTNIRRFSDGEIYIEINENIRGNSVFVIQSTSNPANDNLMELLLVIDALKRSSAKNITAVIPYFGYARQDRKVAPRTSISAKVVANLITNAGASRVVTVDLHAGQIQGFFDMPVDNLFTTPLFAKYIKKKLNNKKLICVSPDVGGVQRTRGLATRIKADLAIIDKRRPTPGKSQVMNIIGNVKNKTCIIVDDIIDSGGTIVNAVDALKKNGAQEVYVFITHAVLSGDAVKKIKNSKIKKLIITDTINNSQKIKNNNKIEVLSISSLMSEAIKRIANSNSVSDLFN

SEQ ID NO: 132240 - protein, 162 aa, Unknown
  Bacterial polypetide isolated from the Sargasso Sea
MKLLTGNSNKVLSKNIAKYLKTKLVNSSIRKFADGEIYIEINENIRGNSIFIVQSISSPANDNLMELLLCIDALKRSSAKNITAVIPYFGYARQDRKVVPRTSISAKLVSNLITQAGADRVVTVDLHAGQIQGFFDIPVDNLFSTPIFARHAKKKIKSKKII

SEQ ID NO: 132241 - protein, 310 aa, Unknown
  Bacterial polypetide isolated from the Sargasso Sea
MIFSGNANRPLAKLVAKNLGTTLGKASVKTFSDGEISVEIEENVRGQDVYIIQPLCDPVNNNLMELLIMADALKRSSVDRISVVLPYFGYSRQDRRARSARVPITAKVVANMLTGMGVERLLTIDLHADQIQGFFDIPVDNIYATPLFLADIHKQNYDDIIVVSPDVGGVVRARALAKQLNTDLAIVDKRRPEANVSEVMQIIGDIKGKCCVIVDDICDTAGTLCHAADALKDKGASAVYAYITHPIFSGKADQNIIESSIDSLIVTDTIKLSKKIIDTGKIRQITVSEMLAETLRRIDNKESVSSLFVE

SEQ ID NO: 132242 - protein, 310 aa, Unknown
  Bacterial polypetide isolated from the Sargasso Sea
MKILTGNSNKQLSSKISKNLKNKLVNTSIRKFADGEIYIEINENIRGNSIFIIQSVSSPANDNLMELLLCIDALKRSSAKNITTVIPYFGYARQDRKVVPRTSISAKLVSNLITNAGADRVVTVDLHAGQIQGFFDIPVDNLFATPIFAKHIKRKIKSNNIICVAPDVGGVERARALGKKLDVGLAIVDKRRPSPGKSQVMNVIGNVKNKICILTDDIIDSGGTIVNAADALLKRGAKEVHVYATHGVFSGDAVKKIKNSKIKNLVITDSIDSSDKLKKVRNIEVLSISILLAEAIKRISNSTSVSDLFK

SEQ ID NO: 132243 - protein, 165 aa, Unknown
  Bacterial polypetide isolated from the Sargasso Sea
MMLFTGRSNSALATKVAEELNIELGSADVGSFSDGEALVEIHENVRGKDVFLLQSTCPPTNDNLMELLIMADALHRASSQRITAVIPYYGYARQDRRPRSARVAISSKVVADIISTTGIDRILTVDLHADQIQGFFTIPVDNVYGSPVLVDDILLKNYSMPIVVA

SEQ ID NO: 132244 - protein, 278 aa, Unknown
  Bacterial polypetide isolated from the Sargasso Sea
EIKVEILENVRGHETYIIQSTCAPTNSNLMELMLITDALKRSSAFKITAILPYYGYARQDRRVRSARVPISAKVIADMLNSAGVDRVLTVDLHSESIQGFFDMPADNVYATKIMHDDIRSRTSKDEEILIVSPDVGGVVRARALAKFLDESDLAIIDKRRATTNESEVMNIIGDVKGKSCIVPDDIIDTAGTLCNAAEALKDAGAAKVKAYITHPVLSGPAIERISDSSIDELVVTNSISLSPEAKKCSKIRVISLAPTIAECIRRLNNEESLSALFL

SEQ ID NO: 132245 - protein, 264 aa, Unknown
  Bacterial polypetide isolated from the Sargasso Sea
MYFVVQSTYQPGNEHLMQLLLMADACKRASAKSVSAVIPYFGYSRQDRRPRNIRGPVSAKLVADLIETADIKRLITVDLHADQIEGFFSIPVDNIYSSTILMSDMWRQGYPDQVIVSPDVGGVQRARAIARRLGNASLAIIDKRREAANKSEVMNIIGDVDQKTAIIFDDMVDTAGTLCNAAAALKEKGALKTVAYAAHPVLSGPAIERIADSELDELVVTDTIPLTQEAKDTGKIRQLSIAELLGETIERIVADQSVSSLYAE

SEQ ID NO: 132246 - protein, 310 aa, Unknown
  Bacterial polypetide isolated from the Sargasso Sea
MRLFSGTANPALAREIAGYLGVSDGPRVSKRFADGELYIQIQESIRGCDVFLVQPTCAPVNDHLMELLIMVDACRRASARQITAVVPYYGYARADRKTAGRESITAKLVANLLVQSGVSRVLAMDLHSAQIQGYFDIPCDHIYGAPVLVDYLATRDLGEVVVVSPDVGGVARARAFAKRMDDAPLAIIDKRRSAHNVAESLTVIGDVAGKTAIVVDDMIDTGGTISKGAKLLRQQGAERVIACATHAVFSPPAVERLSEPGLFEEVLVTNSIPVAEELRFPQLKTLSVANMLGEAIWRIHEESSVSSMFR

SEQ ID NO: 132247 - protein, 303 aa, Unknown
  Bacterial polypetide isolated from the Sargasso Sea
SNKALSRNIAKYLKTKIVNSSIRKFADGEIYIEINENIRGNSIFIIQSISSPANDNLMELLLCIDALKRSSAKNITAVIPYFGYARQDRKVVPRTSISAKLVSNLITKAGADRVVTVDLHAGQIQGFFDIPVDNLFATPIFARHIKKKIKIKNMICVAPDVGGTERARALGKILNVGLAIVDKRRPKPGQSQVMNIVGDVKGKTCVIVDDIIDSGGTIVNAAKALKDRGAKEVYVYITHGVLSGEAVKKIKNSVIKNLVITDTIDNNVRTKNVKNIEVLPISGLMGEAIKRISNSTSVSDLFK

SEQ ID NO: 132248 - protein, 282 aa, Unknown
  Bacterial polypetide isolated from the Sargasso Sea
MKLLTGNSNKNLSKKIAKNLKSKLINSSIRKFADGEIYVEINENIRGNSIFIIQSVSSPANDNLMELLLCIDALKRSSAKNITAVIPYFGYARQDRKVVPRTSISAKLVSNLITKAGADRVVTVDLHAGQIQGFFDIPVDNLFGTPIFARHIRKNIKSKNIICVAPDVGGTERARALGKLLDVGLAIVDKRRPAPGKSQVMNVIGNVKDKTCILVDDIIDSGGTIVNAAKALKDRGAKEVYVYITHGVLSGDAINKIKKSIIKKLVITDTIDNLGKTNKAKN

SEQ ID NO: 132249 - protein, 152 aa, Unknown
  Bacterial polypetide isolated from the Sargasso Sea
MKLLTGNSNKSLSQKISKHLKTKLVHSSIRRFADGEIYIEINENIRGNSIFLIQSSSAPANDNLMELLLCIDALKRSSAKNITAVIPYFGYARQDRKVAPRTSISAKLVSNLITKAGADRIVTVDLHAGQIQGFFDIPVDNLFATPIFARHI

SEQ ID NO: 132250 - protein, 308 aa, Unknown
  Bacterial polypetide isolated from the Sargasso Sea
MKIISGNSNIELSKEISEYIKIPLSETTMTRFSDKEIFVEIAENVRGEDVFLIQSTSFPANDNLMELLVAIDALKRGSAKRITAVLPYFGYARQDRKTGPRTPISAKLVANLITTAGANRVLTMDLHAGQIQGFFDIPLDNLYALNMFVNDIKSNKRDENLVFVSPDVGGVLRARAFAKKLNADLAIIDKRRDAPGVSNAMNVIGSVDGKKCIIVDDLVDSGGTICNAAKALKEKGATHVYGYCSHGVYSGKALENINNSVLEEMVCTNTIKPTFEVPTGMRYLSVAPLFGEAIMRINNETSISSLFD

SEQ ID NO: 132251 - protein, 127 aa, Unknown
  Bacterial polypetide isolated from the Sargasso Sea
MEKQLLFSGNSNKQLAESVAKNLGKKLAPIKVSTFSDGEVSVEIDINVRGSDTFIIQSTDSPAEKNLMELVLIADALKRASANSITAVIPYFGYARQDRRVRSARVPISARVIAEVLTSGGISRVNT

SEQ ID NO: 132252 - protein, 308 aa, Unknown
  Bacterial polypetide isolated from the Sargasso Sea
MPATVNKILAESICSYIGVKIANTSLRKFADREIFVEINENIRGEDVFIIQSTSHPANDHLMELLITIDAAKRGSAKRITAVMPYYGYARQDRKTGPRTPITAKLVANLITSAGADRVLTMDLHAGQIQGFFDIPLDNIFSAPPIIKDMKNKFSNNNDLVITSPDVGGVVRARAFAKRLNAGLAIADKRREKAGESEVMNIIGEVKDKTCILLDDIADSAGTLCNAAKALKEFGAKEIYSYIAHGVLSGEALSRIENSAIKELVLTDSIHASNEVKNTKNIRHISVAPLMGEAIKRINSDSSVSALFD

SEQ ID NO: 132253 - protein, 326 aa, Unknown
  Bacterial polypetide isolated from the Sargasso Sea
MELVTNKKLYLVSGRTYQPLAESIASELGVNLGEPNLAEFANGEVHCRFSESIRGCDVFIVQTHSGSEDSSINDSLMEQLIMVDAAKRASAKRITVVCPAYGYGRQDRKASGREPITAKLVSNLFKAAGASRLVSVDLHSGQTQGFFDGPVDHLTAMPVLVERLSSLKGDLTIVSPDAGRVKVAERYAMTLGAELAIVHKRRSHSSFNTVEAQEVVGDVDGRVCILVDDMIDTAGTICSAAEQLSERGASQIIAAATHGVFSGPASERLSSSPIEKIIVTDTLPLPENMQTDKVEVLSVAPLIAEAIRAVFEDTSVSEIFGGNNLV

SEQ ID NO: 132254 - protein, 314 aa, Unknown
  Bacterial polypetide isolated from the Sargasso Sea
MNNKLKIFSGRSNPGLALGIAKSLHQDLGSISIRTFSDGELWVKYEENVRGCDVFIIQSTNGPSENIIELALMVDAAVRASADTVTVLIPYFGYGRQDRKDQPRVPISSRVMIDILTAMGSDRIITLDLHSTQIQGFAKIPFDNLYSRSVLFEAIQDENFSSDNTAVLAPDVGSVKMSQGYAKNLGMHFALIDKRRFAPNQAEVNHLIGNLDGMDVLIIDDMIDTAGTTVNASQAAMDEGARSVTVVVTHGVLSGSAIERLNESTIKKIIVTDTIAIPKEKQIDKMKIVTVANIFGEAVSRVHNGESVSALFEF

SEQ ID NO: 132255 - protein, 310 aa, Unknown
  Bacterial polypetide isolated from the Sargasso Sea
MKILTGNSNKHLSQKISKFLKNRLVNSNIRKFADGEIYVEINENIRGNSIFLIQSVSSPANDNLMELLLSIDALKRSSAKNITAVIPYFGYARQDRKVVPRTSISAKLVSNLIAKAGADRVVTVDLHSGQIQGFFDIPVDNLFATPIFARHIKKKLKKNNIICVAPDVGGTARARALGKLLNVDLAIVDKRRPAPGKSEVMNVIGNVKNKTCILVDDIIDSGGTIVNAASELKKRGAKDVHVYVTHGVLSGNAVEKIKKSSIKNLVVTDTIDNSMKVKKAKNIEVLTISNLVGEAIKRISNSTSVSDLFK

SEQ ID NO: 132256 - protein, 257 aa, Unknown
  Bacterial polypetide isolated from the Sargasso Sea
TCSPTIKNVMKIMLIADALKRSSASRITAVVPYYGYARQDRRVRSARVPISAKVVADMFASVGIDRVLTIDLHSETIQGFFDMPADNVYATKFMVDDIKDNNDRNEVVVVSPDVGGVVRSRALAKLLDDTDLAIIDKRRAVANESEVMNIIGEVEGKVCIVPDDIIDTAGTLCNAAKALKDKGAKAVKAYITHPVLSGPAIERLNKSEIDELIVTNSIPLNKDAKKCSKIRVISIANIIAECITRLSNEESLSEMFL

SEQ ID NO: 132257 - protein, 310 aa, Unknown
  Bacterial polypetide isolated from the Sargasso Sea
MKILTGNSNKNLSSKIAKYLKEKLVNSNIRKFKDGEIYVEINENIRGNNIFFIQSVSSPANDNLMEMLLCIDALKRSSAKNITAVIPYFGYARQDRKVVPRTSISAKLVSNLITQAGADRVVTVDLHAGQIQGFFDIPVDNLFTTPLFARHIKKKIKSKNIICVAPDVGGVERSRALGRILNVGLAIVDKRRPKPGQSQVMNVIGDVKGKTCIIVDDIIDSGGTIVNAAKALKQRGAKDVYVYISHGVLSGDAVKSIKNSPIKKLVITDTINNENKVRSAKNIEILSISNLMGEAIRRISNSTSVSFLFK

SEQ ID NO: 132258 - protein, 315 aa, Unknown
  Bacterial polypetide isolated from the Sargasso Sea
MQRNKLKIFSGRSNPRLAENIAKSLDRHLGEISIRTFSDGEIWVKYEENIRGCDVFIIQSTNGPSENIMELALLVDAAVRASADTVTVVIPYFGYGRQDRKDQPRVPISSRVIVDILTALGTNRIITLDLHSTQIQGFANIPFDNLYSRTVLYDAIKEEGFNPEETVVLAPDIGSVKMSQSYAKTLGMHFALIDKRRFAPNQAEVNHLIGDLENLDVLIIDDMIDTAGTTVNASKAAMEKGAKSVTAVATHGVLSGPAIKRLNDSDINKIIITDTISNDKKRKTDKIKVVSVAKIFGEAVNRVHNGESVSALFEF

SEQ ID NO: 132259 - protein, 108 aa, Unknown
  Bacterial polypetide isolated from the Sargasso Sea
MKNTQKGPLIISGNAHNNLAIDIANYIGQDLTKAEVFKFNNDNTFVKILENVRERDVFIIQPTAFPVNDNIMELLIMIDAAKRASAGRITAVIPYFSYARTDKKDQPR

SEQ ID NO: 132260 - protein, 310 aa, Unknown
  Bacterial polypetide isolated from the Sargasso Sea
MKLLSGNSNKPLSKDIAKYLKSKLVNSSIRNFSDGEIYVEINENIRGNSIFLIQSISSPANDNLMELLLCIDALKRSSAKNITAVIPYFGYARQDRKVAPRTSISAKLVSNLITKAGADRVVTVDLHAGQIQGFFDIPVDNLFATPIFARHAKKKIKSKNTICVAPDVGGTERARALGKILNVGLAIVDKRRPKPGQSQVMNIIGDVKGKTCIIVDDIIDSGGTIVNAAKALKDRGAKEVYVYITHGVLSGEAVKKIKNSVIKNLVITDTIDNMNRVKGAKNIEVLSISSLMGEAIKRISNSTSVSDLFK

SEQ ID NO: 132261 - protein, 310 aa, Unknown
  Bacterial polypetide isolated from the Sargasso Sea
MKILSGTSNPSLSKSISKQLKLKLINTNIKNFADGEIYVEINENIRGNSVFVVQSTSTPANDNLMELLLCIDALKRSSAKSVTAVIPYFGYARQDRKVVPRTSISAKVVSNLITKAGANRIVTVDLHAGQIQGFFDMPVDNLFTTPLFARYIKKNIKSKNLTCVSPDAGGIERTRGLAKKINADLAIIDKRRPQAGKSQVMNVIGEIKNKNCIIVDDIIDSGGTIVNAVEALIKKGAKDVHVFVTHAVLSGDAVNKIKKSKIKKLIITDTIDNSRRIKNVGKIQVLSIAPLMAEAIKRISNSTSVSDLFN

SEQ ID NO: 132262 - protein, 175 aa, Unknown
  Bacterial polypetide isolated from the Sargasso Sea
MKLLSGTSNKPLSKDIAKFLKSKLVNSSIKNFADGEIYVELNENIRGNSIFIIQSISSPANDNLMELLLCIDALKRSSAKNITAVIPYFGYARQDRKVVPRTSISAKLVSNLITKAGADRVVTVDLHAGQIQGFFDIPVDNLFSTPIFARHVKKNIKSKNIVCVAPDVGGTERAR

SEQ ID NO: 132263 - protein, 317 aa, Unknown
  Bacterial polypetide isolated from the Sargasso Sea
MKNKSVDIFTGTANPEFAQEVSDILGIKISAADVGYFSDGELKVEIEENVRGHDTFIIQSTCSPTNKNVMEIMLIADALKRSSASRITAVVPYYGYARQDRRVRSARVPISAKVVADMFASVGIDRVLTIDLHSETIQGFFDMPADNVYATKFMVDDIKENNDRNEVVVVSPDVGGVVRSRALAKLLDDTDLAIIDKRRAAANQSEVMNIIGEVQGKVCIVPDDIIDTAGTLCNAAEALKNNGAKAVKAYITHPVLSGPAIERLNKSAIDELVVTNSIPLNKEAKKCSKIRVISIANIIAECITRLSNEESLSEMFL

SEQ ID NO: 132264 - protein, 319 aa, Unknown
  Bacterial polypetide isolated from the Sargasso Sea
MINKQTVGIFSGSASKVLSEEVAKILGIKLGEIDLGKFSDGEIKVEVLENVRGHEAYIIQSTCSPSNANLMELMLITDALKRSSASKITAILPYYGYARQDRRVRSARVPISAKVIADMLNSVGVDRVLTVDLHSESIQGFFDMPADNVYATKIMHDDIKSRTATDEQILVVSPDVGGVVRARALAKFLDESDLAIIDKRRASSNESEVMNIIGDVKGKSCIVPDDIIDTAGTLCNAAKALKDAGAAKVKAYITHPVLSGPAIERISDSAIDELVVTNSISLSPEAEKCSKIRVISLAPTIAECIRRLNNEESLSALFL

SEQ ID NO: 132265 - protein, 310 aa, Unknown
  Bacterial polypetide isolated from the Sargasso Sea
MYKESVLMKILSGTSNPTLSKSISKHLKTKLVNTNIKKFADGEIYVEINENIRGNSVFVIQSSATPANDNLMELLLCIDALRRSSAKSITAVIPYFGYARQDRKVVPRTSISAKLVSNLITNAGAHRVVTVDLHAGQIQGFFDMPVDNLFTTPIFARFIKKNIKSKNFICVSPDAGAIERTRALATKINADLAIIDKRRPEPGKSKVMNIIGNVKGKDCIIIDDIIDSGGTIINAADALVKKGARNVYVFITHAVLSGDAVKNIQKSRIKKLIITDTIDNSNKIKKANKIQVLSISQLMAEAIKRISNST

SEQ ID NO: 132266 - protein, 310 aa, Unknown
  Bacterial polypetide isolated from the Sargasso Sea
MKLLTGNSNKILSKNIAKYLKSKLVNSSIRKFSDGEIYVEINENIRGNSIFIIQSISSPANDNLMELLLSIDALKRSSAKNITAVIPYFGYARQDRKVVPRTSISAKLVSNLITKAGADRVVTVDLHAGQIQGFFDIPVDNLFATPIFARHVKKKIKSKKIICVAPDVGGTERARALGKLLNVGLAIVDKRRPKAGQSQVMNVIGDVKDKTCIIVDDIIDSGGTIINAAKALKNRGAREVYVYITHGVLSGDAVKKIKSSVIKNLVITDTIDNGKKTQNVKNIEVLPISGLMGEAIKRISNSTSVSDLFK

SEQ ID NO: 132267 - protein, 105 aa, Unknown
  Bacterial polypetide isolated from the Sargasso Sea
MLKPAKNLILFSGNANNVLAGKIAKKLGKNLGKAEVKRFSDGESDVRINVNVRGKDVFIIQSTCSPANENLMELSIMIDALRRASASRITAVIPYFGYARQDRRV

SEQ ID NO: 132268 - protein, 285 aa, Unknown
  Bacterial polypetide isolated from the Sargasso Sea
MKNNNLKIFSGRSNIDLATDIAKSLKQDLGAISIRTFSDGELWVKYEENIRGCDVFIIQSTNGPSENIIELALMVDAAVRASADTVTVVIPYFGYGRQDRKDQPRVPISSRVMIDILTAMGADRIITLDLHSTQIQGFAKIPFDNLYSRAVLFDAIKNENLEPSTSTVLAPDVGSVKMSQGYAKNLGMHFALIDKRRFAPNQAEVNHLIGELKGMDVLIIDDMIDTAGTIVNAAKEALDEGAKSVTVVATHGVLSGPAIERLKTASIKRIILTDTISIPLEKRLD

SEQ ID NO: 132269 - protein, 310 aa, Unknown
  Bacterial polypetide isolated from the Sargasso Sea
MKLLSGNSNKPLSKKIAKYLKSKLVNSSIRNFSDGEIYVEINENIRGNSIFLIQSVSSPANDNLMELLLCIDALKRSSAKNITAVIPYFGYARQDRKVAPRTSISAKLVSNLITKAGADRVVTVDLHAGQIQGFFDIPVDNLFATPIFARHVKKKMKSKNLICVAPDVGGTERARALGKLLNVGLAIVDKRRPKPGQSQVMNIIGDVKGKTCILVDDIIDSGGTIVNAAKALKDRGAKEVYVYITHGVLSGEAVKKIKNSVIKNLVITDTIDNMNRVKGAKNIEVLSISSLMGEAIKRISNSTSVSDLFK

SEQ ID NO: 132270 - protein, 218 aa, Unknown
  Bacterial polypetide isolated from the Sargasso Sea
RQDRKVAPRTSISAKLVSNLITKAGADRIVTVDLHAGQIQGFFDIPVDNLFATPIFARHVKKKLNKKNLICVAPDVGGVERTRALARKLDVGISIIDKRRPTPGKSQVMNVIGNVNGKTCIIVDDIIDSGGTIVNAAHALIERGAKEVHVYITHGVLSGEAVNKIKKSKIKNLVITDTIDNFSKIKKAKNIEVLTISNLLAEAIKRISNSTSVSDLFK

SEQ ID NO: 132271 - protein, 310 aa, Unknown
  Bacterial polypetide isolated from the Sargasso Sea
MKLLTGNSNKQLSQKISKHLKTKLVHSSIRKFSDGEIYIEINENIRGNSIFLIQSSSAPANDNLMELLLCIDALKRSSAKNITAVIPYFGYARQDRKVAPRTSISAKLVSNLITKAGADRIVTVDLHAGQIQGFFDIPVDNLFATPIFARHVKKNINKKNLICVAPDVGGVERTRALARKLDIGIAIIDKRRPAPGKSQVMNVIGNVKGKICIIIDDIIDSGGTIVNAAQALINRGAKEVHVYITHGVLSGEAVDRIKKSRIKKLVITDTIDNSSKIRNAKNIEVLTISNLLAEAIKRISNSTSVSDLFK

SEQ ID NO: 132272 - protein, 320 aa, Unknown
  Bacterial polypetide isolated from the Sargasso Sea
MLNKAKGSLKMKLVSGNSNRNLAENIGKYLNTPLADCTVKKFSDKEIFIEMNENCRGEDVFIIQSTSFPANDNLMELLILIDTLKRASAKRITAVIPYFGYARQDRKPGPRTPITAKLVANLIAKSGADRVLSMDLHAGQIQGFFDIPTDNLIAAPILLSDIQNKIGTNNAMVVSPDVGGVVRARLIASRIDSDLAIVDKRREKAGESEVMNIIGDVTDRTCFMIDDIVDSAGTLCNAAEALINAGAKEVYAHVTHGVLSGEAIKRVNNSALTKLVITDTINETDDIKNSDKIEIVSVVHLLGEAIRRISEERSVSSLFD

SEQ ID NO: 132273 - protein, 310 aa, Unknown
  Bacterial polypetide isolated from the Sargasso Sea
MKLLTGNSNKKLSGKIAKYLKERLVNSSIRKFKDGEIYIEINENIRGNNIFIIQSISSPANDNLMEMLLCIDALKRSSAKNITAVIPYFGYARQDRKVVPRTSISAKLVSNLITKAGADRVVTIDLHAGQIQGFFDIPVDNLFATPIFARHIKKRIKSKNIICVSPDVGGVARTRGLSKFLNSGLAIIDKRRPSPGKSEVMNVIGNVKDKCCIMVDDIIDSGGTIVNAAKVLKEKGAKEIHVYITHGVLSGDAVNKIRKSTIKNLVITDTIDNYNKIKNAKNIEILSVSNLMGEAIRRISNSTSVSFLFK

SEQ ID NO: 132274 - protein, 313 aa, Unknown
  Bacterial polypetide isolated from the Sargasso Sea
MANQDPIAKIFSCTQSIELSKKIAKHFGAELGNVNFSHYSDGEFQPSFEESVRGARLFIIGSTQPNSENLMELLLMIDAAKRSSARHITAVIPYFGWARQDRKDKPRVPIGAKLIANLIEAAGATRLITMDLHADQIQGFFEKPVDHLYASTIFIPYIQSLNLKKLTIASPDMGGSKRAYAYSRFLKSNVVICYKQRKKANVVSHMELIGKVEGKNVIIVDDMVDTAGTLTKAADLMVERGAKSVRAICTHGILSGKAYENIEKSKLKELIVTDSIAQEKKSSKVKVLSCAKLFADVMHNVNSNKSINSFFIK

SEQ ID NO: 132275 - protein, 311 aa, Unknown
  Bacterial polypetide isolated from the Sargasso Sea
MKIIACNSNKILAEAICSYIGVDLANASLRRFADREIFVEINENIRGEDVFIIQSTSHPANDHLMELLITIDAAKRGSAKRITAVIPYYGYARQDRKTGPRTPITAKLVANLITSAGAHRVLTMDLHAGQIQGFFDIPLDNIFSAPPIIKDMKEKFSKNSNLVITSPDVGGVVRARAFAKRLNAGLAIADKRREKAGESAVMNIIGDVKGKTCILLDDIADSAGTLCNAAKALKDSGAMEIYSYIAHGVLSGEALNRIESSAIKELVLTDSIEASNEVKNTKNIRHISIAPLMGEAIKRINSDSSVSALFD

SEQ ID NO: 132276 - protein, 311 aa, Unknown
  Bacterial polypetide isolated from the Sargasso Sea
MKIISCNSNQELAKSIASYIGVNLADASMRKFSDDEIFVEINENIRGEDVFIIQSTSHPANDHLMELLISIDAAKRGSAKRITAVIPYYGYARQDRKTGPRTPITAKLVANLITSAGADRVLTMDLHAGQIQGFFDIPLDNIFSAPPIIRDMKEKFAGNNDLVISSPDVGGVVRARAFAKRLNAGLAIADKRREKAGESEVMHIIGEVKDKTCILLDDIADSAGTLCNAAKSLKEHGAREIYSYIAHGVLSGKALEKIQNSNIKELVLTDSILASDAVKKSKNIRHISIAPLMGEAIKRINSDSSVSALFD

SEQ ID NO: 132277 - protein, 313 aa, Unknown
  Bacterial polypetide isolated from the Sargasso Sea
MASQEPIAKIFTCTQSHELSKKIAEHYGAKLGNVNFSHYSDGEFQPSFEESVRGARLFIIGSTQPNSENLMELLLMIDAAKRSSARHITAVIPYFGWARQDRKDKPRVPIGAKLIANLIEAAGATRLITMDLHADQIQGFFEKPVDHLYASTIFIPYIQSLKLKKLTIASPDMGGSKRAYAYSRFLKSNVVICYKQRKKANVVSHMELIGKVEGKNVIIVDDMVDTAGTLTKAADLMVERGAKSVRAICTHGILSGSAYENIEKSKLKELIVTDSIAQEKKSSKVKVLSCAKLFADVMQNVNSNKSINSFFIK

SEQ ID NO: 132278 - protein, 315 aa, Unknown
  Bacterial polypetide isolated from the Sargasso Sea
MSNRVLFTGNSNIDLAKKVAKNLETDLGPMKVGTFSDGEINVEVNENVRGKDTFIIQSTSNPAEKNLMELILMVDALKRASARSVTAVIPYFGYSRQDRRVRSARVPISAKVIADMLSEVGISRIITLDIHSEQIQGFFSFPVDNIYTANIMVKGLLEKYDVEDLQVVSPDTGGVIRARSVAKTLGVQDLAIIDKRREKANESEVINLIGDVEGKVCIVPDDLIDTAGTLSNASHALKDKGAKEIIAYITHPVLSGDAIKNLNNSAIDKLVVSNSIDIGDKSKKCPKIDVFDISPILSEAITRIATGDSISELFK

SEQ ID NO: 132279 - protein, 226 aa, Unknown
  Bacterial polypetide isolated from the Sargasso Sea
PYFGYARQDRRVRSARVPISARVIAEVLTSVGISRVITLDIHSEQIQGFFSFPVDNIYTSNIMCKEIIGKYKVEDLQVVSPDTGGVIRARSVAKTLGVKDLAIIDKRREKANESEVINLIGDVKDKVCIVPDDLIDTAGTLSNASHALKAEGAREVIAYITHPVLSGNAIENLNKSAIDRLVVSNSIDIGDKSEKCPKIDVFDISPIIAESIKRITTGDSISELFK

SEQ ID NO: 132280 - protein, 220 aa, Unknown
  Bacterial polypetide isolated from the Sargasso Sea
MKILSGTSNLKLSKSIAKNLKLKLINTNIRRFADGEIYIEINENIRGNSVFVVQSTCDPANDNIMELLLVIDALKRSSAKTITAVIPYFGYARQDRKVAPRTSISAKVMANLITNAGATRVVTVDLHAGQIQGFFDMPVDNLYTAPLFAKYIKKKLGNKKLICVSPDVGGVARTRDLANRIKADLAIIDKRRPAPGKSEVMNILGEVRNKTCIIVDDIID

SEQ ID NO: 132281 - protein, 317 aa, Unknown
  Bacterial polypetide isolated from the Sargasso Sea
MKKEKLILFAGPASKDLGSQIARYLNEPLGFIQVGAFSDGETTIEISQNIRGMDIFLVQSTYQPGNEHLMQLLLMADACKRASANSVSAVIPYFGYSRQDRRPRNTRGPVSAKLVADLIETADIKRVITVDLHADQIEGFFSIPVDNIYSSTILMSDMWRQGYPDQVIVSPDVGGVQRARAIARRLGNAGLAIIDKRREAANKSEVMNIIGDVDQKTAIIFDDMVDTAGTLCNAAAALKEKGALKTVAYAAHPVLSGPAIERIADSELDELVVTDTIPLTQEAKDTGKIRQLTIAELLGETIERIVADQSVSSLYAE

SEQ ID NO: 132282 - protein, 317 aa, Unknown
  Bacterial polypetide isolated from the Sargasso Sea
MSKDKFDLFTGTANPELANEVSKILGIPLSAADVGYFSDGEIKVQIEDNVRGHDTFIIQSTCTPQNKNLMELMLLADALKRSSASRITAVVPYYGYARQDRRIRSARVPISAKVVADMFSSVGIDRVLTIDLHSESIQGFFDMPADNVYASKLMVDDIKDNNERKDIVLVSPDVGGVVRTRAIAKLLDDSDLAIIDKRRAAANQSEVMNIIGDIEGKVCIVPDDIIDTAGTLCNAANALKEKGAKAVKAYITHPVLSGPAIERLEKSDIDELVVTNSIPLSQEAQKCSKIRVISLGSTIAECIKRLSSEKSLSEMFL

SEQ ID NO: 132283 - protein, 101 aa, Unknown
  Bacterial polypetide isolated from the Sargasso Sea
KVCIVPDDIIDTAGTLCNAAIALKEKGAKAVKAYITHPVLSGPAIERINDSAIDELVVTNSIPLNKEAQKCSKIRVISIANIIAECITRLSNEESLSEMFL

SEQ ID NO: 132284 - protein, 317 aa, Unknown
  Bacterial polypetide isolated from the Sargasso Sea
MKKEKLILFAGPASKDLGSQIARYLNEPLGFIQVGAFSDGETSIEISQNIRGMDVFLVQSTYQPGNEHLMQLLLMADACKRASAKSVSAVIPYFGYSRQDRRPRNTRGPVSAKLVADLIETADIKRVITVDLHADQIEGFFSIPVDNIYSSTILMSDMWRQGYPDQVIVSPDVGGVQRARAIARRLGNAGLAIIDKRREAANKSEVMNIIGDVDQKTAIIFDDMVDTAGTLCNAAAALKEKGALKTVAYAAHPVLSGPAIERIADSELDELVVTDTIPLTQEAKDTGKIRQLTIAELLGETIERIVADQSVSSLYAE

SEQ ID NO: 132285 - protein, 174 aa, Unknown
  Bacterial polypetide isolated from the Sargasso Sea
MKILSGTSNPKLSKEISKLLKLKLVNTNIKRFSDGEIYIEINENIRGNSVFVIQSTSNPANDNLMELLLCIDALRRSSAKNITAVIPYYGYARQDRKVVPRTSISAKVVANLITNAGASRVVTVDLHAGQIQGFFDMPVDNLFTTPLFARYIKKKLKNKKLICVSPECWWSSKN

SEQ ID NO: 132286 - protein, 185 aa, Unknown
  Bacterial polypetide isolated from the Sargasso Sea
MKLLSGNSNKPLSKNIAKYLKSKLVNSSIRNFSDGEIYVEINENIRGNSIFIIQSVSSPANDNLMELLLCIDALKRSSAKNITAVIPYFGYARQDRKVVPRTSISAKLVSNLITKAGADRVVTVDLHAGQIQGFFDIPVDNLFATPIFARHVKKKIKSKNMICVAPDVGGTERARSLGKLLNVGL

SEQ ID NO: 132287 - protein, 236 aa, Unknown
  Bacterial polypetide isolated from the Sargasso Sea
MDSASIAIISGNAHPKLAQDIAKYLHLPLTKAQVGRFSDGEFNVEILENIRGKDAYIVQSTCPPAAENLMELLVMTDACRRASANQITAVVPYFGFARQDRRPRSSRVPITAKLVARLFASAGIDRVLTVDLHAEQIQGFFDIPVDNVYASPILLGDAWKKKHKKMVVVSPDVGGVVRGRALAKRLDNADLVIIDKRRSKANKSEVMNIIGDVEEKNCIMIDDMVDTAGTLCQAAD

SEQ ID NO: 132288 - protein, 317 aa, Unknown
  Bacterial polypetide isolated from the Sargasso Sea
MATKILSCNSNRPLADAISKYMELPLTKADVKRFSDMEVFVEIQENVRGEDVFLIQSTSSPTNDNLMELLVALDALKRGSANRITAVIPYYGYARQDRKSGPRTPISAKLVANLITVAGAHRVVTVDLHAGQIQGFFDIPTDNLFAAPVFQSDIKEKYGDKSLVIVSPDVGGVVRARALAKSLDADLAIIDKRRERAGVSEVMNIIGEVDDRHCILVDDIVDSGGTLCNAAEALMAAGGLSVSAYISHGVLSGGAAARIKDSPLTELVTTDSIQATDAVLAAPNMRQITIAPLLGEAILRIAESRSVSSLFDYNTSN

SEQ ID NO: 132289 - protein, 310 aa, Unknown
  Bacterial polypetide isolated from the Sargasso Sea
MKILTGNSNKNLSSKISKYLKNKLVNSSIRKFSDGEIYIEINENIRGNSIFIIQGISSPANDNLMELLLCIDALKRSSAKNITAVIPYFGYARQDRKVVPRTSISAKLVSNLITKAGADRIVTVDLHAGQIQGFFDIPVDNLFSTPIFARHIKRKIKSKNLICVAPDVGGVERTRALGRKLDVGLAIIDKRRPAPGKSQVMNVIGNVKGKTCIITDDIIDSGGTIVNAADALIKRGAKEVYVYVTHGVLSGEAVEKIKKSKIKNLVVTDTIDNSDKVKKSRNIEVLSISNLLAEAMRRISNSTSVSDLFK

SEQ ID NO: 132290 - protein, 317 aa, Unknown
  Bacterial polypetide isolated from the Sargasso Sea
MSNSNFDIFTGSANPELASEVSKILGIDISHADVGEFSDGEIKVQIEDNVRGHDTFIIQSTCAPTNKNVMEIMLIADALKRSSASKVTAIVPYYGYARQDRRVRSARVPISAKVVADMFASVGIDRVLTIDLHSETIQGFFDMPADNVYATKLMVDHIKDNNEKKEVIVVSPDVGGVVRSRALAKLLDDTDLAIIDKRRAVANQSEVMNIIGDIDGKVCIVPDDLIDTAGTLCNAADALKEKGAKAVKAYITHPVLSGPAIERLNNSSIDELVVTNSIPLNKEAQKCSKIRVISLASTIAECIKRLSNEESLSEMFL

SEQ ID NO: 132291 - protein, 310 aa, Unknown
  Bacterial polypetide isolated from the Sargasso Sea
MKLVSGNSNRDLAENIGKYLNTPLANCTVKKFSDKEIFVEMNENCRGEDVFIIQSTSFPANDNLMELLILIDTLRRASAKRITAVIPYYGYARQDRKPGPRTPITAKLVANLIAKSGADRVLSIDLHAGQIQGFFDIPTDNLFAAPVLLSDVEKKIGSNSAIVVSPDVGGVVRARLIASRINSDLAIVDKRREKAGESEVMNIIGDVSNRSCFMIDDIVDSAGTLCNAAEALLNAGAKEVYAHVTHGVLSGEAIKRVNNSSLTKLVITDTINETDDIKNSDKIETVSVVHLLGEAIRRISEERSVSSLFD

SEQ ID NO: 132292 - protein, 206 aa, Unknown
  Bacterial polypetide isolated from the Sargasso Sea
SAKVVSNLITNAGANRIVTVDLHAGQIQGFFDMPVDNLFTTPIFARYIKKNIKSNNLTCVSPDAGGIERTRGLAKKINAELAIIDKRRPQAGKSQVMNIIGDIKNKNCIIVDDIIDSGGTIVNAVEALIKKGAKDVHVFVTHAVLSGDAVNKIKKSKIKKLIITDTIDNSRRIKNVSKIQVLSIAPLMAEAIKRISNSTSVSDLFN

SEQ ID NO: 132293 - protein, 238 aa, Unknown
  Bacterial polypetide isolated from the Sargasso Sea
MKILTGNSNKHLSQKISKFLKNRLVNSNIRKFADGEIYIEINENIRGNSIFLIQSVSSPANDNLMELLLSIDALKRSSAKNITAVIPYFGYARQDRKVVPRTSISAKLVSNLIAKAGADRVVTVDLHSGQIQGFFDIPVDNLFATPIFARHIKKKLKKNNIICVAPDVGGTARARALGKLLNVDLAIVDKRRPAPGKSEVMNVIGNVKNKTCILVDDIIDSGGTIVNAASELKKEELK

SEQ ID NO: 132294 - protein, 243 aa, Unknown
  Bacterial polypetide isolated from the Sargasso Sea
IMADALHRASSQRITAVIPYYGYARQDRRPRSARVAISSKVVADIISTTGIDRILTVDLHADQIQGFFTIPVDNVYGSPVLVDDILLKNYSMPIVVAPDVGGVVRARAIAKQIGDLDLAIIDKRRPRANETEVMTVIGDVAGKTCIIVDDIVDTAGTLCTAAAALKKEGAEKVVAYITHAVFSGSAIERISNSELDEIVVTDTIPLHAKAQECSKIDQLSLANLLAESIRRVSNEESISAMFR

SEQ ID NO: 132295 - protein, 227 aa, Unknown
  Bacterial polypetide isolated from the Sargasso Sea
VPYFGYARQDRRVRSARVPISAKVVADMFASVGIDRVLTIDLHSETIQGFFDMPADNVYATKFMVDDIKDNNERDEVVVVSPDVGGVVRARALAKLLDDTDLAIIDKRRAAANQSEVMNIIGDIQGKVCIVPDDIIDTAGTLCNAANALKENGAKAVKAYITHPVLSGPAIERLENSSIDELIVTNSIPLTPDAKKCSKIRVISLANIIAECIKRLSNEESLSEMFL

SEQ ID NO: 132296 - protein, 234 aa, Unknown
  Bacterial polypetide isolated from the Sargasso Sea
FGGENTAVVPYFGYSRQDRRVRSARVPITAKVVANMIESIDIDRLLTIDLHADQIQGFFDIPVDNIYATPLFVADIYKQKYPKMLVVSPDIGGVVRARALAKQLNCDLAIIDKRRPEANVSEVMQIIGDVSEKTCIMVDDIVDTAGTLCGAAKALKGEGAKKVLAYITHPVLSGKAYENIKKSMLDEIIVTDTIPLHEKAKNITNIRQISVSEMLAETIRRIHQRESVSTLFMD

SEQ ID NO: 132297 - protein, 228 aa, Unknown
  Bacterial polypetide isolated from the Sargasso Sea
TAVIPYFGYARQDRKVAPRTSISAKLVSNLITKAGADRVVTVDLHAGQIQGFFDIPVDNLFATPIFARHVKKKIKSKNLICVAPDVGGTERARALGKILNVGLAIVDKRRPKPGQSQVMNIIGDVKGKTCILVDDIIDSGGTIVNAAKALKDRGAKEVYVYITHGVLSGEAVNKIKKSVIKNLVITDTIDNMNRVKGAKNIEVLSISGLMGEAIKRISNSTSVSDLFK

SEQ ID NO: 132298 - protein, 240 aa, Unknown
  Bacterial polypetide isolated from the Sargasso Sea
MKIITCNSNKILAEAISSYIGVPLANATLRNFADREIFVEINENIRGEDVFIIQSTSHPANDHLMELLIAIDTVKRGSARRITAVIPYYGYARQDRKTGPRTPITAKLVANLITSAGADRVLTMDLHAGQIQGFFDIPLDNIFSAPPIIKDMKRKFANNNELVIASPDVGGVVRARAFAKRLNAGLAIADKRREKAGESEVMNIIGDVNNKTCILLDDIADSAGTLCNAATALKENEPKK

SEQ ID NO: 132299 - protein, 221 aa, Unknown
  Bacterial polypetide isolated from the Sargasso Sea
MKLLSGNSNKPLSKNIARYLKSKLVNSSIRNFSDGEIYVEINENIRGNSIFLIQSISSPANDNLMELLLCIDALKRSSAKNITAVIPYFGYARQDRKVAPRTSISAKLVSNLITKAGADRVVTVDLHAGQIQGFFDIPVDNLFATPIFARHVKKKIKSKNLICVAPDVGGTERARALGKMLNVGLAIVDKRRPKPGQSQVMNIIGDVKGKTCIIVDDIIDS

SEQ ID NO: 132300 - protein, 248 aa, Unknown
  Bacterial polypetide isolated from the Sargasso Sea
MEIMLLADALKRSSASRITAVVPYYGYARQDRRVRSARVPISAKVVADMFASVGIDRVLTIDLHSETIQGFFDMPADNVYATKLMVNDIKDTNERKEVIVVSPDVGGVVRSRAIAKLLDDTDLAIIDKRRAAANQSEVMNIIGEIKDKVCIVPDDIIDTAGTLCNAANALKEKGAKAVKAYITHPVLSGPAINRINESELDELVVTNSIPLSKEAQKCSKIRVISIAKTIAECITRLSNEESLSEMFL

SEQ ID NO: 132301 - protein, 145 aa, Unknown
  Bacterial polypetide isolated from the Sargasso Sea
MKILTGNSNKQLSNKISKNLKNKLVNTSIRKFADGEIYIEINENIRGNSIFIIQSVSSPANDNLMELLLCIDALKRSSAKNITAVIPYFGYARQDRKVVPRTSISAKLVSNLITNAGADRVVTVDLHAGQIQGFFDIPVDNLFAT

SEQ ID NO: 132302 - protein, 207 aa, Unknown
  Bacterial polypetide isolated from the Sargasso Sea
TAKLVANLITSAGADRVLTMDLHAGQIQGFFDIPLDNIFSVRPIIDDVKERFNGNKDLVVASPDVGGVVRARAFAKRLEAGLAIADKRREKAGESEVMNIIGDVKDKTCILLDDIADSAGTLCNAAEALSKNGAKEIYSYIVHGVLSGDALKKIENSSIKELVLTDTIEPSKEVKSTKNIRHISIAPLMGDAIKRINTDTSVSALFD

SEQ ID NO: 132303 - protein, 313 aa, Unknown
  Bacterial polypetide isolated from the Sargasso Sea
IIDIFSGSSSIDLSDEVAKLLNNELSSIELGTFSDGEIQVEINENVRGHDTFIIQSTCFPADKHLMELMLLADALKRSSASKITAVVPYFGYARQDRRVRSSRVPISAKVVSDMFSSVGINRVLTLDLHSETIQGFFDMPADNVYATKLMVEDISKNYSKDNLVIVSPDVGGVVRSRALAKYLDGLDLAIIDKRRDKANESEVMNIIGDVAGKECIVPDDIIDTAGTLCNAAKALKDSGASKVSAYITHPVLSGPAIERISNSEIDELVVTNSIPLTKDGQKCSKIRVISIAPLISECIKRLSNEESLSAVFL

SEQ ID NO: 132304 - protein, 189 aa, Unknown
  Bacterial polypetide isolated from the Sargasso Sea
MLKSEELINKVKNYNKFLNPETLSKAYDFALKAHEKQKRDEGSPYIIHPIAVANILTELKLDSATIATGLLHDTIEDTHATYNTIEAEFGKEVADLVDGVTKISEFENQAISNSKAENFRKLILATSKDIRVLLVKLADRLHNMRTIKVVEKEKQIRKAKETMEIYAPLADRMGMHRIRDELETFHLRF

SEQ ID NO: 132305 - protein, 192 aa, Unknown
  Bacterial polypetide isolated from the Sargasso Sea
MRQFQLVEKVRSYDPSADEEALNRAYVFSMKAHGTQQRASGDPYFSHPVEVAGILSEKKLDTASIVTGLLHDTVEDTVATLEDIESLFGNEISRLVDGVTKLGQLELQSDKTKQAENFRKLLLAMSEDIRVLLVKLADRLHNMRTLSYISSSEKRIQIARETMDIYAPLAERIGIRDWKDELEDLAFMELNA

SEQ ID NO: 132306 - protein, 270 aa, Unknown
  Bacterial polypetide isolated from the Sargasso Sea
MSEAAANSKKKKEIEVSKTILPENKKCESESLNYEIKIPDWLLKDINNFENSNDLKDKNQNLIVKAFKLAYKAHEGQLRASGEPYIIHPVAVANLLKEIGASSSVIAAGLLHDVVEDTGIDLAEIEANFGLEVKILVEGVTKLGGIHFNNRTEAQAENLRKMFLAMASDIRVVLVKLADRLHNMRTIEWLNDERKQRIARETREIYAPLANRLGINRFKWELEDLAFKFLEPKQYQDLKDQISVKRSDREKRLKVTLNLMKENLVSAGFK

SEQ ID NO: 132307 - protein, 289 aa, Unknown
  Bacterial polypetide isolated from the Sargasso Sea
DEIGRLVDGVTKLGQLELQSDQTKQAENFRKLLLAMSEDIRVLLVKLADRLHNMRTLSHVPSPEKRSRIARETMDIYAPLAERIGIRDWKDELEDLAFMELNADARDSILNRLGFLREQGEDLVGQVVKELEHTLAVSGVEARVLGREKKAYSIWRKMQRRDVEFGQLSDIVAFRIIVDGIEDCYRTLGIIHNRYQVVPGRFKDYISIPKPNGYSSIHTGVMGPQMQRVEVQIRTQLMHEIAELGVAAHWQYKQGNSELAKEGRQYRWLRELLEILEHAVEPEDSSSIR

SEQ ID NO: 132308 - protein, 278 aa, Unknown
  Bacterial polypetide isolated from the Sargasso Sea
MPENKRYESESLNYEIKIPDWLLRDINNYEKSNKDNDDNQNLIVKAFKLAYKAHDGQLRASGEPYIIHPVAVANLLKEIGASSSVIAAGLLHDVVEDTGIDLSEIETNFGLEVKILVEGVTKLGGIHFNNRTEAQAENLRKMFLAMASDIRVVLVKLADRLHNMRTIEWLNDERKQRIARETREIYAPLANRLGINRFKWELEDLAFKFLEPKEYQDLKDQIAVKRSDREKRLKVTLNLMKENLVSAGLKNFEITGRPKHLYGIWSKMERQQKHFHEI

SEQ ID NO: 132309 - protein, 317 aa, Unknown
  Bacterial polypetide isolated from the Sargasso Sea
DLKLDESTIKTALLHDTIEDTSRSLKQLELAFGKEVSQLVDGVTKLTNLELSSLETKHAENFRKLFMAMSKDVRVLLVKLADRLHNMRTIKALPIDKQIRKSKETMEIFAPLAGRMGMQFMREELEDLSFRVLNSEARNSIIRRFITLRKETDDLVPKIIDDIKQQLKKENINAIVTGREKKPYSIWRKMQYKKEGFTRLSDIFAFRIVTKNETDAYIAMGSVHRRWRAVPGNFKDYISHPKSNGYRSIHTTVSGRDGKRVEVQIRTEEMNEVAESGVAAHWSYRDGERVKNPFVVDPFKWLRGLSDGFINSDNPSE

SEQ ID NO: 132310 - protein, 251 aa, Unknown
  Bacterial polypetide isolated from the Sargasso Sea
MLHDTIEDTNKSFRDVLDIFGSEIANLVDGVTKLSNLEVASLERKQAENFRKLIVAISKDLRVLLVKLADRLHNMRTIRAVSNDRQLVKANETMDIYAPLAGRMGIQSIRDELEDLSFRILNPEGRNSIIRRFLKLKKESDDLIPKIINDIEDQLDSVGVTATVSGREKKPYSIWRKIQDKQQAFYKLSDIFGFRIITANEKDVYTALGAVHSRWSAVPGRFKDYISQPKSNGYRSIHTTVSGRDGKRVEV

SEQ ID NO: 132311 - protein, 301 aa, Unknown
  Bacterial polypetide isolated from the Sargasso Sea
MDQLRGYLKKNGIGGAEVNGRAKHIYSIWRKMQKKHLDFGEVYDVRAVRILVPEVRDCYAALGVVHSLWQHVPKEFDDYIASPKGNGYQSLHTAVVGPERKMLEVQIRTFDMHEEAELGVCAHWRYKEGAKKGKSGVTDYEQRIAWLRQVLEWHEELGDDSPDAMVDELRHGLVSDRVYVFTPEGHVVDLESGATPVDFAYHIHTEVGHRCRGAKVNGHIVPLNYSLNTGEQVTILTTKEGGPSRDWLTPSLGYVATSSARARIQQWFKRQDRDVHIVQGRTILEKEMSRLALDKVDLDTL

SEQ ID NO: 132312 - protein, 162 aa, Unknown
  Bacterial polypetide isolated from the Sargasso Sea
MLKSEELINKVKNYNKFLNPETLSKAYDFALKAHEKQKRDEGSPYIIHPIAVADILTELKLDSATIATGLLHDTIEDTYATYNTIESEFGKEVADLVDGVTKISVFENQAISNSKAENFRKLILATSKDIRVLLVKLADRLHNMRTIKVVEKEKQIRKAKET

SEQ ID NO: 132313 - protein, 289 aa, Unknown
  Bacterial polypetide isolated from the Sargasso Sea
RAVVIKLAERVCLLRAVKNADEETRVLLAREIADIYAPLANRLGIGQLKWELEDISFRYLHPDTYKDIAKQLDGKRLDREVYIEKFVEQLQQRLDEDHIRAKVYGRPKHIYSIWRKMKGKHLKFDELFDVRAVRIVTERLQDCYGALGVVHTLWHHIPREFDDYVANPKPNGYQSIHTVVVGPEGKTVEIQIRTQDMHEDAELGVAAHWKYKEGNHSGKQSGYEEKINWLRKILQWQEDVVESGNLVEEVRSQVFEDRVYVFTPSGEVVDLPLGSTVLDFAYYIHSQVG

SEQ ID NO: 132314 - protein, 267 aa, Unknown
  Bacterial polypetide isolated from the Sargasso Sea
MINNSELIDKIKSYNKFLNSKSLNKAYSFALNAHQNQKREEGVPYIIHPVAVANILTELKLDSATITTGLLHDTIEDTNVTYETVRKEFGEEVANLVDGVTKLSALEDKASNNSKAENFRKLILATSKDIRVLLVKLADRLHNMRTINFVKDKEKIIRKAKETMEIYAPLADRMGMNRIRDELEDLSFSVLNKPARDLILDRLKFIKSNREDTFKLIAAELIKLLKDNGVNATITGREKTPFSIWRKIQNKKVSLEQLTDIIGFRIL

SEQ ID NO: 132315 - protein, 232 aa, Unknown
  Bacterial polypetide isolated from the Sargasso Sea
MLDASSPQDSSRTDSAPAPVVCGRPELRRHPVRHPDEYNIPLPEWLRQCILNVPPGLGQSCPTDPEALLVAAFDFGFQLHEGQFRASGDPYIVHPVAVADLLRDIGASASVIAAGFLHDVVEDTDVTLDQIELHFGSEVRELVEGVTKLGGIHFNNRTEAQAENLRRMFLAMASDIRVVLVKLADRLHNMRTLGALKEEKRQRIARETKEIYAPLANRLGIGRFKWELEDLA

SEQ ID NO: 132316 - protein, 294 aa, Unknown
  Bacterial polypetide isolated from the Sargasso Sea
GASSSVVAAGLLHDVVEDTGIDLSEIEANFGLEVKILVEGVTKLGGIHFNNRTEAQAENLRKMFMAMASDIRVVLVKLADRLHNMRTIEWLNDERKQRIARETREIYAPLANRLGINRFKWELEDLAFKFLEPREFQDLKDQIAVKRSDREKRLKVTLNLMKENLVSAGLKNFEITGRPKHLYGIWSKMQRQQKQFHEIYDVAALRIIVDNSDSCYRALAVVHDTFKPIPGRFKDYIGLPKPNGYQSLHTSVIGRHRPIEVQIRTTSMHQIAEYGIAAHLAYKEGGSPAKSNAE

SEQ ID NO: 132317 - protein, 189 aa, Unknown
  Bacterial polypetide isolated from the Sargasso Sea
MLKSEELINKVKSYNKFLNPETLSKAYDFALKAHKTQRRDEGVPYIVHPLAVADILSDLKLDSATIATGLLHDTIEDTEATYETIREEFGSEVADLVDGVTKISQFQKKAGENSIAENFRKLILATSKDIRVLLVKIADRLHNMRTIKFVKNKDKQIRKAKETMEIYAPLADRMGMNRIRDELEDLSFQ

SEQ ID NO: 132318 - protein, 183 aa, Unknown
  Bacterial polypetide isolated from the Sargasso Sea
MLKSEELINKVKSYNKFLNPQTLTKAYDFALKAHKTQRRDEGVPYIVHPIAVANILSDLKLDSATIATGLLHDTIEDTSATYENIKEEFGVEVADLVDGVTKISQFQKKAGENSKAENFRKLILATSKDIRVLLVKIADRLHNMRTIKFVKDKEKQVRKAKETMEIYAPLADRMGMNRIRDEL

SEQ ID NO: 132319 - protein, 171 aa, Unknown
  Bacterial polypetide isolated from the Sargasso Sea
MLKSEELINKVKNYNKFLNPETLSKAYDFALKAHEKQKRDEGSPYIIHPIAVANILTELKLDSATIATGLLHDTIEDTHATYNTIEAEFGKEVADLVDGVTKISEFENQAISNSKAENFRKLILATSKDIRVLLVKLADRLHNMRTIKVVDKEKQIRKAKETMGNLCATRR

SEQ ID NO: 132320 - protein, 296 aa, Unknown
  Bacterial polypetide isolated from the Sargasso Sea
TIEDTKASYAEVETRFGTEVAELVDGVTKLTNLQLSSSETKQAENFRKLFMAMSKDLRVILVKLADRLHNMRTIDFMRPEKQAQKARETMEIFAPLAGRMGMQWMREELEDLSFKVLNPEGRLSIMRRFVTLQRESGDVIERITADMRKELDAKGIEADVFGRAKKPYSIWRKMQEKNQGFSRLSDIYGFRIITRSEEDCYRVLGAIHQRWRAVPGRFKDYISQPKTNGYRSIHTTVSGRDGKRVEAQIRTRQMHDVAETGVAAHWSYRDGVRTQNPFAVDPAKWIARLTEQMGSE

SEQ ID NO: 132321 - protein, 194 aa, Unknown
  Bacterial polypetide isolated from the Sargasso Sea
MLKSEELINKVKNYNKFLNPETLSKAYDFALKAHEKQKRDEGSPYIIHPIAVANILTELKLDSATIATGLLHDTIEDTYATYNTIESEFGKEVADLVDGVTKISVFENQAISNSKAENFRKLILATSKDIRVLLVKLADRLHNMRTIKVVEKEKQIRKAKETMEIYAPLADRMGMHRIRDELEDLSFEVLNEDA

SEQ ID NO: 132322 - protein, 308 aa, Unknown
  Bacterial polypetide isolated from the Sargasso Sea
MLNAASTPKEPRTSTGSATARCALPEVRRHPVRHPDDYGIDLPDWLRECIANVPPGIGQSCPTDPEALLVSAFDFGFQLHEGQFRASGDPYIVHPVAVADLLRDIGASAPVIAAGFLHDVVEDTDVTPDQIELHFGSEVRELVEGVTKLGGIHFNDRTEAQAENLRRMFLAMASDIRVVLVKLADRLHNMRTLGALKEEKRQRIARETREIYAPLANRLGIGRFKWELEDLAFKLLEPEAFREIQEEVATKRSEREQRLGVTVGLLNERLERAGLEHCEVSGRPKHLFGIWSKMQRQQKEFHEIYDVA

SEQ ID NO: 132323 - protein, 241 aa, Unknown
  Bacterial polypetide isolated from the Sargasso Sea
MRQYELVERVKAYDPDACETTLNRAYVYATQKHGSQKRASGDPYFSHPIEVAGILTNYKLDCDTIITALLHDTIEDTDATPEEITKLFGSNIMKLVDGVTKLTQIELKSADSKQAENFRKLLLAMSEDIRVLLVKLADRLHNMRTLHYISKPEKRVRIAAETLEIYAPLAERIGMHDIKEELEDLAFQHINPEARDSILARLEFLRQKDDNVVSRIVSELTDVVSRQGLKVDIYGREKRPY

SEQ ID NO: 132324 - protein, 213 aa, Unknown
  Bacterial polypetide isolated from the Sargasso Sea
FETVKKEFGEEVARLVDGVTKLSALEDKATNNSKAENFRKLILATSKDIRVLLVKLADRLHNMRTIHFLKDKEKIIRKAKETMEIYAPLADRMGMNRIRDELEDLSFSVLNKPARELILDRLKFIKSNREDTFKLISAELIKLLNSCGISAKINGREKTPFSIWRKIQNKKISLEQLTDIIGFRIIVDNVEDCYKTLGIFHSKFSAIPGKFKD

SEQ ID NO: 132325 - protein, 164 aa, Unknown
  Bacterial polypetide isolated from the Sargasso Sea
MIRHEDLIEKVKSYEPHVDPMALGEAYNFSMARHGAQRRASGAPYFSHPAEVAVILADLRLDVDSIITALLHDTVEDGVAELGEIEEKFGPNVAKLVDGVTKLGKLELGRDTTVRQAENFRKLLLAISEDIRVLLVKLADRLHNMRTLHYISNSGKRLRIARET

SEQ ID NO: 132326 - protein, 242 aa, Unknown
  Bacterial polypetide isolated from the Sargasso Sea
MIRQYELVETVKSYDRNADEEALNKAYVFAMRAHGAQTRASGDPYFSHPLEVAGILTEYKLDAKSIITALLHDTVEDTEVTPDDICSQFGDEIGQLVDGVTKLTQIELQSDQSDQAENFRKLVLAMSEDIRVLLVKLADRLHNMRTLKFITSQSKRQRIALETMEIYAPLAERIGMQEMKNELEDLAFAVLNEEARESITARLQFLRDEGKDNVASIVEELGRTLAAEGLRASVTGREKTPY

SEQ ID NO: 132327 - protein, 220 aa, Unknown
  Bacterial polypetide isolated from the Sargasso Sea
MVCIEELIRKIKSYNPNADFDLIKKSYNYGFNAHKGQYRASGEIYFTHPVEVANIVIDLKLDESTIKTALLHDTIEDTSRSLKQLEVAFGKEVSQLVDGVTKLTNLELSSLETKHAENFRKLFMAMSKDVRVLLVKLADRLHNMRTIKALPIDKQIRKSKETMEIFAPLAGRMGMQFMREELEDLSFRVLNSEARNSIIRRFITLRKETDDLVPKIIDDI

SEQ ID NO: 132328 - protein, 236 aa, Unknown
  Bacterial polypetide isolated from the Sargasso Sea
DSDKDQLRTVYQYCLTLGDEALTNRLLVRGVEMVGILLMLSMDLGTLKAAIIYPFVEAGLISQERMDEDFGPKIAKLVEGVLEMEAIRSLQTLHRSETSPEQVDNVRRMLLAMVEDVRAVVIKLAERIACLREAKKADEETRVLMAQEITNIYAPLANRLGIGQLKWELEDLAFRYLHPDTYKQIAKQLDEKRLDRERYIREFVQSLRDALKEAGVEAEVYGRPKHIYSIWRKMQK

SEQ ID NO: 132329 - protein, 262 aa, Unknown
  Bacterial polypetide isolated from the Sargasso Sea
FDDVLAFVRERAGDVRLFSGELLADHSAGTASIMRTLNVDPSAMQAAALFVLTPHLSDPERELTERFGDEVARLVSDVRKLLRLGTVSLRAAQNAGADAGRDAAEERRTQIEALRKMLLAFAQDIRVVLIRLASRLQSLRYYAAAKIDPPPDVARETLEIYAPLANRLGIWQLKWELEDLAFRFEDPVTYKRIAKLLDEKRIEREAYVTQAIDRLQQELADAHIQADVSGRPKHIYSIWRKMRGKELDFSELYDVRAFRVIV

SEQ ID NO: 132330 - protein, 204 aa, Unknown
  Bacterial polypetide isolated from the Sargasso Sea
MLNSNDLINKVKTYNKFLNPETLTKAYDFALKAHEKQKRDEGSPYIIHPVAVADILTDLKLDSATIATGLLHDTIEDTHATYQTIEKEFGKEVADLVDGVTKLSEYENQAISNSKAENFRKLIIATSKDIRVLLVKIADRLHNMRTIKFVVDQEKQIRKAKETMEIYAPLADRMGMNRIRDELEDLSFNILNPEARKLIKDRLD

SEQ ID NO: 132331 - protein, 231 aa, Unknown
  Bacterial polypetide isolated from the Sargasso Sea
MLSAHDLVDAIKEYNPSTNVHLIEKAYHFGLDAHAGQMRKSGEPFFSHPVQVAKILSELKLDDASIITALLHDTIEDTNKSFRDVSDLFGSEIANLVDGVTKLSNLEVASLERKQAENFRKLIVAISKDLRVLLVKLADRLHNMRTIRAVNNDRQLVKANETMDIYAPLAGRMGIQSIRDELEDLSFRILNPEGRNSIIRRFLKLKKESDDLIPKSSMILKINWLQLASKQ

SEQ ID NO: 132332 - protein, 254 aa, Unknown
  Bacterial polypetide isolated from the Sargasso Sea
RTSTGSATVGCALPEVRRHPVRHPDDYGIALPDWLRECIANVPPGIGQSCPTDAEALLVSAFDFGFQLHEGQFRASGDPYIVHPVAVADLLRDIGASAPVIAAGFLHDVVEDTDVTPDQIELHFGSEVRELVEGVTKLGGIHFNDRTEAQAENLRRMFLAMASDIRVVLVKLADRLHNMRTLGALKEEKRQRIARETREIYAPLANRLGIGRFKWELEDLAFKLLEPEAFREIQEEVATKRSEREQRLGVTVGL

SEQ ID NO: 132333 - protein, 224 aa, Unknown
  Bacterial polypetide isolated from the Sargasso Sea
MLKSEELINKVLEYNKFLNPETLTKAYNFALNAHKKQKRDEGVPYINHPVAVADILSDLKLDSATITTGLLHDTIEDTDATYQTIKEEFGQEVADLVEGVTKISVFENQVISEKNKQKFSKAENFRKLIIATSKDIRVLLVKLADRLHNMRTIKYLKDDEKKIRKAQETMEIYAPLADRMGMNRIRDELEDLSFEVLNNEARALIKNRLDEIKYNNLMNFNSLS

SEQ ID NO: 132334 - protein, 177 aa, Unknown
  Bacterial polypetide isolated from the Sargasso Sea
MAAVARVLPWRRSVAPVHTEIQGVVDRYKARWPKSSADLLVRAYEAALAAHQGQRRKSGEPYILHPVAVASVVAEMGLDDVSIAAALLHDAVEDTGIELLEIRAEFGDDVAAIVDGVTKLDRVRFATKQAQQAATLRKMLVAMARDLRVLLIKLADRLHNMRTLGALELTKQEQIAR

SEQ ID NO: 132335 - protein, 285 aa, Unknown
  Bacterial polypetide isolated from the Sargasso Sea
VAVADLLRDIGASAAVIAAGFLHDVVEDTDVSLEQIEAHFGKEVRHLVEGVTKLGGIHFTNRTEAQAENLRKMFLAMASDIRVVLVKLADRLHNMRTLGALRPEKQQRIATETRDIYAPLANRLGIGRFKWELEDLAFKVLEPEAFRSMQQEVASKRSDREERLGVTVQLLRDRLEASGVRDCEVEGRPKHLYGIWSKMERQQKAFHEIYDVAALRIVTPSVESCYRALAVVHDTFRPIPGRFKDYIGLPKPNGYQSLHTAVIGRHRPVEVQIRTAEMHEVAEYG

SEQ ID NO: 132336 - protein, 198 aa, Unknown
  Bacterial polypetide isolated from the Sargasso Sea
YDTAANEDALNKAYVFSMKAHGSQRRASGDPYFSHPLEVAGILTKMRLDHYTIITALLHDTVEDTNVTVEEIGRMFGKEIASLVDGVTKLSRIDLVSDNRKQAENFRKLVIAMSDDIRVLLVKLADRLHNMRTLHFISDKEKRRRIAFETMDIYSPLAERIGIHELKDELEFLAFKELNEDAFETVTSRLDVLVKEGS

SEQ ID NO: 132337 - protein, 254 aa, Unknown
  Bacterial polypetide isolated from the Sargasso Sea
MVATRRVAPWRRRASGQSDETTALIDAYLERHPKGDVALIERAYKTALRAHEGQTRKSGEPYVHHPLAVATIVAHQGLDDVTIGAALLHDSIEDTEIDLTDLERDFGSEVASIVDGVTKLDRINFDSREDQQAASMRKMLVAVAKDLRVLVIKLADRLHNMRTLAALPEFKQERTARETLDIYAPLANRLGMQDVKVQLEDLSLATLHPKRYSEIAQMVQDRAPERDMYLTQLVVNVKERFNDMGIKADVSGRP

SEQ ID NO: 132338 - protein, 612 aa, Unknown
  Bacterial polypetide isolated from the Sargasso Sea
MLDASSPQDSSRTESAPAPVQCGGPELRRHPVRHPDEYKIALPEWLRQCILNVPPGLGTSCPTDPEALLVAAFDFGFQLHQGQFRASGDPYIVHPIAVADLLRDIGASASVIAAGFLHDVVEDTDVTPDQIELHFGSEVRELVEGVTKLGGIHFNNRTEAQAENLRRMFLAMASDIRVVLVKLADRLHNMRTLGALKEEKRQRIARETREIYAPLANRLGIGRFKWELEDLAFKLLEPEAFREIQQEVASKRSEREERLGVTVALLNDRLAQAGLEGCEVSGRPKHLYGIWSKMQRQQKAFHEIYDVAALRIITPSVESCYRALAVVHDTFRPIPGRFKDYIGLPKPNGYQSLHTAVIGRHRPIEVQIRTIEMHRVAEFGIAAHWQYKEGGSPASSSSAAERFNWLRQLVDWQQEGGNDDHNDYLSSIKEDLFDEEVFVFTPKGDVVGLRKGATPVDFAYRIHSEVGNHCHGARINDRLCPLATALQNGDFVQILTSNTAHPSLDWLNFVATPTARNRIRQWYKRSHRDETIERGKELLERELGRDGFEALLNGAAMARVAQRCNVGSTDDLLASLGFGAVTLQQVLNRFREEIRLIAEQDTAPPSNEEVAR

SEQ ID NO: 132339 - protein, 214 aa, Unknown
  Bacterial polypetide isolated from the Sargasso Sea
MLKSEELINKVKNYNKFLNPETLSKAYDFALKAHEKQKRDEGSPYIIHPIAVANILTELKLDSATIATGLLHDTIEDTYATYNTIESEFGKEVADLVDGVTKISVFENQAISNSKAENFRKLILATSKDIRVLLVKLADRLHNMRTIKVVEKEKQIRKAKETMEIYAPLADRMGMHRIRDELEDLSFEVLNEDARKLIKDRLDKIKENNLINFN

SEQ ID NO: 132340 - protein, 433 aa, Unknown
  Bacterial polypetide isolated from the Sargasso Sea
MLKSEELINKVKNYNKFLNPETLSKAYDFALKAHEKQKRDEGSPYIIHPIAVANILTELKLDSATIATGLLHDTIEDTHATYNTIEAEFGKEVADLVDGVTKISVFENQAISNSKAENFRKLILATSKDIRVLLVKLADRLHNMRTIKVVNKEKQIRKAKETMEIYAPLADRMGMHRIRDELEDLSFEVLNEDARKLIKDRLDKIKENNLINFNNISDEFSEILKIKNIEPKIIGREKTPFSIWRKIQKKRTSLEQITDIIGFRIILDNIDDCYKALGIFHSKWNCIPGKFKDYISSPKINKYQSLHTAIIGPNKRPIEIQLRTKQMHEFAERGIASHWKYKSSEKFNSLTWKEYDWLADLVEIIDKNENPDDSYEYTKLQMFQENAFCFTPKGSIIKLPKNATPIDFAYAVHTQIGDAAVGCEINGKESACN

SEQ ID NO: 132341 - protein, 735 aa, Unknown
  Bacterial polypetide isolated from the Sargasso Sea
MVSVREAHFNDPDFHLEDWVARYVSHVEEAQTLLTLIAQVEALPAKSPAAKRELLERAREMIEILAPLNMDIETLQAAILFVVFDAGLLNEEAIKEKFGEPLARLVASVVTMDAIGALKINPNSRSTEPQIDNIRRMLLAMVEDVRAVVIKLAERVCLLRAVKNADEETRVLLAREITDIYAPLANRLGIGQLKWELEDISFRYLHPDTYKDIAKQLDGKRLDREVYIEKFVEQLQQRLDEDHIRAKVYGRPKHIYSIWRKMKGKHLKFDELFDVRAVRIVTERLQDCYGALGVVHTLWHHIPREFDDYVANPKPNGYQSIHTVVVGPEGKTVEIQIRTQDMHEDAELGVAAHWKYKEGNHSGKQSGYEEKINWLRKILQWQEDVVESGNLVEEVRSQVFEDRVYVFTPSGEVVDLPLGSTVLDFAYYIHSQVGHKCIGAKVDGRIVPFTYQVETGERIEIITSKHPNPKRDWLNPNLGYIRTSRARSKIQHWFKQQDRDKNIIAGKEMLEAELARVSLKIKDAAIAVERFNMASMDDLLAAIGGGDVRLHQVVNHIQSKLRLDEASEEDAVEELVKKSQPKSGTNSRGQVEVNGVGNLLSHIARCCQPVPGDEILGFITKGRGISVHRSDCEQVKELMRVHPERGVDVVWGENYSGGYRMRLRVLAHDRSGLLRDLTSVLAAEKSNVLAMSSSSDIKNQTAAIELELELYNLDGLSRVLSKLSQVDSVIEARRL

SEQ ID NO: 132342 - protein, 580 aa, Unknown
  Bacterial polypetide isolated from the Sargasso Sea
MLKSEELINKVKNYNKFLNPETLTKAYDFALKAHEKQKRDEGSPYIIHPIAVANILTELKLDSATIATGLLHDTIEDTHATYKTIETEFGKEVADLVEGVTKISEFENQAISNSKAENFRKLILATSKDIRVLLVKLADRLHNMRTIKVVDKEKQVRKAKETMEIYAPLADRMGMHRIRDELEDLSFEVLNEDARKLIKDRLDKIKENNLINFNNISDEFFEILKTKNIEPKIVGREKTPFSIWRKIQKKRTSLEQITDIIGFRIILGNVDDCYKALGIFHSKWNCIPGKFKDYISSPKINKYQSLHTAIIGPNKRPIEIQLRTKQMHEFAERGIASHWKYKSSEKFNSLTWKEYDWLADLVEIIDKNENPDDSYEYTKLQMFQENAFCFTPKGSIIKLPKNATPIDFAYAVHTQIGDAAVSCEINGNESALQSILRNGDVVKIITSKKASPSLHWLTSTKTGKARAAIRRYWQYRENSKPIKEKRYNTTLWISLPDEPGKMGDVTTMIGENFVNISSVEMVEKLNGRINFKFNLIIHDLKNFTKLISELKQKEYKFKIIRHKNKKYAFFKKLFSSFKKN

SEQ ID NO: 132343 - protein, 703 aa, Unknown
  Bacterial polypetide isolated from the Sargasso Sea
MRETDLVDRIVSYNPKVDTRIIKKAFHFGMLMHGSQLRESGDPYFSHPIEVANILAELNLDTSSLVCALLHDTIEDTKATIKDIRENFGKEIAKLVDGVTKLNELESKPDQSKAAEDFRKLILASSSDIRVLLIKLADRLHNMRTLKHLKNKERRKRIAKETIDIYAPLASRIGMHEIREELEDLAFSETEPEIRSILLERIKVSKKKNNKIVKDISDKLSKALKSNKVKAFVSGREKSIYSVWLKLENKNKSLEQLSDLFGFRIYVDKIEDCYAVLGVLHQNWQAVPGLFKDYISTPKKNGYQSIHTTIVGPSNHRVEIQIRTNKMHEINERGVAAHWAYKEKDSSNGEYLTSIAWMADLIDILQKDGATDEFLENTRLELSHDQVYCFTPKGRLIALPKDSTALDFAFALHTDLGLFCSGVKINGEKKPRRTKLKNGDEVEIIKSKSEVPLDSYEDLVTTGRSKSSIRRAIRENMIKNQRLLGKEIIKSVFSSHRKKPTRDILERSFGPLSVKSLVDLYQLVGSGKSSGSEVYDHVYPNTKRKIKRKRFYGKNISLPISGLLPDMDVSFQKNSLLVPGDNIIGITIPGKGITIYHAKDEGLHKHENNPERWLRLQWKKEIDVTFTARVMLSIINEVGSLGVISAAIGDYGGNITNLNLTEKDTDFYNLRIDIDVDDKSHIDNIIKSLRGLPEVNSVERSIH

SEQ ID NO: 132344 - protein, 201 aa, Unknown
  Bacterial polypetide isolated from the Sargasso Sea
MLKSEELINKVKNYNKFLNPETLSKAYDFALKAHEKQKRDEGSPYIIHPIAVANILTELKLDSATIATGLLHDTIEDTHATYKTIEAEFGKEVADLVDGVTKISVFENQAISNSKAENFRKLILATSKDIRVLLVKLADRLHNMRTIKVVDKEKQIRKAKETMEIYAPLADRMGMHRIRDELEDLSFEVLNEDARKLIKID

SEQ ID NO: 132345 - protein, 673 aa, Unknown
  Bacterial polypetide isolated from the Sargasso Sea
KILAPLNMDIETLQAAILFVVFDAGLLDEEAIKEKFGEPLARLVASVVTMDAIGALKINPNSRSTEPQIDNIRRMLLAMVEDVRAVVIKLAERVCLLRAVKNADEETRVLLAREIADIYAPLANRLGIGQLKWELEDISFRYLHPDTYKDIAKQLDGKRLDREVYIEKFVEQLQQRLDEDHIRAKVYGRPKHIYSIWRKMKGKHLKFDELFDVRAVRIVTERLQDCYGALGVVHTLWHHIPREFDDYVANPKPNGYQSIHTVVVGPEGKTVEIQIRTQDMHEDAELGVAAHWKYKEGNHSGKQSGYEEKINWLRKILQWQEDVVESGNLVEEVRSQVFEDRVYVFTPSGEVVDLPLGSTVLDFAYYIHSQVGHKCIGAKVDGRIVPFTYQVETGERIEIITSKHPNPKRDWLNPNLGYIRTSRARSKIQHWFKQQDRDKNIIAGKEMLEAELARLSLKIKDAAIAVERFNMASMDDLLAAIGGGDVRLHQVVNHIQSKLRLDEASEEDAVEELVKKSQPKSGTNSRGQVEVNGVGNLLSHIARCCQPVPGDEILGFITKGRGISVHRSDCEQVKELMRVHPERGVDVVWGENYSGGYRMRLRVLAHDRSGLLRDLTSVLAAEKSNVLAMSSSSDIKNQTAAIELELELYNLDGLSRVLSKLSQVDSVIEARRL

SEQ ID NO: 132346 - protein, 580 aa, Unknown
  Bacterial polypetide isolated from the Sargasso Sea
MSDTSIKEQDRLFNELSNNYSQKDKVILKKAYDIASKGHSEQKRFSGEPYITHPLYVALYLSNLSMDIETIVSAILHDLIEDTEITYKDLKKEFGKEVADIVDGVTKLDKINYNSKEEAKADAIRKMVIAMAKDIRVLILKLADRLHNIETIEYLNEWKKEKIAQETLYVYAPLAHRLGLQNIKHRLEDVSFNILFKNQNEEINNLISKSAPNRDKNINESIKIIQNLLSDNSLSAEVVGRPKHNYSIYKKIINNGLSFNEINDLVGIRILTDDVKNCYTILGLIHANFQPVLGRFKDFISMPKFNLYQSLHTTVLTGEGQRMEIQIRTHDMHYRAEFGVASHWKYKEAPKNDLQEWTNELKNISDEYPEPNEFLSHMKLDLYEQEIFCLTPNGDVITLPTGATPVDFAFAVHTQVGEKLIGAKIDGKLVNLGTLLKTGDTVEILTTKDTSKGPSRDWLSFVKTTRARSKIKQWHQKQMKDEDIQKGKQILNTWLDDNQDVLNFSNKEEILAHLLDNYHLPNNETLYLQLGTNNLKIDNLGTKIRKYVFPEEISEEEDLLSPDPSMELKDQQVLVEGYDD

SEQ ID NO: 132347 - protein, 534 aa, Unknown
  Bacterial polypetide isolated from the Sargasso Sea
LVDGVTKLTKIQLSSMETQEAENIRKLLMAIAQDIRVILVKLADRLHNMRTIKAMPRVKQQQKARETMDIFAPLAGRMGMQFIREDLEDLAFKVLNPKGRESIIRRFINLQKDAGDVIQRISRDMHTEFGKEYIEAEVLGRAKKPYSMWRKMQEKELSFSRLSDIYGFRIICASEVDCYRILGVIHRRWKAVPGRFKDYISQPKSNGYRSIHTTVSGRDGKQVEVQIRTRQMHDVAESGVAAHWSYRDGVRSENPFTVDPVQWITRLIDDFDSEEDHEVFLEAVKLEMYADKVFCFSPKGDVLTFPTGATPIDFAYAIHTRIGNSCVGAKVDGLRVPLWTKLRNGQSVEVITAQGQNPQPTWLDMTETGKAKTAIRRALREVDKERMVVMGKALLRTAFEHIGKKATDKSLELAASKMRFSDSKELLARVGSTEVRPGHVVQLVHPEVAAADDFDVDQASAVIGLNEGQFLDRRPCCGPLPGERIVGIASGGSGVSIHAIDCLELARFEEKPELWIDLHWHVGKHAAVYPTGIE

SEQ ID NO: 132348 - protein, 703 aa, Unknown
  Bacterial polypetide isolated from the Sargasso Sea
MRETDLVDRILSYNPKVDTRIIKKAFHFGMLMHGSQLRESGDPYFSHPIEVANILAELNLDTSSLVCALLHDTIEDTKATIKDVKENFGKEIAKLVDGVTKLNKLESRPDQSKAAEDFRKLILASSSDIRVLLIKLADRLHNMRTLKHLKNKDRRQRIAKETLDIYAPLASRIGMHEIREELEDLAFSETEPEIRAILIERIKDSKKKNNKIVKDISDELSKVLKSNKLKAFVSGREKSIYSVWLKIENQNKSLEQLSDLFGFRIHVDKIEECYSVLGVLHQNWQAVPGLFKDYISTPKKNGYQSIHTTLVGPNNHRVEIQIRTNKMHEINERGVAAHWAYKEKDSSNGEYLSSIAWMADLIDILQKDGATDEFLENTRLELSHDQVYCFTPKGRLIALPQDSTALDFAFALHTDLGLFCSGVKINGEKKPRRTKLKNGDEVEIIKSKSEVPLDSYEDLVTTGRSKSSIRRAIKENTIKNQRLLGKEIIKSVFSSHRKKPTRDILERSFGPLNVKSLMDLYQLVGSGKSSGSEVYDHVYPKTKRKTKRKRYYSKNISLQISGLLPDMDVSFQKNSLLVPGDNIIGITVPGKGITIYHAKDEELHKHENSPERWLRLQWKKEIDVTFTARIMLSIINEVGSLGIISAAIADYGGNITNLNLTEKDTDFYNLRIDIDVDDKGHIDNIVKSLKGLPEVNSVERLIH

SEQ ID NO: 132349 - protein, 769 aa, Unknown
  Bacterial polypetide isolated from the Sargasso Sea
MSEAAANSKEKNEIEVSKTILPENKKYESESLNYQIKIPDWLLKDIHNFEKSNKENDENQNLIVKAFKLAYKAHDGQFRASGEPYIIHPVAVANLLKEIGASSSVIAAGLLHDVVEDTGIDLSEIETNFGLEVKILVEGVTKLGGIHFNNRTEAQAENLRKMFLAMASDIRVVLVKLADRLHNMRTIEWLNDEKKLRIARETREIYAPLANRLGINRFKWELEDLAFKFLEPKEYLDLKDQIAVKRSDREKRLKVTLNLMKENLISAGLKNFEITGRPKHLYGIWSKMERQQKHFHEIYDVAALRIIVDNSDSCYRALAVVHDTFKPIPGRFKDYIGLPKPNGYQSLHTSVIGRHRPIEVQIRTTSMHQIAEYGIAAHWQYKEGGSPAKSNAERFNWLRQLVEWQQEGNERDHNDYLASIKEDLFDEEVFVITPKGDVVGLRKGSTAIDFAYRIHSEVGNHCNGIRINEKLSPLSTALQNGDFIEILTSNNATPSLDWLNFVVTPTAKNRIRQWYKKSHRDETIKRGRDLLEKEVGRNGFEALLSSEAMKKVANRCNLKTTEDLLASLGFGGLTLHQVLNRLREEIKLQTEDVKNDSDSEIAKSLKSNNNLSTNQSNTAAKSPISGIEGLDYRIGKCCSPLPGEDIIGTVSLGNHGITIHREDCENVIPIPIERRLPVGWNQDNKTGDNKFPIQLRIEVIDRVGVLKDILMRLSDKGINVSDANVKTAYGKPAIINLCVGLESYNQLHKTIEQIKSMADVLDIARVGQS

SEQ ID NO: 132350 - protein, 721 aa, Unknown
  Bacterial polypetide isolated from the Sargasso Sea
MSTKSPVKTADELFNSILENYPKSSHKLLNDAYKFAANGHKNQKRKSGEDYITHPLQVALYLAELNLDKETIIAAFLHDLIEDTDVTYSDIKKDFGKEVADIVDGVTKLDKINYNSKEEAKADAIRKMVIAMSKDIRVLILKLADRLHNIETIQYHTDWKQEKIANETLYVYAPLAHRLGLQSIKHKLEDTSFKILFDKQNNEIQEQITQTRPDRENQLEESLNIIKSLLSDNSISAEAYGRPKHNYSIYKKIVNNGLTFDEINDLVGIRIITDDVKNCYTILGLIHANFQPVLGRFKDFISMPKFNLYQSLHTTVITSDGNKMEIQIRTHDMHYRAEFGVAAHWKYKEKPSNDLTRWTNELTEMSSEYPDPNEFLQHMKLDLYENEVFCLTPEGDVLSLPQGSTPVDFAFAIHTQVGEKLIGAKVNGKLVNLSNELKSGDTVEILTSKDKNKGPSRDWLNIVKTTRARSKIKQWYQKQLKNEDIQKGKTVLNTWLDENNDVLEVNSKDQILNELLLDMKLPNIETLYQSLGNGNTGINIVGNKIRKIVFPNEISVDDDLYSPEIKSDSKSDLIIVEGYDDIQVRMAKCCVPVPGDDILGFITISNGIAIHRSDCLNIKIDPNKGERILDVSWGFEPNTGTIVWLEIEAIDRPYLLRDATIAISDNGGNILVAKSVTSSKRIVSLIFQIEVSDVTQLDAILNDAKDIENVFEATRIYPGRK

SEQ ID NO: 132351 - protein, 283 aa, Unknown
  Bacterial polypetide isolated from the Sargasso Sea
MLNAASTPKEPRTSTGSATVGCALPEVRRHPVRHPDDYGIALPDWLRECIANVPPGIGQSCPTDAEALLVSAFDFGFQLHEGQFRASGDPYIVHPVAVADLLRDIGASAPVIAAGFLHDVVEDTDVTPDQIELHFGSEVRELVEGVTKLGGIHFNDRTEAQAENLRRMFLAMASDIRVVLVKLADRLHNMRTLGALREEKRQRIARETREIYAPLANRLGIGRFKWELEDLAFKLLEPEAFREIQEEVATKRSEREERLGVTVGLLNERLERAGLEHCEVSGR

SEQ ID NO: 132352 - protein, 442 aa, Unknown
  Bacterial polypetide isolated from the Sargasso Sea
MPKVTSAQNSNQTNTVCDEFFDGQPRLRTHQIKHIDDYEIILPEWLKNCIENIPPGIGASCPRDSEALLVAAFDLAYQLHKGQFRKSGEPYITHPVAVADLLREIGASASVIAAGFLHDVVEDTDITPEQLEGYFGSEVRYLVEGVTKLGGIHFNNRTEAQAENLRKMFLAMSSDIRVVLVKLADRLHNMRTISYLGEEKQTRIARETREIYAPLANRLGIGRLKWELEDLAFKLLEPDPFREIQQQIASKRSEREERLNTTVQLLKDRLNSAGLHQCEVSGRPKHLYGIWSKMQRQKKEFHEIFDVAALRIIVSDVETCYRALAVVHDTFRPIPGRFKDYIGLPKPNGYQSLHTAVIGRHRPIEVQIRTPEMHRVSEFGIAAHWKYKEGGSPANPDSEKFNWLRQLVEWQQEDGVNDHNDYLASIKEDLFDEEVFVFTPKG

SEQ ID NO: 132353 - protein, 299 aa, Unknown
  Bacterial polypetide isolated from the Sargasso Sea
MLKSEELINKVKNYNKFLNPETLSKAYDFALKAHEKQKRDEGSPYIIHPIAVANILTELKLDSATIATGLLHDTIEDTHATYNTIEAEFGKEVADLVDGVTKISEFENQAISNSKAENFRKLILATSKDIRVLLVKLADRLHNMRTIKVVDKEKQIRKAKETMEIYAPLADRMGMHRIRDELEDLSFEVLNEDARKLIKDRLDKIKENNLINFNNISDEFFEILKNKNIEPKIVGREKTPFSIWRKIQKKRTSLEQITDIIGFRIILNNIDDCYKALGISIVNGIVYQVNLKIISHRQK

SEQ ID NO: 132354 - protein, 587 aa, Unknown
  Bacterial polypetide isolated from the Sargasso Sea
MSETSIKIEDSLFNELSKNYSDKERITLKKAYDLASEGHSDQKRHSGEPYITHPLHVALYLSNLSMDIETIVSAILHDLIEDTDITYKDLKKEFGKEVADIVDGVTKLDKINYNSKEEAKADAIRKMVIAMAKDIRVLILKLADRLHNIETIEYLNEWKKEKIAQETLYVYAPLAHRLGLQNIKHKLEDVSFNILYKNQNEEINNLISKSAPNRDKNINDSIQIIQNLLSDNSLSAEVVGRPKHNYSIYKKIINNGLSFNEINDLVGIRILTDDVKNCYTILGLIHANFQPVLGRFKDFISMPKFNLYQSLHTTVLTAEGQRMEIQIRTHDMHYRAEYGVASHWKYKETPKNDLQEWTNELKNISDDYPEPNEFLSHMKLDLYEQEIFCLTPNGDVITLPTGATPVDFGFAVHTQVGEKLIGAKIDGKLVNLGTLLKTGDTVEILTTKDTSKGPSRDWLSFVKTTRARSKIKQWHQKQMKDEDIQKGKQILNTWLDENQDVLNFSSKEDILKHLLADYHIPNNETLFLQLGTNNIKIENLGTKIRKYVFPEEISEEEDLLSPDPSLDLKDQQVLVEGYDDIKVRMAR

SEQ ID NO: 132355 - protein, 236 aa, Unknown
  Bacterial polypetide isolated from the Sargasso Sea
MLKSEELINKVREYNKFLNPTTLTKAYNFALEAHKKQKRDEGVPYIIHPIAVANILSDLKLDSATIATGLLHDTIEDTRATYKTIKEEFGQEVADLVEGVTKISAFENQAAEDSKAENFRKLIIATSKDIRVLLVKLADRLHNMRTIKFVKLKEKQIRKAKETMEIYAPLADRMGMNRIRDELEDLSFEILNPEARNLVKERLDEIKENNISNFNLISEEFQKILKAEGLNVKIFG

SEQ ID NO: 132356 - protein, 574 aa, Unknown
  Bacterial polypetide isolated from the Sargasso Sea
EFMLVKLADRLHNMRTISFLSIDKQKRISKETLEIYVPIAHRLGMNKIRLELEELSFKTLNPRRYQIITENVKEYKKNKRKVVEKTKAKIIERLLENKIIAEVIGREKNPYSIYKKMKYKKLSFKKVYDIFGFRVVTESIDECYQILGRLHNLYKPVPGRFKDYIALPKSNGYQSLHTVLYGPNGIIMEIQIRTTEMDKFAGSGIASHWQYKIGGKFSAQAFAHDWLKSIIDIKKTASSSFDFLENMKVNLLPDEIYLFTPAGAIKRLPKDSSVIDFAYSVHTDIGNKCVGAKINGVNQPLSTPLSNGQTVEILTSPIGKPNPSWLEYVVTGKARTNIKNYLRDLKEDSAYELGLRIFDQALNDYGTSFIDLKEDEYKKVLSIYGYSNPRQLIINIGLGNVIPHLLARDITEKKNIISSTYNSWLKKVIKSKKQNIPIKGTEGLIVKYANCCHPIPGDDIIGVMSAGNGFVVHRAACKNLKKGLQRINIEWSDKVEGEFLVEIQVISTNERGVLSKVAGVISSFSCNIENVRFNEVEIPYASICFSIKVTSRDHVAEVIKELRKLPDINKVVRT

SEQ ID NO: 132357 - protein, 558 aa, Unknown
  Bacterial polypetide isolated from the Sargasso Sea
WELEDLAFRFEEPVTYKRIAKLLDEKRVERESYVAQAIERLQQELAAANVQAEVSGRPKHIYSIWRKMRGKELDFAELYDVRAFRVIVPDIKDCYTVLGIVHNLWQPVPREFDDYISRPKPNGYKSLHTVVIGDDGRAFEVQIRTQEMHQFAEYGVAAHWRYKEAGTRGYGGQFSANEKYDEKIAWLRQLLAWKDEVSEGEHGEKRAAQPWEQLRQATLDDDHIYVLTPQARVIPLPHGATPVDFAYHLHSELGHRCRGARVDGAMVPLNTPLQNGQTVEIVAVKEGGPSRDWLNPQLGYLQSHRARQKVRAWFNAVEVQEHIASGRAMVEKTLQREGKTSVNLDQLAAKLGFKTTDDLFSVVGKEEFSLRLVEQALHDAPPPEPVVEAPEQFEKRSSGASVARGASTGVLVVGVDALLTQLARCCRPAPPDEISGFVTRGKGMSIHRSDCPSFLRMAERAPERVLQTAWSADVMSGRGQSVYPVDLSIEATDRQGLLRDISEVFAREKMNVIGVKTQSRRNAAFMQFTVEVSSAAQIQRACTLLGEVTGVMRASRKN

SEQ ID NO: 132358 - protein, 200 aa, Unknown
  Bacterial polypetide isolated from the Sargasso Sea
MIFEKIKELEEQISYLNKVDKDVISKAIKFSKDAHLNQIRHSGDPFVTHPIEVAKILTSIKLDASSIAAGLLHDTVEDTEITNSSIKDAFGDQISQLVQGLTKINKLSLKVNKLKLGENYRKLLLAATEDLRVILVKLADRLHNMRTIEFIKDHTKRLNTSMETLEVFSPLAQRLGMKEWADELEDLAFNQLILMPEIPL

SEQ ID NO: 132359 - protein, 280 aa, Unknown
  Bacterial polypetide isolated from the Sargasso Sea
AIRSLQTLHRSETSPEQVDNVRRMLLAMVEDVRAVVIKLAERIACLREAKKADEETRVLMAQEITNIYAPLANRLGIGQLKWELEDLAFRYLHPDTYKQIAKQLDEKRLDRERYIREFVQSLRDALKEAGVEAEVYGRPKHIYSIWRKMQKKHLEFNELFDVRAVRVVTKRLQDCYAALGIVHTHFHHIPREFDDYVANPKPNGYQSIHTVVVGPEGKTVEIQIRTDQMHQDAELGVAAHWRYKEGAQAGGKANTFEDKIEWLRKLLAWQEDLSESGSLL

SEQ ID NO: 132360 - protein, 253 aa, Unknown
  Bacterial polypetide isolated from the Sargasso Sea
TSKHSYGPSQDWVKVAQTSHAKNKIRQFFKKQRRDENIEKGRELVEKEVRSLEYEMKEVLAPDNLKRVAEKFNFANEEDMFAAVGYNGITASQIVTRLTDKFRKQREEEEIVEVKEVRKPMKIRKWDSGVKVSGADNLLIRLSKCCNPVPGDDIVGYITKGRGVSIHRRDCVNVHTEEAIERLLEVEWEGSPEKEIEYNVDIEISGYDRRGLLNEVLQAVTETKTYISAVSGRSDRNKMATINMSISIRNLQH

SEQ ID NO: 132361 - protein, 744 aa, Unknown
  Bacterial polypetide isolated from the Sargasso Sea
MTEPVSASPVAGPSFDDVLAFVRERAGDVRLSSGELLADHSAGTASIMRTLNVDPSAMQAAALFVLTPHLSDPERELTERFGDEVARLVSDVRKLLRLGTVSLRAAQNAGADAGRDAAEERRTQIEALRKMLLAFAQDIRVVLIRLASRLQSLRYYAAAKIDPPPDVARETLEIYAPLANRLGIWQLKWELEDLAFRFEDPVTYKRIAKLLDEKRIEREAYVTQAIDRLQQELADAHIQADVSGRPKHIYSIWRKMRGKELDFSELYDVRAFRVIVPDIKDCYAVLGIVHHLWQPVPKEFDDYISRPKPNGYKSLHTVVIGDDGRAFEVQIRTQEMHRFAEYGVAAHWRYKEAGARGYGGQFSASDKYDEKIAWLRQLLAWKDDVEDGAEKSGDKAWAQLRETSLDDDHIYVLTPQARVIALPQGATPVDFAYHLHSELGHRCRGARVDGAMVPLNTPLANGQTVEIVAVKEGGPSRDWLNLQLGYMKSPRARQKVRAWFNSIEQEENVAHGRALVEKTLQREGKTSVSLDNLAAKLGFKSPEELFSVVGKEEFSLRNVEHALSDAPPPEPVPEAPADFEKRSSGASVAHGASTGVLVVGVDALLTQLARCCRPAPPDPISGFVTRGKGMSIHRTDCPTFRRMVERAPERVLQTTWSADVLGGRGASVYPVDLMIEASDRQGLLRDISEVFAREKMNVVGVKTQSRRNAAFMQFTVEVSNSAQVQRACTLLGEVQGVVRAGRKA

SEQ ID NO: 132362 - protein, 245 aa, Unknown
  Bacterial polypetide isolated from the Sargasso Sea
DMDSRRKIQAGIDKLADAVGVTLGPRGRNVVLEEKFGMPQVINDGVTIARAIELSDPVENAGAQLIKEVAGRTNDSAGDGTTTASVLAREMIKYGLQSVAAGANPVTVKRGIDKTSEFCREKLDELTIPVRNQDDIRAVASISAGNNAEIGDMIAEAIEKVGPDGVLSIENGTGLDTVVEVEEGMEIDRGYISPQFVNNNERLTVEYEGCRVLITDEKIEQVQMLVPLLEEMNQAGSPPLLIIAE

SEQ ID NO: 132363 - protein, 286 aa, Unknown
  Bacterial polypetide isolated from the Sargasso Sea
MTIVMTGHGTMHNTIEAMKAGAFEFVTKPFDILQIEELVRQALKVRHAEKRDSSDLKCSSEELLVGQGHKMRELFKSIGRVASTELTVLIQGESGTGKELIAKTIHQHSNRAKGPFVAINCAAIPSELLESELFGHEKGAFTGAVERKRGKLEQAGNGTLFLDEIGDMPLKLQSKLLRVLQERQFERIGGQELLTTNMRVIAATHRDLEQLMQQEQFRTDLYYRLNVFPLSIPPLRERVEDLPLLVEHFLKRGAREMAVGNKSLSPEAMDALKRYPWPGNVRELEN

SEQ ID NO: 132364 - protein, 260 aa, Unknown
  Bacterial polypetide isolated from the Sargasso Sea
FTGAIERKRGKLEQAGNGTLFLDEIGDMPLKLQSKLLRVLQERQFERIGGQELLTTNMRVIAATHRDLEQLMQQEQFRTDLYYRLNVFPLSIPPLRERVEDLPLLVEHFLKRGAREMAVGSKSLSPEAMDALKRYPWPGNVRELENTLKSLMITNVSNFISLDSLPGHLMKKGESVQESGNLEEWIEDKIAPLVREGISKNTDSLMQEVLHKVERPLLKLLLEETGWNQQKTSKLLGINRNTLRKKIDILRIRRKVVLDA

SEQ ID NO: 132365 - protein, 167 aa, Unknown
  Bacterial polypetide isolated from the Sargasso Sea
MNNYFIILASGQSKRFNSKKPKQFIIYKNKPLFKHSIEKAMKSKLFKKIILVINNKKKVKEKFPKNVLIITGGKERSDSSLIALKYIKKYKPTNVLIHDAARPNFTLKLLKNLIRSLNNNKAVIPAINSIDSIKYKVKNHLFNLNRNNSILTQTPQAFKFKDLYNLS

SEQ ID NO: 132366 - protein, 298 aa, Unknown
  Bacterial polypetide isolated from the Sargasso Sea
FFTYKLGIIWREWLSKSLVRDYMTNKAYYQLNPNDEEQTDVDNPDQRITDDTRAFTGQSLSFTLGIFDALLTFSLNILILWSISTTLTFSLFGYAAFATSILLIAGKNLVKIDFDQLRYEADFRYGLVHIRDNAESIAFYSGENPERNETERRLGEVVRNFNLLIIWRVIIDVMRRSINYAGNFFPYLIMAIPYFKGDIDYGRFIQASFAFGMVEGSLFFIVNQIEELAKFTAGIGRLEGFQSKVESISQTNPTSNQNVISDYPSILINNADLCPPGSNKTIIKNLNLSINNNQSLLV

SEQ ID NO: 132367 - protein, 211 aa, Unknown
  Bacterial polypetide isolated from the Sargasso Sea
PAAGISERFGTTNKLYIKVKNNFLIENSIKPFIRLSQIYRIIIPLNKLDKKWKKTKYYNSNKVITLIGSTSRQKSVYKSLCKIKELGAKNSDWVIIHDAARPFFSQKDLKRFISITLKSNWGAVIGLPASDTIKLVEKNKIISTIERNKVWLAHTPQMFRIKDLLKGYEFCKKNKLLVTDDSQVIESIGIKPLIIESSCKNIKVTNKIDIR

SEQ ID NO: 132368 - protein, 250 aa, Unknown
  Bacterial polypetide isolated from the Sargasso Sea
MKLAAIILAAGKSSRFKSDTPKQFHFHSNDLILNHSIKKLSQIKEIKEIYIALNNKYRKKYSSLIKKTNKIKFFNGGRHRSESVKKGIQKLYQKYTHILIHDAARPNFTIKLVLKLIKELKKNSCVVPAIPASDTTVYEKIYVDRSKIKFLQTPQAFDLKKIYKYHKKNKIKNISDDSILFLQNKQKIKFINGETENKKITFIQDIKTKDKYYGIGYDIHQITKGNGLYIGGVKIPSEYRSVGHSDGDSL

SEQ ID NO: 132369 - protein, 188 aa, Unknown
  Bacterial polypetide isolated from the Sargasso Sea
MDKNLIRKTVLRQRRALSALEKSQAESVMLESLLNWEVFKNAGVIHIFISKPDEPDTRPIIEHCWSSGKKIAVPVVLPNTFDLFHSEIKSFDDLVPGMHGTHEPSPERQTKINLDSFDLVIVPGVAFDRKGGRLGHGKGYYDRFLELTKAFRLGLTFECQLLENIPTELHDVLMNAILSESGIVETNA

SEQ ID NO: 132370 - protein, 121 aa, Unknown
  Bacterial polypetide isolated from the Sargasso Sea
PKTKINLERSLLPTTRLGGHFVQGHVDTTIKLINIERQKDSAEFTFEKINDIADYIVEKGSICLDGISLTIAKNNKNNFKIALIPHTLGVTNWKYIEIGDMVNVEIDMMAKYIKNFMDLRQ

SEQ ID NO: 132371 - protein, 88 aa, Unknown
  Bacterial polypetide isolated from the Sargasso Sea
MKRNILLNPGPGTTTNTVKQALVVPDICPREEEFGALTQSVLKKIVKVVNGQSTHSTVIFAGSGTAGVESALSSVVPDNGKILILKHG

SEQ ID NO: 132372 - protein, 286 aa, Unknown
  Bacterial polypetide isolated from the Sargasso Sea
GKVRMGVSTAAVEADLQALDKRFAALIASGDQLVGDSLKGAAADSANAMGARLQSAQATATQMTANTAAAVQDAAGTLRWRIGMGLALVGLGVLLLIAIVLGRRVVNRLKLLIAAMDDLAAGEGDLTKRVQINSKDEIGDMASAVNRFVDKLQPIVREAGDVAQRTGVEIGAMTLRNAGADAAAGLQRDEVAESLRALSQMADEAQAESHAMQAALQQVVDIRQATDENSRTSAEVGSLIEALAGQVQAGSQVIERLAQQSEQIEVVLTVIHGIAEQTNLLALNAA

SEQ ID NO: 132373 - protein, 315 aa, Unknown
  Bacterial polypetide isolated from the Sargasso Sea
RKVYDDLFNAENEAEMDHISLSRWSDLILVAPATANTISKLSVGSSDDLASTVILASNKDIFLTPAMNVRMWEHPSTKENLNKLKKYGYKIIGPEIGDMACGEFGEGKMTEPNEIIKKVETYFFNLNKTKKFKALITAGPTHEYIDPVRFITNKSSGKQGFEIAKVLSKKGFETTLISGPTNLKINNEINLVQVETAEEMFNSTQNNLPVDVAIFCAAVADFKIKEKKKEKIKKKDFINLNLEKNIDILNYVSNHNSLRPKLVIGFAAETHNMEESSRKKLMEKNCDWIIANDISNKSIGFDSDFNEVTILYKNK

SEQ ID NO: 132374 - protein, 117 aa, Unknown
  Bacterial polypetide isolated from the Sargasso Sea
MNNCFIILAAGKSNRFKSKIPKPFVQYNGDILIKHSINKAILSKKFSKIVVAVNKNHKKYIRGLKLNKIKFINGGKTRADSARNCLNFIKKYNPNNVFIHDAARPNFSLNLIIKLLK

SEQ ID NO: 132375 - protein, 161 aa, Unknown
  Bacterial polypetide isolated from the Sargasso Sea
MNRTIIIIPSRMSASRLKGKPLLEINGLPIICHVLNKAKYTGIDTVVATEDKEIVKVVESNGGKAVLTGKHETGTDRIFEALIKLDKKDIKYVLNLQGDEPMIEPSDIINLNELMIKNDCEIGTLACEIKENEILNNKNVVKVITEKKLEKNNFVRANKFF

SEQ ID NO: 132376 - protein, 163 aa, Unknown
  Bacterial polypetide isolated from the Sargasso Sea
EVAKKVNYDLIIDIQGDEPLLDFNHIDEVVDFHTSNMKFDIIIPHLDFQSPESPNIVKLLIDKNNYIKYMSRAVIPYPFLKKPKFYKKHLSIISFKSESLQRYASLKQSKLEKIESIELLRALENDFSLGSFGLSGDSFSIDVKEDFENALKVMPKDKYRKLY

SEQ ID NO: 132377 - protein, 207 aa, Unknown
  Bacterial polypetide isolated from the Sargasso Sea
MFRIFNDNGYEVTTYYDNFWFGRHKGKYIYDYIVNQSGGKFNTCAFDTGYGLHFKISFLGYCLIADEIKFKLASFFLNKDLKKTTSIEKIMEIMKKNINKKNPQFLMAHHINPGHTGEYIYGREGDFENYLNYYKKKSEIVKIELELIINFIKDNDPNALLFVYADHGPKLSYGIEFEDNNSFKILDSFAVYSGIYPKNKCKKFIYP

SEQ ID NO: 132378 - protein, 155 aa, Unknown
  Bacterial polypetide isolated from the Sargasso Sea
MIKSNNYKGIVLAGGSGSRLYPLTKVISKQLLPIYNRPMVYYPLSILINAKIKDILIITTPEDQESFKSLLGDGSQWDVRLDYSVQEKPEGIAQSLIIADKWLTGNPVVLILGDNLFFGPDLFLKIEKAINENDGATIFGYHVDDPERYGVLELD

SEQ ID NO: 132379 - protein, 450 aa, Unknown
  Bacterial polypetide isolated from the Sargasso Sea
MFKKLFYVPLISFLVFSNFIVSDDVEEVVVTGSYIKGSPTDGASPVELYDRSTIEAIGAVNVADITANIAVNSGSENQADSFTSGALQGRTNVNLRGLGLSSTLVLFDGRRQTVAGATANDGSVFVDTSAIPIIALERVEVLKEGAASIYGSDAVAGVVNYIFRRDFTGFEVDLTHQETDLGSQEDDRVSFIWGAGSGDTNLVLAYSALDRSPLSQSELELAPLGISGLGTSFLLFGPSTVESGPYAGTYSVFENVPDPNCVANKGILIPQASGSRCGFKYGPRFNIVNDEEHNQLYVSLKTVLTNGINAELDYLKAETDVFDNPQSPSYPALSYLSPALAIQPGTGGNPFGVPALWLGRPLASAFPSPFAPREIEMDRVSFGLSGTLDSGFDWDFHMTRSAEDSYGRQPDTGTSALAAAINGTGGPTGDPTFDLFHPSANSQELRRLAK

SEQ ID NO: 132380 - protein, 256 aa, Unknown
  Bacterial polypetide isolated from the Sargasso Sea
MKAVAIIPARMGSSRFPGKPLANILGLPMIEHVRRRVAMSKILSEVYVATCDQEIHDAVTQLGGNAIMTSSSHQRASDRTAEAAEALDAELFVMVQGDEPMTYPDMIDLALRPMLQDSKIICTNLMKRITEHSDYLNPNTIKVVVNNESDALYMSRSPIPHLADVSNLSTTPMYKQVCIIPFTRAGLKLYTELSPTQLEITESVDMNRFMEHGYNVRMIESEYDSHAVDNLEDLHLVTQLIREDPLTRQYLESFSE

SEQ ID NO: 132381 - protein, 410 aa, Unknown
  Bacterial polypetide isolated from the Sargasso Sea
MIETTISGIVVFSGVITILVVILNFAQSKLLPQDEVALVINDKTDEAINIKPGSTLLSALSGQKIFLPSACGGGGTCALCKCQVLDGGGDILPTETGHINRQEAKDNWRLSCQVKIKQDMKIRVPDEIFNIQKWDCTVRSNENVATFIKELILELPEGENLNFTAGGYIQIDIPEYHNLTYADFAVENQYHPDWDKFNIWDLVANNDEECFRAYSMANHPAEGNKVMLNVRIATPPPPLWDTAPPGIASSYIFNLKEGDKVTISGPYGDFFVKNTDREMIYIGGGAGMAPMRSHLFDLFHTQKTNRKVSFWYGARSLREMFYEKDFDEIVEKFPNFSFHVAMSEPLPEDNWNGPTGFIHQVLLDNYLNEHDDPTEVEYYLCGPPPMIDACQKMLYELGVEPEMIAYDSFG

SEQ ID NO: 132382 - protein, 382 aa, Unknown
  Bacterial polypetide isolated from the Sargasso Sea
MPYTGIVKYHVKLSFEVDGLVERADIIGAIFGQTEGLLGPEMNLNELQRVSKVGRIEVNTFSTENTTKGDALLPMSTDIDTCSLISAAIESIDKVGPFDSAFRLDDIEDVRANKKQDILQRAKEIKQKWSTNSVSEGQEMLEEVHENNSEKITTYGPKKLHCSTGIHDSKWVILVEGRADIINLLRAGYDNALAFEGGRIDESIKELCEQKEKVVAFTDGDRAGGFILKELKSVVHVDVELRADTGIEVEELTPKRVDEILAPVKKQMEEELSAPEIKNVDDGPLAELCKNKFSELNESLEAIALDSNDTEVFRVAIPELVGKISGQSGIKYLILDGIITQRLVDAAKTAGVESIIGHRTAKLSNSDGVSLKTFRELGIASN

SEQ ID NO: 132383 - protein, 316 aa, Unknown
  Bacterial polypetide isolated from the Sargasso Sea
MNDWAGLPATYGDVLRRAMESLFRTFENFSEGTFIVDAEARVVWINKRYAARFGFSDPQQAIGRDCEEVIPNSLMREVVNTGKPILLDILETDREPLVVTRLPLKDDAGETVGAVGFALFDELKALTPLFSHYSRVQEELIATRQSLAQARRAKYTFGSFVGTSAASLEVKRQARRAAQLESPVLLLGETGTGKELLAHAIHGGSARANQPLVTVNVAAIPDTLLEVEFFGAAPGAYTGADRKGRVGKFELANGGTLFLDEIGDMPLPLQGKLLRVLQDKEFEPLGSNRIVRADVRIIAATSADLPALVAAGRFRA

SEQ ID NO: 132384 - protein, 354 aa, Unknown
  Bacterial polypetide isolated from the Sargasso Sea
MHVDADAQAAYGRRCAGWRGARDGQCAVGRAAFAAREACVTDAHVHHAGSNVELARFVPDPALFRVSTLRVGAALAGDWLMIAVAFAVAIVFVHPLVYALAAIVIARSQLALAVMMHEGAHGLLARNWHVNDAVGQLFAAGPLWLSLRTYRAGHLKHHRAPMEQDDPVALLFGVHDYPVTRGRLIGRLLAYACGIGYVTSVVKLARGEFAHAMPKVGKSRAYAAWEVASMLAGNGVLFAALAWAGHPLLYVTLWIVPSVTLLPLAGQVRAIFEHAGLPACADQSRNARTIVRRSWQTFLFGPHAIHFHIEHHLFARMPFHHLPVVHRQLAQRQLLPDGNLYAGYGGVLRDVSVR

SEQ ID NO: 132385 - protein, 667 aa, Unknown
  Bacterial polypetide isolated from the Sargasso Sea
MIAKSPVVKHLVLIGGGHSHLAVLKHLGMLPVPGLAVTLISRDINVPYSGLLPGFISGAYDAKEISIDLRPLAQFAKARIIQADIKNIDLNDKKLILPNRPDISFDLLSINIGSEPKLSMIPGAQDHAIGIKPLPAFLELWPQLLQRTISTLTQKEQFKFAIVGGGPASVELAFSIHHRIKNDLNLTSTEKSNLQMQIISAERTILQFHNNRVQRFAAKELTSRNIDILLEKKMSACEKGTIICEDETEIAADAIICATGASLPSWPAKCGLAISQDGFIEVDSYLKSTSHDYVFAAGDAATIKGQKRPKSGVYAVRQGLPLANNLIRQATSKRLKKYKPQTHALALMSMCNKTAIASRNKFFMHGRIAWLIKDRIDINFVKKYSNFPQMENNLGLEKGLVDNKTQQLLESHAMRCAGCGAKVANSVLQEVLRQLPNTEKQEILTNFSSAEDAALIQLEGNKVLLQSVDQIKAFINDPWVFARIATNHCLSDIYAMGCKPHSALAIVGLPFASKKYSQSELRQLMLSCSETLKEQNCSLIGGHSAESEDLTFGLSVNGFTTQDKVLCKNGMQKDDVLILTKPLGSGTLLAADMRSKASHSNIQGALNAMAISNQEASSILVKLKATACTDITGFGLAGHLLEMLAKDRIEVSINLDDIPIMDGAVDS

SEQ ID NO: 132386 - protein, 326 aa, Unknown
  Bacterial polypetide isolated from the Sargasso Sea
MPKQNFFSYLHEKYDTEFIYFDTFMEEALYSDLGFFNTDQVRSDKEGDFLTSPEVSKYFGKIIRNWIHSESNLKNIIEIGSGTGSLIEQIGIKEITAVELSSTAREELIKKGIDTHTTIDELTTKTSDLIFGNEILDNIPCSIGLYKDEGWYEKVVLLEENSLVYGLRPIRNKELDWINKNNIVPNEDYEFEIQVNIDKFLNSVIKKINPGKILLFDYGYEQKNRDKRMYSSLLRTYKNHHLSVDPIDDPGNIDITYDVNFSSISSELKYLGYDVTLKLQRDFLLDNGFNIFFDELQEKYIAAEGIEKLKINSELNGMKAIVDSNG

SEQ ID NO: 132387 - protein, 407 aa, Unknown
  Bacterial polypetide isolated from the Sargasso Sea
MDKGNIWVVDDDESIRWVLERGLSENGIAVETFDSAKKVIKKLETENPSLILTDIKMPGKSGIDLLDEVKEIRPEIPIIIMTAHSDLKSAVESYEHGAWEYLPKPFDIEEAVSMVQRATTKDNTEIEETDESQAEIIGEAPAMQEVFRAIGKLSNSNSTVLLMGQSGTGKELVAKALFQHSPRKENAFIALNMADIPKDLLEAELFGHEKGAFTGADEKRLGRFEQANNGTLFLDEIGDMPLETQTRLLRVLSNGEFYRVGGRQPIKVDVRIITATHQNLEELVKSGNFREDLFHRLNVIKLLLPKLNERKEDIPELAKHFFTKSSEELKEEKKFLSEEVENYFKTLAWPGNVRQLENACRWLTVMSPSKEVKLEDLPDELKLENAEEENNWKVVLRSWSENYLENG

SEQ ID NO: 132388 - protein, 122 aa, Unknown
  Bacterial polypetide isolated from the Sargasso Sea
MKNKILAVIPAAGSSERFNSEELKQYADCGGRSVLEMAVSPFLDSEIITKVIICISTNDTFIKNQNFINDPKILLIEGGSTRAHSVLNALQHEEFNDYQYVIVHDAARPNITEADINKIHND

SEQ ID NO: 132389 - protein, 292 aa, Unknown
  Bacterial polypetide isolated from the Sargasso Sea
MPDSPRAAVIWMIFGSFCFGTMNALVKWTSDHTDVWMIIMVRSAVIAFAVAAFAASRGISLKVNDHRTMLLRCIVGLIAMILYFTALGRIPIGQAVTLQYTGPLFVALLSGRILAERVSASVASLVLTAFAGIVLIVSPEVGTVDPNALLALGSGFFAALAYMYVRELRKTDSPATVIFWFAAFSVVGSIVQSAPHISELDSNTIAALIGIGIGAGGGQVGITMAYHKANAAWVSAFSYLTVLVATFYGFSLFGETLSLADWLGGALVVGSGIALVFVFPPDEKSESGNAAQ

SEQ ID NO: 132390 - protein, 377 aa, Unknown
  Bacterial polypetide isolated from the Sargasso Sea
MIQSAPLRRLATGALAAAALTAAAGALAEPQGFLETVHRHTTLVNTVPDNGDQNPYAIAVAPVSAGTIQAGDVLVDNFNNSANLQGTGSTIVNYRPSTKQLSLFASIPRDLKACPGGVGLSTAMTMLKSGWVIVGSTPSNDGTTNTKGAGCLIVLDPQGKIASTWSTPNINDPWGNMAVVDRGDSATLFVSMAGFGVGGADGNPPIYKQATVLRLDLDVPAGKPPVIKQETVVASGLGAQADKGVFLVGPTGLALSGDQKKLYVSDAIGNRIVEIDDPLTRDTSAGVGRQVTADGFLRRPLALATAPNGHLLATNAQNGQVVEIDPVAGKQIYARWINTDKAQTPPGNGNLFGIAMTPEGDGFYYVADDVNTLLLAK

SEQ ID NO: 132391 - protein, 152 aa, Unknown
  Bacterial polypetide isolated from the Sargasso Sea
MDKVSAIILAAGSGSRFGEKKQFKKLNGKPIWIYSLNTFIQSKCINELILVFPKDSLETLKQSQVFTSLNKKNNIKLVSGGESRRDSVLNGLKAVKKINDVICIHDAARPFIKPSYIKDSIEACREFDGAIIAIPAIDTVKKADNKIIKNTI

SEQ ID NO: 132392 - protein, 301 aa, Unknown
  Bacterial polypetide isolated from the Sargasso Sea
MKILITGGTGFIGRRLVAHLKVAHEVLVLTRQGSRAYDLLGHDVKLLDSLDRLDNLNDVDAVINLAGEPIANGRWSERRKQLLCDSRWLLTEQLVDLVKLSDTPPRVLINASAIGWYGRQGDEPLDEQCQTPHDEFTHQLCQQWETLAREARSKHTRVCIVRIGLVLGTDGGALPKMLPPYRVGLGGPMGTGNQVMSWIHIQDLVRAILFLLEHDECDGLFNGTAPQPVSNREFSQTLAGTLHRPHLFFVPAPLLQLLMGEAADLLLTGQRVLPTRLQQAGFHFTYPALPQALANLLSTPR

SEQ ID NO: 132393 - protein, 316 aa, Unknown
  Bacterial polypetide isolated from the Sargasso Sea
QHRQAGTDPGRPAGDLFLDEIGDMPLTMQAKLLRVLELREVTPIGRQPAGAGGHSHHSRDPSASGAVHRRGQVSRGSLLSPQRHSHPPAAPARAGGGRGAADPLLPQPAHQPHRPAVSGAEPGGDGTAGGLPLARQRARAQQPHRVPGERGAGGGGDREHPAAPQYSAQPAQRGGRAVTQRGANRAHAALARPLFPWRAGRPCAQSCRWQPGIGYGGALVIARGKPARAGGRPGRARVGAATWRKRAGEHGKADDRGDPATPWQQEAGRPGARDRHRYPLSQDKEVRDSRAGLISQRVAWRPRLTAPRPTIAALSL

SEQ ID NO: 132394 - protein, 491 aa, Unknown
  Bacterial polypetide isolated from the Sargasso Sea
MNDWVRLPVNYGDVLRRAAESLFRTFEDSSAGTVVVDRDARVVWMNERYAARFGFADPQQAVGLDCEAVIPNSLMREVVSTGQPILLDIMETGREPLVVTRLPLKNEAGETVGAIGFALFDQLKTLTPIFSRYAQLQQQLIATQRSLAQARRAKYTFASFVGTSAASLETKRQARRAAQVDSPVLLLGETGTGKELLAHAIHAASARALQPLVTVNVAAIPDTLLETEFFGAAPGAYTGADRKGRIGKFELADRGTLFLDEIGDMPLPLQGKLLRVLQDKEFEPVGSNRIVRADVRIIAATSADLPALVAAGRFRADLYYRLNVLTIHAPPLRERASDIAALVYATLEELAAQHGRAAHCELTDDALRMLCAYPWPGNVRELRNTLERALMLSDRSVIDARALAPFLGPVRVSTDAAAPTQPLAAPPVERRAGERPAAPAASYADALAAWERQFLTDALAACDGKVVEAAARIGIGRATLYKKLAALGIDR

SEQ ID NO: 132395 - protein, 483 aa, Unknown
  Bacterial polypetide isolated from the Sargasso Sea
MAHPRHDHPAFRAEALRWCGTRAMRERTLDVMDPYTGTRVGTAPLASVDDVRVAFDYAMAYRPTLTRYERSQILERAAALLRERTEEASDLITLESGLSKQDSRYEIGRVADVLKFAAVEALRDDAQSFSCDLTPHGKARRVFSQRQPLDGVIVAITPFNHPMNQVAHKIAPAIATNNRVIVKPSEKVPLSAFYLADLLYEAGLPEPMLQVLTGDPREIADELVTHPHASLITFTGGVAIGKAIAARAGYRRIVLELGGNDPLIVLDDADLERAASLAVLGSYRNSGQRCTAVKRMLVQRSIAPAFTELLVEKTRAWKYGDPFDPANEMGTVIDEEAARLFEARVAEAVAQGARLLTGNVRRGALYAPTVLDNVDPSMTIVREETFGPVSPVITFDTIDDAIRISNGTAFGLSSGVCTDSTAAVVRFVNELNVGTVNVWEVPGYRIELSPFGGIKDSGLGYKEGVQEAMKSFTNLKTFSLPWE

SEQ ID NO: 132396 - protein, 1500 aa, Unknown
  Bacterial polypetide isolated from the Sargasso Sea
MSHPVLKLFFGTLCLLSLCGAPLTGSALPLNAANTQLKFEHIRSEEGLNQNTITSLFMDSAGMLWIGTQDGLHSYNGYNFNLFIHSPNNPSSISESFISDIIQDAEGYLWIGTFSQGVNRLDLNTGTFERFGLEQGLTDPRVTKLNIVGNTLWIGTQGGLFSLSIKTQRITQVSLGNSVEPHITSLANVENTYLLAGTRASGTFALSSNAITRLNVPQDLTAYQIKANSTRAITLALGNQLWHYDLVSHQGSILWQAEDDIPYLKDFIQTPQGQFWVVGPEAGLIQLEREAGRFVAAYHKYDMQRPNSISDNNILCLLQDPFGNLWLGGSYSGLNKINTRRQYFQHLFEYTTELPQQSNNIRTMFRSQDKALWIGTEGAGLKRLAFNAKQYEHYTSAFAKALGKETRHLNLVLRAITQDRQGVLWFASNYGLGRLTPSGEFSLLKLTQSQDPASEANYIRSLELDAQGQLWVATSHALYRKALEKDEFTSVPLTDIENFHPTQNLLLMLRADGNTLWIGSLNGLVKLDMQTGQGQAFYHDPENKNTIINNRIRDVLVASNGDVWFATHGGISRLSAQAEDMVFRDYTREQGLPSDTIYALLEDDEHHIWFSSNAGIGKLNPTNGKIINFNEQEGLQALEFNGGVKLKDSDGDLWFGGINGINRFNPKAIPDQRSEAKVALTAYKIAGKRHTILDLSHPPKILMNYDDQLVSFEVTSLDFSYTGKNRFSYYLEGFDNQWHDLPSGNEITFTNINPGHYVLHVRHSLEYNSEGSYALLVDLTVKAPFYRSQIAYALYVLLALGLLGWIVLWRKQKREQQQEFETSIRASEERLKLALWASGDGMWDWNIQEQQVYRTHTDIPVSQWSSHTLLHDNAHPEDRERFKQVLTDHLQGRTPFFEMEYRIEHSPGNWLWILERGKVVETNTQEQPIRMTGTTRNITSRKLIENELVLSSQVLNSMNEAVVVAGLDYRIRSVNPAFSAITGYSERQISDKYLIHLAYSRQQRDLFNSIEQQLLRHKHWAGEIWIRNRARKAILVWLEINQVIDVKGETSHFVAVFTDITERKKAEEDLRFLASFDTLTGLPNRTLFQDRLNHAISQAHRSNNIVALLFLDLDRFKHINDSMGHHIGDLLLKAVAHRLQNAVREGDTVARLGGDEFTIILEGVAKTKAATLISEKVLKAFQAPFLLDDKSLTISTSIGISLYPNDAEDVDSLIKFADTAMYHAKALGRNNFQFYTNKLNEMATRHVQLEAGLKQAISRNELSLVYQPKFCLRKGSLTGLEALLRWHHSELGPISPAEFIPLAEETGIINQIGHWVINHACQQLAEWSELGFGDISMAVNLSARQLKADIISSIEVALAVSGLPAKALELELTESMIMGNPQESVNILSKLKALGLTIAVDDFGTGYSSLSYLKRFPIDTLKIDREFVRDITNDPDDAAITSAIIALAHSLELNVVAEGVETQEQLNFLALQGCDQVQGFLLSKPLSAQDCLALLQQRIK

SEQ ID NO: 132397 - protein, 162 aa, Unknown
  Bacterial polypetide isolated from the Sargasso Sea
MVRGIYIGRFQPYHNGHHKVVEKISGEVDEMVLGIGSAGDSHTRKNPFTAGERMLMVTRAIEEFDVPSYVVQIEDLKRNSIWVSHVESISPSFDVAYSNNPLVIQLFREAGKEIRQVPMFDREVLEGAEVRRRMENEEDWQSLVPVPVRDIIEEIGGIRRIQ

SEQ ID NO: 132398 - protein, 202 aa, Unknown
  Bacterial polypetide isolated from the Sargasso Sea
GAINGCSNPHPHGQIWANSTVPTLPAKADQAQREYLAKHGKNLLLNYAALEQQSGERTVVENEHWLVVVPFWASWPFETLVLPKAHVRRMEELTSEQQVALADILKQITIRYDNLFQCSFPYSMGWHSAPYQNDAGAETSESIDHWQLHGHFYPPLLRSATIKKFMVGYEMLAETQRDMTPEQAAERLKQQSPVHYKQQSKV

SEQ ID NO: 132399 - protein, 321 aa, Unknown
  Bacterial polypetide isolated from the Sargasso Sea
RKNPLSGEWVLVSPHRNNRPWLGATEAVATEELPKHDPSCPLCPGNQRANSDTNPHYSYTHVFVNDFGALNSISPQAESSTDPLFTYDAAEGECRVICFSPDHNKTLPEMSLTELSEVITAWQQHYRELSLRYNCVQVFENKGAIMGCSQPHPHGQIWAHPHLSTEIEREDAQQSSYFQLHGRALLADYAEKEIADGSRVVFENKHWLVVVPFWAAWPFETLVLPKDELQRLDALNDAQNSALAETLKVLTTKYDNLFRCSFPYSMGWHNAPANLDSSASYWRLHAHFYPPLLRSATVKKHMVGYEMLAESQRDLTPETAA

SEQ ID NO: 132400 - protein, 207 aa, Unknown
  Bacterial polypetide isolated from the Sargasso Sea
MTQFNPVDHPHRRFNPLTGQWILVSPHRAKRPWQGAQETPSKQVLPAHDPDCFLCAGNTRVTGDKNPDYTGTYVFTNDFAALMSDTPDAPDSHDPLMRCQSARGTSRVICFSPDHSKTLPELSVPALTEIVKTWQEQTEDLGKTYPWVQVFENKGAAMGCSNPHPHGQIWANSFLPNEAEREDRLQKAYFAEQGAPMLVDYVQRELA

SEQ ID NO: 132401 - protein, 182 aa, Unknown
  Bacterial polypetide isolated from the Sargasso Sea
HPHGQIWASDRLPTEIEKEDAHQRSYFEEHRKPLLLDVVEEELKKEERIVEKNSSWLAVVPYWAVWPFELLLLPRRNVKHLEEIDEQEKQELAEILKKILSRYDNLFQTSFPYSMGWHGAPFDEKGDHWLLHAHFYPPLLRSARVRKFMVGYEMLAETQRDLTPEQATERLCKLSSIHYKHS

SEQ ID NO: 132402 - protein, 171 aa, Unknown
  Bacterial polypetide isolated from the Sargasso Sea
MTNLHDLPHRRFNPLTNEWLLVSPNRMKRPWQGKIEAEVKKIIPVYDPNCALCPGNERTGGTKNPDYTGTHVFKNDFSALLEDSNITIEKGNKNSDLFLSKEVYGTSRVICFSPSHCKSLPEMNNSEILEVVRTWIDQTIELGENYRWVQIFENKGEIMGCSNSHPHGQVW

SEQ ID NO: 132403 - protein, 110 aa, Unknown
  Bacterial polypetide isolated from the Sargasso Sea
DLTKEQQAALADILKRITIAYDNLFQCSFPYSMGWHSAPYQNESSDAVESIDHWQLHGHFYPPLLRSATIKKFMVGYEMLAETQRDMTPEQAAERLKQQSPVHYKQQSKV

SEQ ID NO: 132404 - protein, 204 aa, Unknown
  Bacterial polypetide isolated from the Sargasso Sea
GSKYRWVQIFENKGAEMGCSNPHPHGQIWASDRLPTEIEKEDAHQRSYFVEHGNPLLLDVVKEELKKEERIVEKNSSWLAVVPYWAVWPFELLLLPRRNVKRLEEIDEQEKQELAEILKKILSRYDNLFQTSFPYSMGWHGAPYDEKGDHWLLHAHFYPPLLRSARVRKFMVGYEMLAEAQRDLTPEQATERLCKLSSIHYKHS

SEQ ID NO: 132405 - protein, 235 aa, Unknown
  Bacterial polypetide isolated from the Sargasso Sea
FSPNHAKTLPELELQQITELIETWQKQFQDLGSKYRWVQIFENKGAEMGCSNPHPHGQIWASDRLPTEIEKEDAHQKSYFHEHGKPLLLDVVGEELKKGERIVEKNSSWLVVVPYWAVWPFELLLLPRRNLKRLEEIDEQEKQELAEILKKILSRYDNLFQTSFPYSMGWHGAPFDEKGDHWLLHAHFYPPLLRSARVRKFMVGYEMLAEAQRDLTPEQATERLCKLSSIHYKNS

SEQ ID NO: 132406 - protein, 197 aa, Unknown
  Bacterial polypetide isolated from the Sargasso Sea
GLLQPFTPHGQIWGSDFLPNEIAREEQHQRDWLAEHGRPMLLEYVERELADRSRIVVETEHWLAVVPFWAAWPFETLLLPKAHVPSMLNLTKAQQQDLAVALKELTSRYDNLFECSFPYSMGWHFAPPKSDCPEAWQLHAHFYPPLLRSATVRKFMVGFEMLAETQRDLTPEQAAERLRALSPIHYTQTSHTNEEAL

SEQ ID NO: 132407 - protein, 177 aa, Unknown
  Bacterial polypetide isolated from the Sargasso Sea
EIAREEQHQRDWLAEHGRPMLLEYVERELADRSRIVVETEHWLAVVPFWAAWPFETLLLPKAHVPSMLNLTKAQQQDLAVALKELTSRYDNLFECSFPYSMGWHFAPPKSDCPEAWQLHAHFYPPLLRSATVRKFMVGFEMLAETQRDLTPEQAAERLRALSPIHYTQTSHTNEEAL

SEQ ID NO: 132408 - protein, 190 aa, Unknown
  Bacterial polypetide isolated from the Sargasso Sea
PHGQIWGSDFLPNEIAREEQHQRDWLAEHGRPMLLEYVERELADRSRIVVETEHWLAVVPFWAAWPFETLLLPKAHVPSMLNLTKAQQQDLAVALKELTSRYDNLFECSFPYSMGWHFAPPKSDCPEAWQLHAHFYPPLLRSATVRKFMVGFEMLAETQRDLTPEQAAERLRALSPIHYTQTSHTNEEAL

SEQ ID NO: 132409 - protein, 239 aa, Unknown
  Bacterial polypetide isolated from the Sargasso Sea
PDHGKTLPELPLPAIEQVITTWMEQVAELSTHWEWVQVFENKGAVMGCSNPHPHGQLWGSDFLPNEIAREEQHQRDWLAEHGRPLLVDYVERELQDRSRIVVETAHWLAVVPFWAAWPFETLLLPKRHVPSLLDLTPELQQDLAIALKELTSRYDNLFECSFPYSMGWHFAPPRSDCPEAWQLHAHFYPPLLRSATVRKFMVGFEMLAETQRDLTPEQAAERLRALSPIHYNQADGEKR

SEQ ID NO: 132410 - protein, 351 aa, Unknown
  Bacterial polypetide isolated from the Sargasso Sea
MGTPFDPTNDPHRRYNPLLGEWVLVSPHRAKRPWQGASEEPNNEQKPSYDSTCYLCPTNTRVNGEVNPDYKGTFVFQNDFAALKQDTEQASEKKGLFQFETEQGCSRVICFSPDHSKTLPELSDEERVDVVNTWKAQTAELGETYRWVQVFENKGSMMGCSNPHPHGQVWAQQHVPTDPAKKVVQLQQYFGENGTPMLLDYAEQEVAKQERVVCQNDDWVVVVPYWAAWPFETLLLPRFDVQSMHMLSDSQSLSLAKIIGEITAKYDNLFETSFPYSMGWHSAPFDSEAHPEWTLHAHFFPPLLRSASVRKFMVGYEMMAEAQRDLTPEQAADRLKALSTVHYKKRENANG

SEQ ID NO: 132411 - protein, 518 aa, Unknown
  Bacterial polypetide isolated from the Sargasso Sea
MPARFFIWLGVSYDRPLFFWPPRQFEVITRCTIFSQIANFCRKVLGKEDGEQSAESPIPARVAGQRRTLSRDQHPISRKEISENALKVLYRLNKGGYEAYLVGGGVRDLLLGKTPKDFDIATDATPEQIKSLFSNCRLIGRRFRLAHIVFGRDVIEVATFRGHHHQVNTSKHVSAQSDEGMLLRDNVYGTIEEDAERRDFTVNALYYSAKDFTLHDFEGGLEDLAERKLELIGDPETRYREDPVRMLRAVRFAAKLDMTISPRTAAPIKELAPLLQDIPAARLFEETLKLFLAGDGLATYKLLREYGLFQQLFPQVAALFTPHGNSPYEQFIEQALIDTDTRVREDKRVTPAFLYATLLWGCVEARGRVLENESGLPWYDAFMLAINEVLDNQVRIIAVPRRFTTDVRDIWALQQRLTRRQGRHPERAMEHPKFRAAFDFLLLRNRVERGLGELASWWERYVESNPDVRPQLQREATRRPASGERGQAGEARSNDGEKRSSNSRNRRRPRRRKPKAAE

SEQ ID NO: 132412 - protein, 114 aa, Unknown
  Bacterial polypetide isolated from the Sargasso Sea
MKSNKILPVILCGGSGSRLWPLSRQSFPKQFLNLAFTEGLSLLQRTQKRTRKLKNIQDPILICNEEHRFIVAEQMRQLKVKPKSIILEPFGRNTAPAITVAALKSLEFYEDPNF

SEQ ID NO: 132413 - protein, 199 aa, Unknown
  Bacterial polypetide isolated from the Sargasso Sea
MKKKIIPIILCGGVGSRLWPLSRASFPKQFLSIIKDEKKSLLQQTYLRILEVNNITDPIIICNEEHRFIVAEQMREINVKPKAIILEPTGRNTCPAITLAALKAFREESESILLVLSADHKIKNNKEFVKVINRAYDYADAGRLITFGVIPTSPETGYGYIESSKPLNKDSYDGFEINKFIEKPAQELAKKLCQDKRYT

SEQ ID NO: 132414 - protein, 248 aa, Unknown
  Bacterial polypetide isolated from the Sargasso Sea
DTADLEFLRLEREAFAKCPNVAIDVAVMEKTDLGSVLPLDAGWSDVGSWSALWETGTQDSEGNVLQGRVISEGSRNCYIRSEHRLVVGLGVENLVVVETDDAVLIADRSQAQAIKKVVKQLETDGSPEGKAHRKIYRPWGSYTGVVEDHRWQVKRISVKPGASLSLQMHHHRAEHWVVVRGTALVERDGEQQLLGENQSTYIPVGCRHRLSNPGKIPVELIEVQSGEYLGEDDIVRFEDRYGRSNLSI

SEQ ID NO: 132415 - protein, 213 aa, Unknown
  Bacterial polypetide isolated from the Sargasso Sea
MIAVILAGGTGTRLWPYSRSITPKQFLNLGSSHISLFQQTSKRLESLVSPDQIYIVGGDAQKDQLRNQILQIFPDFPIDQLLLEPFGRNTAPAILWSILRIPQRNHNVPIAVLASDHLIKNHNSFTHALKLGERLAYLGYIVTFGIKPDRAETGYGYIKSGQSLEIGFKVEEFVEKPDQQTAEQYLESSNYSWNASIFMATAQTWLQEFRKHA

SEQ ID NO: 132416 - protein, 241 aa, Unknown
  Bacterial polypetide isolated from the Sargasso Sea
MINIDKKSNLNSELIPVILSGGSGTRLWPISRPSFPKQYLNLKENNKYSLIQNTYLRLIGIKNLSNPIIISSEEQRFIVAEQMREINIKPNSILLEPVGRNTAPAIALAALKALEQNSDPILIILSSDHEINNVKGFHKVIEDGLIQANEGRIVTFGIIPDSPETGYGYIETYEEISVKNPSSKIKKFIEKPNIELAKNFIKDKHYLWNSGIFLCKSSVIIRELEKLEPEIVKICKESLKK

SEQ ID NO: 132417 - protein, 267 aa, Unknown
  Bacterial polypetide isolated from the Sargasso Sea
MIAVILAGGTGTRLWPYSRNDTPKQFLNLGSSLESLFQETSKRLESLVLPENIYVVGSNAHKDLLRHQILKIFPDFPIDQLLLEPLSRNTAPAILWSILKIPEVNKKVPVVVLASDHLIKNLQRFDNALKIGEKLASLNYIVTFGIKPDRPETGYGYIKSGEPLDVGFKVEEFVEKPDQSKAEQYLASQSYTWNASIFMATAETWLNEYRKHTPELLDLFEKEASLGGLSDKERIRKIYDSISADSIDYALLEKSDRVAVIPVDIEW

SEQ ID NO: 132418 - protein, 221 aa, Unknown
  Bacterial polypetide isolated from the Sargasso Sea
MLPITPILLAGGSGTRLWPLSRKSYPKQFMQLTTNETLFQQTAKRVVECDGLQFNPHIIITNSDFRFIVSDQLQAIELNPRRILIEPKAKNTAPAILAATIFAQKDDKNAIIITMPTDHVISDTQNFHEAIKVGLEEIENEKIVTFGISPLYPETGYGYIQVEKSSIKSPNKVLKFIEKPNETTAKRMLEEGNYFWNSGIFMFRAKDMIRAFELYAKDILS

SEQ ID NO: 132419 - protein, 132 aa, Unknown
  Bacterial polypetide isolated from the Sargasso Sea
AVVNRLKAEKRPEFEFHREVFRPWGSYDSIDSGARFQVKRITVKPGEKLSVQMHHHRAEHWIVVSGSANVTIDDNTQLVTENESVYIPIGAVHALENPGKIPLELIEVQSGAYLGEDDIVRFSDRYGRVEKK

SEQ ID NO: 132420 - protein, 256 aa, Unknown
  Bacterial polypetide isolated from the Sargasso Sea
MKKVTVILSGGSGSRLWPVSRRTFPKPFMEVSGKTLLEHTIDRAKLVSNNLVIVTNQDHYFLTKDLVDAMGIDMNITYILEPVGRNTAPAITLASMIVKEKFGKDTSCLALPSDHLIGDLPKFEENVSSAFNECSNGSIVVFGIKPTFPETGYGYIEVNEISNEIQKAKRFIEKPSLDRANKYLKSEKHFWNSGMFCFSVKSILNNINIHAKDIHNSSLETHKNVINEDSIYRFDDKIFMNMPDEEVLIMRLGEIR

SEQ ID NO: 132421 - protein, 269 aa, Unknown
  Bacterial polypetide isolated from the Sargasso Sea
ILEPKGRNTAPALTIAALNQQDSILLMMPADHLISQIDLFHDAINAGIEMARQDKLVTFGIKPHSAETGYGYIHMGAELQFFNNQSIHAIKGFTEKPQLSVAETYLSSGEYLWNSGLFMMKAPVWLDKIKQFQKPIHDACALAYEKGQQDGLFYRLDETAFINCPADSIDYAVMEKLAEINDEQLAVIPIDVGWSDVGAWSSVWDTQDKDSNNNHIEGDVIAEDTSNCLIRSERGLIVTIGCDDMVIVDTDDAIMIANKNKTQDVKKIV

SEQ ID NO: 132422 - protein, 119 aa, Unknown
  Bacterial polypetide isolated from the Sargasso Sea
MQKAVLLAGGVGSRLWPLSRQLYPKQLLSIYGDESLLQATLRRVWRMGMESCVIVASHDHRFYIREQIIEMGLPASFSVEIILEPCARNTAPAIALAAYESAKDDVLCVFPADHYLLEK

SEQ ID NO: 132423 - protein, 148 aa, Unknown
  Bacterial polypetide isolated from the Sargasso Sea
MPKPIFPVILSGGIGARLWPLSRRLRPKQFLGLLDEGLSLFRESLNRVNREEYAPPLIVCNDDHRFLIAEELREMGLSASDIILETVARNTAPAITVAALRVSSVNPDGIMLVMPSDHVIPNSQAFTKAVLAAGELASEGRLVTFGVE

SEQ ID NO: 132424 - protein, 259 aa, Unknown
  Bacterial polypetide isolated from the Sargasso Sea
SLEVAEGFLNSDDYLWNSGTFLFKASKYLDELKKFQPKIYEACKKAIENKTNDLDFIRVSEEIFNKCPKDSIDYAVMENTDDGVVIEMDAGWNDIGSWSSIWDVSEHDKNSNAILGDVMTHNTSNSYIRSDNGLVAAVGVDNLVIISTKEVFLVAKKSRSQDLTKIIDKLKNEERPEWKLHREVHRPWGKFDSVDNGFRYQVKRITVKPGAKLSIQKHHHRAEHWIVVQGTAKVTKGDETFLLSVDQSTYIPLGTIHSL

SEQ ID NO: 132425 - protein, 267 aa, Unknown
  Bacterial polypetide isolated from the Sargasso Sea
MHSNTVIPVILCGGSGSRLWPLSRETFPKQYLSLNSSNDKSLLQTTRERIIGLKDLSNPILICSEEHRFIVAEQMREINTEPYSIILEPFRKNTAAAITLAAIKALENHEDPILVILSSDHKIDNEKKFRNVLELGLDYAKKERLVTFGIIPTSPETGYGYIKAETPFSSDKVVGKNILEFTEKPDLKTAKNFLKDKCFTWNSGIFMFKAKSFLSEIKKFSNETFEACSESINKSELDLDFQRIDKESFNKCPNISVDVAVMEKTAK

SEQ ID NO: 132426 - protein, 133 aa, Unknown
  Bacterial polypetide isolated from the Sargasso Sea
MTQNSIIPVILCGGSGTRLWPLSRGSYPKQFLPLISDNKKSLLQNTQERISSIKNLLEPILICNEDHRFIVAEQMREINIKPYSILLEPFGRNTAPAIALAAMKALENQSNPILLILSSDHEIKNKQNVYQYK

SEQ ID NO: 132427 - protein, 154 aa, Unknown
  Bacterial polypetide isolated from the Sargasso Sea
MVTAVLLAGGVGSRLWPLSRELYPKQLLSIYGDESLLQATLRRVVRAGVQSCIIVGSEQHRFYLREQVEELRLSNDVNVKILLEPAARNTAPAIALAAHYLTPDEVMCVFPADHYMEERQFNGQLQRAVDLAQQGYLTTFGVRPSSAETGYGYV

SEQ ID NO: 132428 - protein, 279 aa, Unknown
  Bacterial polypetide isolated from the Sargasso Sea
SSWALTGSETLFQQTLGRLAIEGVSKPIVVCNEEHRFIVSEQLAAIGNEAQTILLEPFGRNTAPAVAIAAMHLLAAGRDELLLVLPADHVIEDLPVFHSALGVARKAAEQGEMVLFGIPAERPETGYGYIRTGERSGLPGGVLSVEQFVEKPDLATASEFVAQGDYVWNSGMFLFRCSRYLEELQRHDQDIYDTCQLALSRSKSDLQFIRIDPSSFECCPDNSIDYAVMEKTERACVVPLAAGWNDVGSWSALWDVQDKDDQGNSRSGDVVIHDSQDCL

SEQ ID NO: 132429 - protein, 161 aa, Unknown
  Bacterial polypetide isolated from the Sargasso Sea
SVVAAVGVDDLIIIVSQEVVLVAKKNKSQDISAIVQKLKSDSRSEWEIHREVHRPWGKFDSIDQGERYQVKRITVKPRAKLSLQKHKYRAEHWIVVSGIAKVTKGDKTFELHENESTYIPLGEIHALENPGETNLELIEVQSGSYLGEDDIVRLEDIYGRS

SEQ ID NO: 132430 - protein, 151 aa, Unknown
  Bacterial polypetide isolated from the Sargasso Sea
MVAHKDKVQDVKKLVSKLDAQDRSETKNHCAVYRPWGWYDSVDMGGRFQVKRICVNPGASLSLQMHHHRAEHWIVVSGTAQVTCNDKTFLLTENQSTYIPITSVHRLANPGKIPLEIIEVQSGSYLGEDDIERFDDVYGRAEQSNEAKVAR

SEQ ID NO: 132431 - protein, 264 aa, Unknown
  Bacterial polypetide isolated from the Sargasso Sea
MNAPSLSPVILCGGTGSRLWPLSRSSFPKQYLSLFDESKNSLLQETQSRLKNLINIDSPIIICNEDHRFIVAEQMREINIKPKSILLEPFGRNTAPAIISAALKASEDGSDPTLLILSADHKIEDIDQFLLVINKARKYCEEGNIVTFGVIPTSPEIGYGYINASVPIESSLRAYPIENFIEKPNLQTALELIKDKKNYWNSGIFMAKTSTLINEAEKYCQGLTSICRDSLDPNLLDLDFQRIKKETFKNCPNISIDKAIMEKT

SEQ ID NO: 132432 - protein, 294 aa, Unknown
  Bacterial polypetide isolated from the Sargasso Sea
MSSSPIVPLILCGGKGTRLWPLSRTSYPKQFLSIEKGEKLSLLQKTINRIQPLKNLKKPILVCNEEHRFIVAEQMRELNIDDFIIILEPFGRNTAPAITIAAIKSLELEEDPTLLVLSSDHEIKNIEKFLTILNEGSKYAEQNKLVTFGIVPTSPEIGYGYIKASKPFSTNIEGFAIESFLEKPDLNTAKKLIKDNRFTWNSGMFMFKAKEIIKEINKFTPDILLSCKKAISNSVLDLDFQRLEKDSFEKCDDISIDIAVMEKTSKGIVIPLDVGWSDIGSWEASMGNLKKRHA

SEQ ID NO: 132433 - protein, 280 aa, Unknown
  Bacterial polypetide isolated from the Sargasso Sea
TSDCILVCNEEHRFLVAEQLRELDVSADILLEPEGRNTAPAIALAAHLTRDKFKDALLVVLPSDHIIQDTSKFHTALTKAITVALEGHLVTFGVVPTRPETGFGYIKLGKDKDDVYFVDDFIEKPDANRAAKFLTDGSYLWNSGMFVFKAGTYLDELQLQRPAIALACKAAASNWQRDMDFIRVKRNEFVSSPSESIDYAVMEHAKSARVVPLDAGWSDIGSWDALWTLLDKDTKNNVIMGDAITSDLTNSIVRAESRLVSVIGLDRVAVVETSDAIMVA

SEQ ID NO: 132434 - protein, 224 aa, Unknown
  Bacterial polypetide isolated from the Sargasso Sea
MEKTELGSVLPLDAGWSDVGSWSALWETADRDSNGNVLQGRVINKGSRNCYLRSEHRLVVGLGVENLVVVETDDAVLIADRAKAQEIKSVVKQLEADGSPEGKAHRKIYRPWGAYTGVTEGNRWQVKRISVNPGASLSLQMHHHRAEHWVVVKGTALVEKDGEQQLVGENQSTYIPMGCHHRLSNPGRIPVEMIEVQSGEYLGEDDIVRFEDRYGRSNLSISNS

SEQ ID NO: 132435 - protein, 305 aa, Unknown
  Bacterial polypetide isolated from the Sargasso Sea
KPDQATAEQFLATSRFTWNSGMFLFRASAMLAELERLAPEVVSCCRAALEQDTADLEFHRLEREAFAKCPNVAIDVAVMEKTELGSVLPLDAGWSDVGSWSALWETSEQKDSQGNVLQGHVIAEGSRDCYLRSEHRLVVGLGVENLVVVETDDAVLIADRSKAQEIKTVVKQLEAAGSPEGKAHRKIYRPWGHYTGVTEGTRWQVKRISVKPGASLSLQMHHHRAEHWVVVKGTALVERDGNEQLVGENQSTYIPMGCKHRLSNPGRIPVELIEVQSGEYLGEDDIERFQDRYGRSDLGRSDLSI

SEQ ID NO: 132436 - protein, 279 aa, Unknown
  Bacterial polypetide isolated from the Sargasso Sea
MADTPLVPIILSGGAGTRLWPMSRHLRPKQFLNVHGEGSMFGQTLKRISNNAYNPPVVVCNEEHRFLVAEELRQSGTRAEDIILEPVARNTAPALTVAALRLMDVHGDALILVLPSDQVVHDVGAFHSDVAKARALAIEGYLIAFGVTPTKPETGYGYIKCGQALCENSWHVEMFVEKPDRETAQNYIDQGDYFWNAGIFLFKASTLIAELERLSPNVTTAARSALDGAGADLEFLRLALEAFAEAPAISFDYAVMEKTDRAAMVPLTSAWNDIGSWSS

SEQ ID NO: 132437 - protein, 214 aa, Unknown
  Bacterial polypetide isolated from the Sargasso Sea
MDAGWSDVGSWSALWETSEQRDSQGNVLQGHVISEGSRNCYLRSEHRLVVALGIENLVVVETDDAVLIADRSKAQEIKTVVKQLEAEGSPEGKAHRKIYRPWGHYTGVTEGTRWQVKRISVKPGASLSLQMHHHRAEHWVVVKGTALVERDGTEQLVGENQSTYIPMGCKHRLSNPGRIPVELIEVQSGEYLGEDDIVRFQDRYGRSDLSISTS

SEQ ID NO: 132438 - protein, 238 aa, Unknown
  Bacterial polypetide isolated from the Sargasso Sea
MTNQEIIPIILCGGSGTRLWPLSRESYPKQFLNLEENNNKSLLQNTCERILSIKNISDPILVCNKEHRFIAAEQLRNININPKSILLEPFGRGTAPAVAIAALKAKENSENPFLLVLSSDHIISNKENLIKVLQLAINYADEGRLVTFGVKPDYPETGYGYIESSSNLNNDLGSQIKRFIEKPNLAKAKKYIKNKNFFWNSGIFLFKANDILREIKSFEPKILENCQKALNSSQLDLD

SEQ ID NO: 132439 - protein, 115 aa, Unknown
  Bacterial polypetide isolated from the Sargasso Sea
PGGAYTGVTEGNRWQVKRISVNPGASLSLQMHHHRAEHWVVVKGTALVERDGDQQLVGENQSTYIPLGCKHRLSNPGRIPVELIEVQSGEYLGEDDIVRFEDRYGRSDQRIPVQS

SEQ ID NO: 132440 - protein, 282 aa, Unknown
  Bacterial polypetide isolated from the Sargasso Sea
MLKAKILPVILSGGTGSRLWPSSRASFPKQYLSISDDKSLTFFQQTVKRISDHQNFEPPIVICNEEDRFIVAEQLRDLNIKSSTILLEPIGRNTAPAITLSAIKALEKGDDPLLLVLPADHLIRNLPKFQDVLESAIKYCIDDKLVTFGIKPDKAETGYGYIEAAKILNFEEIKGEKIVKFIEKPNMEIAKKLLHDKKYSWNSGIFFFKASVFISEIKKNKPDIYKFCKESLFSKLLDFDFQRIDEKKFKLCENISIDNAIMERTNNGIVLPLDAGWCDIGS

SEQ ID NO: 132441 - protein, 247 aa, Unknown
  Bacterial polypetide isolated from the Sargasso Sea
GRSAAEAGRLVTFGIVPTAPETGYGYIEAAEPFSGGSLREVPIARFVEKPARATAEQFLATGRFTWNSGMFLFRASAMLAELERLAPEVVSCCRAALEQDAADLDFLRLEREAFAKCPNVAIDVAVMEKTELGSVLPLDAGWSDVGSWSALWETADRDVDGNVLQGRVINKDSRNCYLRSEHRLVVGLGVENLVVVETDDAVLIADRSKAQEIKSVVKQLEADGSPEGKAHRKIYRPWGAYTGVTEG

SEQ ID NO: 132442 - protein, 143 aa, Unknown
  Bacterial polypetide isolated from the Sargasso Sea
MVAHKNDAQSIKTVVNKLKAEHRPEFEFHREVFRPWGSYDSIDSGARFQVKRITVKPGEKLSVQMHHHRAEHWIVVSGSANVTIDEETQLVTENESVYIPIGAVHALENPGKIPLELIEVQSGAYLGEDDIVRFSDRYGRVAK

SEQ ID NO: 132443 - protein, 318 aa, Unknown
  Bacterial polypetide isolated from the Sargasso Sea
AEALDPGAPVPIARFVEKPDRATAEQFLASGRFTWNSGMFLFRASAMLAELERLAPELVSCCRSALEHDTPDLQFLRLDREAFAQCPSVALDVAVMERTPLGSVLPLDAGWSDVGSWSALWETADQDENGNVLRGRVISEGSRNCYLRSEHRLVVGLGVENLVVVETDDAVLIAERSQAQNVKAIVQQLEADGSSEGKAHRRIYRPWGHYTSIVEGSRWQVKRISVKPGASLSLQMHHHRAEHWVVVRGTALVEKNGVEELIGENQSTYIPLGAQHRLSNPGKIPVEMIEIQSGAYLGEDDIVRLEDVYGRSTAVRRA

SEQ ID NO: 132444 - protein, 88 aa, Unknown
  Bacterial polypetide isolated from the Sargasso Sea
PGQKLSVQMHHHRAEHWIVVAGTALVSIDGVDTMLSENQSVYIPLGAVHALENPGKIPLELIEVQSGTYLGEDDIVRFSDRYGRVEAK

SEQ ID NO: 132445 - protein, 160 aa, Unknown
  Bacterial polypetide isolated from the Sargasso Sea
LIACVGTEDLVVVETPDAILVAKTSEVQRVKNIVARIKAENGTEAEYHRKVFRPWGYYDSIDSDRGFQVKRIVVNPGGRLSLQMHHHRAEHWIVVSGTALVTRGDESFLLSENESTYIPLGQKHRLENPGKVPLAMIEVQSGSYLGEDDIVRFDDTYGRT

SEQ ID NO: 132446 - protein, 508 aa, Unknown
  Bacterial polypetide isolated from the Sargasso Sea
MNAPAVAAETRHSSSTAPAVGTRVAVQPVILAGGSGTRLWPMSRERFPKQLIGLLGEHSLLQSTALRLDGLAADHPLNDDVLIVCGEDHRFTTAEQLRLTGKSASIMLEPIGRDTAPALTLAAFRLVAGGNDAVMTVMPADHAVADLPRFHAAVAAGVHCAMQGKIATMGIVPKHAETGFGYIRVGAPLGDAATGKLDVRRLDRFVEKPHLELAQQYVASGEYWWNSGIFIVRASVWLKAIRELEPAIYAACEQAVAQGKADGDFFRIDREAFAASPSNSIDYAVMEPLASLPQLCESVVVPLDAGWSDVGSWDAIWQISPKDEAENVGRGHVLFEGAESTFAHSESRLVACVGTQNLVVVETPDAVLVADKSRVQDVKKIVGRIKAQRGAEATDHRKVHRPWGHYDSVDMGERFQVKRIVVKPGAQLSLQMHHHRAEHWIVVCGTARITRGDETFLLSENESTYIPLGVSHRLENPGKMPLELIEVQSGAYLGEDDIVRFDDTYGRQ

SEQ ID NO: 132447 - protein, 279 aa, Unknown
  Bacterial polypetide isolated from the Sargasso Sea
MIAIILAGGTGTRLWPYSRNMTPKQFLNLGSSHESLFQETSKRLESLVPPERIYIVGGDAHKDQLLKQILQIFPDFPIDQMLLEPVGRNTAPAILWSIMRIPESNRNDSVVVLASDHLIKNLHSFTHALKLGERLASSGYIVTFGIKPDRAETGYGYIKSGEPLEVGFKVEEFVEKPDQSTADQYLESSDYTWNASIFMATTETWLQEFRKHAPELLDVFEKEASAGDLSDKEQIRKIYNSVSADSIDYALLEKSDRVAVIPVDMEWTDLGSWESLHKV

SEQ ID NO: 132448 - protein, 167 aa, Unknown
  Bacterial polypetide isolated from the Sargasso Sea
FAHSEGRLIACVGTHDLVVVETADAILVADKSRVQDVKKIVGRIRTDGGLEAANHRKVHRPWGNYDSVDTGERFQVKRIVVKPGARLSLQMHHHRAEHWIVVRGTALVTRGEERFIVSENESAYIPLGVTHRLENPGKMPLEMIEVQSGSYLGEDDIVRFDDTYGRQ

SEQ ID NO: 132449 - protein, 285 aa, Unknown
  Bacterial polypetide isolated from the Sargasso Sea
NSGMFVVRSSVWLAVIERFQPEIHAACVEAYQGAKKTDECIIPDATGFLRSPSDSIDYAVMEHVAKPDSPFSAIVVPLDAGWSDLGSWDAVWQAMEKDECGNASNGRVLFEGATATYARSQGGRLVACVGTNNMIVVDTDDAVLVADRSHVQDIKGLVSRIKREKSPEADAHRKVRRPWGFYDSIDHGDRFQVKRIVVMPGARLSLQMHHHRAEHWVVVSGTALVTRGEEQFLLGENESTYIPLGIRHRLENPGCVPLQIIEVQSGTYLGEDDIVRFDDKYGRCG

SEQ ID NO: 132450 - protein, 302 aa, Unknown
  Bacterial polypetide isolated from the Sargasso Sea
KQFLSLTSNSTMLQDTITRLTGTNAEPPVFICNDAHRFLVAEQLRKKNIEHDGILLEPVGRNTAPAIALAALHATKNENDPVLLVLAADHLIKDQSAFHSAITKAEALANEGKLVTFGIVPDQAHTGYGYIKAGNVLNVGFEVAEFVEKPELETAKQYVESGDFFWNSGMFMFKASRYIEELGKYHPEMLEICRRAIETEAPDLDFIRVDSEIFATCPDDSIDYAVMEKTDSAAMVPLDAGWSDVGSWTSLWETADKDDNGNVCVGDTILENTRNSYVNAEQRLVSVIGLEDVIVVETKDAV

SEQ ID NO: 132451 - protein, 228 aa, Unknown
  Bacterial polypetide isolated from the Sargasso Sea
MSSNPIIPIILCGGSGTRLWPLSRESFPKQYLKLSTSENNNYTLLQNTYKRISKINGIKSPILICNEEHRFIAAEQMREINIKPSKILLEPVGRNTAPAIALASLIASTIEEDPLLLVLSSDHEIKNNKKFVEVIKEGINYANNNKLVTFGVVPNNPETGYGYIKASKEFDLTKIEGNEIEEFTEKPDYKKACELIKDKRYTWNSGMFLFKAKKVLKDLEKFSPDTID

SEQ ID NO: 132452 - protein, 244 aa, Unknown
  Bacterial polypetide isolated from the Sargasso Sea
MAGGTGTRLWPLSRAQYPKQFLALDGVDTMLLATAKRLDTLGIDSSIIICNEEHRFLVAEQMRSIGELPSIILEPESKNTAPAIALAAFESRVDDPLLLVLAADHVIQDQMAFAKSVSDATPLAELGKLVTFGIIPNGPNTEYGYIKRGKEQEAGFLVEKFEEKPSIELAREYFASNEYYWNSGMFLFKASKYLEELRKFRPDIYKACELAITGSNADTDFSRIDREEFGRCPNESIDYAVMEN

SEQ ID NO: 132453 - protein, 208 aa, Unknown
  Bacterial polypetide isolated from the Sargasso Sea
MIKAVVMAGGSGTRLWPLSRAAHPKQFLSLHGEETMLQATFKRLEGLNVRSSVTICNEEHRFFVAEQLREIDKLSSIILEPEGRNTAPAIALAALSSQEDEDPLLLVLAADHVIQDQALFVKTIIEAIPLAESGKLVTFGIIAHEPNTGYGYIKKGDPQSPGFKVDKFSEKPSLDIAKGYIKSGDYLWNSGMFLFKAQPILGRAQKVS

SEQ ID NO: 132454 - protein, 253 aa, Unknown
  Bacterial polypetide isolated from the Sargasso Sea
EEDDKDPLLLVLAADHVILDEAAFTKTVLDAIPLAESGKLVTFGIVAHEPNAGYGYIKKGAQQGVGFCVAEFVEKPSAAAAKTYLTSGEYFWNSGMFLFKASRYLEELEKYRPDIHKACNLSIKNISKDHDFLRINETAFAECPSESIDYAVMEKTDKAVVVPMDAGWSDIGSWASLWDISKKDSSGNAAYGEVILQKVNNSYVRTDGKLVAAIGVDDLVIVSTNDAVVVAHKDSVHKVKVIAEQLKRESREE

SEQ ID NO: 132455 - protein, 269 aa, Unknown
  Bacterial polypetide isolated from the Sargasso Sea
MQSTTHSVASTPLIPVILCGGTGTRLWPLSRASYPKQYWPLSGEGDATLMQQTQQRLDGLDGLEAPLLICNEDHRFIVAEQMRQIGIEPSAILLEPMGRNTAPAVTVAALQATAEGQDPLLLVLAADHLIRDAKQFRHAVDAGRAAAEAGRLVTFGIVPTAPETGYGYIEAAEPFCHDQLQDVPIARFVEKPDRATAEQFLATGRFTWNSGMFLFRASAMLAELERLAPEVVSCCRAALEQDSADLDFLRLEREAFAKCPNVAIDVAVM

SEQ ID NO: 132456 - protein, 294 aa, Unknown
  Bacterial polypetide isolated from the Sargasso Sea
MISKEIIPVILCGGSGSRLWPLSRQSFPKQFLNLNFTDGKSLLQRTQNRLENIKNIKEPILICNEEHRFIVAEQMREINVKPTSIILEPFGRNTAPAIILAALKSLEFFDNPHLLILSSDHQITNESAFTRVIEKGLDYSEKDRLVIFGIVPTSPEIGYGYIKAANALDQNQIKGSLVESFIEKPDKINAKLFIQDDRFTWNSGIFLFKAKSILREVESYSPEIVKKCNSSLKKRLFDLDFQRLDEDSFRECPNLSIDIAVMEKTKNAYVFPLDAGWSDIGSWDFVWDISDKDT

SEQ ID NO: 132457 - protein, 208 aa, Unknown
  Bacterial polypetide isolated from the Sargasso Sea
MASTPLIPVILCGGTGTRLWPLSRASYPKQYWPLSGDGEATLLQQTQQRLHGLDALAAPLLICNEDHRFIVAEQMRQIGVEPNAILLEPMGRNTAPAVTVAALQATANGEDPLLLVLAADHLIRNAAQFRQAINSGRKPAEEGRLVTFGIVPTAPETGYGYIEASEPFSLGGPAHVPIKQFVEKPDQATAEQFLATGRFTWNSGMFLS

SEQ ID NO: 132458 - protein, 482 aa, Unknown
  Bacterial polypetide isolated from the Sargasso Sea
MLIPVILSGGAGTRLWPVSREGHPKPFMKLADGESLLLKTYRRAAAVVGGGEDVSCGELLTVTNRDYYFMSKDEFASASLGEQRPGVFMLEPAGRNTAPAVAMAAHHVAEKYGRDALMLVLAADHLVQDQKGFVAAVASAAELAKQGRLVTFGIVPTSPDTGFGYIEAGEPVGAGRAALRFVEKPDAAKAAEYLAAGNYLWNSGMFCFKAGVILDEMARHAPDVAAAAESCWAAVQEANKASTQMLEIPAEAFEKMPDISIDYAVMERSSNVAVVPSSFGWSDIGSWGAVRDLVEPDEDSNRAVGDAIFVDSRNMYVQTQDRVVASVGVADLMIIDTPDALLVAHPDRAQDVKQVVARLKKRNHDAYKLHRTVSRPWGTYTVLEEGPRFKIKRIEVKPGGSLSLQMHHHRSEHWIVVSGMAKVVNGDQEIFVRTNESTYIPAGHKHRLENPGVLDLVMIEVQSGEYLGEDDIVRFQDVYGRA

SEQ ID NO: 132459 - protein, 348 aa, Unknown
  Bacterial polypetide isolated from the Sargasso Sea
MIAVILAGGTGTRLWPYSRNMIPKQFLNLGSSQESLFQETSKRLKSLVAPNHIYIVGADLHKDHLRKQILQIFPDFPIDQLLLEPFGRNTAPAILWSILRIPESNRNEPVVVLASDHLIKNLNSFNHALKLGERLASSGFIVTFGIKPDRAETGYGYIKSGEPLDVGFKVEEFVEKPDHSTAEQYLESNRYTWNASIFMATTETWLEEYREHAPELLDVFEKEASLGNLSDKEQIRKIYNSVPTDSIDYALLEKSDRVAVIPVDMEWTDLGSWESLHKVSEKDREGNLIRGNVISQDTKNSLIFSEKRLVACIGVENLIIVETDDALLVCNMNKSQEVKKLVETLKRE

SEQ ID NO: 132460 - protein, 172 aa, Unknown
  Bacterial polypetide isolated from the Sargasso Sea
MNTLITPVILAGGIGSRLWPLSRQAMPKQFLPLLNNENSLLQNTLNRVSGAEFSQPILVCNEQHRFIAKEQSSAAKVFGLILEPTGKNTAPAIALAAHYAIQSGLKGPMLVMPADHHIKDFSPLTSQINDAVTLAEQGKLVTFSITPSMAHTGFGYIKQGSKISGSNCFEVA

SEQ ID NO: 132461 - protein, 320 aa, Unknown
  Bacterial polypetide isolated from the Sargasso Sea
ACRTSKQFLSLTSDSTMLQDTITRLNGTKAQSPIFICNDAHRFLVAEQLRQKDIHHGGILLEPVGRNTAPAIALAALHATINGEDPVLLVLAADHLIQNNQAFHNAIETAEKLAEEGKLVTFGIVPDQPHTGYGYIKAGCELGDGFEVAEFVEKPALETAKEYVDSGSYFWNSGMFMFKASRYLEELAKYNPEMLDVCKRAIDTETPDLDFIRVDHDIFATCPDDSIDYTVMEKTDSAAMVPLDAGWSDVGSWTSLWETAEKDENGNATVGDTILENTKNSYVNAEQRLVSVIGLEDVIVVETKTQLWVPTKMMRKALKR

SEQ ID NO: 132462 - protein, 190 aa, Unknown
  Bacterial polypetide isolated from the Sargasso Sea
MKPVVLAGGSGSRLWPKSRAALPKQFLSLTSDSTMLQDTITRLKGTPAQNPIFICNDAHRFLVAEQLRQKDIQHGGILLEPVGRNTAPAIALAALHATIKGEDPVLLVLAADHLIKDNQAFHSAIAKAEKLAEQGKLVTFGIVPDQPHTGYGYIKAGEHAGDGFEVAQFVEKPALGTAKEYVDSGSYYWN

SEQ ID NO: 132463 - protein, 247 aa, Unknown
  Bacterial polypetide isolated from the Sargasso Sea
MLFPIIMAGGTGTRLWPLSRSNYPKQFIPLCGEHSMLQETLLRLKGLVHQLPMVICNEDNRFITAEQIKQLDSEPSLKHTQILLEPVGRNTAPAIALAALTAVAKGDDPLLLVLAADHVIENVSAFHAAVATATRLAETGKLATFGIKADHPETGYGYIRRGAIVEGSVAGADESYAVAAFVEKPDAATAQSYLASGEYYWNSGMFLFKASRYLTELKLHRPDIYQACEKAVSELTADLDFIRITKT

SEQ ID NO: 132464 - protein, 218 aa, Unknown
  Bacterial polypetide isolated from the Sargasso Sea
MFTPVIMAGGSGTRLWPLSRGNFPKQFLPLTGRHTMLQQTLLRLSGLQHSTPLLICNEDHRFIAAEQIRQLGNGKADILLEPAGRNTAPAIALAALRAKQQGHAEAVLLVLAADHVINNTPAFQQAVEQALPLAQGGQLVTFGIVPSSAETGYGYIKRGEKSGNAYRVDSFIEKPDLSTAEFYLQSGEYYWNSGMFMFRADIYLQQLQKFRPEYLCRL

SEQ ID NO: 132465 - protein, 504 aa, Unknown
  Bacterial polypetide isolated from the Sargasso Sea
MPVILAGGSGTRLWPLSREQFPKQLIELTSNESPLSATARRLNGIANAVLGDKLLLVCGEQHRIMSAAQVVDRAAPARILLEPAARNTAPALTLAALDASVFEDDPVLAVMPADHVIADVGAFQDAIARAARYAQEGAIVTLGVLPRRAETGYGYIRVGEPRTSRHGGQGGYSIGRFVEKPDAALAERYLQSGDYWWNSGIFVTRASVWLKAIHALAPEIHAACESAWRAGVADDPFFRIDAAAFDACPSDSIDYAVMERLADSSELGIEGIVVPLSAGWSDVGTWDAIWEIMPKDDQGNVARGPTVFEDTQDSLVRSEGRLVACVGMKDVVVIETPDAVLVANRHDVQRVKNIVARLKSDRRPQASEHRKVQRPWGHYDSIDLGERFQVKRIVVEPGKRLSLQMHYHRAEHWIVVHGTAKVTRGNETFLLSENESTYIAVGEVHRLENPGRIPLEIIEVQSGNYLGEDDIVRFDDQYGRPVVDALPETHAAPHVQVAEGDVVR

SEQ ID NO: 132466 - protein, 466 aa, Unknown
  Bacterial polypetide isolated from the Sargasso Sea
MKPVILAGGTGSRLWPKSRAALPKQFLSLTSDKTMIQDTVLRLNGIESLPPSIICNEEHRFLVAEQMRQISVDNSNILLEPVGRNTAPAIALAAFQACENGDDPVLLVLAADHLIKDSDTFRTKIKEAQALAEQGKLVTFGIVPTQPHTGYGYIKAGNKLNIGFDVSEFVEKPDMPTATQYVSSGEYFWNSGMFMFKASAFLKALEVHAPDIYSVCKKAIEKTEKDLDFVRVDKDIFASCPSDSIDYAVMEKTSEAAMVTLDAGWSDVGSWSSLWETGEKDANGNVTTGDTLLEGTTNSYVNAEHSLVAVIGLEDVVVVETKDAVMVANKKNAEHIKTVVNRLKAEKRPEFEFHREVYRPWGSYDSIDNGGRFKVKRITVKPGEKLSVQMHHHRAEHWVVVSGTANVTIGDETQMLTENESVYIPIGAVHALENPGKIPLELIEVQSGAYLGEDDIVRFSDRYGAF

SEQ ID NO: 132467 - protein, 236 aa, Unknown
  Bacterial polypetide isolated from the Sargasso Sea
MILPVIMAGGSGSRLWPLSRDLMPKQFLTLDGELTMLQATVMRLQGLNADAALVICNEDHRFVAAEQLRQIKQLNNNIILEPAGRNTAPAIALAAFTAIKKGQDPLLLVLAADHVIADVDVFQQAVVAAAEFANADQLVTFGIVPTAAETGYGYIKRGACKKLNDAEAYQVAQFVEKPSLEKALEYLSSGDYYWNSGMFLFKASRYLAELKQHRPDIYTACEQAMLEVDPDLDFIR

SEQ ID NO: 132468 - protein, 498 aa, Unknown
  Bacterial polypetide isolated from the Sargasso Sea
MNSSESSLQNSALSTHGSVPLQAVILAGGSGTRLWPLSREHFPKQLIGLLGEESLLQSTARRLDALQASRPVAEEVLVVCGEDHRFTTAEQLRSVGRSGRIILEPVGRNTAPALTTAALALLEGGKDVIMVVMPADHAIVDVVAFSEAVATAADYAAAGQVVTMGIVPSRPDTGYGYIKVGETLGEHGGHRLERFVEKPGKDLAESYVKSGEYWWNSGIFILRASVWLKLIEHFRPLIAEASRRAFVASKADHDFLRVGKAEFVACPSESIDFAVMEHLGDAASPAQGVVVPLRAGWSDVGSWDAIWDLLPKDGAGNVARGRAMFDGAVNTFAHSEGRLIACVGTEDLVVVETPDAILVAKTSEVQRVKNIVARIKAENGTEAEYHRKVFRPWGYYDSIDSDRGFQVKRIVVNPGGRLSLQMHHHRAEHWIVVSGTALVTRGDESFLLSENESTYIPLGQKHRLENPGKVPLAMIEVQSGSYLGEDDIVRFDDTYGRT

SEQ ID NO: 132469 - protein, 442 aa, Unknown
  Bacterial polypetide isolated from the Sargasso Sea
MTLHGSHTMLQNTISRLSGVEHDEPILICNEDHRFIVAEQLNSQKIAHDGIILEPAGRNTAPAIALAAFKCLLNGEDPLLLVLAADHVIENEEAFHASISSACELANNGKLVTFGIIPTFAETGYGYIKRGQPVVFGEGFSVDKFVEKPDRATAELYVSSGDYYWNSGMFLFKASNFLNELKRYRLDIYEACERAMTAASIDLDFIRVDKASFLECPEDSIDYAVMEKTDCSVVVPLDAGWSDVGSWASLWDISKKDESGNSHVGDVLSINSSNSFVFAETGLVATLGLNDTIVVQTKDAVLVASRDHVQDVKAIVQQLSAAGRTEHKVHREVYRPWGKYDSIDNGSRYQVKRITVKPGEKLSIQMHHHRAEHWIVVSGTANVTVDGKDTLLSENQSVYIPLGAIHALENPGKIPLELIEVQSGSYLGEDDIVRFSDRYGRA

SEQ ID NO: 132470 - protein, 474 aa, Unknown
  Bacterial polypetide isolated from the Sargasso Sea
MILPVIMAGGSGSRLWPLSRDLMPKQFLKLDGALTMLQATVMRLQGLNAEAALVICNEDHRFVAAEQLRQIKQLNHNIILEPAGRNTAPAIALAALTAIKKGQDPLLLVLAADHVIADVDAFQQAVVAATEFANADQLVTFGIVPTAAETGYGYIKRGQRKELNSGVAYQVAQFVEKPKLETALDYLSSGDYYWNSGMFLFKASRYLAELKQHRPDIYTACEQAMAEVDPDLDFIRVNQQAFLACPSESIDYAVMEKTAAAVVVPLDANWSDVGSWSSLWDISEKNTLGNVHKGDVLSCDSKDNYVFAETGLVATVGLQNIVVVQTKDAVLVAAKDRVQDVKSIVQQLKDLGRSEHKIHREVYRPWGKYDSIDQGQRYQVKHITVHPGQKLSVQMHHHRAEHWIVVAGTALVSIDGVDTLLSENQSVYIPLGAVHALENPGKIPLELIEVQSGTYLGEDDIVRFSDRYGRVDAK

SEQ ID NO: 132471 - protein, 94 aa, Unknown
  Bacterial polypetide isolated from the Sargasso Sea
MSERKGIILAGGLGSRLYPLTIESSKQLLPIYDKPMIYYPLSILMLAGIKEIAVVVTPKHRSQYENLLGDGEQWGISLKSLNKTNLKGLHRHIL

SEQ ID NO: 132472 - protein, 114 aa, Unknown
  Bacterial polypetide isolated from the Sargasso Sea
MKGIILSGGSGSRLYPLTLATSKQLLSVYDKPMIYYPLCTLMSANIKDILLITTKEDKKNFQKLLGNGSQWGISIRYKIQDKPNGIAEAFIIGKDFIGEDHVALILGDNIFNGI

SEQ ID NO: 132473 - protein, 82 aa, Unknown
  Bacterial polypetide isolated from the Sargasso Sea
MKGIILAGGSGTRLYPITKIATKQLLPIYDKPMIYYPLSTLMLSGIRKILIISTPEDISKYEYLLGNGSTIGLELSYKIQPS

SEQ ID NO: 132474 - protein, 292 aa, Unknown
  Bacterial polypetide isolated from the Sargasso Sea
MHSLTAPAKKSERKGIILAGGSGTRLYPLTKVVSKQLMPVYDKPMIFYPVSTLMMAGITEILIISTPAELPRFKELLGDGSAWGITFEYKEQPNPDGLAQAFLLAEDFLQGQCAALVLGDNLFYGHDLSISLQNATSCEQGATVFGYHVANPKSYGVVEFDQNGKAISIEEKPVKPKSNYAVPGLYFFDSRVVEFAKNVKPSERGELEITDVIEQYLAKKELSVEIMGRGTAWLDTGTLDDLLDAANFIRAIEKRQGLKINCPEEIAYRMGYINAEQLKKLAKPLKKSGYGK

SEQ ID NO: 132475 - protein, 43 aa, Unknown
  Bacterial polypetide isolated from the Sargasso Sea
MKGIILAGGFGTRLYPLTKSVSKQLLPINDKPMIFYPLSILML

SEQ ID NO: 132476 - protein, 150 aa, Unknown
  Bacterial polypetide isolated from the Sargasso Sea
MLERKGIILAGGTGSRLNPITLGVSKQLLPVYDKPMIYYPLSTLMLAGIKEILIITNEHDQPNFERLLGDGKQLGISIEYSVQEKPEGLAQAFMIGESFIQKSPVVLILGDNLFHGQDLIAKLKNCNTSDCGAKLFAYPVRDPQNYGVAE

SEQ ID NO: 132477 - protein, 205 aa, Unknown
  Bacterial polypetide isolated from the Sargasso Sea
MTKGIILAGGSGTRLYPLTKVVSKQLMPVYDKPMVYYPIATLMNAGIKDILVITTPVELDRFKELLGDGKDWGINIEYKTQPSPDGLAQAFLLGEEFIGSSNVALILGDNLFYGHDLVKSLQIAASRKSGATVFGYHVANPCSYGVVEFDESGKAISIEEKPESPKSNYAVPGLYFFDNKVVGYAKNVEASPRGELEITDVIEQY

SEQ ID NO: 132478 - protein, 197 aa, Unknown
  Bacterial polypetide isolated from the Sargasso Sea
MKGIILAGGSGSRLYPATKVASKQLLPIYDKPMIYYPLSTLMLAGIQDILIISTPEDTSKYESLLGNGEQFGIKLSYKIQPSPDGIAQAFFIGENFIENDNVCLILGDNVFFGGNLRKKLQKTVSEVEINNNAVVFGYFVHDPERYGVIEFDKRGKAISIEEKPLKPKSNYAVSGLYFYPNDVISIAKKQNPSKRGE

SEQ ID NO: 132479 - protein, 193 aa, Unknown
  Bacterial polypetide isolated from the Sargasso Sea
MGKDNVCLVLGDNIFYGQHFSEKLEKAASREEGATIFGCFTPEPQRFGVVEFNKEGRALNIEEKPIDPKSDYAVTGLYFYDNEVIEKAKIIKPSARGELEITDLNNLYLEESSLQVEILGRGFAWLDTGTFDSLLEASQLVQTIQKNQGLMIACLEEIALKKQWIGIEEVKKQAEKLNNSAYGRYLSALIKNL

SEQ ID NO: 132480 - protein, 121 aa, Unknown
  Bacterial polypetide isolated from the Sargasso Sea
MKGIILAGGSGTRLYPVTRGISKQLAPVYDKPMIYYPLSILMLAGIKDIAIITTPHDQDAFKRLLGDGSKWGLNFEYIEQASPDGLAQAFILAEDFIKGDTVCLILGDNIFYGHDLSKLLS

SEQ ID NO: 132481 - protein, 83 aa, Unknown
  Bacterial polypetide isolated from the Sargasso Sea
MKGIILAGGSGSRLFPITKVISKQLLPIYDKPMIYYPLSTLMRAQIKDILIISTPHDLPNFKSLFGDGSHIGLNIQYKIQPSP

SEQ ID NO: 132482 - protein, 243 aa, Unknown
  Bacterial polypetide isolated from the Sargasso Sea
MIISTPEDLPKYRSLLSNGKLIGMNFSYKEQVYPDGLAHAFILGEEFIGNENVCLILGDNIFYGSNLPQTLRSAVKRVHDSNIATVFGYYVNDPERYGVVEFDDDDNAISLEEKPSNPKSNYAVSGLYFYPNDAVDIAKNQKPSGRKELEITDTNRVYLSQKRLKVEKLGRGCAWLDTGTHDSLLEASQFVQILEKRQGVKISCIEEIAFRMGYIDRDALLGIGKKMKNNPYGHYLITVAEEN

SEQ ID NO: 132483 - protein, 235 aa, Unknown
  Bacterial polypetide isolated from the Sargasso Sea
MRKGLILAGGLGTRLYPSTIGISKHLFPIYDKPMIYYPLTSLMLAGIREIAVIGDNYNLKRYNKLLGDGSSFGVSLTYLIQKKPRGISEALTIGKNFLNGNPSVLILGDNIFYGSGFVKILENAYKDSEFCSIFLHKVKDPSNFGIAEVDSNNNIMNMSEKPSNSSSNLAITGLYFFCKDAPKFCESLTKSSRNEFEIIELLKIYHNKNLLKYKLLGRGFFWFDAGISSSLLKAK

SEQ ID NO: 132484 - protein, 242 aa, Unknown
  Bacterial polypetide isolated from the Sargasso Sea
MKGIILAGGKGTRLHPITSVCSKQLLPVFDKPMIYYPLSCLMLAGIREIVIISTPEDLSSFRSLLGNGNSLGLDLSYIAQPSPDGLAQAFVLAEDFIGDESVCMILGDNIFHGHGLSELLATAVGIVQSDEKAVIFGHYVNDPERYGVVEFNEKQEVVSLEEKPLVPKSNHAIVGLYFYPSDVVHFAKSVEPSSRGELEITDLNRFYLENGRLNVLTFGRGFGWFDAGTHESLLEASPVCAL

SEQ ID NO: 132485 - protein, 223 aa, Unknown
  Bacterial polypetide isolated from the Sargasso Sea
MTRKGIILAGGKGTRLYPLTVSVTKCILPIYDKPMIYYSLSTLMLAGINDILVISTPEDEVNFSNLMGDGSNYGISISYEVQPKPEGIAQALIIAEKYLNNSPSALILADNIFYGDGLENKLARSCMMDHNTVFSYLVDDPERFGICEVDENNMVTSLVEKPESPKSNLAVTGLYFYDSNAPYIARNIQPSDRGELEITDVNIEYMKSKKLYSEILDDKFSWI

SEQ ID NO: 132486 - protein, 84 aa, Unknown
  Bacterial polypetide isolated from the Sargasso Sea
MRKGIILAGGSGTRLHPLTKVVSKQLMPVYDKPMIYYPLATLMMSGIRDILIITTPEEQSRFIELIGDGSELGINVQYAVQPSP

SEQ ID NO: 132487 - protein, 181 aa, Unknown
  Bacterial polypetide isolated from the Sargasso Sea
MKGIILAGGKGSRLYPLTKVSSKQLQAVYDKPMIYYPLTTLIAAGIREICLITTRQDELMFKNLLNNGSQFGVKLSYIVQDQPLGIAQAIILSEEFLSGENYVLILGDNIFSGGSDIPDAINNFKNGAMVFAYHVPDPERYAVLEFGKDLKIESLEEKPNNPKSNYAVPGIYLYDNKSIKI

SEQ ID NO: 132488 - protein, 151 aa, Unknown
  Bacterial polypetide isolated from the Sargasso Sea
MKGIILAGGTGSRLYPITLAVSKHLMPIYDKPMIFYPLSVLMLSGIRDILIISTPEDHQSYINLLGDGSNFGINLSFIIQPSADGLAQAFILGEEFIGDDSVCLALGDNIFYGMGFQPKLRKVSARKVGATVFGYQVKNPKHFGVISFDNN

SEQ ID NO: 132489 - protein, 296 aa, Unknown
  Bacterial polypetide isolated from the Sargasso Sea
MTKGIILAGGTGSRLYPMTVSVSKQLLPVYDKPLIYYPLSTLMQAGIRQILIITTPEDANAFKALLGNGENWGLEIDYATQPRPEGLAQAFIIGEDFIGSSRVCLILGDNIFYGTGIEETLKKAANEESGASIFAYYVNDPERYGVVVLNDKNEPVDLEEKPLKPKSHFAVTGIYMYDSNVIEIAKSIEPSARGELEITDINKVYLQRETLSVEFFNRGTAWLDTGTTHSLLDAANFIRVLEERQGLKIGCPEEIAYQQKFIMEDQLKEFAQGIKTSGYGTISFKHSEKLIRAKVL

SEQ ID NO: 132490 - protein, 116 aa, Unknown
  Bacterial polypetide isolated from the Sargasso Sea
MLYLIIEHRRTNINMTKGIVLAGGSGSRLHPITLGTSKQLLPIYDKPMIYYPLSVLMLSGINEILIICAPEDLDSYKRLLGNGSDIGISIEYKTQLSPDGLAQAFLLGEEFIEDKN

SEQ ID NO: 132491 - protein, 151 aa, Unknown
  Bacterial polypetide isolated from the Sargasso Sea
MKGIILAGGSGTRLYPLTIGQSKQLLAIHDKPMIYYPLSVLMLAGIKDVLIISTPQDLPNFKRLLSDGSQLGMNFSYEKQNQPNGIAEAFIIGEKFIGNDSVCLILGDNMFYGSGFTKILKKSVYDVEKNKKAKVFGYYVNNPSRYGVVET

SEQ ID NO: 132492 - protein, 259 aa, Unknown
  Bacterial polypetide isolated from the Sargasso Sea
VSITSVISKQLLPVYDKPMIYYPLSTLMLSGIQDILIISTPEDTPRFNDLFGDGSQIGLNISYMVQPSPDGLAQAFILGEDFIGDDSVSLILGDNIFFGHGLSNMLLNSVQTVESKNDAVVFGYSVKDPQRYGVVSFDDNGKVTEIVEKPDSPKSNYAVVGLYYYPNDVVNIAKNVKPSQRGELEITSVNQTFLDLNRLSVELMGRGYAWLDTGTQQAMNNASNFIKTIEERQGLKVACIEEIAYYQGFITRDELNKLA

SEQ ID NO: 132493 - protein, 218 aa, Unknown
  Bacterial polypetide isolated from the Sargasso Sea
TYKIQPNPDGLAQAFILGEKFISKDDVCLILGDNVFYGSRLPAKLKKAVKDVKEKKIAKIFGYYVNDPERYGVVSFDNNGKAISLEEKPKKPKSNYAVSGLYFYPNGVIDIAKSQKPSKRGELEITDTNLIFLKNKKLVVEKMGRGYAWLDTGTHDSMLEASLFVQTIEKRQGMKISCIEEIAFRMGYISKKQLLSIGNKMSNNQYSDYIKKIANESL

SEQ ID NO: 132494 - protein, 277 aa, Unknown
  Bacterial polypetide isolated from the Sargasso Sea
GGSGTRLYPITKGVSKQLLCIYDKPMIYYPISVLMLSGIKEILIISTPNDLPNFKNLLGDGKELGLRFEYIEQKSPDGLAQAFIIGEKFIKNDDVCLVLGDNIFYGSGLSKILQSTVKRTLEKKRATIFGYYVTDPTNFGIVNFDNRKNIINIEEKPRHPKSNYAVVGLYYYPNSVIKIAKNVKPSKRGELEITSINNKYLDLKKLDVKLLGRGFTWLDTGTHNSLLEASNFINTIEKHSGLKVACLEEISFKMGYITKKQLKKLIVPLKKTGYVNI

SEQ ID NO: 132495 - protein, 227 aa, Unknown
  Bacterial polypetide isolated from the Sargasso Sea
MKGIILSGGVGSRLHPMTKVITKQLLPIYDKPMIYYPMSVLMMCHIKEILLITTREDQPHFQKLLGDGSEIGLKFSYIIQDAPNGIAQAYTLAEEFLKGDDSMLVLGDNLFYGRFSGFREAIKRQKARENGIHAQVFAYAVNDPERYGVVEFDKSTGKVQSIEEKPANPKSNYAIPGVYLLDGSAPERVKNLKPSARGELEITDLIQTYLDADSLGVEVINRGDCVA

SEQ ID NO: 132496 - protein, 300 aa, Unknown
  Bacterial polypetide isolated from the Sargasso Sea
MRGIVLAGGSNTRLFPLTLSISKHLLPIYDKPMIYYPLSVLMLSGIRDILVITNPEQHSQYSSLLGNGEEFGINITYAAQEKPEGIAQAFLVAEDFINNDPVSLILGDNIFFGQSFGQMLKEPFLIKEGAYIFGYPVSDPSRFGVIELDNNGNVVSLEEKPDEPKTNFAATGLYFYDNKVVDIAKELKPSARGELEITDLNLEYLKLNQLKVQILGRGFAWLDTGTHEALIEAGSFVKTLEERQGIKISCLEEIAYRKGWIDEEALLRSAKRMPNSPYSQYLESIIDNQTMFPWEKSKDK

SEQ ID NO: 132497 - protein, 269 aa, Unknown
  Bacterial polypetide isolated from the Sargasso Sea
STLMLAGIREVLIITTAHDQEAFQRLLGDGSRWGMTIQYAVQPSPDGLAQAFLIGADFLDGAPASLVLGDNLFHGHDLVPQLVSSDGRAEGATVFAYPVSDPERYGVAEFDADGRVLSIEEKPKLPKSRYALTGLYFYDATVVERARQVKPSARGELEITDLNQMYLDDGKLKVELMGRGMAWLDTGTCDSLNDAGGYIRTLEHRQGLKVGCPEEVAWRQGWISGEQLDSLAHPLKKSGYGTYLLQLLEESISDHAALQSSLEVPAYAG

SEQ ID NO: 132498 - protein, 219 aa, Unknown
  Bacterial polypetide isolated from the Sargasso Sea
EFGISLKYAAQAAPDGLAQAFIIGEEFIGNDNVCLALGDNIFWGQGFSPILKKAAARSTGASVFGYQVKDPERFGVVEFDHNQKAISIEEKPLNPKSNFAVTGLYFYDNQVVNIAKNVKPSVRGELEITSINQAYLDMGELNVEQLGRGFAWLDTGTYESLLEAASFVETIEKRQGYKIACLEEIAWRNKWLTDEQLIAAANQMAKNSYGQYLFDLLGK

SEQ ID NO: 132499 - protein, 102 aa, Unknown
  Bacterial polypetide isolated from the Sargasso Sea
MKGIVLAGGLGTRLYPLTKSVSKQLLPIFDKPMIYYPISTLMLAGIKEILIISTKYDIENYEMLLGDGSDFGCNFKFEVQEEPKGLAEAFIIGEEFIGNDNV

SEQ ID NO: 132500 - protein, 197 aa, Unknown
  Bacterial polypetide isolated from the Sargasso Sea
MRKGIILAGGSGTRLHPLTKVVSKQLMPVYDKPMIFYPLTTLMMSGIRDVLIITTPEEQQRFIDLIGDGSALGMNIQYAVQPSPDGLAQAFLIGEDFIGNDSCSLVLGDNIYYGHDLKLSLQNAYKQEHGATVFGYHVNDPERYGVVDFDDDWNALSIEEKPTVPKSNYAVTGLYYYDNRVVDFAKEVKPSHRGELE

SEQ ID NO: 132501 - protein, 233 aa, Unknown
  Bacterial polypetide isolated from the Sargasso Sea
MANSCKKIYNRNALREHKMKRKGIILAGGSGTRLYPATQVISKQLLPVFDKPMIYYPLSTLMLTDIRQILIISTPQDIPRFETLLGDGSQWGLDLHYAVQNSPDGLAQALLIGESFLNNSPSVLVLGDNIFYGHNLPDLLNSANERKEGATIFAYHVIDPERYGVVEFDPQNRAVNLEEKPKSPKSNYAVTGLYFYDKNAVEYAKQIKPSSRGELEITDLNREYLNMNTFLSK

SEQ ID NO: 132502 - protein, 113 aa, Unknown
  Bacterial polypetide isolated from the Sargasso Sea
MKGIILAGGSGTRLFPSTLAISKQLLPVYDKPMIYYPLSMLMLAGIRDVLIISTPEDLPKYKSLLSSGKSIGMNFLYKEQVSPDGLAQAFILGEEFIGNENVCLVLGDNIFYG

SEQ ID NO: 132503 - protein, 91 aa, Unknown
  Bacterial polypetide isolated from the Sargasso Sea
MKGIILAGGSGTRLYPITIGLSKQLLPIYDKPMVYYPLSTLMLAGIRDILIISTPEDLPKFKDLLGNGSSVGLQLSYKVQPSPDGLAQAFI

SEQ ID NO: 132504 - protein, 210 aa, Unknown
  Bacterial polypetide isolated from the Sargasso Sea
MKGIILAGGSGTRLYPLTKVISKQLLPVYDKPMIYYPLSTLMLSGINELLIISTPTDLPLYERLLGHGNELGLKISYKVQPRPDGLAQAFILGEDFIGEDDVALVLGDNIFYGTGFSGLLQSSVELVEKEKKAVVFGYEVKDPERYGVVEFNNNMEVVSLEEKPANPKSSYAVVGLYFYPNEVIRLAKNVKPSDRGELEITSVNNAFLEE

SEQ ID NO: 132505 - protein, 249 aa, Unknown
  Bacterial polypetide isolated from the Sargasso Sea
LIPIYDKPMIYYPLSMLMLAGIREVLIISTEEDTPKYESLLSNGKSIGMKFSYKIQPSPDGLAQAFILGEDFIGSDNVCLILGDNIFYGDSIPEKLREAVNDVYNSNNATVFGYYVNDPERYGVVEFDNNGSAVSLEEKPTVPKSNYAVSGLYFYPNDVIEIAKNQKPSDRGELEITDTNKSYLDQGRLKVEKLGRGYAWLDTGTHDSLLEASQFVQILEKRQGVKISCIEEIAYRMGYINKENLLALS

SEQ ID NO: 132506 - protein, 167 aa, Unknown
  Bacterial polypetide isolated from the Sargasso Sea
MTKRKGIILAGGSGTRLYPLTIGLTKQLLPVYDKPLIYYPLTVLMLAGIREVLIITTPDDLSQYQRALGDGNQWGINLSYIEQPSPDGLAQAFILAEDFLDGAPSALILGDNIFFGHGLPEVLSAADAKQTGATVFGYHVNDPERYGVVGFDNYGRNVSCCTGFGLL

SEQ ID NO: 132507 - protein, 291 aa, Unknown
  Bacterial polypetide isolated from the Sargasso Sea
MKGIILAGGSGTRLYPVTEVSSKQLLPIYDKPMVYYPLSTLMLAGIKDILIISTPEDTPKYESLLGNGDQLGIKLKFQVQLSPDGLAQAFIIGENFIENENVCLILGDNVFYGGNLRIKLQNTVSDVKSNNNAVVFGYFVNDPERYGVVEFDNKGNAISIEEKPDNPKSNYAVSGLYFYPNDVISIVKKQKPSPRGELEITDVNKSYLNQDRLKVEQMGRGYAWLDTGTHDSLLEASQFVQTLEKRQGMKISCIEEIAFRMGYIDKNQLKSIGNKIKNNQYGKYLLKVADS

SEQ ID NO: 132508 - protein, 264 aa, Unknown
  Bacterial polypetide isolated from the Sargasso Sea
MKPRKGIILAGGSGTRLYPLTMAISKQLMPIYDKPMIYYPLSVLMLTGIREIAIITTPDDQDQFKRLLGDGSQWGLSLTFITQPSPDGLAQAYILAEDFLDGAPSAMTLGDNIFFGHGLPELLAAADAKTSGGTVFGYHVADPERYGVVAFDREGNASQIIEKPEVPPSHYAVTGLYFLDGEAPERARAVKPSARGELEIVTLLESYLHEGKLAVERMGRGYAWLDTGTHSSLLDAGNFVRTLSVRQGMQSGCPEEIAYRNGWI

SEQ ID NO: 132509 - protein, 286 aa, Unknown
  Bacterial polypetide isolated from the Sargasso Sea
MKRKGIILAGGSGTRLYPITQVVSKQLLPVFDKPMIYYPLSTLMLGNIREILIISTPEDLPKFKDLLQDGSKWGLKIEYAVQPSPDGLAQALIIAEDFLNGAPSVLILGDNIFYGNLLHEKLASADSRNKGATIFAYHVNDPERYGVAEFSNGKVVSLEEKPSSPKSNYAVTGLYFYDQKASEYAKNIMPSDRGELEITELNKVYLEKEQMSVELMGRGYAWLDTGTHESLVEANQFVQTIEHRQGLKIACPEEIAFRKKWIGEEQVKEIALPMIKKSYGQYLMQI

SEQ ID NO: 132510 - protein, 43 aa, Unknown
  Bacterial polypetide isolated from the Sargasso Sea
MKGIILAGGSGTRLYPITKGVSKQLLPVYDKPMIYYPISVLML

SEQ ID NO: 132511 - protein, 82 aa, Unknown
  Bacterial polypetide isolated from the Sargasso Sea
MKGIILAGGSGTRLYPLTKVISKQLLPVYDKPMIYYPLSTLMLSGINEVLIISTPTDLPLYERLLGNGNELGLKISYKVQPS

SEQ ID NO: 132512 - protein, 178 aa, Unknown
  Bacterial polypetide isolated from the Sargasso Sea
MKGIILAGGSGTRLYPSTKAISKQLIPIYDKPMIYYPLSMLMLAGIREVLIISTEEDTPKYKSLLKSGRSIGMRLSYKIQPSPDGLAQAFILGEDFIGNDNVCLILGDNIFYGDSIPKKLREAVTDVDTSNNATVFGYYVNDPERYGVVEFDNNGNAVSLEEKPTAPKSNYAVSGLYF

SEQ ID NO: 132513 - protein, 104 aa, Unknown
  Bacterial polypetide isolated from the Sargasso Sea
MKGIILAGGSGTRLYPITSVISKQLLPIYDKPMIYYPLSTLMLSGIQDILIISTPEDTPRFNDLFGDGRQIGLNISYMVQPSPDGLAQAFILGEDFIGDDSVSL

SEQ ID NO: 132514 - protein, 82 aa, Unknown
  Bacterial polypetide isolated from the Sargasso Sea
MKGIILAGGSGTRLHPITLGVSKQLLPIYDKPMAYYPISVLMLAGIRDILLISTPQDLPQYKNLLGDGSQFGVNFSYAEQPS

SEQ ID NO: 132515 - protein, 268 aa, Unknown
  Bacterial polypetide isolated from the Sargasso Sea
MSVSRKGIILAGGSGTRLHPITRAVSKQLLPVYDKPMVYYPLTTLMLAGIREVLVITTPHDQPSFERLLGDGSAWGMEIHYAVQPSPDGLAQAFLIGADFLAGAPAALVLGDNLFHGHDLVLQLQASNQQQQGATVFAYPVSDPERYGVVEFADDGRVLSIEEKPKQPKSRYAVTGLYFYDDTVVERARQVKPSPRGELEITDLNASYLNDGQLQVELMGRGMAWLDTGTYDSLQEAGAYIRTLEHRQGLKVALPRGVALALGWISSD

SEQ ID NO: 132516 - protein, 274 aa, Unknown
  Bacterial polypetide isolated from the Sargasso Sea
MGANYKGIILAGGSGTRLYPITLGTSKQLLPIYDKPMIFYPLSVLMLAGIRDILIISTPDDINSYKNLLGNGERYGVNFNYEIQEKPEGLAQAFLIGEEFIGNSKVSLILGDNIFYGPNFREKLLKATSLDSGATVFGYKVSNPKDFGVIDFNSQGQALSIEEKPIMPKSDFAVTGLYFYDNSVVDYAKTISPSERGELEISDINNLYLSKSMLNVEMLGRGFAWLDTGTHSSLLEASSFVQTIEKRQRLKIACLEEIAYKNKWISSSELSASA

SEQ ID NO: 132517 - protein, 85 aa, Unknown
  Bacterial polypetide isolated from the Sargasso Sea
MRKLKGIILAGGTGSRLYPLTYGTSKQLLPVYDKPMIYYPLSTLLYAGIKDILIISTPKDLPRYRDLLKNGSHLGIRIQYAEQPS

SEQ ID NO: 132518 - protein, 173 aa, Unknown
  Bacterial polypetide isolated from the Sargasso Sea
MKGIILAGGSGTRLYPITSVVSKQLLPIYDKPMIYYPLSTLMLSGIQDILIISTPYDTPRFNELFNDGSHLGLNISYMVQPSPDGLAQAFLLGENFIGDDPVSLILGDNIFFGHGLSGMLQNSVKTVQSKNDAVIFGYSVKDPQRYGVVSFDDSGKVTDIVEKPSPPKSNYAV

SEQ ID NO: 132519 - protein, 291 aa, Unknown
  Bacterial polypetide isolated from the Sargasso Sea
MKGILLAGGSGTRLYPLTLGVSKQLMPVYDKPMIYYPLSVLMLAGIRDILIITTPVQQKNFKNLLHDGSQFGIKLSYVVQEKPEGIAQAFILGDSFLQNKPVALVLGDNLFFGNDLINLISQARKRLELTGGGEIFSYRVRAPERYGVVEQDEDGTVISIEEKPKKPKSSNAVVGLYFYDSKVVQYTKQLKPSQRGELEITDLNQLYLDKGMLRVSNMGRGYAWLDTGTHQDLHDAGSFVRSIQERQGLQIACPEEIAFEAGWIDQKLLLKQAENFRGNLYGEYLFGLVSQ

SEQ ID NO: 132520 - protein, 293 aa, Unknown
  Bacterial polypetide isolated from the Sargasso Sea
MRKGIILAGGSGTRLHPLTKVVSKQLMPVYDKPMIFYPLTTLMMSGIRDVLIITTPEEQQRFIDLIGDGSALGMNIQYAVQPSPDGLAQAFLIGEQFIGNDSCSLVLGDNIYYGHDLKLSLQNAYKQEHGATVFGYHVNDPERYGVVEFDDDWNALSIEEKPAVPKSNYAVTGLYYYDNRVVDFAKEVKPSPRGELEITDLNNLYLQDGSLKVELMGRGSAWLDTGTLDSLLDAANFVAAIEKRQGLKVCCPEEVAYRMGYINAEQLEKLAAPLKKSGYGDYLLKVINDRVKI

SEQ ID NO: 132521 - protein, 292 aa, Unknown
  Bacterial polypetide isolated from the Sargasso Sea
MKGIILAGGSGTRLYPSTKAISKQLIPIYDKPMIYYPLSMLMLAGIREVLIISTKEDISKYESLLSNGKSIGMKFSYKIQPSPDGLAQAFILGEDFIGNDNVCLILGDNIFYGDSIPKKLREAVTNVDTSNNATVFGYYVNDPERYGVVEFDKNGNAVSLEEKPTAPKSNYAVSGLYFYPNDVIEIAKKQKPSDRGELEITDTNKSYLTQGRLKVEKLGRGYAWLDTGTHDSLLEASQFVQILEKRQGVKISCIEEIAYRMGFIDKDGLVKLAEKMKNNSYGDYLIRLAESL

SEQ ID NO: 132522 - protein, 359 aa, Unknown
  Bacterial polypetide isolated from the Sargasso Sea
MRSTLASSSASSAGSRPRRSKRVLPRQFNGIWTIRRGLTKSLRASIGSGLRPTTRSARKGTAMARKGIILAGGSGTRLYPITHVVSKQLLPVYDKPMIYYPLSTLMVAGIRDVLIISTPQDTPRFEAMLGDGSQWGMNIQYAVQPSPDGLAQAFIIGRDFVGNDPSALILGDNIFYGHDLAKQLERANDKDEGATVFAYHVHDPERYGVVEFDKQFRALSIEEKPAKPRSNYAVTGLYFYDKQVCDIAADIKPSPRGELEITDVNSRYLASAALNVEIMGRGYAWLDTGTHDSLIEAATFIATLQKRQGLVVACPEEIAYRQAWIDGEQLLALAKPLAKNAYGKYLQNILTDQVAWPSK

SEQ ID NO: 132523 - protein, 297 aa, Unknown
  Bacterial polypetide isolated from the Sargasso Sea
MTRKGIILAGGSGTRLYPITHAVSKQLLPVYDKPMIYYPLSTLMIAGIRDVLIISTPQDTPRFASMLGDGSQWGMHIEYATQPSPDGLAQAFVIGRDFVGNDPSALILGDNIFYGHDLAKQLERANERDAGATVFAYHVHDPERYGVVEFDRNFRALSIEEKPAKPRSQYAVTGLYFYDNRVCDIAADIRPSARGELEITDVNSRYLADGTLNVEIMGRGYAWLDTGTHDSLIEAATFIATLQKRQGLVVACPEEIAYRRNWIDAEQVLKLAQPLAKNAYGQYLRNLLTHQVAWQST

SEQ ID NO: 132524 - protein, 204 aa, Unknown
  Bacterial polypetide isolated from the Sargasso Sea
MKGIILAGGSGTRLYPSTIAISKQLIPIYDKPMIYYPLSMLMLAGIREVLIISTKEDISKYESLLSNGKSIGMKFSYKIQPSPDGLAQAFILGEDFIGNDNVCLILGDNIFYGDSIPKKLREAVTDVDTSNNATVFGYYVNDPERYGVVEFDNNGNAVSLEEKPTAPKSNYAVSGLYFYPNDVVEIAKKQKPSDRGELEITDTN

SEQ ID NO: 132525 - protein, 173 aa, Unknown
  Bacterial polypetide isolated from the Sargasso Sea
MKGIILAGGSGTRLYPITSVISKQLLPIYDKPMIYYPLSTLMLSGIKDILIISTPEDTPRFNDLFGDGHQIGLNISYMVQPSPDGLAQAFILGEDFIGEDSVSLILGDNIFFGHGLSNMLLDSVQTVESKNDAVVFGYSVKDPQRYGVVSFDDSGKITEIVKSQIILNQIMQL

SEQ ID NO: 132526 - protein, 292 aa, Unknown
  Bacterial polypetide isolated from the Sargasso Sea
MKGIILAGGSGTRLYPSTKAISKQLIPIYDKPMIYYPLSMLMLAGIREVLIISTEEDTPKYESLLSNGKSIGMKFSYKIQPSPDGLAQAFILGEEFIGNDNVCLILGDNIFYGDSIPKKLREAVTDVDTSNNATVFGYYVNDPERYGVVEFDNNGNAVSLEEKPTAPKSNYAVSGLYFYPNDVIEIAKKQKPSDRSELEITDTNKSYLSQGRLKVEKLGRGYAWLDTGTHDSLLEASQFVQILEKRQGVKISCIEEIAYRMGFIDKDGLVKLAEKMKNNSYGDYLIRLAESL

SEQ ID NO: 132527 - protein, 128 aa, Unknown
  Bacterial polypetide isolated from the Sargasso Sea
MSNRKGIILAGGSGTRLHPLTKVVSKQLMPVYDKPMIFYPLTTLMMAGIKDILIITTPAEQQRFIELIGDGSDLGINVEYAVQPSPDGLAQAFIIGEDFIGNDSCTLVLGDNIYYGHDLKLSCKTPTS

SEQ ID NO: 132528 - protein, 296 aa, Unknown
  Bacterial polypetide isolated from the Sargasso Sea
MSASRKGIILAGGSGTRLHPITRAVSKQLLPVYDKPMVYYPLTTLMLAGIREVLVITTPHDQPCFERLLGDGSGWGMEIQYAVQPSPDGLAQAFLIGADFLAGAPAALVLGDNLFHGHDLVLQLQASNQQQQGATVFAYPVSDPERYGVVEFADDGRVLSIEEKPKQPKSRYAVTGLYFYDDTVVERARQVKPSPRGELEITDLNASYLNDGQLHVELMGRGMAWLDTGTYDSLQEAGAYIRTLEHRQGLKVACPEEVAWRLGWISSDQLAALAGPLRKSGYGNYLLQLLEVPIAG

SEQ ID NO: 132529 - protein, 184 aa, Unknown
  Bacterial polypetide isolated from the Sargasso Sea
MKGIVLAGGSGTRLHPITLGVSKQLIPIYDKPMIYYPISVLMLAGIKDILIISTKDDIGSYEKLLGNGKSLGVRFTYEVQESPEGLGQAFIIGENFIGDDKVALILGDNIFFGQGFSDILKKGKDNSGATIFSYQVSDPERFGVVELDKNSSPISIEEKPCNPKSNLAVTGLYFYDNDVIRMQK

SEQ ID NO: 132530 - protein, 279 aa, Unknown
  Bacterial polypetide isolated from the Sargasso Sea
MKGIVLAGGSGTRLYPITKVVSKQLLPIYDKPMIYYPISTLMLAGIKDILIISTPQDTPRFKQLMGNGEKLGLNISYRIQSTPDGLAQAFIIGEEFIDDDPVCLILGDNIFYGHGLSRLLLKGKKSIKENDRALIFGYSVKDPERYGVVSFDNLGKVTQIVEKPKIPASNYAVVGLYFYPNDVIDIAKNLKPSDRGELEITSVNQEYLEQDRMNVEIMGRGYAWLDTGTQEAMNNASNFIRSVEDRQSFKISCLEEIAFRKGFIDREQLEKLSEDFPND

SEQ ID NO: 132531 - protein, 249 aa, Unknown
  Bacterial polypetide isolated from the Sargasso Sea
MTTKRKGIILAGGSGTRLHPATLAISKQLLPIYDKPMIYYPLSTLMLAGIRDILIISTPQDTPRFEQLLGDGSQWGLNLQYEVQPSPDGLAQAFLIGEKFLDGAPSALVLGDNIFYGHDFQSLLKKANTRKEGATVFAYHVRDSERYGVAEFDADGKVLSLEEKPKQPKSNYAVTGLYFYDEQVVELAKQVKPSARGELEITDLNGLYMQQGKLNVELMGRGYAWLDTGTHDSLLEAGAFICPLAAAPG

SEQ ID NO: 132532 - protein, 195 aa, Unknown
  Bacterial polypetide isolated from the Sargasso Sea
MATRKGIILAGGSGTRLYPVTMAVSKQLLPIYDKPMIYYPLSTLMLAGIKDILIISTPQDTPRFEQLLGDGSQWGLNLQYKVQPSPDGLAQAFIIGEEFIGNDSCALVLGDNIFYGHDLPKQLEAAVNKGDGATVFAYHVNDPERYGVVEFDKNGTAISLEEKPLEPKSNYAVTGLYFYDNDVVEMAKNLKPSAR

SEQ ID NO: 132533 - protein, 240 aa, Unknown
  Bacterial polypetide isolated from the Sargasso Sea
PITRGVSKQLLPVYDKPMIYYPISTLMLAGIKDILIITTPEDRDSFQRLLGDGSDFGINLSYAVQASPDGLAQAFLIGEDFIGDSPVSLVLGDNIFYGQSFSKTLKNAASRTNGATVFGYNVKDPERFGVVEFDDNFKAVSIEEKPAKPKSNWAVTGLYFYDNKVIDFAKKVKPSERGELEITSINQMYLEDNSLTVEILGRGFAWLDTGTHESLHEASSFVQTIENVQGLKVSCLEEIA

SEQ ID NO: 132534 - protein, 167 aa, Unknown
  Bacterial polypetide isolated from the Sargasso Sea
MKGIILAGGSGTRLYPITKGVSKQLLPVYDKPMIYYPISVLMLAGIKDILIITTPEDQSSFQRLLGDGSEFGINLHYAIQSSPDGLAQAFIIGEEFIGDDSVCLALGDNIFWGQGFSPILKKAALRPTGATVFGYQVKDPERFGVVDFDDEMKAISIEEKPTRPKSN

SEQ ID NO: 132535 - protein, 291 aa, Unknown
  Bacterial polypetide isolated from the Sargasso Sea
MKGIILAGGSGTRLYPLTKVLSKQLLPVYDKPMIYYPLSTLMLSGINEILIISTPTDLPLYERLLGNGNELGLDISYKIQPSPDGLAQAFIIGEDFIGEDDVALVLGDNIFYGTGFSGLLKSSVKVVDKEKKAVVFGYEVKDPERYGVVEFNNDNMEVVSLEEKPTNPKSNYAVVGLYFYPNDVIRVAKNVKPSDRGELEITSVNNSFLEVNKLKVELLARGFAWLDTGTIDAINNASNFIRTIEDRQGLKVSCLEEIAYLNGFIDKKSIEHLIKKLPDDYANYLCRLIDN

SEQ ID NO: 132536 - protein, 192 aa, Unknown
  Bacterial polypetide isolated from the Sargasso Sea
MKGIILAGGSGTRLYPLTISVSKQMLPIYDKPMIYYPLSILMLAGIREILIITTPEDQSAFRTLLGDGQKWGLSLSYAVQPKPEGLAQAFIIGKNFIGSDNCCLILGDNIFYGHGLSEILIESSTLKDGATVFGYYVNDPERYGVVAFDESGLAKSIVEKPSKPESNWAVTGLYFYDNEVISIAESIKPSDR

SEQ ID NO: 132537 - protein, 287 aa, Unknown
  Bacterial polypetide isolated from the Sargasso Sea
MKGIILAGGSGTRLHPITKGVSKQLLPIYDKPMIYYPLSVLMLAGIKQVLIITTPEDKDSFIRLLGDGSQFGIELSYAEQPSPDGLAQAFIIGADFIGTDNVCLALGDNIFFGQAFGKQLKHAVQNLSGATVFGYQVMDPERFGVVEFDQNFKAISIEEKPTSPRSNWAVTGLYFYENSVIEIAKNVKPSERGELEITTVNQKYLEDGLLNVEQLGRGFAWLDTGTHDSLLEASQFVQTVEKRQGFKIACLEEIALSQGWLTKEQVQAIGSKLSKTGYGQYLLTISK

SEQ ID NO: 132538 - protein, 294 aa, Unknown
  Bacterial polypetide isolated from the Sargasso Sea
MKRKGIILAGGSGTRLYPATQAVSKQLLPIYDKPMIYYPLSTLMLAGIQDILIISTPQDTPRFEQLLGDGSQWGIRLQYKVQPCPDGLAQAFLLGESFINGDHSALILGDNIFYGHDLGGLLKGATDKTSGAQVFAYHVQDPERYGVVEFDATGKAVSIEEKPKVPKSHYAVTGLYFYDEQVVDLAKSLKPSPRGELEITDLNALYLKDGLLNVQTMGRGFAWLDTGTHDSMLEASHFIATMEHRQGLKIACIEEIAYRFGYIDDEQLERLAQPLSKNGYGRYLQNILKEGKVR

SEQ ID NO: 132539 - protein, 287 aa, Unknown
  Bacterial polypetide isolated from the Sargasso Sea
MKGIILAGGSGTRLYPLTRGVSKQLLPIYDKPMIYYPLSTLMLAGIRDILVITTPEDNDSFKRLLGNGSDFGINLSYAVQPSPDGLAQAFIIGEEFIGDSHVCLVLGDNIFYGQSFSKTLKNAANRQTGATVFGYQVKDPERFGVVEFDAEMKAVSIEEKPLRPKSSYAVTGLYFYDNKVVELAKQVKPSHRGELEITTLNEMYLKAGELNVELLGRGFAWLDTGTHESLHEASSFVQTIEHVQGLKVACLEEIAYRNGWLTSEELRNIAKPMLKNEYGQYLIRLVR

SEQ ID NO: 132540 - protein, 285 aa, Unknown
  Bacterial polypetide isolated from the Sargasso Sea
ILAGGSGTRLYPVTMAVSKQLLPIYDKPMIYYPLSTLMLAGIRDILIISTPQDTPRFEQLLGDGNQWGLNLQYKVQPSPDGLAQAFILGEEFIGSDPCALVLGDNIFYGHDLQKQLEAAAAKESGATVFAYHVHDPERYGVVEFDKEGTAISLEEKPLEPKSNYAVTGLYFYDNSVVEIAKSLKPSPRGELEITDVNRIYLEQGNLSVAMMGRGYAWLDTGTHESLIEASNFIQTIETRQGLKVACPEEIAYRQKFITADQVRELAAPLAKNAYGQYLLRMVVKA

SEQ ID NO: 132541 - protein, 289 aa, Unknown
  Bacterial polypetide isolated from the Sargasso Sea
MKGIILAGGSGTRLYPLTRGVSKQLLPIYDKPMIYYPLSTLMLAGIRDILIITTPEDNDSFKRLLGDGSDFGIRLQYAVQPSPDGLAQAFIIGEEFIGDSNVCLVLGDNIFYGQSFSKTLKNIAGRPSGATVFGYQVKDPERFGVVEFDADMKAISIEEKPTKPKSNYAVTGLYFYDNKVVELAKEVKPSHRGELEITTLNDMYLNAGELNVELLGRGFAWLDTGTHESLHEASSFVQTIEHVQGLKVACLEEIAYRNGWLTVDELKELAKPMLKNDYGLYLAHLADKK

SEQ ID NO: 132542 - protein, 196 aa, Unknown
  Bacterial polypetide isolated from the Sargasso Sea
MNKDIEKYTIDHNSSIFKGLETIDKNNKKCLVVLNEEKILGTVTDGDIRRTLLKGSTIDSNIKDAMNKNFLFILDSEDEESKKNKIDQILEKSSDNILPVINKENKIVDLILDYENRNNLNNFEALILAGGEGKRLNPITLKTPKPLIPIGGEPIIFRIIKQIVNSGIKDINISVHYQYEKIINEVGDGSQIFCKK

SEQ ID NO: 132543 - protein, 305 aa, Unknown
  Bacterial polypetide isolated from the Sargasso Sea
FGGRYRLIDVPISNSLNSRINQIFVISQYFASELHQHILSTYHLDMFRTGGLELLTPQETPKGRSWFKGTADAIRQSLDYITQCSAEYFMILSGDQLYNMDLLEMLAFAKRKDADLTIASIPVHVREAKRMGLLKINSTSSITEFVEKPTENSVLANFQLDEAFLKKSGRDHTQNQYLASMGIYIFKRTALINILKQEGDDFGKDLIPKFIEKAKCSAFIFDGYWEDIGTVASFYQANLILTQGEGLNTYEEENRIYSAPQHIPSALICGTRIRDSIIGQGGVIEADEIEHSVIGVRAIIKKGTK

SEQ ID NO: 132544 - protein, 65 aa, Unknown
  Bacterial polypetide isolated from the Sargasso Sea
MKRTVHCVIMGGGRGTRLYPLTKLRCKPAVPLAGKYRLVDIPISNCINSGYNRIYLLSQVQYGVL

SEQ ID NO: 132545 - protein, 63 aa, Unknown
  Bacterial polypetide isolated from the Sargasso Sea
PEVWVGRSCRLRRCFFDRACVIPEGMVIGEHAEEDARRFYRSEEGIVLVTRDMLRKLEHKQER

SEQ ID NO: 132546 - protein, 92 aa, Unknown
  Bacterial polypetide isolated from the Sargasso Sea
MSGVLTMILAGGEGTRLAPLTGVRAKPAVPFGGNYRIIDFVMNNFVNSDLLQIFVITQFKSHSLMKHLSRAWRVTGLTNRFIDPIPAQMQTG

SEQ ID NO: 132547 - protein, 410 aa, Unknown
  Bacterial polypetide isolated from the Sargasso Sea
MNAPLDDITVVEIDNWMAAPSAGAVLADLGAKVIKVEPLTGDPMRDMSRPIKGENFSDEIKNYDFQFDVDNRGKNSIAIAIDTEEGAALVRQLVSNAQVFMCNLLIARQEKYGLDPSSLFKENSSLVHATLTGYGTSGPDAMRPGYDVTAFFGRSGLYDAQREGEDGIVPMARPAQGDHTTGLAFVASILAALRQAEKTQTGQIVETSLYETAVWTQASDYAVTAVDKAPVRKRDREHMLAISANRFPCGDGKWIVFNMMPDAAYWPKICSAINLEHLIEDERFIDSSARYKLMPELIALFDEALSRKSRDEWGEIFDQAGLIWGPVLSLDEVPQDPHALELGMFPEIEHPSMGNYTTVNIPMRFATSDVRPRGPAPQLGEHTDSVLKSLGFDKTQLDSLKKNGIVLSSQ

SEQ ID NO: 132548 - protein, 212 aa, Unknown
  Bacterial polypetide isolated from the Sargasso Sea
MFSGIVQGTRKIIAVDENSGIRRLKIDLTGLKENLQNGASVSVNGVCLTVVAIEKEHVRFDVIRETLNRSNLDVLKTGDPVNIERSLKLEDEIGGHQVSGHVDTTGKISEILKSENNLDLKISCASEWTRFLVPKGWIALDGISLTVVDVGEDWFTVSLIPETLKRTIIGNKHEGDPVNLEFDQNTKIIVKTLDSMLPEIEKRLRKSMIQDL

SEQ ID NO: 132549 - protein, 33 aa, Unknown
  Bacterial polypetide isolated from the Sargasso Sea
MLERKGIILAGGRGSRLHPITLGVCKQLLPVYD

SEQ ID NO: 132550 - protein, 587 aa, Unknown
  Bacterial polypetide isolated from the Sargasso Sea
MEVGDNGIIKFESAVTTEEKLELKNVKVTTCAESSVWSLGAENATFNESNRDLTIENAKLKIFNLPVFWVGEVSLNENDSFSVPNLGITNSSLDISYKFKNTTENSLFKVEPIYSDSSLGLSLSYEYDDDKNNLEFDSLTMGDDDSSWAYNLDAQINFNDFISLDVDYSDFSGNSLIQNYGYRYLDLKRRSLDLKQSLGLSMIYENRNFLFSSDSFKNIGSLRPVSHSKDFFLYERFYLIYGWDLEISSEYAKFKSSIPSSLNMPYQIFNEVDRTVRNITVSKSFSGNQFDHEYEFLGSRREYDINDSDETLNINDFSFRQSFSLLEDRSLKIGYIWSTFSDQHELPLLDSYPINPSPESNISLNPWVGKDRDANMRKVFIYKKGMNKHFKYSIATNLYEKYNYDLENMIFKKFFNKKPIFFSLSTNNKNFNFFSMGNYSYEKKKFMGLMGGFRYMDEKTKFSIAKNKIVPSSYPLKSLDNYVVKFKRDFNSFTIFSRAQYAKEDKSLNENILGVEWAYDCLKLRVSFERAKFFPFLDSDYTTVPYAEHIYLTNPKVKNNLSFEFELIGLSNLLTPIDNIIEYGLFN

SEQ ID NO: 132551 - protein, 117 aa, Unknown
  Bacterial polypetide isolated from the Sargasso Sea
MSVSNVLALVLGGGRGTRLYPLTRDRSKPAVPLAGKYRIIDVPLSNCINSGVQRIYVMTQFNSVSLHRHIRRTYRFDAFSGGYVEILAAQQTNEAMAWYQGTADAVRQHIKCFKILI

SEQ ID NO: 132552 - protein, 155 aa, Unknown
  Bacterial polypetide isolated from the Sargasso Sea
KRPAIERCGTIRSYWEANMDLVGIEPQFNLYNQQWPVLTYNPPFPPAKFVHFSDLRTGHAINSMISPGAIISGAMVEKSVVGYNTRVHSFSHVNESVVMNNVVLGRGCKLHRVIIDKHVVIQPGTVIGHDFEEVANRFETTEDGIVVIPKGAEIG

SEQ ID NO: 132553 - protein, 171 aa, Unknown
  Bacterial polypetide isolated from the Sargasso Sea
MSVSNVLALVLGGGRGTRLYPLTRDRSKPAVPLAGKYRIIDVPLSNCINSGVQRIYVMTQFNSVSLHRHIRRTYRFDAFSGGYVEILAAQQTNEAMAWYQGTADAVRQHIKLLQDSDIKQVLVLSGDQLYRMNYADLLATHEANNADVTIAGIPVGDDVSSSFGIMRFDST

SEQ ID NO: 132554 - protein, 169 aa, Unknown
  Bacterial polypetide isolated from the Sargasso Sea
IGTIKAFFDANLACNDPEKAKFSFYQTGAPIYTQSRFLPPSKLLDAEVSKCTIGDGCFIKKSKLANAMIGLRTNIQEDCVIEDAMIMGADYYEETHECEDLPGCTPIGIGAGTTIKRAIIDKNARIGMDCKIINKDNVQEANHEDKGYIIKDGIVVICKDAIIPNGTVI

SEQ ID NO: 132555 - protein, 268 aa, Unknown
  Bacterial polypetide isolated from the Sargasso Sea
DMETAAGQFGVMEVDESGRIIGFEEKPANPKTIPGQNDKALASMGIYVVSQDYLAARLREDANLQGSSHDFGRDIIPKGIQRGDHFQAHEFRNPTDERTPYWRDVGTIDAYYAANMELVSADPLLNLYDPNWSTVTHQPQLPPALFKGADDMRRIDSSMVSGGCVIVNSELRRSLIFSSVRVNDGCELEGVLALPGCEIGAGSWLQNVILDNRCEVPPGTIIGADPVADAKRFDVTNGGIVIVNRRMLGQGESYMPGQHLPPQPNEAD

SEQ ID NO: 132556 - protein, 182 aa, Unknown
  Bacterial polypetide isolated from the Sargasso Sea
SLYPSGDVYVYDFSSNTIRGESERSAGYWRDVGTLDSYYQANMDLIAVEPPFDLYNRYWPLRGYTPPVPPAKFVHDETNRTGQAISSMVASGCIVSGAIVYQSILGFNVHVHSHSYIEKCVLMGNNDIGRGCRIRRAIIDKDVKIAPGTVIGEDPVLDKQRFHVSASGVVVIPKGAKIGFDD

SEQ ID NO: 132557 - protein, 64 aa, Unknown
  Bacterial polypetide isolated from the Sargasso Sea
MADQSSRYISNLTRDTYALILAGGKGSRLHELTTWRAKPALYFGGKFRIIDFPLSNCVNSGIRR

SEQ ID NO: 132558 - protein, 310 aa, Unknown
  Bacterial polypetide isolated from the Sargasso Sea
SGTADAVFQSLDIIESHGPEYIIILAGDHIYNMDYGEMLAEHVNNGADFSVACIAIEASKAAHQFGVVSVNENSRIIDFEEKPKHPKTMSGEDNKALVSMGIYLVSQKYLASMLRDDADSERSNHDFGKDIIPEGLRRGDHFHAYEFRNPTNEDPPYWRDVGTVDSYYAANMELLEADPPLNLYDKGWPIATYQRQLPPAFIKPGKDDSKIESSIISSACLIESSEIKRSILFSEVRVEPGCKLSGVLALGGCRIGANCHLQNVILDNGCVVPPGAVIGFDRQADAEKFDVTREGVVLVNRQMLGTGIRY

SEQ ID NO: 132559 - protein, 69 aa, Unknown
  Bacterial polypetide isolated from the Sargasso Sea
MKRVLAIILGGGKGSRLYPLTKMRAKPAVPLAGKYRLIDIPISNCINSGIEKMYVLTQFNSASLNRHIG

SEQ ID NO: 132560 - protein, 98 aa, Unknown
  Bacterial polypetide isolated from the Sargasso Sea
MYKGIILAGGRGSRLFPITISTSKQLLPIYDKPMIYYPLSVLMTAGIKDVLIIVNPNDLKNYENLLGDGSQLGISISYKVQPSPDGLAQSFILGETFI

SEQ ID NO: 132561 - protein, 60 aa, Unknown
  Bacterial polypetide isolated from the Sargasso Sea
METPARLNDLQRTTLAIVLAGGRGTRLGPLTNKRVKPAVHFGGKYRIIDFALSNCLNSGI

SEQ ID NO: 132562 - protein, 69 aa, Unknown
  Bacterial polypetide isolated from the Sargasso Sea
NPYLASMGIYVFSRNTLSILLNKYPSYTDLVRTYFQKHCIGEILLKVMYSMIIGKILEPLAHSLSQILH

SEQ ID NO: 132563 - protein, 327 aa, Unknown
  Bacterial polypetide isolated from the Sargasso Sea
CKKIPMVFQEWDVDEYLILSGDQLYRMDYSLFVQHHRDNGADLTVAALPVDEAQAEGFGLMRTDDVGNIKEFSEKPTGEKLKAMAVDTSKFGLSEESAAEKPYLASMGIYVFSRNTLFDLLNKFPNYTDFGKDIIPEALNRGDTLKSYVFDDYWEDIGTIGAFFESNLALTEQPKPPFSFYDEKFPIYTRPRFLPPSKLVDAQITDSIVCEGTILKSCSILHCVLGVRSRIESDSVLEDTLVMGADFFESPEERIELRKGGGTPLGVGEGTTVKRAILDKNTRIGDNVVIINKDRVEEADKPELGFYIRNGIVVVVKNATIANGTVI

SEQ ID NO: 132564 - protein, 134 aa, Unknown
  Bacterial polypetide isolated from the Sargasso Sea
MINKEVLSIILGGGQGSRLYPLTKNRSKPAVPIAGKYRLVDIPISNCINSDIKRIFVLTQFNSASLNKHIKNTYSFSFFSTGFVDVLAAEQTPENKTWFQGTADAVRQSMHHFLSHDFKYALILSGDQLYQMGF

SEQ ID NO: 132565 - protein, 326 aa, Unknown
  Bacterial polypetide isolated from the Sargasso Sea
RAKPAVPLAGKYRLIDIPISNCINSGIEKMYVLTQFNSASLNRHIGRTYNLNGPFGQGFVEVLAAQQTPDSPKWFEGTADAVRKYQWLFQEWDVDEYLILSGDQLYRMDYSLFVQHHRDNGADLTVAALPVDEAQAEGFGLMRTDDVGNIKEFSEKPTGEKLKAMAVDTSKFGLSKESAAEKPYLASMGIYVFSRNTLFDLLNKFPNYTDFGKDIIPEALKRGDTLKSYVFDDYWEDIGTIGAFFESNLALTEQPKPPFSFYDEKFPIYTRPRFLPPSKLVDAQITDSIVCEGTILKSCSILHCVLGVRSRIESDSVLEDTLVMGA

SEQ ID NO: 132566 - protein, 174 aa, Unknown
  Bacterial polypetide isolated from the Sargasso Sea
MKRVLAIILGGGKGSRLYPLTKMRAKPAVPLAGKYRLIDIPISNCINSGIEKMYVLTQFNSASLNRHIGRTYNLNGPFGQGFVEVLAAQQTPDSPKWFEGTADAVRKYQWLFQEWDVDEYLILSGDQLYRMDYSLFVQHHRDNGADLTVAALPVDEAQAEGFGLMRTDDGGNIK

SEQ ID NO: 132567 - protein, 260 aa, Unknown
  Bacterial polypetide isolated from the Sargasso Sea
MKRVLAIILGGGKGSRLYPLTKMRAKPAVPLAGKYRLIDIPISNCINSGIEKMYVLTQFNSASLNRHIGRTYNLNGPFGQGFVEVLAAQQTPDSPKWFEGTADAVRKYQWLFQEWDVDEYLILSGDQLYRMDYSLFVQHHRDNGADLTVAALPVDEAQAEGFGLMRTDDVGNIKEFSEKPTGEKLKAMAVDTSKFGLSKESAVKKPYLASMGIYVFSRNTLFDLLNKFPSYTDFGKDIIPEALKRGDTLKSYVFDDYWED

SEQ ID NO: 132568 - protein, 204 aa, Unknown
  Bacterial polypetide isolated from the Sargasso Sea
MKRVLAIILGGGKGSRLYPLTKMRAKPAVPLAGKYRLIDIPISNCINSGIEKMYVLTQFNSASLNRHIGRTYNLNGPFGQGFVEVLAAQQTPDSPKWFEGTADAVRKYQWLFQEWDVDEYLILSGDQLYRMDYSLFVQHHRDNGADLTVAALPVDEAQAEGFGLMRTDDLGNIKEFSEKPTGDKLKAMAVDTSKFGLSKESAVE

SEQ ID NO: 132569 - protein, 275 aa, Unknown
  Bacterial polypetide isolated from the Sargasso Sea
GGGFVEVLAAQQTPDSPTWFEGTADAVRKYQWLFQEWDVDEYLILSGDQLYRMDYSLFIEHHRRTGADLTVAALPVDPKQAEAFGLMRTDENGTIKEFREKPKGDSLLEMAVDTSRFGLSADSAKERPYLASMGIYVFSRETLFDLLDKHPGHKDFGKEIIPEALSRGDNLQSYVFDDYWEDIGTIGAFYEANLALTQQPTPPFSFYDEKFPIYTRPRYLPPSKLVDAQIINSIVGEGSILKSCSIHHCVLGVRSRIESDVVLQDTLVMGSDFFE

SEQ ID NO: 132570 - protein, 150 aa, Unknown
  Bacterial polypetide isolated from the Sargasso Sea
MQTAKRFVSRLTRQTLALVLAGGRGSRLHDLTKWRAKPAVPFGGKFRIIDFPLSNCINSGIGQVGVITQYKSHSLIRHIQRGWGFLRGELDEFVELLPAQQRIETSWYEGTADAVLQNLDIIRSHQPEYVLILAGDHVYKMDYGTMLAAH

SEQ ID NO: 132571 - protein, 303 aa, Unknown
  Bacterial polypetide isolated from the Sargasso Sea
IEKMYVLTQFNSASLNRHIGRTYNLNGPFGQGFVEVLAAQQTPDSPKWFEGTADAVRKYQWLFQEWDVDEYLILSGDQLYRMDYSLFVQHHRDSGADLTVAALPVDEAQAEGFGLMRTDDVGNIKEFSEKPTGEKLKAMAVDTSKFGLSKESAAEKPYLASMGIYVFSRNTLFDLLNKFPNYTDFGKDIIPEALNRGDTLKSYVFDDYWEDIGTIGAFFESNLALTEQPKPPFSFYDEKFPIYTRPRFLPPSKLVDAQITDSIVCEGTILKSCSILHCVLGVRSRIESDSVLEDTLVMGADFL

SEQ ID NO: 132572 - protein, 278 aa, Unknown
  Bacterial polypetide isolated from the Sargasso Sea
MKRVLAIILGGGKGSRLYPLTKMRAKPAVPLAGKYRLIDIPISNCINSGIEKMYVLTQFNSASLNRHIGRTYNLNGPFGQGFVEVLAAQQTPDSPKWFEGTADAVRKYQWLFQEWDVDEYLILSGDQLYRMDYSLFVQHHRDNGADLTVAALPVDEAQAEGFGLMRTDDLGNIKEFSEKPTGDKLKAMAVDTSKFGLTKESAAEKPYLASMGIYVFSRNTLFDLLNKFPSYTDFGKDIIPEALKRGDTLKSYVFDDYWEDIGTIGAFFESNLALTEQP

SEQ ID NO: 132573 - protein, 164 aa, Unknown
  Bacterial polypetide isolated from the Sargasso Sea
MKRVLAIILGGGAGTRLYPLTKMRAKPAVPLAGKYRLIDIPISNCINSDINKMYVMTQFNSASLNRHLSQTFNLSNSFGGGFVEVLAAQQTPDSPSWFEGTADAVRKYQWLFQEWDVDEYLILSGDQLYRMDYSLFIEHHRRTGADLTVAALPVDPKQAEAFGL

SEQ ID NO: 132574 - protein, 292 aa, Unknown
  Bacterial polypetide isolated from the Sargasso Sea
ILSGDQLYRMDYSLFVQHHRDNKADLTVAALPVDESQAEGFGLMRTDDLGNIKEFSEKPTGEKLKSMAVDTSKFGLTKESASEKPYLASMGIYVFSRKTLFDLLNKFPSYTDFGKDIIPEALSRGDTLKSYVFDDYWEDIGTIGAFFESNLALTQQPKPPFSFYDEKFPIYTRPRYLPPSKLVDAQITDSIVCEGTILKSCSILHCVLGVRSRIESDSVIEDTLVMGSDFFESLEERIELRKGGGTPLGVGEGSTIKRAILDKNARIGDNVVIVNKDRVEEADKPDLGFYIR

SEQ ID NO: 132575 - protein, 220 aa, Unknown
  Bacterial polypetide isolated from the Sargasso Sea
MSEQKSNPDNDPRYVSKLTKDTLALVLAGGRGSRLYELTDWRAKPALYFGGKFRIIDFPLSNCINSGIRQVGVLTQYKAHSLVRHLVRGWSHFKKELGEYVEVLPASQRYSDDWYQGTADAIYQNMDIIRASNPKYVVVLSGDHIYKMDYGHMLVSHVERGADMTVSCLEVPTGEAAGAFGVMQVDEESRVLGFEEKPEHPAEVPGRPGFCLASMGNYVF

SEQ ID NO: 132576 - protein, 296 aa, Unknown
  Bacterial polypetide isolated from the Sargasso Sea
YYSLFVQHHRDNKADLTVAALPVDESQAEGFGLMRTDDLGNIKEFSEKPTGEKLKSMAVDTSKFGLTNESAQEKPYLASMGIYVFSRKTLFDLLNKFPSYTDFGKDIIPEALSRGDTLKSYVFDDYWEDIGTIGAFFESNLALTQQPKPPFSFYDEKFPIYTRPRYLPPSKLVDAQITDSIVCEGTILKSCSILHCVLGVRSRIESDSVIEDTLVMGSDFFESLEERIELRKGGGTPLGVGEGSTIKRAILDKNARIGDNVVIVNKDRVEEADKPDLGFYIRNGIVVVVKNATIAN

SEQ ID NO: 132577 - protein, 150 aa, Unknown
  Bacterial polypetide isolated from the Sargasso Sea
MKRVLGIILGGGAGTRLYPLTKMRAKPAVPLAGKYRLIDIPVSNCINSGINKIYVLTQFNSASLNRHISQTFNLSSGFDQGFVEVLAAQQTPESPSWFEGTADAVRKYEWLFQEWDIDEVLILSGDQLYRMDYGLFVAEHRSSGADLTVA

SEQ ID NO: 132578 - protein, 256 aa, Unknown
  Bacterial polypetide isolated from the Sargasso Sea
MTVSCMSVPLQEAAGAFGVMSVDENYRINGFEEKPANPTPLPNDPTRCLASMGNYVFDTEFLFEQLRVDAENMGSQRDFGKDIIPSIIADHPVYAYPFEKSGGDNAYWRDVGTIDSFWEANMEMVAPVPQLNLYDRKWPIWTYQEQLPPAKFVWEDHDRRGEAINSVVSGGCIISGSTLRSSICFSNVRVHSYGLIEDAVILPDVEIKRHCKLKKVIIDRGCVIPEGTTIGYDHEQDKARGFRVSEKGVVLVTREM

SEQ ID NO: 132579 - protein, 235 aa, Unknown
  Bacterial polypetide isolated from the Sargasso Sea
MKRVLSIILGGGAGTRLYPLTKMRAKPAVPLAGKYRLIDIPISNCINSNITKMYVLTQFNSASLNRHLSQTYDLSAGFGQGFVEVLAAQQTPESPSWFEGTADAVRKYQWLFQEWDVDEYLILSGDQLYRMDYSLFVEHHRKSGADLTVAALPVDPKQAESFGLMRTDENGAIQEFREKPKGDSLKEMAVNTARFGLSPESAQEKPYLASMGIYVFSRKALFGLLNDYPTYKDFG

SEQ ID NO: 132580 - protein, 290 aa, Unknown
  Bacterial polypetide isolated from the Sargasso Sea
IILGGGAGTRLYPLTKKRAKPAVPLGANYRLIDIPVSNCINSDINKVYCLTQFNSASLNRHLSQAYNTNIGTYTRTGFVEVLAAEQSPVNKAWFQGTADAVRQYLWLFGESECDEYLILSGDHLYRMDYRPFIQAHRDAMADITVAALPTDEKRASSFGLMKINSEAVITEFSEKPKGEALHAMKVDTTILGLDAQRAAEMPYIASMGIYVFTAKAMHQLLRKDFPEANDFGGEIIPLAAATGMKVVAYLYDGYWEDIGTVDAFFHANLSCNDPNPQFSFYDRKAPIYTQ

SEQ ID NO: 132581 - protein, 253 aa, Unknown
  Bacterial polypetide isolated from the Sargasso Sea
KMYVMTQFNSASLNRHLSQTFNLSASFGQGFVEVLAAQQTPDSPSWFEGTADAVRKYQWLFQEWDVDEYLILSGDQLYRMDYSLFVEHHRSTGADLTVAALPVDPNQAEAFGLMRTDDDGNIKEFREKPKGDSLLEMAVDTSRFGLSADSAKERPYLASMGIYVFSRDTLFDLLDSNPGYKDFGKEVIPEALKRGDKLKSYVFDDYWEDIGTIGAFYEANLALTQQPTPPFSFYDEKFPIYTRPRYLPPSKLS

SEQ ID NO: 132582 - protein, 211 aa, Unknown
  Bacterial polypetide isolated from the Sargasso Sea
MKRVLAIILGGGKGSRLYPLTKMRAKPAVPLAGKYRLIDIPISNCINSGIEKMYVLTQFNSASLNRHIGRTYNLNGPFGQGFVEVLAAQQTPDSPKWFEGTADAVRKYQWLFQEWDVDEYLILSGDQLYRMDYSLFVQHHRDNGADLTVAALPVDEAQAEGFGLMRTDDLGNIKEFSEKPTGEKLKAMAVDTSKFGLSKESAAEKPYLASM

SEQ ID NO: 132583 - protein, 267 aa, Unknown
  Bacterial polypetide isolated from the Sargasso Sea
MKRVLAIILGGGAGTRLYPLTKMRAKPAVPLAGKYRLIDIPISNCINSNINKMYVMTQFNSASLNRHLSQTFNLSASFGQGFVEVLAAQQTPDSPSWFEGTADAVRKYQWLFQEWDVDEYLILSGDQLYRMDYSLFVEHHRSSGADLTVAALPVDPKQAEAFGLMRTDDDGNIKEFREKPKGDSLLEMSVDTSRFGLRADSAKDRPYLASMGIYVFSRDTLFDLLDSNPGYKDFGKEVIPEALKRGDKLKSYVFDDYWEDIGTIGAF

SEQ ID NO: 132584 - protein, 309 aa, Unknown
  Bacterial polypetide isolated from the Sargasso Sea
HMEINRCSIVSRLTNNTMALVLLGGRGQRLGVLTDWRTKPAVPFGGKFRIIDFTLSNCMHSGINKICVLTQYKSHSLIRHLIKGWTKINNDSGDFLDIVPAQQWTDNETWFQGTADAVFQSLDIIESHGPQYVIILAGDHIYNMDYGEMLAEHVNNGADFSVACIAIEAAKAANQFGVMSVNENGRIIDFEEKPKDPKTISREENKALVSMGIYVVSQKYLASMLRDDAVSERSNHDFGKDIIPEGLRRGDHFHAYEFRNPTNDDPPYWRDVGTVDSYYAANMELLEAEPPLNLYDKGWPIATYQRQLP

SEQ ID NO: 132585 - protein, 242 aa, Unknown
  Bacterial polypetide isolated from the Sargasso Sea
MKRVLAIILGGGAGTRLYPLTKMRAKPAVPLAGKYRLIDIPISNCINSNINKMYVMTQFNSASLNRHLSQTFNLSASFGQGFVEVLAAQQTPDSPSWFEGTADAVRKYQWLFQEWDVDEYLILSGDQLYRMDYSLFVEHHRSTGADLTVAALPVDPNQAEAFGLMRTDDDGNIKEFREKPKGDSLLEMAVDTSRFGLSADSAKERPYLASMGIYVFSRDTLFDLLDSNPGYKDFGKEVIPEA

SEQ ID NO: 132586 - protein, 297 aa, Unknown
  Bacterial polypetide isolated from the Sargasso Sea
TSNTMALVLAGGRGERLGVLTDWRTKPAVPFGGKYRIIDFTLSNCMHSGINKVCVLTQYKSHSLIRHLIEGWTKINSQRGDFLDIVPAQQWTGQDTWFQGTADAVFQSLDIIESHSPDYLIILAGDHIYNMDYGEMLAEHVNMGADFSVACMAVDIEKAANQFGVMTINDNGRIINFEEKPSSPAPLPGKSKKALASMGIYVVSHRYLAERLREDAALSESTHDFGRDIIPEGLRRGDYFHAHTFQNPTNDAPPYWRDVGTIDTYYAANMELLERQPALDLHNSKWPTVTYQRQLPP

SEQ ID NO: 132587 - protein, 237 aa, Unknown
  Bacterial polypetide isolated from the Sargasso Sea
MKRVLAIILGGGKGSRLYPLTKMRAKPAVPLAGKYRLIDIPISNCINSGIEKMYVLTQFNSASLNRHIGRTYNLNGPFGQGFVEVLAAQQTPDSPKWFEGTADAVRKYQWLFQEWDVDEYLILSGDQLYRMDYSLFVQHHRDNGADLTVAALPVDEAQAEGFGLMRTDDVGNIKEFSEKPTGEKLKAMAVDTSKFGLSKESAAEKPYLASMGIYVFSRNNLFDLLNKFPNYTDFVRT

SEQ ID NO: 132588 - protein, 161 aa, Unknown
  Bacterial polypetide isolated from the Sargasso Sea
MKRVLGIILGGGAGTRLYPLTKMRAKPAVPLAGKYRLIDIPVSNCINSGINKIYVLTQFNSASLNRHISQTFNLSSGFDQGFVEVLAAQQTPESPSWFEGTADAVRKYEWLFQEWDIDEVLILSGDQLYRMDYGLFVAEHRSSGADLTVSALPVDEEQAQS

SEQ ID NO: 132589 - protein, 235 aa, Unknown
  Bacterial polypetide isolated from the Sargasso Sea
MKRVLAIILGGGKGSRLYPLTKMRAKPAVPLAGKYRLIDIPISNCINSGIEKMYVLTQFNSASLNRHIGRTYNLNGPFGQGFVEVLAAQQTPDSPKWFEGTADAVRKYQWLFQEWDVDEYLILSGDQLYRMDYSLFVQHHRDNGADLTVAALPVDEAQAEGFGLMRTDDLGNIKEFSEKPTGEKLKAMAVDTSKFGLSKESAAEKPYLASMGIYVFSRNTLFDLLNKFPNYTDFG

SEQ ID NO: 132590 - protein, 137 aa, Unknown
  Bacterial polypetide isolated from the Sargasso Sea
MKRVLAIILGGGKGSRLYPLTKMRAKPAVPLAGKYRLIDIPISNCINSGIEKMYVLTQFNSASLNRHIGRTYNLNGPFGQGFVEVLAAQQTPDSPKWFEGTADAVRKYQWLFQEWDVDEYLILSGDQLYRMDYSLFV

SEQ ID NO: 132591 - protein, 301 aa, Unknown
  Bacterial polypetide isolated from the Sargasso Sea
PISNCINSDINKMYVMTQFNSASLNRHLSQTYNLSNSFGGGFVEVLAAQQTPDSPTWFEGTADAVRKYQWLFQEWDVDEYLILSGDQLYRMDYSLFIEHHRRSGADLTVAALPVDPKQAEAFGLMRTDENGSIKEFREKPKGDSLLEMAVDTSRFGLSADSAKERPYLASMGIYVFSRQTLFDLLDKHPGHKDFGKEIIPEALARGDKLQSYVFDDYWEDIGTIGAFYESNLALTQQPTPPFSFYDEKFPIYTRPRYLPPSKLVDAQITNSIVGEGSILKSCSIHHCVLGVRSRIESDCVL

SEQ ID NO: 132592 - protein, 297 aa, Unknown
  Bacterial polypetide isolated from the Sargasso Sea
MKRVLAIILGGGKGSRLYPLTKMRAKPAVPLAGKYRLIDIPISNCINSGIEKMYVLTQFNSASLNRHIGRTYNLNGPFGQGFVEVLAAQQTPDSPKWFEGTADAVRKYQWLFQEWDVDEYLILSGDQLYRMDYSLFVQHHRDSGADLTVAALPVDEAQAEGFGLMRTDDIGNIKEFSEKPTGEKLKAMAVDTSKFGLSKESAAEKPYLASMGIYVFSRNTLFDLLNKFPNYTDFGKDIIPEALNRGDTLKSYVFDDYWEDIGTIGAFFESNLALTEHQNLHLVFMMRNFQFILDLDF

SEQ ID NO: 132593 - protein, 252 aa, Unknown
  Bacterial polypetide isolated from the Sargasso Sea
MSGVLAMILAGGEGKRLRPLTSVRTKPAVPFGGNYRIIDFALSNFINSGFLKIFVLTQFKSHSLMQHLREGWRLSGLRGHFIDPIPAQMRMGKRWYEGTADAIYQNMNLIKDTDPEHVCIFGGDHIYRMDISQMLRFHKKRDANLTVAAIPVPVSEARHFGIIEVDENWCMTGFVEKPQSSPRTMPGQPDMVLASMGNYIFNRHPLEDMLQQDSQDGQSVHDFGRDVIPKMYPGREGLCLRFQSKPYTRCPT

SEQ ID NO: 132594 - protein, 321 aa, Unknown
  Bacterial polypetide isolated from the Sargasso Sea
MIRSNKARFVSRLTSNTMALVLAGGRGERLGVLTDWRTKPAVPFGGKFRIIDFTLSNCMHSGINKVCVLTQYKSHSLIRHLIEGWTKINSQRGDFLDIVPAQQWTGTDTWYQGTADAVFQSLDIIESHAPDYVIILAGDHIYNMDYGEMLAEHVNMRADFSVACMEVDIEKAAGQFGVMTISESGRIIDFVEKPSSPAPLPGKKNKTLASMGIYVVSRRYLAERLREDAGHSGSSHDFGRDIIPEGLRRGDYFHAHIFQNPTNVDPPYWRDVGTIDTYYEANMELLERQPPLDLYDREWPTVTYQRQLPPSLFRGWRKGAV

SEQ ID NO: 132595 - protein, 420 aa, Unknown
  Bacterial polypetide isolated from the Sargasso Sea
MSNVRYISNLTRETYALILAGGRGSRLHELTDWRAKPALYFGGKFRIIDFPLSNCINSGIRRVGVVTQYKSHSLIRHVMRGWGHFKKELGESVEILPASQRYSENWYQGTADAVFQNIDIIRHELPKYVMVLSGDHVYRMDYAGLLAAHAESGADMTVSCLEVPVAEAAGAFGVMEVDDEMRILGFEEKPKYPKHSPGNPEKCLASMGNYVFNTEFLFEQLKKDAQNANSDRDFGKDIIPSIIEKHKVFAYPFKSAFPNEQAYWRDVGTLDSFWQANMELLSPTPALNLYDAKWPIWTYQEQLPPAKFVFDDDDRRGMAVDSIISGGCIISGATVRRSVLFNEVRVCSYSVVEDSVVLPDVVVLRHCKIKNAIIDRGCIIPEGTVIGYNHDHDRAKGFRVSEKGITLVTRDMLGLPVGYE

SEQ ID NO: 132596 - protein, 243 aa, Unknown
  Bacterial polypetide isolated from the Sargasso Sea
KPAMPSSVPGKPGTCLASMGNYIFNTEFLFEQLKKDAENEGSGRDFGHDIIPAIIEEHNVFAFPFRDPQQEGQPYWRDVGTLDSFWEANMELVMPEPQLDLYDPAWPIWTYQEQLPPAKFIFDDDDRRGMALDSTVSGGCIISGSAVRKSLLFSNVHVRSFCEIEQSVILPGAIINRGCKIKRAIIDRSCEIPAGLEIGFDRKTDEENGFRVSKKGIVLVTRDMLSELAKKLERQTQENKKLA

SEQ ID NO: 132597 - protein, 431 aa, Unknown
  Bacterial polypetide isolated from the Sargasso Sea
MKRVLAIILGGGKGSRLYPLTKMRAKPAVPLAGKYRLIDIPISNCINSGIEKMYVLTQFNSASLNRHIGRTYNLNGPFGQGFVEVLAAQQTPDSPKWFEGTADAVRKYQWLFQEWDVDEYLILSGDQLYRMDYSLFVQHHRDNGADLTVAALPVDEAQAEGFGLMRTDDLGNIKEFSEKPTGEKLKAMAVDTSKFGLSKESAAEKPYLASMGIYVFSRNTLFDLLNKFPNYTDFGKDIIPEALDRGDTLKSYVFDDYWEDIGTIGAFFESNLALTEQPKPPFSFYDEKFPIYTRPRFLPPSKLVDAQITDSIVCEGTILKSCSILHCVLGVRSRIESDSVLEDTLVMGADFFESPEERIALRKGGGTPLGVGEGTTVKRAILDKNTRIGDNVVIINKDRVEEADKPELGFYIRNGIVVVVKNATIANGTVI

SEQ ID NO: 132598 - protein, 431 aa, Unknown
  Bacterial polypetide isolated from the Sargasso Sea
MKRVLAIILGGGKGSRLYPLTKMRAKPAVPLAGKYRLIDIPISNCINSGINKMYVLTQFNSASLNRHIGRTYNLSAPFGQGFVEVLAAQQTPDSPKWFEGTADAVRKYQWLFQEWDVDEYLILSGDQLYRMDYSLFVQHHRDNKADLTVAALPVDESQAEGFGLMRTDDLGNIKEFSEKPTGEKLKSMAVDTSKFGLTKESASEKPYLASMGIYVFSRKTLFDLLNKFPSYTDFGKDIIPEALSRGDTLKSYVFDDYWEDIGTIGAFFESNLALTQQPKPPFSFYDEKFPIYTRPRYLPPSKLVDAQITDSIVCEGTILKSCSILHCVLGVRSRIESDSVIEDTLVMGSDFFESLEERIELRKGGGTPLGVGEGSTIKRAILDKNARIGDNVVIVNKDRVEEADKPNLGFYIRNGIVVVVKNATIANGTII

SEQ ID NO: 132599 - protein, 404 aa, Unknown
  Bacterial polypetide isolated from the Sargasso Sea
CCALAGKYRLIDIPISNCINSGIEKMYVLTQFNSASLNRHIGRTYNLNGPFGQGFVEVLAAQQTPDSPKWFEGTADAVRKYQWLFQEWDVDEYLILSGDQLYRMDYSLFVQHHRDNGADLTVAALPVDEAQAEGFGLMRTDDLGNIKEFSEKPTGEKLKAMAVDTSKFGLSKESAAEKPYLASMGIYVFSRNTLFDLLNKFPNYTDFGKDIIPEALDRGDTLKSYVFDDYWEDIGTIGAFFESNLALTEQPKPPFSFYDEKFPIYTRPRFLPPSKLVDAQITDSIVCEGTILKSCSILHCVLGVRSRIESDSVLEDTLVMGADFFESPEERIELRKGGGTPLGVGEGTTVKRAILDKNTRIGDNVVIINKDRVEEADKPELGFYIRNGIVVVVKNATIANGTVI

SEQ ID NO: 132600 - protein, 420 aa, Unknown
  Bacterial polypetide isolated from the Sargasso Sea
MSNVRYISNLTRETYALILAGGRGSRLHELTDWRAKPALYFGGKFRIIDFPLSNCINSGIRRVGVVTQYKSHSLIRHVMRGWGHFKKELGESVEILPASQRYSENWYQGTADAVFQNIDIIRHELPKYVMVLSGDHVYRMDYAGLLAAHAESGADMTVSCLEVPVAEAAGAFGVMEVDDEMRILGFEEKPKHPKHSPSNPEKCLASMGNYVFNTEFLFEQLKKDAQNANSDRDFGKDIIPSIIEKHKVFAYPFKSAFPNEQAYWRDVGTLDSFWQANMELLSPTPALNLYDAKWPIWTYQEQLPPAKFVFDDDDRRGMAVDSIISGGCIISGATVRRSVLFNEVRVCSYSVVEDSVVLPDVVVLRHCKIKNAIIDRGCIIPEGTVIGYNHDHDRAKGFRVSEKGITLVTRDMLGLPVGYE

SEQ ID NO: 132601 - protein, 289 aa, Unknown
  Bacterial polypetide isolated from the Sargasso Sea
MAGDHIYKMDYTRMLADHAESGADCTVGCIEVPRMDAVAFGVMHVDENRRVTGFVEKPADPPSIPGRPDVALASMGIYVFSADYLYTLLEENISSVDTDHDFGKDILPRVVTQGTAIAHPFSMSCVSSDPSVEPYWRDVGTIDAYWAANLDLASTIPTLDLYDRNWPIWTYQEQLPPAKFVRDMKGLQGTGNNLIVCGGCVISGSQISRSVLSSNVKVSSFCNINEAVLLPQVTVGASCRLQKVVIDRGCTIPDGTIIGEDPVADAERFYRTDDGVVLVTPEALQKKGK

SEQ ID NO: 132602 - protein, 346 aa, Unknown
  Bacterial polypetide isolated from the Sargasso Sea
MKHLSRAWRVTGLTNRFIDPIPAQMQTGKHWYLGTADAVYQNIHLIHGLDPEEVCVFGGDHIYKMDVRQMLNFHRQNHALLTVAAIPVHVSQAHEFGVIEVDSTGKMVGFEEKPKSNPKTIPGRPDYVLASMGNYIFDAKTLVEVLNEDAAQIDSKHDFGHNIIPKMYPQGSVYVYDFSTNVIRGEQEDSKGYWRDVGTLDSYYEANMDLISVQPPLDLYNKYWPLRSYTPPMPPAKFVHDEANRTGQAISSMVASGCIVSGAIVYQSILGYNTVVHSHAYIEKSVLMGNNDIGRGCRIRRAIIDKDVKIAPNTIIGEDPVLDRQRFHVSADGVVVIPKGAMVGFD

SEQ ID NO: 132603 - protein, 409 aa, Unknown
  Bacterial polypetide isolated from the Sargasso Sea
MNETMALVLAGGRGSRLKQLTDNRAKPAVHFGGKFRIIDFVLSNCINSGIRRVGVVTQYKSHSLLRHLQSGWSFLRYQMNEFIDLLPAQQRVDEVNWYRGTADAVYQNLDIIRDHGPKYVVVLAGDHIYKMDYAAMLLDHVNMGARVTVACIEVPRDEASAFGVMAVDGDRKINAFVEKPANPPAMPGKPDTALASMGVYIFEADYLYQLLEEDLANPASHHDFGMDVIPRVVQEGTAYAHPFSMSCVGCCPQKRPYWRDVGTVDSFWEANMDLASVTPELDIYDQDWPIWTSQNMTPPAKFVQDRNGQHGMTINSMFAGGTIVSGSFIVSSVLFTNVRVDSFCTLDQAVIFPGVEIGPGCRLRRVVIDKGCKLPEGLVVGENACEDARRFYRSEQGIVLVTKEMLARL

SEQ ID NO: 132604 - protein, 237 aa, Unknown
  Bacterial polypetide isolated from the Sargasso Sea
FGLSADSAKERPYWASMGIYVFSRDTLFDLLDSNPGYKDFGKEVIPEALKRGDKLKSYVFDDYWEDIGTIGAFYEANLALTQQPTPPFSFYDEKFPIYTRPRYLPPSKLVDAQITNSIVGEGSILKSCSIHHCVLGVRSRIETDVVLQDTLVMGADFFESSDERAVLRERGGIPVGVGQGTTVKRAILDKNARIGSNVTIVNKDHVEEADRSDQGFYIRNGIVVVVKNATIQDGTVI

SEQ ID NO: 132605 - protein, 400 aa, Unknown
  Bacterial polypetide isolated from the Sargasso Sea
RGRGTRLAPLTGVRAKPAVPFGGNYRIIDFVLNNFVNSDLLQIFVITQFKSHSLMKHLSRAWRVTGLTNRFIDPIPAQMQTGKHWYLGTADAVYQNIHLIHGLDPEEVCVFGGDHIYKMDVRQMLNYHRQNNALLTVAAIPVHVSQAHEFGVIEVDSTGKMIGFEEKPKSNAKTIPGRPDYVLASMGNYIFDAKTLVEVLNEDAAQIDSKHDFGHNIIPKMYPQGTVYVYDFSTNVIRGEQAESKGYWRDVGTLDSYYEANMDLISVQPPLDLYNKYWPLRSYTPPMPPAKFVHDEANRTGQAISSMVASGCIVSGAIVYQSILGYNTVVHSHAYIEKSVLMGNNDIGRGCRIRRAIIDKDVKIAPNTIIGEDPVLDRQRFHVSADGVVVIPKGAMVGFD

SEQ ID NO: 132606 - protein, 424 aa, Unknown
  Bacterial polypetide isolated from the Sargasso Sea
MKSTGARFVSRLTNNTMALVLAGGRGQRLGVLTDWRTKPAVPFGGKFRIIDFTLSNCMHSGINKICVLTQYKSHSLIRHLIKGWTKINNDSGDFLDIVPAQQWTDNETWFQGTADAVFQSLDIIESHGPEYVIILAGDHIYNMDYGEMLAEHVNNGADFSVACIAIEAAKAANQFGVMSVNENGRIIDFKEKPKDPKTISGEDNKALVSMGIYVVSQKYLASMLRDDAVSERSNHDFGKDIIPEGLRRGDHFHAYEFRNPTGDDPPYWRDVGTVDSYYAANMELLEAEPPLNLYDKGWPIATYQRQLPPAFIKPGKKDSKIDASIISSACLIENSEIRRSIIFSEVRVESGCKLSGVLALGGCRVGANCHLQNVILDNGCIVPPGSVIGFDLQADAEKFNVTREGIVLINRQMLGQGISYNPEF

SEQ ID NO: 132607 - protein, 129 aa, Unknown
  Bacterial polypetide isolated from the Sargasso Sea
MADQSSRYISNLTRDTYALILAGGKGSRLHELTNWRAKPALYFGGKFRIIDFPLSNCVNSGIRRIGVVTQYKSHSLIRHLVRGWGHFKKELGESVEILPASQRFSDSWYEGTADAVFQNIDIIRDELPK

SEQ ID NO: 132608 - protein, 333 aa, Unknown
  Bacterial polypetide isolated from the Sargasso Sea
MKRVLAIILGGGKGSRLYPLTKMRAKPAVPLAGKYRLIDIPISNCINSGIEKMYVLTQFNSASLNRHIGRTYNLNGPFGQGFVEVLAAQQTPDSPKWFEGTADAVRKYQWLFQEWDVDEYLILSGDQLYRMDYSLFVKHHRDNGADLTVAALPVDEAQAEGFGLMRTDDLGNIKEFSEKPTGEKLKAMAVDTSKFGLTKESAAEKPYLASMGIYVFSRNTLFDLLNKFPSYTDFGKDIIPEALNRGDTLKSYVFDDYWEDIGTIGAFFESNLALTEQPKPPFSFYDEKFPIYTRPRFLPPSKLVDAQITNSIVCEGTILKSCSILHCVLGVRS

SEQ ID NO: 132609 - protein, 420 aa, Unknown
  Bacterial polypetide isolated from the Sargasso Sea
MSNVRYISNLTRETYALILAGGRGSRLHELTDWRAKPALYFGGKFRIIDFPLSNCINSGIRRVGVVTQYKSHSLIRHVMRGWGHFKKELGESVEILPASQRYSENWYQGTADAVFQNIDIIRHELPKYVMVLSGDHVYRMDYAGLLAAHAESGADMTVSCLEVPVAEAAGAFGVMEVDDEMRILGFEEKPKHPKHSPGNPEKCLASMGNYVFNTEFLFEQLKKDAQNANSDRDFGKDIIPSIIEKHKVFAYPFKSAFPNEQAYWRDVGTLDSFWQANMELLSPTPALNLYDAKWPIWTYQEQLPPAKFVFDDDDRRGMAVDSIISGGCIISGATVRRSVLFNEVRVCSYSVVEDSVVLPDVVVLRHCKIKNAIIDRGCIIPEGTVIGYNHDHDRAKGFRVSEKGITLVTRDMLGLPVGYE

SEQ ID NO: 132610 - protein, 270 aa, Unknown
  Bacterial polypetide isolated from the Sargasso Sea
MKRVLAIILGGGAGTRLYPLTKMRAKPAVPLAGKYRLIDIPVSNCINSGINKIYVLTQFNSASLNRHIAQTFNLSSGFDQGFVEVLAAQQTPDSPSWFEGTADAVRKYEWLLQEWDIDEVLILSGDQLYRMDYAHFVAQHRGSGADLTVAALPVDREQAQSFGLMHTDTEGSITKFREKPKGEALDEMAVDTERMGLSAEEAKRRPFLASMGIYVFKRDVLFRLLAENPGATDFGKEIIPKALSDGFNLRSYLFDDYWEDIGTIRAFYEA

SEQ ID NO: 132611 - protein, 330 aa, Unknown
  Bacterial polypetide isolated from the Sargasso Sea
GITDRFIDPIPAQMRMGKRWYDGTADAIYQNLRFIEISDPEHVCIFGSDHIYKMDVSQMVTFHKQKAAALTVAALRMPIEEASAFGVIEVDQEGRMIGFEEKPKRPKHIPGDPTQALVSMGNYIFETEALYRELKRDAAEENSSHDFGKDIIPSLFPRAPVYVYDYSTNVIPGEKPNVYWRDVGTLDSYWQAHMDLVADDAPFSLYNRKWPLHTHYPPLPPATFVDTDDCKVKIANSLISGGCFIQGSQIQRSILGFRCNVGPCSHISESVLLGDVKIGEGCSIRRAIIDKNVEIAPGTVIGENLDHDRERFTVSEGGIVVVPKGARVGY

SEQ ID NO: 132612 - protein, 321 aa, Unknown
  Bacterial polypetide isolated from the Sargasso Sea
WYEGTADAVFQNIDIIRDELPKYVMILSGDHIYRMDYGDMLAKHKESGAKMTVSCMSVPLEEAAGAFGVMSVDENYRINGFEEKPANPTPLPNDPTRCLASMGNYVFDTEFLFEQLRVDAENMGSQRDFGKDIIPSIIADHPVYAYPFEKSGGDNAYWRDVGTIDSFWEANMEMVAPVPQLNLYDRKWPIWTYQEQLPPAKFVWEDHDRRGEAINSVVSGGCIISGSTLRSSICFSNVRVHSYGLIEDAVILPDVEIKRHCKLKKVIIDRGCVIPEGTTIGYDHEQDKARGFRVSEKGVVLVTREMLGQPVGGLSKPRKHD

SEQ ID NO: 132613 - protein, 285 aa, Unknown
  Bacterial polypetide isolated from the Sargasso Sea
DHIYKMDYAAMLLDHVRLGAKVTVACIEVPRAEASAFGVMDIDEQRKIRAFVEKPANPPAMPGNENVSLASMGIYIFEAEYLYQLLEEDIHNQESKHDFGMDVIPRIVGEGKAFAHPFTMSCVGAKEGQKPYWRDVGTLDSFWEANMDLASVVPELDIYDENWPIWTSQTMTPPAKFVQDRNGQHGMTINSMFAGGSIVSGSFVLNSVLFTHVRVHSFCTLDQAIIFPGVEIGSGCRLRRVVVDKGCKLPDGLVVGENADEDSRRFYRSEQGIVLVTKEMLAKLG

SEQ ID NO: 132614 - protein, 33 aa, Unknown
  Bacterial polypetide isolated from the Sargasso Sea
MKNNAIYPGTFDPITFGHIDVIKKGLKIADTII

SEQ ID NO: 132615 - protein, 75 aa, Unknown
  Bacterial polypetide isolated from the Sargasso Sea
MRTAIYPGTFDPITLGHIDVIKKSLKIVDRVVIATTDNINKDYFFSIDERMSIIKKSLFNDLKLNKKKILVVSFD

SEQ ID NO: 132616 - protein, 94 aa, Unknown
  Bacterial polypetide isolated from the Sargasso Sea
MNKVAIYPGTFDPITYGHIDVIKKAIKLFDKIVIGVSNVSSKDYLFTSDERINIVNKALFNDLKLNRKKILVVSFNSLTTDLCKKYKSNIILRR

SEQ ID NO: 132617 - protein, 91 aa, Unknown
  Bacterial polypetide isolated from the Sargasso Sea
MKKAIYPGTFDPITFGHIDLIKKSLNIFDQVIVAVSDGKTKNYLFDAKEREDLIKKALFNDLKFSKKKIIVTSFKTLTTDFCKKMKSNVII

SEQ ID NO: 132618 - protein, 55 aa, Unknown
  Bacterial polypetide isolated from the Sargasso Sea
MKNIAIYPGTFDPITYGHIDVIKKGINLFDKLIVAVSEGGEKNHLFSTDDRINLS

SEQ ID NO: 132619 - protein, 85 aa, Unknown
  Bacterial polypetide isolated from the Sargasso Sea
MKTGIYPGTFDPITLGHIDVIKKSLKLVDRVVVATTDNINKEYYFSIEDRISIIKNSLFKDLKLNKKKIIVTSFESLTKDMCKKY

SEQ ID NO: 132620 - protein, 80 aa, Unknown
  Bacterial polypetide isolated from the Sargasso Sea
MDKIGIYPGTFDPLTFGHIDVIKRSLKIIDKLIIGIADNDNKTPLLSIEERKLIIDNDIKDYFNQNNKIIIKNIDGLLTD

SEQ ID NO: 132621 - protein, 226 aa, Unknown
  Bacterial polypetide isolated from the Sargasso Sea
MTSAIALSIDMLLPAFADLRSSFGMEPTSNLPGLTITCIFVGMAIGMPIYGPMADTYGRIPVLRAGIALFALGALGSTLAPNLAFLLASRVLWGIGCAAPRTISQAMIRDKFEGDDMARVMAIVQTIFFAGPVLAPVIGNLLVQAGGSWRLTMLFGLVIAIVIWLWSFRITESLDSANQRDLSFSATKQGLKVVFENRVTIGYAITLLFSGGAFYSFLSSSELIIS

SEQ ID NO: 132622 - protein, 307 aa, Unknown
  Bacterial polypetide isolated from the Sargasso Sea
ISVKRENLLGKGQSLSLSTQLAASKTAFSLSFTEPYFRGRDVAAGFDLFHIERDRQDVSSYDLKNTGAGVRTSFSLSEEVRQSWQYGYKVTDITKVAANASSLIKAQEGTRQISELGHVIVHDTRDSKLSPTIGNKVSMSNDLAGLGGDVSYFRNDLSGTNYYTPFKDWLIASHLRLGHILGISEDVQIPERFFLGGSTLRGFAEGGVGPRDKTTLDALGGEFIYNGYVETSMPIGLPADFAIRGRLFSDFGGVTGVSPSNANVVDDNTPRVSIGMGLGWVSPFGPISLDFAHPVKKEDLDQEEKFR

SEQ ID NO: 132623 - protein, 94 aa, Unknown
  Bacterial polypetide isolated from the Sargasso Sea
MKKTAIYPGTFDPITYGHIDVIQKSLKIFDKIIVAISNYNQKNNLFSIDERIDIVNKALFSDLRLNKNKIKVISFDSLTTDLYKKYKSNIILRG

SEQ ID NO: 132624 - protein, 53 aa, Unknown
  Bacterial polypetide isolated from the Sargasso Sea
MNKVAIYPGTFDPITFGHIDVIKKGLKIFDKIIVAVSNVDNKDYLFDTLERIE

SEQ ID NO: 132625 - protein, 79 aa, Unknown
  Bacterial polypetide isolated from the Sargasso Sea
MIGKIGLYPGTFDPITYGHIDVIRRALKIVSKLIIAVSNDYTKDYMFSSDERVEIIKNSLFNDLKINKKSIKVLSFNTL

SEQ ID NO: 132626 - protein, 34 aa, Unknown
  Bacterial polypetide isolated from the Sargasso Sea
MNKVAIYPGTFDPITFGHIDVIKKGLRLFNKIVV

SEQ ID NO: 132627 - protein, 70 aa, Unknown
  Bacterial polypetide isolated from the Sargasso Sea
MRTAIYPGTFDPITYGHIDVIKKSLKIFDRVVIAAAENINKDYLFSVDERIDIIKNSLIKDLKMNKKKIP

SEQ ID NO: 132628 - protein, 82 aa, Unknown
  Bacterial polypetide isolated from the Sargasso Sea
MKKTAIYPGTFDPITYGHIDVIHKSLKIVDKVIVGISNGSQKNYLFSIDERIEIVNKALFSDLRFNKNKIKVVSFNSLTTEL

SEQ ID NO: 132629 - protein, 84 aa, Unknown
  Bacterial polypetide isolated from the Sargasso Sea
GLRAMGQRDPLVEYQKEGYDLFEELIYNVKLSVVRLLLNFESSSIVKEEALKEKRTEKPSKNEKIGRNDPCHCGSGLKYKKCHG

SEQ ID NO: 132630 - protein, 138 aa, Unknown
  Bacterial polypetide isolated from the Sargasso Sea
QRGSDLFGEVLIAVLENPSKKATFSCERRIEQIENATKDIPGCRTIAFKGLTVDCARENNADLILRGLRAMSDFEYELQVAHTNRSLNNQYETIFLATETHHSFLSSSVVKEVARFGGEIRHMVPEFIAKDLMKLNTN

SEQ ID NO: 132631 - protein, 68 aa, Unknown
  Bacterial polypetide isolated from the Sargasso Sea
SDFEYELQIAHTNKSLNSKIETIFLSTNTNFSFLSSSLVKEVAKFGGEINHMVPEAVEHDLKDYFKNN

SEQ ID NO: 132632 - protein, 52 aa, Unknown
  Bacterial polypetide isolated from the Sargasso Sea
MRTAIYPGTFDPITLGHIDVINKSLKIVDRLIIAITDNVNKEYFFSLEKEFL

SEQ ID NO: 132633 - protein, 162 aa, Unknown
  Bacterial polypetide isolated from the Sargasso Sea
MKHKTVIYPGTFDPIHMGHIDIIERASRIFDEVIIAIAVNIDKNPLFSVEERIELAIDATSHIDNIKAYSTDGLIANFAKEHNACGLIRGLRHVSDFEFEFQMATMNNHLNPLVSTLLMVTSDKYVHLNSSMVKNVSKLNGDIEKYVPGNVLKALKQKFSHN

SEQ ID NO: 132634 - protein, 70 aa, Unknown
  Bacterial polypetide isolated from the Sargasso Sea
MKKIAIYPGTFDPITYGHIDVIKKSLKLVDKIFVAISESNEKKCLFSVEERISMVKASLFNDLNFKKSKI

SEQ ID NO: 132635 - protein, 58 aa, Unknown
  Bacterial polypetide isolated from the Sargasso Sea
MKRIIYPGTFDPIHNGHLDIAKRAAELFDELVLVVAVNKEKNPLFDNDERIHLIEECI

SEQ ID NO: 132636 - protein, 51 aa, Unknown
  Bacterial polypetide isolated from the Sargasso Sea
MKKSAIYPGTFDPITFGHIDVIKKGLKIFDKIIVAVSESNSKKCLFDSYER

SEQ ID NO: 132637 - protein, 75 aa, Unknown
  Bacterial polypetide isolated from the Sargasso Sea
MSKVAIYPGTFDPITFGHIDVIKKGLKLFDKIVVAVSNVENKDYLFDSDERIEIVKKALFYDLKLNKKKVVVISF

SEQ ID NO: 132638 - protein, 150 aa, Unknown
  Bacterial polypetide isolated from the Sargasso Sea
MKKAVFPGSFDPITIGHLDIVKRGTKIFDEIIIAIGDNTDKKYMFSKEKRVEFVERTFSAYDKIKVDSYQGLTVDFCKKNNIEFMIRGLRNPADFEFEKSIALTNREITGIETIFFLTSPENSFISSSIVRDLIINRGDYKLFIPKGIIL

SEQ ID NO: 132639 - protein, 97 aa, Unknown
  Bacterial polypetide isolated from the Sargasso Sea
MSRRIVIYPGTFDPLTFGHMDIIQRAARLGDELIVAVASSAGKGPLLSVEERTELVATETKRIFDDGTVTTPIRVLQFSNLLTDFAREQKASIIFEG

SEQ ID NO: 132640 - protein, 161 aa, Unknown
  Bacterial polypetide isolated from the Sargasso Sea
MQKKRVAIYPGTFDPVTFGHIDIMRRALKIFDHIIIAVALNPKKDPLFSLEKRVTFIKEATKNLKNLEVLPFDNLLINLAHSKKASVVIKGLRAISDFEFELQMGLMNRTLDEKIETLFMIPSQEFSFLSSNLVKETARHDGDVSKLVPKIVFKELKKKFK

SEQ ID NO: 132641 - protein, 73 aa, Unknown
  Bacterial polypetide isolated from the Sargasso Sea
MRKIIYPGTFDPIHNGHIDIASRASKLFDELEFVVAINSDKKPLFSIETRLELIKRSIEHIPNIKVSQFKGLV

SEQ ID NO: 132642 - protein, 64 aa, Unknown
  Bacterial polypetide isolated from the Sargasso Sea
MSKIAIYPGTFDPITYGHIDVIKKALKLFDKIVVGVSDVSNKNYLFSSEERIEIVNKALFKDLK

SEQ ID NO: 132643 - protein, 94 aa, Unknown
  Bacterial polypetide isolated from the Sargasso Sea
MKKIGIYPGTFDPITFGHIDVVKRSLKIVDKVIVAVSNDDTKNYLFSADERVELIKKSLFKDLSYKKNLIKVINFKTLTTSVCRKYKASAIFRG

SEQ ID NO: 132644 - protein, 47 aa, Unknown
  Bacterial polypetide isolated from the Sargasso Sea
MRRALFPGSFDPITNGHEDIIIRSLNLFDEIVIGVGINSEKKYMFFL

SEQ ID NO: 132645 - protein, 75 aa, Unknown
  Bacterial polypetide isolated from the Sargasso Sea
MSKIGIYPGTFDPITYGHIDVIKRSLKIVNKLIIAVSNDYLKDYLFSSEERVQIIKDSLFKDLKINSKNIKVTSF

SEQ ID NO: 132646 - protein, 67 aa, Unknown
  Bacterial polypetide isolated from the Sargasso Sea
MKKIGVYPGTFDPMTNGHLNIIKRSLKIVDQLIIGVADNLNKTPLLSSDERKNIILSDLSSEKLDNK

SEQ ID NO: 132647 - protein, 67 aa, Unknown
  Bacterial polypetide isolated from the Sargasso Sea
MKKIIYPGTFDPIHYGHIDIAKRASKLFDEVHICVSDNVQKDPMFSHDERVEMIEECFNDIDNIHVH

SEQ ID NO: 132648 - protein, 99 aa, Unknown
  Bacterial polypetide isolated from the Sargasso Sea
NKKKIIIISFTSLTTDLCKKFKSNIILRGLRAASDFEYEFQLAGMNRKLNKNIETLFLMSDVENQIISSRLVKEIVKLKGNIKKFTTKSTIKFIKKKYE

SEQ ID NO: 132649 - protein, 77 aa, Unknown
  Bacterial polypetide isolated from the Sargasso Sea
MKKVAIYPGTFDPITFGHIDVIKKGLRIFDKIVVAVSNVDNKDYLFDSDERIEIVKKALFSDLKLNKKKNIIISFTS

SEQ ID NO: 132650 - protein, 34 aa, Unknown
  Bacterial polypetide isolated from the Sargasso Sea
MKTILYPGTFDPITFGHIDLIKKALKIGDKLIVA

SEQ ID NO: 132651 - protein, 161 aa, Unknown
  Bacterial polypetide isolated from the Sargasso Sea
MANIFFPGTFDPITKGHEDLILRCVGLFSHLTVALTTNPDKTPLLSIEDRIELLQQSCKGINVTIEVFDGLLVDYVSSVKNPLIVRGVRSINDYIYEHDRAMMNQSLSNNLETIFLPSKPEFSSLSSTLVREIARLSGDLSSFVSPHVQEKLKHYGSQNNR

SEQ ID NO: 132652 - protein, 47 aa, Unknown
  Bacterial polypetide isolated from the Sargasso Sea
MAKALYPGTFDPITLGHIDIIERALHLFDEVTIAIATSASKKPIFTL

SEQ ID NO: 132653 - protein, 70 aa, Unknown
  Bacterial polypetide isolated from the Sargasso Sea
MNKVAIYPGTFDPITYGHIDVIQKALKLFDRIVVGVSNVNNKNYLFNSEERIDIVNKALFKDLKLSKKKM

SEQ ID NO: 132654 - protein, 87 aa, Unknown
  Bacterial polypetide isolated from the Sargasso Sea
MKKAIYPGTFDPITFGHIDLIKKSLNIFDKVIVAVSDGNTKNYLFSAQERENLIKKALFSDLKFSKKKIDVTSFKTLTTDFCRKMKS

SEQ ID NO: 132655 - protein, 48 aa, Unknown
  Bacterial polypetide isolated from the Sargasso Sea
MKNIAIYPGTFDPITFGHIDVIKKGVNLFDKLIVAVSEGGKKNHLFST

SEQ ID NO: 132656 - protein, 61 aa, Unknown
  Bacterial polypetide isolated from the Sargasso Sea
MNKIGIYPGTFDPMTAGHMDIIKRSLRIVDSLVIAVANNINKDSLFSVQERINIIKSEYQF

SEQ ID NO: 132657 - protein, 47 aa, Unknown
  Bacterial polypetide isolated from the Sargasso Sea
MREKIAVYPGTFDPFTFGHLDVVKRSSKLFDKIIVSVADNNNKKCSF

SEQ ID NO: 132658 - protein, 321 aa, Unknown
  Bacterial polypetide isolated from the Sargasso Sea
MSSNFKNLYTSNNPPLQATLIRGSNIESIHKIHAVITDKKGRVLMCAGNPEYKSFIRSALKPFQAIPFVSSGAASKINNESQSIALACGSHSGSKLHSREAFKILWEYDIDINNLKCPKTKTSPLEHNCSGKHAAFLATCKKMNWPLDSYLKGDHPLQIEIFRIVSELLEIPSSEINAERDDCGAPTLYLKLLEMSRLYSFLSSSDNAELEQISRSMILNPTMISDNNKFDTEIIKASHGNVISKGGAEGIQCLCKVNEGIGLALKVEDGSKRAKHAVSLHLLKQLEWISDLRIQDIEEKVFNFPDGVRLEVKGKVKFQES

SEQ ID NO: 132659 - protein, 154 aa, Unknown
  Bacterial polypetide isolated from the Sargasso Sea
MKILIPGSFDPPTNGHIDVITRCLKVFDEVLVGVIVNPSKESLFSTETRTEMLNEVFNENKNVTVKSFEGLLVDFAKENKVDAIVKGLRAMTDFDYELQMAQMNFNLADFETIFIPTSPEYGYVSSSLVKEIHSYGGDVNELVPKNVSKRLKDV

SEQ ID NO: 132660 - protein, 481 aa, Unknown
  Bacterial polypetide isolated from the Sargasso Sea
MVRAIESERIQSAITDTAVDAILTVDDKGIIKTANPAVERIYGYTQQEIIGMHAAEVVTPERRHLYGDDFFSQRVVPTEQIIGTGREVEVLRKDGERIPVRLGVGYTKIDGKPVFVSFASDLRKRKEMEDALRESEAKFRSLISNIPGMAYRCLNMPGWPMVFISDAVIEVTGYPPEDFTLPNPKRSFTDLYHPDDVERLSSISPEVGEFSYEYRIVAKSGEVKWVIEHGVQVKDDDGMVLYVDGFISDITHRKVMENELKAAKEKAEQAAAARTAFLANMSHEIRTPMNAIIGFSDLMLGEALREEQKSHLTTINRSARSLLHLLNDILDSAKLDKGKLDLDYRDFLIREELDLVISTFWLEAKRKKVGLVLNVDDSVANGYRGVPERMRQVLNNLIGNAVKFTHEGEVTINVKSDEKFVYFDVTDTGIGMTQEQVERVFDPFSPADASMSRKYGGTGLGTTISQQLVELMGGNICATSE

SEQ ID NO: 132661 - protein, 112 aa, Unknown
  Bacterial polypetide isolated from the Sargasso Sea
MRIVIYPGTFDPIHRGHIDIAERASKLFDQIIFSVAVNSEKNPLFSAEERIELILESTKHISNVKAYSTDGLIADFARQHNAVALIRGLRHVSDFEFEFQMATMNNHLNNNV

SEQ ID NO: 132662 - protein, 485 aa, Unknown
  Bacterial polypetide isolated from the Sargasso Sea
MGTGAELLDSEFIQGFSASLLDDYLNAKNYVQDVPTQSLLHIRSFTHRLTELLGQDKAVSFTSPNLYDRIELLNQKRLIDVKTTRALHRLRGDGNRGAHPEKYHLTQEQLLALAQKAIKDVLALIEHLYPKVLGRAAPAYRYQASDAVTIKDLCYRAVMEDDPNAQYLVGISFKTKALMLKEQELALADQSYGNEDENGPAVKEVAQKASDTFAKAAYWFALAAPKHADALYEHGVGLIHGYQGQADAIQGEAAIAKAAEAGVVNAMALLGYFYLVGSESFKPDLVQAKHYLQLAAEGEQTEAMANLGVLYYQAKDLTQAYHFINKAAQAGYPHAQYHLALMLANGDGCKRDPIISEYWMAEAAEQGQLDAMLTRAQHMLNDESGLGGDVSQAERYLREVIKYGHSVPAMIELSMALADGILGRIDVVGSAALLNLARRHANAKEAEIIEPLWQSLALQVDTVLEMTQDPGEIQTLKRAKTLLNT

SEQ ID NO: 132663 - protein, 72 aa, Unknown
  Bacterial polypetide isolated from the Sargasso Sea
MKKIAIYPGTFDPITYGHIDVIQKALKIFDNIVVAISDSKQKNQLFSIDERIDIVNRALFFDLKLKRSKIKI

SEQ ID NO: 132664 - protein, 44 aa, Unknown
  Bacterial polypetide isolated from the Sargasso Sea
MKRIIYPGTFDPIHYGHIDIARRASKLFDEVYMCVSDNQHKNPL

SEQ ID NO: 132665 - protein, 38 aa, Unknown
  Bacterial polypetide isolated from the Sargasso Sea
MSKIAIYPGTFDPITYGHIDVIKKALKLFDKIVVGVSD

SEQ ID NO: 132666 - protein, 163 aa, Unknown
  Bacterial polypetide isolated from the Sargasso Sea
MSIAIYPGTFDPITYGHIDVIKKSLKIFDKLIIAVAENINKDYLFSVEERVDIINQSLFKDLRLNKKKIKIISFNTLTINLCKKYKASVIVRGLRAASDFEYEYQLAGMNKKLNENIETIFLMSDVENQIISSRFVKEIAKLNGKISKFLTKTVEKKLKNKLE

SEQ ID NO: 132667 - protein, 159 aa, Unknown
  Bacterial polypetide isolated from the Sargasso Sea
MSRTGIYPGSFDPIHKGHIDIINRATKLVDKLYIAVADSPHKSPLFDLDERKEMIENEFSSNDKIEVIAFDNLLIDLANSLDAKILIRGLRVVSDFEYEFQMLGMNRQLDNNIETVFLMADAQRQSISSNFVKEIARLGGNISNFTNKFVEQKLKDKFK

SEQ ID NO: 132668 - protein, 96 aa, Unknown
  Bacterial polypetide isolated from the Sargasso Sea
MNDHQTITGIYPGTFDPVTFGHLDIVQRACNIMDKLIISVAENIHKKPFFTVDERVNMIHKSLNLIDTNKCLIEVVGFDNLLVDHAKNFDAKVIIR

SEQ ID NO: 132669 - protein, 66 aa, Unknown
  Bacterial polypetide isolated from the Sargasso Sea
MRKIIYPGTFDPIHNGHIDIASRASKLFDELEFVVAINSDKKPLFSIETRLELIKRSIEHIPNIKV

SEQ ID NO: 132670 - protein, 157 aa, Unknown
  Bacterial polypetide isolated from the Sargasso Sea
MKIAIFPGTFNPLTYGHINIAQRASSLFDEVIIAIAKKENEELLLTTKERLSISEDIFSEEKNITPIVFSGLVTDLAREKSSYFIIRGVRTIIDFDYESVMADMNKKLYPEIETVFLMPDEKFKNISSSLVREIAMLGGDISSFVPPSVKLALERKL

SEQ ID NO: 132671 - protein, 35 aa, Unknown
  Bacterial polypetide isolated from the Sargasso Sea
MKNIAIYPGTFDPITYGHIDVIRKSLKFIDKLIVG

SEQ ID NO: 132672 - protein, 58 aa, Unknown
  Bacterial polypetide isolated from the Sargasso Sea
MKIAIYPGTFDPITYGHIDVIRKSLNIFDKIIVATTDNSNKNYHFSIEDRISIINNSL

SEQ ID NO: 132673 - protein, 160 aa, Unknown
  Bacterial polypetide isolated from the Sargasso Sea
MTNAIFPGTFDPVTKGHLDIVERGAAIFDYVTVGVYEDSDKNTLFNIEERIEMFKSSSGHLSNVSVNSYKGLTVDFAKKNNSKVIIRGLRIGNDFEYERGMALINREINNDIETVCLISAMPNQFISSSRVKEIAMLGGDYKNFIPEKIYEFSKTKLMEA

SEQ ID NO: 132674 - protein, 71 aa, Unknown
  Bacterial polypetide isolated from the Sargasso Sea
MSKAIYPGTFDPLTLGHIDIVERALHIFDEVTIAIAVSEKRVPLFSLEERIDQIEKIFDNDKRIQAIGFSG

SEQ ID NO: 132675 - protein, 159 aa, Unknown
  Bacterial polypetide isolated from the Sargasso Sea
MNRTGIYPGSFDPIHKGHIDIINRATKLVDKLYIAVADSPHKKPLFNLDERKEMIDEEFSSNSIIEVIAFDNLLIDLANSLNAEILIRGLRVVSDFEYEFQMLGMNRQLDSKIETVFLMADAQRQSISSNFVKEIARLGGDISNFTNKFVESKLKDKYK

SEQ ID NO: 132676 - protein, 162 aa, Unknown
  Bacterial polypetide isolated from the Sargasso Sea
MKHKTVIYPGTFDPIHMGHIDIIERASRIFDEVIIAIAVNIDKNPLFSVDERIELVINATEHVDNIKAFSTDGLIADFAKEYNACGLIRGLRHVSDFEFEFQMATMNNHLNPSVSTLLMVTSDKYVHLNSSMVKNVSKLNGDIGKYVPDNVLNALKQKFSHN

SEQ ID NO: 132677 - protein, 115 aa, Unknown
  Bacterial polypetide isolated from the Sargasso Sea
MAIAIYPGSFDPIHLGHVRIVENAATIFDQVIVVAMQNREKKGFLSIEKRQELLKTSFGHLNNVVTDSSTGLVVDVAKALNAEVIIKGLRSSADFEIEMQMAQTNKKISAINTVF

SEQ ID NO: 132678 - protein, 491 aa, Unknown
  Bacterial polypetide isolated from the Sargasso Sea
MGTEAELLDSEFIQGFSASLLDDYLNAKNYVQDVPTQSLLHIRSFTHRLTDLLGQSKAVSFASPNLYDRIELLNQKRLIDVKTTRALHRLRADGNRGAHPEKYHLTQEQLLALAQKAIKDVLALVEHLYPKVVGCEAPAYRFQASDAITVKDLCYRAVMEDDPNAQYLVGISFKTKALMLKEQELALVDQYYGTEDDSPVVKAVAQKASDTFAKAAYWFALAAQTHMQALYEHGVSLIHGYQGEADAIKGEAAIATAAEAGVVNAMALLGYFYLVGSESFKPDLAQAKHFLQLAAEGEQTEAMANLGVLYYQTKDLPQAYHFISKAAQAGYPHAQYHLALMLANGDGCQRDPIASEYWMAEAAEQGQLDAMLTRAQHMLNDESGLGGDVSQAERYLREVIKYAHSVPAMIELSMALADGILGRIDVVGSAALLNLARRHANSKEAEIIEPLWQSLILQIDTVMKITQDPGEIHTLNRAKDLLSAEDYSSSF

SEQ ID NO: 132679 - protein, 119 aa, Unknown
  Bacterial polypetide isolated from the Sargasso Sea
MVTALYPGTFDPITVGHLDIAERAAALFEKLIIGVYKLPDKNLLFSTDERVALFEEAVKDIPNVEVRVFDGLVVRFAKDIGASVIVRGLRSGTDFEYEFDMTFMNRRLEPDVDVVCLMT

SEQ ID NO: 132680 - protein, 57 aa, Unknown
  Bacterial polypetide isolated from the Sargasso Sea
MNKIGIYPGTFDPMTYGHMDIVKRSLKIVDNLVIAVANNINKDSLFDINERINIIKT

SEQ ID NO: 132681 - protein, 107 aa, Unknown
  Bacterial polypetide isolated from the Sargasso Sea
ISDIFKDNSKIEAIGYSKQLTVDLARDNNATAIIRGLRAVADFEYEFQLATMNRSLAPDIESIFFTPKDTLIYVSSSLVKEIATFGGDVSRFVPENVKVALENKIAG

SEQ ID NO: 132682 - protein, 166 aa, Unknown
  Bacterial polypetide isolated from the Sargasso Sea
MRIGLYPGTFDPITLGHIDIIRRASLLVDRLVIGVAINSDKLPLFDLEDRVSMLEEECNYLSGQTGTEIVVHPFENLLIDCAHDVGAQVIVRGLRAVADFEYEFQMVGMNRSLDNSIETVFLMAEAKHQAIASKLVKEIARLNGDISKFVTPHVAKRLLNKLEVSN

SEQ ID NO: 132683 - protein, 83 aa, Unknown
  Bacterial polypetide isolated from the Sargasso Sea
MIALYPGTFDPITNGHFEIIRRASTIFQVLVVGVAISDEKKPLFEHEKRLAMVNEVLNAFSNIEVQPYDGLTIDFAKKLMQES

SEQ ID NO: 132684 - protein, 163 aa, Unknown
  Bacterial polypetide isolated from the Sargasso Sea
MRALYPGSFDPLTNGHMDLIERAAALFGQVTVAVLSNPNKKPAFSVDQRIEQIRNATRHLNGIDVVSFDGLTVHCAATHQADLILRGLRAMSDFEYELQIAHTNRSLAADLETVFLATSTRHSFLSSSVVKEVARFGGPVDHMVPKEVAKDLNRLFNSAFPPR

SEQ ID NO: 132685 - protein, 104 aa, Unknown
  Bacterial polypetide isolated from the Sargasso Sea
KDLNFSKKNIRVIRFNSLTTELCKKHKSNLILRGLRAVSDFEYEFQLAGMNRKLNDKVETIFLMSDVENQIISSRFVKEIAYHKGDLRKFTTKSTIKSLKGKYA

SEQ ID NO: 132686 - protein, 158 aa, Unknown
  Bacterial polypetide isolated from the Sargasso Sea
MIALYPGTFDPITNGHFEIIRRASTVFQVLIVGVAVSEDKAPLFDHDKRLTMVSEVLNGFSNIEVQPYDGLTIDFAKQIEARVIVRGLRSPADGQYEFELASMNKKLADDIETVFLSSGDQNAFISSSLIRQIAQEGGDVSDFVHPVVHQALSETYKK

SEQ ID NO: 132687 - protein, 158 aa, Unknown
  Bacterial polypetide isolated from the Sargasso Sea
MYPGTFDPMTLGHKELASRAAKIFDSVVVAIAANPEKNPMFSLHERVSMAEDVLSDISNIEVAEYSGLTVDFAIENGIGVIVRGLRAASDFEYELQLANMNRYLANKIETAFLTPTEYAFVTSSLVREIATMGGNVSSFVSPAVEKALVNHFKKNNPS

SEQ ID NO: 132688 - protein, 161 aa, Unknown
  Bacterial polypetide isolated from the Sargasso Sea
MTKAIFPGTFDPITKGHLDIVERGAEIFEHVYVAVYESAEKETLFDKNERVEMFKLSTQHLKNISITSYKGLTVDFAVSVKAKAIIRGLRIGQDFEYERGMALVNREINNGIETVCLISAMPNQFISSSRVKEIAGLGGEFNSFIPEKIYQQAKNKLKGEK

SEQ ID NO: 132689 - protein, 161 aa, Unknown
  Bacterial polypetide isolated from the Sargasso Sea
MKTKAIYPGTFDPLTNGHSDLVQRASRLFDQVIVAVASNPSKQPLFTLAERVQLAEQCFADIPNVTVVGFSGLLADFAKNNQAQVLLRGVRAVADFEYEFQLASMNRQLNPDLDSLFMTPSEKNTFISSTLVKEVARHGGDVSRFVASHVEQALKRKFAAV

SEQ ID NO: 132690 - protein, 167 aa, Unknown
  Bacterial polypetide isolated from the Sargasso Sea
MTKKIALYPGTFDPFTYGHLDIIKRAIKIVDTVYVGIAHNKNKKTLFNIKEREEIIIKTLKLLPKQSRKKIKTVNFSGLTINFCKKINSNILIRGLRVVADFEYEFQLAGMNNNLNKNVQTIFLMADIQNQAISSNMVKEIAYLGGDVAKFVPKPVLLLLKKKFKKI

SEQ ID NO: 132691 - protein, 158 aa, Unknown
  Bacterial polypetide isolated from the Sargasso Sea
MIALYPGTFDPITNGHFEIIRRASTIFQVLVVGVAISDEKKPLFKHEKRLAMVNEVLNAFSNIEVQPYDGLTIDFAKKIDARVIVRGLRSPADGQYEFELASMNKKLADDIETVFLSSGDQNAFISSSLIRQIAQEGGDISDFVHPVVHQNLSEAYKK

SEQ ID NO: 132692 - protein, 131 aa, Unknown
  Bacterial polypetide isolated from the Sargasso Sea
VAVSDGENKDYLFEVHERIDIVKKALFYDLKLSQKKISVISFSSLTTDLCKKYKSNIILRGLRAVSDFEYEFQLAGMNRKLNNDIETLFLMSDVENQIISSRFVKEIVKLGGNIKKFTTKSTIKSLKKKYD

SEQ ID NO: 132693 - protein, 89 aa, Unknown
  Bacterial polypetide isolated from the Sargasso Sea
LVDHARKSKAKVIIRGLRAVADFDYEFQMAGMNSKLAPEIETIFLMASENLQLTSARFVKEIANYKGNIERFVPKNVIKMFDLKEKEIK

SEQ ID NO: 132694 - protein, 101 aa, Unknown
  Bacterial polypetide isolated from the Sargasso Sea
RLNRKKIKVVSFGSLTTDLCKKYKSNIILRGLRAVSDFEYEFQLAGMNRKLNQKIETIFLMSDVENQIISSRLVKDIVKLKGDIKKFTTKSTIKSLKDKYE

SEQ ID NO: 132695 - protein, 48 aa, Unknown
  Bacterial polypetide isolated from the Sargasso Sea
MKIAIYPGSFDPITFGHIDIVERASTLFDKVILGVAESQSKKSSFLLF

SEQ ID NO: 132696 - protein, 117 aa, Unknown
  Bacterial polypetide isolated from the Sargasso Sea
MKKTAIYPGTFDPITYGHIDVIQKSLKIVDKLIVAISDSNQKNYLFTIDERIEIVNKALFSDLKFIKNKIKVISFNSLTTDLCKKYKSNIILRGLRAASDFEYEFQLAGMNRKLNNN

SEQ ID NO: 132697 - protein, 118 aa, Unknown
  Bacterial polypetide isolated from the Sargasso Sea
MKIKAIYPGTFDPITAGHEDLVKRASNIFESVIVAVASNTQKNTLFSYDERYDMCRKVLSKYKNVDVIKLDKLTVEHAKELEAKVMLRGLRAVSDFEYEVQLSNLNRAMNPGIESIFL

SEQ ID NO: 132698 - protein, 98 aa, Unknown
  Bacterial polypetide isolated from the Sargasso Sea
MKNIAIYPGTFDPITYGHIDVIKKGLKFLDIIIIAISNDNQKNYLFDVYERSQIVNKALFSDMKFKSNRIKIVNFNSLTTDLCKKYKSKIILRGLRAV

SEQ ID NO: 132699 - protein, 159 aa, Unknown
  Bacterial polypetide isolated from the Sargasso Sea
MRKIIYPGTFDPIHNGHIDIANRVSMLFDELEFVVAVNSEKKPLFSIETRLDLIKESVKHIKNVKVSQFQGLVVDHADKTGSIAIIRGLRHVSDFEFEFQMAMMNFHLNPNITSLFMMPDEKFIHLNSTVVKDVSKNGGDISEFVPACVKEALFTKFSN

SEQ ID NO: 132700 - protein, 114 aa, Unknown
  Bacterial polypetide isolated from the Sargasso Sea
RYKIVSKALYGDLKFSKKKIQVIKFNSLTTSLCKKYKSNLILRGLRAVSDFEYEFQLAGMNRKLNNKIETVFLMSDVENQIISSRFVKEIALHKGDLRKFTTKSTIKSLRNIYA

SEQ ID NO: 132701 - protein, 55 aa, Unknown
  Bacterial polypetide isolated from the Sargasso Sea
TNKSLNNDIETIFLSTNTNYSFLSSSLVKEVAKFGGKINHMVPPSVERDLKEYFK

SEQ ID NO: 132702 - protein, 158 aa, Unknown
  Bacterial polypetide isolated from the Sargasso Sea
MIALYPGTFDPITNGHFEIIRRASTIFQVLVVGVAISDEKKPLFEHEKRLAMVNEVLNAFSNIEVQPYDGLTIDFAKKIDARVIVRGLRSPADGQYEFELASMNKKLADDIETVFLSSGDQNAFLSSSLIRQIAQEGGDISDFVHPVVHQNLSEIYKK

SEQ ID NO: 132703 - protein, 98 aa, Unknown
  Bacterial polypetide isolated from the Sargasso Sea
MKKVIYPGTFDPIHNGHINIATRASKLFDELEFVVAVNAEKTPLFSVEKRLELIQDSVKHLDNVKVSEFKGLVVDHADNTGAHAIIRGLRHVSDFEFE

SEQ ID NO: 132704 - protein, 124 aa, Unknown
  Bacterial polypetide isolated from the Sargasso Sea
MKKTAIYPGTFDPITYGHIDVIQKSLKIVDKIIVGISDSNQKKYLFSIDERMEIVRKALFFDLKFNKNKIKVISFNSLTTDLCKKYKSNIILRGLRAASDFEYEFQLAGMNRKLNNNIETIFLM

SEQ ID NO: 132705 - protein, 109 aa, Unknown
  Bacterial polypetide isolated from the Sargasso Sea
MIALYPGTFDPITNGHFEIIRRASTIFQVLVVGVAISDEKKPLFEHEKRLAMVNEVLNAFSNIEVQPYDGLTIDFAKQIDARVIVRGLRSPADGQYEFELASMNKKLAD

SEQ ID NO: 132706 - protein, 136 aa, Unknown
  Bacterial polypetide isolated from the Sargasso Sea
FDKVVVGVSDESNKNYLFSSEERIEIVNKALFKDLKLNRKKIKVVSFGSLTTDLCKKYKSNIILRGLRAVSDFEYEFQLAGMNRKLNQNIETIFLMSDVENQIISSRFVKEIVKLKGDIKKFTTKSTIKSLKDKYE

SEQ ID NO: 132707 - protein, 146 aa, Unknown
  Bacterial polypetide isolated from the Sargasso Sea
MDIIKRALKIFDEVVIAVVKNSSKKLLFSLDERKAIIDEVYKTEKNIICISLDSKLSVELANEINALAIIRGLRAMSDFEYEFQIASINRSQNKKIESVFFAAQDKLTFVSSSMVKEIAQYKGKISKFVDPIVEKILEEKIKSSGT

SEQ ID NO: 132708 - protein, 163 aa, Unknown
  Bacterial polypetide isolated from the Sargasso Sea
MRALYPGSFDPLTNGHMDLIERALALFGQVTVAVLSNPNKKPAFSVDQRIGQIQSATRHLKGIDVVSFDGLTVHCAVTHQADLILRGLRAMSDFEYELQIAHTNRSLAEDLETVFLATSTRHSFLSSSVVKEVARFGGPVDHMVPKEVAKDLNRLFNSAFPPR

SEQ ID NO: 132709 - protein, 104 aa, Unknown
  Bacterial polypetide isolated from the Sargasso Sea
MKKNAIYPGTFDPITYGHIDVIQKSLKIIDKIIVAISDGNQKNYLFSIDERIEIVNKALFSDLKFNKNKIKVISFNSLTTDLCKKYKSKIILRGLRAASDFEYE

SEQ ID NO: 132710 - protein, 135 aa, Unknown
  Bacterial polypetide isolated from the Sargasso Sea
DTVIVAISEFSNKNYLFDSSERLEIVKKALFKDLKLSNKKVKVITFNSLTTSLCRKMNSKIILRGLRAVSDFEYEYQLAGMNKKLNNKIETIFLMSDIENQIISSNFVKEIIELGGDIRKFTTPSTIKALKNKYA

SEQ ID NO: 132711 - protein, 55 aa, Unknown
  Bacterial polypetide isolated from the Sargasso Sea
MNKKIVIYPGTFDPMHMGHLDIIERASRIFDEVIIAIAVNINKNPLFSIQERINL

SEQ ID NO: 132712 - protein, 33 aa, Unknown
  Bacterial polypetide isolated from the Sargasso Sea
MKILYPGTFDPLTNGHLDLIERAEKIFGNLVVA

SEQ ID NO: 132713 - protein, 167 aa, Unknown
  Bacterial polypetide isolated from the Sargasso Sea
MKQSIKSAVYPGTFDPFTLGHLDVVIRASRIFDKVIIAVAENDSKNPLFSVNERTDIIQQVIKEKKGDIKLDSIKVKSFFGLLVDFVEKENASAVLRGLRALSDFDYEFQMAGVNARLSDKFETVFLMASENQQFVASRLVKEIHSLGGDVSSFVPHLVLKELESKK

SEQ ID NO: 132714 - protein, 72 aa, Unknown
  Bacterial polypetide isolated from the Sargasso Sea
RGLRAVSDFEYEFQLAGMNRQLNNRIETVFLMSDPDKQVISSRFVKEIAKLKGKIDDFVTKSTKRSIKEKYD

SEQ ID NO: 132715 - protein, 81 aa, Unknown
  Bacterial polypetide isolated from the Sargasso Sea
DNDANILIRGLRVVADFEYEFQLANMNRAMSPDIESVFLTPKEEYSYISSSLVKEIATMGGDVTRFVDPVTLDALNQKIKN

SEQ ID NO: 132716 - protein, 137 aa, Unknown
  Bacterial polypetide isolated from the Sargasso Sea
LNVVDELIIAVSNNKSKEHLISVDDRLELINQSIQSLPKEDLNKIKVEKFDNLLVHYVKSKNASLIIRGLRAVSDFEYEFLMTGMNRTIDKEIETIFLMSSEKYHFISSRFIKEIHKLGGDISKSVPKPVLDFLSKI

SEQ ID NO: 132717 - protein, 98 aa, Unknown
  Bacterial polypetide isolated from the Sargasso Sea
MSKIGVYPGTFDPMTNGHLNIIERALRVVDKLIIGIADNLNKKPLLSIDERKSIIENDILYLQQNNKKIEIYTVNGLLTEFAKKCNADCIIRGLRAVS

SEQ ID NO: 132718 - protein, 82 aa, Unknown
  Bacterial polypetide isolated from the Sargasso Sea
REQNAQVVLRGLRAVSDFEYEFQLAAMNRRLDPKIETMFLTPSEHFTFLSASMVKEIATHGGDVSQFLHPEVNDRLIQRLRG

SEQ ID NO: 132719 - protein, 143 aa, Unknown
  Bacterial polypetide isolated from the Sargasso Sea
IKKALKLADKIIVGISNGNQKNFLFPIDERYKIVSKALYNDLKFPKNKIQVVKFNSLTTELCKKYKSNLILRGLRAVSDFEYEFQLAGMNRKLNNKVETVFLMSDVENQIISSRFVKEIAIHKGDLRKFTTKSTIKSLKKIYA

SEQ ID NO: 132720 - protein, 53 aa, Unknown
  Bacterial polypetide isolated from the Sargasso Sea
MTKKIGIYPGTFDPLTFGHLDIIKRSLLIVDKLIIGVANNLNKVSMLSIVDRK

SEQ ID NO: 132721 - protein, 29 aa, Unknown
  Bacterial polypetide isolated from the Sargasso Sea
MTHTVVYPGTFDPITNGHIDLVERAAKLF

SEQ ID NO: 132722 - protein, 85 aa, Unknown
  Bacterial polypetide isolated from the Sargasso Sea
TSLCNKHKSNIILRGLRAVSDFEYEFQLAGMNRKLNKNIETVFVMSDVANQIISSRFVKEIAELNGDIKKFTTKSTIKALKNKLI

SEQ ID NO: 132723 - protein, 161 aa, Unknown
  Bacterial polypetide isolated from the Sargasso Sea
MKKIIYPGTFDPIHYGHIDIARRASKLFDEVYMCVSDNQYKNPLFTHEERVEMIEECTSDLKNVSAFSNPNNLVVKFAQDKGAIAIIRGLRHVSDFELEFQMANVNHGLNSEVSTILMVSNEKFLHLNSSIIRELAEYNTDLSKFVPKNVEKRLMEKLKGM

SEQ ID NO: 132724 - protein, 92 aa, Unknown
  Bacterial polypetide isolated from the Sargasso Sea
MRIGLYPGTFDPITNGHIDIISRAAALVDRLVIGVAINRDKGPLFSLEERVTMIQPVIAEIAERTGTEIVAHPFENLLIHCAHDVGANVIVR

SEQ ID NO: 132725 - protein, 159 aa, Unknown
  Bacterial polypetide isolated from the Sargasso Sea
MKKIIYPGTFDPIHNGHIDIATRASKLFNELEFVVAINAEKTPLFSIEKRLELIQDSVKHLDNVKVSEFKGLVVDHAVSTGANAIIRGLRHVSDFEFEFQMAMMNFHLNNSITSLFMMPDEKFIHLNSTVVKDVSKNGGDVSAFVPPSVEKALFNKFFS

SEQ ID NO: 132726 - protein, 72 aa, Unknown
  Bacterial polypetide isolated from the Sargasso Sea
MKVAIYPGSFDPITFGHMDIIDRACGLFDKIIIAIAKNEAKNPLFNLEDRIKLAKEIYKDNSQVEVVGFPRQ

SEQ ID NO: 132727 - protein, 111 aa, Unknown
  Bacterial polypetide isolated from the Sargasso Sea
MTVKIAVYPGTFDPFTFGHLDVVKRSSKLFDKIIVSVAENNNKSALFNLDERIKIISDVISNEKDLDKIEIRGFKGLLVDHVIDVGAVAVLRGLRALSDFEYEFQMAGINT

SEQ ID NO: 132728 - protein, 137 aa, Unknown
  Bacterial polypetide isolated from the Sargasso Sea
IVDKIIVGISDGNEKNFLFPIDERLKIVSKALYVDLKLPKNKVKVIKFNSLTTKLCKKYKSNLILRGLRAVSDFEYEFQLAGMNRKLNNKVETVFLMSDVENQIISSRFVKEIALHKGDLRKFTTKSTIKSLKEVYA

SEQ ID NO: 132729 - protein, 111 aa, Unknown
  Bacterial polypetide isolated from the Sargasso Sea
IVSRALYNDLKFSKNKIHVIRFNSLTTELCKKYKSNLILRGLRAVSDFEYEFQLAGMNRKLNNKVETVFLMSDVENQIISSRFVKEIAMHNGDLRKFTTKSTIKSLKKIYA

SEQ ID NO: 132730 - protein, 147 aa, Unknown
  Bacterial polypetide isolated from the Sargasso Sea
FNPITNGHTDLVERAAGLFDKIIVAVGTNTQKGKGLQATRRVALATEVLKEIDNVEVVSFDGLLTDFVRAQGANIILRGLRTVADFEYEFQLVGMNRALNPEIETVFLAPAEHLSYISSTLVREIAFFGGDISKFVHPVVADAILKT

SEQ ID NO: 132731 - protein, 135 aa, Unknown
  Bacterial polypetide isolated from the Sargasso Sea
FDKLIVAVSEGGEKNHLFSTDERINLVKNSLHKDMRISSKKIQIIKFSSLTTTLCQKYKSNIILRGLRAVSDFEYEFQLAGMNRMLNAKIETIFLMSDVDNQVISSRLVKEIANLKGDLKKFITKSVIKEIKKKV

SEQ ID NO: 132732 - protein, 115 aa, Unknown
  Bacterial polypetide isolated from the Sargasso Sea
EERVDIVKKAIYKDLKISKKNVQVMSFNTLTTSLCKKLNAKIIFRGLRAVSDFEYEFQLAGMNRQLNNKVETVFLMSDVEKQVISSKFVKEIASLGGNIDNFVTKSTNRAIKMKI

SEQ ID NO: 132733 - protein, 164 aa, Unknown
  Bacterial polypetide isolated from the Sargasso Sea
MKSTAIYPGTFDPITYGHIDVIKKSLKIFDRVIVAAAENINKDYLFSVDERVENIKDSLFKDLKLNRNKIFVIPFNTLTINLCKKYKASVIIRGLRVVSDFEYEFQLAGMNKKLDEKIETIFMMSDVENQIISSKFVKEIAKLDGKIDKFLTKSIVKRIKNKLE

SEQ ID NO: 132734 - protein, 172 aa, Unknown
  Bacterial polypetide isolated from the Sargasso Sea
MSQKVIIYPGTFDPLTYGHIDIIERGANLGDQLIVAVSLNSGKQPLFTMEERTALVMTEVEQINVKQKATPPVLVKSFSGLLTDFATEQKATAILRGLRAVADFEYEFQMASINKRLHGELETIFLMAAEQQHFVASRFVKEIALFNGDVSSFVPTNVANALQRKMQGRSAL

SEQ ID NO: 132735 - protein, 72 aa, Unknown
  Bacterial polypetide isolated from the Sargasso Sea
IRGLRAVSDFEYEFQLAGMNKKLNSNIETMFLMSDVENQIISSKFVKEITKLNGNINKFVTKSTVKMLKKKF

SEQ ID NO: 132736 - protein, 106 aa, Unknown
  Bacterial polypetide isolated from the Sargasso Sea
LYADLKLPKNKIQVIKFNSLTTELCKKYKSNLILRGLRAVSDFEYEFQLAGMNRKLNNKVETIFLMSDVENQIISSRFVKEIALHKGDLRKFTTKSTIKSLKEAYA

SEQ ID NO: 132737 - protein, 84 aa, Unknown
  Bacterial polypetide isolated from the Sargasso Sea
AKKFNADCIIEGLRAVSDFEYDFQMTGMTIKLNPEIETIFLMSADNNSFISSNLVKEVHKLGGDVSKFVSENTIKILNNKNTSS

SEQ ID NO: 132738 - protein, 65 aa, Unknown
  Bacterial polypetide isolated from the Sargasso Sea
MIALYPGTFDPITNGHFEIIRRASTIFQVLVVGVAISDEKKPLFEHEKRLAMVNEVLNAFSNIEV

SEQ ID NO: 132739 - protein, 120 aa, Unknown
  Bacterial polypetide isolated from the Sargasso Sea
LFNSNERIDIVNKALFKDLKLNRKKILVVSFSSLTTDLCKKYKSNVILRGLRAVSDFEYEFQLAGMNRKLNNNIETIFLMSDVENQIISSKFVKEIVKLNGDIKKFTTKSTIKSLKEKYE

SEQ ID NO: 132740 - protein, 164 aa, Unknown
  Bacterial polypetide isolated from the Sargasso Sea
MNKVAIYPGTFDPITFGHIDVIKKGLKLFNKIVVAVSDVDNKDYLFDSDERIEIVKKALFSDLKLNKKKILIISFSSLTTDLCKKYKSNIILRGLRAASDFEYEFQLAGMNRKLNSNIETVFLMSDVENQIISSKFVKEIVKLKGNIKKFTTKNTIKLLKKKYE

SEQ ID NO: 132741 - protein, 37 aa, Unknown
  Bacterial polypetide isolated from the Sargasso Sea
MTVANRRIAVYPGTFDPITNGHIDLVSRAAPLFEKVV

SEQ ID NO: 132742 - protein, 99 aa, Unknown
  Bacterial polypetide isolated from the Sargasso Sea
PKNKIKVIKFNSLTTKLCKKYKSNLILRGLRAVSDFEYEFQLAGMNRKLNNKVETVFLMSDVENQIISSRFVKEIALHKGDLKKFTTKSTIKSLKEVYA

SEQ ID NO: 132743 - protein, 97 aa, Unknown
  Bacterial polypetide isolated from the Sargasso Sea
MKTAVYPGTFDPITYGHIDVIKKSLKIFDRIVVATTDNTDKNYFFSIEERLNIINHSLFKDLKLSKNKIKVISFDNLTIELCKKYSASAIIRGLRAV

SEQ ID NO: 132744 - protein, 34 aa, Unknown
  Bacterial polypetide isolated from the Sargasso Sea
MKVAIYPGSFDPITFGHIDIVERAASLFDQVVIG

SEQ ID NO: 132745 - protein, 89 aa, Unknown
  Bacterial polypetide isolated from the Sargasso Sea
KSLTTDLCKKNNSKVILRGLRAVSDFEYEFQLAGMNRKLNNSIETIFLMSDVENQIISSKFVKEIISLGGNVNKFTTKSTIKALKKKYA

SEQ ID NO: 132746 - protein, 120 aa, Unknown
  Bacterial polypetide isolated from the Sargasso Sea
SKNTVFSTEERVQLSSEILAPWDNVEVKSFSGLMVDFAKENGATVVLRGLRAVTDFEYEFQLAGMNRKLMPETDTVFLPTSEKYTYISSSLVREIASLGGDISDFVHPKIKEVLTARLGK

SEQ ID NO: 132747 - protein, 78 aa, Unknown
  Bacterial polypetide isolated from the Sargasso Sea
AVAIIRGLRAVADLKYEFKLATMNRTLAPDIESIFFTPKDTLIYVSSSLVKEIAAFGGDISRFVPPNVETALINKIGN

SEQ ID NO: 132748 - protein, 164 aa, Unknown
  Bacterial polypetide isolated from the Sargasso Sea
MKKTAIYPGTFDPITFGHIDVIQKSLKIVEKIIVAISDSNNKNYLFSVEERIEIVNKALFSDLKFNRNKISIVSFNSLTTDLCKKYKSNIILRGLRAASDFEYEFQLAGMNRKLDNNIETIFLMSDVKNQIISSRLIKEIIELKGDIKKFTTKSTINSLKKKYE

SEQ ID NO: 132749 - protein, 136 aa, Unknown
  Bacterial polypetide isolated from the Sargasso Sea
VSKLIVAVSNDYTKDYLFSSDERVTIIKNSLFKDLKLNKNRIKVLSFNTLTTSLCLKYNATIIFRGLRAVSDFEYEFQLAGMNRQLNKKIETVFLMSDPDRQVISSKFVKEIAKLNGKIDDFVTKSTKKSLKEKYE

SEQ ID NO: 132750 - protein, 94 aa, Unknown
  Bacterial polypetide isolated from the Sargasso Sea
TVVSFSSLTTDLCKRYKSNIILRGLRAVSDFEYEFQLAGMNRKLNQNIETIFLMSDVENQIISSRFVKEIVKLNGDIKKFTTKSTIKSLKEKYE

SEQ ID NO: 132751 - protein, 60 aa, Unknown
  Bacterial polypetide isolated from the Sargasso Sea
MKVAIYPGSFDPITYGHMDIIDRASGLFDKIVIAIAKSESKNPLFSLEDRIKLVKNIFSR

SEQ ID NO: 132752 - protein, 159 aa, Unknown
  Bacterial polypetide isolated from the Sargasso Sea
MRALYPGSFDPLTNGHMDLIERAVALFGQVTVAVLSNPNKKPAFSVDQRIGQIQSATCHLNSIDVVSFDGLTVHCAVTHQADLILRGLRAMSDFEYELQIAHTNRSLAEDLETVFLATSTRHSFLSSSVVKEVARFGGPVDHMVPKEVAKDLNRLFNSA

SEQ ID NO: 132753 - protein, 114 aa, Unknown
  Bacterial polypetide isolated from the Sargasso Sea
RLKIVSKALFNDLKLPKKKIQVIKFNSLTTELCKKYKSNLILRGLRAVSDFEYEFQLAGMNRKLNSNVETVFLMSDVENQIISSRFVKEIANHKGDLRKFTTKSTIKSLKKIYA

SEQ ID NO: 132754 - protein, 121 aa, Unknown
  Bacterial polypetide isolated from the Sargasso Sea
MIALYPGTFDPITNGHFEIIRRASTIFQILVVGVAISDEKKPLFKHEKRLAMVNEVLNAFSNIEVQPYDGLTIDFAKKIDARVIVRGLRSPADGQYEFELASMNKKLADDIETVFLSSGDQ

SEQ ID NO: 132755 - protein, 152 aa, Unknown
  Bacterial polypetide isolated from the Sargasso Sea
MNKIIYPGTFDPIHNGHINIAKRAITIFDELEFVVAINVDKNPLFTIEERLDLIDESTKYIENISVSNFSGLVVDHAANVGATSIIRGLRHVSDFEFEFQMAMMNFHLNKNITSIFMMPDEKYIHLNSSVVKDVSKNGGDDSAFVPSCVQEA

SEQ ID NO: 132756 - protein, 164 aa, Unknown
  Bacterial polypetide isolated from the Sargasso Sea
MKKTAIYPGTFDPITFGHIDLIQKSLKIVDKIIVAISDSNQKEYLFTSEERIQIVNKALFSDLRFDKKKIKVISFNSLTTDLCKKYNSNIILRGLRAASDFEHEFQLAGMNRKLNNKIETIFLMSDFKNQVISSRLIKEIIELKGDIRKFTTKSTIISLKKKYE

SEQ ID NO: 132757 - protein, 138 aa, Unknown
  Bacterial polypetide isolated from the Sargasso Sea
DRLVVGVASNIDKKPLFSVEERVEMIRVQVEKFNENLNTNIVIHQFENLLIDCAKDVGAAVIFRGLRAVSDFEYEFQMVGMNRALNDKIETVFLMADVSHQAIASKLVKEISRLGGNIDRFVPEEVASIMHKIYKLKK

SEQ ID NO: 132758 - protein, 158 aa, Unknown
  Bacterial polypetide isolated from the Sargasso Sea
MIALYPGTFDPITNGHFEIIRRASTIFQVLVVGVAVSDEKKPLFEHEKRLAMVNEVLNAFSNIEVQPYDGLTIDFAKKIDARVIVRGLRSPADGQYEFELASMNKKLADDIETVFLSSGDQNAFLSSSLIRQIAQEGGDISDFVHPVVHQNLSEAYKK

SEQ ID NO: 132759 - protein, 160 aa, Unknown
  Bacterial polypetide isolated from the Sargasso Sea
MSDKLAVYPGTFDPFTFGHLDIVRRSSKLFDRIIISVAENNSKSALFNLDERIEIVSNVISNEKDLDKIEIKGFSGLLVDHVVDMGAVAVLRGLRALSDFEYEFQMAGINARLSNEFETIFLMASENQQFVASRFVKEIHSLGGDVSSFVPKIVMEHLEK

SEQ ID NO: 132760 - protein, 159 aa, Unknown
  Bacterial polypetide isolated from the Sargasso Sea
MKKILYPGTFDPIHNGHIDIAKRAAKLFDELEFVVAINSDKKTLFSKEKRVELIEVAVQDIKNINVSFFNGLVVDYASRQGCSAIIRGLRHVSDFEFEFQMAMMNFHLNKNITSLFMMPDEKYIHLNSSVVKDVSKNGGDVSAFVPSCVQEALFTKFSK

SEQ ID NO: 132761 - protein, 165 aa, Unknown
  Bacterial polypetide isolated from the Sargasso Sea
MKKIAIYPGTFDPVTFGHIDVIKKSLKLFDNLIVAISDGNQKNYLFNLEERTTIMNNALFKDLKLNKKKIKVITFNYLTTDLCKKFKSNVILRGLRAASDFEYEFQLAGMNRTLNKNIETIFLMSDVKNQIISSKLIKEIIELKGNINKFTTKSTIAALKKKYDT

SEQ ID NO: 132762 - protein, 106 aa, Unknown
  Bacterial polypetide isolated from the Sargasso Sea
TAEMKDVADKIVVQGFDNLLVDFAKDNDAKVIIRGLRAVSDFDYEFQMSSMNAKLAPEVETVCLMASDRHQFIASRLVKEIAKLNGDVQQFVSPRVSGLLEAIFAK

SEQ ID NO: 132763 - protein, 132 aa, Unknown
  Bacterial polypetide isolated from the Sargasso Sea
MKKIIYPGTFDPIHYGHIDIARRASKLFDEVYMCVSDNQYKNPLFTHEERVEMIEECTSDLKNVSAFSNPNNLVVKFAQDKGAIAIIRGLRHVSDFELEFQMANVNHGLNSEVSTILMVSNEKFLHLNSSII

SEQ ID NO: 132764 - protein, 96 aa, Unknown
  Bacterial polypetide isolated from the Sargasso Sea
MEVLVRIAVYPGTFDPITNGHIDIIRRASKVVDKLIVAAAENIGKSPMFSLDERRDMVNQEIGIIKADNEARGYHSEIEVTSFNSLLMHFVDEHDA

SEQ ID NO: 132765 - protein, 46 aa, Unknown
  Bacterial polypetide isolated from the Sargasso Sea
MRVAIYPGSFDPITYGHMDIIDRASGLFDKIIIAVAKSEAKKPLFT

SEQ ID NO: 132766 - protein, 60 aa, Unknown
  Bacterial polypetide isolated from the Sargasso Sea
MKVAIYPGSFDPITFGHMDIIDRASGLFDKIIIAIAKSETKNPLFSLEDRIKLANTIYKD

SEQ ID NO: 132767 - protein, 137 aa, Unknown
  Bacterial polypetide isolated from the Sargasso Sea
KLFEKIIVGVSDGENKEYLFEAHERVQIIKKALFSDLKLNKKKIEVITFTSLTTDLCKKYRSSIILRGLRAVSDFEYEFQLAGMNRKLNNNIETFFLMSDVENQIISSKFVKEIVKLGGDIKKFTTKSTIKSLKQKL

SEQ ID NO: 132768 - protein, 50 aa, Unknown
  Bacterial polypetide isolated from the Sargasso Sea
MKVAIYPGSFDPITYGHMDIIDRACGLFDKIVIAIAKNEAKNPLFSLEDR

SEQ ID NO: 132769 - protein, 161 aa, Unknown
  Bacterial polypetide isolated from the Sargasso Sea
MKTKAIYPGTFDPLTNGHSDLVQRAARLFDQVIVAVASNPSKQPLFSLAERVQLAEQCFTDLPNVTVVGFSGLLADFAKQNQAQVLLRGVRAVADFEYEFQLASMNRQLNPDLDSLFMTPSEKNTFISSTLVKEVARHGGDISRFVASHVELALKQKFTAV

SEQ ID NO: 132770 - protein, 166 aa, Unknown
  Bacterial polypetide isolated from the Sargasso Sea
MRIGLYPGTFDPITLGHIDIIRRASLLVDRLVIGVAINSDKSPLFDLKDRVSMLEEECNYLSKQAGTEFVVHPFENLLIDCAHDVGAQLIVRGLRAVADFEYEFQMVGMNRSLDNSIETVFLMAEAKHQAIASKLVKEIARLNGDISKFVTPHVAKRLLNKLKVSN

SEQ ID NO: 132771 - protein, 150 aa, Unknown
  Bacterial polypetide isolated from the Sargasso Sea
MKKAVFPGSFDPITIGHLDIVKRGMKIFDKIIIAIGDNTDKKYMFTKEKRVEFVERTFSSYDKIKIESYQGLTVDFCKKNNVEFIIRGLRNPADFEFEKSIALTNREMTGIETIFFLTSPENSFISSSIVRDLIRNKGDYKLFIPKGIIL

SEQ ID NO: 132772 - protein, 148 aa, Unknown
  Bacterial polypetide isolated from the Sargasso Sea
MRALYPGSFDPLTNGHMDLIERASALFGEVIVAVLSNPSKKPLFTVEERIAQIQVSTAHLERIEVISFDGLTVHCAETHRADLILRGLRAMSDFEYELQIAHTNRSLAEDLETVFLATSARHSFLSSSVVKEVARFGGPVEHHGPLRG

SEQ ID NO: 132773 - protein, 164 aa, Unknown
  Bacterial polypetide isolated from the Sargasso Sea
MKNNAIYPGTFDPITYGHIDVIQKSLKIFDKVIVAVSDSNQKNYLFSIDERIEIVNKALFSDLNFSKNKIKVISFNSLTTDLCIKNKSKIILRGLRAASDFEYEFQLAGMNRKLNSNIETIFLMSDVKNQIISSRLIKEIAELKGDIKKFTTKSTINSLKKKYE

SEQ ID NO: 132774 - protein, 155 aa, Unknown
  Bacterial polypetide isolated from the Sargasso Sea
MYPGSFDPMTKGHMDIVKKALTIFDEVVIAVLENSAKTMLFTPDERKKMIEEIYINDERVRCISLGSKLTINLAEEISAQAIIRGLRAMSDFEYEFQIANINRSQNEKIESIFFTATDKFTYVSSSMVKEIALYKGKVDEFVDPVVKKELEKKFN

SEQ ID NO: 132775 - protein, 160 aa, Unknown
  Bacterial polypetide isolated from the Sargasso Sea
MKIAVYPGSFDPFTLGHKDILLRSSKIFDKVIVAIGENHGKQNLFSVEERINDISNEINDIGIKDNVIVKSFSGLIVDFARSNDANILIKGVRGPVDYDYELQMAGMNSTMNPDIETIFLISRPEFSYISSSLVKQIAFMKGDYSSFVSPIVEKSIKSKI

SEQ ID NO: 132776 - protein, 159 aa, Unknown
  Bacterial polypetide isolated from the Sargasso Sea
MKRIIYPGTFDPIHNGHLDIAKKAAGLFDELVLVVAVNKEKNPLFNNDERIHLIEECVTNLNNVRVSSFDGLVVDCAKIEKSAAIIRGLRHVSDFEFEFQMAMMNYNLNPIITSVFMMPDEKYIHLNSTIIKDVARLGGDISDYVPDNVKIALYEKYKD

SEQ ID NO: 132777 - protein, 70 aa, Unknown
  Bacterial polypetide isolated from the Sargasso Sea
MKVAIYPGSFDPITVGHMDIVERATVLFDKVIISVAETDMKNPLFSSEERLDLVSSIYADNEKIEVVAFK

SEQ ID NO: 132778 - protein, 163 aa, Unknown
  Bacterial polypetide isolated from the Sargasso Sea
MRALYPGSFDPLTNGHMDLIERAVALFGQVTVAVLSNPNKKPAFSVDQRIGQIQCATRHLNGIDVVSFDGLTVHCAVTHQADLILRGLRAMSDFEYELQIAHTNRSLAEDLETVFLATSTRHSFLSSSVVKEVARFGGPVDHMVPKEVAKDLNRLFNSTFPPR

SEQ ID NO: 132779 - protein, 168 aa, Unknown
  Bacterial polypetide isolated from the Sargasso Sea
MKRIALYPGSFDPLTNGHLDIMRRSLSICDSLIVGIAINKQKKPFFTVEERITLIKDAINENKTLNKENKSNISVKSFDSLLINFSKENNVSMIIRGLRVVSDFDYEFQMAGMNSRLSADIQTVFLMASENNQFIASRFVKEVASLNGDISSFVPKNVFRAIKQRFNY

SEQ ID NO: 132780 - protein, 158 aa, Unknown
  Bacterial polypetide isolated from the Sargasso Sea
MIALYPGTFDPITNGHFEIIRRASTIFQVLIVGVAVSEEKTPLFDHDKRLTMVNEVLNGFSNIEVQPYDGLTIDFAKQIEARVIVRGLRSPADGQYEFELASMNKKLADDIETVFLSSGDQNAFISSSLIRQIAQEGGDVSDFVHPVVHQALSEAYKK

SEQ ID NO: 132781 - protein, 160 aa, Unknown
  Bacterial polypetide isolated from the Sargasso Sea
MKIAVYPGSFDPFTLGHKDILLRSSRIFDKVIVAIGENHGKQNLFTIEERIKDISNEINDIGIKDNVLVESFSGLIVDFARSKNANILIKGVRGPVDYDYELQMAGMNSTMNPDIETIFLISRPEFSYISSSLVKQIALMKGDYSSFVSPIIEKSIKSKI

SEQ ID NO: 132782 - protein, 152 aa, Unknown
  Bacterial polypetide isolated from the Sargasso Sea
MKKVIYPGTFDPITFGHIDLIKKALNIFDNLIIAISDGNNKEYLFSAEEREYLVKKSLFSDLKFKKKQIKVVTFNTLTTDFCKKMKSNVILRGLRATSDFEYEFQLSGMNKKLNDKIETVFLMYDPQNQIISSKLVKEIADLKGNVKKLLQK

SEQ ID NO: 132783 - protein, 164 aa, Unknown
  Bacterial polypetide isolated from the Sargasso Sea
MKNIAIYPGTFDPITFGHIDVIKKALKVIDVVIVAISEVNNKNYLFETHERMEIIKKALFLDLKFNKKRVKVISFKSLTTKLCKKYKSEIILRGLRAASDFEYEFQLAGMNRKLNSNIETIFLMSNVENQIISSKFVKEIISLGGDIKKFTTKSTIKYLKKKYD

SEQ ID NO: 132784 - protein, 160 aa, Unknown
  Bacterial polypetide isolated from the Sargasso Sea
MKIAVYPGSFDPFTLGHKDILLRSSRIFDKVIVAIGENHGKQNLFSIEERIKDISNEINDIGIKDNVLVESFSGLIVDFARSKDANILIKGVRGPVDYDYELQMAGMNSTMNPDIETIFLISRPEFSYISSSLVKQIALMKGDYSSFVSPIIEKSIKSKI

SEQ ID NO: 132785 - protein, 59 aa, Unknown
  Bacterial polypetide isolated from the Sargasso Sea
MHTRALYPGTFDPITNGHADLIERASQLFSHVIVAIASNPSKKPLFTLEERVEMIKKVT

SEQ ID NO: 132786 - protein, 161 aa, Unknown
  Bacterial polypetide isolated from the Sargasso Sea
MKRIIYPGTFDPIHYGHIDIARRASRLFDEVYICVSDNQHKNPLFSHEERVEMIEECTSDLDNVSAYSNPNNLVVKFAQEKEAIAIIRGLRHVSDFELEFQMANVNHGINPEVSTILMVSNEKFLHLNSSIIRELAEYNTDLSKFVPKSVEKKIIEKLKGK

SEQ ID NO: 132787 - protein, 163 aa, Unknown
  Bacterial polypetide isolated from the Sargasso Sea
MRALYPGSFDPLTNGHMDLIERAVSLFGEVVVAVLSNPSKRPAFSVDERIEQIRTATRHLSGVEVISFDGLTVNCAVTHRADLILRGLRAMSDFEYELQIAHTNRSLADDLETVFMATTARHSFLSSSVVKEVARFGGSIDHMVPPEVAKDLNRLFNSAFPAS

SEQ ID NO: 132788 - protein, 127 aa, Unknown
  Bacterial polypetide isolated from the Sargasso Sea
MTDRIGLYPGSFDPITNGHIDIIKRSLRVVDKLVIGIAVNVGKTGLFSLKEREKLVLSDIKNLGLEGFVEVRSFEGLLVNYAKKINAKIIVRGLRAVTDFEYEFQMTGMNSRLDSSIETVFLMASEN

SEQ ID NO: 132789 - protein, 158 aa, Unknown
  Bacterial polypetide isolated from the Sargasso Sea
MIALYPGTFDPITNGHFEIIRRASTVFQVLIVGVAVSEDKAPLFDHDKRLTMVNEVLNGFSNIEVQPYDGLTIDFAKQIEARVIVRGLRSPADGQYEFELASMNKKLAEDIETVFLSSGDQNAFISSSLIRQIAQEGGDVSGFVHPVVHQALSNAYKK

SEQ ID NO: 132790 - protein, 159 aa, Unknown
  Bacterial polypetide isolated from the Sargasso Sea
MRKIIYPGTFDPIHNGHIDIASRASKLFDELEFVVAINSDKKPLFSIETRLELIKRSIEHIPNIKVSQFKGLVVDHAQNTGSIAIIRGLRHVSDFEFEFQMAMMNFHLNPKVTSLFMMPDEKFIHLNSTVVKDVSKNGGDVSEFVPSCVKEALFAKYSN

SEQ ID NO: 132791 - protein, 159 aa, Unknown
  Bacterial polypetide isolated from the Sargasso Sea
MKRIIYPGTFDPIHNGHLDIAKRAAGLFDELVLVVAVNKEKNPLFNNNERIHLIEECVTNLNNVRVSSFDGLVVDCAKTEKAVAIIRGLRHVSDFEFEFQMAMMNYNLNPMIASMFMMPDEKYIHLNSTIIKDVARLGGDISDYVPDNVKIALYKKYKD

SEQ ID NO: 132792 - protein, 105 aa, Unknown
  Bacterial polypetide isolated from the Sargasso Sea
MVKSIYPGTFDPVTKGHFDIVQRASLLFEKVTVCVYSGSLKNVIFDIDERVSMFQEAVSDLNNVDVIPFNTLTVDLAKELNSSAIIRGLRIGADFEYEREMALTN

SEQ ID NO: 132793 - protein, 158 aa, Unknown
  Bacterial polypetide isolated from the Sargasso Sea
MIALYPGTFDPITNGHFEIIRRASTIFQVLIVGVAVSDEKNPLFDHEKRLAMVNEVLNGFSNIEVQPYNGLTIDFAKQIEARVIVRGLRSPADGQYEFELASMNKKLADDIETVFLSSGDQNAFISSSLIRQIAQEGGDVSDFVHPAVHQSLSEAYKK

SEQ ID NO: 132794 - protein, 148 aa, Unknown
  Bacterial polypetide isolated from the Sargasso Sea
MIAIYPGTFDPITNGHFEIIRRASTIFQVLIVGVAVSEEKTPLFDHDKRLTMVNEVLNGFSNIEVQPYDGLTIDFAKQIEARVIVRGLRSPADGQYEFELASMNKKLADDIETVFLSSGDQNAFISSSLIRQIAQEGGDVSDFVHPVV

SEQ ID NO: 132795 - protein, 154 aa, Unknown
  Bacterial polypetide isolated from the Sargasso Sea
LIQLLCGHIDVIKKSLKIVDKVIVGISDGNQKNFLFSLDERIEIVKRALYKDLKFKKNKVDVIKFNTLTTDLCKKYKSNIILRGLRAVSDFEYEFQLAGMNRKLNNQVETIFLMSDVENQIISSRFVKEIAQHNGDLKKFTTKSTIKSLKEVYE

SEQ ID NO: 132796 - protein, 161 aa, Unknown
  Bacterial polypetide isolated from the Sargasso Sea
MKRIIYPGTFDPIHYGHIDIAKRASKLFDEVYMCVSDNQHKNPLFSHDERVEMIEECTSDLENVSAFSNPNNLVVKFAQDKGAVAIIRGLRHVSDFELEFQMANVNHGINPEVSTILMVSNEKFLHLNSSIIRELAEYNTDLSKFVPKNVEERLMKKLKGL

SEQ ID NO: 132797 - protein, 57 aa, Unknown
  Bacterial polypetide isolated from the Sargasso Sea
MKNIIYPGTFDPITNGHLDITERASSLFDEVMIVIANNPRKNSLFTIDERIDLIDQS

SEQ ID NO: 132798 - protein, 162 aa, Unknown
  Bacterial polypetide isolated from the Sargasso Sea
MRTAIYPGTFDPITLGHIDVIKKSLKIVDRIIVATTDNINKNYYFDINERLEIIKNSLFKDLKLNKKKIVVIPFDTLTIKLCKKYNASIIIRGLRAVSDFEYEFQLAGMNKKLNNNIETIFLMSDLENQIISSKFVKEIAKLDGDIKKFLTKSATKALKDKF

SEQ ID NO: 132799 - protein, 133 aa, Unknown
  Bacterial polypetide isolated from the Sargasso Sea
MSKVAIYPGTFDPITFGHIDVIKKSLKLFEKIIVAVSDGENKDYLFQIEERIEIIKKALFNDLKLNRNKIEVISFTSLTTDLCKKYKSNIILRGLRAVSDFEYEFQLAGMNRKLNNKIETLFLMSDVENQIIS

SEQ ID NO: 132800 - protein, 160 aa, Unknown
  Bacterial polypetide isolated from the Sargasso Sea
MKVAIYPGSFDPITFGHMDIIDRACGLFDKIIIAIAKNEAKNPLFNLEDRIKLAKEIYKDNSQVEVVGFPRQLTVDLAKEQNACAIIRGLRAVSDFEYEFQLATMNRSLAPDIESIFLTPKESLIYVSSSLIKEICDLKGDISKFVHPGVEKALKAKLTS

SEQ ID NO: 132801 - protein, 164 aa, Unknown
  Bacterial polypetide isolated from the Sargasso Sea
MIRTGIYPGTFDPITFGHIDVIKKSLKIVDKLIVAISDSSEKDYLFSTDERIEILKKSLFKDLKLKKNKIKIVSFQTLTVKLCKKFNASIIIRGLRAVSDFEYEFQLAGMNKKLDNKIETIFLMSNIENEIISSKFVKEIGYLRGDLKKFVSNSVIKAIKDKLE

SEQ ID NO: 132802 - protein, 89 aa, Unknown
  Bacterial polypetide isolated from the Sargasso Sea
MRNSAIAVYPGTFDPVTNGHLDIIARAARLVDRLIIAVAVNIGKSPLFNVDERVDMVEMEIRAMGDGSIDRIKAVPFDTLLMEFATQQN

SEQ ID NO: 132803 - protein, 96 aa, Unknown
  Bacterial polypetide isolated from the Sargasso Sea
KIIVVELSGLLTSFAKDQNATCIIRGLRAVSDFEYEFQMTGMNYQLNPDIETIFLMTSEKNSFISSNFVKEVHKLGGDVSNFVTKNTLDELNKKNS

SEQ ID NO: 132804 - protein, 160 aa, Unknown
  Bacterial polypetide isolated from the Sargasso Sea
MKVAIYPGSFDPITVGHMDIVERATLLFDKVIISVADTDMKNPLFSSEERLDLVSSIYADNEKIEVVAFKKKLTVDLARENNACAIIRGLRAVSDFEHEFQLATMNRSLAPDIESIFLTPKDTLIYVSSSLVKEIASLGGDISKFVHENVEMALKAKLNH

SEQ ID NO: 132805 - protein, 160 aa, Unknown
  Bacterial polypetide isolated from the Sargasso Sea
MKTAIYPGSFDPITFGHIDIVERAAALFDKVILGVAESQSKNPLFSVDERIDLIAEIFKDNPKIEVLGYSKKLTVDLARENDAIAIIRGLRAVADFEYEFQLATMNRSLAPDIESIFFTPKDTLIYVSSSLVKEIATFGGDVSRFVSPNVRAALQKKIAG

SEQ ID NO: 132806 - protein, 119 aa, Unknown
  Bacterial polypetide isolated from the Sargasso Sea
MRIGLYPGTFDPVTYGHLDIISRAARLVDRLVIGVAFNQEKNPLFTLDERVSLIDEQIKEIMQRCRVEIVTHPFQNLLIDCARDVSASLIFRGLRAVSDFEYEFQMVGMNRVLDSNIET

SEQ ID NO: 132807 - protein, 166 aa, Unknown
  Bacterial polypetide isolated from the Sargasso Sea
MKMINKIGIYPGTFDPMTAGHMDIIKRSLRIVDKLVIAVANNINKDSLFSVQERTNIIKSDISSVNELNSKINVTELSGLLTTFAKDQNATCIIRGLRAVSDFEYEFQMTGMNYQLNPDIETIFLMTSEKNSFISSNFVKEVHKLGGDVSNFVSKNTLEQLNKKNS

SEQ ID NO: 132808 - protein, 166 aa, Unknown
  Bacterial polypetide isolated from the Sargasso Sea
MRALYPGSFDPVTFGHLDLIQRASQLFDEVIVAVLRNPNKQPSFSLEERLEQLSNVTNHLPQVQVTSFEGLTVHFALEQNARVILRGLRALSDFEFELQLAHTNASLSDQVDTLFMATAVPHSFLSSSVVKEVARFGGDVQHLVPQTVASDLRRLFNQRVDVGGDR

SEQ ID NO: 132809 - protein, 113 aa, Unknown
  Bacterial polypetide isolated from the Sargasso Sea
SLEERINHVDEIFKGNDRVKAIGFTGLVVDLAKEENSNILIRGLRAVSDFEYEFQLANMNRAMSPDLESVFLTPKAKFSFLSSTLVREIASMGGEISSFVDPVIEKALKERFK

SEQ ID NO: 132810 - protein, 136 aa, Unknown
  Bacterial polypetide isolated from the Sargasso Sea
MSKIGIYPGTFDPMTNGHLNIIQRSLKVVDKLIIGVADNLNKKPLLSIDERKNIIANDIYSLQENNKKIEIHTVNGLLTEFAKKCNADCIIRGLRAVSDFEYEFQMTGMNYQLSPEIETIFLMSADNNSFISSKFS

SEQ ID NO: 132811 - protein, 107 aa, Unknown
  Bacterial polypetide isolated from the Sargasso Sea
MSKIAIYPGTFDPITFGHIDVIKKSLKLFDKIVVGVSDESKKNYLFSSDERIEIVNKALFKDLKLNRKKIKVVSFGSLTTDLCKKYKSNIILRGLRAVSDFEYEFQL

SEQ ID NO: 132812 - protein, 164 aa, Unknown
  Bacterial polypetide isolated from the Sargasso Sea
MSKTAIYPGTFDPITFGHIDVIKKSLKIVDKLIVATTDNIEKDYLFSLDERIEILNKSLFNDLRLSKNKIKIISFDDLTVKICKKYKASIIIRGLRAVSDFEYEFQLAGMNKKLDKSVETIFLMSDIENEIISSKFIKEIGKLKGDLKKFATKSVIKAIKSKFS

SEQ ID NO: 132813 - protein, 164 aa, Unknown
  Bacterial polypetide isolated from the Sargasso Sea
MKNIAIYPGTFDPITNGHIDVIKKALNLADKIIVGISDGNEKNFLFPIDERLKIVSKALYGDLKFSKNKIQVIKFNSLTTELCKKYKSNLILRGLRAVSDFEYEFQLAGMNRKLNNKVETVFLMSDVENQIISSRFVKEIAQHKGDLKKFTTKSTIKALKEVYA

SEQ ID NO: 132814 - protein, 164 aa, Unknown
  Bacterial polypetide isolated from the Sargasso Sea
MKRNVLYPGTFDPITYGHIDLIKKALKIVDTVIVAISENSNKNYLFNSNERLEIVEKALYKDLKFNSKKVKVITFNSLTTQLCKKMKSKIILRGLRAVSDFEYEYQLAGMNKNLDNNIETMFLMSDIENQIISSNFVKEIIELGGNIKKFTTPSTIKALKNKYV

SEQ ID NO: 132815 - protein, 142 aa, Unknown
  Bacterial polypetide isolated from the Sargasso Sea
MKNSAIYPGTFDPITFGHIDVIKKSLKFIDKLIVAISNGREKKYLFSKDERIKLVKTALFNDLKLPKNKIEVIEFESLTTDLCKKYKSNIILRGLRAVSDFEYEYQLAGMNRKLYNKVETIFLMSDIENQIISSKFVKEIAE

SEQ ID NO: 132816 - protein, 140 aa, Unknown
  Bacterial polypetide isolated from the Sargasso Sea
MRALYPGSFDPVTLGHLDLIHRASGLFDDVIVAVLRNPNKQPSFSLEQRLEQLSCATRHLPQVRVASFEGLTVHFALQEQARVILRGLRALSDFEFELQLAHTNASLSAEVDTLFMATAVHHSFLSSSVVKEVARLAAMC

SEQ ID NO: 132817 - protein, 162 aa, Unknown
  Bacterial polypetide isolated from the Sargasso Sea
MRIAIYPGTFDPITYGHIDVIKKSLNIFDKLIVATTDNINKNYHFSIDDRLSIINNSLFKDLKLNKNKIKVIPFDTLTINLCKKYKAETIIRGLRAVSDFEYEFQLAGMNKKLNSNIETIFLMSDIENQIISSKFVKEIANLGGNIDRFVTKSTVKVLKNNF

SEQ ID NO: 132818 - protein, 163 aa, Unknown
  Bacterial polypetide isolated from the Sargasso Sea
MSKTAIYPGTFDPITFGHIDVIKKSLKIVDKLIVATTDNIEKDYLFTIDERMEMLKKSLFKDLRLNKNKIKVVSFDDLTVKICKKYKASIIIRGLRAVSDFEYEFQLAGMNKKLDKNIETIFLMSDIENEIISSKFIKEIGKLKGDLKKFATKSVIKAIKSKF

SEQ ID NO: 132819 - protein, 97 aa, Unknown
  Bacterial polypetide isolated from the Sargasso Sea
MNTVLYPGTFDPITKGHTDLVERAARLFDRVVVAVAASPKKNPAFSLEQRVDMAKTVLSHLPNVEVVGFSSLLAHFVKEVDANVLLRGLRAVSDFEY

SEQ ID NO: 132820 - protein, 120 aa, Unknown
  Bacterial polypetide isolated from the Sargasso Sea
MKILYPGTFDPLTNGHLDIIQRAEKLFGNVVVAVLENTSKKPTFDLNKRIVQIKNAVSHLSNISVISYEGLTVDCAKEVNANLILRGLRAMSDFEYELQIAHTNKSLNTEIETIFLSTNT

SEQ ID NO: 132821 - protein, 162 aa, Unknown
  Bacterial polypetide isolated from the Sargasso Sea
MKRNALYPGTFDPITYGHIDLIKKALNIVDIVIVAISENSNKNYLFDSNERLEIVKKALFKDLKFSSKKVKVITFNSLTTSLCKKVNSKIILRGLRAVSDFEYEYQLAGMNKKLNNNIETMFLMSDIENQIISSNFVKEIIELGGNIQKFTTKSTIKALKDK

SEQ ID NO: 132822 - protein, 162 aa, Unknown
  Bacterial polypetide isolated from the Sargasso Sea
MKTAIYPGTFDPITYGHIDVIKKSLKIFDRLIVATTDNINKNYYFPIEERLSIIKNSLFKDLRFNKKKIIVIPFDTLTINLCKKYKATVIIRGLRAVSDFEYEFQLAGMNKKLNANIETIFLMSDVENQIISSNFVKEIAKLNGNINKFVTKSTVKMLKNKF

SEQ ID NO: 132823 - protein, 160 aa, Unknown
  Bacterial polypetide isolated from the Sargasso Sea
MKVAIYPGSFDPISFGHMDIIDRACGLFDKIIIAIAKSETKNPLFSLEDRIKLAETIYKENDQVNVIGFPRQLTVEVAKENNACAIIRGLRAVSDFEYEFQLATMNRSLAPDIESIFLTPKESLIYVSSSLIKEICDLKGDISKFVHPTVEQALKAKLDS

SEQ ID NO: 132824 - protein, 124 aa, Unknown
  Bacterial polypetide isolated from the Sargasso Sea
MTDLKSHKRIGLYPGTFDPITNGHLDIISRASKLVDKLIIGIAANAGKSPLFSSDERVEMVIEEINDLNKTTKIKCEIEVNSFSNLLTHYANDVDAIMIIRGLRAVSDFDYEFQMVGMNARLNP

SEQ ID NO: 132825 - protein, 164 aa, Unknown
  Bacterial polypetide isolated from the Sargasso Sea
MSKIAIYPGTFDPITYGHIDVIKKALKLFDKIVVGVSNVSNKNYLFSSQERIEIVNKALFKDLKLNKKKIVVVSFGSLTTDLCKKYKSNIILRGLRAVSDFEYEFQLAGMNRKLNQNIETIFLMSDVENQIISSRFVKEIVKLNGNIKKFTTKSTIKSLKEKYE

SEQ ID NO: 132826 - protein, 78 aa, Unknown
  Bacterial polypetide isolated from the Sargasso Sea
MRKALYPGTFDPITNGHLDIIERASKIVDHLIVGVVEKSTKKTIFNADERSNYVIQATKALSNVSVKRYSGLTVDIAK

SEQ ID NO: 132827 - protein, 139 aa, Unknown
  Bacterial polypetide isolated from the Sargasso Sea
SLRIVDNLVIAVANNINKDALFSVQERINIIKNDINSVEELNSKINVIELSGLLTTFAKDQNATCIIRGLRAVSDFEYEFQMTGMNYQLNPDIETIFLMTSEKNSFISSNFVKEVHKLGGDVSNFVSKNTLEQLNKKNS

SEQ ID NO: 132828 - protein, 164 aa, Unknown
  Bacterial polypetide isolated from the Sargasso Sea
MSKIAIYPGTFDPITYGHIDVIKKALKLFDKIVVGVSDVSNKNYLFSSEERIEIVNKALFKDLKLNKKKIIVVSFGSLTTDLCKKYKSNIILRGLRAVSDFEYEFQLAGMNRKLNQNIETIFLMSDVENQIISSRFVKEIVKLNGNIKKFTTKSTIKSLKEKYE

SEQ ID NO: 132829 - protein, 164 aa, Unknown
  Bacterial polypetide isolated from the Sargasso Sea
MSKIAIYPGTFDPITFGHIDVIKKALKLFDKIVVGVSDVSSKNYLFSSKERIEIVNKALFKDLKLNKKKIIVVSFSSLTTDLCKRYKSNIILRGLRAVSDFEYEFQLAGMNRKLNQNIETIFLMSDVENQIISSRFVKEIVKLNGDIKKFTTKSTIKSLKEKYE

SEQ ID NO: 132830 - protein, 163 aa, Unknown
  Bacterial polypetide isolated from the Sargasso Sea
MPKTAIYPGTFDPITFGHIDIIKKSLKIVDKLIIATTDNSEKEYFFSLEERLEILERSLFKDLRLNKKKIKIVSFNNLTVNLCRKHKAFIIVRGLRAVSDFEYEFQLAGMNKKLDKSIETIFLMSDIENEIISSKFIKEIGKLKGSLKKFVTKSVIKAINAKI

SEQ ID NO: 132831 - protein, 163 aa, Unknown
  Bacterial polypetide isolated from the Sargasso Sea
MRTAIYPGTFDPITYGHIDVIKKSLKVVDRVIVATTDNISKDYFFSIEERISIIKNSLFKDLKLNKKKILIIPFETLTINLCKKYKASIIIRGLRAVSDFEYEFQLAGMNKKLNNKIETIFLMSNIENQIISSKFVKEIAKLNGNINKFLTKSAIKALKEKLR

SEQ ID NO: 132832 - protein, 164 aa, Unknown
  Bacterial polypetide isolated from the Sargasso Sea
MSKIAIYPGTFDPITFGHIDVIKKSLKLFDRVVVGVSDESNKNYLFTSDERIEIVNKALFKDLKLNRKKIKVVSFGSLTTDLCKKYKSNIILRGLRAVSDFEYEFQLAGMNRKLNQNIETIFLMSDVENQIISSRFVKEIVKLKGDIKKFTTKSTIKSLKEKYE

SEQ ID NO: 132833 - protein, 159 aa, Unknown
  Bacterial polypetide isolated from the Sargasso Sea
MAKALYPGTFDPITLGHIDIIERALHLFDEVTIAIATSASKKPIFTLEERIEHVEKIFEGKKNVKAIGFTGLVVDLAKEQESNILIRGLRAVSDFEYEFQLANMNRAMSPDLESIFLTPKAKFSFLSSTLVREIASMGGEIDSFVDPVVKAALQERFKT

SEQ ID NO: 132834 - protein, 164 aa, Unknown
  Bacterial polypetide isolated from the Sargasso Sea
MKNIAIYPGTFDPITNGHIDVIKKALKLADKIIVGISDGNEKNFLFPIDERLKIVSKALYGDLKFPKKKIQVIKFNSLTTELCKKYKSNLILRGLRAVSDFEYEFQLAGMNRKLNNRVETVFLMSDVENQIISSRFVKEIALHKGDLRKFTTKSTIKSLREIYA

SEQ ID NO: 132835 - protein, 164 aa, Unknown
  Bacterial polypetide isolated from the Sargasso Sea
MSKIAIYPGTFDPITFGHIDVIKKSLKLFDKIIVGVSDESNKNYLFSSDERIEIVNRALFKDLKFNKKKIKVISFGSLTTDLCKKYKSNIILRGLRAVSDFEYEFQLAGMNRKLNQNIETIFLMSDVENQIISSRLVKEIVKLNGNIKKFTTKSTIKSLKDKYE

SEQ ID NO: 132836 - protein, 86 aa, Unknown
  Bacterial polypetide isolated from the Sargasso Sea
MKRIALYPGTFDPVTNGHLDIIYRASSLCDILIIGVAENIGKSPFFKISQRKSLIQEAIKENLKSSKRKLGQIKVESFDNLLIDFR

SEQ ID NO: 132837 - protein, 106 aa, Unknown
  Bacterial polypetide isolated from the Sargasso Sea
MNKVAIYPGTFDPITFGHIDVIKKGLNLFDKLVVAISNGENKDYLFSSEERIEIVKKALFFDLKLNKKKIEIVSFSSLTTDLCKKYKSNIILRGLRAVSDFEYEFQ

SEQ ID NO: 132838 - protein, 164 aa, Unknown
  Bacterial polypetide isolated from the Sargasso Sea
MKRNILYPGTFDPITYGHIDLIKKALNIVDTVIVAISENSNKNYLFDAGERLEIVKKALFKDLKLSNKKIKVITFNSLTTSLCKKMNSKIILRGLRAVSDFEYEYQLAGMNKKLNSNIETMFLMSDIENQIISSNFVKEIIELNGDIKKFTTPSTVKALKNKYA

SEQ ID NO: 132839 - protein, 158 aa, Unknown
  Bacterial polypetide isolated from the Sargasso Sea
MAKALYPGTFDPITLGHIDIIERALHLFDEVTIAIATSESKKPVFSLEERISHVDQIFKGNDRVKAIGFTGLVVDLAKEEQSNILIRGLRAVSDFEYEFQLANMNRAMSPDLESVFLTPKAKFSFLSSTLVREIASMGGEISSFVDPVIEEALKKRFK

SEQ ID NO: 132840 - protein, 117 aa, Unknown
  Bacterial polypetide isolated from the Sargasso Sea
MKVAIYPGSFDPITVGHMDIVERATVLFDKVIISVAETDMKNPLFSSEERLDLVSSIYADNEKIEVVAFKKKLTVDLARENNACAIIRGLRAVSDFEHEFQLATMNRALAPDIESIF

SEQ ID NO: 132841 - protein, 160 aa, Unknown
  Bacterial polypetide isolated from the Sargasso Sea
MKVAIYPGSFDPITFGHMDIIDRASGLFDKIVIAIAKSKTKNPLFSLEDRIKLAKNIYQDNQKVDVMGFPRQLTVDVAKEQNACAIIRGLRAVSDFEYEFQLATMNRSLAPDIESIFLTPKESLIYVSSSLIKEICDLKGDISKFVHPTVEKALKAKLGS

SEQ ID NO: 132842 - protein, 163 aa, Unknown
  Bacterial polypetide isolated from the Sargasso Sea
MKIAVYPGTFDPITYGHIDVIKKSLKIFDKLIVATTDNTDKDYFFSIDERIEIINYSLFKDLRLDKKKIKVISFANLTIDLCKKYNATTIIRGLRAVSDFEYEFQLAGMNKKLNSKIETMFLMSDIENQIISSKFVKEIAHFGGEIDKFVTKNTVKMLKNKYS

SEQ ID NO: 132843 - protein, 160 aa, Unknown
  Bacterial polypetide isolated from the Sargasso Sea
MNRVLYPGTFDPITKGHGDLVERAARLFDHVIIAVAASPKKNPLFSLEQRVELAREVTKHLPNVEVVGFSSLLAHFVKEQNANVFLRGLRAVSDFEYEFQLANMNRQLAPDVESLFLTPSEKYSFISSTLVREIAALGGDITKFVHPAVADALNERFRKS

SEQ ID NO: 132844 - protein, 164 aa, Unknown
  Bacterial polypetide isolated from the Sargasso Sea
MKNIAIYPGTFDPITNGHIDVIKKALKLTDKIIVGISDGNEKNFLFPIDERLKIVTKALYGDLKLSKNKIQVIKFNSLTTELCKKYKSNLILRGLRAVSDFEYEFQLAGMNRKLNNKVETIFLMSDVENQIISSRFVKEIALHKGDLRKFTTKSTIKSLKEVYA

SEQ ID NO: 132845 - protein, 159 aa, Unknown
  Bacterial polypetide isolated from the Sargasso Sea
MSLIAVYPGTFDPITNGHTDLVNRGIKIFDKIIIAVAENPTKNTLFTISERMNFIEKIFEGNMKIEIFPLNRLLVEFAKDHGATVILRGLRAVSDFEYEVQLASMNRSMEPDIESVFMSPAEKYGFLSSSIIKDIAKHDGDLSNFVDKEVLKSLKKKLR

SEQ ID NO: 132846 - protein, 137 aa, Unknown
  Bacterial polypetide isolated from the Sargasso Sea
MKNVAIYPGTFDPITYGHVDVIKKALKFVDNVIVGISDGNHKKFLFPIEDRVKIVSKALFIDLKLSKKNIKVITFNSLTTELCKQYKSNLILRGLRAVSDFEYEFQLAGMNRKLNHKVETIFLMSDIENQIISSRFV

SEQ ID NO: 132847 - protein, 108 aa, Unknown
  Bacterial polypetide isolated from the Sargasso Sea
KSLFKDLKLSKKKISVISFDTLTIDLCKKLKAKVIIRGLRAVSDFEYEFQLAGMNKKLSEEIETIFLMSDIENQIISSKFVKEIWKFNGKIDNFLTKSATKILKSKLK

SEQ ID NO: 132848 - protein, 138 aa, Unknown
  Bacterial polypetide isolated from the Sargasso Sea
MKKVAIYPGTFDPITFGHIDVIKKGLKLFDKIVVAVSNVDNKNYLFSSIERMEIVKKALFLDLKLDKKKILIISFTSLTTDLCKKYKSNIILRGLRAVSDFEYEFQLAGMNRKLNNNIETLFLMSDVENQIISIKNLL

SEQ ID NO: 132849 - protein, 105 aa, Unknown
  Bacterial polypetide isolated from the Sargasso Sea
MKIAVYPGTFDPITYGHIDVIKKSLKIFDKLIVATTDNTDKNYFFSLDERLDIINNSLFKDLKLNKKRIRVISFDNLTIELCRKYNASAIIKGLRAVSDFEYEFQ

SEQ ID NO: 132850 - protein, 156 aa, Unknown
  Bacterial polypetide isolated from the Sargasso Sea
MKNIAIYPGTFDPITFGHIDVIKKALKFADKVIVGISDGNQKNFLFSIDERVKIVKKAIFNDLKFRKNKVEIITFDSLTTDLCKKYKSNIILRGLRAVSDFEYEFQLAGMNRKLNSSIETIFLMSDLENQIISSRFVKEIAQHKGDLKKFTTKSTI

SEQ ID NO: 132851 - protein, 162 aa, Unknown
  Bacterial polypetide isolated from the Sargasso Sea
MKTAIYPGTFDPITFGHIDVIKKSLNIFDRVIVATTDNINKNYHFSIEERINIINNSLFKDLKINKKKVKIISFDYLTIDLCKKYNANTIIRGLRAVSDFEYEFQLAGMNKKLNSNIETMFLMSDVENQIISSKFVKEIANLGGNINRFVTRSTVKKLKNKS

SEQ ID NO: 132852 - protein, 160 aa, Unknown; identical to SEQ ID NO: 132843
  Bacterial polypetide isolated from the Sargasso Sea

SEQ ID NO: 132853 - protein, 156 aa, Unknown
  Bacterial polypetide isolated from the Sargasso Sea
MKVAIYPGSFDPITYGHMDIIDRACGLFDKIIIAIAKNEAKNPLFSLEDRIKLANSIYKNNSQVEIVGFPRQLTVDIAKEQNACAIIRGLRAVSDFEYEFQLATMNRSLAPDIESIFLTPKESLIYVSSSLIKEICDLKGDISKFVHPSVEKALKA

SEQ ID NO: 132854 - protein, 133 aa, Unknown
  Bacterial polypetide isolated from the Sargasso Sea
MKTAIYPGTFDPMTYGHIDVIKKSLKIFDRVIIATTDNTDKNYFFSIDERVDIINHSLFKDLRFNRNKIKVISFDNLTIDLCKKYKASVIIRGLRAVSDFEYEFQLAGMNKKLNSNIETMFLMSDVENQIILL

SEQ ID NO: 132855 - protein, 151 aa, Unknown
  Bacterial polypetide isolated from the Sargasso Sea
MKVAIYPGSFDPITVGHMDIVERATVLFDKVIISVAETDMKNPLFSSEERLDLVSSIYADNEKIEVVAFKKKLTVDLARENNACAIIRGLRAVSDFEHEFQLATMNRALAPDIESIFLTPKDTLIYVSSSLVKEIASLGGDISNFVHENVE

SEQ ID NO: 132856 - protein, 163 aa, Unknown
  Bacterial polypetide isolated from the Sargasso Sea
MPKVAIYPGTFDPITFGHIDIIKKSLKIVDKLIIATTDNSEKDYLFSVEERIDILKKSLFYDLKLNKKKITITSFDNLTVKLCKKYNASIIVRGLRAVSDFEYEFQLAGMNKRLDKNIETLFLMSDIENEVISSKFIKEIARLEGKLDRFVTKSVIKSIKEKF

SEQ ID NO: 132857 - protein, 163 aa, Unknown
  Bacterial polypetide isolated from the Sargasso Sea
MKNVAIYPGTFDPITFGHIDVIKKGIKLFDKLIVAVSEGGDKNHLFSTEERINLVKNSIYKDTKISSKKIQVIKFSSLTTTLCKKYNSNIILRGLRAVSDFEYEFQLAGMNRKLNENIETIFLMSDVDNQVISSRLVKEIATFKGNLKKFITKSVINEIKKKI

SEQ ID NO: 132858 - protein, 123 aa, Unknown
  Bacterial polypetide isolated from the Sargasso Sea
MKSTAIYPGTFDPITYGHIDVIKKSLKIFDRVVVAAAENINKDYLFSIDERVEIIRDSLFKDLKLNKNKILVISFNTLTINLCKKYKASVIIRGLRAVSDFEYEFQLAGMNKKLNEKIETIFM

SEQ ID NO: 132859 - protein, 143 aa, Unknown
  Bacterial polypetide isolated from the Sargasso Sea
IINRSLRIVDNLVIAVADNINKDSLFSVQERINIIKSDVSNLNKFNSKINVMELSGLLTTFAKDQNATCIIRGLRAVSDFEYEFQMTGMNYQLNPDIETIFLMTSEKNSFISSNFVKEVHKLGGDVSKFVSKNTLEQLNKKNS

SEQ ID NO: 132860 - protein, 164 aa, Unknown
  Bacterial polypetide isolated from the Sargasso Sea
MPKVVIYPGTFDPITFGHIDVIKKSLKLFDKVIVAVSDSENKNYLFDPLERIEIVRKALFSDLKLNRKKIIVISFSSLTTDLCKKYKSNIILRGLRAVSDFEYEFQLAGMNRKLNNKIETIFLMSDVENQIISSKFVKEIVKLKGNVKKFTTKSTIKSLKRKYE

SEQ ID NO: 132861 - protein, 119 aa, Unknown
  Bacterial polypetide isolated from the Sargasso Sea
MKKIAVYPGTFDPITYGHIDVIKKGLKFLDKIIVAISDGESKNYLFNIDEREQIVNKALFKDLKLNSKQIKIIKFNSLTTSLCKKYKSNIILRGLRAVSDFEYEFQLAGMNRKLNKNMK

SEQ ID NO: 132862 - protein, 145 aa, Unknown
  Bacterial polypetide isolated from the Sargasso Sea
MSKAIYPGTFDPLTLGHIDIVERALHIFDEVTIAIAVSEKKVPLFSLEERIDQIEKIFDNDKRIKAIGFSGLIVDLAKQEGSNVLVRGLRAVSDFEYEFQMASMNRAMSPDLDSIFLTPKAKYSFLSSSLVREIASMGGEVSEFV

SEQ ID NO: 132863 - protein, 162 aa, Unknown
  Bacterial polypetide isolated from the Sargasso Sea
MKIAVYPGTFDPITYGHIDVIKKSLKIFDKLIIGTTENTDKNYFFSIEERIDIINNSLFKDLKFDKKKIKVISFDNLTIDLCRKYNATAIIRGLRAVSDFEYEFQLAGMNKKLNNKIETMFLMSDVENQIISSKFVKEIASLGGNIERFVSKYVVKMLKSKY

SEQ ID NO: 132864 - protein, 164 aa, Unknown
  Bacterial polypetide isolated from the Sargasso Sea
MNKVAIYPGTFDPITYGHIDVIKKGLKLFDKIVVAVSNVDNKNYLFDSDERIQIVKKALFLDLKLNKKKITIISFNSLTTDLCKKYKSTIILRGLRAVSDFEYEFQLAGMNRKLNKNIETLFLMSDIENQIISSKFVKEIIKLNGDIKKFATKSTIKLLKKKYE

SEQ ID NO: 132865 - protein, 166 aa, Unknown
  Bacterial polypetide isolated from the Sargasso Sea
MCNFNYVKIGIYPGSFDPFTNGHNDILSRSLKIFDKVIIAVVKNSAKNYLFSLEDRIQMVNQLFKDQGNISCVGLDSKLTVNLASELNAQAIIRGLRAVSDFEYEFQIASINRSQNPEIESVFFTPDEKLTFISSSMVKELASYGGDISKFVHADINNALIKKFKN

SEQ ID NO: 132866 - protein, 164 aa, Unknown
  Bacterial polypetide isolated from the Sargasso Sea
MSTAIYPGTFDPITYGHIDVINKSLKIFDKLIIAAAENTNKDYLFSVDERVEIIKDSLFKDLKLNKNRIVIIPFNTLTINLCNKYKAKVIVRGLRAVSDFEYEFQLAGMNKKLNEQIETIFLMSDVENQIISSKFVKEIAKLDGKINKFLTRSVEKKLKIKLNE

SEQ ID NO: 132867 - protein, 128 aa, Unknown
  Bacterial polypetide isolated from the Sargasso Sea
MRKIAIYPGTFDPITYGHIDVIRKSLSLVDNLIIGVSNSSNKKYLFNADERIEIIKNALFKDLRFNKKKLKVITFNNLTTSLCKKYNSRLILRGLRAVSDFEYEFQLAGMNRKLNKNIETVFVMSDVE

SEQ ID NO: 132868 - protein, 135 aa, Unknown
  Bacterial polypetide isolated from the Sargasso Sea
IIGVAVNDGKGPLFTLDERVKMIEREIAQSTEIGDCNLEVKSFEGLLTEFATSSGASLIIRGLRAVSDFEYEFQMTGMNTKLEPNIETVFLMASEGEQFISSRLVKEINSLGGDISHFVSENVRTKLIGKVSADN

SEQ ID NO: 132869 - protein, 116 aa, Unknown
  Bacterial polypetide isolated from the Sargasso Sea
MKNIAIYPGTFDPITFGHIDVIKKALKFVDKVVVGISDGNQKNFLFSIDERVKIVEKAIYNDLKFKRNKVNIITFSSLTTDLCKKYKSNIILRGLRAVSDFEYEFQLAGMNRKLNS

SEQ ID NO: 132870 - protein, 166 aa, Unknown
  Bacterial polypetide isolated from the Sargasso Sea
MKKIAIYPGTFDPITFGHIDVIKKSLKLVDKLIVGVSNGKTKNYLFSSNERIQIVKKALFNDLNYNKKKIKVINFNNLTTSLCKKYKSNLILRGLRAVSDFEYEFQLAGMNRKLNNNIETIFLMSDVENQIISSRFVKEIAELRGDLKKFTTKSTIKSLNKKYNNV

SEQ ID NO: 132871 - protein, 136 aa, Unknown
  Bacterial polypetide isolated from the Sargasso Sea
MKKIIGLYPGSFDPITNGHLDIIFRASKIVDTLIIGVAINEKKKHLFDMTERTNLINEQFSINKTKLSNTKVIAFDGLLMNFAQKLNANIIIRGLRAVSDFDYEFQMTGMNARLNSEIETVFLMASEKHQFISSRF

SEQ ID NO: 132872 - protein, 81 aa, Unknown
  Bacterial polypetide isolated from the Sargasso Sea
CKKYKASAIIRGLRAVSDFEYEFQLAGMNKKLNSKIETMFLMSDVENQIISSKFVKEIVNLGGDINRFVTKYTAKMLRNKY

SEQ ID NO: 132873 - protein, 111 aa, Unknown
  Bacterial polypetide isolated from the Sargasso Sea
MSDETIAVYPGTFDPVTNGHMDIIARAARLVDRLVIAVAVNIGKGPLFSLDERVDMVEAEISAMGNCFAERITAVPLNSLLMEFAAKQNANMIIRGLRAVSDFEYEFKWAA

SEQ ID NO: 132874 - protein, 164 aa, Unknown
  Bacterial polypetide isolated from the Sargasso Sea
MKKNLLYPGTFDPITYGHIDLIKKALKIVDTVIVAISENSNKKYLFEASERLEIVKNALFKDLNFSKKRVKIITFNSLTTSLCKKLKSNIILRGLRAVSDFEYEYQLAGMNKKLNSNIETIFLMSDIENQIISSNFVKEIIELKGDIKKFTTKSTIKALKNKYE

SEQ ID NO: 132875 - protein, 159 aa, Unknown
  Bacterial polypetide isolated from the Sargasso Sea
MAKALYPGTFDPITLGHIDIIERALHLFDEVTIAIATSASKKPIFTLEERIEHVEKIFKGNDRVKAIGFTGLVVDLAKEQNSNILIRGLRAVSDFEYEFQLANMNRAMSPDLESIFLTPKAKFSFLSSTLVREIASMGGKIDSFVDPIVKEALENRFKT

SEQ ID NO: 132876 - protein, 151 aa, Unknown
  Bacterial polypetide isolated from the Sargasso Sea
MFLEYKNSKIMNKIGIYPGTFDPMTAGHMDIIKRSLRIVDNLVIAVANNINKDSLFSVQERINIIKSDITSVNELNSKINVTELSGLLTTFAKDQNATCIIRGLRAVSDFEYEFQMTGMNYQTYPDIETIFLMTSEKNSFISSNFCKEVHN

SEQ ID NO: 132877 - protein, 164 aa, Unknown
  Bacterial polypetide isolated from the Sargasso Sea
MKNIAIYPGTFDPITNGHIDVIKKSLKFADKIIVGISDGNEKNFLFPIDERLKIVSKALYVDLKLSKNKIQVIKFNSLTTELCKKYKSNLILRGLRAVSDFEYEFQLAGMNRKLNNKVETVFLMSDVENQIISSRFVKEIALHKGDLRKFTTKSTIKSLKDVYA

SEQ ID NO: 132878 - protein, 161 aa, Unknown
  Bacterial polypetide isolated from the Sargasso Sea
MTTALYPGTFDPVTMGHLDVLSRASKLFDRVIVAVSGGNSSKNTTFDVESRVEMVRENLVSFSNATVESFEGLLVDYAKSKQATVLVRGLRAVSDFEYEFQMAQMNRHLDSELETIFLMPNEKYFYTSSQLIKQVHLFGDKETDLVPENVLRALRSLSQGS

SEQ ID NO: 132879 - protein, 164 aa, Unknown
  Bacterial polypetide isolated from the Sargasso Sea
MPKVAIYPGTFDPITFGHIDVINKSLKLFDKIVVAVSDSENKNYLFSPYERIEIVKKALFSDLKLNKKKITVVSFSTLTTDLCKKYKSNIILRGLRAVSDFEYEFQLAGMNRKLNNKIETIFLMSDVENQIISSKFVKEIVKLKGDIKKFTTKSTIKSLKEKYE

SEQ ID NO: 132880 - protein, 157 aa, Unknown
  Bacterial polypetide isolated from the Sargasso Sea
MKILYPGTFDPLTNGHLDLIERAEKIFGNLVVAVLENTSKTPTFNLESRIIQIKNTISHLPNIEVISYSGLTVDCANDLKANLILRGLRAMSDFEYELQIAHTNKSLNNDIETIFLSTNTNYSFLSSSLVKEVAKFGGEINHMVPPSVERDLKEYFK

SEQ ID NO: 132881 - protein, 142 aa, Unknown
  Bacterial polypetide isolated from the Sargasso Sea
MKNIAIYPGTFDPITFGHIDLIKKGINLFDKLIVAVSEVGDKNHLFSIDERIILVKNSLHNDMKISSKKIQVIKFSSLTTTLCQKYKSNFILRGLRAVSDFEYEFQLAGMNRKLNEKIETIFLMSDVDNQVISSRLVKEIAN

SEQ ID NO: 132882 - protein, 164 aa, Unknown
  Bacterial polypetide isolated from the Sargasso Sea
MKRAAIYPGTFDPITFGHIDVIQKSLKIIDKLIVAISDSNEKNYLFTAEERIEIVKKALFNDLKFNKNKIKVVTFNSLTTDLCKKFKSNIILRGLRAVSDFEYEFQLAGMNRKLNNKIETIFLMSDVKNQIISSRLIKEIIEHNGDIKKFTTKSTINSLKKKYE

SEQ ID NO: 132883 - protein, 164 aa, Unknown; identical to SEQ ID NO: 132801
  Bacterial polypetide isolated from the Sargasso Sea

SEQ ID NO: 132884 - protein, 167 aa, Unknown
  Bacterial polypetide isolated from the Sargasso Sea
MKKIAIYPGTFDPITYGHIDVIKKSLRIVDSIIVGISEVGQKNYLFNINERIKIVERALYIDLKFKKNQIKVIKFKSLTTSLCKKYRSNIILRGLRAVSDFEYEFQLAGMNRKLNNSIETIFLMSDVDNQIISSRFVKEIAQLSGDLKKFTTKSTIKALKKKYENSF

SEQ ID NO: 132885 - protein, 164 aa, Unknown
  Bacterial polypetide isolated from the Sargasso Sea
MSKIAIYPGTFDPITFGHIDVIKKSLKLFDKVVVGVSDESNKNYLFSSDERIEIVNKALFKDLKLNRKKIKIVSFGSLTTDLCKKYKSNIILRGLRAVSDFEYEFQLAGMNRKLNQNIETIFLMSDVENQIISSRFVKDIVKLKGDIKKFTTKSTIKSLKEKYE

SEQ ID NO: 132886 - protein, 143 aa, Unknown
  Bacterial polypetide isolated from the Sargasso Sea
IKKSLKIVDRVIIATTDNINKDYFFSIDERLEIIKNSLFKDLKMSRKKIIVIPFDTLTINLCKKYKSTLIIRGLRAVSDFEYEFQLAGMNKKLNNNIETIFLMSDLENQIISSKFVKEIAKLNGNLKKFITNSAIKALKDKFK

SEQ ID NO: 132887 - protein, 129 aa, Unknown
  Bacterial polypetide isolated from the Sargasso Sea
MSKIGIYPGTFDPMTNGHLNIIQRALKIVDKLIIGVADNLNKTPLLSIDERKNIIENDIFSLQQNNKKIEIYPVNGLLTEFAKKCNADCIIRGLRAVSDFEYEFQMTGMNYKLSPEIETIFLMSADNIL

SEQ ID NO: 132888 - protein, 160 aa, Unknown
  Bacterial polypetide isolated from the Sargasso Sea
MKVAIYPGSFDPITVGHMDIVERATVLFDKVIISVAETDMKNPLFSSEERLDLVSSIYADNEKIEVVAFKKKLTVDLARENNACAIIRGLRAVSDFEHEFQLATMNRALAPDIESIFLTPKDTLIYVSSSLVKEIASLGGDISNFVHENVEMALKAKLNH

SEQ ID NO: 132889 - protein, 163 aa, Unknown
  Bacterial polypetide isolated from the Sargasso Sea
MSKVGIYPGTFDPITYGHISIIKSALKIVDKLIVAVSNDYSKDYLFSAEERVLLTKKSLFKDLRFKSKDIKVLSFNTLTTSLCKKNNATIMFRGLRAVSDFEYEFQLAGMNRKLDSTIETVFLMTDVEKQVISSKFVKEIARLNGKIDNFVTRSAVKAIKKKI

SEQ ID NO: 132890 - protein, 164 aa, Unknown
  Bacterial polypetide isolated from the Sargasso Sea
MKKIAIYPGTFDPITFGHIDVIKKGLKLFDKLVVAVSNGENKEYLFSSDERIQIVKKALFSDLKLNKKKIEIISFTSLTTDLCRKYKSNIILRGLRAVSDFEYEFQLAGMNRKLNSNIETIFLMSDVENQIISSKFVKEIVKLKGNIKRFTTQSTIKSLKNKYE

SEQ ID NO: 132891 - protein, 159 aa, Unknown
  Bacterial polypetide isolated from the Sargasso Sea
MAKALYPGTFDPITLGHIDIIERALHLFDEVTIAIATSASKKPIFTLEERIEHVEKIFQGNKNVKAIGFTGLVVDLAKEQESNILIRGLRAVSDFEYEFQLANMNRAMSPDLESIFLTPKAKFSFLSSTLVREIASMGGEIDSFVDPVVKAALQERFKT

SEQ ID NO: 132892 - protein, 164 aa, Unknown
  Bacterial polypetide isolated from the Sargasso Sea
MKNIAIYPGTFDPITFGHIDVIKKALKFVDKVVIGISDGNQKNFLFSIDERVKIVQKAIFNDLRFKKDKIKIITFNSLTTDLCKKYKSNIILRGLRAVSDFEYEFQLAGMNRKLNNKIETIFLMSDLENQIISSRFVKEIAQHNGDLKKFTTKSTIVSLKNIYA

SEQ ID NO: 132893 - protein, 164 aa, Unknown
  Bacterial polypetide isolated from the Sargasso Sea
MNKIGLYPGTFDPITFGHIDVIKKSLKIVNKLIIAVSNDYSKDYLFSAEERVFIIKNALFKDLKLNSNKLKILSFNTLTTSLCLKHKATIIFRGLRAVSDFEYEFQLAGMNRQLNKNIETVFLMSEPSKQVISSKFVKEIVKLNGKIDAFVTKSTKKALKEKYD

SEQ ID NO: 132894 - protein, 129 aa, Unknown
  Bacterial polypetide isolated from the Sargasso Sea
MSSPKIGIYPGTFDPITNGHTDIIGRAARLLDKLVVGVAVNPGKGPIFTIDERVEIVREEMNHLGNGLSDRIEVTQFSGLLIDFAHQENATVIIRGLRAVSDFDYEFQMSSMNAKMAPDVETVCLMASD

SEQ ID NO: 132895 - protein, 164 aa, Unknown
  Bacterial polypetide isolated from the Sargasso Sea
MKKTGVYPGTFDPITFGHIDVIQKSLKIVDQVIVAISDGDNKKYLFTIEERIKIVNKALFSDLKFKKNKVKVISFNSLTTDLCKKYKSNIILRGLRAVSDFEYEFQLAGMNRKLNKNIETIFLMSDVQNQIISSRLIKEIIELKGDIKKFTTKSTINSLKKKYE

SEQ ID NO: 132896 - protein, 127 aa, Unknown
  Bacterial polypetide isolated from the Sargasso Sea
MNKIGIYPGTFDPLTAGHMDIIKRSLRIVDNLVIAVANNINKHSLFSIQERINIIKSDISSVNELNSKINVIELSGLLTTFAKDQNATCIIRGLRAVSDFEYEFQMTGMNYQLNPDIETIFLMTSEK

SEQ ID NO: 132897 - protein, 164 aa, Unknown
  Bacterial polypetide isolated from the Sargasso Sea
MKKAIYPGTFDPITFGHIDLIKKSLNIFDRVIVAVSDGNTKNYLFSAEERENLIKKALFKDLRFSKKKIDVTSFKTLTTDFCRKMKSNVIIRGLRATSDFEYEFQLAGMNKKLNKLVETVFLMSDPENQIISSKFVKEIIELNGDIRKFTTKTVIKSLKDKFYE

SEQ ID NO: 132898 - protein, 164 aa, Unknown
  Bacterial polypetide isolated from the Sargasso Sea
MKNIAIYPGTFDPITFGHIDVIKKSLRFVDRVIVAISDGNQKNFLFSIDERVKIVQKAIFNDLNFKKNKIQVITFSSLTTDVCKKYNSNIILRGLRAVSDFEYEFQLAGMNRKLNSKIETIFLMSDLENQIISSRFVKEIAQHKGDLKKFTTKSTIKALKNIYV

SEQ ID NO: 132899 - protein, 163 aa, Unknown
  Bacterial polypetide isolated from the Sargasso Sea
MDKIGIYPGTFDPLTFGHIDVIKRSLKIVDKLIIGIADNDNKTPLLSIEERKLIIDSDIKDYFNQNNKIIIKNIVGLLTDFAKLNKVTCIIRGLRAVSDFDYEFQMTGMNYQLNPDLETIFLMSSDKNSFISSNFVKEVHKLGGDVSKFVSTNTIKILDNKNT

SEQ ID NO: 132900 - protein, 167 aa, Unknown
  Bacterial polypetide isolated from the Sargasso Sea
MKKIAIYPGTFDPITYGHIDVIKKSLKIVDNLIVAISEVGEKNYLFSINERIDLVKKALYSDLKLKRSRIKVIKFESLTTSLCKKYKSNIILRGLRAVSDFEYEFQLAGMNRKLNSKIETIFLMSDVDNQIISSRFVKEIAQLGGNLNKFTTKSIISALKKKYENSF

SEQ ID NO: 132901 - protein, 165 aa, Unknown
  Bacterial polypetide isolated from the Sargasso Sea
MKKHNAGYLGSFDPLTNGHLDIISRGSRIFTKLIIGVGGSTKKNLTFSQKERLAMLTRTCKHLNNVEISSFDGLAVDFCKKKNISVIIRGLRTEADYVYEMQMAMMNFTLDPKIDTFFIPTRQDLSHISSSLVKEVAFLGGDVSKLVPEASLELLTSKKNNTNKS

SEQ ID NO: 132902 - protein, 136 aa, Unknown
  Bacterial polypetide isolated from the Sargasso Sea
MKVAIYPGSFDPITYGHMDIIDRACNLFDKIVIAIAKNEAKNPLFNLEDRIKLAKEIYKDNSHVEVVGFPRQLTVDIAKEQNACAIIRGLRAVSDFEYEFQLATMNRSLAPDIESIFLTPKESLIYVSSKFNKRDM

SEQ ID NO: 132903 - protein, 108 aa, Unknown
  Bacterial polypetide isolated from the Sargasso Sea
MNKVAIYPGTFDPITFGHIDVIKKGLKLFDKIVVAVSNVENKDYLFDSDERIEIVKKALFYDLKLNKKKVVVISFSSLTTDLCKKYKSNIILRGLRAVSDFEYEFQLA

SEQ ID NO: 132904 - protein, 164 aa, Unknown
  Bacterial polypetide isolated from the Sargasso Sea
MSKTAIYPGTFDPITFGHIDVIKKSLKIVDRLIVATTDNIEKDYLFSLDERIEILNKCLFNDLRFNKNKIKIISFDDLTVKICKKYKASIIIRGLRAVSDFEYEFQLAGMNKKLDKSVETIFLMSDIENEIISSKFIKEIGKLKGDLKKFATKSVIKAIKSKFS

SEQ ID NO: 132905 - protein, 163 aa, Unknown
  Bacterial polypetide isolated from the Sargasso Sea
SKIAIYPGTFDPITFGHIDVIKKSLKLFEKVIVAVSDVENKKYLFDVEERIEIVKKALFLDMKLNKKKIMVISFTSLTTDLCKKYKSNIILRGLRAVSDFEYEFQLAGMNRKLNNNIETIFLMSDVENQIISSRFVKEIVKLGGDIKKFTTKSTIRSLKEKYE

SEQ ID NO: 132906 - protein, 119 aa, Unknown
  Bacterial polypetide isolated from the Sargasso Sea
MKVAIYPGSFDPITFGHMDIIDRACGLFDKIIIAIAKNEAKNPLFNLEDRIKLAKEIYKDSSQVEVVGFPRQLTVDLAKEQNACAIIRGLRAVSDFEYEFQLATMNRSLAPDIESIFLT

SEQ ID NO: 132907 - protein, 109 aa, Unknown
  Bacterial polypetide isolated from the Sargasso Sea
MNTIDKIFEGNKKVKAIGFTGLVVDLAREQESNILIRGLRAVSDFEYEFQLANMNRAMSPDLESIFLTPKAKFSFLSSTLVREIASMGGKIDSFVDPIVKEALQERFKR

SEQ ID NO: 132908 - protein, 164 aa, Unknown
  Bacterial polypetide isolated from the Sargasso Sea
MKNIAIYPGTFDPITNGHIDVIKKALKLADKIIVGISDGNEKNFLFQIDERLKIVSKALYGDLKLSKNKIQVIKFNSLTTELCKKYNSNLILRGLRAVSDFEYEFQLAGMNRKLNNKVETVFLMSDVENQIISSRFVKEIALHKGDLKKFTTKSTIKSLKEAYA

SEQ ID NO: 132909 - protein, 162 aa, Unknown
  Bacterial polypetide isolated from the Sargasso Sea
MKTAIYPGTFDPITYGHIDVIKKSLNIFDRVIIATTDNINKDYYFSIEERLDIINNSLFKDLRLSKKKIKVISFHNLTINLCKKYNAKAIIRGLRAVSDFEYEFQLAGMNKKLNSKIETMFLMSDVENQIISSKFVKEIASLGGNIDRFVTKYTVKLLKSKF

SEQ ID NO: 132910 - protein, 164 aa, Unknown
  Bacterial polypetide isolated from the Sargasso Sea
MKKAIYPGTFDPITFGHIDLIKKSLNIFDQLIVAVSDGNTKNYLFDANEREQLIKKALFSDLKFSKKKIIVTSFKTLTTDFCKKMKSNVIIRGLRATSDFEYEFQLAGMNKKLNSLVETVFLMSDPENQIISSKFVKEIIELNGNIKKFTTKTVIKSLKYKFNE

SEQ ID NO: 132911 - protein, 164 aa, Unknown
  Bacterial polypetide isolated from the Sargasso Sea
MKKTAIYPGTFDPITFGHIDVINKALKIFDYLIVAVSDGNNKNYLFEIDERIEIVKRALFTDSKIKKKKLKVISFKSLTTALCKKHKSNIILRGLRAVSDFEYEFQLAGMNRKLNKNIETVFVMSDVANQIISSRFVKEIAELNGDIKKFTTKSTIKALKNKLK

SEQ ID NO: 132912 - protein, 164 aa, Unknown
  Bacterial polypetide isolated from the Sargasso Sea
MPKTAIYPGTFDPITFGHIDVIKKSLKIVDKLIVATTDNIEKDYLFSLDERIEILNKSLFNDLRLSRNKIKIISFDDLTVKICKKYKASIIIRGLRAVSDFEYEFQLAGMNKKLDKSVETIFLMSDIENEIISSKFIKEIGKLKGDLKKFATKSVIKAIKSKFS

SEQ ID NO: 132913 - protein, 160 aa, Unknown; identical to SEQ ID NO: 132888
  Bacterial polypetide isolated from the Sargasso Sea

SEQ ID NO: 132914 - protein, 93 aa, Unknown
  Bacterial polypetide isolated from the Sargasso Sea
VIPFNLLTVKLCKKYNANVIIRGLRAVSDFEYEFQLAGMNKKLNEKIETIFLMSDVENQIISSKFVKEIAKFNGKIDNFLTKSVIKELKEKLE

SEQ ID NO: 132915 - protein, 163 aa, Unknown
  Bacterial polypetide isolated from the Sargasso Sea
MKIAVYPGTFDPITNGHIDVIKKSLKIFDKLIIATTDNTDKNYSFSVNERLDIINNSLFKDLKLSKKKIKVISFDNLTIELCKRYKANAIIRGLRAVSDFEYEFQLAGMNKKLNSKIETMFLMSDVENQIISSKFVKEIAILGGNIDRFVTRYTVKMLKNKFL

SEQ ID NO: 132916 - protein, 164 aa, Unknown
  Bacterial polypetide isolated from the Sargasso Sea
MSKVGIYPGTFDPITNGHIDVIKRSLKIVKKLIIAVSNDYSKDYLFSSEERVAIIENSLFKDLRIKKQKVKVLSFNTLTTSLCAKYKATIIFRGLRAVSDFEYEFQLAGMNRQLNKSIETVFLMSDPDNQVISSKFVKEIAKLNGKIDAFVTKSTKKAIKEKYD

SEQ ID NO: 132917 - protein, 165 aa, Unknown
  Bacterial polypetide isolated from the Sargasso Sea
MTKIGIYPGTFDPLTFGHLDVINRSLKLVDKLIIGIANNDNKNSLLSVNERQNIIENDINEYLEKNTKVSIKVIEGLLTDFAKLNNAVCIIRGLRAVSDFEYELQMTGMNSQLNPEIETIFLMSSDKNSFISSNLVKEVHKLGGNVSRFVSQNTIKILDLKNSPS

SEQ ID NO: 132918 - protein, 112 aa, Unknown
  Bacterial polypetide isolated from the Sargasso Sea
MKNIAIYPGTFDPITNGHIDVIKKALKLADKIIVGISDGNEKNFLFPIDERLNIVTKALYGDLKFPKNKIQVIKFNSLTTELCRKYKSNLILRGLRAVSDFEYEFQLAGMNR

SEQ ID NO: 132919 - protein, 140 aa, Unknown
  Bacterial polypetide isolated from the Sargasso Sea
SLKIVDKLIVATTDSSDKEYLFSVNERIEILRRSLYGDLKLSKKRIKIISFDNLTIKTCKKFKASLIIRGLRAVSDFEYEFQLAGMNKKLDKNIETIFLMSNIENEIISSKFVKEIGVLKGDLKKFVTKSVIKAIQNKLR

SEQ ID NO: 132920 - protein, 163 aa, Unknown
  Bacterial polypetide isolated from the Sargasso Sea
MNKIGIYPGTFDPMTKGHFNIILRSLKIVDKLIVGVADNPNKRPLLSTDERINIIKNDISINNLDLNLIDIQPVKGLLTDFAKSFNAQCIIRGLRAVSDFEYEFQMTGMNYQLNPHIETIFLMSSDNNSFISSNLVKEVHKLGGDVSKFVSKNTINILDNKNF

SEQ ID NO: 132921 - protein, 156 aa, Unknown
  Bacterial polypetide isolated from the Sargasso Sea
MKVAIYPGSFDPITVGHMDIVERATVLFDKVIISVAETDMKNPLFSSEERLGLVSSIYADNEKIEVVAFKKKLTVDLARENNACAIIRGLRAVSDFEHEFQLATMNRALAPDIESIFLTPKDTLIYVSSSLVKEIASLGGDISDFVHENVEMALKA

SEQ ID NO: 132922 - protein, 138 aa, Unknown
  Bacterial polypetide isolated from the Sargasso Sea
MKNNALYPGTFDPITYGHIDVIKKALKIVDRVIIAVSENSNKNYLVDINERLKIINKALFKDLKMKTSKIKVRPFNSLTTDLCKKMNSKIILRGLRAVSDFEYEISLAGMNRKLNNKIETVFFMSDVEKSISSSRFVK

SEQ ID NO: 132923 - protein, 143 aa, Unknown
  Bacterial polypetide isolated from the Sargasso Sea
SLKIFDRVVVAATDNINKNYFFAVEDRLSIIKNSLFKDLRLNKNKIKVVSFKTLTINLCNKYKASVIIRGLRAVSDFEYEFQLAGMNKKLNNNIETIFLMSEVENQIISSNFVKEITKLKGNINKFVTKSTVKMLKDKFNEEI

SEQ ID NO: 132924 - protein, 164 aa, Unknown
  Bacterial polypetide isolated from the Sargasso Sea
MTKVAIYPGTFDPITFGHIDIIKKSLKIVDRLIVATTDNSEKDYFFSLEDRLEILNKSLFNDLRLSKKKIEIVSFNSLTVNLCRKHNAYIIIRGLRAVSDFEYEFQLAGMNKKLDKNIETIFLMSDIENEIISSKFIKEIGKLKGSLKKFVTKSVIKAIKSKIE

SEQ ID NO: 132925 - protein, 104 aa, Unknown
  Bacterial polypetide isolated from the Sargasso Sea
MKNIAIYPGTFDPITYGHIDVIKKGINIFDKLIVAVSENGEKNHLFSTEERITLVKKSLNDVKIDPKKIQVIKFASLTTTLCKKYQSKIILRGLRAVSDFEYEF

SEQ ID NO: 132926 - protein, 103 aa, Unknown
  Bacterial polypetide isolated from the Sargasso Sea
MKNIAIYPGTFDPITNGHIDVIKKALKLADKIIVGISDGNEKNFLFPIDERLNIVTKALYGDLKFPKNKIQVIKFNSLTTELCRKYKSNLILRGLRAVSDFEY

SEQ ID NO: 132927 - protein, 126 aa, Unknown
  Bacterial polypetide isolated from the Sargasso Sea
MNKTAIYPGTFDPITFGHIDVIKKSLKLFNKIIVGVSDESNKNYLFSSEERIEIVNKALFKDLKLNKKKIKVVSFGSLTTDLCKKYKSNIILRGLRAVSDFEYEFQLAGMNRKLNQNIETIFLMSD

SEQ ID NO: 132928 - protein, 163 aa, Unknown
  Bacterial polypetide isolated from the Sargasso Sea
MKNIGIYPGTFDPITLGHIDVIKRALKIVKKLVIAVSNDFSKDYLFSSEERVIIVKKAIYDDLKISKKSVDVMSFNSLTTSLCKKLNAKIIFRGLRAVSDFEYEFQLAGMNRQLNNKVETVFLMSDVEKQVISSKFVKEIAILGGNIDNFVTKSTKKTIKMKI

SEQ ID NO: 132929 - protein, 164 aa, Unknown
  Bacterial polypetide isolated from the Sargasso Sea
MPKTAIYPGTFDPITFGHIDVIKKSLKIVDKLIVATTDNIEKEYLFSLDERIEILNKSLFNDLRLSKNKIKIISFDDLTVKICKKYKASIIIRGLRAVSDFEYEFQLAGMNKKLDKSVETIFLMSDIENEIISSKFIKEIGKLKGDLKKFATKSVIKAIKSKFS

SEQ ID NO: 132930 - protein, 164 aa, Unknown
  Bacterial polypetide isolated from the Sargasso Sea
MSKIAIYPGTFDPITFGHIDVIKKSLKLFDKIVVGVSDESNKNYLFSSEERIEIVNKALFKDLKLNRKKIKVVSFGSLTTDLCKKYKSNIILRGLRAVSDFEYEFQLAGMNRKLNQNIETIFLMSDVENQIISSRFVKEIVKLKGDIKKFTTKSTIKSLKEKYE

SEQ ID NO: 132931 - protein, 84 aa, Unknown
  Bacterial polypetide isolated from the Sargasso Sea
IELCKKYKASAIIRGLRAVSDFEYEFQLAGMNKKLNPKIETMFLMSDVENQIISSKFVKEIANLGGNIDRFVTKYAVKMLKNKF

SEQ ID NO: 132932 - protein, 85 aa, Unknown
  Bacterial polypetide isolated from the Sargasso Sea
TIDLCKKYKANTIIRGLRAVSDFEYEFQLAGMNKKLNSKIDTMFLMSDIENQIISSKFVKEIASLGGDIDRFVTKSTAKLLKKNF

SEQ ID NO: 132933 - protein, 164 aa, Unknown
  Bacterial polypetide isolated from the Sargasso Sea
MKNIAIYPGTFDPITNGHIDVIKKALKLADKIIVGISDGSEKNFLFPIDERLKIVSRALYADLKLSKNKIQVIKFNSLTTELCKKYKSNLILRGLRAVSDFEYEFQLAGMNRKLNNKVETIFLMSDVENQIISSRFVKEIALHKGDLRKFTTKSTIKSLKEIYA

SEQ ID NO: 132934 - protein, 120 aa, Unknown
  Bacterial polypetide isolated from the Sargasso Sea
MAKKIGIYPGTFDPLTFGHIDIIKRSLMIVDKLIIGVANNVNKIPMLSINDRKKIIKKDVIKYIDKNDKIIIKDIKGLLTNFAKTNKATCIIRGLRAVSDFEYEFQMTGMNYKLNPNIET

SEQ ID NO: 132935 - protein, 160 aa, Unknown
  Bacterial polypetide isolated from the Sargasso Sea
MKVAIYPGSFDPITFGHMDIIDRACGLFDKIIIAIAKSETKDPLFSLEDRLKLAKTIYKNNSQVEVIGFPRQLTVDVAKEHNACAIIRGLRAVSDFEYEFQLATMNRSLAPDIESIFLTPKESLIYVSSSLIKEICDLKGDISKFVDPIVQQALKAKLDS

SEQ ID NO: 132936 - protein, 160 aa, Unknown; identical to SEQ ID NO: 132888
  Bacterial polypetide isolated from the Sargasso Sea

SEQ ID NO: 132937 - protein, 158 aa, Unknown
  Bacterial polypetide isolated from the Sargasso Sea
MAKALYPGTFDPITLGHIDIIERALHLFDEVTIAIATSESKKPVFTLEERISHVEQIFKGNKKVKAIGFTGLVVDLAKEENSNILIRGLRAVSDFEYEFQLANMNRAMSPDLESVFLTPKAKFSFLSSTLVREIASMGGEISSFVDPIIEKALKERFK

SEQ ID NO: 132938 - protein, 161 aa, Unknown
  Bacterial polypetide isolated from the Sargasso Sea
MRVAIYPGSFDPITYGHMDIIERGCNLFDKIIVAIAKSDAKKPLFTLEERIALSSSIFEDNEKVEVVGFPRQLTVDLAREHNASAIIRGLRAVSDFEYEFQLATMNRSLAPDIESIFLTPKESLIYVSSSLIKEISDLKGDVSKFVHPNIEKALRAKLDSH

SEQ ID NO: 132939 - protein, 160 aa, Unknown
  Bacterial polypetide isolated from the Sargasso Sea
MKVAIYPGSFDPITYGHMDIIDRACGLFDKIVIAIAKNEAKNPLFSLEDRIKLADSIYKDNSQVEIVGFPRQLTVDIAKEQNACAIIRGLRAVSDFEYEFQLATMNRSLAPNIESIFLTPKESLIYVSSSLIKEICDLKGDISKFVHPSVEKALKAKLAS

SEQ ID NO: 132940 - protein, 160 aa, Unknown
  Bacterial polypetide isolated from the Sargasso Sea
MKVAIYPGSFDPITFGHMDIIDRASGLFDKILIAIAKSETKNPLFSLEDRIKLANTIYEDNDKVDVIGFPRQLTVDVAKENNACAIIRGLRAVSDFEYEFQLATMNRSLAPDIESIFLTPKESLIYVSSSLIKEICDLKGDISKFVHPTVEQALKAKLDS

SEQ ID NO: 132941 - protein, 160 aa, Unknown
  Bacterial polypetide isolated from the Sargasso Sea
MRVAIYPGSFDPITYGHMDIIDRASGLFDKIIIAVAKSEAKNPLFTLEDRMKLAKTIYGDNDKVDIVGFPRQLTVDVAKEHNACAIIRGLRAVSDFEYEFQLATMNRSLAPDIESIFLTPKESLIYVSSSLIKEICDLKGDISKFVHPTVEQALKAKLGS

SEQ ID NO: 132942 - protein, 157 aa, Unknown
  Bacterial polypetide isolated from the Sargasso Sea
MKILYPGTFDPLTNGHLDLIERAEKIFGNLVVAVLENTSKTPTFNLERRIIQINNTLSHLPNIEVISYSGLTVDCANDLKANLILRGLRAMSDFEYELQIAHTNKSLNNDIETIFLSTNTNYSFLSSSLVKEVAKFGGEINHMVPPSVERDLKEYFK

SEQ ID NO: 132943 - protein, 160 aa, Unknown
  Bacterial polypetide isolated from the Sargasso Sea
MRVAIYPGSFDPITYGHMDIIDRASGLFDKIIVAVAKSEAKNTLFSLEDRVKLATTIYKDNPKVEIVDFPRQLTVDVAKDHNACAIVRGLRAVSDFEYEFQLATMNRSLAPDIESIFLTPKESLIYVSSSLIKEICDLKGDISKFVHPAVEQALKAKLGS

SEQ ID NO: 132944 - protein, 159 aa, Unknown
  Bacterial polypetide isolated from the Sargasso Sea
MSNIAVYPGTFDPITNGHTDLVNRGCRLFDKIIILVAEKTQKNTLFTIDERIKFVESVFSDNKKIIVEPLNELVVDYATKKSAKIILRGLRAISDFEYEVQLASMNRSMQPDIESVFMSPSDEYSFLSSSIVKDIARHGGDLSKFVHPSVLSELVKKFS

SEQ ID NO: 132945 - protein, 160 aa, Unknown
  Bacterial polypetide isolated from the Sargasso Sea
MKVAIYPGSFDPITVGHMDIVERATVLFDKVIISVAETDMKNPLFSSEERLDLVSSIYANNEKIEVVAFKKKLTVDLARENNACAIIRGLRAVSDFEHEFQLATMNRALAPDIESIFLTPKDTLIYVSSSLVKEIASLGGDISNFVHENVEMALKAKLNH

SEQ ID NO: 132946 - protein, 173 aa, Unknown
  Bacterial polypetide isolated from the Sargasso Sea
MRDDRRSDMVVAVYPGTFDPLTRGHEDLVRRASSIFDTLVVGVADSRAKKPFFSLEERLTIANEVLGHYPNVKVMSFTGLLKDFVRTNNARVIVRGLRAVSDFEYEFQMAGMNRYLLPDVETMFMTPSDQYQFISGTIVREIAQLGGDVSKFVFPSVEKWLTEKVAAIGGPAA

SEQ ID NO: 132947 - protein, 159 aa, Unknown
  Bacterial polypetide isolated from the Sargasso Sea
MAKALYPGTFDPITLGHIDIIDRALHLFDEVTVAIATSAAKKPIFTLEERIEHIDKIFEGNKKVKAIGFTGLVVDLAKEQESNILIRGLRAVSDFEYEFQLANMNRAMSPDLESVFLTPKAKFSFLSSTLVREIASMGGKIDSFVDPIVMRALQEKFKK

SEQ ID NO: 132948 - protein, 160 aa, Unknown
  Bacterial polypetide isolated from the Sargasso Sea
MKVAIYPGSFDPITYGHMDIIDRATNLFDKVIIAIAKNEAKNHLFTLEDRIKLAKNIYKDNSNVEVLGFPRQLTVDVAKENNACAIIRGLRAVSDFEYEFQLATMNRSLAPDVESIFLTPKESLIYVSSSLIKEICDLKGDVSKFVHPSVEQALKAKLGS

SEQ ID NO: 132949 - protein, 160 aa, Unknown
  Bacterial polypetide isolated from the Sargasso Sea
MKVAIYPGSFDPITFGHMDIIDRASGLFDKIIIAIAKSETKNPLFSLEDRIKLANTIYKDNDKVDVIGFPRQLTVDVAKEHDACAIIRGLRAVSDFEYEFQLATMNRSLAPDIESIFLTPKESLIYVSSSLIKEICDLKGDISKFVHPSVEQALKAKLDS

SEQ ID NO: 132950 - protein, 164 aa, Unknown
  Bacterial polypetide isolated from the Sargasso Sea
MNKIAIYPGTFDPITFGHIDVIKKSLKLFDKIVVGVSDESNKNYLFSSEERIEIVNKALFKDLKLNKKKIKVVSFGSLTTDLCKKYKSNIILRGLRAVSDFEYEFQLAGMNRKLNQNIETIFLMSDVENQIISSRLVKDIVKLKGDIKKFTTKSTIKSLKNKYE

SEQ ID NO: 132951 - protein, 166 aa, Unknown
  Bacterial polypetide isolated from the Sargasso Sea
MRIGLYPGTFDPLTLGHVDIIRRASYLVDKLVIGVAVNNSKSPMFSLQERVNMINEEIESIENEFKIQIITHPFENLLIECAKDVNANIIIRGLRAVSDFEFEFQMVGMNRVLSNEIETVFLMADNSYQSIASKLVKEIARLGGNTKKFVPNSVYKRLINIKSKKK

SEQ ID NO: 132952 - protein, 159 aa, Unknown
  Bacterial polypetide isolated from the Sargasso Sea
MKNIIYPGTFDPITNGHLDIAERASTLFDEVMIVIANNPRKESLFTIDERIDLIKKSTSHLKNVLVHTTESLIVNFARKNKSVALIRGLRSISDFEYEFQMALMNRSLAPEISTIFMMPDEKYMHLNSTVVKEIAALEGDISSYVPEVVNTALKSKLTK

SEQ ID NO: 132953 - protein, 153 aa, Unknown
  Bacterial polypetide isolated from the Sargasso Sea
LTPMTNGHMDIIKRSLKIVDNLVIAVAKNLNKNSLFNVSERIDIVKNDISLLNEINSKIKVTELSGLLTTFAKNQNATCIIRGLRAVSDFEYEFQMTGMNYQLNPDIETIFLMTSEKNSFISSNFVKEVHKLGGDVSSFVSSNTLNILNKKNS

SEQ ID NO: 132954 - protein, 165 aa, Unknown
  Bacterial polypetide isolated from the Sargasso Sea
MSKIGVYPGTFDPMTNGHLNIIKRSLKIVDQLIIGVADNQNKKPLLSIIERKDIIANDLKSENMDNNKISIFSVKGLLTEFAKTHNANCIIRGLRAVSDFEYQFHMTGMNYQLSPDIETVFLMSSDNNSFISSNLVKEVHKLGGDVSKFVSKNTINILNRKNSIS

SEQ ID NO: 132955 - protein, 139 aa, Unknown
  Bacterial polypetide isolated from the Sargasso Sea
SLRIVDNLVIAVANNINKVSLFSVQERINIIKNDISSVNELNSKINVTELSGLLTTFAKDQNATCIIRGLRAVSDFEYEFQMTGMNYQLNPNIETIFLMTSEKNSFISSNFVKEVHKLGGDVSNFVSKNTLEQLNKKNS

SEQ ID NO: 132956 - protein, 164 aa, Unknown
  Bacterial polypetide isolated from the Sargasso Sea
MKNIAIYPGTFDPITFGHIDVIKKALKFVDNVIVGISNGNQKNFLFPIDERINIVSKALFEDLKFSKKKIKVITFNSLTTDLCNKYRSNLILRGLRAVSDFEYEFQLAGMNRKLNDKVETIFLMSDVENQIISSRFVKEIAQHHGNLKKFTTKSTIKSLKEKYE

SEQ ID NO: 132957 - protein, 141 aa, Unknown
  Bacterial polypetide isolated from the Sargasso Sea
MSKIAIYPGTFDPITYGHIDVIKKALKLFDKIVVGVSDVSSKNYLFSSEERIEILNKALFKDLKLNKKKIIVVSFSSLTTDLCKKYKSNIILRGLRAVSDFEYEFQLAGMNRKLNQNIETIFLMSDVESQIISSRFVKEIV

SEQ ID NO: 132958 - protein, 162 aa, Unknown
  Bacterial polypetide isolated from the Sargasso Sea
MSKTAIYPGTFDPITFGHIDVIKKSLKLFDKVVVAVSNGENKDYLFDVEERIEIVKNALFKDLKMNKKKIIIISFKSLTTTLCKKYKSNIILRGLRAVSDFEYEFQLAGMNRKLNDNIETIFLMSDVENQIISSKFVKEIIKLKGDIKKFTTKTTIKALKNK

SEQ ID NO: 132959 - protein, 163 aa, Unknown
  Bacterial polypetide isolated from the Sargasso Sea
MNVTAIYPGTFDPLTNGHTDLIQRAAKMFDTVLVAVANNPSKQPCFNLEERVALANTILSHLDNVKVIGFSGLLADLARDHNAHVLIRGIRAVSDFDYEFQLANMNRRLNPDLESVFLTPAEKNSFISSTLVKEVARHHGDVSEFVDPIIVKALKEKVGCNTN

SEQ ID NO: 132960 - protein, 164 aa, Unknown
  Bacterial polypetide isolated from the Sargasso Sea
MSKIAIYPGTFDPITFGHIDVIKKSLKLFDKIVVGVSDESNKDYLFSSDERIEIVNKALFKDLKLNRKKIKVVSFGSLTTDLCKKYKSNIILRGLRAVSDFEYEFQLAGMNRKLNQNIETIFLMSDVENQIISSRFVKEIVKLKGDIKKFTTKSTIKSLKDKYE

SEQ ID NO: 132961 - protein, 164 aa, Unknown
  Bacterial polypetide isolated from the Sargasso Sea
MKNIAIYPGTFDPITFGHIDVIKKSLKIVDKVIVGISDGNQKNFLFSLDERIEIVKRALYKDLKFKKNKVDVIKFNTLTTDLCKKYKSNIILRGLRAVSDFEYEFQLAGMNRKLNNQVETIFLMSDVENQIISSRFVKEIAQHNGDLKKFTTKSTIKSLKEVYE

SEQ ID NO: 132962 - protein, 166 aa, Unknown
  Bacterial polypetide isolated from the Sargasso Sea
MRALYPGSFDPVTFGHLDLIQRASQLFDEVIVAVLRNPNKQPSFSLEERLEQLSSVTSHLPQVRVTSFEGLTVHFALEQDARVILRGLRALSDFEFELQLAHTNASLSDQVDTLFMATAVPHSFLSSSVVKEVARFGGDVQHLVPETVAIDLRRLFNQRVDVSGDR

SEQ ID NO: 132963 - protein, 164 aa, Unknown
  Bacterial polypetide isolated from the Sargasso Sea
MKKTGVYPGTFDPITFGHIDVIQKSLKIVDQVIVAISDGDNKKYLFTIEERIKIVNKALFSDLKFKKNKVKVISFNSLTTDLCKKYKSNIILSGLRAVSDFEYEFQLAGMNRKLNKNIETIFLMSDVQNQIISSRLIKEIIELKGDIKKFTTKSTINSLKKKYE

SEQ ID NO: 132964 - protein, 118 aa, Unknown
  Bacterial polypetide isolated from the Sargasso Sea
MKVAIYPGSFDPITFGHMDIIDRASGLFDKIIIAIAKSETKNPLFSLEDRIKLANTIYKDNDKVDVIGFPRQLTVDVAKEHDACAIIRGLRAVSDFEYEFQLATMNRSLAPDIESIFL

SEQ ID NO: 132965 - protein, 160 aa, Unknown
  Bacterial polypetide isolated from the Sargasso Sea
MKVAIYPGSFDPITFGHMDIIDRACGLFDKIIIAIAKNEAKNPLFNLEDRIKLAKEIYKDNSQVEVVGFPRQLTVDLAKEQNACAIIRGLRAVSDFEYEFQLATMNRSLAPDIESIFLTPKESLIYVSSSLIKEICDLKGDISKFVHPSVEQALKAKLSS

SEQ ID NO: 132966 - protein, 157 aa, Unknown
  Bacterial polypetide isolated from the Sargasso Sea
MKILYPGTFDPLTNGHLDLIERAEKIFGNLVVAVLENTSKTPTFNLERRIIQIKNSLSHLPNIEVISYSGLTVDCANDLKANLILRGLRAMSDFEYELQIAHTNKSLNNDIETIFLSTNTNYSFLSSSLVKEVAKFGGEINHMVPPSVERDLKEYFK

SEQ ID NO: 132967 - protein, 164 aa, Unknown
  Bacterial polypetide isolated from the Sargasso Sea
MKKIAIYPGTFDPITYGHVDVINKSLKLVDKIFVAISESNEKKCLFSVEERMAIVKEALYKDLKFKKNKINIISFNNLTTDICKKFKSNIILRGLRAVSDFEYEFQLAGMNRKLNNNIETIFLMSDVKNQIISSRLIKEIAELKGNINSFTSKSVIKALKKKYE

SEQ ID NO: 132968 - protein, 154 aa, Unknown
  Bacterial polypetide isolated from the Sargasso Sea
PGSFDPFTNGHNDILVRSLKIFDKVIIAVVKNSAKNYLFSLEDRVQMIDDLFKDHENISCVGLDSKLTVDLASELNAQAIIRGLRAVSDFEYEFQIASINRSQNPEIESVFFTPDEKLTFISSSMVKELASYGGDISEFVHADIKNALIRKFKN

SEQ ID NO: 132969 - protein, 157 aa, Unknown
  Bacterial polypetide isolated from the Sargasso Sea
MKILYPGTFDPLTNGHIDLIERAEKIFGNLVVAVLENTSKTPTFNLERRIIQIKNSLSHLPNIEVISYSGLTVDCANDLKANLILRGLRAMSDFEYELQIAHTNKSLNNDIETIFLSTNTNYSFLSSSLVKEVAKFGGEINHMVPPSVERDLKEYFK

SEQ ID NO: 132970 - protein, 164 aa, Unknown
  Bacterial polypetide isolated from the Sargasso Sea
MNKVAIYPGTFDPITYGHIDVIKKALKIFDKIIVAVSEVSDKNYLFSLDERISIVNKALFSDLKLNKKKILVVSFGSLTTDLCKKYKSTIILRGLRAVSDFEYEFQLAGMNRKLNSNIETIFLMSDVENQIISSKFVKEIVKLKGDIKKFTTKSTIKSLKEKYE

SEQ ID NO: 132971 - protein, 164 aa, Unknown
  Bacterial polypetide isolated from the Sargasso Sea
MSKIAIYPGTFDPITYGHIDVIKKSLKLFKKIVVAVSNVENKDYLFSSDERIDIVKKALFSDLKLDKKKIIVISFSSLTTDLCKKYKSNIILRGLRAVSDFEYEFQLAGMNRKLNNNIETLFLMSDVENQIISSKFVKEIVKLNGDIRKFTTKSTIKSLKEKYE

SEQ ID NO: 132972 - protein, 159 aa, Unknown
  Bacterial polypetide isolated from the Sargasso Sea
MQRAVYPGTFDPMTMGHVDLVKRASKLFDLVIIAIASSDSKKPMFSLEERIEIGNKIFADDPKVEVVGFSGLLVNFAKDNDANILIRGLRVVADFEYEFQLANMNRAMSPDIESVFLTPKEEYSYISSSLVKEIAMMGGDVTRFVDPVTLEALNQKIKN

SEQ ID NO: 132973 - protein, 164 aa, Unknown
  Bacterial polypetide isolated from the Sargasso Sea
MKNNAIYPGTFDPITYGHIDVIKKALKIVDTVIVAISDVNNKNYLFDSEERIEIVKKALYQDLKLNKKRIKVVKFNALTTSLCRKYKSNIILRGLRAVSDFEYEFQLAGMNRKLNSNIETIFLMSNVENQIISSNFVKEIISLGGDVKKFTTKSTIKALKLKYE

SEQ ID NO: 132974 - protein, 160 aa, Unknown; identical to SEQ ID NO: 132939
  Bacterial polypetide isolated from the Sargasso Sea

SEQ ID NO: 132975 - protein, 160 aa, Unknown
  Bacterial polypetide isolated from the Sargasso Sea
MKVAIYPGSFDPITVGHMDIVERATVLFDKVIISVAETDMKNPLFSSEERLDLVSSIYADNEKIEVVAFKKKLTVDLARENNACAIIRGLRAVSDFEHEFQLATMNRSLAPDIESIFLTPKDTLIYVSSSLVKEIASLGGDISKFVHENVEMALKAKLNH

SEQ ID NO: 132976 - protein, 163 aa, Unknown
  Bacterial polypetide isolated from the Sargasso Sea
MNKIGIYPGTFDPMTAGHMDIIKRSLRIVDNLVIAVANNMNKDSLFGVQERINIIKSDISNLNEFNSKINVMELSGLLTTFAKNQNATCIIRGLRAVSDFEYEFQMTGMNYQLNPDIETIFLMTSEKNSFISSNFVKEVHKLGGDVSKFVSKNTLEQLNKKNS

SEQ ID NO: 132977 - protein, 164 aa, Unknown
  Bacterial polypetide isolated from the Sargasso Sea
MKNIAIYPGTFDPITNGHIDVIKKALKLADKIIVGISDGNEKNFLFPIDERYKIVSKALYHDLKFSKNKIKVIKFNSLTTELCRKYKSNLILRGLRAVSDFEYEFQLAGMNRKLNNKVETIFLMSDVENQIISSRFVKEIALHKGDLKKFTTKSTIKSLKEVYA

SEQ ID NO: 132978 - protein, 92 aa, Unknown
  Bacterial polypetide isolated from the Sargasso Sea
KSIDGLLTDFAKLNNVTCIIRGLRAVSDFDYEFQMTGMNYQLNPDLETIFLMSSDKNSFISSNFVKEVHKLGGDVSKFVSKNTIKILDNKNT

SEQ ID NO: 132979 - protein, 164 aa, Unknown
  Bacterial polypetide isolated from the Sargasso Sea
MKNIAIYPGTFDPITFGHIDVIKKALKFVDKVVVAISDGNQKNFLFPIDERVDIVKKALFSDLKFTKKNIDVITFNSLTTDLCKKYRSNIILRGLRAVSDFEYEFQLAGMNRKLYNKIETIFLMSDVENQIISSRFVKEIAQHNGDLKKFTTKSTIESLKERYA

SEQ ID NO: 132980 - protein, 147 aa, Unknown
  Bacterial polypetide isolated from the Sargasso Sea
MKKAIYPGTFDPITFGHIDLIKKSLNIFDQVIVAVSDGNTKNYLFNAEEREQLIKKALFNDLKFNRKKIIVTTFKTLTTDFCKKKKANVIIRGLRATSDFEYEFQLAGMNKKLNSLVETVFLMSDPENQIISSKFVKEIIELNGDIK

SEQ ID NO: 132981 - protein, 149 aa, Unknown
  Bacterial polypetide isolated from the Sargasso Sea
MKNIAIYPGTFDPITFGHIDVIKKSLKIVDKVIVGISDGNQKNFLFSLDERIEIVKRALYVDLKFKKNKVDVIKFNTLTTDLCKKYKSNIILRGLRAVSDFEYEFQLAGMNRKLNNQVETIFLMSDVENQIISSRFVKEIAQHNGDLKN

SEQ ID NO: 132982 - protein, 123 aa, Unknown
  Bacterial polypetide isolated from the Sargasso Sea
MNKIGIYPGTFDPMTAGHMDIIKRSLRIVDNLVIAVANNINKDSLFSVQERINIIKSDISNLKEFNSKINVMELSGLLTTFAKDQNATCIIRGLRAVSDFEYEFQMTGMNYQLNPDIETNISL

SEQ ID NO: 132983 - protein, 164 aa, Unknown
  Bacterial polypetide isolated from the Sargasso Sea
MKKTAIYPGTFDPITFGHIDVIKKALKLFDKVVVAVSNGNNKDYLFDSEERIEIIKKALFIDCKLKKKKIDVISFVSLTTDLCKKYKSNIILRGLRAVSDFEYEFQLAGMNRKLNNNVETFFLMSDVENQIISSRFVKEIVKLNGDIKKFTTKNTIKSLKKKYE

SEQ ID NO: 132984 - protein, 164 aa, Unknown
  Bacterial polypetide isolated from the Sargasso Sea
MSKTAIYPGTFDPITFGHIDVIKKALKLFDKIVVAVSDGENKDYLFDAEERLEIVRNALFKDLKMNKKKITLISFKSLTTSLCKKYKSNIILRGLRAVSDFEYEFQLAGMNRKLNNNIETLFLMSDVENQIISSKFVKEIIKLNGDIKKFTTKSTIKALKEKYE

SEQ ID NO: 132985 - protein, 162 aa, Unknown
  Bacterial polypetide isolated from the Sargasso Sea
MSKIGIYPGSFDPITYGHLDIIQRSLSVVDELVIAVSNNKSKNHLISIDDRLNLINQSILSLPEKDLSKIKVEKFDNLLVHYVKSKNASLIIRGLRAVSDFEYEFLMTGMNRSIDKDIETIFLMSSEKYHFISSRFIKEIHKLGGDISKSVPKPVLDFLAKI

SEQ ID NO: 132986 - protein, 164 aa, Unknown
  Bacterial polypetide isolated from the Sargasso Sea
MKNIAIYPGTFDPITFGHIDVIKKALKFVDKVIVGISDGNQKNFLFSIDERVKIVKKAIFNDLNFRKNKVEIITFDSLTTDLCKKYKSNIILRGLRAVSDFEYEFQLAGMNRKLNSSIETIFLMSDLENQIISSRFVKEIAQHKGDLKKFTTKSTIKSLKNIYA

SEQ ID NO: 132987 - protein, 160 aa, Unknown
  Bacterial polypetide isolated from the Sargasso Sea
MRVAIYPGSFDPITYGHMDIIDRASGLFDKIIIAVAKSEAKSPLFTLEDRMKLAKTIYGDNDKVDVVGFPRQLTVDVAKEHNACAIIRGLRAVSDFEYEFQLATMNRSLAPDIESIFLTPKESLIYVSSSLIKEICDLKGDISKFVHPSVEQALKAKLGS

SEQ ID NO: 132988 - protein, 164 aa, Unknown
  Bacterial polypetide isolated from the Sargasso Sea
MKNIAIYPGTFDPITNGHIDVIKKALKLADKIIVGISDGNEKNFLFPIDERLKIVSKALYGDLKLSKNKIQVIKFNSLTTELCKKYKSNLILRGLRAVSDFEYEFQLAGMNRKLNNKVETIFLMSDVENQIISSRFVKEIALHKGDLRKFTTKSTIKSLKEIYA

SEQ ID NO: 132989 - protein, 164 aa, Unknown
  Bacterial polypetide isolated from the Sargasso Sea
MNKVAIYPGTFDPITFGHIDVIKKGLKLFDKIVVAVSNVDNKDYLFDCEERIEIVKKALFSDLKLNKKKITVISFTSLTTDLCKKYKSNIILRGLRAVSDFEYEFQLAGMNRKLNKNIETLFLMSDVENQIISSKFVKEIIKLKGNIKKFTTKSTIKLLKRKYE

SEQ ID NO: 132990 - protein, 164 aa, Unknown
  Bacterial polypetide isolated from the Sargasso Sea
MSKIAIYPGTFDPITYGHIDVIKKALKLFDKIVVGVSDVSSKNYLFSSEERIEILNKALFKDLKLNKKKIIIVSFSSLTTDLCKKYKSNIILRGLRAVSDFEYEFQLAGMNRKLNQNIETIFLMSDVENQIISSRFVKEIVKLNGDIKKFTTKSTIKTLKEKYE

SEQ ID NO: 132991 - protein, 164 aa, Unknown
  Bacterial polypetide isolated from the Sargasso Sea
MKNIAIYPGTFDPITFGHIDVIKKSLKIVDKVIVGISDGNQKNFLFSLDERIEIVKRALYKDLKFKKNKVDVIKFNTLTTDLCKKYKSNLILRGLRAVSDFEYEFQLAGMNRKLNNQVETIFLMSDIENQIISSRFVKEIAQHNGDLKKFTTKSTIKSLKEVYE

SEQ ID NO: 132992 - protein, 164 aa, Unknown
  Bacterial polypetide isolated from the Sargasso Sea
MKNIAIYPGTFDPITNGHIDVIKKALKLADKIIVGISDGNEKNFLFPIDERLKIVTKALYNDLKLPKNKIQVIKFNSLTTELCKKYKSNLILRGLRAVSDFEYEFQLAGMNRKLNNKVETVFLMSDVENQIISSRFVKEIAQHKGDLKKFTTKSTIKSLKEIYA

SEQ ID NO: 132993 - protein, 164 aa, Unknown
  Bacterial polypetide isolated from the Sargasso Sea
MSKTAIYPGTFDPITFGHIDVIKKSLKLFDKIVVAVSDGENKSYLFNAEERLEIVKNALFKDLKMSKKKIILISFKSLTTTLCKKYKSNIILRGLRAVSDFEYEFQLAGMNRKLNTNIETLFLMSDVENQIISSNFVKEIIKLNGDIKKFTTKSTIKALKEKYE

SEQ ID NO: 132994 - protein, 164 aa, Unknown
  Bacterial polypetide isolated from the Sargasso Sea
MKKSAIYPGTFDPITFGHIDVIKKGLKIFDKIIVAVSESNSKKCLFDSYERIKIVNDALFKDLKFKKSNIKVISFDSLTTDLCKKFKSTVILRGLRAVSDFEYEFQLSGMNKKLNNNIETLFLMSDADKQIISSKLIKEITELRGDIKKFTTKSTVKALKDKYV

SEQ ID NO: 132995 - protein, 141 aa, Unknown
  Bacterial polypetide isolated from the Sargasso Sea
MNKVAIYPGTFDPITYGHIDVIQKALKLFDKIVVGVSNVNNKNYLFSSEERIDIVNKALFKDLKLSNKKIIVISFNSLTTDLCKKFKSNIILRGLRAVSDFEYEFQLAGMNRKLNNNIETIFLMSDVENQIISSKFVKEIC

SEQ ID NO: 132996 - protein, 164 aa, Unknown
  Bacterial polypetide isolated from the Sargasso Sea
MPKTAIYPGTFDPITFGHIDVIKKSLKIVDKLIVATTDNIEKDYLFSLDERIEILNKSLFNDLRLSKNKIKIISFDDLTVKICKKYKASIIIRGLRAVSDFEYEFQLAGMNKKLDKSVETIFLMSDIENEIISSKFIKEIGKLKGDLKKFATKSVIKAIKSKFS

SEQ ID NO: 132997 - protein, 160 aa, Unknown; identical to SEQ ID NO: 132888
  Bacterial polypetide isolated from the Sargasso Sea

SEQ ID NO: 132998 - protein, 160 aa, Unknown
  Bacterial polypetide isolated from the Sargasso Sea
MTNKVIYPGTFDPVTNGHTDLIGRAAKLFDEVVVGVANSPSKRPLFDLDERVQLARQVTAHLPNVKVVGFSGLLVDFAREQQANVLIRGLRAVSDFEYEFQLANMNRRLMPELESVFLTPAEENSFISSTLVKEVALHGGDIRQFVDPAVAAAIKAKQTK

SEQ ID NO: 132999 - protein, 163 aa, Unknown
  Bacterial polypetide isolated from the Sargasso Sea
MNKIGIYPGTFDPMTAGHMDIIKRSLRIVDNLVIAVANNINKDSLFSIQERIKIINADISTVNELNSKINVMELSGLLTTFAKDQNATCIIRGLRAVSDFEYEFQMTGMNYQLNPDIETIFLMTSEKNSFISSNFVKEVHKLGGDVSNFVSKNTLEQLNKKNS

SEQ ID NO: 133000 - protein, 164 aa, Unknown
  Bacterial polypetide isolated from the Sargasso Sea
MSKIAIYPGTFDPITYGHIDVIKKALKLFDKIVVGVSDVSSKNYLFSSEERIEILNKALFKDLKLNKKKIIVVSFSSLTTDLCKKYKSNIILRGLRAVSDFEYEFQLAGMNRKLNQNIETIFLMSDVENQIISSRFVKEIVKLNGDIKKFTTKSTIKSLKEKYE

SEQ ID NO: 133001 - protein, 157 aa, Unknown
  Bacterial polypetide isolated from the Sargasso Sea
MKILYPGTFDPLTNGHIDLIERAEKLFGNIVVAVLENTAKTPTFNLQKRISQIKNSLFYLNNVEVISYSGLTVDCANDLKANLILRGLRAMSDFEYELQIAHTNKSLNKDIETIFLSTNTNFSFLSSSLVKEVAKFGGEINHMVPPCVERDLKEYFK

SEQ ID NO: 133002 - protein, 164 aa, Unknown
  Bacterial polypetide isolated from the Sargasso Sea
MRNNALYPGTFDPITYGHVDVIKKALKIVDRVIIAVSENSNKDYLFDINERLNIINNALFKDLKMKPSKIKVISFNSLTTDLCKKMNSKIILRGLRAVSDFEYEFQLAGMNRKLNNKIETVFLMSDVENQIISSRFVKEIIDLGGDIRKFTTKSTVKALKDKYA

SEQ ID NO: 133003 - protein, 164 aa, Unknown
  Bacterial polypetide isolated from the Sargasso Sea
MSRIGIYPGTFDPITFGHIDIIKKSLKVVDKLVVAISDSSEKDYLFSTDERIEILKKSLFNDLKLKKNKIKIVSFQSLTVKLCKKFNASIIIRGLRAVSDFEYEFQLAGMNKKLDDKIETIFLMSSIENEIISSKFVKEVGKLKGDLKKFVSRSVIKAIKEKLE

SEQ ID NO: 133004 - protein, 160 aa, Unknown
  Bacterial polypetide isolated from the Sargasso Sea
MKVAIYPGSFDPITLGHMDIIDRACNLFEKIIIAIAKSDTKDPLFSLEDRLKLAKTIYKDNSQVEVIGFPRQLTVDVAKEYNACAIIRGLRAVSDFEYEFQLATMNRSLAPDIESIFLTPKESLIYVSSSLIKEICDLKGDISKFVDPVVEQALRAKLDS

SEQ ID NO: 133005 - protein, 165 aa, Unknown
  Bacterial polypetide isolated from the Sargasso Sea
MSKIGIYPGTFDPMTNGHLNIIHRSLKVVDKLIIGVADNLNKKPLLTINERKNIIANDIYSLQQNNKKIEIHTVNGLLTEFAKKCNADCIIRGLRAVSDFEYEFQMTGMNYQLSPEIETIFLMSADNNSFISSNLVKEVHKLGGDVSKFVSDNTIKILNNKNSSS

SEQ ID NO: 133006 - protein, 164 aa, Unknown
  Bacterial polypetide isolated from the Sargasso Sea
MKNTAIYPGTFDPITFGHIDVIKKSLKIVDKVIVGISDGNQKNFLFSLEERIEIVKRALYKDLKFKKNKVDVVKFNTLTTDLCKKYKSNIILRGLRAVSDFEYEFQLAGMNRKLNNQVETIFLMSDVENQIISSRFVKEIAQHNGDLKKFTTKSTIKSLKEVYE

SEQ ID NO: 133007 - protein, 164 aa, Unknown
  Bacterial polypetide isolated from the Sargasso Sea
MSKVAIYPGTFDPITFGHIDVIKKSLKLFEKLIVAVSDGENKEYLFDVDERIEIVKKALFFDLKLNRNKISVISFTSLTTDLCKKYKSNIILRGLRAVSDFEYEFQLAGMNRKLNNNIETLFLMSDVENQIISSKFVKEIVKLGGNINKFTTKSTIKSLKQKYE

SEQ ID NO: 133008 - protein, 169 aa, Unknown
  Bacterial polypetide isolated from the Sargasso Sea
MSRVSKVHTRAIYPGTFDPITNGHADLIERAAKLFKHVIIGIAANPSKQPRFTLEERVELVNRVTAHLDNVEVVGFSGLLVDFAKEQRASVLVRGLRAVSDFEYEFQLANMNRRLSPDLESVFLTPAEENSFISSTLVKEVALHGGDVSQFVHPEVASALTAKLNLAKA

SEQ ID NO: 133009 - protein, 185 aa, Unknown
  Bacterial polypetide isolated from the Sargasso Sea
MNFVLIIPARYNSSRFPGKPLTLLKGKSMIRRVYDQCLKAVPRDSIYVATEDRRIADHCKKNNIQFIMTSDECLTGTDRLCEVSKLVEADYYINIQGDEPLFNPIDIQNLIQELDKQKNLYDVYCGYCSIDSEDTFFSFNMPKVIFNKRKELVYISRAPIPSNKQNEFRKGFRQVCGYAFPKKVG

SEQ ID NO: 133010 - protein, 177 aa, Unknown
  Bacterial polypetide isolated from the Sargasso Sea
MTSKKHKRATDRSSEALNKVEIKEKCKYDLVTMVQGDEPLVNNKMIKQSLAPFKHKDTNVVNLMGKIGKKDFLDEDCIKVVTNKYNNALYFSRKPIPYLGKSKSSLFKQICIITFRKKFLKKYIKMKPTPLEILESIDMLRILENGYDIKLVKTNEISIAVDRARDIKKVESFLNKK

SEQ ID NO: 133011 - protein, 221 aa, Unknown
  Bacterial polypetide isolated from the Sargasso Sea
DLNGKSLIERVFLRAIQSNAKEVFIATDSKKIEDHVKNFSPNVILTSKEHESGTDRVHECATKLDISNDMVIVNVQGDEPFINPETINKTADIIFKNKNASVGSACTLFKDNDFNDPNNVKVYLSDSNRAINFLRNVDPINLSKNKAKYFQHVGIYSYNYKTLSTFVSLPRSKNEISESLEQLRFLDNGHEIYLVEIEELSIGIDTETDYKKALRILNNND

SEQ ID NO: 133012 - protein, 243 aa, Unknown
  Bacterial polypetide isolated from the Sargasso Sea
MVIGVIPARIESTRFPKKILADIEGKPMVAHVAERALKAKKLDRVIIAIDSEETKNALSNYEFELVMTKSSHNSGTDRVAEVVRSVEEAEIIINIQGDEPLLDPSIIDGLVGLFDDPSVSMGTVVSRNIGVNDYLDRNIVKVFLDENQNAYDFKRDIYDSEIGGLFRHIGFYGFQRDSLFEFTSLPPSHNELEYSLEQFRAIDNNISIKALITNAEQLAVDVPGDIENVLSKMKKLFEATTVE

SEQ ID NO: 133013 - protein, 250 aa, Unknown
  Bacterial polypetide isolated from the Sargasso Sea
RIKYEYMSNSIIIIPSRLAATRLPQKPLIKINNKTLIMHVYEKAIKSQTGEVYAATCDEEIASEVRKNGGKFIMTDINHTTGTDRVFEASQKLDLKDIDFIMNIQGDEPMINPLDIKNLNNLSKEKDLNFSTLAYKIEKNEDYNNENIVKVITKYKLSDNSISEALNFHRVIKGDRYDNIYQHSGIYLYKYSALKKFVNLKKSKNEIKERLEQLRAIDNNMKIDVILANYFSSGIDTKKDLEEYMKLLNK

SEQ ID NO: 133014 - protein, 133 aa, Unknown
  Bacterial polypetide isolated from the Sargasso Sea
MKIAFVIPARYRSKRLPGKPLKKILGVPMLSRTVSQCLKVIDKKDLFVLTDNQKIYSFCKSIKINCIVINKKSLTGTDRVAHFANTNKSKKYSNFINIQGDEPIFNPVDLMKIIKSTKKNPRLIYGGYLKLKI

SEQ ID NO: 133015 - protein, 213 aa, Unknown
  Bacterial polypetide isolated from the Sargasso Sea
MNILALIPARMGSSRFPGKPMAKILGKPMIGHVYDNVKKNNLITDLAVATCDDEIYNYVKSINGRAIMTSDKHERASDRCAEALLKIESEDNINYDIVVMVQGDEPMVHPDMLSQALQPLIDNTNILITNLLGSIKNDKEFQDNNTIKVVCDKNYNALYFSREPIPSKCHNNSAMGKQVPIIPFRRDFLIKYNELDPTPLEISESVDMLRILE

SEQ ID NO: 133016 - protein, 214 aa, Unknown
  Bacterial polypetide isolated from the Sargasso Sea
IPIILKTYRAALDTGLFENVYVVSGNDEILELIKSDGGKTFKSQKKHNSGTDRIAEAAIKLNTDIVVNLQGDEPFINKNAIESLIRSFDDKSVEMASLMTKFESFEELNNPNNVKVIVDNNHNALYFSRLPIPHASKNLIDYNRHIGVYAFLKQSLIEFSNLKRLNLEIIENLEGNRVVENSKKIRMVSTDFHGLSIDTPEDLLKAEKFISLND

SEQ ID NO: 133017 - protein, 154 aa, Unknown
  Bacterial polypetide isolated from the Sargasso Sea
MSNSIIIIPSRLAATRLPQKPLIKINNKTLIMHVYEKALQSQIGEVYVATCDEEIASEVRKNGGKFIMTDINHTTGTDRVFEASQKLNLKDTDFIVNIQGDEPMINPLDIKNLNKLSKEKSLNISTLAYNIEKNDDYDDENIVKVITKNKISDN

SEQ ID NO: 133018 - protein, 209 aa, Unknown
  Bacterial polypetide isolated from the Sargasso Sea
KKLNDAYICCDTRKVLNVAKKFNAKAILTSKKHKCGTDRIAEALKKLKKKYDQIVNIQGDEPLIDPKNIDYVISHHRKNREYDIILPNLKTKFSKDPNVVRLIFNKKKQVIYITRSVTPYQFISKTNYIFKHLSIVSFKPKALIKYTKNKQSKLEKIEDIELLRAIDLGLMIKTFSLKGNSFSIDIKKNLRDARKIIYKDKFFKKYAKK

SEQ ID NO: 133019 - protein, 234 aa, Unknown
  Bacterial polypetide isolated from the Sargasso Sea
MKIISIIPARMGSSRLPGKPMKDILGMPMIGHVYKRIKMCKTLSEVYVATCDKEIFDYIESIGGKAVMTSDIHERCADRCAEAMIKIENQIKEKCDIIVIVQGDEPLTFPQMIDEALKPMIEDKNILITNLVADIDNPEAFENPNEIKVVIDKKKNALYFSREPIPSRKKSTLKVPMKKQVCVIPFKRDFLIEYNKMDPTPLEIIESIDMMRILENGGKVKLCETNYKTKAVDT

SEQ ID NO: 133020 - protein, 222 aa, Unknown
  Bacterial polypetide isolated from the Sargasso Sea
PNKPLKDIAGKTLIERVVDQARKTTAKSIHVATDSDEIMYHCNEINVEALSTSANHKTGSDRLFESCDILKLLDEELIINIQGDEPFIDPKDIENLAQLAEKENANMVTLYTSLESNDLANNDVVKLWLDSNIVKDFSRDVDHLPRKDAKKHIGVYGYKVNFLQKFIKWNQSENEIKRNLEQMRVMDNGEKIYAIESSGKYHIGVDTESDLKQAIEIALDLE

SEQ ID NO: 133021 - protein, 243 aa, Unknown
  Bacterial polypetide isolated from the Sargasso Sea
MKTLVIIPSRLSATRLPGKPLLKINGLSIISHVFKRAEKANIGEVIVAAEDKEIAEDVKMNGGNAILTSKKPKTGTDRIYEALKILDRKNIDLIMNIQGDEPEIDIEDIKKLYNNMKNNKKTRIGTLAAKISDIKMYENQNIVKVKTKESFEQNQFPLADNFFRNIEKKENIFHHIGIYCYEVETLKNFVSFNQSKNELDNKLEQLRALDNNIDINVAQANSSPIGIDTKEDYLAIKKIIEYK

SEQ ID NO: 133022 - protein, 198 aa, Unknown
  Bacterial polypetide isolated from the Sargasso Sea
MRSVVLIPARYASSRFPGKPLVPLLGKPMVLWVAELSAKAVGKENVYVATEDVRIADVVAAAGFKSVMTTDQCLTGTDRLAEAALQVKADIYVNVQGDEPIIDPDDILEAIKVKQQDLSAIVNGYCWLSDHENPESVNIPKVITNEHNTLVYMSRNAIPGFKDAKCAPKRYKKQVCIYAFTFDELVAFKEFGRKSELE

SEQ ID NO: 133023 - protein, 238 aa, Unknown
  Bacterial polypetide isolated from the Sargasso Sea
MNEFIVIIPSRLSSTRLKEKALLDLNGKSLIERVFLRAIQSNAKEVFIATDSKKIEDHVKKFTPNVILTSKEHESGTDRVHECAAKLDISDDMVIVNVQGDEPFIDPETINKTADIIFKNKNASVGSACTLFKDDDFNDPNNVKVYLSDSNRAINFLRNVDPIDLPKNKAKYFQHVGIYSYNYETLSTFVSLPRSKNEISESLEQLRFLDNEHEIYLVEIEELSIGIDTETDYKNALK

SEQ ID NO: 133024 - protein, 111 aa, Unknown
  Bacterial polypetide isolated from the Sargasso Sea
MVIGVIPARIGSTRFPKKILADIDGKPMVAHVAERALEAKKIDRVIIAIDSEETKNALSNYEFELVMTKPSHNSGTDRVAEVVRLVEDAEIIINIQGDEPLLDPSIIDGLV

SEQ ID NO: 133025 - protein, 201 aa, Unknown
  Bacterial polypetide isolated from the Sargasso Sea
MKVIGIIPCRYGSSRLPGKALADIHGKPMMWHVYQQSKKSPMLGEVYIATDDERIAETCKKLDLNYLITSIHHLTGTDRVAECVNVIDADIYVNIQGDEPMIEPMAISEVVDALKCNDSENIMAANAYVPMENPSDVIDTNNVKVVLKADGTALVYSRSPIPYPKGAETHYLRQLGLYAFKKNGLKRFAEHKPGPLEQSEN

SEQ ID NO: 133026 - protein, 213 aa, Unknown
  Bacterial polypetide isolated from the Sargasso Sea
MIIRTYNQCKKVVPESKILVATDDQRIKKVCQDVKINTVMTSKRCLTGTDRVAEVAKKLKADFYLNIQGDEPICNPTDIKKLLIAAKNNPKKIINGYTEIKDKKLFYSGHIPKLVFRKDGRLLYQSRAPIPTTKDKKFVKSWRQVCIYSLPYKPLIKFSSVKNKTPLEALEDCELLRFLELGYEIKMIKMSDKSVSVDTKESLKEVRKIIKKL

SEQ ID NO: 133027 - protein, 142 aa, Unknown
  Bacterial polypetide isolated from the Sargasso Sea
MKTLIIIPSRMSATRLPGKPLLKINGQSIISHVFKRAQSAEIGDVIVAAEDQEIIDDVKSNGGNAILTSKIHKTGTDRIYEALTSLNKKDINFVMNIQGDEPDVDLNDIKVLDSRMKINRSKIGTLAAKINNEEMYDNENIV

SEQ ID NO: 133028 - protein, 91 aa, Unknown
  Bacterial polypetide isolated from the Sargasso Sea
RKAKNANIGEVYVATEDEEILNDVKKNGGQAIITSKNHKTGTDRICEALDKLKKPNIELVLNIQGDEPLMNIEDIKNLHELMIKTDSKLGT

SEQ ID NO: 133029 - protein, 122 aa, Unknown
  Bacterial polypetide isolated from the Sargasso Sea
MIIGLIPARYQSSRLPGKPLLMFGDKTMIQRVYLQSIKSELIDKVYVVTDDERVKKSIDDIGGNCLMIKDECLNGTERICIALNRYHEIFKDTKFIVNVQGDEPFINPNHIDIAITKMLKNK

SEQ ID NO: 133030 - protein, 124 aa, Unknown
  Bacterial polypetide isolated from the Sargasso Sea
MNIGVVPARLASKRLPKKILADLDGKPMVVHTMEQVLKTQKLDKVILAIDSEETLDALKDFGFDMVMTSKDHCSGTDRVAEVVKKNEDAEVIINIQGDEPLVDPNIIDELVDLFEIRMSIWGLL

SEQ ID NO: 133031 - protein, 203 aa, Unknown
  Bacterial polypetide isolated from the Sargasso Sea
MLDKLIVIPARYNSSRLPKKILANIHGFPMIYWVAKRIENANLTKYVVAADNEKVFDVCKKYNIPVVMTNPDLKNGTERVFEVSKIFNEYNNFINIQGDEPLINIQVVDDLIGESKSYAFNTAMSKIPAEKPNNVSEVKVALTKENRIVYASRAKIPHFQSESTFRYKIQGVYLYSREILERFVNSEMGPLEQYESVEQLQVY

SEQ ID NO: 133032 - protein, 232 aa, Unknown
  Bacterial polypetide isolated from the Sargasso Sea
MKTAIIIPARYKSSRFPGKPLAKILGKEMILRVLNICAKAINKKNIYVATDDNRIKIRVLENNFQAIMTPKQCKTGTDRVAIASKKINARIFVNVQGDEPLINYKDIKKIISAKKKFPKSVICGYTKISKQENPKNLNLPKVVISKSNNLIYMSRLPIPGSKSSKLDNKKNFLKQVCIYAFNKNELNSFLKFGKKTYLEKFEDIEILRFFEIGIPIKMVELKKQSIAVDVKS

SEQ ID NO: 133033 - protein, 175 aa, Unknown
  Bacterial polypetide isolated from the Sargasso Sea
MNIIGIIPARMESSRFPGKPLASILGMPMIGHVYNRSKMSAILDEVYVATCNKEIFDYIESNGGKAIMTASTHERASDRAAEALLKIEKEKKGQKIDIIVMLQGDEPMIIPSMIEDAVNPLIQDAEIQVSNLISEIRTEKEWIDPNEVKVVCDINYNALYFSREPIPIIKKYNGK

SEQ ID NO: 133034 - protein, 150 aa, Unknown
  Bacterial polypetide isolated from the Sargasso Sea
NIQGDEPLLDPSIIDGLVGLFDDPSVSMGTVVSRNIGVNDYLDRNIVKVFLDENQNAYDFKRDIYDSEIGGLFRHIGFYGFQRDSLFEFTSLPPSHNELEYSLEQFRAIDNNISIKALITNAEQLAVDVPGDLEHVLSKMGESFEATRVE

SEQ ID NO: 133035 - protein, 241 aa, Unknown
  Bacterial polypetide isolated from the Sargasso Sea
MTEKNNIITIIPARMGSSRFPGKPMAEINGKPMIGHVYERAKLSKIIRETFVATCDSEIADYIHSIGGHVIMTSSSHERASDRTAEAMLKAETIIGKKVEIVVMVQGDEPMVTADMIEKSIKPFKDIDVNVVNLMSKMETIEEFEDPNEPKVVVDINSNALYFSREPIPSRKKGVLDVPMYKQVCIIPFRRQALLDFNGLPETELERIESIDMNRILEHGGSVKMVLVGENPISVDTKSDP

SEQ ID NO: 133036 - protein, 203 aa, Unknown
  Bacterial polypetide isolated from the Sargasso Sea
MKFKVLLVIPARYGSTRLPGKPLKKIGNKTMIQHVYERAKKVNCSKTIIATDDKRILQHCLLNKMNCVMTKKSHETGSDRVSEVCKKYNYQWVLNLQGDEPLINIKDVKNLIRKTLAYNKKNKKFSVSTLYFKKKETNEYNPNEARLLINKKNEVLIFSRKKITNTSKEKSYLKHIGIFFYRKDFLVKFSKLKERFLERDQKL

SEQ ID NO: 133037 - protein, 126 aa, Unknown
  Bacterial polypetide isolated from the Sargasso Sea
MSFFVVIPARYNSSRLPGKPLKDIAGKPMIQHVYENARKSAAKDVVVATDDSRILDCVEKFGGRALLTSKDHTSGTERVQEAANILNLSLDDIVVNVQGDEPLMPPEAIDKVAIDLNERKNFGIST

SEQ ID NO: 133038 - protein, 232 aa, Unknown
  Bacterial polypetide isolated from the Sargasso Sea
MKYYLVIPARYNSKRFPGKPLIDICGVPMIIRTYNQCKKVVPKSKILIATDDKRIQKVCEKEKIKVVMTSKKCLTGTDRIAEVSKKYKADFYLNIQGDEPICNPSDIKKLLIAAKKNPKTIINGYTEIKDKKLFNSGHIPKVVFRMDGRLLYQSRAPIPTTKDKKFVKSWRQVCIYSLPFKSLIAFKSVRNKTPLEKLEDCELLRFLELGHEVKMIKMSDKSISVDTKENLS

SEQ ID NO: 133039 - protein, 251 aa, Unknown
  Bacterial polypetide isolated from the Sargasso Sea
MKNIRTIAIIPVRLESSRLPNKALLDICGLPMIIHTCKRVAMAKEIDQVFLATDNEKIKDVAEANGIKVIITSKDHSCGSDRVAEAVQNVPCDIVINIQGDEPLVYPEHIDAIAKTIKDNTTIKCALGYTKYSKKNSPSDIKAVLDINSNVIYCSRTDLPSDAYKTVDKMKKLCFIVAFRKSFLAKYASWSPTPLEKIELNEYLRILENGEKIRAVQIDGAKISVDTKEDLIIVRKLMEEDKLKLSYLPTQ

SEQ ID NO: 133040 - protein, 122 aa, Unknown
  Bacterial polypetide isolated from the Sargasso Sea
MNIGIIPARLNSKRFPRKILEPLNGKPMIAHTVERSLLAEKLDRVILAIDSEETKYALKDFDFEIIMTAIEHQSGTDRIAEVAQGIKDADLIINIQGDEPLINPKIIDSLVRKLENPNVNFA

SEQ ID NO: 133041 - protein, 88 aa, Unknown
  Bacterial polypetide isolated from the Sargasso Sea
RISKKVNEYGFNSIMTSSNLLTGTDRVAEASKKLDYDIFVNVQGDEPLIDPSDILKSIELKKRFPSSVVNSFCFLSKDPPPPPISVPL

SEQ ID NO: 133042 - protein, 222 aa, Unknown
  Bacterial polypetide isolated from the Sargasso Sea
MKKIIIIPSRMASSRFKNKPLASILGMPMIGHCYFRSKMVKNIDEVFVATCDREIFEYVESIGGKCIMTSDKHTRASTRAAEALQKIEKEYRMMIPLVVMVQGDEPAISPNVISNIVHAFDDEDVQIANIMSLIRSEEDFNDKNNVKVVVDRNNDALYFSREPIPSSWVEDQHAPRFMQTGIIAFRRDALIEFNSMDETTLEKVESIDMNRVLESGRSVRMV

SEQ ID NO: 133043 - protein, 167 aa, Unknown
  Bacterial polypetide isolated from the Sargasso Sea
QGDEPLLPTDIVNHLISFMKSDEDSGIEFATVSEPISDQSEFENPNCVKVVTDRDGAALYFSRAPIPFPRDQGVSEATSNGEYNNLVKVDYPIKRHVGIYAFRVHALREFSALPESGLERLEKLEQLRWLEAGRKIHVIHSEELLPGGVDTPEDLAIVEPLLLKKQK

SEQ ID NO: 133044 - protein, 231 aa, Unknown
  Bacterial polypetide isolated from the Sargasso Sea
MSEFIVIIPSRLSSTRLKEKALLDLNGKSLIERVYLRAIQSNANKVFIATDSKKIEDHVKKFSPNVILTSKDHESGTDRVHECAAKLDISDDMVIVNVQGDEPFIDPETINKTADIILKNKNASVGSACTLFKDNDFNDPNNVKVYLSDSNRAINFLRNVHPIDLSKNKAKYFQHVGIYSYNYETLSTFVSLPRSKNEISESLEQLRFLDNGYEIYLVEIEELSIGIDTET

SEQ ID NO: 133045 - protein, 170 aa, Unknown
  Bacterial polypetide isolated from the Sargasso Sea
QSRKKCDIMVLVQGDEPLTFPEMIDEALEPMLKDKSVKITNLVADMDTEEEFNNSNEVKVVMDNKNNALYFSREPIPSKKKTKLKIPMKKQVCVIPFRRDFLLQYNRMEPTPLEEIESVDMMRILENGGDVKMCHTKYLTKAVDTEKDLDLVCKMMKEDSLYEIYKTNEG

SEQ ID NO: 133046 - protein, 177 aa, Unknown
  Bacterial polypetide isolated from the Sargasso Sea
ITDTNHTTGTDRVFEASQKLDLKDIDFIMNIQGDEPMINPLDIRNLNKLSKEKNFNISTLAYNIRQKEDYDNENIVKVITKNKISNKSATEALNFYRVIKENSSSNIYHHFGIYLYKYSALKKFVNFKKSENETKEKLEQLRAIDNNMKINVILANYFSSGIDTKKDLEDYIKAFKK

SEQ ID NO: 133047 - protein, 242 aa, Unknown
  Bacterial polypetide isolated from the Sargasso Sea
MIEEKKVITVIPARLGSYRFPTKPIELIDGIPMLERVYKGAIDSKYSDMVVVATPDEEIMEFCRERNLNVYKSQKECKRGTERVYETYKNLMPDADIIVNLQGDEPLIDAPTLDLCILELFKDTSAASLNMYKKATYEEAESDQNEVKVVTDFDGYALYFSRNPLPAKWLGDKNFDCKLEICVMPFWAWSIEKFMVSREGILEDIESVDMLRLLENGMKVKMIEAPIEMQSVDVPEDIKKVK

SEQ ID NO: 133048 - protein, 143 aa, Unknown
  Bacterial polypetide isolated from the Sargasso Sea
MQFITPSYYQSQLPTRVLGVIPARYHSSRFPGKPLVKINGIPMIQRTYDQVKRSTALDDIVVATDHDEIYNYCLSQNMNVILTSQENLTGTDRVAEVATQLDYDFYVNIQGDEPVINDSSIDLVVNAYKSCQGQYEIFNLLKS

SEQ ID NO: 133049 - protein, 112 aa, Unknown
  Bacterial polypetide isolated from the Sargasso Sea
MSNSIIIIPSRLAATRLPQKPLIKINNKTLIMHVYEKAVQSQIGEVYVATCDEEIASEVRKNGGKFIMTDINHTTGTDRVFEASQKLNLKDIDFIMNIQGDEPMINPLDIKI

SEQ ID NO: 133050 - protein, 209 aa, Unknown
  Bacterial polypetide isolated from the Sargasso Sea
NAVMTSPTAPNGTARIVEALSQFPNAEIIVNVQGDEPDISPEAIESAIDLLTQCPEAGLATLVTPIRSQDTLADPAAVKAVLTPWRQTSTSGFKDAAVVEGIWRAITFSRASVPAAREWNDDLLDATPPLYWQHIGLYAFRRHILERWESLPESRLAQLESLEQLRAIEAGIPIAVGPIDHAARGIDTQKDYDDFVERWKEHHQPGTGI

SEQ ID NO: 133051 - protein, 151 aa, Unknown
  Bacterial polypetide isolated from the Sargasso Sea
MVIGVIPARIGSTRFPKKILADIDGKPMVAHVAERALEAKKLDRVIIAIDADETKNALSNYEFELVMTKPSHNSGTDRVAEVVRSIEDAEIIINIQGDEPLLDPSIIDGLIGLFDDPSVSMGTVVSRNIGVNDYLDRNIVKVFLDENQNAY

SEQ ID NO: 133052 - protein, 206 aa, Unknown
  Bacterial polypetide isolated from the Sargasso Sea
MRVIRFDEVYIATDDSRIAEAGQNLNLNVLITRKEHRTGTDRVAECMELVDADIYVNIQGDEPMIEPKAIEMVTAALAECDDARVMASNAYVPFSDPCDVVDTNNVKVVLSKNDRALFYSRQPIPYPKSSTTHYLRQLGLYAFRKKGLQVFAEHKPGAVENAEGVEMLRFLEYDHEVLMVKVNDSSIPVDTEADLSRVIELMLPLA

SEQ ID NO: 133053 - protein, 157 aa, Unknown
  Bacterial polypetide isolated from the Sargasso Sea
DISDDMVIVNVQGDEPFIDPETINKTADIIFKNKNASVGSACTLFKDNDFNDPNNVKVYLSDSNRAINFLRNVDPIDFSKNKAKYFQHVGIYSYNYKTLSTFVSLPRSKNEISESLEQLRFLDNEHEIYLVEIQELSIGIDTETDYKKALKILNNND

SEQ ID NO: 133054 - protein, 243 aa, Unknown
  Bacterial polypetide isolated from the Sargasso Sea
MKTLIIIPSRLSATRLPGKPLLKINDISIISHVFKKAKEANIGEVIVAAEDQEIVNDVKKNGGKAILTSNKHKTGTDRIYEAYQQLKLDNIDFIMNIQGDEPAINIQDIINLNQMMINHKAEIGTLAAKIQNKSDLTNENIVKVITQNNLEDDPFSNAKTFLRKSEDVLNIYHHIGIYSYSSEILKKFVELAQSKNEIENRLEQLRALDNNIKINVALASKAPIGIDTEEDYLALKKIMEYKS

SEQ ID NO: 133055 - protein, 156 aa, Unknown
  Bacterial polypetide isolated from the Sargasso Sea
MTGQVLGIVPARLGSTRLPRKPLHPLLGRPLIEWVWRRVAAMKVLDHALVATDSPEVVDVCHAIGAPVELTSEDHVSGTDRVAEVVGRPGYTGYGLVVNIQGDEPLIEEEHVRSAIELVRSGNWQVGTCATPVQEAGVSEDPSMVKVARADSGRAL

SEQ ID NO: 133056 - protein, 243 aa, Unknown
  Bacterial polypetide isolated from the Sargasso Sea
MTVSALIPARLNSSRLEKKLIKDLDGIPVIVRTYKNIVSTNLFKEVIVVTDADEIVEILKRHNIKFLKSLKSHNTGTDRIAEFADKLNSDIIVNVQGDEPFISKDDLISIINEFKCDSNNLVNVVSLMIKLSNIDEINNPNNVKVVVDNNNDSILFSRSIIPFDRDDLKPNYYKHIGVYAFRSLYLKKFAKYDQTPLEKAEMIEALRIVEHGEKIRMIEIFKEHVSIDTIDDLKMAESILKGK

SEQ ID NO: 133057 - protein, 238 aa, Unknown
  Bacterial polypetide isolated from the Sargasso Sea
MSYRIIIPARIGSTRLPNKPLKDIAGKTLIERVVDQARKTSAKSIHVATDSDEIMYHCNEINVEALLTNSNHRTGSDRLFESCDILKLSDEELIINIQGDEPFIEPKDIENLAQLAEKENANMVTLYSSLVSNDLANKDVVKLWLDSNIVKDFSRDVDHLPRKDAKKHIGVYGYKVNFLQKFIKWKQSKNEIKRNLEQMRVMDNGEKIYAIESSGKYHIGVDTESDLKQAIEIALDLE

SEQ ID NO: 133058 - protein, 229 aa, Unknown
  Bacterial polypetide isolated from the Sargasso Sea
MQLQSRSTIRSPKIIGLIPARWQSSRFEGKPLKLINGKPMIERVYNQCSLVESLDKVIVLTDDDRIQEFCEENSIPYLRVDDDCETGTDRCAKAIESIEADFFVNIQGDEPVIDPGSIDLLIKNFLGNDRSANVSSRSEIRIGNAYTEIKDDKKLHDKNVVKVVFDKNKKALFFSRYPLPFLKGKSGKFFQQLGLYIYSKEALNLFSKLPSLSLEKSEEVELLRFLEHG

SEQ ID NO: 133059 - protein, 244 aa, Unknown
  Bacterial polypetide isolated from the Sargasso Sea
MNEFIVIIPSRLSSTRLKEKALLDLNGKSLIERVYLRAIQSNAKKVFIATDSKKIEDHVKNFSPNVILTSKEHESGTDRVHECAEKLDISDDMVIVNVQGDEPFIDPETINKTADIIFKNKNASVGSACTLFKDNDFNDPNNVKVYLSDSNRAINFLRNVDPIDFAKNKAKYFQHVGIYSYNYKTLSTFVSLPRSKNEISESLEQLRFLDNEHEIYLVEIEELSIGIDTETDYKKALKILNNND

SEQ ID NO: 133060 - protein, 246 aa, Unknown
  Bacterial polypetide isolated from the Sargasso Sea
MSKTLILIPSRLAAKRLPRKPLLKIGGKSLIYHVYKKAKESKIGDVFVATGDKEIYNDIIDNGGKCILTKTLHKSGTDRIYEAFKKLKIKKVKYVLNIQGDEPLINKNDIVNLNKIAVKNKLDFCTLGSLIDKKKIHSNKNIVKVETINKLKKNNYLLAKNFFRKKKLNKYVNIYHHIGIYHYSVSALKKFQSFKQTKNEKKYKLEQLRAMDNKMSVNVVLANSSPIGVDTLKEYKKVKLLMERNS

SEQ ID NO: 133061 - protein, 243 aa, Unknown
  Bacterial polypetide isolated from the Sargasso Sea
MVIGVIPARIGSTRFPKKILADIEGKPMVAHVAERALEAKKLDRVIIAIDADETKNALSNYEFELVMTKPSHNSGTDRVAEVVRSIDDAEIIINIQGDEPLLDPSIIDGLIGLFDDPSVSMGTVVSRNIGVNDYLDRNIVKVFLDENQNAYDFKRDIYDSEIGGLFRHIGFYGFQRDLLFEFTSLPPSHNELEYSLEQFRAIDNNISIKALITNAEQLAVDVPGDLEHVLSKMGKSFEATTVE

SEQ ID NO: 133062 - protein, 232 aa, Unknown
  Bacterial polypetide isolated from the Sargasso Sea
MVIGVIPARLKSTRFPNKILTPINDKPMVMHVYERSKESEKLDDVIIAIDSKETEDALKQYKPNIKMTHPDHLSGTDRVAEVIKDMDADIILNIQGDEPMLDPLIINQLVDCFDDELVDMATIGSTVINNSDYLNPNSVKVTINENGFASSFCRDINDHQIGGYYHHVGIYGYRKNTLQHLTNLDQSINEKSLNLEQLRALDNGIEIKVAMTDYPHRGIDTKEDLNQIELNK

SEQ ID NO: 133063 - protein, 189 aa, Unknown
  Bacterial polypetide isolated from the Sargasso Sea
ASEVRKNGGKFIMTDINHTTGTDRVFEASQKLNLKDIDFIMNIQGDEPMINPLDIKNLNKLSKEKSLNISTLAYNIEKNEDYDNENIVKVITKNKISDNSISEALNFHRVIKEDSYDNIYQHFGIYLFKYSALKKFVNLKKSKNEIKERLEQLRAIDNNMKIDVLLANYFSSGIDTKKDLEEYINLLNK

SEQ ID NO: 133064 - protein, 159 aa, Unknown
  Bacterial polypetide isolated from the Sargasso Sea
DLIVNVQGDEPLLDPCLIDAVLSRLQADPPANIVTARCAITMQSEFTNPNIVKVVVTADDYALYFSRAPIPQHRGESDESPTILGYKHIGLYAYQRTTLLELNNLQPTVLEKAEQLEQLRALQYGYRIATIETDTHSLGVDTPEDLDEVRRLVSTGANE

SEQ ID NO: 133065 - protein, 209 aa, Unknown
  Bacterial polypetide isolated from the Sargasso Sea
VIVATDDNRIFNCIKDFGGKVILTKKNHKNGTSRCLEAVNIYCEETGKEFEYIVNVQGDEPLIHEDHLKKLIHCFQDPNTNFATVALQLSNKKPLPNGKVFLVKDMNEYALYFSRNIIPFIRAKNKENITDNTSFYQHIGIYGYTKKALEKFCNQKPSSLEMSEKLEQLRWLENGGKIKVGITKQLSYPVDTIEDLNEVRKIYEKKHHI

SEQ ID NO: 133066 - protein, 174 aa, Unknown
  Bacterial polypetide isolated from the Sargasso Sea
MEFHVVIPVRYHSNRFPGKALADIAGKPMVQRVYDNAMASGAETVIIATDDEKIAEVASGFGAKVCMTSDTHQSGTERIAEAVEALDYEKDEIIVNVQGDEPLIPPHAIKQVAQALGEHDNVKVSSLCHPIESLEELNNTNAVKVILSRRHFAMYFSRSMIPWQRLSDEAAVLE

SEQ ID NO: 133067 - protein, 172 aa, Unknown
  Bacterial polypetide isolated from the Sargasso Sea
MTNSNHQTGTDRCAEIIEKNPGYDIVINIQGDEPLVNPIQLNTLIQSFENNAKQEIATLAIRCLHQEEISNSNRIKVVCDYKNNALYFSRTSIPFSKKTDTKKYLRHIGLYAYQSETLLKIAKLTPCEIEKMESLEQLRWLFYGYSIKVIETDIETPNIDSPEDVKNVIKHL

SEQ ID NO: 133068 - protein, 173 aa, Unknown
  Bacterial polypetide isolated from the Sargasso Sea
MQDFIVLIPSRMESTRLPGKPLKLIGNKTLIQRVYEQALQSKAKKVLVATDSEEIISHCSNNSIDTVLTRRGHLTGSDRLAEVVNILDLENDQIVVNVQGDEPFIDPDDINNLFDLMVQKSSNMATLFANLDAKDITNTSVVKLWINEDGSVVHFSRKVDDKYDIDKAKMHLG

SEQ ID NO: 133069 - protein, 216 aa, Unknown
  Bacterial polypetide isolated from the Sargasso Sea
QHVWERVKQTPSIDQILVATDDKRILDTVRNFGGDSVLTSIEHETGTDRIVEVANEISCGWILNIQGDEPTVMPADLDRLIRQAKIKKGTKAATLIYNINNQVLLNDPNIVKVVIDINNMALYFSRSMIPYPHSGQSTDCKIWRHLGVYLFQRSFLMEFSQWPRSKLEISEQLEQLRILENGESLLCVEAENEVVSVDVPQDLVYVENLMKKKITS

SEQ ID NO: 133070 - protein, 248 aa, Unknown
  Bacterial polypetide isolated from the Sargasso Sea
MQSEHDYVVVIPARYHSTRLPGKPLIKILGIEMLQRTYNQCLKAVDKEKIFVATDSKKITDYCIENNIQSLLTSKNCLTGTDRIAEVSKIIDAKVYINVQGDEPLLNPDDLKLLIESSEEYPDIIFNGYCEIDDNSQYISENIPKVVFSNTKDLLYMSRSPIPFHKNKKNHHSYRQVCIYAYPKHVLSIFLEQPKKTKFESYEDIEILRFLELGCKIKMLKMSSESVAVDVPKDIIKVEEILKLSNEK

SEQ ID NO: 133071 - protein, 335 aa, Unknown
  Bacterial polypetide isolated from the Sargasso Sea
MQRGQARLPDPRRHPRDAGRRGTSDRRRHAGRPGRPLSRPTRPSSRPVRSEGAEPAGGPRSDAPPAPLSSPPSPMTQPFIAVIPARLASTRLPNKPLADLGGKPMVVRVAERAREAGAQQVLVASDAQSVLDAARDHGFEAVLTRADHPSGTDRLAEVAATFGWSDDTVVVNVQGDEPLIDPVLVRDVASHLATHPACAIATAAHPIHDAADVFNPNVVKVALDAQSVALYFSRAPIPWSRDAYQPHWPDVAAMPAPAFPVYRHIGLYAYRARFLRTYPTLAQAPIEQAEQLEQLRALWHGERIAVLITESAPEAGIDTPADLARVQALFQPSSK

SEQ ID NO: 133072 - protein, 249 aa, Unknown
  Bacterial polypetide isolated from the Sargasso Sea
MSFTVVIPARYGSSRFPGKPLALIDGKPMIQHVVERAKEAGADNVIVATDDERIQNVVLGFAQVCMTSVNHQSGTERIAEVIEKEGIASSTIVVNVQGDEPFIPAENIRQVADNLANAPQCQMATLSTPIERVEDVFNPNIVKVLVNEKGESIYFSRSPIPFERDHMMAKPQSANTSLYKRHIGIYAYRAEYVKQYVAYAPSSLEQIESLEQLRAIWYGDKIHCEVAIAPPPVGIDTPEDLERLLKTIS

SEQ ID NO: 133073 - protein, 265 aa, Unknown
  Bacterial polypetide isolated from the Sargasso Sea
MTSFNSARPVHVVIPARYGSTRLPGKPLVDLNGEPMIVRVHARVSRALPGADIVVAIDDARIAEALDARGIRFAMTGTHHASGTDRAAELARASGWRDTDVVLNVQGDEPLVPERLLKAFAGYCVAVPDLGIATVACPVGDAALLDEPGIVKLVVDRRGRALYFSRAAIPFCRDGRPAGADLGGHLRHIGLYGYSNAALQTLAHTAPCELEQLEQLEQLRALWLGMPIEVMRWPDAPPAGVDTPDDVARVVSFLKRQTQDETEPH

SEQ ID NO: 133074 - protein, 304 aa, Unknown
  Bacterial polypetide isolated from the Sargasso Sea
MALRSAAIHRRICPLSRWRAQCTTCERFLPVASPPVLPMTNANVTTPPFVAVVPARLASSRLPNKPLADIGGKPMVVRVAERARESGAQQVLIASDAQPVLDVAREHGFDAVLTRADHPSGTDRLAEVAAQFGWSDDTIVVNVQGDEPLIDPALVCGVASHLASSHGCAIATAAHPITDAAEIFNPNVVKVVLDARGVALYFSRAPIPWARDAYQAHWPDVASMPTPPAPAVVYRHIGLYAYRAQFLRTYPSLAISPIEQVEALEQLRAMWHGERIAVLVTENAPLPGVDTPADLARVQALFGA

SEQ ID NO: 133075 - protein, 246 aa, Unknown
  Bacterial polypetide isolated from the Sargasso Sea
MSSSQKTLAIIPARYSSTRFPGKPLVDIAGKPMIQHVWERVRQTPSIDQILVATDDDRILNTVRNFGGEGVLTSTKHETGTDRIVEVVQEISCDLVLNIQGDEPTVLPADLDRLIKQTKIRKGTKAATLIYNITDKTQLNDPNIVKVTVNVNNIALYFSRSLIPYPRSGQNSNCKIWRHLGIYLFQRKFLLEYSKWPRSNLEKSEQLEQLRILENGESILCVEAENETVSVDVPEDLVYVKNLLKR

SEQ ID NO: 133076 - protein, 241 aa, Unknown
  Bacterial polypetide isolated from the Sargasso Sea
MNIGVVPARLASKRLPKKILADLDGKPMVAHTMEQVLKAQKLDKVILAIDSEETFDALKDFGFDMVMTSKDHCSGTDRVAEVVKKNEDAEVIINIQGDEPLIDANIIDDLLGLFEDKDVNMGTAISTKLRADDLLDDNVVKAIIDQDKNVIDFKRNIYDSEIGGLYRHIGIYGFRRNTLFQFSMLDQSPREKNRKLEQMRALDNDLPIRATITGFESFAVDTKSDLNKVLQIMEAKEIGLD

SEQ ID NO: 133077 - protein, 219 aa, Unknown
  Bacterial polypetide isolated from the Sargasso Sea
MGFIAVIPARFGSTRLPGKPLLDIAGQPMIQHVYARAQSSRADRVFVATDDQRIEDVVRGFGGECLMTASDHPTGTDRLAEVADVLGLAANVIIVNVQGDEPLLPASAIHQVAEMLIAHPEASIATLCEPIQDASDIDDPNQVKVVKSRSGRALYFSRARIPGYPTSAIGAHYRHVGLYAYRAGFLRDFRTWEPTSLERFERLEQLRALEHDCLIQVDV

SEQ ID NO: 133078 - protein, 219 aa, Unknown
  Bacterial polypetide isolated from the Sargasso Sea
MFHVIIPARYASTRLPGKPLQLIDRKPMVQHVWQQACKSGAASVIVATDDQRIMDACAGFGARAIMTRADHPTGTDRLQEVVSQLGLPDDACVVNVQGDEPMIPPAVIDQVAANLIAAQDAGIATLAEPIHDSETLFNPNAVKVVCDHQGYALYFSRAPMPWCRDQFANGPAALPDAIPFRRHVGIYAYKVSFLHAYVGWPASPLETAESLEQLRALWF

SEQ ID NO: 133079 - protein, 178 aa, Unknown
  Bacterial polypetide isolated from the Sargasso Sea
SGTERLAEVVEQLKLESDTIVVNVQGDEPLLASENVSQVAMLLADSDAPMATLSTSIDEIDDIFNPNCVKVINDADNNALYFSRSPIPYHRDAMMNDDRDKLNLADFARHIGIYAYRAGFIKDYIELPESRLELLESLEQLRVLYHGHKIKIAKALCAPQAGVDTPEDLARVIAVLGN

SEQ ID NO: 133080 - protein, 208 aa, Unknown
  Bacterial polypetide isolated from the Sargasso Sea
IIATDHQKVFDEVSTFTNDVVMTREDHQSGTERLAEVVALLNLDSNTIVVNVQGDEPLLAPDNVLQVAKLLNESSAPMATLSVAIEHKDEIFNPNAVKVVSDINKNALYFSRASIPFDRLAMLDEKRDLELSSFQRHVGIYAYRAGFINQYIALSISPLELLESLEQLRVLYHGYSIKIEQAKVAPHAGVDTAEDLAKVIAFLQNKNA

SEQ ID NO: 133081 - protein, 254 aa, Unknown
  Bacterial polypetide isolated from the Sargasso Sea
MSAVFTVVIPARYASTRLPGKPLQDIAGKPMVQHVWEQAKKSSASRVVVATDDARIVEACQAFGAEVLLTREDHNSGTDRLAEVATQLGLPADAIVVNVQGDEPLIPPVIIDQVAANLAANPQAGIATLAEPIEDVTALFNPNVVKVVADKNGLALTFSRAPLAWARDAFAKNRDVLPAGVPYRRHIGIYAYRAGFLHDFVAWGPCWLEDTECLEQLRALYNGVRIHVADALEAPAAGVDTAEDLERVRHLLGA

SEQ ID NO: 133082 - protein, 214 aa, Unknown
  Bacterial polypetide isolated from the Sargasso Sea
QAIKSGAERVVIATDDARVKQACEGFGAEVCMTSPAHNSGTERLAEVVSLLDLADDTVVVNVQGDEPFIPPAIIRQVAQNLASQSKARMATLSVPIEHSDEVQNPNVVKVQSDKHGYALYFSRSVIPFDRDKAFTTQLADIYRRHIGIYAYRAGFIKEYVRWPASQLEQIECLEQLRVLWQGEAIHVATALEVPAVGVDTPEDLERARLVAATL

SEQ ID NO: 133083 - protein, 250 aa, Unknown
  Bacterial polypetide isolated from the Sargasso Sea
MSAFLVVIPARYASSRLPGKPLADIAGLTMIERVYRQAIKSGAERVVIATDDARVQQVCEGFGAEVCMTSPAHNSGTERLAEVVSLLGLADDTVVVNVQGDEPFIPPAIIRQVAENLANQSKARMATLSVAIEHSDEVQNPNVVKVQSDKNGYALYFSRSVIPFDRDKAFTSQLADIYRRHIGIYAYRAGFIKDYVSWPASQLEQIECLEQLRVLWQGEAIHVATALEVPAVGVDTPEDLERARLVAAAL

SEQ ID NO: 133084 - protein, 258 aa, Unknown
  Bacterial polypetide isolated from the Sargasso Sea
MSDRQLCDCEMIMDGSFKPLNHFMKESDYESVLAEMRLSNGFLFPLPITLDVNKEFSNQLIIGERIILLDKEGFKIAYMMIDSIWEPNFDREAELVYGTNDMSHPAVNYMYNIGNKVYIGGRIKKISMPNHYDFRNHRIAPAEAKNEFNSRGWEKIVAFQTRNPLHRAHIEMTQKAMVELNAKLFLHPVVGLTKPGDVNHYTRTRCYEHAINKYPDGSAILAILPLAMRMGGPREAVLHAIIRKNYGCTDIIIGRDHA

SEQ ID NO: 133085 - protein, 72 aa, Unknown
  Bacterial polypetide isolated from the Sargasso Sea
MRKNHAQKKEFFHFEIKAIVGILKIKNPELWNLFNTKIDKDESVRVFPLSNWTEIDVWQYIYQEKIPIVPLY

SEQ ID NO: 133086 - protein, 242 aa, Unknown
  Bacterial polypetide isolated from the Sargasso Sea
TDRQICDCEMILDGSFHPLNHFMNENDYYQVLENMRLETGQLFPIPIVLDVNTDFSQNLELNERIILRDKEGFIIAYMTVESIWKPNLKREAQKLYKTTDKLHPAVNFLFHSKNKVYIGGKIEKVMMPNHYDYEKYRLTPKDVKNKFEKMGWEKIIAFQTRNPLHKAHVEMTFRSMKEFNANLFIHPAVGQTKPGDIDYYTRVRCYEHVIKKYPNNTAFLALLPLSMRMGGPREALLHAIIR

SEQ ID NO: 133087 - protein, 50 aa, Unknown
  Bacterial polypetide isolated from the Sargasso Sea
MDINTFFKKQNTKNQVKILTCGSVDDGKSTLIGRLLFDSKNIFHDQISQA

SEQ ID NO: 133088 - protein, 190 aa, Unknown
  Bacterial polypetide isolated from the Sargasso Sea
MISLKNKSPEIYWKLNDRQLCDLELILNGGFSPLKGFLNKKDYQSVIKDMRLENGDLWPIPINLDVDENFRNSLSLGQSIYLKDKEGFVLATLQVEEIWKPDLLNEALLVYDTVDQKHPAVRYLLNYSNPYYIAGKIKFKSLPNHYDFKEQRHTPSSLKSIFKEKGWKKIVAFQTRNPLHKAHIEMTKRA

SEQ ID NO: 133089 - protein, 106 aa, Unknown
  Bacterial polypetide isolated from the Sargasso Sea
IVGRDHAGVGDYYGAFDAQTIFQEKVPAGALEIKIFEADHTAYSKKLDRVVMMRDVPDHTKDDFVLLSGTKVREMLGQGIAPPPEFSRPEVAQILMDYYQALDAGK

SEQ ID NO: 133090 - protein, 290 aa, Unknown
  Bacterial polypetide isolated from the Sargasso Sea
IPDLNWECENAYGTIDDNHPYVKYKLSHKGKVYVSGPLQKINDIKHYDFKDIRLYPNDVREFIKENNWKTVVGFQTRNPMHKAHYELTKYALRKTGDKEAKLFLNPVVGETQTVDIDYFTRVKVYKNIVKKYDDNVVKLGLLPLAMRMAGPREACLHALIRKNYGCTHFVVGRDHAGPSYKKKDGSNFYGPYDAQEMFFKYSDEIGIIPIVSKMIVYNVTKNIYQPIDDVDKNDETLFLSGSEVRRRLKENEEIPDWFSFPEIVDLLKKSVKKRGICYYFTGLSGSGKSF

SEQ ID NO: 133091 - protein, 143 aa, Unknown
  Bacterial polypetide isolated from the Sargasso Sea
PKAQRPELWNLYNTKLHTGQTMRVFPISNWTEKDVWQYLLKEKISIVPLYFAKERPVVYRNETLIMVDDERIPLETGEEPQLKSVRFRTLGCYPLTGAIESNASTLEEVVLETMMARTSEREGRLIDSDETGSMEKKKREGYF

SEQ ID NO: 133092 - protein, 69 aa, Unknown
  Bacterial polypetide isolated from the Sargasso Sea
MTQVNTSISMQNISEFLLNQNQKKTLRLITCGSVDDGKSTLIGRLLHESQNVFEDQLKTLERDSEKFGT

SEQ ID NO: 133093 - protein, 279 aa, Unknown
  Bacterial polypetide isolated from the Sargasso Sea
MGVMSEIPGTALTPVQNEHLDWLEAESIYIIREVVAECRNPALLFSGGKDSIVMLHLALKAFRLGERKIELPFPLVHIDTGHNYPEVITFRDEQVAKLGARLVVGHVEDSIKRGTVRLRKETDSRNAAQAVTLLETIESHGFDALMGGARRDEEKARAKERIFSFRDEFGQWDPKAQRPELWSLYNARMAQGEQMRVFPISNWTELDVWQYIARENLALPPIYYAHEREVVRKNGLLVPVTPITPKADGDVSEVLSVRFRTVGDISCTCPVASTAATPA

SEQ ID NO: 133094 - protein, 195 aa, Unknown
  Bacterial polypetide isolated from the Sargasso Sea
MIAYNLELKNQANNYPSWQLNDRQICDLELILNRGFQPLNGFLSKKDYNSVVNKMRLADGALWPIPINLDVNDKFIEEISNNSKITLRDKEGFALAILTISDIWKPDLKHEAQSIFGTLDTKHPGVNHLLNIGNNNYVGGTVEMISLPHHHDYNDFRHNPDELKHDFKTKGWDKIVAFQTRNPLHRAHFELTKNA

SEQ ID NO: 133095 - protein, 86 aa, Unknown
  Bacterial polypetide isolated from the Sargasso Sea
VFRNDQLILVDDERLKILNDEKIENKQVRFRTLGCYPLTGAVESEASSIDQVIKEIKISQFSERGGRLIDKDQIGSMEKKKKEGYF

SEQ ID NO: 133096 - protein, 61 aa, Unknown
  Bacterial polypetide isolated from the Sargasso Sea
MDIETFFQNQNNKKQLKILTCGSVDDGKSTLIGRLLFDSKNIYSDQLSQSKIESEKYGTPR

SEQ ID NO: 133097 - protein, 171 aa, Unknown
  Bacterial polypetide isolated from the Sargasso Sea
MSDRQLCDCELIMDGSFNPLDQFMSEIDYESVLTQMRLSNGDLFPIPIVLDVNKEFSDSLSLGEKILLRDKEGFKIAHMTINSIWEPDLNREAELVYMTNDLTHPALNYMFNIGNKVYIGGKVEKISMPNHYDYRQYRISPNKVKNEFINRGWDKIIAFQTRNPLHRAHVK

SEQ ID NO: 133098 - protein, 44 aa, Unknown
  Bacterial polypetide isolated from the Sargasso Sea
MDINTFFKKQNSKNQVKILTCGSVDDGKSTLIGRLLFDSKSIFL

SEQ ID NO: 133099 - protein, 110 aa, Unknown
  Bacterial polypetide isolated from the Sargasso Sea
MLWQYINREGIEIVPLYFAAERPVIERDGMLLMVDDDRMRMSEGEEIRTRLVRFRTLGCYPLTGAIDSSATSLPEIVLELLQSKTSERQGRAIDSDSSASMEKKKQEGYF

SEQ ID NO: 133100 - protein, 60 aa, Unknown
  Bacterial polypetide isolated from the Sargasso Sea
MKHNHLKKLESESIHIIREVAAEFSNPVMLYSIGKDSSVMLHLTMKAFSPNKIPFKLLHV

SEQ ID NO: 133101 - protein, 156 aa, Unknown
  Bacterial polypetide isolated from the Sargasso Sea
MNLTHLEKLESESIHIIREVASEFENPVMLYSIGKDSAVMLHLALKAFAPSKLPFKLLHVDTTWKFKEMITFRDQIAKEYNLDLLVHINEEGVKNNIGPITHGSKLHTDVMKTQALKQALEKYKFDAAFGGARRDEEKSRAKERVFSFRDKQHHWD

SEQ ID NO: 133102 - protein, 217 aa, Unknown
  Bacterial polypetide isolated from the Sargasso Sea
MLSNKIKKSKANNLKLESNIYKSWTLSNRQLCDLEMILNNSFSPLSNFLNKSNYDSVLHNMRLETGELWPIPINLDITSKFQNKIKDSDKITLKDKEGFPVAILKISDIWEPNLKNEAELIYNTKNIEHPGVNYLLNRVNKIYISGDILKIADIRHHDYAYLRHTPFQLKSIFKKNNWEKIVAFQTRNPLHRAHVEMMKKTIKNLGAKVIASSLLLE

SEQ ID NO: 133103 - protein, 233 aa, Unknown
  Bacterial polypetide isolated from the Sargasso Sea
NLFVSNFKIRSAYRIIIDNYIKEILDTKFKISQLRNKYKTIGAFQTRNIPHLGHEKIIEMMLDHCDVVVINPILGPKKPGDLNTERLKFIYDNILKTRFNNRILFIPLRANMFYAGPREALHHTLIREWLGFSHFSVGRDHAGSDDFYKPEEAKNTLKSYQGLFNIKILYHNGAYFCKSCNKIILKGDCKHLDSELKEVSGSKLRNCLKSNKTYKYASKDVQNWSKENIKTLY

SEQ ID NO: 133104 - protein, 80 aa, Unknown
  Bacterial polypetide isolated from the Sargasso Sea
MSATVTSLNEQLNTLGIRGYLQQHQDKGLLRVLTCGSVDDGKSTLIGRLLHDSQQLYDDQLDALKRDHKGRNSDGELELA

SEQ ID NO: 133105 - protein, 260 aa, Unknown
  Bacterial polypetide isolated from the Sargasso Sea
MQNLIPELYVASDSSQALKDKAAHLQCWDLTPRQICDLELIMNGGFNPLAGFLGQEDYKNVVENMRLSNGTLWPIPITLDVSQQFADGVEEGEEIVLRDLEGVVLAVLTISDKWSPNKKYEAEKVFGTNDIKHPAVHYLQNVAGPVYLGGQILGLQKPVHYDFRARRDTPNELRSYFHKLGWKKIVAFQTRNPLHRAHQELTFRAAKEVQANLLIHPIVGMTKPGDVDHFTRVRCYEAVLDKYPAATTTMSLLNLAMRMA

SEQ ID NO: 133106 - protein, 279 aa, Unknown
  Bacterial polypetide isolated from the Sargasso Sea
IPFIESVKMLDARIQTMDNQADRFVTKEKKDLIVDSYIKWRISDFSRYYLATGGGDVSQAEVLLKRKFSDRLRSEIGRLDVKDIVTDSRGRLTLEVRDALNSGSAGTEDEVATPAADSAIAEAAERVQAETNGKVPVINPNSMAALGIEVVDVRIKQINLPAEVSEAIYNRMRAEREAVARRHRSQGQEEAEKLRATADYEVTKTLAESERQGRIMRGEGDAEAAKLFADAFSQDPDFYAFIRSLRAYEKSFEGNQDVMVMSPDSDFFRYMKTPSSATR

SEQ ID NO: 133107 - protein, 553 aa, Unknown
  Bacterial polypetide isolated from the Sargasso Sea
MQDEKYLNKFNKDILQLKSWTLSDRQLCDIEMILNGGFSPLDGFMNRKDYNSVCEKMRLENNLLWPIPITLDINDELVDTLEINEEIALRDKEGFVIAILTIGDIWTPDKEKEAQQIYQTTDIFHPGVNTLLNETHSTYVGGTLKGIHYPKHYDYPQLRHTPQELRESFDNWGWKDIIAFQTRNPMHQAHIELTKRALNEKNAKLLIHPVVGLTKPGDVNHYTRVRCYKHIMNKYPKNMAALSLLPLAMRMAGPKEALWHAIIRKNYGCNYFIVGRDHASPGLNKDNTPFYGPYDAQEMLNTNTNELGIKMIPFKQLVYVKEKKSFIGVDEVPKNLTALTVSGTELRKLLDEGKEIPEWFSYPEVISELQKQRPSLSNRGFTIFFTGLSGSGKSTLANGLLVKLLEEGRRPVSLLDGDIVRTHLSSELGFSKEHRSLNVRRIGFVASEITKNGGIAICAPIAPYRLDRQFNRNMIDPLGGYIEIFVSTPLEVCEQRDAKGLYAKARKGILKQFTGIDDPYEKPRNAEIVINSSNDKPETLVDQILHQIHKMGY

SEQ ID NO: 133108 - protein, 320 aa, Unknown
  Bacterial polypetide isolated from the Sargasso Sea
MSTTLDSTVNAPLANTATRMDHLDWLEAESIHILRELVAECRKPALLFSGGKDSVVVLHLALKAFGIGANRKTVLPFPLVHIDTGHNYEEVIDFRDRRAKEIGAELVVGHVEDSIKRGTVRLRRELDSRNAAQAVTLLETIAEHEYTALIGGARRDEEKARAKERIFSFRDEFGQWDPKAQRPELWSLYNARLHNGEHLRVFPISNWTELDVWQYIAREQLELPSIYYAHQREIVRRNGLLVPVTPLTPMREGETSETALVRFRTVGDISCTCPVESDADDLEKIIAETAVTEITERGATRMDDQVSEAAMEQRKKQGYF

SEQ ID NO: 133109 - protein, 320 aa, Unknown
  Bacterial polypetide isolated from the Sargasso Sea
MSTTLEQSAFAPPAGADSRMGHLDWLEAESIHILRELVAECSKPALLFSGGKDSVVVLHLALKAFGLGANRKTTLPFPLVHIDTGHNYEEVIDFRDRRAKELGAELVVGHVEDSIKRGTVVLRRETDSRNAAQAVTLLETIEEHGYTALIGGARRDEEKARAKERIFSFRDEFGQWDPKAQRPELWSLYNARLHKGEHLRVFPISNWTELDVWQYIARENLELPSIYYAHQREIVRRNGLLVPVTPLTPMRDGETSELAQVRFRTVGDISCTCPVESDADDVEKIIAETAVTEITERGATRMDDQASEAAMEQRKKQGYF

SEQ ID NO: 133110 - protein, 334 aa, Unknown
  Bacterial polypetide isolated from the Sargasso Sea
LGIKHIIVAINKMDIVDYSQDVFESIRRDYVDFAARLELPDVHFMPISALKGDNVVTNSEKMAWHEGPPLMHLLETVYIGSDRNMEDFRFPVQYVTRPNLDFRGFAGTVASGIIRKGDEIITLPSRKKSRIQSIVTFDGERDEAFAPQSVTLTLEDEIDSSRGDMIVRVGNLPKVDQKFEAMLVWMDETSLIPGKEYLFKQTGKVTPGRVSSIKYRVDINTLHREPAPTLALNEIGRCGVTLAVPIAHDSYRRNRTTGSFIIIDRLTNGTVGAGMILDREPEEGAAHWDDEPATEGLTVSSSEVTIEERQARFGQNPVTILITGPHGSGKTQSL

SEQ ID NO: 133111 - protein, 282 aa, Unknown
  Bacterial polypetide isolated from the Sargasso Sea
MPNHYDYRQYRLRPDEVKIKFKDKGWDKIVAFQTRNPLHRAHIEMTLKSMEELDAKLFLHPVVGMTKPGDVDHYTRVRCYEHIIKKYPKDSIMLSLLPLAMRMGGPRETLLHAIIRKNYGCTHIIVGRDHAGPGNDNTGNPFYGPYDAQELLNQYKDEIGIEIVPFQFMVYTPSDNTYKPLESLDDNENYQTISGTELRNILDKGAQIPEWFSYPEVAEELKRSRPPLNERGFTLFFTGLSGSGKSTIANGLLIKFLEEGSRPVTLLDGDIVRTHLSSELGF

SEQ ID NO: 133112 - protein, 264 aa, Unknown
  Bacterial polypetide isolated from the Sargasso Sea
QEISEITSLNDDELQLLTHKIFGTTDTEHPGVANFLSLGNVMLAGNIQVLNYSYFPEDFPGTFYTAPEIRDMLAKANWGTTVAFQTRNPMHRAHEELCKMALERVEADGVLIHMTLGKLKDGDIPGDIRNKAIEKMVELYFPENTVMITGFGFDMLYAGPREALLHAVFRQNCGCTHLIVGRDHAGVGDYYGPFEAQENFDLDIVKKSLKLKIFSADHTAYSKKLNKVVMMRDVKDHNKDDFVLLSGTKVREMLSNGEELPEEF

SEQ ID NO: 133113 - protein, 293 aa, Unknown
  Bacterial polypetide isolated from the Sargasso Sea
TIDSIWMPDLEREAELVYGTNDISHPAINYMLNIGNKVYIGGKVKKIAMPNYYDYKEYRLNPTDAKNKFIERGWKKIVAFQTRNPLHRAHIEMTRKAMIESNAKLFLHPVVGLTKPGDVDHYTRTRCYEHAINRYPNDSAMLAILPLAMRMGGPREAILHAIIRKNYGCTHIIIGRDHAGPGNNIDGEPFYEPYEAQDLIKKYEDEIGIKMIPFQYMVYVPSENKYMPISEVENNTDYKTISGTDLREILDKGNDIPSWFSYPEIALELKKSRPPIYKRGFTVFFTGLSGSGK

SEQ ID NO: 133114 - protein, 100 aa, Unknown
  Bacterial polypetide isolated from the Sargasso Sea
IPIVPLYLAAERPVISRDGMLILVDDDRLKLFPGEKIEIMKVRFRTLGCYPLTGAIASDADSLPKILLELFEAKTSERQGRAIDNDSSSSMEKKKKEGYF

SEQ ID NO: 133115 - protein, 186 aa, Unknown
  Bacterial polypetide isolated from the Sargasso Sea
MKLSHIDKLESESIDIIREVASEFINPVMLYSIGKDSSVMLHLAQKAFYPSKIPFKLMHIDTTWKFKEMINFRDDIAKKYNLDLLVHINQEGVSNNINPISSGSKIHTDVMKTQSLIQALDKYKFDAAFGGARRDEEKSRAKERIFSFRDKKHRWDPKNQKPELWNLFNTKIDQGESVRVFPLSNW

SEQ ID NO: 133116 - protein, 206 aa, Unknown
  Bacterial polypetide isolated from the Sargasso Sea
MSHLKYLEAEAIHIIREIISESTNPVVLYSIGKDSAVILHLIKKAFYPSIPPLPLLHVDTTWKFKEMYNLRDKVAKDIGMELIVYQNQDAINKGINPFDHGTLHTDIWKTEGLKKAFNKYEFDAAICGARRDEEKSRAKERIFSFRNSKHFWDSKAQRPELWSLYNARKFTGENIRVFHYQTGQNRYLAYIYMEKIEIVSLYLAAP

SEQ ID NO: 133117 - protein, 296 aa, Unknown
  Bacterial polypetide isolated from the Sargasso Sea
IWKPDLEQEAKSIFGTLDTKHPGVNHLFNIGNNNYIGGTIKMISLPHHHDYNNFRHSPDDLKHYFKSKGWDKIVAFQTRNPLHKAHFELTKNAMRELDANILIHPVVGLTKPGDVNHYTRMRCYQHVMNEYPKNSAKLSLLPLAMRMGGPRETLLHAIIRKNYGCTHLIVGRDHAGPGLDSKNNPFYGPYDAQEMLNKYQREIGIEMVPFKFMVYITKTKNYKPIDEVKKNEDYKTLSGTELRQLLDKGEGIPDWFTFRAVSRELERSNPPLTKRGLTIFFTGLSGSGKSTLANGL

SEQ ID NO: 133118 - protein, 205 aa, Unknown
  Bacterial polypetide isolated from the Sargasso Sea
MILFVQYIELNNTKFLFANDRRNGRLWVKVKSKKINDISKGLKYFSKLRKKNIIIFPDINLLNTFVEEKINEKLANYKLKHPIHFPDYLFKINKLNIKDTKLLKKFNLPQNSYLSDLEAESIHIIREVVSETKNPVMLYSIGKDSSVMLRLAQKAFYPSPPPFPLVHVDTRWKFREMYLFRTWIAKNSGMKLITHINPEGIKSNI

SEQ ID NO: 133119 - protein, 219 aa, Unknown
  Bacterial polypetide isolated from the Sargasso Sea
MPHGSNELNTLYIEDELARASMLSAAAEMRTLEISSAAAANAVMLAAGYFNPLTGYMNKDDALRVSKEMLTTDNLFWPIPIVNLTTDANSLDYTHGEEIALKDPNVAGNPVIAIQRVDNVEKLTDEDIDVIVTNVFGTNDDNHPGVKTFKDQGRYIISGSIEVLNYSYFPTDFPETFATAPQIREMLTKAGWSKTVAFQTRNPMHRAHEELCKMALDRL

SEQ ID NO: 133120 - protein, 58 aa, Unknown
  Bacterial polypetide isolated from the Sargasso Sea
MSYHSELIASDIQEYLHQHENKELLRFLTCGSVDDGKSTLIGRLLHDSKMIYEDQLAA

SEQ ID NO: 133121 - protein, 268 aa, Unknown
  Bacterial polypetide isolated from the Sargasso Sea
QMRLSNGDLFPIPIVLDVNKEFSDSLSLGEEILLRDKEGFKIAYMTINSIWEPDLNREAELVYGTNDITHPALHYMFNIGNRVYIGGKVEKISIPNHYDYRKYRISPNKAKNEFINRGWDKIIAFQTRNPLHRAHVEMTLRSMRELDANLFLHPVVGMTKPGDVDHYTRLRCYEHVIGKYPKDNAILALLPLAMRMGGPREALLHALIRKNYGCTHIIIGRDHAGPGNDINDEPFYGPYEAQDLIKKYKDEIDIKMIPFEFMVYVPDS

SEQ ID NO: 133122 - protein, 59 aa, Unknown
  Bacterial polypetide isolated from the Sargasso Sea
MTASIPSVTHLKQLEAESIQIFREVAAEFENPVMLYSVGKDSSVLLHLARKAFAPGKIL

SEQ ID NO: 133123 - protein, 286 aa, Unknown
  Bacterial polypetide isolated from the Sargasso Sea
EDIWCPEKLFEADKVFSSTNNEHPGVNYLLNKSNKIYLGGKLIGINKPTFYDFKHFRNSPNELRKIFNKLGWSSVVAFQTRNPLHRAHFELTLRASSESEANLLIHPVVGMTKPGDIDHFTRVRCYEAILKYYSKSTTCLSLLNLAMRMAGPKEAILHGLIRANYGCTHFIVGRDHAGPGLKANMVPFYKEYEAQELFAKYQDKINIQLLKFQNFVFLEDSAEYVPINEVPKNSSVVQISGTELRRRLNKDLKIPEWFSFPEVIAELKKTKPPLHKQGFAVFFTRF

SEQ ID NO: 133124 - protein, 320 aa, Unknown
  Bacterial polypetide isolated from the Sargasso Sea
FGPIPITLDVSKEFSKHLKIGEKVALRNLEGVILATIQIDAKWSPDKFREADKVFQTRDETHPGVNFLMNNTGEIYLGGEVVGLERPQHYDFKSRRQTPNELRKYFQKMGWQKIVAFQTRNPLHRAHQELTLTAAREVEANLLIHPVVGMTKPGDVDHFTRVRCYEAILDKYPTFSTNLSLINLAMRMAGPKEAIWHGLIRKNHGCTHFIIGRDHAGPGKDAYGNNFYTPYAAQSLFKKYSKEIGIKMVSFKELVYVPDQAKFKSIDELGDGIKTLNISGTELRRRLYEGIEIPDWFSFPEVLEELRKTLPPLSKTRFYY

SEQ ID NO: 133125 - protein, 161 aa, Unknown
  Bacterial polypetide isolated from the Sargasso Sea
MDIETFFEKQNSKNQLKILTCGSVDDGKSTLIGRLLFDSKSIYSDQLSQTKFESEKYGTQGKEIDLALLIDGLQAEREQGITIDVAYRYFETDKCKFIIADTPGHQEYTRNMATGASNSDVGIILIDSTKGILDQTKRHTFILSLLEVNHIVIAINKMDLV

SEQ ID NO: 133126 - protein, 145 aa, Unknown
  Bacterial polypetide isolated from the Sargasso Sea
MGSKKPKTRIMEFINTKISKDESVRIFPLSNWTEVDVWQYIYQEKIPIVPLYFAAKRPVIKRDDMLIMVDDKRLEINKNEKVEEKLVRFRTLGCYPLTAAIESKASNIEEIIIELLESNNSERQGRLIDSDQIGSMEIKKQDGYF

SEQ ID NO: 133127 - protein, 255 aa, Unknown
  Bacterial polypetide isolated from the Sargasso Sea
TRPPARPPARTRARGHRERRTRTRARTHTHTRARTHTHTRSQRETSAHTRAHTRADTPRRTQTRRHADTQARRQTYTHTRADTQARRQPDRHKHTDTQTRNDSDTDTDTGTGTDTDTDTETRAHGHAGTQTHRHTDTHKRRHADTQTRRHGDTQTRRHGHGHRHRHRHRHRHRHRRRHRRRRRRKHRDRHRHRHRRRHSHRHRHRHRHTHTHARARTDTHTRATHTHTHARAQRGIASASQTDRHAASQTGIQPD

SEQ ID NO: 133128 - protein, 295 aa, Unknown
  Bacterial polypetide isolated from the Sargasso Sea
DLFPIPIVLDVTKEFSDSISLGERILLREKEGFKIAYMTIDSIWKPNFNREAELVYGTNDISHPAVNYMFNLGHEVYIGGKIEIISKPNHYDYRGYRIAPDEAKIKFKEMGWDKIVAFQTRNPLHRAHVEMTLKSMNELNANLFLHPVIGMTKPGDVDHYTRVRCYEHILDKYPENNAILALLPLAMRMGGPREALLHALIRKNYGCSHIIIGRDHAGPGNDINNNPFYAPYEAQEIIRKYEDEIDIKMIPFEFMVYIPETKNYKPISEIGKNTDYKTISGTELRQILDRGENIP

SEQ ID NO: 133129 - protein, 87 aa, Unknown
  Bacterial polypetide isolated from the Sargasso Sea
CRNFDGIDILVDDDRMPIRDDQKIELKSVRFRTLGCYPLTGAVESNATTLPEIIQEMLLTKSSERQGRLIDADRAGSMEEKKRKGYF

SEQ ID NO: 133130 - protein, 257 aa, Unknown
  Bacterial polypetide isolated from the Sargasso Sea
MNKYQLTHLEELESESIFLFREVASQFENPVLLFSGGKDSIVCYHLARKAFFPANLPFPLLHIDTGHNFTELYKFRDELIKETNGRLLIGSVQKSIDDGKVIEEKGINSSRNKLQTITLLNSIEENQFDCAIGGARRDEEKSRAKERFFSHRDDFGQWDPKNQRPELWNLFNGKKNFGEHFRAFPISNWTEMDVWQYILQEKIKLPSLYFSHERNCFMRNGVLMAKTDFIKLNHDEKIMKMNVRFRTIGDVTCTGAT

SEQ ID NO: 133131 - protein, 256 aa, Unknown
  Bacterial polypetide isolated from the Sargasso Sea
MDNKSESNNYKTWVLTDRQICDLELIMDGSFSPLTGFLNEDDYNSVLDNMKLTDGSVWPMPINLDVNNEFIESISDESSITLRDKEGFAIAILDIESKWKPNKENEALKVYQTKNQEHPGVHYIINQTHDWYIGGKIRSIQNPKHYDYTNIRLTPSKVKEKISKMGWDRVVAFQTRNPMHRAHVEITHLAAKENNANLLIHPVVGMTKPGDVDYFTRVRCYNKIIKKYPSGSAMLSLLPLSMRMAGPREALWHALI

SEQ ID NO: 133132 - protein, 270 aa, Unknown
  Bacterial polypetide isolated from the Sargasso Sea
SGYLDMELLRFTTVGSVDDGKSTLIGRLLYDSKSIFEDQYESIKKTSESRGEENVNLALVTDGLRDEREQGITIDVAYRYFSTPKRKFIIADTPGHIQYTRNMVTGASTAHCALILIDARKGIVEQTCRHSFIASLLQIPHLIICVNKMDLVDYDKSVYEKIKQEFKKFSSKLQVKDIRFVPISALEGDNVVNKSNNMDWYEGTTLMYLLETIHIGSDRNLVDCRFPIQTVIRPQTKEHHDYRGYAGEIAGGIFKKGDDVMVLPSGFTSK

SEQ ID NO: 133133 - protein, 61 aa, Unknown
  Bacterial polypetide isolated from the Sargasso Sea
LLRLLTCGSVDDGKSTLIGRLLHDSKMIYEDHLASIAAESAKSGSTGGELNLALLVDGLQA

SEQ ID NO: 133134 - protein, 265 aa, Unknown
  Bacterial polypetide isolated from the Sargasso Sea
FAIKNSNASKITLRDKEGFALAVLTISEIWKPNLKQEAKSIFGTTDTKHPGVNHLLNIGNNNYVGGTVKMISMPHHHDYNDFRHTPDDLKHDFKSKGWDKIVAFQTRNPLHRAHFELTKNAMRELDANILIHPVVGLTKPGDVNHYTRMRCYQHVMNEYPKNSAKLSLLPLAMRMGGPKETLLHAIIRKNYGCTHLIVGRDHAGPGLDSKNNPFYGPYDAQEMLNKYQREIGIEMVPFKFMVYIPKTKNYKPIDEVKKNEDYKTL

SEQ ID NO: 133135 - protein, 287 aa, Unknown
  Bacterial polypetide isolated from the Sargasso Sea
CFVSNEKERDALLKEAETLPSLLLNSAAAANAVMLGGGYFNPLKGFMDLEEALSVAEHMRTKSGLFWPVPIVNLTNEDWVKSGQRIALCDPNIEDNPILAVMNVADVEEVSLEHHRFMAENIFGTLDESHPGVATFLGLGRKILSGSVQVLNFSYFEKEFGDTFLTANQIRSEIHRLGWSKVVAFQTRNPMHRAHEELCRMAMQDLEADGILIHMLLGKLKEGDIPAMVRDSAIRKMVELYFPMNTAMVAGYGFDMLYAGPREAVLHAVFRQNCGCSHLIVGRDHAG

SEQ ID NO: 133136 - protein, 186 aa, Unknown
  Bacterial polypetide isolated from the Sargasso Sea
MAELQTSPERIQEYIDRQMGLDLLRFITCGSVDDGKSTLIGRMLYEAQLIFDDQVASLQSDSKKHGTQEGEIDFALLVDGLAAEREQGITIDVAYRFFGTDRRKFIVADTPGHEQYTRNMVTGASTADVAVILVDASQGILVQTRRHSFLTSLLGVKHVVLAVNKMDLISYDEQRYQQIVDEYEVF

SEQ ID NO: 133137 - protein, 231 aa, Unknown
  Bacterial polypetide isolated from the Sargasso Sea
MSTLVPPHGGSALNPRLLPKTEQASALKRAEGLKQVPLTSRESSDVLMLSMGAYTPLEGFMSEADWKGTCGEMKLSNGVFWPIPVTLSADETLAGSIKDGEEVALVDEDSGEILATMTVTEKYTIDHEFECQNVFGTTDKDHPGVAKVLGQRGVNLSGPVVVFNEGEMPNLYKDLYLRPKESRDLFEKMGWSKVTAFQTRNPMHRSHEHLVKIALEVTDGVFIHQVLGKIK

SEQ ID NO: 133138 - protein, 318 aa, Unknown
  Bacterial polypetide isolated from the Sargasso Sea
MILDKSFHPLNRFMTEDDYNSVLNEMRLSNGELFPIPITLDVNKGFFDQLEIGEQIILREKEGFKIATMTIQSKWKPDFQRESELVYGSVDKYHPGVNYLFNTSNEFYVGGEVEKISMPNHYDYRQYRIKPEESKKIFKTMGWEKIIAFQTRNPLHRAHIEMTIKSMTDLSANLLLHPVVGLTKPGDVDHFTRVRCYEHVIKKYPKGSAILGLLPLAMRMGGPREALLHALIRKNFGCTHFIIGRDHAGPGNNSNGEPFYSPYDAQELLNKYKKEIGIEVVAFKFMVYVPSDGKYRALEDLDKNEEYKTISGSEYELS

SEQ ID NO: 133139 - protein, 247 aa, Unknown
  Bacterial polypetide isolated from the Sargasso Sea
PGVEKVMAQNPVNLAGSITVLNEGSYPSTYDGLYFKPQETRAMFEKNNWSTVAAFQTRNPMHRSHEHLAKIAIEICDGLLIHQVLGALKPGDIPADVRVAAIDALVENYFVAGTAIQAGYPIEMRYAGPREALLHALFRQNFGCSHLVVGRDHAGVGDYYGPFDAHKIFDEIPFGSLETQALKIDIAFYSYKCGGMATGRTCPSDDSQRLNISGTRLREMLANGETVPNEFSRPEVIEVLRRYYNSL

SEQ ID NO: 133140 - protein, 121 aa, Unknown
  Bacterial polypetide isolated from the Sargasso Sea
RVFPLSNWTEIDVWQYIFQEKIPIVPLYFAKIRPIIKRNNMLIMVDDDRLELKQNEKIEQIQVRFRTLGCYPLTAAVESSASSVEEILIELLETKHSERQGRLIDNDQIGSMERKKQEGYF

SEQ ID NO: 133141 - protein, 73 aa, Unknown
  Bacterial polypetide isolated from the Sargasso Sea
RMPLEKGEVPEMRSVRFRTLGCYPLTGAVESEAATLPEVIQEMLLTKTSERQGRVIDHDSAGSMEKKKMEGYF

SEQ ID NO: 133142 - protein, 70 aa, Unknown
  Bacterial polypetide isolated from the Sargasso Sea
MDSNLSHLEFLEAESIEIIREAIAGAKNPVMLYSIGKDSSVMLQLALKSFYPASPPLPLLHVDTTWKFKE

SEQ ID NO: 133143 - protein, 278 aa, Unknown
  Bacterial polypetide isolated from the Sargasso Sea
MAELQTSPERIQEYIDRQMDLDLLRFITCGSVDDGKSTLIGRMLYEAQLIFDDQVASLQSDSKKHGTQEGEIDFALLVDGLAAEREQGITIDVAYRFFGTDRRKFIVADTPGHEQYTRNMVTGASTADVAVILVDASQGILVQTRRHSFLTSLLGVKHVVLAVNKMDLISYDEERYQKIVHDYEVFSTGLAFKSVTPIPLSALEGDNVIERSANTGWYKGPTLLGYLETVDIRDEFNEKPLRFPVQWVNRPSAEFRGFSGSVVSGQVAVGDKLRFYFL

SEQ ID NO: 133144 - protein, 196 aa, Unknown
  Bacterial polypetide isolated from the Sargasso Sea
CFSTRNPMHRAHEELCRISQKQLNADGILVHMLLGKLKKGDIPADIRNASIRKMVELYFPENTVMVTGYGYDMLYAGPREAILHAIFRQNAGCSHLIVGRDHAGVGDYYGAFDAQTIFESIPEGTLQIEIFRGDHTVWCFKCDEVVMMRDCPHDKEDYLLLSGTRVREILSEGKELPPEFSRPEVAKILSEYYQTL

SEQ ID NO: 133145 - protein, 278 aa, Unknown
  Bacterial polypetide isolated from the Sargasso Sea
EDDYKRVLNDMRLANGFLFPLPITLDVDKEFSKKVSVGEKIILREKEGFQVANMTITSIWEPDFDLEAELVYGTTDQSHPAVNYLFNFSNKVYIGGEVEKISMPNHYDYRELRLNPSNVKKQFKELGWDIIVAFQTRNPLHRAHIEMTLESMKNLNAKLLLHPVVGMTKPGDVDHYTRVRCYQHVIKKYNKNNAMLALLPLAMRMGGPREALLHALIRKNFGCTHIIIGRDHAGPGNDSSGNPFYGPYDAQELLNEHKEEIEIEIVPFKFMVYTPKDG

SEQ ID NO: 133146 - protein, 252 aa, Unknown
  Bacterial polypetide isolated from the Sargasso Sea
YHGETLMTILEQVELRKDQNVEDFRFPVQFVNRPNLDFRGYCGTVASGVVHKGDELAVLPSGKTSRVKGIHTYEGEIPRAWPGDAVTITLEDEIDISRGDLLVHANQKPAMGQRFAAHVVWMNEKALVPGREYGIKIGTKVTGCFVNKVLEEVDVNTLARNTNVATGLELNAIGLCDVELSEPVVVEDYQAHPGTGAFILIDRLTNVTVAAGMVAQGLDGAGEAPQREYTEAERNLNRFIRENYPEWGCKAV

SEQ ID NO: 133147 - protein, 371 aa, Unknown
  Bacterial polypetide isolated from the Sargasso Sea
DVKENSGIDFALITDGLKAEREQGITIDVAYRYFSTPKRKFIIADTPGHIQYTRNMFTGASNSDLAIILIDARKGVLQQSKRHLYISWLLGIKQIIVAINKMDLVNYEEKTFDFIRKDFLSISQNLELPKIDLVPISALNGDNIISKSKNMEWYQDKTLIELLEGAEPRSNKDSSGIRFPVQLVNRVDNEDTKDYRGFLGTLVGGKFSIGTEINVLPSNFNAKITKIIKSSVEVDIANLGDSVSICLDKEIDISRGDMIVKSDDLPQISNKIIANICWMDNDPLNIKKKYLFKHCNKITKCMIKDLVYKIDMETLEQQKAISSIEMNDVGQISLTLLKSIAYDSYSTNQSTGAFILIDPDTNNTVAAGTIS

SEQ ID NO: 133148 - protein, 365 aa, Unknown
  Bacterial polypetide isolated from the Sargasso Sea
KKRKVIFNLKDSIGILRFATAGSVDDGKSTLIGRLLYDSKGIFSDQLEALENDSKLKNQKNIDLAHLTDGLKDEREQGITIDVAYRYFSTTKRKFIIADTPGHEEYTRNMFTGASNSNLAIILIDSRKGVLEQSRRHLYISYLLGIKDIIVAVNKMDLIEYSEKKFFSIKNEFNKIAKKLSIKSIKFIPISALHGDMIVKRGDNLPWYKGETLLSMLENTVVHSNDESSHSSFPIQLVSRVDNDEINDFRGYMGMTASGEFKIGDKIRILPGKKESEIKNIIVSGSNTNKITKNQSGTLLIKDELQISRGDTVTSLNYNPRIDSTISAQICWMGDEELNPNKKYLIKHSNKISKILIKQVVDKIK

SEQ ID NO: 133149 - protein, 380 aa, Unknown
  Bacterial polypetide isolated from the Sargasso Sea
MSNSIIQPHGGKLCNSFIQKENLNDIKNEILRLRSWSLTDRQLCDVELILNGGFSPLVGFMNQDDYDSVCEKTRLQNNHLWPIPITLDITSELADKLVTNEKLVLRDKEGFAIALLTINDIWVPDKGKEAQNIYGTTDTYHPGVNFLINETHPTYVGGTIQGIDSPTHYDYPELRHTPFQLRELFKKLRWTNIIAFQTRNPMHRAHVELTKRALNENNAKLLIHPAVGVTKPGDVNHYTRVRCYKSIMDKYDKDMAALSLLPLAMRMAGPREALWHAIIRKNYGCNFFIVGRDHASPGLNKNNKPYYGPYDAQENLNEHSKELEMNIIPFKQLVFVKEKKSFMEIDKVPNDCTALSVSGTELRDMLDKGKIIPEWFSYPE

SEQ ID NO: 133150 - protein, 400 aa, Unknown
  Bacterial polypetide isolated from the Sargasso Sea
MTNLILPHGSNELNTLYIEDEMARSSMLSASAEMRSLEINSAAAANAVMMAAGYFNPLTGYMNKEEALKVSREMLTLNDIFWPVPIVNITTDANSLDYTHGEEIALKDPNVEGNPVIAIQRIDNVEKLSDDDIEIIVKNVFGTTDVNHPGVKNFKDQGKYIISGPIEVLNYSYFPHDFPNTFATAPDIRKMLTKAGWSKTIAFQTRNPMHRAHEELCKMAYERLEADGVLIHMLLGKLKEGDIPGDVRDAAIRKMVELYFEENTAIISGFGFDMMYAGPREALLHAVFRQNAGCTHLIVGRDHAGVGDYYEPFEAQEIFDLDIVRDSLKIEIFKADHTAYSKKLDKVVMMRDAEDHSKDDFVLLSGTKVREMLAAGQELPPEFARKEVAKILMTYYQERS

SEQ ID NO: 133151 - protein, 399 aa, Unknown
  Bacterial polypetide isolated from the Sargasso Sea
MTNLVAPHGSDILKPLIIRDKSEKDNIITQSKNLHQLKLNSAAAANAVMLAAGYFTPLEGYMNKKDALSVSENMVTTNGLFWPVPIINLTKEDITGVSVGDEIALLDPNVEGNPVLAIQRIETIEKISDEDLSLMAKNIFGTNDSEHPGVKNFTSLGNTLISGSIKVLNYSYFPSDFPNTFATAEEIRKKLSDSGWTKVVAFQTRNPMHRAHEELCKMALERLSADGVLIHMTLGKLKEGDIPGDIRDAAIRKMVEIYFPKNTVIISGFGFDMLYAGPREALLHATFRQNCGCSHLIVGRDHAGVGDYYEPFAAQEIFDNEIVKKSLKIEIFAADHTAFSKKLNKVVMMRDVDDHSKDDFVLLSGTKVREMLSNGEDLPAEFARKEVADILKSYYQSLK

SEQ ID NO: 133152 - protein, 185 aa, Unknown
  Bacterial polypetide isolated from the Sargasso Sea
MDLDLLRFITCGSVDDGKSTLIGRMLYEAQLIFDDQVASLQSDSKKHGTQEGEIDFALLVDGLAAEREQGITIDVAYRFFGTDRRKFIVADTPGHEQYTRNMVTGASTADVAVILVDASQGILVQTRRHSFLTSLLGVKHVVLAVNKMDLISYDEERYQKIVHDYEVFSTGLAFKSVTPIPLSAL

SEQ ID NO: 133153 - protein, 395 aa, Unknown
  Bacterial polypetide isolated from the Sargasso Sea
MPHGSNELNTLYIEDELARASMLSAAAEMRTLEISSAAAANAVMLAAGYFNPLTGYMNKDDALRVSREMLTMDNLFWPVPIVNLTTDANSLDYTHGEEIALKDPNIEGNPVIAIQRVNNVEKLSDEDINIIVTNVFGTNDDNHPGVKTFKEQGRYIISGSIEVLNYSYFPSDFPDTFATAPQIREMLTKAGWSKTVAFQTRNPMHRAHEELCKMALDRLEADGVLIHMTLGKLKEGDIPGDVRDSAIRKMVEIYFPENTAIISGFGFDMMYAGPREALLHAVFRQNAGCTHLIVGRDHAGVGDYYEPFGAQDIFDQDVVKNSLKIEIFKADHTAYSKKLNEVVMMRDAKDHTKDDFVLLSGTKVREMLAEGQELPPEFARKEVAEILMAYYQKIG

SEQ ID NO: 133154 - protein, 125 aa, Unknown
  Bacterial polypetide isolated from the Sargasso Sea
GESIRVFPMSNWTELDIWQYIYLENIDIPQLYLSKPRPVVERDGVLIMVDDDRMPLEEGEVPEMRSVRFRTLGCYPLTGAVESEAATLPEVIQEMLLTKTSERQGRVIDHDSAGSMEKKKMEGYF

SEQ ID NO: 133155 - protein, 184 aa, Unknown
  Bacterial polypetide isolated from the Sargasso Sea
LKDALDIQKYDFVFGGARRDEEGSRSKEKILSHRSNFHIWTPENQRLEPWNLFNYEKKDNESFRVFPLSNWTEINIWEYIKDSNLKVVPLYFAKERKVVIKDNEIFLYDDKRFILSPNDKVKKLKIRFRTLGCYPLTAGVESSADTVDKIIRELKKSKNSERAGRKIDLDKIGSMELKKREGYF

SEQ ID NO: 133156 - protein, 369 aa, Unknown
  Bacterial polypetide isolated from the Sargasso Sea
GKLVNRVKDVDPSGLISVDISADLANDVENIADGIFSPLEGFLNQQDFESVISKGRLANGTAWTMPTVLDVDDDTGKKMKDAGDVLLKNPDGVGIAVLHVEDVYSYDKQATMNGVYGTNDDSHPGVSKTNSMKDFLVGGKIDYIQRQNETEIRKHRMTPTQTRELFEKAGWKTIVAFQTRNPPHVAHEMLQKTAITTRDGVFVNPLIGKKKSGDFKDEIIVKAYEVMIEKYYPENKCQLATLHTEMKYAGPREAIHHAIMRQNYGCTHIIIGRDHAGVGKFYDPFAAHKIFDDYPELEIEPIFFPAFFYCKKCLTFTNPNVCPCDPEYREQISGTKMREMINNGESPSEFILRPEVAEVIINYDKPFVE

SEQ ID NO: 133157 - protein, 375 aa, Unknown
  Bacterial polypetide isolated from the Sargasso Sea
MINAHGGKLVNRVKDVDPSGLISVDISADLANDVENIADGIFSPLEGFLNQQDFESVISKGRLANGTAWTMPTVLDVDEETGKKMKDAGDVLLKNPDGTGIAVLHVEDVYSYDKQATMNGVYGTNDDSHPGVSKTNSMKDFLVGGKIDYIQRQNETEIRKHRMTPTQTRELFEKAGWKTIVAFQTRNPPHVAHEMLQKTAITTRDGVFVNPLIGKKKSGDFKDEIIVKAYEVMIEKYYPENKCQLATLHTEMKYAGPREAIHHAIMRQNYGCTHIIIGRDHAGVGKFYDPFAAHKIFDDYPELEIEPIFFPAFFYCKKCLTFTNPNVCPCDPEYREQISGTKMREMINNGESPSEFILRPEVAEVIINYDKPFVE

SEQ ID NO: 133158 - protein, 375 aa, Unknown
  Bacterial polypetide isolated from the Sargasso Sea
MINAHGGKLVNRVKDVDPSGLISVDISADLANDVENIADGIFSPLEGFLNQQDFESVISKGRLANGTAWTMPTVFDVDEETGKKMKDAGDVLLKNPDGTGIAVLHVEDVYSYDKQATMNGVYGTNDESHPGVSKTNSMKDFLVGGKIDYIQRQNETEIRKHRMTPTQTRELFEKVGWKTIVAFQTRNPPHVAHEMLQKTAITTRDGVFVNPLIGKKKSGDFKDEIIVKAYEVMIEKYYPENKCQLATLHTEMKYAGPREAIHHAIMRQNYGCTHIIIGRDHAGVGKFYDPFAAHKIFDDYPELEIEPIFFPAFFYCKKCLTFTNPNVCPCDPEYREQISGTKMREMINNGESPSEFILRPEVAEVIINYDKPFVE

SEQ ID NO: 133159 - protein, 395 aa, Unknown
  Bacterial polypetide isolated from the Sargasso Sea
MPHGSNELNTLYIEDEMARSSMLSASAEMRSLEINSAAAANAVMMAAGYFNPLTGYMNKEEALRVSREMLTLNDIFWPVPIVNITTDANSLDYTHGEEIALRDPNVDGNPVIAIQRIDNVEKLSDDDIETIIKNVFGTTDINHPGVKNFKDQGKYIISGSIEVLNYSYFPHDFPNTFATAPDIRKMLTKAGWSKTVAFQTRNPMHRAHEELCKMAHERLEADGVLIHMLLGKLKEGDIPGDVRDAAIRKMVEVYFEENTAIISGFGFDMMYAGPREALLHAVFRQNAGCTHLIVGRDHAGVGDYYEPFEAQEIFDLDVVNDSLKIQIFKADHTAYSKKLNKVVMMRDAEDHSKDDFVLLSGTKVREMLAAGQDLPPEFARKEVAKILMTYYQGRG

SEQ ID NO: 133160 - protein, 108 aa, Unknown
  Bacterial polypetide isolated from the Sargasso Sea
WQYIYEENIPIVPLYLAKKRPVILRDNMLIMVDDDRLKIKEEEKIETKLVRFRTLGCYPLTAAIESNAASVEEIIIELLESNNSERQGRLIDTDQIGSMEIKKREGYF

SEQ ID NO: 133161 - protein, 375 aa, Unknown
  Bacterial polypetide isolated from the Sargasso Sea
MINAHGGKLVNRVKDVDPSGLMSIDISADLANDVENIADGIFSPLEGFLNQQDFESVISKGRLANGTAWTMPTVLDVDEETGKKMKDAGDVLLKNPDGTGIAVLHVEDVYSYDKQATMNGVYGTNDESHPGVVKTNSMKDFLVGGKIDYIQRQNETEIRKHRMTPTQTRELFEKAGWKTIVAFQTRNPPHVAHEMLQKTAITTRDGVFVNPLIGKKKPGDFKDEIIVKAYEVMIEKYYPENKCQLATLHTEMKYAGPREAIHHAIMRQNYGCTHIIIGRDHAGVGKFYDPFAAHKIFDDYPELEIEPIFFPAFFYCNKCLTFTNPNVCPCAPEHREQISGTKMREMINNGESPSKFILRPEVAEVIINYDKPFVE

SEQ ID NO: 133162 - protein, 326 aa, Unknown
  Bacterial polypetide isolated from the Sargasso Sea
KTNNGLFWPVPCVNRTDDISRMEGSSVIALRDPNVTGNPVLAIQNIEAIETLDVEKINHITKQIFGTLDIDHPGVKTFKNSGKYLISGPIRVLNYSYFKSEFSDTFRTAMEIRNQIQKNNWKTVVAFQTRNPMHRAHEELCKIAKDSVNADGILIHMLLGKLKPGDIPADIRNAAIRKMVELYFPKNTVMVTGYGFDMLYAGPREAVLHAVFRQNAGCTHLIVGRDHAGVGDYYGPFEAQTIFDSNDVSDALDIEIFKADHTAYSKKLNKVVMFRDVPDHTKEDFVMLSGTRVREILSAGKDLPAEFARPEVAKILMSYYQQEANQ

SEQ ID NO: 133163 - protein, 354 aa, Unknown
  Bacterial polypetide isolated from the Sargasso Sea
MSIDISADLANDVKNIADGIFSPLEGFLNQQDFESVISKGRLANGIAWTIPTVLDVDDDTGKKMKEAGDVLLKNPDGTGIAVLHVEDVYSYDKQATANGVYGTNDDSHPGVAKTNSMKDFLVGGKIDYIQRQNETEIRKHRMSPTQTRELFEKAGWKTIVAFQTRNPPHVAHEMLQKTAITTRDGVFVNPLIGKKKSGDFKDEIIVKAYEAMIEKYYPENKCQLATLHTEMKYAGPREAIHHAIMRQNYGCTHIIIGRDHAGVGKFYDPFAAHKIFDDYPELEIEPIFFPAFFYCRKCLTFTNPNVCPHDAEDREQISGTKMREMIDNGESPSEFILRPEVAKVIIDYDKPFVE

SEQ ID NO: 133164 - protein, 373 aa, Unknown
  Bacterial polypetide isolated from the Sargasso Sea
MIKTHASKELNPLFVQDSHQRAELTKEAESLPAMTLSSSAASNAVMLSAGYFTPLKGFMNKEDTLSVANQLTTADGLFWPTPVINLTNDTTAISTAKRIALRDPNIKGQPVLAIQDVTAIETLSKQELEHVTQEVFSTCDPDHPGVAAFISQGSQLVSGPIQVLNHSYFETEFPETFRTATQIRDEIKQRGWKTVVGFQTRNPMHRAHEELCKMAQEAVNADGVLIHMLLGKLKPGDIPADVRDAAIRKMVELYFPENTVMITGYGFDMLYAGPREAVLHAVFRQNCGCTHLIVGRDHAGVGDYYGAFDAQTIFDKAVPPGALDIEIFRADHTAYSKKLNKVVMMRDAPDHSKEDFVLLSGTKVREMLASGKE

SEQ ID NO: 133165 - protein, 184 aa, Unknown
  Bacterial polypetide isolated from the Sargasso Sea
MTDQKTLTHLQQLEADSIHIMREVVAETENPVMLYSIGKDSSVLLHLARKAFYPAKIPFQVMHVDTTWKFKEMIEFRDNLAKEYDLDLIVYTNPDGVKQNVGPFTHGSAVHTDIMKTQALKQALDKYQFDVAFGGARRDEEKSRAKERIFSFRSAQHRWDPKNQRPELWSLYNTKKKPGESIRV

SEQ ID NO: 133166 - protein, 267 aa, Unknown
  Bacterial polypetide isolated from the Sargasso Sea
MSHQSSLIESDILGYLHDQEHKSLLRFITCGSVDDGKSTLIGRLLYESKLIYEDQLAALEKDSKKVGTQGEDIDFALLVDGLASEREQGITIDVAYRYFSTDKRKFIVADTPGHEQYTRNMATGASTAELAILMVDARHGIMTQTKRHSTIVHLLGVDKIVLAINKMDLVDFSQSVYEDILNEYQSFAAEIGIKQFTAIPVSALKGDNITESSRNMDWYTGPNLIEFLETVPLSQVNESEAFSMPVQWVNRPNLDFRGFAGQITTGK

SEQ ID NO: 133167 - protein, 257 aa, Unknown
  Bacterial polypetide isolated from the Sargasso Sea
MESEAIHIFRETAAAFRNPVLLYSIGKDSSVLLHLALKAFHPAPLPFPVMHIDTTWKFREMIEFRDRRAQELNLDLRIATNQQAVADGVSPFSHGTHEYTRIMKTVALREGLDHYGFDAAIGGARRDEERSRAKERIFSLREPGHRWDPRKQRPEFWRTANTALAEGQTMRAFPLSNWTELDVWRYIAREGIEIPALYFAKERPVVQRDGTWIMVDDDRYPLEEGGTPEMKSVRFRTLGCYPLNGGGSSRPPMIWRH

SEQ ID NO: 133168 - protein, 247 aa, Unknown
  Bacterial polypetide isolated from the Sargasso Sea
MEKTQLRFLTCGSVDDGKSTLIGRILFDCKSVMDDQVSQSKAESRRYGTQGTDLDLALLVDGLQAEREQGITIDVAYRYFETKHRKFIAVDTPGHEQYTRNMITGASNVDLAVILVDAQKGVLQQTRRHSIILSLIGIKKIILAVNKMDLVHYEKEIFSNIKNEYLSFIKKLDLIDCTAIPISARNGDGVTHLSKEMNWYSGPSILDLLEKIDIFSEIADKPTRLPIQWVNRPNSSFRGFSGLINSG

SEQ ID NO: 133169 - protein, 310 aa, Unknown
  Bacterial polypetide isolated from the Sargasso Sea
RHGTQGEKLDLALLVDGLQAEREQGITIDVAYRYFSTEKRKFIIADTPGHEQYTRNMATGASTCDLAILLIDARKGVLDQTRRHSFISTLLGIKHLVVAINKMDLVDFSEETFNRIREDYLTFAEQLPGNLDIRFVPLSALEGDNVASQSASMPWYSGPTLLEVLETVEIQRSIDTQPMRFPVQYVNRPNLDFRGYAGTLASGSVKVGQRVKVLPSGVESSVARIVTFDGDLQEAHAGEAITLVLKDEIDISRGDLLLDAGEALPAVQSAAIDVVWMAEQPLSSGQSYDIKVAGKKTRARVDSVQYQVDI

SEQ ID NO: 133170 - protein, 195 aa, Unknown
  Bacterial polypetide isolated from the Sargasso Sea
MNDLIKKVDEYINSQANLDLLRFITCGSVDDGKSTLIGRVLYEAQLIFEDQVTSLKRESKNQGSQDGDIDLALLVDGLAAEREQGITIDVAYRFFSTERRKFIVADTPGHEQYTRNMATGASTADVAVILIDASSGLMPQSYRHSFICSLLGIKHVALIVNKMDLADFDQSVFQKIVSDYETFAKDLDFESITPI

SEQ ID NO: 133171 - protein, 269 aa, Unknown
  Bacterial polypetide isolated from the Sargasso Sea
MSKSIDILRFATAGSVDDGKSTLIGRLLFDTKGVFTDQLEALEGTSHSNEEKGIDLALITDGLRAEREQGITIDVAYRYFSTTNRKFIIADTPGHVQYTRNMFTGASNSDLAIILIDSRNGVQQQSKRHLYISWLLGIQNIIVAINKMDLVNYDQKIFDFLCKDFLSITKNLSIKQIDFVPISALNGDMIVNRGKNMKWYKGPTLIKILESTKLSSSHVKEAARFPVQLVNRVNNEAAKDFRGYMGTLLSGKISVGDSIKILPSTKKQK

SEQ ID NO: 133172 - protein, 313 aa, Unknown
  Bacterial polypetide isolated from the Sargasso Sea
FEDQVTSLKRESKNQGSQDGDIDLALLVDGLAAEREQGITIDVAYRFFSTERRKFIVADTPGHEQYTRNMATGASTADVAVILIDASSGLMPQSYRHSFICSLLGIKHVALIVNKMDLADFDQSVFQKIVSDYETFAKDLDFKSITPIPVSALHGDNVIERSSRMKWYSGPTFIGLLETIDISNLSKSQYFRMPVQWVNRPNQNFRGFSGTVVSGGVTIGDTVKVLPSGETADVKDIAFYSGSKIQALTDEAVTLVLSKEIDCSRGDIIVQADRPVEVADQFQVNLVWLDSEPGHQGRSYLIKTPSGSMWSKT

SEQ ID NO: 133173 - protein, 182 aa, Unknown
  Bacterial polypetide isolated from the Sargasso Sea
QALDKYKFDAAFGGARRDEEKSRAKERVFSFRDQNHRWDPKVQRPELWNVFNTRVDKGESIRVFPLSNWTELDIWQYIYLENISIVPLYYSAKRPVVERDGMMIMVDDDRLPLKEGEVPEMKSVRFRTLGCYPLTGAVESEAVTLPDIIQEMLLTTTSERQGRAIDHDSSGSMEKKKMEGYF

SEQ ID NO: 133174 - protein, 304 aa, Unknown
  Bacterial polypetide isolated from the Sargasso Sea
HFLEPLKEMKKPRKSPRDKTSNRSSVLSHLDRLEAESIHIIREVMAHADNPVMLYSVGKDSSVMLHLARKAFYPSSPPFPLLHVDTRWKFKAMYEFRDMMANESGMDLIVHVNPEGVEKNINPFDHGSALHTDIMKTQGLKQALDAQKFDVAFGGARRDEEKSRAKERIFSFRSSSHRWDPKNQRPEVWNIYNCRKNQNESVRVFPLSNWTELDIWQYIYRENIPIVPLYFAAKRPIVRRNGMLIMLDDDRMQLLPGEVIETMMVRFRTLGCYPLTGAIESTANDLSQIVLELLQSRTSERQGR

SEQ ID NO: 133175 - protein, 244 aa, Unknown
  Bacterial polypetide isolated from the Sargasso Sea
NFLHVDTTWKLKEMIKFRDEVSKKYNLDLIIHINQEGLKKNIGPISHGSKTHTDIMKTQSLKQALSKFKFDAAFGGARRDEEKSRAKERVFSFRDANHRWDPKNQRPELWNLFNTKIGNNESVRVFPLSNWTELDIWQYIYEENIPIVPLYLAKKRPVILRDNMLIMVDDDRLKIKEEEKIEIKLVRFRTLGCYPLTAAIESNAASVEEIIIELLESNNSERQGRLIDTDQIGSMEIKKREGYF

SEQ ID NO: 133176 - protein, 247 aa, Unknown
  Bacterial polypetide isolated from the Sargasso Sea
PPLPMLHVDTTWKFKEMYEFRNQIAHDTGMEMIVHTNQEGIKAGINPFTHGSNYYTDVMKTQALRQALDEGGYDVILGGARRDEEQSRAKERVFSFRSKGHVWDPKVQRPELWNIYNTRLLPGQTMRVFPLSNWTERDIWQYLLQNKISVVPLYFAKERPVISRNDTLIMVDDERIPLEAGEKPQMKSVRFRTLGCYPLTGAVESDASTLEEIVLETLKASNSERQGRLIDNDEIGSMENKKRDGYF

SEQ ID NO: 133177 - protein, 300 aa, Unknown
  Bacterial polypetide isolated from the Sargasso Sea
GSVDDGKSTLIGRLLHDSQQIYEDQLAALHKDSKTHGTTGETIDLALLVDGLQAEREQGITIDVAYRYFSTDKRKFIIADTPGHEQYTRNMATGASNCDLAIILVDARYGVQTQTRRHSFICSLLGIKQFVVAINKMDLLGFDQQRFEQIKQDYLQFAAQLNVPSITFVPLSALNGDNVVHSSSQTPWYQDGPLLSLLEKAPVTGFNWQAEARLPVQYVSRPNLDFRGFAGTIASGSFKVGDAIVALPSGKGSVIKSIVTFDGEWQEAVAGQAVTLTLNDEIDISRGDVIVPATHHAAVS

SEQ ID NO: 133178 - protein, 182 aa, Unknown
  Bacterial polypetide isolated from the Sargasso Sea
QALNQYGFDAAFGGARRDEEKSAPRERVYSFRDRHHRWDPKNQRPELWRTYNGAVNKGESIRVFPLSNWTELDIWQYIYQENIELVPLYFAAERPVVERGGQLIMADDERMKLEEGETIKHEVVRFRTLGCYPLTAAMHSQADNLEKIIEEMLLTRSSERQGRLIDSDQSASMEQKKRQGYF

SEQ ID NO: 133179 - protein, 243 aa, Unknown
  Bacterial polypetide isolated from the Sargasso Sea
LLHVDTTWSFGEMIKFRDDKAKKHGFDLLVHINEEGVEAGVGPFSHGSAKHTDIMKTQALKQALNKYKFDAAFGGARRDEEKSRAKERVYSFRDSNHRWDPKNQRPELWNIYNSQVNKGESIRVFPMSNWTELDIWQYIYLENIDIPQLYLSKPRPVVERDGILIMVDDDRMPLEEGEVPEMRSVRFRTLGCYPLTGAVESEAATLPEVIQEMLLTKTSERQGRVIDHDSAGSMEKKKMEGYF

SEQ ID NO: 133180 - protein, 256 aa, Unknown
  Bacterial polypetide isolated from the Sargasso Sea
AEKAFFPGKIPFPLLHVDTGWKFKEMISFRDKLAISHDLKLLVHKNEAGFKSGITPFTHSSSVYTDVMKTESLKQALDLHKFDAAFGGARRDEEKSRSKERIFSFRSASHRWDPKYQRPELWSAFNTKISFGESVRVFPLSNWTELDIWHYISCEEIQLVPLYFSDDRPVVNRNGILIMVDDERFKLNDGEEVKNKKVRFRTLGCYPLTGAVESEATNVEEIILELLGGTNSERQGRVIDKDQTASMEKKKQDGYF

SEQ ID NO: 133181 - protein, 231 aa, Unknown
  Bacterial polypetide isolated from the Sargasso Sea
MSHQSDLISSDINAYLAQHERKQLLRLLTCGNVDDGKSTLIGRLLHDSKMIYEDHLASIAAESAKSGTTDGDLDLSLLVDGLQAEREQGITIDVAYRYFSTARRKFIIADTPGHEQYTRNMATGASTCALAIILIDARNGVQIQTRRHSFITSLLGIKHVIVAINKMDLVDYEESIFNKIKKEFLKFSASLPHADLHFIPLSALTGVNVVQVGEEVPWYKGKSLMDILESV

SEQ ID NO: 133182 - protein, 131 aa, Unknown
  Bacterial polypetide isolated from the Sargasso Sea
NSRVNKGESTRVFPLSNWTELDIWQYIYQEQIPIVPLYFAKVRPVVIRDGMIVMIDDDRFNLQSNEKIELKKIRFRTLGCYPLTGAIESDANTLEDIVLELLQSKTSERQGRAIDSDSSSSMEMKKIDGYF

SEQ ID NO: 133183 - protein, 179 aa, Unknown
  Bacterial polypetide isolated from the Sargasso Sea
NKYKFDAAFGGARRDEEKSRAKERVYSFRDSNHRWDPKNQRPELWNIYNSQVNKGESIRVFPMSNWTELDIWQYIYLENIDIPQLYLSKPRPVVERDGVLIMVDDDRMPLEEGEVPEMRSVRFRTLGCYPLTGAVESEAATLPEVIQEMLLTKTSERQGRVIDHDSSGSMEKKKMEGYF

SEQ ID NO: 133184 - protein, 281 aa, Unknown
  Bacterial polypetide isolated from the Sargasso Sea
YPALPPFPLLHVDTTWKFRAMYEHRERIAKESGMEMLVYINQQGVNEGINPFTHGSNYHTDVMKTQALKLALDLHGFDVIFGGARRDEEKSRAKERILSFRYKGHRWDPKGQRPELWNVFNTNISLGETIRSFPISNWTELDIWQYLHSEQIPIVSLYFAAERKVVIRGGTMILVDDDRIQLESGEMPEVKKVRFRTLGCYPLAGAIESPAENLEEVIAETFIARSSERQGRLIDKDLQGSMEKKKLEGYFLFTSILKIFWRSKKRNRLCALLPVVVWMMV

SEQ ID NO: 133185 - protein, 286 aa, Unknown
  Bacterial polypetide isolated from the Sargasso Sea
KRLTHLRQLEAESIHIIREVAAEFSNPVMMYSIGKDSSVMLHLARKAFYPGTLPFPLLHVDTGWKFSEMYEFRDRTAKAYGCELLVHKNPEGVAMGINPFVHGSAKHTDIMKTEGLKQALNKYGFDAAFGGARRDEEKSRAKERIYSFRDRFHRWDPKNQRPELWHNYNGQINKGESIRVFPLSNWTEQDIWQYIWLENIDIVPLYLAAERPVLERDGMLMMIDDDRIDLQPGEVIKKRMVRFRTLGCWPLTGAVESNAQTLPEIIEEMLVSTTSERQGRVIDRDQ

SEQ ID NO: 133186 - protein, 175 aa, Unknown
  Bacterial polypetide isolated from the Sargasso Sea
MQNTGKTKTKDERSQLRFLTCGSVDDGKSTLIGRILYDTNRVSKDNLSQTREESEKYGTQGQDLDLALLVDGLQAEREQGITIDVAYRYFETQFRKFIAIDAPGHEQYTRNMVTGASNAETAIILIDAEKGITKQTKRHSSIISLLGIKSVLLAVNKMDKVNYDRQSFCENLRGI

SEQ ID NO: 133187 - protein, 282 aa, Unknown
  Bacterial polypetide isolated from the Sargasso Sea
TIDLALLVDGLQAEREQGITIDVAYRYFSTDKRKFIIADTPGHEQYTRNMATGASNCDLAIILVDARYGVQTQTRRHSFICSLLGIKQFVVAINKMDLLGFDLQRFEQIKQDYLQFAAQLNVPSIQFVPLSALNGDNVVHSSTQTPWYQDGPLLSLLEKAPVTGFNWQAEARLPVQYVSRPNLNFRGFAGTIASGSFKVGDAIVALPSGKGSTIKSIVTFDGEWQEAVAGQAVTLTLKDEIDISRGDVIVPATHHAAVSNRILAKVVWMHEEPLLIGKSYNI

SEQ ID NO: 133188 - protein, 211 aa, Unknown
  Bacterial polypetide isolated from the Sargasso Sea
NQEGVRNNINPISSGSKIHTDVMKTQSLIQALDKYKFDAAFGGARRDEEKSRAKERIFSFRDKKHRWDPKNQKPELWNLFNTKIDQGESVRVFPLSNWTEIDIWQYIYQENIPLVPLYFAKIRSIIRRNDMMIMVDDDRLKIKENEKIEQKKVRFRTLGCYPLTAAVESNASTVEEIIIELLESKYSERQGRLIDNDQIGSMEKKKQEGYF

SEQ ID NO: 133189 - protein, 149 aa, Unknown
  Bacterial polypetide isolated from the Sargasso Sea
KNHRWDPKNQKPELWNLFNTKINTDESVRVFPLSNWTELDIWQYIYQEKIPIVPLYLAKTRPIIKRDGMMIMVDDDRLEIKQNEKIEQKKVRFRTLGCYPLTAAMESSATKVEEIIIELLETKYSERQGRLIDSDQIGSMEIKKQEGYF

SEQ ID NO: 133190 - protein, 235 aa, Unknown
  Bacterial polypetide isolated from the Sargasso Sea
MNYLKRLESEAIYIIREALSSSDNPVMLYSVGKDSSVLLHLAKKAFYPSLPPFPLLHVDTTWKFQDMYELRSKVAKNANMELIIHQNPEGIKKKINPFDHGSVHTEIWKTDGLKQALRKHNFDMALGGARRDEEKSRAKERIFSFRDKNYIWDPKQQRPEIWSLFNTRKNTNESFRVFPLSNWTELDIWQYIYLEGIEIVPLYFAAPRPTIKRDGLIIMIDDNRFKFRRGEKSKL

SEQ ID NO: 133191 - protein, 291 aa, Unknown
  Bacterial polypetide isolated from the Sargasso Sea
MEAESIQIFREVAAEFDNPVMLYSIGKDSSVLLHLARKAFYPGKIPFPLLHVDTRWKFREMIEFRDKVAKQYGFDLLVHINPEGIAMDMNPFTYGSSKHTDVMKTQGLKQALDQYGFDAAFGGARRDEEKSRAKERVYSFRDQHHRWDPKNQRPELWHTYNGQVNKGESIRVFPLSNWTELDIWQYIYQEKIDIVPLYFAAVRPVVERNGTLIMVDDERMPLNPGEVPEQKLVRFRTLGCYPLTGAIESSADSLTGIIEEMLLSTSSERQGRVIDHDSSGSMEKKKREGYF

SEQ ID NO: 133192 - protein, 197 aa, Unknown
  Bacterial polypetide isolated from the Sargasso Sea
MAFNHLKKLESESIHIIREVASEFANPVMLYSIGKDSSVMLHLAIKAFAPNKIPFKLLHVDTTWKFKEMIKFRDQISRDYNLDLIVHINQEGVKNKVGPISHGSKTHTDIMKTQSLKQALNKFKFDAAFGGARRDEEKSRAKERIFSFRDINHRWDPKNQKPELWNLFNTKISKDESVRIFPLSNWTEVDVWQIYYQ

SEQ ID NO: 133193 - protein, 301 aa, Unknown
  Bacterial polypetide isolated from the Sargasso Sea
DNEKVGNAGEELDLALLVDGLQAEREQGITIDVAYRYFSTAKRKFIIADTPGHEQYTRNMVTGASTSDVAIILVDARYGVQVQTKRHSFICDSLGIKQFVVAINKMDIVDFDETVYEKIKADYLKFAEQLNVSNIKFVPMSALKGDNVVTRSEHTPYYTDKPLLELLEDSPAAELDNGFEARLPVQYVARPNLDFRGFQGTLTSGKFSVGDAVKVLPSGKSSSIKEIVTFDGNLDTAEAGQAITLTLNDEIDISRGDVIVPAASKAAVTNRIQAKLVWMHEAPLVLGKSYNFKLGSKNTSA

SEQ ID NO: 133194 - protein, 171 aa, Unknown
  Bacterial polypetide isolated from the Sargasso Sea
FGGARRDEEKSRAKERIFSFRDENHHWDPKNQRPELWNLYNTKIDKGESVRVFPLSNWTELDVWQYIYQEKIEIVPLYLAAIRPIIKRDNLLLMVDDKRLDVKESETIENKLVRFRTLGCYPLTGAIESNAKSVEQIILELIQSKNSEREGRAIDKDQIGSMEKKKQEGYF

SEQ ID NO: 133195 - protein, 100 aa, Unknown
  Bacterial polypetide isolated from the Sargasso Sea
MIHLDKFFQDQNKKKQVKILTCGSVDDGKSTLLGRLLFDSQNIFLDQMDQAKIESEKYGTQGKEIDLALLVDGLQAEREQGITIDVAYRYFETSNCKFII

SEQ ID NO: 133196 - protein, 241 aa, Unknown
  Bacterial polypetide isolated from the Sargasso Sea
MSHQSDLISQDILAYLAQHERKELLRFLTCGNVDDGKSTLIGRLLHDSKMIYEDHMEAITRDSKKSGTTGEDVDLALLVDGLQAEREQGITIDVAYRYFSTAKRKFIIADTPGHEQYTRNMATGASTCDLAIILIDARYGVQTQTKRHSFIASLLGIKHIVVAVNKMDLMDFDQTVFDKIREDYLQFAKGLELLDGDKVQFVPMSALKGDNVVNHSERSPWYTGPSLMEILETVEIASDRN

SEQ ID NO: 133197 - protein, 217 aa, Unknown
  Bacterial polypetide isolated from the Sargasso Sea
MLDKLTHLKQLEAESIHIIREVAAEFDNPVMLYSIGKDSAVMLHLARKAFFPGKLPFPVLHVDTRWKFQEMYRFREKMVSEYGLELLTHINPDGVAQDMNPFTYGSAKHTDVMKTEGLKQALDKYGFDAAFGGARRDEEKSRAKERVYSFRDSKHRWDPKNQRPELWNVYNGKVKKGESIRVFPLSNWTELDIWQYIYLEQIPIVPLYFAAEREVIE

SEQ ID NO: 133198 - protein, 243 aa, Unknown
  Bacterial polypetide isolated from the Sargasso Sea
MLHLAIKAFAPNKIPFKLLHVDTTWKFKEMIKFRDQISRDYNLDLIVHINQEGVKNKIGPISHGSKTHTDIMKTQSLKQALNKFKFDAAFGGARRDEEKSRAKERIFSFRDINHRWDPKNQKPELWNLFNTKISKDESVRIFPLSNWTEVDVWQYIYQEKIPIVPLYFAAKRPVIKRDDMLIMVDDKRLEINKNEKVEEKLVRFRTLGCYPLTAAIESKASNIEEIIIELLESNNSERQGRLI

SEQ ID NO: 133199 - protein, 216 aa, Unknown
  Bacterial polypetide isolated from the Sargasso Sea
MNNENELLRQDILSYLEQHEKKDMLRFLTCGSVDDGKSTLIGRLLHDSKMIYEDQLAAITKDSKKVGTTGEKVDLALLVDGLQSEREQGITIDVAYRYFSTDKRKFIIADTPGHEQYTRNMVTGASTCDLAIILVDARGGVKVQTKRHSFLVSLLGIKHVIVAINKMDLMDYSEEVYKQIQEDYLKFAEQLDIPDIQFVPISALEGDNVVGKSEKT

SEQ ID NO: 133200 - protein, 266 aa, Unknown
  Bacterial polypetide isolated from the Sargasso Sea
ASEREQGITIDVAYRYFSTDKRKFIVADTPGHEQYTRNMATGASTAELAILMVDARHGIMTQTRRHSTIVHMLGVDKIVLAINKMDLVDYEESTYQKILDDYRTFATELGIRDFTAIPVSALKGDNITDPSEEMEWYSGPSLIEFLETVPLKTVDTTGTFTMPVQWVNRPNLDFRGFAGQITTGQISVGDAIEVLPGKVRSTVKSIVTFENEAKEAIRGESITLTLNDEIDISRGDVLVCKGSKTEIGHSFVSTLLWMSEEALVPG

SEQ ID NO: 133201 - protein, 279 aa, Unknown
  Bacterial polypetide isolated from the Sargasso Sea
LREVVAEFERPVMLYSVGKDSSVMLHLAQKAFFPAKVPFPLLHIDTGYKFKEMYEFRDSFVKSIGAELIVHRNEEAIANGAHPSKLGVAKCCGSLKTQALLDALEFNKFDAAIGGARRDEEKSRAKERVFSFRDSFGQWDPKAQRPELWNIYNGAIDEGESVRVFPLSSWTEGDIWNYIKEEEIEIVPLYFAKKRKIIRKDKNLIPLDNSNNTEENVEEVLCRFRTLGCAPCTGAVESSATTIDSIVNEATTATRSERETRIIDHGSNNMEDKKKEGYF

SEQ ID NO: 133202 - protein, 233 aa, Unknown
  Bacterial polypetide isolated from the Sargasso Sea
FREMIEFRDRLAKEYNFELLVHKNPEGLAMNINPFVHGSAKHTDIMKTQSLKQALNKYGFDAAFGGARRDEEKSRAKERVYSFRDKHHRWDPKNQRPELWNLYNGAINEGESIRVFPLSNWTELDIWLYILQENIDIVPLYLAKPRPVVERSGTLIMVDDERMPLEPGEVPQMKSVRFRTLGCYPLTGAIESTADTLEGIVEEMLRARTSERQGRVIDQDQSGMELKKREGYF

SEQ ID NO: 133203 - protein, 170 aa, Unknown
  Bacterial polypetide isolated from the Sargasso Sea
WWRSTRRRKSRAKERVYSFRDSNHRWDPKNQRPELWNIYNSQVNKGESIRVFPMSNWTELDIWQYIYLENIDIPQLYLSKPRPVVERDGILIMVDDDRMPLEEGEVPEMRSVRFRTLGCYPLTGAVESEAATLPEVIQEMLLTKTSERQGRVIDHDSAGSMEKKKMEGYF

SEQ ID NO: 133204 - protein, 204 aa, Unknown
  Bacterial polypetide isolated from the Sargasso Sea
AFQTRNPMHRAHEELCHMAMEDLSADGVLIHMLLGKLKPGDIPADVRDASIRKMVDLYFPPNSVMVTGYGFDMLYAGPREAVLHAVFRQNAGCTHLIVGRDHAGVGSYYGGFDAQTIFDNEVPEGALALDIYRADHTAFSKKLGRVVMMRDAPDHSPEDFVLLSGTKVREMLGQGIAPPPEFSRPEVAEILMAYYQEIDGTAAG

SEQ ID NO: 133205 - protein, 174 aa, Unknown
  Bacterial polypetide isolated from the Sargasso Sea
MLHSGGARRDEEKSRSKERIFSFRSNNHQWEPKSQRPELWSLYNARKKTGESVRVFPLSNWTELDIWHYIYQQNIEIVPLYFAKKRPVVKRGDLLIVVDDDRFKFKKNEKSEMKSVRFRTLGCYPLTGAVESNASNLIDVIQELLSSTKSERQGRAIDHDQSSSMEQKKRQGYF

SEQ ID NO: 133206 - protein, 181 aa, Unknown
  Bacterial polypetide isolated from the Sargasso Sea
ALDKYGFDAAFGGARRDEEKSRAKERIYSFRDRFHRWDPKNQRPELWHNYNGQINKGESIRVFPLSNWTELDIWQYIYLENIEIVPLYLAAERPVLERDGMLMMIDDDRIDLQPGEMIKKQMVRFRTLGCWPLTGAVESNAQTLPEIIEEMLVSTTSERQGRMIDRDQAGSMELKKRQGYF

SEQ ID NO: 133207 - protein, 67 aa, Unknown
  Bacterial polypetide isolated from the Sargasso Sea
MNTTIAQQIANEGGVEAYLHAQQHKSLLRFLTCGSVDDGKSTLIGRLLHDTRQIYEDQLSSLHNDSK

SEQ ID NO: 133208 - protein, 175 aa, Unknown
  Bacterial polypetide isolated from the Sargasso Sea
MSNNIKSAVYKPDAIIAKDINAYLKSHQKKSLLRFITCGSVDDGKSTLIGRLLFESNMLFEDHLTQLESDSKKAGTQGKDLDFALLLDGLEAEREQGITIDVAYRFFTTEKRKFIAVDTPGHEQYTRNMITAASTAELAIILIDARKGILTQTRRHSFLCNLIGINNFILAINKM

SEQ ID NO: 133209 - protein, 404 aa, Unknown
  Bacterial polypetide isolated from the Sargasso Sea
MSSTNVTSLNEQLNTLGIRGYLQQHQDKGLLRVLTCGSVDDGKSTLIGRLLHDSQQLYDDQLDALKRDHKGRNSEGELELAMLVDGLQAEREQGITIDVAYRYFSTTERKFILADTPGHEQYTRNMATGASTSDVAILLIDARYGVQTQTRRHSFICSLLGIKHLIVAVNKMDIVGYSEHSYQAIKQDVQALMAQLQVPTVDVVPISALKGENILTLSANMPWYTGTALLPLLETLPIPQRGGAATRFPVQYVNRPDLNFRGFAGTLVSGRLAVGQAVTAYPSGKKSTIKQLVSFEGEHASAIAGQAITVTLNDEIDISRGDWLVPSDENVTLTNRALAYVVWFNDQPLEAGRLYDLKLATRKTSVSINRLNHKVNVNTLAQEAAEQVAMNDIALVELELTETL

SEQ ID NO: 133210 - protein, 472 aa, Unknown
  Bacterial polypetide isolated from the Sargasso Sea
MSVANELAEIGIEQYLEQQQHKSLLKFLTCGSVDDGKSTLIGRLLHDSQQIYEDQLAALHKDSKSHGTTGEAVDLALLVDGLQAEREQGITIDVAYRYFSTDKRKFIIADTPGHEQYTRNMATGASNCDLAIILVDARYGVQTQTRRHSFICSLLGIKQFVVAINKMDLLGFDQQRFEQIKQEYLQFAAQLNVPSIQFVPLSALNGDNVVHSSTQTPWYQDGPLLGLLEKAPVTGFNWQAEARLPVQYVSRPNLDFRGFAGTIASGSFKVGDAIVALPSGKGSVIKSIVTFDGEWQEAVAGQAVTLTLNDEIDISRGDVIVPATHHAAVSNRILAKVVWMHEEPLLIGKSYNIKLATKKVSGKVTAIAHSIDVNTLAEHQADKLELNSIALVELELTEAVVFDPYAQNRDTGGFIFIDRISNITVGAGMVDSALASVSSKAEFSEFELELNALVRKHFPHWQALDLSQLNKG

SEQ ID NO: 133211 - protein, 265 aa, Unknown
  Bacterial polypetide isolated from the Sargasso Sea
KDSSVLLHLARKAFYPGKIPFPLLHVDTRWKFREMIEFRDKVAKQYGFDLLVHINPEGVAMDMNPFTYGSSKHTDVMKTQGLKQALDQYGFDAAFGGARRDEEKSRAKERVYSFRDQHHRWDPKNQRPELWHTYNGQVNKGESIRVFPLSNWTELDIWQYIYQEKIDIVPLYFAAVRPVVERNGTLIMVDDERMPLNPGEVPEQKLVRFRTLGCYPLTGAIESSADSLTGIIEEMLLSTSSERQGRVIDHDSSGSMEKKKREGYF

SEQ ID NO: 133212 - protein, 295 aa, Unknown
  Bacterial polypetide isolated from the Sargasso Sea
HLEKLESESIHIIREVASEFENPVMLYSIGKDSAVMLHLALKAFAPSKLPFKLLHVDTTWKFREMITFRDEIAKEYNLDLLVHINEEGVKNNIGPITHGSKLHTDVMKTQALKQALDKYKFDAAFGGARRDEEKSRAKERVFSFRDQQHHWDPKNQRPELWNLYNTKIAKGENVRVFPLSNWTEIDVWQYIYQEKINIVPLYFAKERPVIKRDDLLLMVDDKRLDVKEHEKIENRMVRFRTLGCYPLTGAIESTATSVEEIIIELLESKNSEREGRAIDKDQIGSMEKKKQEGYF

SEQ ID NO: 133213 - protein, 504 aa, Unknown
  Bacterial polypetide isolated from the Sargasso Sea
MEAFRSTKYQQTSRTVEQDKSEIKMDKAVNKTNRMAAEISQHGVKEYLAQQQHKGLLRFLTCGSVDDGKSTLIGRLLHDSAQIYEDQLASLKNDSAKMGTTGEAIDLALLVDGLQAEREQGITIDVAYRYFSSDKRKFIIADTPGHEQYTRNMATGASTCDLAVILVDARYGVQTQTKRHAFIASLLGIRHFVVAVNKMDLLGFDEQVFNRIRNDFSEFVKGFGELDIHFVPLSALNGDNVVEPSLHTPWYQGGTLLELLETIDTQRELSALPVRFPVQYVSRPNLDFRGFAGTLASGVIKVGDEVVALPSGKRSKVERIVTFDGDLAEATAGQAVTITLEDEIDISRGDLLALPESAPQVANQIVADLVWMDEKPLQLGQLYDIKVAGKKTQASVSTIEYVVDVNTLARSSADTLGLNAIARVTLELTEDIVFDAYSLVRDTGGMILIDRLSNATVAAVMVVSGQHVSKQVSSQFSAFEIEFNALVRKHFPHWQAIDISKLGA

SEQ ID NO: 133214 - protein, 302 aa, Unknown
  Bacterial polypetide isolated from the Sargasso Sea
MAGRELSHLQQLEAESIQIIREVAAEFDNPVMLYSIGKDSSVMLHLARKAFYPGKIPFPLLHVDTGWKFKEMIAFRDAQAKKFGFELLTHTNSEGVAQGINPFDHGSAKHTDIMKTQGLKQALNQYGFDAAFGGARRDEEKSRAKERVYSFRDRHHRWDPKNQRPELWRTYNGAVNKGESIRVFPLSNWTELDIWQYIYQENIELVPLYFAAERPVVERGGQLIMADDERMKLEEGETIKHEVVRFRTLGCYPLTAAMHSQADNLEKIIEEMLLTRSSERQGRLIDSDQSASMEQKKRQGYF

SEQ ID NO: 133215 - protein, 299 aa, Unknown
  Bacterial polypetide isolated from the Sargasso Sea
MKLSHIDKLESESIHIIREVASAFDNPVMLYSIGKDSSVMLHLAQKAFYPSKIPFKLMHIDTTWKFKEMINFRDETAKKYNLDLLVHINKEGVANNINPISSGSKIHTDVMKTQSLIQALDKYKFDAAFGGARRDEEKSRAKERIFSFRDKKHRWDPKNQKPELWNLFNTNIDKGESVRVFPLSNWTEIDIWQYIYQENIQLVPLYFSKIRSIIRRNDMMIMVDDDRLKIKENEKIEQKKVRFRTLGCYPLTAAVESDATTVEEIIIELLESKYSERQGRLIDNDQIGSMEKKKQEGYF

SEQ ID NO: 133216 - protein, 343 aa, Unknown
  Bacterial polypetide isolated from the Sargasso Sea
MNNENELLRQDILSYLEQHEKKDMLRFLTCGSVDDGKSTLIGRLLHDSKMIYEDQLAAITKDSKKVGTTGEKVDLALLVDGLQSEREQGITIDVAYRYFSTDKRKFIIADTPGHEQYTRNMVTGASTCDLAIILVDARGGVKVQTKRHSFLVSLLGIKHVIVAINKMDLMDYSEEVYKQIQEDYLKFAEQLDIPDIQFVPISALEGDNVVGKSEKTPWFDGTPLMEMLENIEIGEDDNLEDFRFPVQYVNRPNLDFRGFAGTVVSGQVAPGDEVTALPSGKKSKVKQVVTFEGDQERAYVPQAVTLTLEDEIDISRGDMIVKSDNLPLLNTQFKTHLVWMSEG

SEQ ID NO: 133217 - protein, 210 aa, Unknown
  Bacterial polypetide isolated from the Sargasso Sea
MTASIPSVTHLKQLEAESIQIFREVAAEFENPVMLYSVGKDSSVLLHLARKAFAPGKIPFPLLHVDTTWKFGEMIKFRDEQAKKHGFDLLVHINEEGVEAGVGPFSHGSAKHTDIMKTQALKQALNKYKFDAAFGGARRDEEKSRAKERVYSFRDSNHRWDPKNQRPELWNIYNSQVNKGESIRVFPMSNWTELDIWQYIYLENIDIPQL

SEQ ID NO: 133218 - protein, 235 aa, Unknown
  Bacterial polypetide isolated from the Sargasso Sea
KFQAMYDFRDYMAAESKMDLIVLVNPEGVEKNINPFDHGSALHTDIMKTQGLKQALDMHKFDAAFGGARQDEKKSRAKERIFSFRNPQHRWDPKNQRPELWSLYNGYKNPGESIRVFPLSNWTELDVWQYINREGIEIVPLYFAAERPVIERDGMLLMVDDDRMRMSEGEEIRTRLVRFRTLGCYPLTGAIDSSATSLPEIVLELLQSKTSERQGRAIDSDSSASMEKKKQEGYF

SEQ ID NO: 133219 - protein, 299 aa, Unknown
  Bacterial polypetide isolated from the Sargasso Sea
MTFNHLKKLESESIYIIREVAAEFTNPVMLYSIGKDSSVMLHLAIKAFAPNKIPFKLLHVDTTWKFKEMIKFRDQTIKENNLDLIVHINQEGVNNKVGPITHGSKTHTDIMKTQSLKQALNKYKFDAAFGGARRDEEKSRAKERIFSFRDTNHRWDPKNQKPELWNLFNTKISTNESVRIFPLSNWTEVDVWQYIYQENIPIVPLYFAAKRPVIKRDDMLIMLDDNRLEIKKGEKIEEKLIRFRTLGCYPLTGAVESKASSIEEIIIELLESKHSERQGRLIDSDQIGSMEIKKQDGYF

SEQ ID NO: 133220 - protein, 280 aa, Unknown
  Bacterial polypetide isolated from the Sargasso Sea
MDLKKFFINQNSKKQLKILTCGSVDDGKSTLIGRLLFDSKSIYSDQISQTKFESEKYGTQGKEIDLALLIDGLQAEREQGITIDVAYRYFETEKCKFIIADTPGHQEYTRNMATGASNSDIGIVLIDATKGILDQTRRHTFILSLLGVNHIVIAVNKMDLLNYDKKNFENIVHSFEKLSKNFNFLSKRYIPMSALIGDNVFSKSKKMPWYAEETLISTLESFDIDKSSIDEEFSMPIQWVNRSSSDFRGYSGTISSGKININDEITVVSSGEKAKVRKIL

SEQ ID NO: 133221 - protein, 302 aa, Unknown
  Bacterial polypetide isolated from the Sargasso Sea
MDRERLTHLQQLEAESIHIIREVAAEFENPVMMYSIGKDSSVMLHLARKAFYPGKIPFPLLHVDTDWKFKEMIKFRDETAKKYGLDLIVHKNPDGLAMGINPFVHGSGKHTDIMKTEGLKQALNKYGFDAAFGGARRDEEKSRAKERVYSFRDKSHRWDPKNQRPELWRVYNSQVNKGESIRVFPLSNWTELDIWQYIYLENIDIVPLYFAAHRPVVERNGIKIMVDDERMPIGPEDEVKQELVRFRTLGCYPLTGAIESAATTLPEIIEEMLLTTSSERQGRLIDHDQAGSMEQKKRQGYF

SEQ ID NO: 133222 - protein, 171 aa, Unknown
  Bacterial polypetide isolated from the Sargasso Sea
MNNHIQIAISEQGIEAYLHAQQHKSLLRFLTCGSVDDGKSTLIGRLLHDSQQIYEDQLKALESDSQKLGTTGEKLDLALLVDGLQAEREQGITIDVAYRYFSTAKRKFIISDTPGHEQYTRNMATGASTCDLAIILIDARKGVLDQTRRHSFIASLLGIKQFVVAVNKMDL

SEQ ID NO: 133223 - protein, 299 aa, Unknown
  Bacterial polypetide isolated from the Sargasso Sea
MALTHLQQLEAESIKIMREVAAEFENPVMLYSIGKDSSVLLHLARKAFYPAKIPFPLLHVDTDWKFREMIEFRDRIAKEYDFDLLVHKNPEGLAMGVGPFTHGSGKHTDIMKTQGLKQALNKYGFDAAFGGARRDEEKSRAKERVYSFRDKHHRWDPKNQRPELWNTYNSQVNPGESIRVFPLSNWTELDIWQYIYQENIEMVPLYLAKERPVVERDGTLIMVDDERMPLEEGEVPQMKSVRFRTLGCYPLTGAVESTASTLTEIIEEMLLSTSSEREGRVIDHDSAGSMEKKKREGYF

SEQ ID NO: 133224 - protein, 170 aa, Unknown
  Bacterial polypetide isolated from the Sargasso Sea
MSSQNNDTFNEVKEIGIDAYLARQQDKSLLRMLTCGSVDDGKSTLIGRLLHDSHQIYEDQLAALHKDNEKVGNAGEDLDLALLVDGLQAEREQGITIDVAYRYFSTAKRKFIIADTPGHEQYTRNMVTGASTSDVAIILVDARYGVQVQTKRHSFICDSLGIKQFVVAIN

SEQ ID NO: 133225 - protein, 299 aa, Unknown
  Bacterial polypetide isolated from the Sargasso Sea
MNLTHLEKLESESIHIIREVASEFENPVMLYSIGKDSAVMLHLALKAFAPSKLPFKLLHVDTTWKFREMIKFRDDIANEYNLDLLVHINEEGVKNNIGPISHGSKLHTDVMKTQALKQALDKYKFDAAFGGARRDEEKSRAKERVFSFRDQQHHWDPKNQRPELWNLYNTKIAKGENVRVFPLSNWTEIDVWQYIYQEKINIVPLYFAKERPVIKRDDLLLMVDDKRLDVKDYEKIENRMVRFRTLGCYPLTGAIESTATSVEEIIIELLESKNSEREGRAIDKDQIGSMEKKKQEGYF

SEQ ID NO: 133226 - protein, 299 aa, Unknown
  Bacterial polypetide isolated from the Sargasso Sea
MKLSHIEKLESESIHIIREVAAEFENPVMLYSIGKDSSVMLHLAQKAFAPNKIPFKLMHIDTTWKFKEMILFRDETVNNHNLDLLVHINEEGLRDKISPFSHGSKIHTDIMKTQALKQALDKYQFDAAFGGARRDEEKSRAKERIFSFRDKNHRWDPKNQKPELWNLFNTKINKDESVRVFPLSNWTEIDVWQYIYQEKITIVPLYFAKTRPIIKRDNMMIMVDDDRLEVKQNEKIEQIKVRFRTLGCYPLTAAVESSASSVEEIIIELLQTKYSERQGRLIDNDQIGSMEKKKQEGYF

SEQ ID NO: 133227 - protein, 200 aa, Unknown
  Bacterial polypetide isolated from the Sargasso Sea
MSANSYLKELESEAIFILREVVAEFTNPVMLYSVGKDSSVMLHLARKAFYPSRIPFPLLHVDTGYKFKEMYEFRDSFTKEIGAKLIVHRNEEAIKKGFHPAKNGIAKCCGALKTQALLDALSKYNFNAAIGGARRDEEKSRAKERVFSFRDSFGQWNPKSQKPELWNIFNAEIDENESVRIFPLSSWTESDIWNYIKHEK

SEQ ID NO: 133228 - protein, 338 aa, Unknown
  Bacterial polypetide isolated from the Sargasso Sea
MSHQSSLIATDIDEYLTQHEQKELLRFITCGSVDDGKSTLIGRLFYESKMIYEDQLTAIKKDTTRYGTTGEEVDLALFTDGLEDERQQGITIDVAYRYFSTEKRKFIIADTPGHEQYTRNMATGASTADLAIILIDARHGVLPQTKRHSFIVSLLGIKHIIVAINKMDIVDYSQDVFESIRRDYIDFAARLELPDVHFMPISALKGDNVVTNSEKMTWHEGPPLMHLLETVYIGSDRNMEDFRFPVQYVTRPNLDFRGFAGTVASGIIRKGDEIITLPSRKKSRIQSIVTFDGERDEAFAPQSVTLTLEDEIDSSRGDMIVRVGNLPKVDQKFEAMLV

SEQ ID NO: 133229 - protein, 303 aa, Unknown
  Bacterial polypetide isolated from the Sargasso Sea
MTAYSLTHLRQLEAESIHIIREVAAEFDNPVMLYSIGKDSAVMVRLAEKAFYPAKPPFPLMHVDTTWKFQEMYQLRDNYIAKELGFKLIVHVNEEGRAQGVNPFTHGSKVHTDIMKTQALRQALDTHRFDAAFGGARRDEEKSRAKERVFSFRDDFHRWDPKNQRPELWNLYNTKVKKNESIRVFPISNWTELDVWQYIHLEQIPIVPLYFAKERPIVWREGVMIMVDDDRMQLEPNEKPEMRRVRFRTLGCYPLSGAVDSTATTLPEIIQEMLLTTFSERQGRLIDSDEAGSMEKKKREGYF

SEQ ID NO: 133230 - protein, 350 aa, Unknown
  Bacterial polypetide isolated from the Sargasso Sea
MRSRHHSDRRPQRCAGSDPSPQLYREPAWHQAVRGGGQQDGLVKFSQEVFERISLEYREFAKKLSVDTIHIVPVSALDGDNVVNPSDKLAWYQGETLLALLESADVIQNAERELERHPVRLPVQYVNRPNLDFRGFAGTLASGILRVGDKLAVLPSGKESTVTRIVTFDGDLDYALPGQAITVTFADEIDISRGDLLVDAARKPLVTQNLLAHIVWMGEESLQPGRVYDVKLATKKSRGQVEAIRHRIEINKLDELDASELKLNEIGLCELSLTDPVAFDPYQEIRDTGSFILIDRLTNVTVGAGMIVEGLAATVATGHYSEFEVELNALVRKHFPHWQALTISNDASKE

SEQ ID NO: 133231 - protein, 428 aa, Unknown
  Bacterial polypetide isolated from the Sargasso Sea
MHDSQQIYEHQLAALHKDSKTHGTTGETIDLALLVDGLQAEREQGITIDVAYRYFSTDKRKFIIADTPGHEQYTRNMATGASNCDLAIILVDARYGVQTQTRRHSFICSLLGIKQFVVAINKMDLLGFDQQRFEQIKQDYLQFAAQLNVPSIQFVPLSALNGDNVVHSSSQTPWYNDGPLLCLLEKAPVTGFNWQAEARLPVQYVSRPNLDFRGFAGTIASGSFKVGDAIVALPSGKGSTIKSIVTFDGEWQEAVAGQAVTLTLKDEIDISRGDVIVPATHHAAVSNRILAKVVWMHEEPLLIGKSYNIKLATKKVSGKVTAIAHSIDVNTLAEHQADKLELNTIALVELELTEAVVFDPYAQNRDTGGFIFIDRISNITVGAGMVDSALASVSSKAEFSEFELELNALVRKHFPHWQALDLSQLTKG

SEQ ID NO: 133232 - protein, 470 aa, Unknown
  Bacterial polypetide isolated from the Sargasso Sea
MAAEISQHGVKEYLAQQQHKGLLRFLTCGSVDDGKSTLIGRLLHDSAQIYEDQLASLKNDSAKMGTTGEAIDLALLVDGLQAEREQGITIDVAYRYFSSDKRKFIIADTPGHEQYTRNMATGASTCDLAVILVDARYGVQTQTKRHAFIASLLGIRHFVVAVNKMDLLGFDEQVFNRIRNDFSEFVKDFGDLDIHFVPLSALNGDNVVEPSLHTPWYQGGTLLELLETIDTQRELSALPVRFPVQYVSRPNLDFRGFAGTLASGVIKVGDEVVALPSGKRSRVERIVTFDGDLAEATAGQAVTITLEDEIDISRGDLLALPESAPQVANQIVADLVWMDEKPLQLGQLYDIKVAGKKTQASVTAIDYVVDVNTLARSSADTLGLNAIARVTLELTEDIVFDAYSLVRDTGGMILIDRLSNATVAAVMVVSGQHVNKQASSQFSAFEIEFNALVRKHFPHWQAIDISKLGA

SEQ ID NO: 133233 - protein, 302 aa, Unknown
  Bacterial polypetide isolated from the Sargasso Sea
MAGRELSHLQQLEAESIQIIREVAAEFDNPVMLYSIGKDSSVMLHLARKAFYPGKIPFPLLHVDTGWKFKEMIAFRDAQAKKFGFELLTHTNPEGVAQGINPFDHGSAKHTDIMKTQGLKQALNQYGFDAAFGGARRDEEKSRAKERVYSFRDRHHRWDPKNQRPELWRTYNGAVNKGESIRVFPLSNWTELDIWQYIYQENIELVPLYFAAERPVVERGGQLIMADDERMKLEEGETIKHEVVRFRTLGCYPLTAAMHSQADNLEKIIEEMLLTRSSERQGRLIDSDQSASMEQKKRQGYF

SEQ ID NO: 133234 - protein, 301 aa, Unknown
  Bacterial polypetide isolated from the Sargasso Sea
MDLEKFFQNQNNKRQVKILTCGSVDDGKSTLLGRLLYDSQNVFVDQIDQAKIESEKYGTQGKEIDLALLVDGLQAEREQGITIDVAYRFFETPKCKFIVADTPGHEQYTRNMATGASNSDVAIILIDAQKGVLEQTKRHSFIVNLLGIQHVVVAINKMDLVDYDESFFNKIVTEYNELIKNFNFISINYIPLSALKGDNVFSTFENTKWYSGSTLIETLENIQIIDEGMRNAFSMPVQWVNRSSSDFRGYSGTITSGKISKGDLITTALSNSQTSIKNIYGPNGELNEAFVNQAYNINASR

SEQ ID NO: 133235 - protein, 294 aa, Unknown
  Bacterial polypetide isolated from the Sargasso Sea
MSDLEAESIHIIREVVSETKNPVMLYSIGKDSSVMLRLAQKAFYPSLPPFPLLHVDTRWKFREMYLFRNWVEKNSGMKLITHINPDGIKSNINPFDHGSALHTDIMKTQSLKQALDKYKYDAAFGGARRDEEKSRAKERVISFRNPSHQWDPKNQRPELWSLYNSKVNKGESTRVFPLSNWTELDIWQYIYQEQIPIVPLYFAKVRPVVVRDGMIIMVDDDRFNIQSKERIELKSIRFRTLGCYPLTGAIESNANSLEDIVLELLQSKTSERQGRAIDTDSSSSMEIKKIDGYF

SEQ ID NO: 133236 - protein, 271 aa, Unknown
  Bacterial polypetide isolated from the Sargasso Sea
KNKITFLLGSAEMEGVISYEDSRSGLTMLAEIILNEAFKLSLNWMKKRYGDVKNSEGRLGKFAIIGLGKLGGYEMTYYSDLDLIFIHSGNGISDGFDKLSSQEYWIKLIKRLISCLTTITKKGYAYKLDTRLRPSGNAGVLVTPLNIYLKYHQSSQPWEHQALIKARVIGGIGGEKWFKKVEEQIKKTVYEWKSPNNIDSQINHFRFRKEEELAQENNFKRNIKEGKGGLLDIEYLTQSIQLKHGKEFPQLQSSRTFSTLKNIGHLDLIKK

SEQ ID NO: 133237 - protein, 310 aa, Unknown
  Bacterial polypetide isolated from the Sargasso Sea
IILFFNFNYTNIKDHFETKQFIINKFKKLVKILTNFSEGDFLYRVDLRLRPDPSSTPIAIDTKFAENYYQKLGRTWERMAFIKARPVCGDIKKGKEFLNKLDSFIWRNHFDYAAIDEVKNLREKMKLNSSYLKFYDLSGYNIKTGLGGIRDIELFTQTYQLIVAGRNRELRGAKTVKTLNKLKELGWLDHEPFEKLVGAYNLFRTIENRLQIVNNTQNQNIPNENSLQFNHLATLAGFASYSKFKDLVLQNLNNVKLITDDFFSNFKFRNVQKKNFLDTEIIKSNQGKLGFKLSNENHFYSKISQLKHLS

SEQ ID NO: 133238 - protein, 185 aa, Unknown
  Bacterial polypetide isolated from the Sargasso Sea
EQAWTWEHMALCRARPLYGSPEGRAALAAVVHAVLTAPREAEKLRADVLEMREKMARHKPPGGPLDVKLMRGGLVDLEFIVHFIQLRERGPGLDPDLGEAVRGLAAAGLVDAALVEAHDALTRLLVAGRLLAPDAQVPGPAARLALVRACGYGDWEALETGLATARRHIADAWRAAFDETLEIDA

SEQ ID NO: 133239 - protein, 223 aa, Unknown
  Bacterial polypetide isolated from the Sargasso Sea
MTFELKPKRGPKVFDQRIAQEIYNLFPESEEKLRIFFASVASCSPYLYSQIQKEKTWLLNTVRNNDFHILSLLESLKSETYDSLYLKLRIAKRRAALWIALNDLADTWSLEVVTKNLSEFADKAINLSWRASFLKELKKGKFPKEYDGDPNKVGFFILAMGKLGAFELNYSSDIDLICFFDEEVFHPEEFQNVRRIFINATKNMYRILNENGKDGYVFRTDLR

SEQ ID NO: 133240 - protein, 304 aa, Unknown
  Bacterial polypetide isolated from the Sargasso Sea
AEIVLEEAFRMAMKKLDLRFGNSLKQLEDPLYFAIIGLGKLGGRELTYHSDLDLIIVHSGKSKASQNDRLLIQEYGVKLIQRTIFLVTTITRSGFAYTLDTRLRPSGNAGVLVTPWEVYFKYHRNSQAWEHQALVKGRIVVGASTQLESDGLIETIGEFSKPGWLQEVESGIEQAAYEWETPRDLASQIHHLRSRKEKELSAETDKKRNLKEGRGGLLDVEFLTQYLQLVHGRDIPEMRTTETLEALENAGKHGLLNQDQVSILSEGYRHLRLIENGLRLLYDDATNMLDFDRIHQPLILMLLK

SEQ ID NO: 133241 - protein, 169 aa, Unknown
  Bacterial polypetide isolated from the Sargasso Sea
LTFKNLNRFLVLSFAAIILAACTTTPQDTASTSSSSSTSKVEVVDGVYVGTDTVEMLAVDVPDRVFFAYDSYSLTSAAQATLAKQAKWLKANGSVTIAIEGHADERGTREYNLALGDRRANAAKDYLMTQGISASRITTISFGKERPVNSASNNKAWAQNRRSVTVRTN

SEQ ID NO: 133242 - protein, 272 aa, Unknown
  Bacterial polypetide isolated from the Sargasso Sea
MKKKKREFYEVFGSLKNIKSSDLGFVVIAMGKMGAFELNYSSDIDFNVFYDSKIFSKDQLLIFQPILIKITRDVIKLMSEINEEGYIFRCDLRLRPEPSVNPVCMSVKFALQYYREKGRTWERSAYIKARAVAGDISKGNCFLADLEPFIWRKKLNYFAIQDTQEIRKKIARKESKGQKAGVLGFNVKVGSGGIRDIELYTQTLQLIYGGRDKNVRCLGTCQSLQVLKEEGRITENTLREFSEAYEFYRNLEHRIQMLNDSQTHEIPKTEEG

SEQ ID NO: 133243 - protein, 303 aa, Unknown
  Bacterial polypetide isolated from the Sargasso Sea
MGRVRAIFNGLFSLKHLEIEASIRKCSRIKHFTTVEERFIESFSQQIVPHISQYTKNHFQRLFESINVQIDYYRKLSQYPSALSRLTRIAETSEMLWNYLLNNLELLEKLDNPVPDISVENLTKILEDQLSTCKGNEEEEIDRLRQFKHTITFLLGSAEMEGLVSYENARFGMTVLAEIIVRAAFAMSQKSLASRYGEVKDVEGELSSFAILGLGKLGGEEMTYHSDLDLIFLHSGDGVTTGPSVIGAQEYWIKIIQRLISCLSTITRTGFAYKLDTRLRPSGNAGVLVSPLDTYLNYHNSSE

SEQ ID NO: 133244 - protein, 296 aa, Unknown
  Bacterial polypetide isolated from the Sargasso Sea
NNPESGGISKSIEGKSRDEMREKMRTLEVPNGMGVILRTAGEGVSFEELKWDLDFLLNLWDAIQEANQLRKAPFLIYRENDLVSRSLRDFLREDITEVLIDTDDAYEKAYDFTSKLMPDFEDKIKRYDEAIPLFTRYQIESQIETAYQRDVELQSGGSIVIDQTEALVAIDINSAKATSGSDIEETALNTNLEAATEIGKQLRLRDIGGLIVIDFIDMLSLKNKRAVEDKLWKALSIDRAKVQVGRISRFGLLEMSRQRLRPSLQERWTQDVASLSTAVLRLIEEEASKKKSGEVR

SEQ ID NO: 133245 - protein, 145 aa, Unknown
  Bacterial polypetide isolated from the Sargasso Sea
DAEEAFATPESNSAKVLGATIDGIVQNRLNKALQGQRTENQRLAKEASFRQKHKLNDDEWAEFVDFAKSKSLELDDIYYLMNRKNRDNKIASSTRDEMREKMRQTQEIPNSLATQGSTQVEQSPDDKIFDALLGSESEIEKAFSI

SEQ ID NO: 133246 - protein, 457 aa, Unknown
  Bacterial polypetide isolated from the Sargasso Sea
TLPQTDDGFLRLANFLMLDHTVFKEKIINSVKSVHDLTESFFNPEEATIPQTVFPQGKTYRHDLISRWPSYPALRTARAEALFLKIQPIILEKLSNAVDADRALISFDKFLSLLPAGVQLFSLFNTNRQLIDLFIDIISSSDALSEYLSGNVQVLDALIGGSFWSQWPGEKFLGKDLANTTAREQDYESQLNASRRWGREWHFRIGVHLLRGVITPEMATRQYGELALATLKELWFLVNKQFAKKYGPSPGRGAVLLGLGSLGRKRLHSKSDLDLILIYDAAGVEISSGEKSIASKSYYARLTKSMVAAIGAPMTEISLFQVDMRLRPSGNQGPVATSWEAFKHYQISEAWVWEHLALVNATIIAGPESLQKDVCKFCESLKTLRQDEKVMSGLSIMRKRLYALQSVNENWSLKLGQGKLQDIELVSQMGIILSNERVSGVHSGLNALFELKKICAD

SEQ ID NO: 133247 - protein, 121 aa, Unknown
  Bacterial polypetide isolated from the Sargasso Sea
MSEFRLQELNVSSDKFNKKEFIFCHPDGSSVGSYKKGFQKLLDECDLRLDNDGNYRTLYSLRHTYATMRINEVPIYQLAVNMGTSVKMIEEYYSHAQTKDPKFAESMTKGNQKGNSKVLPF

SEQ ID NO: 133248 - protein, 662 aa, Unknown
  Bacterial polypetide isolated from the Sargasso Sea
MFSAVELIGEDNFANTENANIDIIYSEDFLKEGDELILGLRFKLTPGWHIYWKNPGDSGLPPELEWNLPVGIEFQEILWPSPELAPLDPLTSYGYYDEVVLPIKFKINSNYNYSEKFSAFLSFLICEEICIPEDTNISIDLTKFSQSQLENGKNILNDWINRLPSKSSFITEAFLSDNTFKISWRSGEIYEKAYFYPEQNGLINYSSNQILGKNNESAYLTIDRPENFREELQFVSGVLELQNADQKTFFQIENSIERVSFIEVNKTQGLSFLLAIFLAFIGGIILNAMPCVFPVIALKVMSLVNESGKSNSWKHGLVFTLGIEISMLILLIATMAVKNLGQFVGWGWQLQSSLMSSLLAILFFALGVILVSRVELGSFFTRLGNLNVNKTGYSNSFLLGLLTVIVATPCTGPYMGAAIGWGISQPILISSIIFLSLGFGIAFPTLILSILPKGINILPKPGNWMGIVSRIMGIPMFLTALWLAWVVFRQSGYEGLIILISSLMILLVAFLILRLSSVIAKRSSVALISASILFLIFFIPAENKNTKSYIDIGEKWSTERVNQLRDEKRNILLNFTADWCLTCKVNERLVLNSKEFISLIESDEIVYLVADWTKYDPKITEELEKYKRAGVPLYLYWSQGSDEVKILPAVLTKSILYDHLKL

SEQ ID NO: 133249 - protein, 632 aa, Unknown
  Bacterial polypetide isolated from the Sargasso Sea
LRPDPSVTPVCMGVDAAERYYASLGRTWERAAFIKARVCAGDYSAGIKFLKNMEPFVWRKYLDYAAISDAHDIRLRIRDHFKTKIGDITLPQHNMKLGRGGIRDIEFFTQTHQIIFGGRDKGLRSKATITSLRAIADKKWLPKALVKDLIENYRFNRTIEHRLQMVNDAQTHELPNSDQGFVRLASLMGIEKDDLQKELVERLSKTNSAIEGFFEPQNTGQNIQRSSFSKELEDLMKNWGSFPALRTARAMSIFERIKPVILEKINSTSRPQETLKAFGNFLSKLPAGIQIFSLFENNKQILDLLIDILGTSGALSEYLVKNTDVLDSVIAPEFWEIWPSREFLSSELEIILKSEMDYEAKLDLTRRWCKEWQFKIGVHYLRSQISAKRAGAQYAELAEITLSIIWKEVLFEFAKKFGPEPGNGAAVISMGSLGSGVLHANSDLDLIIIYDADGNDQSEGHRSLSARQYYSRLTKAFITAISAPMTEGRLYEIDMRLRPSGFQGPVATSWSSYQNYQKNEAWVWEHLALTRARAVAGKVFLLNEFENFRNSVLKSYHRENIFNELVNMRARIFQAKSLNPWDAKVGPGRLQDIDLLSQAGCLVNRSVSRSTADGLEALFSGKFISHEEFFEI

SEQ ID NO: 133250 - protein, 226 aa, Unknown
  Bacterial polypetide isolated from the Sargasso Sea
MEFELRPKRVPKVFDQRIAQEIYNLFPESSEKLRMFFASVASCSPYLYSQIVKEKSWLLNAVGDKDFNILSLLEPLESETYDSLYLKLRIAKRRAALWIALNDLADIWSLEVVTKNLSEFADKAINLSWRVSFLKEMKKGKFPKQYDGDPDKAGFFILAMGKLGAFELNYSSDIDLICFFDEEVFHPEEFQDVRRIFINATKNMYRILNENGIDGYVFRTGFTLAA

SEQ ID NO: 133251 - protein, 216 aa, Unknown
  Bacterial polypetide isolated from the Sargasso Sea
MTNAELAEKFWQQLLTAPAMSENDKVIVEAHSETLKQAFSRSAFLAETLIQKPSFVSRIVEHYRPLENSEELQSVGTAISSDYHTALDDKLQGVVSEDDLMQVLREFRNKEMARIAFLDVLNKQPIETSLIHVSALADVLISGAYHWLYQHLAARYGKPQSHGKDMHMYILGMGKLGGKELNFSSDIDLIFAYPEKGETQGGRKSLEHQQFFTKVA

SEQ ID NO: 133252 - protein, 331 aa, Unknown
  Bacterial polypetide isolated from the Sargasso Sea
VFYKLAQRLIAALNKTTPLGQVFRVDMRLRPFGDSGPLVAHFGALEDYYQDQGRQWERYAMVKARILNPESCYASQLEAILAPFIYRRYLDFTTIDAIRDMKRLIGKELRRRRLTGNIKLGAGGIREVEFFAQSFQLIHGGRETTLQSRELHPVLTRLAELQIIEPQAINQLLEDYYFLRKAEHTLQQFNDEQTQLLPENSWTQAVIAKVMAFPDYQTFISALTVVMERVHEQFNQLVSEPGEEQQEQDSLFSRCKDAWLLEVSENEFCDLLSDTLDESSAMVLFEQLRDFRGQLSRHRIGQRGEDTLGKLMPEMIYYMLPPCPTNIIQLL

SEQ ID NO: 133253 - protein, 294 aa, Unknown
  Bacterial polypetide isolated from the Sargasso Sea
SFYKGFIDQRASWLKKTFDLDLTSTLSGLLKKCKKSDRMDLYRSLRVAKRRAILLLALADLGGLWRLSDVTEALSEFASSVLEVSLDHLTYHEFNWELHSSYFKTTNDFPISMFGSAKKVGLVGIAMGKLGGKELNYSSDIDLIFFFDEFQFKPYFYSEVRLIFIKIIRNLVKLLSEVTLDGYVFRVDLRLRPDPSSNPICIGIASAERYYESFGRNWERAALIKARPVAGATKKGFKFLLRLEPFIWRKNLDFSAIEDTEQMLDKIRDRDTVKSQPKILGYDIKNNFGGIREI

SEQ ID NO: 133254 - protein, 163 aa, Unknown
  Bacterial polypetide isolated from the Sargasso Sea
MKQLSSPLQQYWPTVVERLPAAISESSLSVQAKSVLTFSDFVRDSIIAHPEWLAELESTPPLADEWQHYANWLQQALADVSDENTLMRELRLFRRRIMVRIAWAQTLSLVTEESILQQLSHLAETLIVAARDWLYAACCRAKRKFMDVNDCFNWFCIFYITSS

SEQ ID NO: 133255 - protein, 321 aa, Unknown
  Bacterial polypetide isolated from the Sargasso Sea
KLGAGGIREIEFIAQAFQLIHGGRDLSLQQRPLLKVLTTLEGQGYLPPAVVAEMKEGYEFLRYAEHALQGIGDRQTQMLPADPQDQARVAAIMGFADWTSFHERLMHWRGRIEWHFQQVIADPDEDESDAGEACVGAEWLPLWQGALDDEAAVLQLQEAGFIEPDAACRRLGDLRNGPQVRAMQRLGRERLDAFIPRLLAQAVEHDKPDLVLERVLPLVEKVARRSAYLVLLSENPGALERLITLCAASPWIAEQIARYPLLLDELLNEGRLYSPPLAPELAAELRERLIRIPEEDLEQQMEALRHFKLAHSLRVAASEIA

SEQ ID NO: 133256 - protein, 188 aa, Unknown
  Bacterial polypetide isolated from the Sargasso Sea
AGLLCCHIDGFEKYQTEEAWTWEHQALVRARAICGDPRLLNDFTQVRNSILTRSRNAKTLADDVCKMRLKMREHLLSKANDKVDLKQCVGGITDIEFMAQYLVLANAKSQAAMTEYPDNLRIFDAAAKTNIIDVATAHKLQKAYLKLREQYHHLTLADTKYADQSEELDAIREQVTIHWNTLFGTCSG

SEQ ID NO: 133257 - protein, 240 aa, Unknown
  Bacterial polypetide isolated from the Sargasso Sea
ILGMGKLGGKELNHSSDVDLIFIHDDLAPVEQQDQSNRHRIKVARSLIDVMSDITEEGFLARVDMRLRPGGDRAPLVQSLDEVEVYYSAKGELWERQALIKGRTVAGCERTKKSFESMITPFVYSRLLEERLSRDIQHMKERIEEEHLRENQLNVKLGVGGIREIEFFVQTFQLLYGGRRKSLRQTNTLKALEAIEEVDLIPALDGAHLKRAYIFLRRVEHRLQMREEQQTHTIPSNAES

SEQ ID NO: 133258 - protein, 317 aa, Unknown
  Bacterial polypetide isolated from the Sargasso Sea
MGKLGARELNYSSDIDLVCFFDDEKLAEKDFFETRKAAIAVIKGVTKILSETTEHGYVFRTDLRLRPDPSVNPVCIGFEAAEKYYEALGRTWERAAYIKARYCAGSKSLAVKFLAALYPFVWRKYLDFAAIEDAHSIRIRYQRKIELKTISSILGHDVKLGLGGIRDIEFFTQTRQLIVGGRDPDLQVPETLVALVKLAEKGWVSTDTSKRLAEHYRFLRKVEHLLQMVNDAQTHTLPQTDDGFLRLANFLMLDRTVFKEKIINALKSVHDLTESFFNPEEGSIPKTVFPEGKTYRQDLISRWPSYPALRTARAEAL

SEQ ID NO: 133259 - protein, 247 aa, Unknown
  Bacterial polypetide isolated from the Sargasso Sea
RAALWVALNDLADTWSLEVVTKNLSEFADKAINLSWRASFLKELKKGKFPKQHDGDPDKVGFFILAMGKLGALELNYSSDIDLICFFDEEVFHPEEFQDVRRIFINATKNMYRILSENGTDGYVFRTDLRLRPDPSVTPVCMGVDAAERYYASLGRTWERAAFIKARVCAGDHSAGIKFLKNMEPFVWRKYLDYAAISDAHDIRLRIRDHYKTKKGDITLPKHNMKLGRGGIRDIEFFTPNSSNYFW

SEQ ID NO: 133260 - protein, 316 aa, Unknown
  Bacterial polypetide isolated from the Sargasso Sea
TFFASVASCSPYLYSQILKEKIWLVNTVRCNDFNILSLLGPLDSETYDSLYLKLRIAKRRAALWVALNDLADTWSLEVVTKNLSEFADKAINLSWRASFLKELKKGKFPKQYDGDPDKVGFFILAMGKLGAFELNYSSDIDLICFFDEEVFHPEEFQDVRRIFINATKNMYRILSENGTDGYVFRTDLRLRPDPSVTPVCMGVDAAERYYASLGRTWERAAFIKARVCAGDHSAGIKFLKNMEPFVWRKYLDYAAISDAHDIRLRIRDHYKTKKGDITLPKHNMKLGRGGIRDIEFFTQTHQIIFGGRDKSIRSRA

SEQ ID NO: 133261 - protein, 402 aa, Unknown
  Bacterial polypetide isolated from the Sargasso Sea
NLISQRLSYNVELLDLLVSKKFLDYLFSKDILAKELKLRFKYNNDFEFIINELRRFVKERKFQISIHLILGKINCFHASKYFSDTAEICIEILLPVVKKNLKTRYGYPVNHLPCVLGMGKLGSSEMNFFSDLDLILIYNPFVKYKIKNQNYNSLEKYFARFTQALVSAFTSLTQEGKLYNVDMRLRPSGRKGPVATSISSFLNYQINKAWVWEHMALSRARIITGDTKTKSKLNKILFQIFDNKTFSKNEIKKQTLNMRLTLQKNYSKEFNPPDIKYGRGGFQELELLVQMGMLLMNIGYKKNHQSPKKLIVLLFRASFLNEDEFKEVSLIYDLFFNYQQVICIMSDKIDNKEILSNHGLQYLVENFCKSINYEKVKNLNDLYLLLKQKSKYIGNLFDKKLK

SEQ ID NO: 133262 - protein, 362 aa, Unknown
  Bacterial polypetide isolated from the Sargasso Sea
MVYVFGRSNFLVTRLKRNPELALKLLESSFLFQKKNLLEMEKELRQRLENQPNQSLLEFKTALRCFKYEEFLRITVRDLAELCPFEETLEELSSVAICCLRESLYFVTSHELVNLEKSKKELIEDNFITAKGETLQSMSFSSHHYLPFSILALGKLGGNELNFSSDVDLIFIHDNESITGNLNFDHKFRIKAAKLLIEVMSEVTEEGFLARVDMRLRPGGEKAPLVLSLDETEFYYTASREMWERQSLIKAVPVAGSELLTKDIMNMVTPLVYKSLLDEEVLNDIEKVKKRIEEEHLREDHLNVKLGVGGIREIEFFVQTFQLLYGGVNKQLQTTGTLRVLQALSKIGMIPGQDAALLKEAY

SEQ ID NO: 133263 - protein, 308 aa, Unknown
  Bacterial polypetide isolated from the Sargasso Sea
MSARSHNADLGLHNLERFVVNFKEKEHLFTQLSESKHLLESLICLFSGSQILTDSLLSEPSHINWLSEPNILNEPKSKDILMRDFYEMAGNDFHKNTTSKLLRKFKKREYIRIGLRDLLGTVELMETVGDISNLADVCLQIAYEKADRDLKKKHGIPSYKDSDENWQVSEFAVIGMGKLGGQELNYSSDIDLIYIYTSSHGETRPEPSNKSEVITLTNHEYFSKLAQQITNYINEITDEGNVFRVDLDLRPDGPSGEIASSLASCETYYQSWGKTWERQAMIKARVSAGSDSLGREFFGMMEPFIYRR

SEQ ID NO: 133264 - protein, 566 aa, Unknown
  Bacterial polypetide isolated from the Sargasso Sea
MNSCKVTQFLEDRSGLDRWARDIGLSDGENASQVFKKLVSQDVDVDLLGRLIKILERLLPLYGEADRLLVTLGRFLQAVGSPLSTIALFEREPESLEALLAILATSPFLGEIVIAEPDVWERIRSGGGRPEKRESLRDILRSEVGDSLDSAFVMQVLRRFKRREILRVAYGDIVKHQRLETVVDQISAIADCIIDEALRVALLQQQQRRGSPITGDGRPATITVIALGKLGGNELNYSSDIDLVFCYSEDGDIAGSKTYTTSEFFERVVQQVTRLIADQTELGAAYRVDLRLRPYGGQGPLVLPRVALERYYDRQGRTWERQAWVKARCVAGDLQLGEDLLANLRPWVYSRWLPRTEISGIRALKRQIERRSIREGIDSADLKTGRGGIRDIEFTIQFLQLLSGGDETEVRVGNTIEAIRRLAANGSLNDQEREILERNYRLLRTAEHRLQILYDRQTHRLPENEDEYARLAGRLGYGRQANAATKLREDLEEATRLNRRILEHLLHDAFPGETTPEAEVDLILDPKPQKELIDSVLAPRGFHDVTRAYRMVNALSEESSHFLSNR

SEQ ID NO: 133265 - protein, 471 aa, Unknown
  Bacterial polypetide isolated from the Sargasso Sea
KFLFSKIEKSLYEMISNTYSPAETLANIDKYFSQLSSGVEIFSLLNSNKSFLNIFVDIASKVPQVLEEIGQNTDILASVVNKDFFHSFPTLEGVLFELDRILNVKPFDYEDKLSLIRQFVKELKFKVAVHLIQRKSNIEEASFSYSIIAEAVLQILAPIVTENFSKRYGPLKSKGFAIIGMGKLGSREMTLTSDLDLIIVYDPVSLENLEKSSKIHPSTYFSKLTKELVSALTSTMKDGYLYKVDMRLRPSGSKGPVAVSFSSFSNYQKTEAWTWEHLALIRGRVVYGEKSFSLRIEDVIKESLRGPRDVSKVFSDVKDMRGKLFENLKLENKKLKSLNIKVGQGMMLDLELLIKMGALITKQGNGKNISYLIDKLEGIKYFSNEEVDLIRKAWRIFYTSDFLSRYFNFDISKSTDFESYRWSELFQKDSFFIFLKDFLSEDLTKDTLKKHLESLVGLLSNEINSVFNSKL

SEQ ID NO: 133266 - protein, 384 aa, Unknown
  Bacterial polypetide isolated from the Sargasso Sea
MLSIFGRSDYLSRRLIRDPKFASEFCSLENWKEARSSELMLRELRKKVRSVNPETPEGLKNILRRWKYREFLRISIRDFCLPEAFVETLEEWASVAESLLQVALETIHEILQKKDGVHFPEPPFMILGMGKLGGKELNHSSDVDLIFIHDDLAPVEQQDQSNRHRIKVARSLIDVMSDLTEEGFLARVDMRLRPGGDRAPLVQSLDEVELYYSAKGELWERQALIKGRTVAGCERTKKSFESMITPFVYSRLLDERLSRDIQHMKERIEEEHLRENQLNVKLGVGGIREIEFFVQTFQLLYGGRRKSLRKTNTLEALEAIEEVDLIPALDGTHLKRAYIFLRRVEHRLQMREEQQTHTIPSNAESQRHLARCMGYDDLDPEKAR

SEQ ID NO: 133267 - protein, 202 aa, Unknown
  Bacterial polypetide isolated from the Sargasso Sea
SALVLQRVLGVFRQIVSRTAYLELLSENPPALQQLVMLCHKSGWLAEHLARYPLLLDELIDPSQLYQVPDSTDYRDKLRQSMLRVPTDDLELQMEVLRQFKQAQQLRIAAADITGILPLMKVSDHLTFLAEAIIAAVVELSWQQMAEKYGLPAGLKPEDAKAFAVLAYGKLGGSGTGLWFGSGLGFCAPVRQSCADSRRQSH

SEQ ID NO: 133268 - protein, 205 aa, Unknown
  Bacterial polypetide isolated from the Sargasso Sea
MFGQLYETDLRLRPSGNAGLLCCHIDGFEKYQTEEAWTWEHQALVRARAICGDPRLLNDFTQVRNSILTRSRNAKTLADDVCKMRLKMREHLLSKANDKVDLKQCVGGITDIEFMAQYLVLANAKSQAAMTEYPDNLRIFDAAAKTNIIDVATAHKLQKAYLKLREQYHHLTLADTKYADQSEELDAIREQVTIHWNTLFGTCSG

SEQ ID NO: 133269 - protein, 245 aa, Unknown
  Bacterial polypetide isolated from the Sargasso Sea
LVVGMGKLGGRELNVSSDIDLIFLYDDDGDTQGGPRPLSNHEYFTKLGRRLINALADVTEDGYVFRVDMRLRPNGDAGPLACSLGMLEEYFVVQGREWERYAWIKGRVITDPTSPHAARVIQQLDRVTGPFVFRRYLDYGVISAIRALHAQIRNEAAKRSNGANQQRDDMGHLQARSPNIKLGRGGIREIEFVAQVFQLIRGGQDFGLRVRPTLEVLRAAAERGLIDADAVARLTEAYRFLRQLE

SEQ ID NO: 133270 - protein, 334 aa, Unknown
  Bacterial polypetide isolated from the Sargasso Sea
AENHREALLVAFARSAFLAETLVQKPAFISRVVELVSDSNATCFSTELKAKLESLKSEDEFLKVLREYRNQEMARITFLDVLNKQNIEDSLAQVSALADALINSAYHWIYKHLALRYGTPKSNSQDMNMYILGMGKLGGRELNFSSDIDLIFAYPEKGETSGGKKALEHQQFFTKLAQKLIQALNKVTNDGQVYRVDMRLRPFGDSGPLVMHFAALEDYYQDQGRHWERFAMIKARVINDDHSDDAKWLNSILQPFTFRRYLDFTTLDALRNMKKLIATEIRRRRLSNNIKLGAGGIREVEFFAQSFQLIHGGREPALQSKSLLRTLDALSELD

SEQ ID NO: 133271 - protein, 272 aa, Unknown
  Bacterial polypetide isolated from the Sargasso Sea
MEGYYETQGREWERYALIKMRPMAGDLEAGGRLIKRLNPFVYRRYIDYGAFQSLREMKSLIEREVNRKGMQADVKLGAGGIREVEFIVQAFQLIRGGQLPDLREPNLIKVLPQLVALELLPEDVADELTEAYLFLRDVEHRLQAVADKQTQRLPDDELGWQRLTYAMGFSARAAFERKLRRYRESVRHHFSQVIADPEQETDAAQGADQELLDLWLGALDEDAAQAQLSAIGVLDAQAVYARLSDFRDSRAVENMQAISRQRLDRLMPLMLE

SEQ ID NO: 133272 - protein, 241 aa, Unknown
  Bacterial polypetide isolated from the Sargasso Sea
MYRSALDITLETVKTEDDLLKALREYRNQEMARVTFLDVLNKQDISTSLERVSALADVLLTGAYHWIYQHLAIRYGTPQNNGEDMHMYILGMGKLGGKELNFSSDIDLIFSYPEKGETQGGRKSIEHQQFFTKLAQKLIQALNKITNDGQVYRVDMRLRPFGDSGPLVMHFAALEDYYQDQGRHWERFAMVKARVINDDNSEDVKWLNSILHPFTFRRYLDFTTLDALRNMKKLIATEIRR

SEQ ID NO: 133273 - protein, 277 aa, Unknown
  Bacterial polypetide isolated from the Sargasso Sea
ASKGSVLHHYRAEVSKRLEGVKTEDELLSALRECRNTEMARITYADVLNKQAILTSLAQVSALADTLIVAAYNWLYKDAVARYGTPVSTHSTGLFSKDGSNQNTNSDQSTNSDQSTNSDQSTAPCPAHMYILGMGKLGGRELNFSSDIDLIFAYPEKGETQGGRKSIENQQFFTKLAQKLIQSLNKITTDGQVYRVDMRLRPFGDSGPLVMHFAAMEDYYQDQGRHWERFAMVKARIINDDNSDDAQALKDILKPFTFRRYLDFTTLDALRNMKKLI

SEQ ID NO: 133274 - protein, 282 aa, Unknown
  Bacterial polypetide isolated from the Sargasso Sea
DGQVFRVDMRLRPFGESGPLVMSFNAIEDYYQEQGRDWERYAMLKSRLIGKPNHYWDEFNQLLKPFVYRRYIDFSVIESLRKMKLMIAQEVRRKRLTNNIKLGAGGIREVEFIVQALQMVRGGREANLQTQSLLNALKQLALNQVIDDDEAKELKGNYLYLRKVEQYLQIFDDQQTQTLPDDEINQQRLNYLLSQSDFAGSVNEIEQVMAQVHNEFIQVIGEETEPLDTCEGAFISAWDHCDVSFLNEPKDEWQEPLQDFKLRLSKVKVEIEGVRFLINSCQ

SEQ ID NO: 133275 - protein, 278 aa, Unknown
  Bacterial polypetide isolated from the Sargasso Sea
DVLSQIIIECEKKIQTNTLSSLRTAKRRAILLICLADFGALIDLRDVTRSLSVFAENILKLVMDLFVYNEFQRSDCKLFFRNSENYPIAIHSSACSVGFTCLGMGKLGSNELNYSSDIDLIFVFDEERFKPECYSRIRSVFVTIVRQVIKALSEVTSDGYVFRVDLRLRPDPSTNPVCIGAMAAQRYYENFGRNWERAALVKARSIAGDISTGRKFLDSLQPFIWRKFLDFAAIEDINFIRTKVRKRNPRVIKSNLLGYNVKTGRGGIREIEFFVQTQ

SEQ ID NO: 133276 - protein, 309 aa, Unknown
  Bacterial polypetide isolated from the Sargasso Sea
FLAFRNPGTRERMLDILYHSSWVTDRLIEMPVLLDELLTLEVSEAILSREMITQELNMRMLRVDPDDTERLTEVMVQFARGLAFRVAVFEVRAEIPLMQVSDQLTWIAEAIVSEVLRYAYSEIATKHGQPVRIGADREDALGLSILGYGKLGGLEMSYESDLDLVFVHGIDPDQLTDGATPVEGGLFVNRVVRRVIALLETNTRFGRLYDIDTRLRPSGRSGLMVVGIDALKKYFDESAWTWELQAFVRARPVAGDTLLGNKLELLRMEILRQPRMLDSLLRDVVDMREKMRGHFGSGVNETDFDLKHG

SEQ ID NO: 133277 - protein, 310 aa, Unknown
  Bacterial polypetide isolated from the Sargasso Sea
PNTLYQPTATDAYRDELRQYLLRVPEDDEEQQLEALRQFKQTQLLRIAAADIAGTLPVMKVSDHLTWLAEAIIDAVVQQAWTQMVARYGQPTHLGEREGRGFAVVGYGKLGGWELGYSSDLDLIFLHDCPMDVMTDGEREIDGRQFYLRLSQRIMHLFSTRTSSGILYEVDARLRPSGAAGMLVTSTDAFADYQRNEAWTWEHQALVRARVVYGDPQLTSQFDAIRRDIMTLVRDGKTLQTDVREMREKMRAHLGNKHRDRFDIKADEGGITDIEFITQYLVLRYAHEKPKLTRWSDNVRILELLAQNDI

SEQ ID NO: 133278 - protein, 237 aa, Unknown
  Bacterial polypetide isolated from the Sargasso Sea
QFFTRLGQRIIHLLTTQTTSGALYEVDMRLRPSGAAGLLVSSLGAFQRYQENEAWTWEHQALVRARVLVGCSRLAGEFARVRAEVLGRQRDIAALRVEVSEMRAKMRDNLGNKNTAAGTAPNAFEATSSFDLKQDAGGIVDIEFMVQYAALAWSWQHPQLLEFTDNIRILEGLERVGLMSAEDAALLREVYKIYRSAAHRQALQKQPGVVPGDQFQDERRAVMRLWRELGLELNNGA

SEQ ID NO: 133279 - protein, 289 aa, Unknown
  Bacterial polypetide isolated from the Sargasso Sea
PVACVSDQLTWTAEACVNSALDLAWSELTTRYGTPCCDDGGNRRETGFAVIAYGKMGGIELGYGSDLDLVFLNDSTGSSQQTNGEKSVENNVFYTRLAQRFIHILSTTTPSGTAYEVDTRLRPSGNAGMMVCPTPAFQSYLTEQAWVWEHQALVRARGIAGQCEVIAEFDRIRNEVLRRPRVEADLKQAIVEMRKRMLGEVDRGDDSHFDLKHGVGGITDIEFMVQYAVLRWAAQHDALLDWTDNLRLLETIAELELLPAAACDELRDAYFAYRAQIHRSALQQSTPWC

SEQ ID NO: 133280 - protein, 294 aa, Unknown
  Bacterial polypetide isolated from the Sargasso Sea
VSDHLTALAEAIVEQAVNIAWHNTVKRFGMPPNTDNEHKGFAVIAYGKTGGFEVGYDSDLDLVFVHNHDGSSQTNGDKAIDSRQFYLKLAQRLMHLFNTRTASGILYELDTRLRPEGASGLLAINLESFNHYQQTQAWTWEHQALVRARIILGQNELEKRFSQIRKNILCQARETAVLKDDVIKMREKMRGHLAKGNTQLFDLKQDAGGMADIEFITQYLVLKNAHDSEQLSLFSDNVRILTDAAKIGCITKEQKQQLIKAYIDYRSCYHVLSLDQKGKLVEREQFLQDITNVT

SEQ ID NO: 133281 - protein, 248 aa, Unknown
  Bacterial polypetide isolated from the Sargasso Sea
LELGYGSDLDLVFLHQCDANTETSGDKAIDSRQFYLKLVQRILHLCTTRTASGVLYDVDTRLRPSGNAGLLTVHIETYRDYLLQDAWTWEHQALVRTRLIYGDSAIAARFEQVRAEVLGKTRDISKLKDEVLSMRQKLREHHGVDNTEVKHTAGGVVDLEFISQYLVLAYGSQYPALYKYSDNIRILDAAAACGILPPEQTAALQQAYQDLRGVSHRLTLEPADLTDLPDLSLALAQVQVRWQQVFAT

SEQ ID NO: 133282 - protein, 295 aa, Unknown
  Bacterial polypetide isolated from the Sargasso Sea
VSDQLTWIAEAVVSEVLHYAYREVANKHGHPRANATKGDNWLGLSVLGYGKLGGLEMSYGSDLDLVFVHGIDSEQMTDGDVAIEGGLFVNRVVRRVIALIGTNTRFGRLYEIDTRLRPSGRSGLMVVGLDALKKYLDESAWTWELQAFVRARPVAGDRFLNTKLETLRFEILRNAREPTEVLNDVVEMREKMRAHLGSKAGDVGFDLKHDRGGIVDIEFMVQYQVLAHAETHPGLATYTDNIRQLDGLSDSGCISTVDADALKTAYVRYRTLNHEAILAGRNGRVEFAEVENERQ

SEQ ID NO: 133283 - protein, 373 aa, Unknown
  Bacterial polypetide isolated from the Sargasso Sea
MVWPTLVRPDLTSEQHQDLQLLLAVSPFLSRVMQQQPELIAVLLNKDLLAQPLIHLNPLSELAEQSEATVFKALRRCRNAQLAQILAADILAVKSTEQCLLDISAMADNLINSAYQWAYQDVATQWGQPLDQQGKPMPLLILGMGKLGGGELNFSSDIDLIFTYPHNGETSGGSRSVENQQFFTKLGQKLISALHQVTADGFVFRVDMRLRPFGDSGPLVLSFAAMEDYYQAQGREWERYAMLKARILNPDSVHAPELNQLLKPFVYRRYIDFSALESLRRMKQLIEQENRRRNRVDNIKLGAGGIREVEFVVQTLQLIRGGRLPELQQVSIFKALEALQSQQLLEPQQYQQLRQDYLWLRKVEQLLQGLDDQ

SEQ ID NO: 133284 - protein, 930 aa, Unknown
  Bacterial polypetide isolated from the Sargasso Sea
MTDATLLSSSYSHYAARAAAARPQIVAQVAALASAPLTRERIDARFDALCAEGADAGGGPLSEDALKRALRRLRTEVFCAVMERDLAGEADVAEVTGAMTDLAETTIQRALAVVSAELEALYGEPRGPQGERLALGVVGMGKLGGRELNVSSDIDLIFVYEEDGETAGGQRSPIATQDFFTRLGKRLIGALAEVTADGYVFRVDMRLRPNGDSGPLVCSLGMLEEYFYVQGREWERYAWIKGRLVSEGASEAAVRLQKQLDAIVTPFVYRRYLDFGVISAIRALHLQIRQEAQRRASMRPDKADDIKLGRGGIREIEFSAQVFQLIRGGQDAGFRVRPTLAVLRHAATQGLIDTSVCVKLSQAYRFLRELEHRLQYRNDAQTHAMPVDPEERVALAHAMGCDDYAALMLKLDAHREFVEQQFDQIFADKVSGRDGCGAREDGAATWVWSSALADDSADEALRARLIELGVPEPGELLARLRAVWQSSRYAGLAERSRQRFDIVAQRALEAAQTLEPPERRGDTLARLFDLLEAVSRRGAYLALLTEYPQALHRVLSVLGGSRWAAGYLIRHPQLLDELLDDEAMDSPFDWPEFKRTLRLRLAAADGVEQQMDLLRHAHQAEVFRILLIDLAGRLSVEHVSDRLSELADAVLDVTLEAVWKQLAKRHREVPKFAVIAYGKLGGKELGYASDLDVIFLYDDPDDAAADVYATYTRRLITWLTTATGAGTLFDVDLRLRPNGESGLLVTDLDAFRRYQLREGDAANTAWVWEHQALTRARYCAGDAEIGAKFELIREQVLTTPREAAPLAKEIVEMRERVEAGHPNQTALFDLKHDRGGMVDIEFTVQYWVLLHAASDPELIRNTGNIALLREVSRFGLMSEEEAETVGAAYRTYRKLQHKLRLDGMEKARVDPALVVTEREAVLGLWKRVFG

SEQ ID NO: 133285 - protein, 967 aa, Unknown
  Bacterial polypetide isolated from the Sargasso Sea
MPRDAAPSPWSRSGAGRVCVSRAGRPFRQARFSMTDASALICTSYSRYLARAAAARPALAEQIAVWAAAPLARAQQDARLTELLGTPAAGAAAPTEEQLKRALRQLRAEVFGAVAERDLRGLADVAEVTGAMTDLAEVSVQRSLALLSAELEALYGEPRGADGQRVVLGVVGMGKLGGRELNVSSDIDLIFVYEDDGETTGGTRSPLSTQEYFTRLGRRLIGVLSEVTADGYVFRVDMRLRPNGDSGPLVCSLGMLEEYFYVQGREWERYAWIKGRLVSEGESDAAQRLASQLESLVKPFVYRRYLDFGVIGAIRSLHQQIRQEAARRASMRPDKADDIKLGRGGIREIEFSAQVFQLIRGGQDAEFRVRPTLAVLRHAQARGLIGEDVRARLTDAYNFLRTLEHRLQYRNDAQTHAMPVEPDERAALAASLGFADYAALMTVLDGHRTFVEAQFDQIFADKASGAPCAAGDDTAAAWIWSGALADDGEDDALVARLDGLGFKDPATVLARLRAIWQSSRYTGLPEKSRQRFDSVAQRALDAAPNIDAARRDDTIVRLFDLLETVSRRGVYLALLTEYPAALDRVLSVLGATRWGGGYLIRHPQLLDELLDDEAIASPFDWPAFKDALRARLAAADGPEQQMDLLRHAQHAEVFRILLIDLAGQLSVEHVSDRLSELADAVLDVTIEVVWSQLAKRHRDVPKFAVIAYGKLGGKELGYASDLDLIFLYDDADERSADVYTTFTRRLITWLTTATGAGALFDIDLRLRPNGEAGLLVTDLDAFRRYQLREGDAANTAWVWEHQALTRARYSAGDAQIGADFEAIRQQVLTTPRDGGVLAKEIVDMRGKVFAGHPNQTELFDLKHDRGGMVDIEFIVQYWVLLHASSDAELIRNTGNIALLREVARFGLMGEDEAERVGAAYRKYRKLQHKLRLDGMEKARVDPAVVADERAAVTALWERVFGAVETDS

SEQ ID NO: 133286 - protein, 969 aa, Unknown
  Bacterial polypetide isolated from the Sargasso Sea
MTNVKLAEKFWQQLLTAPAISDSDRAVIEAHCEKLMLSFTRSSFLAETLIQNPSFVSRIVEHYQPLEKSETLQSLGNTMSSDYLANLDNELHTVASEDDLLQVLRKFRNKEMARITFLDVLNKQPIEISLIQVSALADVLINGAYHWLYQHLAARYGKPQSHNQDMHMYILGMGKLGGKELNFSSDIDLIFTYPEKGETQGGRKSVEHQQFFTKLAQKLIQALNKVTNDGQVYRVDMRLRPFGDSGPLVMHFAALEDYYQDQGRHWERFAMVKARVINDDNSQDVKWLKSILHPFTFRRYLDFTTLDALRNMKKLIATEIRRRRLSNNIKLGAGGIREVEFFAQSFQLIHGGREPALQSKSLLRTLDALTELDIVERDVTQQLKSDYLFLRKVEHTLQQAQDRQTQTLPELPWQQAALIEVMGFDSYSEFLVHLDTVMARIHAHFNELVEESHDTHSEEDQLFTACQDAWRLALQEDEFTETFGEYLSASDIKGIYSILVAFKDKQRNYRIGQKGEDTLNKLLPEILYVLINQHPNYIPQVLDRLLGVIEAITGRTTYLDLLLENPDVLKQLVRLCERSDWIAQEIKRFPLLLDELLTPLYLGQQNTDIHTSKQEYQLELREIMLRIEQDDVEMLMDGWRQFKLCQQLRIAASDISESLPINNVSDKLTVLAEVILENVVDAAWMQMQQRYGVPAHLEGTDKGFAVIGYGKLGGYELGYGSDLDLVFLHNAPRGISTDGKKSIEAQQFYIKLAQRIMHLLNTKTLFGQLYETDLRLRPSGNAGLLCCHIDGFEKYQTEEAWTWEHQALVRARAICGAPRLLNDFTQVRSSILTRSRNAKTLADDVCKMRLKMREHLLSKENDKVDLKQCVGGITDIEFMAQYLVLANAKSQAAMTEYPDNLRIFDAAAKSNIIDVATAHKLQKAYLKLREQYHHLTLADTKYADQSEELDAIREQVTIHWNTLFGTCSG

SEQ ID NO: 133287 - protein, 940 aa, Unknown
  Bacterial polypetide isolated from the Sargasso Sea
MAQRHWQRLIELAPDYGTQPEPVHQTLLTLLGLSDFVADSLFKQPELLTELLASGELERSERWPAYQSDLTALLAEVSDEEALKRILRQFRRSRMLVIAWRELLGHAAVEESFVHLTRLADALICAARDWLYAKQCGELGTPMDGDGNPQPLLILGMGKLGGGELNFSSDIDLIFTFPENGYTVGGRRELANQQFFIKLGQRIINALHQSTVDGQVFRVDMRLRPFGDAGPLAISFAAMEDYYQHHGRNWERYAMVKARVLGPQCEHAFELAEMLRPFVFRRYIDFGVIDGLRQMKAMIAAEVRRKGLEGNIKLGAGGIREVEFIAQALQLIRGGREPALRVRHLPEALAAIAQCGALESAHCERLLTAYRFLRRVENILQEIGDQQTQTLPTEERDRQRLVAALGFADWGAFMAHLDEEMAAVHQEFAAVVGEEKEAPAHLEQLWLDLWRTELDAAELEQLLTAQGVAEPVPLCGALLRFKEEYKRRQVGPQGRIALDWLMPELLRLVVASEQPARLFERVCELLTRIFTRSAYLQLLAENPGALRQLVRLCDASHLVSEQLARYPILLDELLDPQHLYHPTPLDQYKPQLRQFLLRIPEEDVEQQMEALRQFKQVQLLRIVAADIAGALPLMKVSDHLTWLAEAITEEVVNQAWAQMSERYGVPPEVAVSGQRGFAVVAYGKLGGIELGYGSDLDLVFLHGGDPNSYTDGRKPIDSRQFYLRLAQRILHLFSTRTPSGILYEIDMRLRPSGDSGLLVSSLSAYELYQQNEAWTWEHQALVRARPIYGDEAVIAEFACIRRAVLAKERDLPTLAREVREMRHKMRDHLLKAGASEFDLKQSPGGMVDIEFIAQYLVLAHACGEPEALTRWSDNVRIFDECVLAGVLTLEQAEGLKHAYLEIRNLGHRLNLSEVSRKVGDDRLLPERGHVLAVWQQLLGE

SEQ ID NO: 133288 - protein, 985 aa, Unknown
  Bacterial polypetide isolated from the Sargasso Sea
MRHGNGIKPDVASFYIIYDIICRRLNLLGIIMAVQKDSNKSLSPLINQAAERHWARLAEVWSEGLANLTPAQQQELKNVLGLSDYIAAQLTRSPEWINTLFAGDLQQVERQTFDAQLHEQLSSATTEDLAKRQLRRFRNYQMVRLAWRDFLDYASLEESLLDLSALAEALVIGARDWLYKEMCAQYGTPMDKAGNPQPLLILGMGKLGGRELNFSSDIDLIFTFPEHGETVGGRRSLDNQQFFIRMGQRLVNLLDQITVDGFVFRVDMRLRPYGESGPLVVSFSGLEDYYQEQGRDWERYAMVKARSLGPWNHFSDELHSLLRPFVYRRYIDFSAIESLRKMKQLIAQEVRRRQLTDNIKLGAGGIREVEFVVQSFQLIRGGREPALRQQSLFGAMDTLYSLGQFEYLAVDELKHSYLLLRRVENLLQAIDDKQTQTLPNNPLDWARLCAVLDMTNETDLRTHIEAAMAKIHRHFKATVGGEEGEEKAEHWTAQLWNVQQDDHAVNLLAEQQIDDDKLWPLLSSWRDTVTKRSIGPRGRETLDKLMPRLLDELLNQPSPSAAFEPVSKVLEQILTRTTYLELLCENPGARQQLVSLCCASPWIAAQLAKFPMLLDELIDPAHLYDTTSLDDYPSELRQYLLRVPEDDMEQQMEALRQFKLSQQLKIAAADVTGVLPVMQVSDHLTFLAEAIIEQVVMQAWQQVAVRHGVPSYLEEGNDTGFAVIGYGKLGGIELGYGSDLDLVFLYEAPENMANSLTNGDRPIEVGHFYLKLAQRILHLFSTRTTSGELYEVDMRLRPSGSSGLMVSEIARFGEYQTQEAWTWEHQALVRSRFVFGDNSLAAKFSQIRASVLEQPREKDELKKAVREMRQKMRDHLLKVSEGEFDLKQSPGGITDIEFIAQYLVLAHAHEYPELSIWSDNVRIFGVLAELELLPLMSAQHLTQSYCWLRDENHRLTLQQKAGKLAYADVEEHAERVMNIYRNILE

SEQ ID NO: 133289 - protein, 394 aa, Unknown
  Bacterial polypetide isolated from the Sargasso Sea
SENPPALQQLLMLCHKSGWLAEHLARYPLLLDELIDPSQLYQVPDSTDYRDKLRQSMLRVPTDDLELQMEVLRQFKQAQQLRIAAADITGILPLMKVSDHLTFLAEAIIAAVVELSWQQMAEKYGLPAGLKPEDAKAFAVLAYGKLGGLELGYGSDLDLVFVHQCDNLAPTQGDKAIDSRQFYIKMVQRIVHMFTTRTPSGVLYDIDTRLRPAGNAGLLAVHIDTYADYLEKEAWTWEHQALVRSRLVYGDDKIAQRFNQIRSEVLAKPRDLAVLKAEVTEMRQKLRQHHGEQSTEVKHASGGIVDLEFISQYLVLAYGSQYADLYFYSDNIRILDAAAAAGLLQPEQTQALQQAYQQLRGVSHRQTLDPAIETAQQLEQAMEQVRKVWEQLFS

SEQ ID NO: 133290 - protein, 111 aa, Unknown
  Bacterial polypetide isolated from the Sargasso Sea
DLGRGGGCLIAETTTGVAPERFLFRRDPARFRIDSLIVFGPPQEWPRAAQDRPKTPQNPQEQPKTRPKTPEDRPKTPQDLPKTTPRPPKIAPRSPKTTPRPPKIAPSPSFH

SEQ ID NO: 133291 - protein, 97 aa, Unknown
  Bacterial polypetide isolated from the Sargasso Sea
MLSTHPRSPLVNKSISGQYPPGSTFKMIVALAALEAGIISMKTKFVCKGHLEIGDMKFHCWRHKYGHGSVNVFKAIAESCDVYFYQLALKTGINRIA

SEQ ID NO: 133292 - protein, 281 aa, Unknown
  Bacterial polypetide isolated from the Sargasso Sea
MAWLKKRLSELQEIQQTVELQQDKQLSLTDPDSRLMKTNNLNRQVCYNVQTAVDTKNHLIVAHEVTNTTDRGQLYSVTKLAQEALGKVDITVLADKGYYSRNDIKAVLDTGAVALVPKGDTSGADRKGLFNRSLFKYDHEKDVYICPAGNELQNRFTSVEDGLEQQMYFNCIACRDCSQRSKCTTSKVAARRMRRWVHEDKMEVMQARLDASPQTALVRKQTVEHPFGTIKMWMGATHFLMRRFKNVSTEISLHILAYNLKRMISIWGAAGLVSRLQELYG

SEQ ID NO: 133293 - protein, 212 aa, Unknown
  Bacterial polypetide isolated from the Sargasso Sea
MARVCAGCGHPGSMMCDECAALLQPRPRFRRSLDVGDLVTGLRVPLVCSLDYRGPVRQMLNAFKDDGQRSLASWLAPALLACIDHALVACPRTNQVPALIPVPTRRSSRRRRASDHVELLGTAVARTDSQYRTRRVLRDTRSDPGSKYLNAEDRYARVREAFAVKRIIPSPGTLAILIDDIVTTGATAREATATLVLAGMDVVAVATIAGTP

SEQ ID NO: 133294 - protein, 132 aa, Unknown
  Bacterial polypetide isolated from the Sargasso Sea
MAFNDSLSDMLARIKNAHRARKSITSCYKSNLNMNVLSVLKDEGYIRDFKDLEIRKGINTIQIDLKYFNGNPVIKNIKRVSKPGIRVYSKISDLPKTYGGLGISILSTPMGVMSDNKARQKNVGGEVLCEVF

SEQ ID NO: 133295 - protein, 213 aa, Unknown
  Bacterial polypetide isolated from the Sargasso Sea
MSKHNKQEMVVRHKLFDRICHWFIVAVGLVTFLTGFSFFYPSFQWLGAIAGTPQLAKFIHPIAGLMMCLPLMLMLVRYYHHNKWEKHDLAWMLAIKDVMFENEEKIPPIGHYNPGQKVLFRAFVLTSITLTVTGFIMWQPYFAPYFSATVVGWAIVLHAISALIMLMFVMVHFWMATWVEGSITGMLYGKVSKAWCRKHHPLMLDEHSDVEKH

SEQ ID NO: 133296 - protein, 129 aa, Unknown
  Bacterial polypetide isolated from the Sargasso Sea
MSDPIADFLTRIRNAQMASMANVASPSSKIKVEISKVLQEEGYISGFAVSEIDGKPVINIDLKYFNGKPVIEEIKRVSRPGLRNYQGKDDLPENRAGLGIVIVTTNKGLMTEKQARAAGIGGEVLCTVF

SEQ ID NO: 133297 - protein, 131 aa, Unknown
  Bacterial polypetide isolated from the Sargasso Sea
AFNDSLSDMLARIKNAHRARKSITSCYKSNLNMNVLSVLKDEGYIRDFRDLEVRKGINSIQIDLKYFNGNPVIKNIKRVSKPGIRVYSKISDLPKTYGGLGISILSTSMGVMSDNKARQKNVGGEVLCEVF

SEQ ID NO: 133298 - protein, 237 aa, Unknown
  Bacterial polypetide isolated from the Sargasso Sea
VCYNVQTAVDTKNHLIVAHEVTNTTDRGQLHSVTKLAQEALVKKDITVLADKGYYSRSDIKAVLDTGAVALVPKGDTSGADRKGLFNLSLFKYDQEKDVYICPTGNELQNRFISIEDGLELQMYFNCIACRDCSQRSKCTTSKVAARRIRRWVHEDKMEVMQARLDASPQTALVRKQTVEHPYGTIKMWMGATHFLMRRFKNVSTEISLHILAYNLKRMISIWGTAGLASRLQELYG

SEQ ID NO: 133299 - protein, 352 aa, Unknown
  Bacterial polypetide isolated from the Sargasso Sea
METHRSWFRTQADESPAADGADAASSRRDLVGQLLIECSAMARYALQHGIAVAPDLIAQLSMLMAGVPHAAADTAVADASSVHGASYALAAIHRRLAVAIAPATPQAVTLLDRELRVRSRLAWLGPVPLIRALTLSAATFLVAVIATSLSPEVSVANIDQGFLDSHGTQLLWNALFLLFCAGLGASFATLFQAHRYVANSTYDPKYDASYGARLILGVIAGLILVELLPPHLYDGGSMRSFGKPALAMLGGFSATAVHRLLHRLVETLETLVRGDTAAAAQATFEAHRAHAATERVQWQSELAADLLRLQQSLEAGMPPDAIKQRLADFTRAMLSADVPQAGRRDGASAIGE

SEQ ID NO: 133300 - protein, 38 aa, Unknown
  Bacterial polypetide isolated from the Sargasso Sea
SVIGIGAGAHYTLYDAGSDRVDFLKAGTKALAKGRGFA

SEQ ID NO: 133301 - protein, 139 aa, Unknown
  Bacterial polypetide isolated from the Sargasso Sea
VEALLRAVDPSHLRWLVSLQFGFIELDCGLIHGSSADIGDELTPETSPLILIDRLTRLDVNRLFTARSAQQFRLELTGGGIDSRVKGLSGEQQQQQQVPNRSVIGIGAGAHYTLYDAGSDRVDFLKAGTKALAKGRGFA

SEQ ID NO: 133302 - protein, 3215 aa, Unknown
  Bacterial polypetide isolated from the Sargasso Sea
MNGYAASIPSNVTIDFNSSGFIEGADHGSNVFTQGDFKITYSAVNWFQDTDDGQSNSAGLFAGMYSGVETITVETTSGNEFDFVSFYINAFGGGFASVEGFRDGSSVGTQSSGSGFGQANGSFTVTLNNNPFDNVDKVVITSNSSGYYDVFDSFVFNTVPDITPPTVSSVNSSTANGTYKLGDVITVQVNFSENVNVTGTPQLTLETGSTDRTINYTSGTGTSTLNFNYTVQAGDTSADLDYVATTSLTLNGGTIMDAASNNATLTLASPGAANSLGANKALVIDGVVPTVTSVNSSTANGTYKVGDNISIQVNFSEVVNVTGTPQLTLETGTTDRTINYASGSGSSTLTFSYTIQSGDNSSDLDYVATTSLSLNGGTIRDAATNNATLTLASPGAANSLGANKALVVDGVVPSVTSVNSSTADGAYKAGDVISIQVNFSETVTVDTGGGTPQLTLETGATDRAIDYASGSNSSTLTFNYTIQAGDNSADLDYVGINSLVLNSGTIRDAANNNATLTLAPPGAANSLGANKALVVDGVAPSVISIAPTGSPIANAASMDFAVTFDESVGNISTDDFTLVTTGTAAGSIGSVSATSGSNINVAINTISGTGTLKLNLNGSTNIADAAGNGIAAYVAGTVHNVDRDAPAAPSTPDLDDASDTGASNTDNITSDNTPTFTGTAEANATVTVISSISGTLGTTVADGSGNWSYTASAMVNGIHNITATATDAANNVSSVSAALAVTIDGPVTVTTNSDAGADATIDGSLATDIADGGGLSLREALAYVAASGRVDFAAGLSGTTITLGAPLSVPSNITLDADALGTATITGSTFTPLGSLTITNGSGDSLTLESELTGVGALTKTGAGRLTLTNTNNSTSYSGGVTVMAGELSIGSDDVFSSGSLTLNGGTLTNNTASFTFDNSIVLGASGGTVQVVGAGQTLTLSGSISGSGALSKTSGGNLTLSGSNGFSGGLSISGTNGVTVADSTNLGSGTVTINASSLLTLTGTAQTITNAINLAGDATISNANAMTISGIVSGASALTKAGAGTLTLSAANTATGAVSVTAGGLVLANGSALTDSVAVSVSAGASVILPSGSETVGSLTGAGSLVLTSGTLTTGSNNSSTTFSGVVSGAGSLVKAGTGTFILSGTSTFSGATQVSAGTLLVTGNIAPSSGVTVASGATLGGTGTVAAVSVANGGNLSPGNAGPGLINIAGNLLLNSGANLLLDITGTSAATQYDQLNVTGTVTLTGAAISATHSYVAANGDSYEVIINDGVDAINGTFSGIAEGDVLVAGGNSSNLLVSYMAGSGNDLSLTNNLLPGAPTGVSAVAGVSSATITFSSPTVTGGSAITEYSVTSSPGGIVQAGASSPITVTGLTNGTQYTFTVTATNSSGTGMASSPSNPVTPRGIQTITFSNPGAQNFGTTPTLTAISDSGLTPTFTSSTTGVCTITSGGNLTFVTAGTCTINADQSGDASYLPATQVSRSFTVNAVVPGAPVIGTATAGDAQASVSFTAPGFSGGAPISGYTLVSTPGGITASGGSSPIVISGLTNGTSYSFTVAATNSAGLGSASSASNTVKPNGAPVINGTPTLTVNQGALYNFAPVATDSPGDSLTFSINQTISWLTFNSATGALSGTPSNQDVGVINGIVISVSDGSLSASLPPFNLSVINVNDAPTISSTVLTSATQDAAYSYTLVATDSDVGDSLTLSAVTLPSWLNFNAATGVLSGTPNNANVGSHAVLLRATDGDGLTADQSFTIVVANVNDAPTISSSALTSATQDAAYSYILVATDSDVGDSLTLSAMTLPSWLSFNVATGVLSGTPTNANVGSYAVVLRATDVDGLTADQSFTIVVTNVNDAPTISSTAVTSATQDAAYSYTLVATDSDVGDSLTLSAVTLPSWLSFNAATGVLSGTPTNANVGSHAVLLRATDVDGLTADQSFTIVVANVNDAPTISSTALTSATQDAAYSYTLVVTDSDVGDSVTLSAVTLPSWLNFNAATGVLSGTPTNTNVGSHVVVLRATDVDGLTADQSFTIVVANVNDAPTISSTALTSATQDAAYSYTLVATDSDVGDSLTLSAVTLPSWLNFNAATGVLSGTPTNANVGSHTVVLRATDVDGLTADQSFTIVVANVNDAPIATNQTVTLEEDSSLMITLAAEDADNDPLTYEITAQPASGTLEQHGSVWLYTPEKDFNGTDSIGFIAKDAELSSEPATVTITVTPVNDDPQAVDDSYTLTSTPNDTYTLTVLANDVDVDGDTLTIDGAAADIGSVQITSDGLSFTAPEAYVGPVALRYTISDGNKGRATAEVNVLIEGTDSASQPVITLPDDVEVNATGLFTRVKLGFAKAVDRNGHPLPVSLVNKSLFFAPGNYLAYWQAVDGEGNKAIKAQKVKVNPLISLRKDQVVAEGNQVTVSVHLNGEAPSYPLSIPFTVSGSADSSDHDLVDGVVEITSGQMAEIHFTTLNDGVTEGDEEVLISLDPSLNLGSKQQTQVVITEANIAPQVSLAVTQAGQQQVIVAQNGGDVHIRATASDANEQDTLTLTWASGALSLQADATGMAFSPAAVSPGIYPVSLTVTDDGSPVLSSTETVYIVVRPSLAALTSADTDGDLIPDNQEGYSDSDSDGIPDYLDANNDCNVMPEGELQPVYFLAEGQAGVCLRLGNIALRRGQSGMQLQPEVVAEDALAANVGGIFDFIATGLPQQGQSYSLVLPQRSPIPANAVYRKFNAQAGWRDFVIDANNTVASTEGERGFCPPPGDSRWTPGLTEGHWCVQLTIEDGGPNDDDGVANRTIVDPSGVAVMLNGNHLPVANPDSAAIAWNQSVDVNVLANDTDSDGDSLSVTQVISEFGTVTVLADQRLSYMPAADFIGTDVLVYSITDGKGGTASSELTIVVNGNTAPVTVDDSAATDDRTSLLIDVLSNDTDVDGNTLTLLSATAQQGAVTIEANKLRYIPKTGFDGVDTVTYRISDGQGGEATGQVLITVKAYQEVIIDNKSGGGSMTLWALAFILACAMLRRRELQRFALGSLLLLSVTQQVQATDWYVEGFIGQAQADKTLPELNVQVGEGQLLNVDDSDTAFGVSLGYQWTPTVALELGYADFGEGSARIKGSTLTPEQYHELVKTVTPVLADGVMLGLRFTLLQHQGWRFEVPVGLFHWQADISSTMGNTRIKTDLDGTDWYAGVRFSYQFSDAWSVGVGYQYIDIEPNDLLSYQLNLRYQF

SEQ ID NO: 133303 - protein, 117 aa, Unknown
  Bacterial polypetide isolated from the Sargasso Sea
MRNIKITKDFINSKNTSVLYESGNTKVLITVSISDRLPGWLENSDSGWLTAEYNMLPGSSGNRVSRKAYEGGRSKEISRLIGRSLRSICNLKLLNGYMVTVDCDVLEADGGTRTASN

SEQ ID NO: 133304 - protein, 168 aa, Unknown
  Bacterial polypetide isolated from the Sargasso Sea
MTFELYHTHHSTCSQKVRIALAEKGLPNKDKDWVAREVDLGKFEHLTPEYLQLNPNGVVPTLIHEGSVLIESSAIVEYLDEVLPQNDLVPKTSLERAKLRAWMRYIDEVPTVAVRVPSFANLLAPMRFSDYTDSEFAQHSARLPIRKRFYQRMTQNGFGKEEIEYAKE

SEQ ID NO: 133305 - protein, 103 aa, Unknown
  Bacterial polypetide isolated from the Sargasso Sea
MLYSHILKKKVLTESPLKQLVASVSAGLVDGQIVLDLDYLEDSSADTDMNFVMTESGKYIEIQGTGEEGDFSQSELLEMMNVADAGIKELIEMQKKALALNID

SEQ ID NO: 133306 - protein, 130 aa, Unknown
  Bacterial polypetide isolated from the Sargasso Sea
RTIYIDCDVLQADGGTRTAAITGSYVALHQAFDKMVLEKTIEQNPLKSQLAAISVGIVDGDILLDLCYEEDSIADVDMNIIMTKNHDIVEIQGTAEQAPFSISTANEMIKTASSGIDYLVDVQNRALTIN

SEQ ID NO: 133307 - protein, 50 aa, Unknown
  Bacterial polypetide isolated from the Sargasso Sea
MSRDNRKPTQAREISIETNVNLHAEGSVLVKFGNTHVICTASIDNNVPRW

SEQ ID NO: 133308 - protein, 60 aa, Unknown
  Bacterial polypetide isolated from the Sargasso Sea
EEGVPRFMKGQAKGWIPAEYSMLPRANHTRSGREAARGKQGGRTLEIQRVIARSLRAAVD

SEQ ID NO: 133309 - protein, 175 aa, Unknown
  Bacterial polypetide isolated from the Sargasso Sea
MSNKLTLMFDFLLARLHVWLVLSASLLICTSPWIFIGRSLRANASIWDYLHVYLGLVCAALGILFLLRNSLQGKWHQYFAWLVGDWEQLVQDIKGLFKGKLPVAGGKGLFSCIEGIGMILLVATGLTGVVWFIYQGTPLAMTWRGYHQICADAFIGFLVLHIILAATHIIEFIRQ

SEQ ID NO: 133310 - protein, 175 aa, Unknown
  Bacterial polypetide isolated from the Sargasso Sea
MSEKLTQALGFLLARLHVWIVLSSTLLVCTSPWIFIGRSLRANASVWDYLHVYLGLICAALGILFLLRNTLQGKWHQYFAWLVGDWGQLAQDIKGLFKGKLPVAGGKGLFSTVEGIGMLLLVATGVTGAIWFIYQGTPLAMTWRGYHQVCADFFIGFLVVHLVLAATHIIEFIRQ

SEQ ID NO: 133311 - protein, 28 aa, Unknown
  Bacterial polypetide isolated from the Sargasso Sea
MVTVDCDVLEADGGTRTASINGSLDCIK

SEQ ID NO: 133312 - protein, 132 aa, Unknown
  Bacterial polypetide isolated from the Sargasso Sea
MRPIKITPNIISNADGSILYQSGKTEVICTATFESKTPEWLLNGGWITAEYSMLPASTSSRVAREISRGKKSPRSQEIQRLIGRSLRGAVDLSEISGNSIYIDCDVINADGGTRTASINGGYLALAIAIKKK

SEQ ID NO: 133313 - protein, 125 aa, Unknown
  Bacterial polypetide isolated from the Sargasso Sea
KVDCDVLQADGGTRTASINGGFVALYIAIDKIKKNYNLQKPIVKNFIGAISAGIVENKSLLDLNYEEDSKAEVDANFVISGTGEIAEIQVTGEEFFFTESQFGELFSLAKNGIAEIIKKQKEILN

SEQ ID NO: 133314 - protein, 133 aa, Unknown
  Bacterial polypetide isolated from the Sargasso Sea
LGENTVVIDCDVLQADGGTRTASITGGYVALHMAVLNSLNENLLKENPLINKIAATSIGLIGNEILLDLCYKEDSEAGADFNLVMADDGNIIEIQGAAEKQNFDIDTVNKVLAIGSLGIKEIFEIQNKIISEL

SEQ ID NO: 133315 - protein, 219 aa, Unknown
  Bacterial polypetide isolated from the Sargasso Sea
MRDIKITKDFINSKNTSVLYESGNTKVLITVSISDRLPGWLENSDSGWLTAEYNMLPGSSGNRVSRKAYEGGRSKEISRLIGRSLRSICNLKLLNGYMVTVDCDVLEADGGTRTASINGSWIALNETFNKLVENGELVQNPLENQIAAVSVGIVDGEYIVDLDYENDSQAEVDLNLVLNDKYEILEIQGTAEKKPFSKEDLDKLFELTKDQIDEIFEVQ

SEQ ID NO: 133316 - protein, 144 aa, Unknown
  Bacterial polypetide isolated from the Sargasso Sea
IGRSLRSIVDLSNLGERQIKIDCDVIQADGGTRTASISGGFISLYLAIEKLKNNYNLQKPIIKKFIGAVSTGIVENKAILDLDYKEDSDAQVDANFVICDSDEISEIQVTGEEFFFNDNQFAEMFSLAKIGVKEIISKQREALK

SEQ ID NO: 133317 - protein, 225 aa, Unknown
  Bacterial polypetide isolated from the Sargasso Sea
MKSGDIGTDRAADKLRDIEVTLDFTPNADASVLYRQGETMVLACATIAPSLPRWFPRDANRGWVHAEYSLLPGSTDSRFQRERRGAKGRTQEIERLVARSLRGAIDLEALGPIAITVDCDVLNADGGTRCASITAASIAMRLCVRRLIASGRCLPADKRLTHDQIKSGMEAPTLSAEEAVAHENAVIPHDLAAISVGLIDGNVYTDLDYILDSNADVDMNVVMTG

SEQ ID NO: 133318 - protein, 132 aa, Unknown
  Bacterial polypetide isolated from the Sargasso Sea
MRPIKITKNFINSAENSVLYESGNTKVLVTVSVSTRIPDWLLNSEKGWVTAEYNMLPGSSGNRISRKSFESGRSKEISRLIGRSLRAVCNLGIINGYSFTVDCDVLEADGGTRTASVNGAWIALHDTFEKMV

SEQ ID NO: 133319 - protein, 124 aa, Unknown
  Bacterial polypetide isolated from the Sargasso Sea
DCDVIQADGGTRTASISGAFIALKHSVNFLMESNEIKKDPIREYLGAVSCGIYRGKPILDLDYKEDSEAEADANFVITEKNKIIEIQATAEQYPFSEKKFSELMDLAKSGIEEIIKKQKGVLEN

SEQ ID NO: 133320 - protein, 221 aa, Unknown
  Bacterial polypetide isolated from the Sargasso Sea
MRDIKITKDFINSKNTSVLYESGNTKVLITVSISDRLPGWLENSDSGWLTAEYNMLPGSSGNRVSRKAYEGGRSKEISRLIGRSLRSICNLKLLNGYMVTVDCDVLEADGGTRTASINGSWIALNETFNKLVENGELVQNPLENQIAAVSVGIVDGEYIVDLDYENDSQAEVDLNLVLNDKYEILEIQGTAEKKPFSKEDLDKLFELTKDQIDEIFEVQKN

SEQ ID NO: 133321 - protein, 122 aa, Unknown
  Bacterial polypetide isolated from the Sargasso Sea
MRDIKITKDFINSKNTSVLYESGNTKVLITVSISDRLPGWLENSDSGWLTAEYNMLPGSSGNRVSRKAYEGGRSKEISRLIGRSLRSICNLKLLNGYMVTVDCDVLEADGGTRTASINGSWI

SEQ ID NO: 133322 - protein, 58 aa, Unknown
  Bacterial polypetide isolated from the Sargasso Sea
MRPSGRTASQIRPITFTRQFTAHAEGSVLVEFGNTKVICTASVIEGVPRFMKGQGKGW

SEQ ID NO: 133323 - protein, 87 aa, Unknown
  Bacterial polypetide isolated from the Sargasso Sea
PLLQPVAAISVGIVQGTPLLDLEYVEDVDCDTDMNVVMTGAGHYVEVQGTAEGVAFTRAEMDQLLGLAEQGIAQLVQLQQQALQNTP

SEQ ID NO: 133324 - protein, 56 aa, Unknown
  Bacterial polypetide isolated from the Sargasso Sea
VDMNVVMTADGKFVEVQGTGEEFTYTREELDALLDAATAGVTSLNEMQVRVLDGIE

SEQ ID NO: 133325 - protein, 207 aa, Unknown
  Bacterial polypetide isolated from the Sargasso Sea
YQSGKTEVICTATFESKVPEWLTKGGWITAEYSMLPASTSSRVQREISRGKKSPRSQEIQRLIGRSLRGAIDLSNIPGNSIYVDCDVINADGGTRTASINGGFLALAMALKKRLPDLIIDKKITPIAAISVGKVNGQIVDDLDYEMDSNADVDLNLVMNSSYEIIEIQGTGEKGTFSTSELNQMIDLGKKCIEKIFDEQQKILNNYD

SEQ ID NO: 133326 - protein, 59 aa, Unknown
  Bacterial polypetide isolated from the Sargasso Sea
MDTLPDRPSGRAPDAMRAIQFDRGYTCHAEGSVLVSFGQTKVICTAKCERWRTRFFCGG

SEQ ID NO: 133327 - protein, 148 aa, Unknown
  Bacterial polypetide isolated from the Sargasso Sea
MRNIKITKDFINSKNTSVLYESGNTKVLITVSISDRLPGWLENSDSGWLTAEYNMLPGSSGNRVSRKAYEGGRSKEISRLIGRSLRAICNLKLLNGYMVTVDCDVLEADGGTRTASINGSWIALNETFNKLVENGELVQNPLENQIAA

SEQ ID NO: 133328 - protein, 150 aa, Unknown
  Bacterial polypetide isolated from the Sargasso Sea
MRSDRKLNELRNIKVEKNFMQNAFSSCLIEFGLTKVICSVTIEEYIPRWLKGSGQGWLTAEYSMLPTSTNTRNDRESIRGKLSGRTQEIQRLIGRSLRNCIDLSLLSEKLIKIDCDVLSADGGTRTTSINGSWVALNLAVKKLMQKRIIK

SEQ ID NO: 133329 - protein, 222 aa, Unknown
  Bacterial polypetide isolated from the Sargasso Sea
MRDIKVTKDFINSENTSVLYESGNTKVLITVSIADKVPRWLENSDRGWLTAEYNMLPGSSDQRISRKSFEGGRSKEISRLIGRSLRSVCDLAILNGYLVTVDCDVLDADGGTRTASINGAWIALNETFNNLVEQKKLVQNPLTNQIAALSVGIVDGEFIADLDYEKDSSAEVDLNLVLNDNFEILEIQGTAEQKPFSKEDLDKLFEMTKDEVNKIFDVQKNV

SEQ ID NO: 133330 - protein, 213 aa, Unknown
  Bacterial polypetide isolated from the Sargasso Sea
DFINSKNTSVLYESGNTKVLITVSISDRLPGWLENSDSGWLTAEYNMLPGSSGNRVSRKAYEGGRSKEISRLIGRSLRSICNLKLLNGYMVTVDCDVLEADGGTRTASINGSWIALNETFNKLVENGELVQNPLENQIAAVSVGIVDGEYIVDLDYENDSQAEVDLNLVLNDKYEILEIQGTAEKKPFSKEDLDKLFELTKDQIDEIFEVQKN

SEQ ID NO: 133331 - protein, 128 aa, Unknown
  Bacterial polypetide isolated from the Sargasso Sea
YLKGKTINVDCDVIQADGGTRTASITGGCVALFLAIKNHHDDQRAIKSFVAAVSMGIKENQVLLDLDYDEDSTADTDLNIVMNDKDELIEIQGTAEDAPFSKKELDDMLVMGSSAIADIIKKQKACIE

SEQ ID NO: 133332 - protein, 145 aa, Unknown
  Bacterial polypetide isolated from the Sargasso Sea
LIGRSLRSIVDLKKLEERQIKIDCDVIQADGGTRTASISGGFVSLYLAIEKLKQNYNISAPIIKNYIGAVSTGIVDGKAILDLDYNEDSAAEVDANFVMSDSNEISEIQVTGEEYFFNDHQFNSLFALAKNGIKKIIEAQKEVLG

SEQ ID NO: 133333 - protein, 222 aa, Unknown
  Bacterial polypetide isolated from the Sargasso Sea
MRDIKVTKDFINSANTSVLYESGNTKVLITVSIADKVPRWLENSDKGWLTAEYNMLPGSSDQRISRKSFEGGRSKEISRLIGRSLRSVCDLAILNGYLVTVDCDVLDADGGTRTASINGAWIALNETFNNLVEQKKLVQNPLTNQIAALSVGIVDGEFIADLDYEKDSSAEVDLNLVLNDKFEILEIQGTAEQKPFSKEDLDKLFEMTKDEVNKVFDVQKNV

SEQ ID NO: 133334 - protein, 220 aa, Unknown
  Bacterial polypetide isolated from the Sargasso Sea
MRPIKVTKNFINSAENSVLYESGNTKVLVTVSVSTRLPDWLLNSDKGWVTAEYNMLPGSSGNRISRKSYESGRSKEISRLIGRSLRSVCNLGIINGYSFTVDCDVLEADGGTRTASVNGAWIALNDTFEKMIQDNKLNQNPLTSKVGAISVGIVAGELVADLDYEKDSNAEVDLNLVLDEKFEILEIQGTAEGKPFPKEHLDQLFELGKECIKEVFEIQK

SEQ ID NO: 133335 - protein, 34 aa, Unknown
  Bacterial polypetide isolated from the Sargasso Sea
MTNDTQRPSGRQANQLRDVRITRHYTKHAEGSVL

SEQ ID NO: 133336 - protein, 139 aa, Unknown
  Bacterial polypetide isolated from the Sargasso Sea
RSLRQSVNLKYLKDKTIQVDCDVIQADGGTRTASITGGCVALFLAIKNHHDDQRAIEQYVAAISLGVKDDGILVDLDYQEDSTADADINIVMTQDLDLIEIQGTAEERPFSQEQLTEIVSKASSSIKDIVAIQKQAVEG

SEQ ID NO: 133337 - protein, 62 aa, Unknown
  Bacterial polypetide isolated from the Sargasso Sea
MQRNLDRPLNQLREVSLEINTNIHAEGSVLVSFGNTKVICTASIENNVPRWMKNSNEGWITA

SEQ ID NO: 133338 - protein, 219 aa, Unknown
  Bacterial polypetide isolated from the Sargasso Sea
MRDIKVTKDFINSENTSVLYESGNTKVLITVSIADKVPRWLENSDKGWLTAEYNMLPGSSDQRISRKSFEGGRSKEISRLIGRSLRSVCDLAILNGYLVTVDCDVLDADGGTRTASINGAWIALNETFNNLVEQKKLVQNPLTNQIAALSVGIVDGEFIADLDYEKDSSAEVDLNLVLNDNFEILEIQGTAEQKPFSKEDLDKLFEKTKDEVNKVFDVQ

SEQ ID NO: 133339 - protein, 67 aa, Unknown
  Bacterial polypetide isolated from the Sargasso Sea
LDYDEDSQCDTDMNVVMTARGGFVEIQGTAEGAPFSRDEMNALLDLASDGINTLIAKQKEALEQKSE

SEQ ID NO: 133340 - protein, 137 aa, Unknown
  Bacterial polypetide isolated from the Sargasso Sea
MRPSGRQHNEKRAVSVEIGTSKYAEGSSLIRFGDTHVLCTASVEERVPPFLRGQGIGWVTAEYGMLPRSTHTRTDREAARGKQSGRTLEIQRLIGRSLRAVTDTKALGERQVRIDCDVIQADGGTRTAAITGGYIAL

SEQ ID NO: 133341 - protein, 142 aa, Unknown
  Bacterial polypetide isolated from the Sargasso Sea
MEQAIVRPSGRETDQMREVSFKAGIAPHANGSVLCSFGNTQVICAAMIEDRIPGWMRQQKIEGGWLTAEYSMLPYSTLTRKDRPISRGKQDGRNIEIQRLIGRSLRAVLDLKKLPEKTLWIDCDVLRADGGTRTASITGAWL

SEQ ID NO: 133342 - protein, 208 aa, Unknown
  Bacterial polypetide isolated from the Sargasso Sea
VEFGNTKVICTASVIEGVPRFMKGQGKGWITAEYGMLPRATHTRNDREAARGKQGGRTMEIQRLIGRALRTAVDLKLLGENTITIDCDVIQADGGTRTASITGACVALVDALNFMRAKGLIKTNPLNFMVAAVSVGVYKGTAVADLDYAEDSNAETDMNIVMTETGKIIEIQGTAEEAPFSFEEMQQMMELGKHAIREIIDEQKRVLA

SEQ ID NO: 133343 - protein, 146 aa, Unknown
  Bacterial polypetide isolated from the Sargasso Sea
EIQRLIGRSLRPAVDLDKLTGYTITIDCDVIQADGGTRTASITGGTVALYKALQKIEKEDAIKNLVAAISVGICKDELLLDLDYEEDSNAQCDVNIVMNEALELIEVQGTGEEKAFSKEQFKDLVDLAENGLKDLFTLQKEVIKNG

SEQ ID NO: 133344 - protein, 134 aa, Unknown
  Bacterial polypetide isolated from the Sargasso Sea
MRPSGRKLDELRNVSIETNITMHAEGSCIIKMGDTHIICTATIEDRVPPFIKGSGLGWVTAEYGMLPRSTGSRMRREAASGKQGGRTVEIQRLIGRSLRAGVDRLALGERQITIDCDVIQADGGTRCASITGGW

SEQ ID NO: 133345 - protein, 203 aa, Unknown
  Bacterial polypetide isolated from the Sargasso Sea
FGNTHVICTASIDNNVPRWMKGSDKGWVTAEYGMLPRSTNERMGREAARGKQSGRTQEIQRLIGRSLRQSVNLKYLKDKTIQVDCDVIQADGGTRTASITGGCVALFLAIKNHHDDQRAIEQYVAAISLGVKDDEILVDLDYQEDSTADADINIVMTQDLDLIEIQGTAEERPFSQEQLTEIVSKASSSIKDIVAIQKQAVEG

SEQ ID NO: 133346 - protein, 186 aa, Unknown
  Bacterial polypetide isolated from the Sargasso Sea
RWMKGSDKGWVTAEYGMLPRSTNERMGREAARGKQSGRTQEIQRLIGRSLRQSVNLKYLKDKTIQVDCDVIQADGGTRTASITGGCVALFLAIKNHHDDQRAIEQFVAAISLGLKDDEILVDLDYHEDSTADADINIVMTQDLDLIEIQGTAEEHPFSQEQLTEIVSKASSSIKDIVAIQKQAVEG

SEQ ID NO: 133347 - protein, 189 aa, Unknown
  Bacterial polypetide isolated from the Sargasso Sea
MSRDNRKPTQAREISIEANVNLHAEGSVLVKFGNTHVICTASIDNNVPRWMKGSDKGWVTAEYGMLPRSTNERMGREAARGKQSGRTQEIQRLIGRSLRQSVNLKYLKDKTIQVDCDVIQADGGTRTASITGGCVALFLAIKNHHDDQRAIEQYVAAISLGVKDDEILVDLDYQEDSTADADINIVMTQ

SEQ ID NO: 133348 - protein, 219 aa, Unknown
  Bacterial polypetide isolated from the Sargasso Sea
MRANVNLHAEGSVLVKFGNTHVICTASIDNNVPRWMKGSDKGWVTAEYGMLPRSTNERMGREAARGKQSGRTQEIQRLIGRSLRQSVNLKYLKDKTIQVDCDVIQADGGTRTASITGGCVALFLAIKNHHDDQRAIEQYVAAISLGVKDDEILVDLDYQEDSTADADINIVMTQDLDLIEIQGTAEERPFSQEQLTEIVSKASSSIKDIVAIQKQAVEG

SEQ ID NO: 133349 - protein, 177 aa, Unknown
  Bacterial polypetide isolated from the Sargasso Sea
WVTAEYGMLPRSTNERMGREAARGKQSGRTQEIQRLIGRSLRQSVNLKYLKDKTIQVDCDVIQADGGTRTASITGGCVALFLAIKNHHDDQRAIEQYVAAISLGVKDDEILVDLDYQEDSTADADINIVMTQDLDLIEIQGTAEERPFSQEQLTEIVNKASSSIKDIIAIQKQAVEG

SEQ ID NO: 133350 - protein, 224 aa, Unknown
  Bacterial polypetide isolated from the Sargasso Sea
MSRPSDRTAAQLRPVTITRHFTKHAEGSVLVEFGNTRVLCTASVDTSVPRFLKGKNQGWVTAEYGMLPRSTHSRMNREAASGKQSGRTLEISRLIARSLRAAVDLTALGEHSITVDCDVLQADGGTRTAAITGACVALVDALNWMVEKGMLKQSPLKQMIAAVSVGMYEGEAICDLEYIEDSAAETDMNVVMTEDGRIIEVQGTAEAEPFTHEELLEMLALAKG

SEQ ID NO: 133351 - protein, 161 aa, Unknown
  Bacterial polypetide isolated from the Sargasso Sea
MGREAARGKQSGRTQEIQRLIGRSLRQSVNLKYLKDKTIQVDCDVIQADGGTRTASITGGCVALFLAIKNHHDDQRAIEQYVAAISLGVKDDEILVDLDYQEDSTADADINIVMTQDLDLIEIQGTAEERPFSQEQLTEIVSKASSSIKDIVAIQKQAVEG

SEQ ID NO: 133352 - protein, 234 aa, Unknown
  Bacterial polypetide isolated from the Sargasso Sea
MTRKNNRSNNEMRSVEIAVGVNKHAEGSVLIKFGDTHVICTASIENHVPRWMRGSNEGWITAEYGMLPRSTHERMNRESARGKQSGRTMEIQRLIGRSLRQAVDLKYLKDKTINIDCDVIQADGGTRTASITGACVALFEAIKNSHDDQRAIKEYVAAVSIGLKDGRPLLDLDYEEDSSADTDLNVVMTESGGIIEIQGTAEKYPFTKDQLDEMIVSASMGIKDIVSFQKSCLN

SEQ ID NO: 133353 - protein, 232 aa, Unknown
  Bacterial polypetide isolated from the Sargasso Sea
MRESRTFDQMREISFEINVNLHAEGSCLVKFGNTHVLCTASIDEKTPHWLKNSGKGWVTAEYGMLPRSTNTRIDREASRGRQTGRTQEIQRLVGRSLRSIINLENIGERQIKIDCDVIQADGGTRTASISGGFVALYQAISFLKKNYNLTKPIIKDFIGAVSAGIIKNQANLDLDYFEDSNADVDANFVICESGKIAEIQVTGEEYFFSTEQFEELFNLAKYGVSTIIKKQK

SEQ ID NO: 133354 - protein, 229 aa, Unknown
  Bacterial polypetide isolated from the Sargasso Sea
NQMRKISFEKNVNIHADGSCLVKFGNTHVLCLATIDEKVPHWLKNTGKGWITAEYGMLPRSTNTRMDREAAKGKQSGRTQEIQRLIGRSLRSIVNLSNLGERQIKIDCDVIQADGGTRTASISGGFISLYLAIEKLKNNYNLQKPIIKNFIGAVSTGIVENKALLDLDYKEDSEAQVDANFVICDSDEISEIQVTGEEFFFNDAQFTEMFSLAKIGVKEIISKQKEALE

SEQ ID NO: 133355 - protein, 237 aa, Unknown
  Bacterial polypetide isolated from the Sargasso Sea
MRPSNRTPAQTRPITITRQFTTHAEGSVLVEFGETKVLCTASFTEGVPRFLKGQGQGWVTAEYGMLPRSTHSRMDREAARGKQSGRTQEIQRLIGRALRACVDMKALGENTIVIDCDVIQADGGTRTASITGACVALVDALNWARGKGIIKSNPLKFLIAAVSVGIYKGEAISDLEYIEDSAAETDMNVVMTETGKIIEIQGTAEGEPFTHEELIELLGLAKNSIREIVDVQKAALN

SEQ ID NO: 133356 - protein, 206 aa, Unknown
  Bacterial polypetide isolated from the Sargasso Sea
KVLVTASIEDKVPGWMRNSGQGWVTAEYGMLPRATHTRGRREAAAGKQSGRTQEIQRLIGRSLRAVVDLKALGERQVLIDCDVIQADGGTRTASITGAWVAMSLALNYLRDEGVLKADPITDQVAAVSCGVCDGVPVLDLDYEEDSEAEADSNFVLTGSGQIVEVQATGEKRGFSRAEFDRLFSLAETGCTELFALQKAALAAVKR

SEQ ID NO: 133357 - protein, 105 aa, Unknown
  Bacterial polypetide isolated from the Sargasso Sea
MRPSGRKLDEIRKISLSTNVNKHAEGSCLVKYGDTHVICTASVDERLPAWVKDLGHGWITAEYGMLPRSTGERSSREASRGKQGGRTMEIQRLIGRSLRAATNLS

SEQ ID NO: 133358 - protein, 84 aa, Unknown
  Bacterial polypetide isolated from the Sargasso Sea
MSRDNRKPTQAREISIETNVNLHAEGSVLVKFGNTHVICTASIDNNVPRWMKGSDKGWVTAEYGMLPRSTNERMGREAARGKQS

SEQ ID NO: 133359 - protein, 134 aa, Unknown
  Bacterial polypetide isolated from the Sargasso Sea
KTLGENTLYIDCDVIQADGGTRTASITGACVALVDALRAMKQRGALKKVPEVQMIAAISVGIYKGVPVLDLDYPEDSSADTDLNVVMTDKGGFIEVQGTAEAAPFSADDLNAMLALARQGCEQLFSLQQAALAD

SEQ ID NO: 133360 - protein, 206 aa, Unknown
  Bacterial polypetide isolated from the Sargasso Sea
LISFGLTQVICTASIEKGVPSFLRGKGRGWITSEYGMLPRSTGARMDREAVKGKQSGRTQEIQRLIGRSLRAAVDLQTVGENTIKIDCDVIQADGGTRTAAITGGCVALMDALSLLGESVSTKFVSAVSVGIVDGEPVLDLEYVEDSRADTDMNFVLSEDGSFIEIQGTAEGNTFTDRELFKMIELAQKGGAELISLQKRVLLENA

SEQ ID NO: 133361 - protein, 199 aa, Unknown
  Bacterial polypetide isolated from the Sargasso Sea
MIRQDGRSKNQVRPLRITPHYSKYADGSVLIETGETRVLCNATVEESLPHWLRQQRLSRGWLTAEYSMLPRSTNTRVRRERQHPSGRSQEIQRLIGRSLRGVLDFSKLPERTIIIDCDVLQADGGTRTASITGGYIALKMAVDKLLRENKIKQNPLIDGVAAVSLGIHNDSILLDLNYEEDSTADIDMNLVMTHSEKIL

SEQ ID NO: 133362 - protein, 220 aa, Unknown
  Bacterial polypetide isolated from the Sargasso Sea
MRQDRNFEELRPISFEIDVNIHAEGSCLVRFGNTQVLCTASIDEKAPHWLKNTGKGWVTAEYGMLPRSTNTRIDREAARGKQTGRTQEIQRLIGRSLRSVINLENIGERQIKIDCDVIQADGGTRTASISGGFIALYQAVLNLKKNYNIQKPIINQFVAAVSAGIIQNHPILDLDYKEDSQAQVDANFIICENGKIAEIQVTGEEIFLSENQFQSFIRSC

SEQ ID NO: 133363 - protein, 236 aa, Unknown
  Bacterial polypetide isolated from the Sargasso Sea
MRKDRTFDQMRDVSFEKNVNIHADGSCLVKFGNTHVLCLATIDEKIPHWLKNTGKGWVTAEYGMLPRSTNSRMDREAAKGKQSGRTQEIQRLIGRSLRSVVNLENLGERQIKIDCDVIQADGGTRTAAISGGFVSLYLAINKLKENYNIQKTIIKNYIGAVSAGIINDKPLLDLNYIEDSEAQVDANFVICGTGEISEIQVTGEEFFFKDYQFNELFELAKKGIKEIIELQRKVLD

SEQ ID NO: 133364 - protein, 234 aa, Unknown
  Bacterial polypetide isolated from the Sargasso Sea
MTEKNNRSNDEMRPLEIEVGVNKHAEGSALIKFGDTHVICTASIENHVPRWMRGSNEGWITAEYGMLPRSTHERMNREAARGKQSGRTMEIQRLIGRSLRQAVDLKYLKDKTINIDCDVIQADGGTRTASISGACVALFEAIKNSHDDHRAIKEHVAAVSIGLKDGCPLLDLDYDEDSSADTDLNVVMTESGGIIEIQGTAEKYPFSKNELDEMIESASNGIADIVSFQKSCLS

SEQ ID NO: 133365 - protein, 173 aa, Unknown
  Bacterial polypetide isolated from the Sargasso Sea
EYGMLPRSTNERMGREAARGKQSGRTQEIQRLIGRSLRQSVNLKYLKDKTIQVDCDVIQADGGTRTASITGGCVALFLAIKNHHDDQRAIEQYVAAISLGVKDDEILVDLDYQEDSTADADINIVMTQDLDLIEIQGTAEERPFSQEQLTEIVSKASSSIKDIVAIQKQAVER

SEQ ID NO: 133366 - protein, 192 aa, Unknown
  Bacterial polypetide isolated from the Sargasso Sea
MDTLSKEMRNVSISFDLLTNVENSCLIKFGNTIVICKATIEESVPPFLRKSGMGWVTAEYGMLPGSTNERMRREAKQAGQSGRTQEIQRLIGRSLRVAVDRVALGERQIVVDCDVIQADGGTRCASICGGWVALKLATNTLKRSGQIKFDPIIRHVAAISCGIVDGEKKLDLNYQEDSAAETDANFVMDDKG

SEQ ID NO: 133367 - protein, 134 aa, Unknown
  Bacterial polypetide isolated from the Sargasso Sea
MRKDRDFDEIREIVFETNINMHAEGSCLVKFGNTQVICTASIDEKTPPWLRGSGKGWVTAEYGMLPRSTNTRIDRESSRGKQSGRTQEIQRLIGRSLRSVVNLENLGERQIKIDCDVVQADGGTRTAAISGSFV

SEQ ID NO: 133368 - protein, 190 aa, Unknown
  Bacterial polypetide isolated from the Sargasso Sea
FWLRGSGKGWVTAEYGMLPRSTHIRMDREISKGKISGRTQEIQRLIGRSLRSIIDLESLGEIQIKIDCDVIQADGGTRTASITGAWVALHDAVKFLMSKGKVSRNPITEQVAAISCGIVSGESLIDLDYSEDSTADVDANFVLTDSKNIVEVQTTSEKQTLTKTEFMTLYELAESQIDILFKKQLNVISK

SEQ ID NO: 133369 - protein, 150 aa, Unknown
  Bacterial polypetide isolated from the Sargasso Sea
MRNTRKIGDLRKFEIIPNFSSYPEGSCMIKFGETQVLCNASLDQNVPRWLKNSQQGWVTAEYGMLPRSTSERMSREAVRGKQSGRTQEIQRLIGRSLRAVTDLSLLKDMQILIDCDVIQADGGTRTASISGAFVALRLCIQNIIEKKIIK

SEQ ID NO: 133370 - protein, 95 aa, Unknown
  Bacterial polypetide isolated from the Sargasso Sea
MSAQTIRPSGRKYDEARIVSVEIGKSKYAEGSCLIKFGDTHVFCTASVEERVPPFLTGKGIGWVTAEYGMLPRSTHTRTDREAARGKQSGRTLEI

SEQ ID NO: 133371 - protein, 131 aa, Unknown
  Bacterial polypetide isolated from the Sargasso Sea
MSDPRPSGRQADQLREVRIERAFTRHAEGSVLVSFGETRVLCTASVENRVPGFLRGKGEGWVTAEYGMLPRSTHTRNDREAARGKQGGRTLEIQRLIGRTLRACIDRGALGERTITLDCDVLQADGGTRTA

SEQ ID NO: 133372 - protein, 143 aa, Unknown
  Bacterial polypetide isolated from the Sargasso Sea
SAVNLYSLEKHTVWIDCDVIQADGGTRTASITGGFVALIFALRKIYDKGDIKEFPVKEFLAAISVGIVNQKPILDLNYEEDKDAEVDMNVVMLGSKKLVEVQGTAEGRTYSRKQLSIMLDLAEMGIHSHISSQKKVLGNNLAG

SEQ ID NO: 133373 - protein, 173 aa, Unknown
  Bacterial polypetide isolated from the Sargasso Sea
MRKERLFNQMREVSFEKNVNIHADGSCLVKFGNTHVLCMASIDEKVPHWLKNTGKGWITAEYGMLPRSTNTRMDREATKGKQSGRTQEIQRLIGRSLRSVIDLGNLGERQIKVDCDVIQADGGTRTASISGGFVALYMAIEKIKKNYNMQKPIIKNFIGAISAGIIDNKPLLD

SEQ ID NO: 133374 - protein, 180 aa, Unknown
  Bacterial polypetide isolated from the Sargasso Sea
WVTAEYGMLPRSTNTRMDREAAKGKQSGRTQEIQRLIGRSLRSIIDLSNLGERQIKIDCDVIQADGGTRTASISGGFISLYLAIEKLKNNYNLQKPIIKNFIGAVSAGIVENKAILDLDYKEDSEAQVDANFVICDSDEISEIQVTGEEFFFNHTQFTEMFSLAKIGVKEIISKQKEALK

SEQ ID NO: 133375 - protein, 217 aa, Unknown
  Bacterial polypetide isolated from the Sargasso Sea
MRKDRAFDELREIAFETNTNIHAEGSCLVKFGNTHVICTASIDEKTPPWLRGSGKGWVTAEYGMLPRSTNTRIDRESAKGKQSGRTQEIQRLIGRSLRSVINLNNLGERQVKVDCDVIQADGGTRTASISGGFVALYLAIDKLKKNYNIEKPIIKNFVAAISAGIIDNKARVDLDYNEDSAAEVDANFVICDNGKISEIQATGEEYFFSEEQYQEMF

SEQ ID NO: 133376 - protein, 239 aa, Unknown
  Bacterial polypetide isolated from the Sargasso Sea
MRIDKRKPDQLRNIDFKLDFIRSSEASVLASFGDTRVLCTATIEHNVPRWMKNKGHGWVTAEYGMLPGSTSQRNMRESVKGKQSGRTLEIQRLIGRSLRAAVDLEALGERTIILDCDVIQADGGTRTTAINGAFIALSRAVNSLFDDRKIDSDPIKKFLGAISVGIYKNEVIMDLNYNEDSQADTDMNIVMTEDSEFIEIQGTAESGSFSSDQLALMLNYAEKGIKEITLHQKKLLSSN

SEQ ID NO: 133377 - protein, 250 aa, Unknown
  Bacterial polypetide isolated from the Sargasso Sea
DFTPNALSSLLYSQGNTQVLVCVTKAPSLPRWFPRDSDRGWVHAEYSLLPGSTDTRFRRERSGAKGRTMEIERLVARSLRGAVDLEQLGPVALTVDCDILNADGGTRCASITAANIALRLAVRRLISSGECLPKDRRLTREQIRKGAKQETLSKEQMASHEDSVMPNDVAALSVGMVEGQVWTDLDYVLDSNADVDMNVVMTSSGDFVEVQGTGEEATYSREELDSLIDAAEAGIAKLHKLQTEVLSNAS

SEQ ID NO: 133378 - protein, 103 aa, Unknown
  Bacterial polypetide isolated from the Sargasso Sea
MTRKDRALDEMRDISFETNINLHAEGSCLVKFGNTQVLCTASVDEKTPHWLKNTGKGWVTAEYGMLPRSTNTRIDREAAKGKQSGRTQEIQRLIGRSLRSIIN

SEQ ID NO: 133379 - protein, 87 aa, Unknown
  Bacterial polypetide isolated from the Sargasso Sea
MRPSGRQHNEKRAVSVEIGTSKYAEGSSLIRFGDTHVLCTASVEERVPPFLRGQGIGWVTAEYGMLPRSTHTRTDREAARGKQSGRT

SEQ ID NO: 133380 - protein, 232 aa, Unknown
  Bacterial polypetide isolated from the Sargasso Sea
MKRNQDRSNNQLRDITIEPNINIHAEGSVLISFGNTKVICNASIENNVPRWMKNSDEGWVTGEYGMLPRSTNERMSREAARGKQSGRTQEIQRLIGRSLRQAVNLKYLKGKTINVDCDVIQADGGTRTASITGGCVALFLAIKNHHDDQRAIKSFVAAVSMGIKENQVLLDLDYDEDSTADTDLNIVMNDKDELIEIQGTAEDAPFSKKELDDMLVMGSQAIADIIKKQKAC

SEQ ID NO: 133381 - protein, 121 aa, Unknown
  Bacterial polypetide isolated from the Sargasso Sea
MNSRFDGRQTGQMRSISFERNFTRHAAGSVLMCFGDTKVLCTASVEEKVPRFLKDQGRGWVTAEYAMLPSSTHTRISREVSRGKPSGRTSEIQRLIGRALRSIIDFERLGERTIYIDADVI

SEQ ID NO: 133382 - protein, 197 aa, Unknown
  Bacterial polypetide isolated from the Sargasso Sea
LKLPENCYKHGWVTAEYGMLPGSTGKRKRRERPQVDGRTQEIQRLIGRSLRSVVDLKALGRHTVWIDCDVIQADGGTRTASITGGFVALILALRQMQAEGRFKTFPVSRFLASISVGIFEGRPLLDLKYDEDVKAEVDMNVVMLDNGDYVEVQGTAEGQTFPRNQLNQLLDFAEKGIRSHLQNQKKLLGEHLESGVF

SEQ ID NO: 133383 - protein, 180 aa, Unknown
  Bacterial polypetide isolated from the Sargasso Sea
MSAQTIRPSGRKYDEARIVSVEIGKSKYAEGSCLIKFGDTHVFCTASVEERVPPFLRGKGIGWVTAEYGMLPRSTHTRTDREAARGKQSGRTLEIQRLIGRSLRAVTDEKSLGERQIRIDCDVIQADGGTRTAAITGGYIALHLALRNLVSKKVLPSIPLHGEVAAISCGVYQGQAVFGP

SEQ ID NO: 133384 - protein, 208 aa, Unknown
  Bacterial polypetide isolated from the Sargasso Sea
EFGDTKVICTASAETKVPPFLRGQGQGWVTAEYGMLPRSTGSRMIREAAKGKQQGRTVEISRLIGRSLRAAVDLEALGENTITIDCDVIQADGGTRTASITGACVALADAINWLKENGKVKGEPLKQMIAAVSVGIYNGEAVLDLDYAEDSTAETDLNVVMTEKGGYVEIQGTAEGEAFSAEELNAMLAHAQKAIGELSELQKAALSS

SEQ ID NO: 133385 - protein, 119 aa, Unknown
  Bacterial polypetide isolated from the Sargasso Sea
MRPSGRTASQIRPITFTRQFTAHAEGSVLVEFGNTKVICTASVIEGVPRFMKGQGKGWITAEYGMLPRATHTRNDREAARGKQGGRTMEIQRLIGRALRTAVDLKLLGENTITIDCDVI

SEQ ID NO: 133386 - protein, 94 aa, Unknown
  Bacterial polypetide isolated from the Sargasso Sea
MKRNQDRPLNKLREISLEININIHAEGSVLVSFGNTKVICTASIEHNVPRWMKNSDEGWVTAEYGMLPRSTNERMGREAARGKQSGRTQEIQRL

SEQ ID NO: 133387 - protein, 165 aa, Unknown
  Bacterial polypetide isolated from the Sargasso Sea
MRKDRSFNQMREISFEKNVNIHADGSCLVKFGNTHVLCLATIDEKVPHWLKNTGKGWVTAEYGMLPRSTNTRMDREAAKGKQSGRTQEIQRLIGRSLRSIVDLSNLGERQIKIDCDVIQADGGTRTASISGGFISLYLAIEKLKNNYNLQKPIIKNFIGAVSTGI

SEQ ID NO: 133388 - protein, 203 aa, Unknown
  Bacterial polypetide isolated from the Sargasso Sea
MRKDRSFNQMREISFEKNVNIHADGSCLVKFGNTHVLCLATIDEKVPHWLKNTGKGWVTAEYGMLPRSTNTRMDREAAKGKQSGRTQEIQRLIGRSLRSIVDLSNLGERQIKIDCDVIQADGGTRTASISGGFISLYLAIEKLKNNYNLQKPIIKNFIGAVSTGIVENKAILDLDYKEDSRAQVDANFVICDSDEISENSVTG

SEQ ID NO: 133389 - protein, 162 aa, Unknown
  Bacterial polypetide isolated from the Sargasso Sea
KRTRVGKQSGRTIEIQRLIGRSLRSVVELEKLNGFQVILDCDVIQADGGTRTASISGSFVALNLALKKFIKKDFIKSNPVKDYVAAISCGIVNGKVLVDLDYDEDSSADVDANFIMTKKSGFSEIQISGENSTFNYQSVTQMVDITKKIVNQIFDIQKNAIK

SEQ ID NO: 133390 - protein, 233 aa, Unknown
  Bacterial polypetide isolated from the Sargasso Sea
RELSKIRNLEIIPGFQPNNQSSCLVKLGNTHVCCSAIIEDRVPGFLRNSGKGWLTAEYGMLPSSTSERMDREAAKGRQSGRTQEIQRLIGRSLRCAVNLDVLGEKTIKVDCDVISADGGTRTASIIGGYVSLVRSVNDFKNKFNLSKAIIVNQVAAISVGVVKGTSCIDLNYIEDSSAEVDCNVVMANDGQFIEFQSTGEEAKFSKKTIMSFIELVEGSMPEIFNIQNLAIEK

SEQ ID NO: 133391 - protein, 238 aa, Unknown
  Bacterial polypetide isolated from the Sargasso Sea
MRPSGRAPDQMRDITMEPGFTIHAEGSCLISFGDTRVLCTASVEEKVPPFLRGKGSGWVTAEYGMLPRATHTRGSREAAKGKQSGRTQEIQRLIGRSLRTVVDLKKLGERQIVVDCDVIQADGGTRTAAISGSWVALRIAVDKLLASGALKEDPIIQKVAAISCGIFEGTPVLDLDYAEDSNAETDANLILTGDGKFAEVQATAEGAAYDEEELLRLLRLARIGCAKIFAAQDVATGR

SEQ ID NO: 133392 - protein, 194 aa, Unknown
  Bacterial polypetide isolated from the Sargasso Sea
VPRFLRDSGQGWVTAEYSMMPAATSERNRREVSKGKQSGRTMEIQRLIGRSLRAAVDMEKLGEVSIIIDCDVIQADGGTRTTSITGGMIVLYDAIQKLMKEGIVTEDPIRHFVSAISVGLVDNQVVLDLDYIEDSGADVDLNLVMTDAGTFIEIQGTAEKDPFSNEHLSQFIEIGKKGIDTIMEQVKETVAVSA

SEQ ID NO: 133393 - protein, 149 aa, Unknown
  Bacterial polypetide isolated from the Sargasso Sea
MTKNTSRTDGRFDDEVRKLELISGYTQNAPGSVLVSTGDTRIICTATFEEEVPGFLKLPENGYKHGWVTAEYGMLPGSTGKRKRRERPQVDGRTQEIQRLIGRSLRSVVDLKALGRHTVWIDCDVIQADGGTRTASITGGFVALILALR

SEQ ID NO: 133394 - protein, 220 aa, Unknown
  Bacterial polypetide isolated from the Sargasso Sea
MRKDRLFNEMREISFEKDFNIHAEGSCLVKFGKTHVLCTASIDEKTPHWLKNSGKGWVTAEYGMLPRSTNTRIEREAAKGKQSGRTQEIQRLIGRSLRSITNLDNLGERQIKIDCDVLQADGGTRTASISGGFVALYLAVKKLKENYNIQKPIIKEFIGAVSTGIINGKANLDLNYKEDSEANVDANFVLCESGKIAEIQVTGEEYFFSEEQFNEIFILA

SEQ ID NO: 133395 - protein, 167 aa, Unknown
  Bacterial polypetide isolated from the Sargasso Sea
NTRMDREAAKGKQTGRTQEIQRLIGRSLRSVVDLKSLGERQIKIDCDVIQADGGTRTASISGGFVSMFLAINKIKNNYNLQKPIIKNYIGAISAGIIDDKPLLDLDYKEDSEAQVDANFVISDTGEISEIQVTGEEFFFSDNQFNEIFNLAKKGIKEIIDLQKKVLS

SEQ ID NO: 133396 - protein, 183 aa, Unknown
  Bacterial polypetide isolated from the Sargasso Sea
MRLGGRKNGELREISITRGYTKYAEGSVLIEFGDTKVLCNASVEDSVPRFLKGKGQGWVTAEYGMIPRSTNSRMEREATRSQRAARSIEIQRLIGRSLRAVVDLKKLGERTIKIDCDVLQADGGTRTASITGACIAVVDAISHILEEKVLTESPLKQLVASVSAGLVNGQIVLDLDYLEDSNA

SEQ ID NO: 133397 - protein, 239 aa, Unknown
  Bacterial polypetide isolated from the Sargasso Sea
MSDRHDGRRTDQGRKVRIEVSTAPYAEGSCLISTGNTRVLCTASVSEGVPPWRERSGAGWVTAEYAMLPRATHTRSRRERSGPKGRTQEIQRLIGRSLRSVVDMEAMGQHTITIDCDVMQADGGTRTASITGACVALELATKWMTSEGLIERSPIRERVAAVSVGIVSGLPCLDLDYREDSSAQVDMNLVGTESGALVEIQGTAEGDPFPRAHLDQMIDLGMAGIETLLAAQARALSGS

SEQ ID NO: 133398 - protein, 153 aa, Unknown
  Bacterial polypetide isolated from the Sargasso Sea
GDTHVLCTASVENRVPPWLRNSGSGWVTAEYGMLPRSTGDRMRREASVGKQSGRTQEIQRLIGRSLRSVIDLDQLGENQISIDCDVIQADGGTRTASISGAFIALKHSVNFLMESNEIKKDPIREYLGAVSCGIYRGKPILDLDYKEDSEAEA

SEQ ID NO: 133399 - protein, 134 aa, Unknown
  Bacterial polypetide isolated from the Sargasso Sea
CSLKKLGERTITVDCDVLQADGGTRTASISGGAVALSLALKSIGKEEAMQGLVSAVSVGMYRGQPVLDLDYAEDSNAETDMNVVQLNGSGFIEIQGTAEGQAFSATDLESMLSVAEKGMNEIYEYQKALLSTLT

SEQ ID NO: 133400 - protein, 71 aa, Unknown
  Bacterial polypetide isolated from the Sargasso Sea
QGEAVLDLDYLEDSAAETDLNVVMTSAGGFIEVQGTAEGAPFQPEDFNAMLALAQKGMDEIFELQQAALAD

SEQ ID NO: 133401 - protein, 239 aa, Unknown
  Bacterial polypetide isolated from the Sargasso Sea
MRIDERKPDQLRNIDFKLDFIKSSDASVLASFGDTRVLCTATIENNVPKWMKNKGHGWVTAEYGMLPGSTSQRNMRESVKGKQGGRTLEIQRLIGRSLRAAVDLEALGERTIILDCDVIQADGGTRTTAINGAFIALKRAVNTLFDDRNIDSDPIKKFIGAISVGIYRNEVIMDLNYNEDSQADTDMNIVMTEDNEFIEIQGTAESGSFNNDQLALMLNYAKKGIKEITLHQKKLLSSN

SEQ ID NO: 133402 - protein, 123 aa, Unknown
  Bacterial polypetide isolated from the Sargasso Sea
MLKRENDRKNNQLRKISMIRNFSPYAEGSCFIKFGKTHVLCTASIDEKVPFWLRGTGKGWITAEYGMLPRSTHTRIEREINKGKISGRTQEIQRLIGRSLRAVVDLNLLGEMQIKIDCDVIQA

SEQ ID NO: 133403 - protein, 156 aa, Unknown
  Bacterial polypetide isolated from the Sargasso Sea
SQEIQRLIGRSLRSALDLTKCPDISFVVNCDVLQADGGTRTASITGGWIALKMAINRLLHDGRLLENPLIGTVAAVSVGYKNGEIFVDPDYSEDSTADLDMNVVMSDSGKIQEIQGTGEKAGFDLEQLNNITTTSQEVLSTIFELQQAAVESPIET

SEQ ID NO: 133404 - protein, 200 aa, Unknown
  Bacterial polypetide isolated from the Sargasso Sea
MRPSGRKLDEMRNVSIETNITMHAEGSCIIKMGDTHVICTATVEDRVPPFIKGSGMGWVTAEYGMLPRSTGSRMRREAASGKQGGRTVEIQRLIGRSLRAGVDRLSLGERQITIDCDVIQADGGTRCASITGGWLALRLAIDKLLDSGTISTDPLISPVSAISCGIYAGQPILDLDYSEDSEAGVDGNFIMLESGNMMKP

SEQ ID NO: 133405 - protein, 172 aa, Unknown
  Bacterial polypetide isolated from the Sargasso Sea
MTRKNRKNFEIRPLEIVKNNIKNADGSCLIKLGNTQIICTASFEGKLPKWLKGSGKGWITAEYGMLPRSTNERMRREASVGKISGRTSEIQRLIGRALRSSVDLNMLGENLITIDCDVIQADGGTRTASITGGYIALVECIKIMQSKKIINTNPIKNQIAAISSGYVKGDHL

SEQ ID NO: 133406 - protein, 166 aa, Unknown
  Bacterial polypetide isolated from the Sargasso Sea
MQNEKLLTLRPSGRKFNELRKITLEKNVAKYAEGSCFIKSGFTHVLCTASIEERVPPWLRNTGQGWVTAEYGMIPRSTETRMRRESSKGKQTGRTQEIQRLIGRSLRSIVDLKLLGERQVTIDCDVIQADGGTRTAAITGSYVALHEALTALIKKGELDSQPINNQ

SEQ ID NO: 133407 - protein, 249 aa, Unknown
  Bacterial polypetide isolated from the Sargasso Sea
YTQNALASLVYSQGDTMVLVCVTKADSLPRWFPRDAQRGWVHAEYSLLPGSTNTRFRRERNGAKGRTMEIERLVARSLRAAIDLEELGPVALTIDCDILNADGGTRCASITAASIALRLAIRRLISSGESVPKSKRLTKEEIRKGETPVELNEQDRKDHERSVMPNDVAALSVGVVDGKVWTDLDYSLDSNADVDMNVVMTSSGQFVEVQGTGEEATYSRDELDELVDAAVTGITKIHKIQSEILSGSV

SEQ ID NO: 133408 - protein, 195 aa, Unknown
  Bacterial polypetide isolated from the Sargasso Sea
MLNRPSNRQSNEMREISLASKVSPYAEGSCMAKFGNTHVLCTASVDTKLPTWLRNSGKGWITAEYGMLPRSTHSRMDREVVKGKPSGRTQEIQRLIGRSLRSIVDLKKLGENQIKIDCDVIQADGGTRTASITGAWVALYDAVNFLLKTGKISENPILDQVSAISCGIWKSKEIIDLDYEEDSSAETDGNFCYDC

SEQ ID NO: 133409 - protein, 234 aa, Unknown
  Bacterial polypetide isolated from the Sargasso Sea
MPRDNRKSTQAREISIETNINLHAEGSVLVKFGNTHVICTASIDNNVPRWMKGSDKGWVTAEYGMLPRSTNERMGREAARGKQSGRTQEIQRLIGRSLRQSVNLKYLKDKTIQVDCDVIQADGGTRTASITGGCVALFLAIKNHHDDQRAIEQYVAAISLGVKDDEILVDLDYQEDSTADADINIVMTQDLDLIEIQGTAEERPFSQEQLTEIVSKASSSIKDIVDIQKQAVEG

SEQ ID NO: 133410 - protein, 128 aa, Unknown
  Bacterial polypetide isolated from the Sargasso Sea
SVDCDVIQADGGTRTASITGAWIALHDCLKWMEARSMVKTGKVLKDHVAAISCGIFADQPVIDLDYLEDSSAETDANFVMTGTGGIVEIQGTAEGKPFSQDEFLTLLDLARNGIAELVDLQKKTVEGA

SEQ ID NO: 133411 - protein, 189 aa, Unknown
  Bacterial polypetide isolated from the Sargasso Sea
IRKTGLGWVTAEYGMLPRSTNSRMKRESSRGKQGGRTLEIQRLIGRSLRTCVDRLLLGERQIIIDCDVLQADGGTRCAAITGGWIALKLASDHLVKNQIIDENPIINQVAAISCGIYNDEPILDLDYEEDSNVKTDANFVLNQKNEIIEIQVSAEKDPFSYKDFEKLFELSKGGIEKLIDFQSKAIKSE

SEQ ID NO: 133412 - protein, 110 aa, Unknown
  Bacterial polypetide isolated from the Sargasso Sea
MKRPSGRAADQLRSIRITRNYTKHAEGSVLVEFGDTKVICTVSVESGVPRFLKGQGQGWLTAEYGMLPRATGERNQREASRGKQGGRTLEIQRLIGRSLRAALDMTKLGE

SEQ ID NO: 133413 - protein, 107 aa, Unknown
  Bacterial polypetide isolated from the Sargasso Sea
MRPSDRKNNEMRSISFETGVSKHAEGSCLVKFGDTHVLCTASVENRVPPWLRNSGSGWVTAEYGMLPRSTGERMRREASAGKQSGRTQEIQRLIGRSLRSVIDLDQL

SEQ ID NO: 133414 - protein, 109 aa, Unknown
  Bacterial polypetide isolated from the Sargasso Sea
MRKDRPFDEIRAIMFETNINIHAEGSCLVKFGNTQVICTASIDEKTPPWLRGSGKGWVTAEYGMLPRSTNTRIDRESARGKQSGRTQEIQRLIGRSLRSVINLENLGER

SEQ ID NO: 133415 - protein, 197 aa, Unknown
  Bacterial polypetide isolated from the Sargasso Sea
ATIDEKVPHWLKNTGKGWVTAEYGMLPRSTNTRMDREAAKGKQSGRTQEIQRLIGRSLRSIVDLSNLGERQIKVDCDVIQADGGTRTASISGGFVALYIAINKIKNNYNIQKPIIKNYIGAISAGIIDNKPLLDLDYKEDSEAKVDANFVICETGEISEIQVTGEEYFFSDNQFNEIFNLAKKGIREIIEIQKKTLA

SEQ ID NO: 133416 - protein, 162 aa, Unknown
  Bacterial polypetide isolated from the Sargasso Sea
DGRTQEIQRLIGRSLRSVVDLKALGKHTVWIDCDVIQADGGTRTASITGGFVALILALRQMQAEGRFKTFPVSRFLASVSVGIFEGRPLLDLKYDEDVIAEVDMNVVMLDNGDYVEVQGTAEGQTFPRNQLNQLLDYAENGIQSHLQNQRKLLGENLESGGS

SEQ ID NO: 133417 - protein, 198 aa, Unknown
  Bacterial polypetide isolated from the Sargasso Sea
MRKDRSFSQMREISFEKNVNIHADGSCLVKFGNTHVLCLATIDEKVPHWLKNTGKGWVTAEYGMLPRSTNTRMDREAAKGKQSGRTQEIQRLIGRSLRSIVDLSNLGERQIKIDCDVIQADGGTRTASISGGFVSLYLAIEKLKNNYNLQKPIIKNFIGAVSTGIVENKALLDLDYKEDSDAQVDANFVICDSDEISE

SEQ ID NO: 133418 - protein, 86 aa, Unknown
  Bacterial polypetide isolated from the Sargasso Sea
MPNDVAALSVGMVERQVWTDLDYVLDSNADVDMNVVMTSSGDFVEVQGTGEEATYSREELDSLIDAAEAGIAKLHKLQAEVLSNAS

SEQ ID NO: 133419 - protein, 235 aa, Unknown
  Bacterial polypetide isolated from the Sargasso Sea
MTITTRSDGRADNELRPLIITPDYIKYAEGSVLTCCGNTKVICTASVENKVPHWLLDEHNYPRHGWITAEYGMLPRSTGSRRSRETATIQGRTHEIQRLIGRSLRSVTNLHSLDNHTIWIDCDVIQADGGTRTASITGGFVALIYALRKMHDKGDIKEFPIKEFLAATSVGIVKQQPVLDLNYDEDKDAEVDMNVVMLSSGKFVEVQGTAERRTYSRQQLNIMLDLAEQGILSQY

SEQ ID NO: 133420 - protein, 162 aa, Unknown
  Bacterial polypetide isolated from the Sargasso Sea
MREITFEINVNLHAEGSCLVKFGNTQVLCTASIDEKTPPWLKNSNKGWVTAEYGMLPRSTNTRIDREAARGKQSGRTQEIQRLIGRSLRSITNLYNLGERQIKIDCDVLQADGGTRTAAISGGFVALYLAVEKLRSSYNIDKPIIKEFIGAISAGIINNQPN

SEQ ID NO: 133421 - protein, 193 aa, Unknown
  Bacterial polypetide isolated from the Sargasso Sea
MRYNNRDNDQLRSISFSRHYTKHAEGSVLTAFGDTKVLCNVSVVEGIPKFLKGKRQGWLTAEYGMLPRSTHDRCRREAAHGKQSGRTQEIQRLIGRALRAAVDLTLLGEYTLQIDCDVIQADGGTRTAAISGSCVALIDAIEYMQQQKLIKTNPLKHLVAGISVGVLDKNILLDLDYQEDSSAEKDMNIVMDD

SEQ ID NO: 133422 - protein, 124 aa, Unknown
  Bacterial polypetide isolated from the Sargasso Sea
MARKNNRSNNEMRPLEIEVGVNKHAEGSALIKFGDTHVICTASIENHVPRWMRGSNEGWITAEYGMLPRSTHERMNREASRGKQSGRTMEIQRLIGRSLRQAVDLKYLKDRTINIDCDVIQADG

SEQ ID NO: 133423 - protein, 102 aa, Unknown
  Bacterial polypetide isolated from the Sargasso Sea
MRQDRNFEQLRPVSFETDVNIHAEGSCLVKFGKTHVLCTASIDEKAPHWLKNTGKGWITAEYGMLPRSTNSRIDREAAKGKQSGRTQEIQRLIGRSLRAVLI

SEQ ID NO: 133424 - protein, 113 aa, Unknown
  Bacterial polypetide isolated from the Sargasso Sea
MKRNQDRPLNKLREISLEININIHAEGSVLVSFGNTKVICTASIEHNVPRWMKNSDEGWVTAEYGMLPRSTNERMGREAARGKQSGRTQEIQRLIGRSLRQAVNLKYLKGKTI

SEQ ID NO: 133425 - protein, 251 aa, Unknown
  Bacterial polypetide isolated from the Sargasso Sea
MQSTKHIRSKNKMTSRPSDREPDEMRDILLEPGINPYAEGSCLAKFGNTHVLCTATVEESVPPFLRNSGKGWVTAEYGMLPRSTHTRTGREAARGKQSGRTQEIQRLIGRSLRAVTDLSRMGERQIRLDCDVIQADGGTRTASITGAWVALHIAFSKLVTDGHLKQIPMSDSVGAVSCGIYGGVGVLDLDYPEDSNAQADANFVLTGSGGIVEIQGTAEKDPFSRELFNQLLDLAFKGVRELTALQQKAIK

SEQ ID NO: 133426 - protein, 121 aa, Unknown
  Bacterial polypetide isolated from the Sargasso Sea
MTRKNNRSNVEMRPLEIKVGVNKHAEGSALIKFGDTHVICTASIENHVPRWMRGSNEGWITAEYGMLPRSTHERMNREAARGKQSGRTMEISRLIGRSLKQAVDLKYLKEKTINIDCDVIQ

SEQ ID NO: 133427 - protein, 166 aa, Unknown
  Bacterial polypetide isolated from the Sargasso Sea
RPQVDGRTQEIQRLIGRSLRSVVDLKALGRHTIWIDCDVIQADGGTRTASITGGFVALILALRQMQAEGRFKTFPVSRFLASISVGIFERRPLLDLKYDEDVKAEVDMNVVMLDNGDYVEVQGTAEGQTFPRNQLNQLLDYAEKGIRSHLQNQKNLLGENLESGVS

SEQ ID NO: 133428 - protein, 158 aa, Unknown
  Bacterial polypetide isolated from the Sargasso Sea
MRNNRNINQLRDIEIIPNFSCNPEGSCLIKCGDTHVICSASLDRNLPRWLKNSENGWVTAEYGMLPRSTSERMSREATKGKQSGRTQEIQRLIGRSLRSIVNLEDLRELQIIIDCDVIQADGGNRTASISGSFIALSLCINHMLNKKIIKKIQFSDML

SEQ ID NO: 133429 - protein, 228 aa, Unknown
  Bacterial polypetide isolated from the Sargasso Sea
RNHNQLRDISIETNINIHAEVSALFSFGNTKVICNASIENNVPRWMKNSDEGWVTGEYGMLPRSTNERMGREAARGKQSGRTQEIQRLIGRSLRQAVDLKYLKGKTINVDCDVIQADGGTRTASITGGCVALFLAIRNHHDDQRAIKSFIAAVSMGIKDNKILLDLNYDEDSTADTDLNIVMNDKDELIEIQGTAEDAPFSKNELSDMLEMGSSAIAEIIKKQKACIE

SEQ ID NO: 133430 - protein, 163 aa, Unknown
  Bacterial polypetide isolated from the Sargasso Sea
MRKDRAFGELREIAFETNTNIHAEGSCLVRFGNTHVICTASIDEKTPPWLRGSGKGWVTAEYGMLPRSTNTRIDRESAKGKQSGRTQEIQRLIGRSLRSVVDLNNLGERQIKVDCDVIQADGGTRTASISGGFVALYLAIDKLKKNYNIEKPIIKNFVAAILQ

SEQ ID NO: 133431 - protein, 189 aa, Unknown
  Bacterial polypetide isolated from the Sargasso Sea
MSIQTIRPSGRQYDEARIVSVEIGQSKHAEGSCLIKFGDTHVFCTASVEERVPPFLRGKGIGWVTAEYGMLPRSTHTRTDREAARGKQSGRTLEIQRLIGRSLRAVTDEKSLGERQIRIDCDVIQADGGTRTAAITGGYIALYLALNNLVSKKVLPCIPLYGEVAAISCGVYQGQAVLDLDYSEDSSAE

SEQ ID NO: 133432 - protein, 110 aa, Unknown
  Bacterial polypetide isolated from the Sargasso Sea
MRKDRNFDQLRKVSLETNISLHAEGSCLVKFGNTNVMCTASIDDKTPPWLRNSGKGWVTAEYGMLPRSTNTRIDREAARGKQTGRTQEIQRLIGRSLRSVTDLESLGERQ

SEQ ID NO: 133433 - protein, 86 aa, Unknown
  Bacterial polypetide isolated from the Sargasso Sea
MANDVSAISIGMLDGKVWTDLDYELDSNADVDMNVVMTSDGGFVEVQGTGEESTYTRGQLSEMLDAACNAIEELHSIQKEILSEAR

SEQ ID NO: 133434 - protein, 148 aa, Unknown
  Bacterial polypetide isolated from the Sargasso Sea
MRPSDRKNNEMRTISFETGVSKHAEGSCLVKFGDTHVLCTASIENRVPPWLRNSGSGWVTAEYGMLPRSTGDRMRREASVGKQSGRTQEIQRLIGRSLRSVIDLDQLGENQISIDCDVIQADGGTRTASISGAFIALKHSVNFLMEST

SEQ ID NO: 133435 - protein, 174 aa, Unknown
  Bacterial polypetide isolated from the Sargasso Sea
MKRPSGRNSDQLRLISLEPSVALHAEGSCLAKFGNTHVFCTASLDARVPTFLRNSGRGWVTAEYGMLPRSTHSRIDREAAQGKQSGRTLEIQRLIGRSLRAVTDLEALGERQIKIDCDVIQADGGTRTAAISGAWVALRIAFEKLLLAGSITRSPATGQVAAIFLRVFRGTPVI

SEQ ID NO: 133436 - protein, 155 aa, Unknown
  Bacterial polypetide isolated from the Sargasso Sea
MGRTQEIQRLIGRSLRSIINLEDLRELQIIIDCDVIQADGGTRTASISGSFIALQLCINHMLNKKIIKKNPISEYVAAISCGMINGEPYLDLDFEEDQNAEVDANFVITESGKLVEVQMTSEKKLCEERSFNAMLELAKSGISEIIQLQKQILSD

SEQ ID NO: 133437 - protein, 103 aa, Unknown
  Bacterial polypetide isolated from the Sargasso Sea
MRKNRKFDEIREVNFETNINIHAEGSCLVRFGNTSVICTASMDEKTPPWLKNSGKGWVTAEYGMLPRSTNSRIEREAARGKQKGRTQEIQRLIGRSLRSVTNL

SEQ ID NO: 133438 - protein, 210 aa, Unknown
  Bacterial polypetide isolated from the Sargasso Sea
EGSVLVKFGNTHVICTASIDNNVPRWMKGSDRGWVTAEYGMLPRSTNERMGREAARGKQSGRTQEIQRLIGRSLRQSVNLKYLKDKTIQVDCDVIQADGGTRTASITGGCVALFLAIKNHHDDQRAIEQYVAAISLGVKDDEILVDLDYQEDSTADADINIVMTQDLDLIEIQGTAEERPFSQEQLTEIVSKASSSIKDIVAIQKQAVEG

SEQ ID NO: 133439 - protein, 247 aa, Unknown
  Bacterial polypetide isolated from the Sargasso Sea
MTKNTSRTDGRLDDEVRKLELISGYTQNAPGSVLVSTGDTRIICTATFEEEVPGFLKLPENGYKHGWVTAEYGMLPGSTGKRKRRERPQVDGRTLEIQRLIGRSLRSVVDLKALGRHTVWIDCDVIQADGGTRTASITGGFVALILALRQMQAEGRFKTFPVSRFLASISVGIFEGRPLLDLKYDEDVKAEVDMNVVMLDNGDYVEVQGTAEGQTFPRNQLNQLLDYAEKGIRSHLQNQKKLLGEYL

SEQ ID NO: 133440 - protein, 230 aa, Unknown
  Bacterial polypetide isolated from the Sargasso Sea
LRPITFVRDFTSMADGSVLATFGNTTVLCTASVDDDVPRWMKGSGTGWVTAEYSMLPGSSPERVRRETRGPKGRTQEIQRLIGRSLRAVCDMEKLGERQVVVDCDVLQADGGTRVASICGGYLALHDALSRRVLRGDLANHPISEACAAVSVGIIHGQPRLDLPYSEDSIADTDMNVVMTESGGFIEIQGTAEQASFNRNELDILLSLAERGIRQIIDLQNELTGNQPTI

SEQ ID NO: 133441 - protein, 218 aa, Unknown
  Bacterial polypetide isolated from the Sargasso Sea
MENVDHSCLIQFGKTKVICTATIEENVPPFLRKTGLGWVTAEYGMLPKSTAERMRREAKSVSQSGRTQEIQRLIGRSLRAGVDRVALGERQVIIDCDVIQADGGTRCAAICGGWVSLKLATNYLLKSGTLKFDPIISNIAAVSCGIVDGEPLLDLNYEQDSNAETDANFVMNEKSQIVEIQCSAEKKAFTKQEFEQLFNLASEGIRKIISIQNSVFDG

SEQ ID NO: 133442 - protein, 160 aa, Unknown
  Bacterial polypetide isolated from the Sargasso Sea
GREAARGKQSGRTQEIQRLIGRSLRQSVNLKYLKDKTIQVDCDVIQADGGTRTASITGGCVALFLAIKNHHDDQRAIEQYVAAISLGVKDNEILVDLDYQEDSTADADINIVMTQDLDLIEIQGTAEERPFSQEQLTEIVSKASSSIKDIVAIQKQAVEG

SEQ ID NO: 133443 - protein, 237 aa, Unknown
  Bacterial polypetide isolated from the Sargasso Sea
MRKKRTYEEMREISFETGVNIHAEGSCLVRFGNTHVLCTASVEEKTPHWLKNSGKGWVTAEYGMLPRSTNSRIDREAAKGRQTGRTQEIQRLIGRSLRSIVNLKNLGERQIKIDCDVIQADGGTRTASISGGFVALYLAVDVLKKNFNIEKPIIKEFIAGVSVGIIDDKPNLDLDYEEDSKAQVDGNFVICESGKIVEIQTTGEEYFFSREQYNILFDLAYVGVAKIIEKQKKCLSV

SEQ ID NO: 133444 - protein, 84 aa, Unknown
  Bacterial polypetide isolated from the Sargasso Sea
MSRDNRKPTQAREISIEANVNLHAEGSVLVKFGNTHVICTASIDNNVPRWMKGSDKGWVTAEYGMLPRSTNERMGREAARGKQS

SEQ ID NO: 133445 - protein, 138 aa, Unknown
  Bacterial polypetide isolated from the Sargasso Sea
MRVDGRANDDLRPISFERNFTDQTPGSVLVSFGRTKVLCTVSIDDDVPRWMRGNGEGWVTAEYAMLPGSSGERVGREAKKGKQKGRTLEIERLIGRALRAVCDMKVLGEREVTVDCDVLQADGGTRTASICGGYVALP

SEQ ID NO: 133446 - protein, 222 aa, Unknown
  Bacterial polypetide isolated from the Sargasso Sea
REISIETDINIHAEGSALISFGNTKVICNASIENNVPRWMRNSNEGWVTGEYGMLPRSTNERMGREAARGKQSGRTQEIQRLIGRSLRQAVNLKYLKGKTINVDCDVIQADGGTRTASITGGCVALFLAIKNHHDDQRAIKSFVAAVSMGIKDNKILLDLDYDEDSTADTDLNIVMNDQDEIIEIQGTAEDAPFSKSELNDMLDMGSSAISQIIKKQKVCVK

SEQ ID NO: 133447 - protein, 230 aa, Unknown
  Bacterial polypetide isolated from the Sargasso Sea
NRKPTQAREISIHTNVNLHAEGSVLVKFGNTHVICTASIDNNVPRWMKGSDRGWVTAEYGMLPRSTNERMGREAARGKQSGRTQEIQRLIGRSLRQSVNLKYLKDKTIQVDCDVIQADGGTRTASITGGCVALFLAIKNHHDDQRAIEQYVAAISLGVKDDEILVDLDYQEDSTADADINIVMTQDLDLIEIQGTAEERPFSQEQLTEIVSKASSSIKDIVAIQKQAVEG

SEQ ID NO: 133448 - protein, 175 aa, Unknown
  Bacterial polypetide isolated from the Sargasso Sea
THKRMDREISKGKISGRTQEIQRLIGRSLRAVVDLEILGELQIKIDCDVIQADGGTRTASITGAWIALHDSIKFLLSKGKITTNPITNQVAAISCGIVDGEILLDLDYDEDSNAEVDANFVLSEDNGIIEIQTTSEKKPIDIVQFNQIFELVLKQIKHLFKIQSNVLIIDENNQK

SEQ ID NO: 133449 - protein, 236 aa, Unknown
  Bacterial polypetide isolated from the Sargasso Sea
MRKDRSFNQMREISFEKNVNIHADGSCLVKFGNTHVLCLATIDEKVPHWLKNTGKGWVTAEYGMLPRSTNTRMDREAAKGKQSGRTQEIQRLIGRSLRSIVNLSNLGERQIKIDCDVIQADGGTRTASISGGFISLYLAIEKLKNNYNLQKPIIKNFIGGVSTGIVENKALLDLDYREDSEAQVDANFVICDSDEISEIQVTGEEFFFNDAQFTEMFSLAKIGVKEIISKQKEALK

SEQ ID NO: 133450 - protein, 235 aa, Unknown
  Bacterial polypetide isolated from the Sargasso Sea
MPRSSSRGLDDLRSLSIETDVNLHAEGSALIKWGNTHVLCTVSIEHGVPRWMRNSEKGWLTAEYGMLPRSTHERMGREAARGKQSGRTQEIQRLIGRSLRQAVNLKYLCEKTIQIDCDVIQADGGTRTASITGACVALFSAIKNHHDDQRAMHQLVSAVSLGIKDDEILVDLDYEEDSAADTDLNIVMTEDQNIIEIQGTAEHAPFSVDQLHTIVSKAKVATDKIIRIQKEALKL

SEQ ID NO: 133451 - protein, 236 aa, Unknown
  Bacterial polypetide isolated from the Sargasso Sea
MRKDRSFNQMREISFEKNVNIHADGSCLVKFGNTHVLCLATIDDKVPRWLKNTGKGWVTAEYGMLPRSTNTRMDREAAKGKQSGRTQEIQRLIGRSLRSIVDLSNLGERQIKIDCDVIQADGGTRTAAISGGFVSLYIAIEKLKNSYNIQKPIIKNYIGAVSAGIIDQKAMLDLNYEEDSKAQVDANFVICDTGEISEIQVTGEEYFFSNNEFSEIFELAKKGIKEIIEIQKKALD

SEQ ID NO: 133452 - protein, 272 aa, Unknown
  Bacterial polypetide isolated from the Sargasso Sea
MKTGVGSTGRENDEIREIEVKLDFTPNALSSLLYSQGDTQVLVCVTKAPSLPRWFPRDSDRGWVHAEYSLLPGSTDTRFRRERSGAKGRTMEIERLVARSLRGAVDLEQLGPVALTVDCDILNADGGTRCASITAANIALRLAVRRLISSGECLPKDRRLTREQIRKGAKQETLSKEQMASHEDSVMPNDVAALSVGMVEGQIWTDLDYVLDSNADVDMNVVMTSSGDFVEVQGTGEEATYSREELDSLIDAAEAGIAKLHKFQTEVLSNAS

SEQ ID NO: 133453 - protein, 238 aa, Unknown
  Bacterial polypetide isolated from the Sargasso Sea
MRKDRDFDEIREIVFETNINIHAEGSCLVKFGNTQVICTASIDEKTPPWLRGSGKGWVTAEYGMLPRSTNTRIDRESARGKQSGRTQEIQRLIGRSLRSVVNLENLGERQIKIDCDVVQADGGTRTAAISGSFVALYLAIDKLKKNYNIAKPIIKNFVAAISVGIIANKVFVDLDYSEDSKAEVDANFVICDNSKISEIQATGEEYFFSEAQYQEMFKLAKLSVEKIITKQKNILNLN

SEQ ID NO: 133454 - protein, 234 aa, Unknown
  Bacterial polypetide isolated from the Sargasso Sea
MKRSNDRAFDQLRDVNVETGIISNAEGSALIKFGNTHVICTASIENSVPRWMKNSNEGWITAEYGMLPRSTHERMGREAARGKQSGRTQEIQRLIGRSLRQSVNLEYLKDHTITIDCDVIQADGGTRTASITGGCIALFSAIQNKLKDHRAIKKHVSAISIGLLNDQPILDLDYTEDSSAETDLNLVMDEDNGIIEIQGTAEEKPFSNEQLEQMLDIGKKGISHLIELQKKCLN

SEQ ID NO: 133455 - protein, 237 aa, Unknown
  Bacterial polypetide isolated from the Sargasso Sea
MRPSNRTPAQTRPITITRQFTAHAEGSVLVEFGETKVLCTASFTEGVPRFLKGQGQGWVTAEYGMLPRSTHSRMDREAARGKQSGRTQEIQRLIGRALRACVDMKALGENTIVIDCDVIQADGGTRTASITGACVALVDALNWARGKGIIKSNPLKFLIAAVSVGIYNGEAISDLEYVEDSAAETDMNVVMTETGKIIEIQGTAEGEPFSHEELIELLGLAKNSIREIVDVQKAALN

SEQ ID NO: 133456 - protein, 218 aa, Unknown
  Bacterial polypetide isolated from the Sargasso Sea
SQQAIHESSALQLSRKRFRCFLQLPENDYKHGWVTAEYGMLPGSTGKRKRRERPQVDGRTQEIQRLIGRSLRSVVDLKALGRHTVWIDCDVIQADGGTRTASITGGFVALILALRQMQAEGRFKTFPVSRFLASISVGIFEGRPLLDLKYDEDVKAEVDMNIVMLDNGDYVEVQGTAEGQTFPRKQLNQLLDYAEKGIQSHLQNQKKLLGEHLESGVS

SEQ ID NO: 133457 - protein, 165 aa, Unknown
  Bacterial polypetide isolated from the Sargasso Sea
MSRDNRKPTQAREISIDTNVNLHAEGSVLVKFGNTHVICTASIDNNVPRWMKGSDKGWVTAEYGMLPRSTNERMGREAARGKQSGRTQEIQRLIGRSLRQSVNLKYLKDKTIQVDCDVIQADGGTRTASITGGCVALFLAIKNHHDDQRAIEQYVAAISLGVKDD

SEQ ID NO: 133458 - protein, 248 aa, Unknown
  Bacterial polypetide isolated from the Sargasso Sea
MKILSDNKLIRPSGRSFDELRKIEFVPNFISHAEGSCFVKYGETHVLCTASVEERVPVFLKSSGKGWVTAEYGMLPRSTHTRSGREASRGKQSGRTLEIQRLIGRSLRSIIDLKELGERQIIIDCDVIQADGGTRTASITGGWIALSYAVKKLIQINKLKSNPIIGQICAVSCGIWNGFSVLDLDYSEDSSAEVDTNFVITSDQKLVEIQISSESEPFERKKMNELTDLAIIGTSKIIDLQLKALNDS

SEQ ID NO: 133459 - protein, 128 aa, Unknown
  Bacterial polypetide isolated from the Sargasso Sea
MRKDRNFDEIREIVFETNINMHAEGSCLVKFGNTQVICTASIDEKTPPWLRGSGKGWVTAEYGMLPRSTNTRIDRESARGKQSGRTQEIQRLVGRSLRSVVKLENLGERQIKIDCDVIQADGGTRTAA

SEQ ID NO: 133460 - protein, 243 aa, Unknown
  Bacterial polypetide isolated from the Sargasso Sea
MTSSVSRPSGRRADALRKVALTRHYTKHAEGSVLVEFGDTKVLCTASVSERVPDFLRDRGQGWLTAEYGMLPRATHTRSDREAARGKQTGRTQEIQRLIGRALRAVFDLEALGPRTIHIDCDVIQADGGTRTASITGAFVAAHDAVSKLIAAGKLTRSPITDHVAAISVGVYQGAPVLDLDYAEDSQCDTDMNVVMTGAGGFVEVQGTAEGVPFSRAEMNALLDLAQGGIAELVQLQKDVLGA

SEQ ID NO: 133461 - protein, 236 aa, Unknown
  Bacterial polypetide isolated from the Sargasso Sea
MRKDRSFNQMREISFEKNVNIHADGSCLVKFGNTHVLCLATIDEKVPHWLKNTGKGWVTAEYGMLPRSTNTRMDREAAKGKQSGRTQEIQRLIGRSLRSIVDLSNLGERQIKIDCDVIQADGGTRTASISGGFISLYLAIEKLKNNYNLQKPIIKNFIGAVSTGIVENKALLDLDYREDSEAQVDANFVICDSNEISEIQVTGEEFFFNDAQFTEMFSLAKIGVKEIISKQKEALK

SEQ ID NO: 133462 - protein, 144 aa, Unknown
  Bacterial polypetide isolated from the Sargasso Sea
IARSLRAAVDLKLLGENTITLDCDVIQADGGTRTASITGACVALVDALTYMRAKGIIKTNPLKHMIAALSVGIYEGTPIADLEYTEDSEAETDMNIVMTETGKLIEVQGTAEGEPFSFEELDEMLKIGKHGLRELFDIQKAALA

SEQ ID NO: 133463 - protein, 235 aa, Unknown
  Bacterial polypetide isolated from the Sargasso Sea
MHRLDKRKYDQLREVSIIPDYNKHAEGSALIKFGDTHVICNASVEKAVPRWMQDKKTGWVTAEYGMLPRSTNERMNREAQRGKQSGRTMEIQRLIGRSLRQVVNLDQLTGYTITIDCDVIQADGGTRTASITGGAIALCKALKKIGKENSINNLVAAISVGIYKDELILDLNYEEDSNAQCDVNIVMNDKLDFIEVQGTGEEKAFSKEQFNGLLDLAESGIKDLFKLQHEIINSK

SEQ ID NO: 133464 - protein, 237 aa, Unknown
  Bacterial polypetide isolated from the Sargasso Sea
MRNNRNINQLRDIEIIPNFSYNPEGSCLIKCGDTHVICSASLDRNLPRWLKNSETGWVTAEYGMLPRSTSERMSREAAKGKQSGRTQEIQRLIGRSLRSIVNLEDLRELQIIIDCDVIQADGGTRTASISGSFIALQLCINHMLNKKIIKKNPISEYVAAISCGIINGEPYLDLDFEEDQNAEVDANFVITESGKLVEVQMTSEKKLCEERSFNAMLELAKSGISEIIQMQKKILSD

SEQ ID NO: 133465 - protein, 125 aa, Unknown
  Bacterial polypetide isolated from the Sargasso Sea
IVDCDVIQADGGTRTASITGGYIALYDAVNRAMADGLITSNPIKAKIASISVGIYQGEVLLDLNYKEDSAADTDMNVVMDENFSFIEIQGTSEKRPFTNQELNGMLDLARKGISKLFEYQEKVIG

SEQ ID NO: 133466 - protein, 228 aa, Unknown
  Bacterial polypetide isolated from the Sargasso Sea
MREISFETGVNIHAEGSCLVKFGNTHVLCTASVDEKTPHWLKNSGKGWVTAEYGMLPRSTNSRIDREATKGKQTGRTQEIQRLIGRSLRSIINLKNLGERQIKIDCDVIQADGGTRTASISGGFVALYQAVDLVKKNFNIEKTIIKEFIAGVSVGVINDKPNLDLDYEEDSKAQVDGNFVICESGKIAEIQTTGEEYFFSREQYNMLFDLASEGVSKIIEKQKKCLSV

SEQ ID NO: 133467 - protein, 195 aa, Unknown
  Bacterial polypetide isolated from the Sargasso Sea
MRIDNRDNNELRDIVINKNIQFQSDGSCIISLGNTQVVCAVRYENKVPPFLKGFGKGWVTAEYSMMPGSTNTRTNRNNTNSGRSKEIQRLIGRSLRAVLDLNQIGENSLIVDCDVLNADGGTRTASVIGSVIALQNAIVKLQKSKALPNNIDFNPIAAISVGIVNNEVMLDLNYSEDSQAIADFNFVMDTNGNII

SEQ ID NO: 133468 - protein, 161 aa, Unknown
  Bacterial polypetide isolated from the Sargasso Sea
MRKNNRKLDQARKLTILPNYQKNSIGSVLINFEDTRVICSTNISRNVPRWLLNENRGWVTAEYSMLPNSSEDRISRDRGGRISGRTQEIQRLIGRSLRQAINLDLIPGILITVDCDVLNADGGTRTASITGSFIATYMALKNYYNSSPKKFIKNQIAAISV

SEQ ID NO: 133469 - protein, 237 aa, Unknown
  Bacterial polypetide isolated from the Sargasso Sea
MRPSNRTPAQTRPITITRQFTAHAEGSVLVEFGETKVLCTASFTEGVPRFLKGQGQGWVTAEYGMLPRSTHSRMDREAARGKQSGRTQEIQRLIGRALRACVDMKALGENTIVIDCDVIQADGGTRTASITGACVALVDALNWARGKGIIKSNPLKFLIAAVSVGIYNGEAISDLEYVEDSAAETDMNVVMTETGKIIEIQGTAEGEPFTHEELIELLGLAKNSIREIVDVQKAALN

SEQ ID NO: 133470 - protein, 237 aa, Unknown
  Bacterial polypetide isolated from the Sargasso Sea
MRPSGRTASQIRPITFTRQFTAHAEGSVLVEFGNTKVICTASVIEGVPRFMKGQGKGWITAEYGMLPRATHTRNDREAARGKQGGRTMEIQRLIGRALRTAVDLKLLGENTITIDCDVIQADGGTRTASITGACVALVDALNFMRAKGMIKTNPLNFMVAAVSVGVYKGTAVADLDYAEDSNAETDMNIVMTETGKIIEIQGTAEEAPFSFEEMQQMMELGKHAIREIIDEQKRVLA

SEQ ID NO: 133471 - protein, 246 aa, Unknown
  Bacterial polypetide isolated from the Sargasso Sea
MNKTLLERHSKRKSNQARKIHITKDYINNADASCLINVGKTSIICTASIETKIPNWLKGSRKGWLTAEYSMLPASTHTRNNRESAQGKQSGRTLEIQRLIGRSLRASLDLEKLQELQIKIDCDVINADGGTRTASITGGWVVLKMLVESLIKNKTLKNNPIKDQIAAISCGIFKGEEILDLDYFEDSNTEIDANFVVSKSKNLIEVQTTAEKGGFTKTQLNTLIDMACKECGNLFSIQSEVIKNEK

SEQ ID NO: 133472 - protein, 261 aa, Unknown
  Bacterial polypetide isolated from the Sargasso Sea
LNIKVIKKLYLYIMKILSDNKLIRPSGRSFDELRKIEFIPNYIRHAEGSCFVKYGETHVLCTASIEERVPIFLKNSGKGWVTAEYGMLPRSTHTRSGREASRGKQSGRTLEIQRLIGRSLRSIIDLKALGERQIIVDCDVIQADGGTRTASITGGWIALSYAVKKLIQINKLNFNPIISQICAVSCGIWKGFSILDLDYSEDSSAEVDTNFVITSDQKLVEIQISSESEPFEREKMNELTDLAIMGTSKIIDLQLKALNDS

SEQ ID NO: 133473 - protein, 234 aa, Unknown
  Bacterial polypetide isolated from the Sargasso Sea
MTRKNNRSNNEMRPLKIEVGVNKHAEGSALIKFGDTHVICTASIENHVPRWMRGSNEGWITAEYGMLPRSTHERMNREAARGKQSGRTMEIQRLIGRSLRQAVDLKYLKDKTINIDCDVIQADGGTRTASISGACVALFAAIKNSHDDQRAIKEHVAAISIGLKDGFPLLDLDYEEDSSADTDLNVVMTESGGIIEIQGTAEKNPFAKDQLDEMIESASEGISDIIALQKSCLA

SEQ ID NO: 133474 - protein, 244 aa, Unknown
  Bacterial polypetide isolated from the Sargasso Sea
MVDPSETRADGRRPDALRPFEVSWDPMGFALSSLIVRTGRTAVLCSVCLEETVPRWRKGNGLGWISAEYRLLPGSTPQRQSRELLKLSGRTQEIQRLIGRSLRAAVDLEALGERSLLIDCDVIQADAGTRTASVTGAWMALQLACDRLIAQGILERQPIRSQVAAVSVGLLEGRPLLDLDYSEDSRADVDLNVVASGDGSLLEIQGTAEGAPFSRGQLNVLLDLAQPGLDALLAAQSHALSSRS

SEQ ID NO: 133475 - protein, 234 aa, Unknown
  Bacterial polypetide isolated from the Sargasso Sea
MVRNKDRNHNQLRDISIETNINIHAEGSALISFGNTKVICNASIENNVPRWMKNSDEGWVTGEYGMLPRSTNERMGREAARGKQSGRTQEIQRLIGRSLRQAVNLKYLKGKTINVDCDVIQADGGTRTASITGGCIALFLAIKNHHDDQRAIKSFVAAVSMGIKDNKLLLDLDYDEDSTADTDLNIVMNDKDELIEIQGTAEDAPFSKNELSDMLKLGSSAIAEIIKKQKACIE

SEQ ID NO: 133476 - protein, 234 aa, Unknown
  Bacterial polypetide isolated from the Sargasso Sea
MKRNQERPLNKLREISLEININIHAEGSVLVSFGNTKVICTASIEHKVPRWMKNSDEGWVTAEYGMLPRSTNERMGREAARGKQSGRTQEIQRLIGRSLRQAVNLKYLKGKTINIDCDVIQADGGTRTAAITGGCVALFLAINNYHDDKRAIKSYVAAVSLGVKDNNVLLDLDYSEDSSADTDLNIVMNDKDELIEIQGTAEDVPFSKNELNDMLKLGSSAIAELIEKQKACIE

SEQ ID NO: 133477 - protein, 187 aa, Unknown
  Bacterial polypetide isolated from the Sargasso Sea
MRPSERKNNEMRTISFETGVSKHAEGSCLVKFGDTHVLCTASVENRVPPWLRNSGSGWVTAEYGMLPRSTGDRMRREASVGKQSGRTQEIQRLIGRSLRSVIDLDQLGENQISIDCDVIQADGGTRTASISGAFIALKHSVNFLMESNEIKKDPIREYLGAVSCGIYRGKPILDLDYKEDSEAEADA

SEQ ID NO: 133478 - protein, 201 aa, Unknown
  Bacterial polypetide isolated from the Sargasso Sea
WNTKVICNATIENNVPRWMKNSDEGWVTGEYGMLPRSTNERMSREAARGKQSGRTLEIQRLIGRSLRQAVNLKYLKGKTINVDCDVIQADGGTRTASITGGCVALFLAIKNHHDDQRAINSLVAAVSLGIKDNKILLDLDYDEDSTADTDLNIVMNEKDELIEIQGTAEDSPFSKSELSDMLHLGSSAIAEIVKKQKACIE

SEQ ID NO: 133479 - protein, 206 aa, Unknown
  Bacterial polypetide isolated from the Sargasso Sea
MTKFGNTHVICNATIEKAIPRWMTDVKTGWVTAEYGMLPRSTNERMNREAQRGKQSGRTLEIQRLIGRSLRQVVDLKKLTGYTITVDCDVIQADGGTRTASITGGTVALCLALKKINMEDAINNLVAAVSVGVNNKTCLLDLNYEEDSSADSDINIVMNENLDLIEVQGTAEEKPFSKEEFSTLINLAENGIKDLISLQREIIEDK

SEQ ID NO: 133480 - protein, 234 aa, Unknown
  Bacterial polypetide isolated from the Sargasso Sea
MKRNQDRPLNKLREISLEININIHAEGSVLVSFGNTKVICTASIEHNVPRWMKNSDDGWVTAEYGMLPRSTNERMGREAARGKQSGRTQEIQRLIGRSLRQAVNLKYLKGKTINIDCDVIQADGGTRTAAITGGCVALFLAINNHHDDKRAIKSYVAAVSLGVKDNNVLLDLDYSEDSSADTDLNIVMNDKDELIEIQGTAEDVPFSKNELNDMLKLGSSAIAELIEKQKACIE

SEQ ID NO: 133481 - protein, 235 aa, Unknown
  Bacterial polypetide isolated from the Sargasso Sea
MQRKDKRSNDQLREISIVPDFNMHAEGSALVKFGNTHVICNASVEKATPRWMQNDKTGWVTAEYGMLPRSTNERMNREANRGKQSGRTMEIQRLIGRSLRQAVDLDKLTGYTITIDCDVIQADGGTRTASITGGTVALYKALQKIEKEDAIKNLVAAISVGICKDELLLDLDYEEDSNAQCDVNIVMNEALELIEVQGTGEEKAFSKEQFKDLVDLAENGLKDLFTLQKEVIKNG

SEQ ID NO: 133482 - protein, 82 aa, Unknown
  Bacterial polypetide isolated from the Sargasso Sea
MSRDNRKSTEAREISIETNVNLHAEGSVLVKFGNTHVICTASIDNSVPRWMKGSNKGWVTAEYGMLPRSTNERMGREAARGK

SEQ ID NO: 133483 - protein, 234 aa, Unknown
  Bacterial polypetide isolated from the Sargasso Sea
MSRDNRKPTQAREISIETNVNLHAEGSVLVKFGNTHVICTASIDNNVPRWMKGSDKGWVTAEYGMLPRSTNERMGREAARGKQSGRTQEIQRLIGRSLRQSVNLKYLKDKTIQVDCDVIQADGGTRTASITGGCVALFLAIKNHHDDQRAIEQYVAAISLGVKDDEILVDLDYQEDSTADADINIVMTQDLDLIEIQGTAEERPFSQEQLTEIVSKASSSIKDIVAIQKQAVEG

SEQ ID NO: 133484 - protein, 436 aa, Unknown
  Bacterial polypetide isolated from the Sargasso Sea
MDNLSEKIKQLRNEYSDSDFLIEHLDKNPVKQFTNWLDDAIETKIYEPNAMVLATSVDNQPRSRYVLFKNIVEDKLIFHTHYESPKALEMLENPNISGIFYWAEIHRQVRFQGIAKKADKTISDEYFSTRPRGGQLSAWASDQSSIIKNREEVTNKIAELDKKFENQEVPRPDFWGGFEIEVNYWEFWQGRRNRTHDRFCYTQNTQRLEYRKDVSIMREIKVTKNFINSAENSVLYESGNTKVLVTVSVTDRVPDWLSNSEKGWVTAEYNMLPGSSGNRISRKSFESGRSKEISRLIGRSLRAVCNLGIINGYSFTIDCDVLEADGGTRTASINGAWIALNDTFTKMVNENKLVQNPLTSKVGAISVGIVNGEIVADLDYAKDSNADVDLNLVLDEKFEILEIQGTAEGKPFSKDNLDSLFNIAKECVEEIFKIQN

SEQ ID NO: 133485 - protein, 238 aa, Unknown
  Bacterial polypetide isolated from the Sargasso Sea
MRPSDRKNNEMRTISFETGVSKHAEGSCLVKFGDTHVLCTASVENRVPPWLRNSGSGWVTAEYGMLPRSTGDRMRREASVGKQSGRTQEIQRLIGRSLRSVIDLNQLGENQISIDCDVIQADGGTRTASISGAFIALKHSVNFLMESNEIKKDPIREYLGAVSCGIYRGKPILDLDYKEDSEAEADANFVITEKNKIIEIQATAEKYPFSEKMFSELMDLAKSGIEEIIKKQKGVLEN

SEQ ID NO: 133486 - protein, 200 aa, Unknown
  Bacterial polypetide isolated from the Sargasso Sea
MREKRTFKEMREISFETGVNIHAEGSCLVKFGNTHVLCTASVDEKTPHWLKNSGKGWVTAEYGMLPRSTNSRIDREAAKGKQSGRTQEIQRLIGRSLRSIINLKNLGERQIKIDCDVLQADGGTRTASISGGFVALYQAVDLVKKNFNIEKPIIKEFIAGVSVGIIDDKPNLDLDYEEESKAQVDGNFVICESGKIAEIQ

SEQ ID NO: 133487 - protein, 238 aa, Unknown
  Bacterial polypetide isolated from the Sargasso Sea
MRNTRKTSDLRKFEIIPNFSSYPEGSCMIKFGETHVLCNASLDQNVPRWLKNSQQGWVTAEYGMLPRSTSERMSREAVRGKQSGRTQEIQRLIGRSLRAVTDLSLLKDMQILIDCDVIQADGGTRTASISGAFVALQLCIQSMIGKKIIKTNPIKENLAAISCGIVDNVPLLDLDFIEDQNAEVDANFVITETNKIVEIQMTSEKKLCTENEFNSMFELAKSGISQIIQSQKILLEGK

SEQ ID NO: 133488 - protein, 234 aa, Unknown
  Bacterial polypetide isolated from the Sargasso Sea
MSRNQDRNHNQLREVTIEPNVNIHSEGSVLVSFGNTKVICNASIENNVPRWMKNSDEGWVTGEYGMLPRSTNERMSREAARGKQSGRTLEIQRLIGRSLRQAVNLKYLKGKTINVDCDVIQADGGTRTASITGGCVALFLAIKNHHDDQRAINSFIAAVSLGVKDNKILLDLDYDEDSTADTDLNIVMNEDLDLIEIQGTAEDTPFSKTELNDMLEIGSSAIAEIIKKQKACIG

SEQ ID NO: 133489 - protein, 238 aa, Unknown
  Bacterial polypetide isolated from the Sargasso Sea
MRPSDRKNNEMRSISFETGVSKHAEGSCLVKFGDTHVLCTASVENRVPPWLRNSGSGWVTAEYGMLPRSTGERMRREASVGKQSGRTQEIQRLIGRSLRSVIDLDQLGENQISIDCDVIQADGGTRTASISGAFIALKQSVNFLLTSKEIKKDPIKEYLGAVSCGIYRGKPILDLDYKEDSAAEADANFVITDKNKIIEIQATAEQYPFSEKMFLELMMLAKSGIEEIIKKQKDVLEN

SEQ ID NO: 133490 - protein, 161 aa, Unknown
  Bacterial polypetide isolated from the Sargasso Sea
MRNNRNINQLRDIEIIPNFSYNPEGSCLIKCGDTHVICSASLDRNLPRWLKNSETGWVTAEYGMLPRSTSERMSREAAKGKQSGRTQEIQRLIGRSLRSIVNLEDLRELQIIIDCDVIQADGGTRTTSISGSFIALQLCINHMLNKKIIKKNPISEYVAAI

SEQ ID NO: 133491 - protein, 240 aa, Unknown
  Bacterial polypetide isolated from the Sargasso Sea
MARTNNRRPDELRSVHFTRAYSRHAEGSVLVEFGDTRVLCTASVEERVPRFLKGSQQGWITAEYGMLPRATGERMAREAARGKQGGRTLEIQRLIGRSLRAALDLKALGERTVTLDCDVIQADGGTRTASITGAWVALADALDHLHEQGLLDATVPLHQIASVSVGLQQGEVLLDLDYSEDSTADTDMNFVMNDEKRFIEIQGTAEHSPFSEAEMQKMTAIAVRGIEELMRLQRLARETD

SEQ ID NO: 133492 - protein, 236 aa, Unknown
  Bacterial polypetide isolated from the Sargasso Sea
MRKDRSFNQMREISFEKNMNIHADGSCLVKFGNTHVLCLASIDEKVPHWLKNTGKGWVTAEYGMLPRSTNTRMDREAAKGKQSGRTQEIQRLIGRSLRSIVDLSNLGERQIKIDCDVIQADGGTRTASISGGFISLYLAIEKLKNNYNLQKPIIKNFIGAVSTGIVENKALLDLDYREDSEAQVDANFVICDSDEISEIQVTGEEFFFNDAQFTEMFSLAKIGVKEIISKQKEALK

SEQ ID NO: 133493 - protein, 234 aa, Unknown
  Bacterial polypetide isolated from the Sargasso Sea
MSRNQDRNHNQLREVTIEPNVNIHSEGSVLVSFGNTKVICNASIENNVPRWMKNSDEGWVTGEYGMLPRSTNERMSREAARGKQSGRTLEIQRLIGRSLRQAVNLKYLKGKTINVDCDVIQADGGTRTASITGGCVALFLAIKNHHDDQRAINSFIAAVSLGIKDNKILLDLDYDEDSTADTDLNIVMNEDLDLIEIQGTAEDTPFSKTELNDMLEIGSSAITEIIKKQKACIE

SEQ ID NO: 133494 - protein, 132 aa, Unknown
  Bacterial polypetide isolated from the Sargasso Sea
LGENTLYVDCDVIQADGGTRTASITGAMVALIDALKVLKKRGSLKGEPLKQMIAAVSVGIYQGEPVLDLDYLEDSAAETDLNVVMTNAGGFIEVQGTAEGAPFQPDEFNAMLALAQKGMNEIFELQKAALVD

SEQ ID NO: 133495 - protein, 236 aa, Unknown
  Bacterial polypetide isolated from the Sargasso Sea
MRKDRAFDELREIAFETNINIHAEGSCLVRFGNTHVICTASIDEKTPPWLRGSGKGWVTAEYGMLPRSTNTRIDRESAKGKQSGRTQEIQRLIGRSLRSVVDLNSLGERQVKIDCDVVQADGGTRTASISGGFVALYLAIDKLKKSYNIEKPIIKNFVAAISAGIIDNKARVDLDYNEDSAAEVDANFVICDNGKISEIQATGEEYFFSEEQYQDMFKLAKTGIEKIIAKQKKCLI

SEQ ID NO: 133496 - protein, 184 aa, Unknown
  Bacterial polypetide isolated from the Sargasso Sea
MKGSDKGWVTAEYGMLPRSTNERMGREAARGKQSGRTQEIQRLIGRSLRQSVNLKYLKDKTIQVDCDVIQADGGTRTASITGGCVALFLAIKNHHDDQRAIDQYVAAISLGIKDDEILVDLDYQEDSTADADINIVMTQDLDLIEIQGTAEERPFSQEQLTEIVSKASSSIKDIVAIQKQAVEG

SEQ ID NO: 133497 - protein, 95 aa, Unknown
  Bacterial polypetide isolated from the Sargasso Sea
MRSISFETNVNIHAEGSCLVKFGNTHVMCTASVEDKTPHWLKNTGKGWITAEYGMLPRSTNTRIDRESAKGKQSGRTQEIQRLIGRSLRSVTNLE

SEQ ID NO: 133498 - protein, 235 aa, Unknown
  Bacterial polypetide isolated from the Sargasso Sea
MQRKEKRSNNQLREISIIPGFNMHAEGSALVKFGNTHVICNATVEKATPRWMQNDKTGWVTAEYGMLPRSTNERMNREANRGKQSGRTMEIQRLIGRSLRQAVDLEKLTGYTVTVDCDVIQADGGTRTASITGGTVALYKALKKINKAEAIKSLVAAISVGIRNDELLLDLDYDEDSNAQCDVNIVMNEQLELIEVQGTGEEKAFSKEQFKDLVDLAESGLKDLFLLQNEIIKNG

SEQ ID NO: 133499 - protein, 235 aa, Unknown; identical to SEQ ID NO: 133481
  Bacterial polypetide isolated from the Sargasso Sea

SEQ ID NO: 133500 - protein, 201 aa, Unknown
  Bacterial polypetide isolated from the Sargasso Sea
PGSTDTRFRRERSGAKGRTMEIERLVARSLRGAVDLEQLGPVALTVDCDILNADGGTRCASITAANIALRLAVRRLISSGECLPKERRLTRDQIRKGVKQETLSKEQMASHEDSVMPNDVAALSVGMVEGQVWTDLDYVLDSNADVDMNVVMTSSGDFVEVQGTGEEATYSREELDSLIDAAEAGIAKLHKLQTEVLSNAS

SEQ ID NO: 133501 - protein, 234 aa, Unknown
  Bacterial polypetide isolated from the Sargasso Sea
MKRNQDRSHNQLREVTIEPNINIHSEGSVLVSFGNTKVICNASIENNVPRWMKNSNEGWVTGEYGMLPRSTNERMSREAARGKQSGRTLEIQRLIGRSLRQAVNLKYLKGKTINVDCDVIQADGGTRTASITGGCVALFLAIKNHHDDQRAINSFIAAVSLGIKDNKILLDLDYDEDSTADTDLNIVMNEDLDLIEIQGTAEDTPFSKTELNDMLEIGSSAIAEIIKKQKACIG

SEQ ID NO: 133502 - protein, 234 aa, Unknown
  Bacterial polypetide isolated from the Sargasso Sea
MERIDNRNHNQLRDITIEPNVNIHAEGSVLISFGNTKVICNASIENNVPRWMKNSDEGWVTGEYGMLPRSTNERMSREAARGKQSGRTQEIQRLIGRSLRQAVDLKYLKGKTINVDCDVIQADGGTRTASITGGCVALFLAIKNHHDDQRAIKSFVAAVSLGIKENKVLLDLNYEEDSTADTDLNIVMNDKNQIIEIQGTAEDAPFSKTELSDMLELGSSAINEIIERQKACIE

SEQ ID NO: 133503 - protein, 227 aa, Unknown
  Bacterial polypetide isolated from the Sargasso Sea
MKRNQDRSNNQLRDITIEPNINIHAEGSVLISFGNTKVICNASIENNVPRWMKNSDEGWVTGEYGMLPRSTNERMSREAARGKQSGRTQEIQRLIGRSLRQAVNLKYLKGKTINVDCDVIQADGGTRTASITGGCVALFLAIKNHHDDQRAIKSFVAAVSMGIKENQVLLDLDYDEDSTADTDLNIVMNDKDELIEIQGTAEDAPFSKKELDDMLVMGSQAIADIIK

SEQ ID NO: 133504 - protein, 224 aa, Unknown
  Bacterial polypetide isolated from the Sargasso Sea
MRPSGREVDQIRKLNIELSYLDHVPGSVLISMGTTKVLCTASIEASVPGFLRGTGQGWLTAEYGMLPAATNTRNDREAARGKQTGRTIEIQRLIGRSLRAMLQLEKLGEKTVTVDCDVLQADGGTRTASITGGAVALCVALKSMGLEEAMQGLVSAVSVGIYQGQAVLDLDYAEDSNAETDMNVVQLNGSGFIEIQGTAEGRAFSAADLDSMLSVAQKRYGRDF

SEQ ID NO: 133505 - protein, 238 aa, Unknown
  Bacterial polypetide isolated from the Sargasso Sea
MRPSDRKNNEMRTISFETGVSKHAEGSCLVKFGDTHVLCTASVENRVPPWLRNSGSGWVTAEYGMLPRSTGDRMRREASVGKQSGRTQEIQRLIGRSLRSVIDLDQLGENQISIDCDVIQADGGTRTASISGAFIALKHSVNFLMESNEIKKDPIREYLGAVSCGIYRGKPILDLDYKEDSEAEADANFVITEKNKIIEIQATAEQYPFSEKKFSELMDLAKSGIEEIIKKQKSVLEN

SEQ ID NO: 133506 - protein, 152 aa, Unknown
  Bacterial polypetide isolated from the Sargasso Sea
KASGRTQEIQRLIGRSLRQAVNLKYLKGKTINIDCDVIQADGGTRTAAITGGCVALFLAINNHHDDKRAIKSYVAAVSLGVKDNFIMLDLDYSEDSSADTDLNIVMNDENNLIEIQGTAEDVPFSKNELDDMLELGSSAIAELIKKQKACIE

SEQ ID NO: 133507 - protein, 234 aa, Unknown
  Bacterial polypetide isolated from the Sargasso Sea
MKRNQDRSNNQLRDITIEPNINIHAEGSVLISFGNTKVICNASIENNVPRWMKNSDEGWVTGEYGMLPRSTNERMSREAARGKQSGRTQEIQRLIGRSLRQAVNLKYLKGKTINVDCDVIQADGGTRTASITGGCLALFLAIKNHHDDQRAIKSFVAAVSMGIKENQVLLDLDYDEDSTADTDLNIVMNDKDELIEIQGTAEDAPFSKKELDDMLVMGSQAIADIIKKQKACIE

SEQ ID NO: 133508 - protein, 195 aa, Unknown
  Bacterial polypetide isolated from the Sargasso Sea
NASVEKATPRWMQNDKTGWVTAEYGMLPRSTNERMNREANRGKQSGRTMEIQRLIGRSLRQAVDLDKLTGYTITIDCDVIQADGGTRTASITGGTVALYKALQKIGKEDAINNLVAAISVGICKDALLLDLDYAEDSNAQCDVNIVMNEQLELIEVQGTGEESAFSKEQFKDLIDLAENGLKDLFVLQNEVIKNG

SEQ ID NO: 133509 - protein, 206 aa, Unknown
  Bacterial polypetide isolated from the Sargasso Sea
VLISFGNTKVICNASIENNVPRWMKNSDEGWVTGEYGMLPRSTNERMSREAARGKQSGRTQEIQRLIGRSLRQAVNLKYLKGKTINVDCDVIQADGGTRTASITGGCVALFLAIKNHHDDQRAIKSFVAAVSMGIKENQVLLDLDYDEDSTADTDLNIVMNDKDELIEIQGTAEDAPFSKKELDDMLVMGSQAIADIIKKQKACIE

SEQ ID NO: 133510 - protein, 291 aa, Unknown
  Bacterial polypetide isolated from the Sargasso Sea
LLEQRLVDGDHATAKELEKRLWSELFNSTAKDYISAKLQERELRHKKQGGQRYMVEPNVKEGKGGLRDLQSLFWIAKYLYQVKEQADLVKLGMLLKDEFAKFQQAENFLWAVRCHLHIFTQRPTDQLSFDLQVEVSERMGYKDTKARRAVELFMQDYFIHATRVGDITRIFLTALEAKHVKEMPLLQRIFRRLPQIKGPYIVSQNRLSVKSFDEFLRDKLNLLRLFEEALRTGLLIHPDAMRAVSANIHLFDEQMRQDKEAQRIFMDLLIKHGNPERALRRMNELGALAAF

SEQ ID NO: 133511 - protein, 254 aa, Unknown
  Bacterial polypetide isolated from the Sargasso Sea
MKDISQIKKKYQSNKVKLFQKLASTNDGFYFNKNHTDLVDTVVKEIVKGIYNIYPIEDFSLIAVGGYGRHDLSPKSDVDLLFIYKKSNKNIRDFITQLNNTLWDIGLEVGISFLTIKQALIDSKKDIKTITKFVETRFIIGDEIQYGEFVRSIKILIGKQNPLKLSELKLIELVDRHDYRIGIKSNLEPNIKEGIGGLRDIHTILWVSIFMFNIYKLEDLTSVNIYTKEEIKELKNAWKFLLTIRAFIHLFNES

SEQ ID NO: 133512 - protein, 265 aa, Unknown
  Bacterial polypetide isolated from the Sargasso Sea
MLWDAGFSIGHATRSVNEVLKDSKKDITIRTSILDRRFIEGNRFLYEELENKFKNFQKKSIPIFIKSKLAERENRHLKMGGSRYMLEPNIKEGKGTLRDLHTLFWIAKYVYGLNNFFDIKGINISLKSELKRFIRAQKFLWSIRCHLHYLSNRNDNILNFDAQNKIALCFGYKNRKNILAVERFMKKFYLTVRDVGSLTRLICTEIDHIYSRKKLYPNQNKGEDFKRDNLVIEDGKVSIAGFVEIKKNPGVIFKLFKFAQERNLE

SEQ ID NO: 133513 - protein, 307 aa, Unknown
  Bacterial polypetide isolated from the Sargasso Sea
FRSKKQNIKLFLKLLKSKRLLVTQLENMKNLGILGRYLPEFGRITGQMQYDLFHIYTVDAHTLQVLRNMRWMSLGKSKEKFPLASQLIDKLPKLEVLYISGLYHDIGKGRGSDHSELGKTIVRNFCKKHFFSEEDTKKIEWLVENHLLMSVTSQKKDLADNEVIKDFAKKIKDQDTLNYIYCLTAADISATNPRLWNSWNASLLKQLYDRTKLYFEDEILLNTSITEEKAKAMELLGDFRKQDVKKLWNNFYGDYFEASDHQDLQIHAKNILLSKGMSNIKLFQKDADSLTTIFINTQDRANLLRQL

SEQ ID NO: 133514 - protein, 205 aa, Unknown
  Bacterial polypetide isolated from the Sargasso Sea
MNYVNEKTKLHLHQKLCFKKLKTKVDKQILLADLKAQLNEKKERIKRDFFKTSDGTLAVGLNSLLIDNLLKYLFNLTYKNDFNQKNSSVTIIAVGGYGRGELAPHSDIDILFLLPDKQNFLEKNISEKNIEEILYFLWDLGLTIGHSTRTIKETLKNLKIDLTFLTSLLDNRFVVGDKSSYASLISSFYKLRIKSKTLDFVRKKL

SEQ ID NO: 133515 - protein, 147 aa, Unknown
  Bacterial polypetide isolated from the Sargasso Sea
MEPIKYAKANANKLHEIDDFRIDEIDLNIFKKKLFDKLKKQINIKKDLIKETFLNTSDGSLNVGLNVILIDSLLKILFKKLYFHTFNSKDFIFSIIAVGGYGRGELAPHSDLDLLFLLPNNLKKNEIKKTEEVIQQILYVLWDLGYK

SEQ ID NO: 133516 - protein, 324 aa, Unknown
  Bacterial polypetide isolated from the Sargasso Sea
RGEFYPKSDTDLLILLDKTTKNDLKNIISKSLTFLWDIGIEASHSTRTINECIKESKRDISVGTSLLESRSVFGSKELFLEFQKKVLHKQSWKSEKFFSAKIQEQNDRHNSFNNTAYNLEPNIKDGPGGLRDAHTIFWIAKKLGYTSITDLKQDNVLNIDQIQLLQESWDLISKIRYALHLLAKRPEDRLLFDYQRVLANNLGYKDSEHLMAVEVFMQDYYKAAKTISRFNEICLQIFDQKINARRFIGKKNINKNFHIRNKLIGLRKGVEFKNHPSLLLEIFLHFQENNIIGIESKTINQILENLDLINDAFRDNLNNKKLSS

SEQ ID NO: 133517 - protein, 296 aa, Unknown
  Bacterial polypetide isolated from the Sargasso Sea
NSLFLEILASKKNPEKILRKMNESGFLGRFIPEFGKIVAQTQHDMYHLYTVDEHTIRAIGIMNKIESGELNNEHNFASIIAKKINSRRVLYLAIFLHDIAKGQPGDHSKIGEKIALNLCYRLGLDEEEVKAVAWLVRWHLLMSHTAFKRDLGDMKTIQDFSKLVVNKDRLDMLFLLTISDISAVGPNTWNAWKGQLLGNLYNSANALIEGSFDKTIEERTILSIKKLEKSLKTWSNADFSNFISLHHDSYWLSTDLQSQIRQAEVVKSQNFSNNKLKIKAYIDTINAVTEIIVYSP

SEQ ID NO: 133518 - protein, 304 aa, Unknown
  Bacterial polypetide isolated from the Sargasso Sea
MLRIVKPRLVIDRKALLVELDSLFEGKNPNSEDSAEILELFKNAKAKGWAEINRRFERDNVNSIEIIKAHAYLIDQLTRSICDFAVRNVFPSHNPTTGDRIALLATGGYGRGELAPFSDVDLMFLLPYKLTPRSEQLIEHTLYMLWDLGLKVGHATRSLSEALRLAKEDLTIRTSLLEARWLWGNTRLFSEFQARFRKEIIEPTKQDFVSAKLAERDDRHMKMDDSRYVLEPNVKEGKGALRDLQTLFWIIKYLYDTVSIENLLTKKILTKIDARLFKKATKFFWTVRCHLHYVSGRQEERLTF

SEQ ID NO: 133519 - protein, 81 aa, Unknown
  Bacterial polypetide isolated from the Sargasso Sea
MLPDAQLTRENCKEYLSRFLGWLHARFDAGDNIIKLVATRSEYMDELLTRLWQKFGFDKTELTLIAVGGYGRGELHPHSDI

SEQ ID NO: 133520 - protein, 240 aa, Unknown
  Bacterial polypetide isolated from the Sargasso Sea
DPFYIESGRVRLYENLRFRDDPLRIFRLFFIAQAYNADVHPVSLQRVTRGLPSVGTKIRQDPHANALFLDILTANKNSERVLRLMNECGVLGKFLPDFGRIVAMMQFDMYHSYTVDEHTLKAIGILQAIEAGDLKTTAPVATDAMPEIQSRRALFVATLLHDIGKGRGDDHSILGAEVALFVCPRLGLTPEETETVSWLVRHHLLMSKTAFRYDLNDSKTIQDFAAIVQSPERLKLLLIL

SEQ ID NO: 133521 - protein, 260 aa, Unknown
  Bacterial polypetide isolated from the Sargasso Sea
DEAARAEDPRAAVSVVLRETYDAARARAERKLDGGMKGRDVARLYAAAADEMLAGLWRVATQTLWPTSPVEAERLALVAVGGYGRGVLAPHSDLDLLFLRSSKATPRGEQVIQFVLYVLWDLGAKVGSAVRSVEECLSLSRTDMTVRTTLLEARPLAGDEALAQLMIGRFRDMVSKSDPRPFIAAKLEERAARHEKAGSTRYKVEPNVKDGKGGLRDLNTLYWIARSLAPESRLGATVMDELFTPRERRTSDEAFDFLWR

SEQ ID NO: 133522 - protein, 272 aa, Unknown
  Bacterial polypetide isolated from the Sargasso Sea
MMHYCGSLSSDRLTFDIQITIANKLGYKKHIGSSPVERLMKHYYLYAKDVGYLTASIIERIENDKFKNKKTKIKSFFTQLNKNKNGIFTFYDKKVHLLKNISSISALDIFRAYNFSAEKNYDLSAELTNLIKLNLKKVDSFRNNIKANTFFINILMNTTNAEAVLRNMNETGVLGRFIPDFGKVVAQVQHDMYHTYTVDEHTINAIGILRKIYNGELSEKFPLAFKVAQNVVSKKVLYVALFLHDIAKGRGGNHSILGGEVANTLCPRFGLS

SEQ ID NO: 133523 - protein, 170 aa, Unknown
  Bacterial polypetide isolated from the Sargasso Sea
MKDISQIKKKYQSNKVKLFQKLASTNDGFYFNKNHTDLVDTVVKEIVKGIYNIYPIEDFSLIAVGGYGRHDLSPKSDVDLLFIYKKSNKNIRDFITQLNNTLWDIGLEVGISFLTIKQALIDSKKDIKTITKFVESRFIIGDEIQYGEFVRSIKILIGKQNPLKLSELKL

SEQ ID NO: 133524 - protein, 269 aa, Unknown
  Bacterial polypetide isolated from the Sargasso Sea
KLIGNEKILSNYTSLLATKNLWRNKSFFEAKLEEQIHRHNRFNNTEYNLEPDLKSSPGGLRDIHTIDWIIKNCQRNISRDKIELEKIITNDERRDLEKAKYWLWTIRYLLHQEARREEDRLLFEYQISIGNKLFPSVKNSSTAAEKLMHRYYRSALSISEINSTALQAFEEITSKNKLSRKKIIDKNFYESNKLINLRNSNGFKKNPSLLLELFIRLTENPHLKGISSETLRLVKRDRGLINAEFRSKNKNINLFLRLLKSNRLIVTQL

SEQ ID NO: 133525 - protein, 229 aa, Unknown
  Bacterial polypetide isolated from the Sargasso Sea
IKNYYNYLNAHSYISQNKTDFEKMAIIATGGYGRGKISPGSDIDLLFLMPFKKTAWAESIAENLLYFLWDLGLKIGHATRNINECLTLSSKDQTITTSLLDARYICGDKEVKNVFDKKFRNTISRRSPGDFIAAKLEERETRHIKEGQSRYLVEPNVKNGKGGLRDLESLSWMTNFCYEAPRPEQMLINGVLTKSEAEAFRRCEDFLWHIRCQLHFLEKNPNDVINFNV

SEQ ID NO: 133526 - protein, 252 aa, Unknown
  Bacterial polypetide isolated from the Sargasso Sea
EKLAERDARHEKMGGSRYVLEPNIKEGKGGLRDLQTLYWIAKYLYKVDEVANVVDRGVLTKKEAHRFDRAHRFLLDVRCRLHYLAGRGEDRLTFDLQSEIAAMLGYRDRAGARGVERFMKHYYLIAKEIGDLTRIFCAALEAEHQRKPRFRLPSIGIFHKSVDGFDVEGGRLTVARSRDLRDDPVRILRLFHAAQAEELDVHPKALRAITRNLNVIDTIRDDEEANRLFVEMLTSEKDPESTLRRLNEAGVF

SEQ ID NO: 133527 - protein, 178 aa, Unknown
  Bacterial polypetide isolated from the Sargasso Sea
MRQALHHAPRRNDARRAAHPHHALAAMLSDHDAARPPLGHLRAARAPVRPRVPADCARRRHPLCVRADRARHVPVRVLLLRGGEPRVPAPVPVRVRASIRIGRRALVRGDPAHALRHGPGERDPDRPAPPQGELRGHGHVAPSHRRPVHRPILLRRRVRATVRQPDPRARDRNRPQQR

SEQ ID NO: 133528 - protein, 154 aa, Unknown
  Bacterial polypetide isolated from the Sargasso Sea
MKDISQIKKKYQSNKVKLFQKLASTNDGFYFNKNHTDLVDTVVKEIVKGIYNIYPIEDFSLIAVGGYGRHDLSPKSDVDLLFIYKKSNKNIRDFITQLNNTLWDIGLEVGISFLTIKQALIDSKKDIKTITKFVESRFIIGDEIQYGEFVRSIK

SEQ ID NO: 133529 - protein, 291 aa, Unknown
  Bacterial polypetide isolated from the Sargasso Sea
EFSINTSFQDMTKHDFRIFLLKTLKNHYDKYRRILENILEYEPLFAPKAIKHYSLLMDEILRKTLDLVIEHIHPLPNPTSSEKICVIAVGGYGRMEMAPFSDIDLLFLTPYKQTAWGESVIETILYILWDLKLKIGYSVRTVDDCIRLGKKDFTIRTAMLEQRYLSGDKSLQLSLHKRLWQDLFQKSGSEFIEAKLEERAKRHAQHGGTRYMLEPNVKEGKGGLRDLQTLYWITKYLYNTSSTNELVAIGVFSKEEFSIFSEAEKFLWSVRCSLHLLSKRAGEQLNFNSQV

SEQ ID NO: 133530 - protein, 140 aa, Unknown
  Bacterial polypetide isolated from the Sargasso Sea
MEPVNYAKKNSNKFYKFKKIQIYNEDKKTFKELLFNNLKKQLVQYKQKIRQEFLRTSDGSLNVGLNVILIDSMLREIICNTYQHVFGNKDYKLSIIAVGGYGRGELAPHSDLDLLFLIPDNLNQTETKDIEGLIQLILYL

SEQ ID NO: 133531 - protein, 294 aa, Unknown
  Bacterial polypetide isolated from the Sargasso Sea
ATPIFIDLLLNYNNPERALRHMNEVGFLGSFIPEFGRIVAMMQFNMYHSYTVDEHTIQCIRTLAEIEHKNLLEDLPIASQILSGDINRRILYVALLLHDIGKGLPEDHSTVGAEIAKTLAPRLGLKPEESEIVVWLIKNHLLMSDIAQKRDITDSRTVRDFATQVTSSAKLKLLTVLTVCDIRGVGPNAWNNWKAVLLRDLYSQTLAFLNQGSIASSRPDRLMAIKSKMRESLNELSNQEANYHLDRHYDNFWFGLDFNTQFEFIKLLQKSDNKDIKVNIVTDKNRDANRICCV

SEQ ID NO: 133532 - protein, 307 aa, Unknown
  Bacterial polypetide isolated from the Sargasso Sea
FIPEFEPIVAMMQFNMYHSYTVDEHTIQCLKTLAQIEKGELVEELPIASSILTNGVNRRVIYVALLLHDIGKGRSDDHSVLGAKIARRVSPRLGLKKHETETVEWLVRYHLLMSDMAQKRDISDPRTVRDFAKAVQSVKRLDLLTILTVCDIRSVGADTWNNWKATLIRQLYSETRLTLEQGGEALNRENRMAEAKKLLREKLFDWDSKDIKLETGRHYPPYWQGFQIGAQFAFAKLLKNLGSDEIKIDLTPDTDRDATRICFALSDHPGIFSRLSGALALVGANVVDARSYTSKDGFATAAFLGSR

SEQ ID NO: 133533 - protein, 304 aa, Unknown
  Bacterial polypetide isolated from the Sargasso Sea
RSIDIAACARDNNNSKNDVTGHMGTITKQRDIINISFMHAALVDQLEEEAPPNSVRQALLAIMREALNNGRQEVRRRFENDSRLGEATIHANAFLIDQLLRFAFEITTTRVYPTAEPTESEQISIAAVGGYGRGEMAPYSDIDLLFLLPYRLTPRVEQIIESILYLLWDLGLKVGHATRTIDDCIRLSNGDITIRTSILEVRFVDGNRKLFNNLRQKFREEIIADTSLAFVEAKLSERDARHHRMGGSRYVLEPNIKDGKGGLRDLQTLFWIAKYLFQVDSVNDLIREGVLTPPEAKSFARAEV

SEQ ID NO: 133534 - protein, 284 aa, Unknown
  Bacterial polypetide isolated from the Sargasso Sea
MSETGVLGKLFPDFQKITGLMQFNMYHHYTVDEHTLLAIGYLNKLEKGELIELAPIASTLIKKAQSRKILFLAVFLHDIGKGKNKDHTIVGENIANQVCQNLKLKDQETETITWLVRNHLLMSKYAFNYDVSDPKTILNFTNLVQSPEKLKLLLIITVVDILAVGPGIWNSWKAALMRELFKYSEEVLYGADVYQLMELNPEKSKIKLMEALDDWKREDFEDFANLYPDQYWSSLDIDTHSWLAKIIYKTHKTKKITVNFKTLNKTDSVLLVVIAPDNPGLFSE

SEQ ID NO: 133535 - protein, 189 aa, Unknown
  Bacterial polypetide isolated from the Sargasso Sea
IKKINGIFLHNAEDLLGKNKRKLYIALQEAKKRGLVKKIGVSIYSFETLEKILKEFKLDIIQIPLNILDRRLEHYKFLNKIKKKKVKIYARSIFLKGTLLLKEKQFPKKFRKWSSIFKLWNSWVAYNKISNLQACINYVFSFKEVDKIIIGVNNLKQTKEIFNAVSKKTKIFPKNLFCNDENLINPTKW

SEQ ID NO: 133536 - protein, 265 aa, Unknown
  Bacterial polypetide isolated from the Sargasso Sea
VKLLDKCKFDLFHAYTVDEHTFKLVRNMRQMKLYESKEFKLEYELINKLPKIEILYLAGFFHDLGKGKGGDHSIIGAESSIKFTKRMGLSLSDGELISWLVKNHLLMSSISQKKDIHDREIINYFVELVENTEKLDYLYLLTINDIKATNPALWNGWKHKLLKDLFLLARSKINKEPIKKSFEISQDRKSSVLKDFDVKNAAVINKFWSVFDEGYFNKYKSDKIKWHAELILKTKEDFIVDCKKSFDNLIEVFIKVTNRDGLFLK

SEQ ID NO: 133537 - protein, 278 aa, Unknown
  Bacterial polypetide isolated from the Sargasso Sea
LRLITSLTKLINSEVRYDFTANQMFLDILTSQRDSTRTLRLMNESNLLGKFIPEFQKIVCLMQFDMYHSYTVDEHTIFTISNLHSLKNGKFKDFAPLASKVIQEISSYRCLFVAMLLHDIAKGKKGDHSVNGAIVASTVCPRLGLSNDETEIVKWLVLHHLLLSKTAFRYELGDPKIIRDFAEKVKTVEKLKLLLVLTVADIKGVGPEIWNDWKGSLISDLYLKCLNVLQERTFTKNVYEYVKTTKELFKSDLLKNGIKNKSIEQYSKNYYDNYWEIF

SEQ ID NO: 133538 - protein, 193 aa, Unknown
  Bacterial polypetide isolated from the Sargasso Sea
MHPLVGDENDKAFRAALLAAAKDIHSTLKDDLATEFEQRRDGAVYVGRHSLGMDQLLEALLSVIMARHGDAGLALVAVGGYGRGELAPLSDIDLLVLTVADSDPAADVIVEQLLYLLWDLGLKVGHAKRTVTDTIRSSREDHTILTGLIEMRFIGGDAALYRKLETTFQKELGRIRPGDFAEIKLAERDARHQ

SEQ ID NO: 133539 - protein, 323 aa, Unknown
  Bacterial polypetide isolated from the Sargasso Sea
SYRLTPRVEQIVESILYLLWDLGLKVGHATRTIDDCIRLSQNDITIRTSILEVRFISGNRPLFNTLKKKFLDEVIKDSALEFVEEKLKERDYRHRRMGDSRYVLEPNIKDGKGGLRDLQTLFWIAKYLYQVDKVEDLIKEGVLTTREAKRFQRAQVFLWTVRCYLHYIAGRAEDRLTFDLQTEICQRLGYKDRAGTRGVERFMKHYYLTAKEVGDLTRIFCAALESEERRSLPLAFVNLDWLRRDIEGFPIQSGRLSVFSEEDFEANPTRILQLFYVAQKRGIDIHPNALRLVTRNLKKVDSIRTEPEANDLFIKNLNCILRC

SEQ ID NO: 133540 - protein, 314 aa, Unknown
  Bacterial polypetide isolated from the Sargasso Sea
FPISNPTTADYLSIVAVGGYGRNNLSPGSDIDLLILTPYKITPRIEKIFETLLYMLWDLKIKVGYAVRSLEESISKSKIDNTICTSLLDARLIAGNQSLWLKFQDAFKKEIILKEKHNFFTEKLKERRVRHLKMGDSSYLLEPNIKEGKGGIRDLNTLRWIIHFIYQVKDSNSYLNKNIMSKDEALLYDRSEKFLSRLRTMMHYCSNRNSDRLTFDLQVLIANKLGYKNHIGSSEVERLMKHYYLFARDVGYLTASIIERIENDKFKKNKRKIKDFFLQLKKDKNGIFAFYDKKIHLIKNYSNISALNIFRAYN

SEQ ID NO: 133541 - protein, 209 aa, Unknown
  Bacterial polypetide isolated from the Sargasso Sea
MVLAVGTSLDTEKEKYSYAIGVNFAQSLMRQGAPLDADAVYMGVNDVLSDSELRLDANTISAVLRNQAQKVGERKKQSAAVNLLRGREYMERNGKKASVTTLPNGIQYEVLRQGSGKQPSVSSTVRVHYSGSLVDGREFDSSKRRGEPAEFAISDVIKGWQYALPLMREGSRWSVSIPPEFAYGIKGAGSTIGPNETLVFEIDLLNIIE

SEQ ID NO: 133542 - protein, 181 aa, Unknown
  Bacterial polypetide isolated from the Sargasso Sea
MSIIDERKRLLADRELRGSEFTLQLSDATDEWLYGLFTSVAENRADLALIAVGGYGRRDLSPLSDLDVLLLHNDAPDIEEVAEALWYPIWDQGEKLGHSVRTLNETLTLASEDLDTATALLSSRLIAGSQPLANELSGKAVDQWKSKAKFWLPKLAESVHSRHRAKGEVAFMLEPELKEGR

SEQ ID NO: 133543 - protein, 261 aa, Unknown
  Bacterial polypetide isolated from the Sargasso Sea
YLLHQEARREEDRLLFEYQISIGNKLFPSVKNSSTAAEKLMHRYYRSALSISEINSTALQAFEEITSKNKLSHKKVIDKNFYERNKFINLSHPDGFKKNPSLLLELFIRLTENPHLKGISSETLRLVKRDRDLINAEFRSNHKNINLFLKLLKSNRLIVTQLENMKDLGILGRYLPEFGRVTGQMQYDLFHIYTVDAHTLQVLKNMRRMILKKSTEIYPLATKLIQNLPKIEILYIAGLYHDIGKGRGSDHSNLGKSIAGK

SEQ ID NO: 133544 - protein, 279 aa, Unknown
  Bacterial polypetide isolated from the Sargasso Sea
DETFWIMGSYYLREWHMRWFHDHLPGGLRDLKISGHVEIKDISDNICGYSISGPNARKVLEKLTSRDISNENFKFMSCQEIDVGLIRAKVGRLSVAGELGYEINCHALELSVLRELLIEAGSEYMIKEYGYYTLNTLRLEKSFGIWNAEFMQAYTPGETGMDRWISWKKNVNYVGKIPATKEREAGKDKLKQSLVTLEIENAEAEAAGYEPLWNGNKRVGMTTSGGYGHSIDKSLAMALVEPEFAEPGTSLKTHIVGVERNCKVVSSSPWDPKGERIRM

SEQ ID NO: 133545 - protein, 285 aa, Unknown
  Bacterial polypetide isolated from the Sargasso Sea
IVKHRSQFVDSLLTQAWQDFALNTDALALVAVGGYGRAELHPYSDIDLLFLISDEPLSAELESQLSQFITYLWDTGLEIGHSVRTVAQTIEQGKLDITIATNLIEARLLSGNEHLFDLLYDNIRQHDFWPSFEFYNAKKDEQITRHSKASAFDLEPNIKTCPGGLRDIQTIAWVAMRHFDAATLEELVEHDFLAPAELEELLECQNFLWEIRFALHITANRNENRLLFDLQRQIASLLGYEDATQLAVEQMMKRYYRTVRRVMELNQMLLQLFKRATLGHTQALE

SEQ ID NO: 133546 - protein, 304 aa, Unknown
  Bacterial polypetide isolated from the Sargasso Sea
INILKLFICALDSKILIHPQALLLVSQNLGLVDSKLKNSFEANDLFLSLLIDYGNPERVLRRMNEVGFLGAFIPEFGRIVALMQFNMYHWFTVDEHTIQCLKVLSEIEKLPENYGTAVQEIFLRKSLNRKILYLSLLFHDIGKGLENDHSIEGEKIATKLCKRFTLQDSEQNKISWLVGNHLMMSDFAQKRDLSDQKTIIDFQEHVQDRETLDLLFILTVCDIKGVSSDAWNNWKSSLLESLYFQTLQLVSKDAKVKTRSERIDTAKTKLKGYLKEFKYDAIEKETSRHFDAYWLVLDTKTQMQ

SEQ ID NO: 133547 - protein, 380 aa, Unknown
  Bacterial polypetide isolated from the Sargasso Sea
MKDISQIKKKYQSNKVKLFQKLASTNDGFYFNKNHTDLVDTVVKEIVKGIYNIYPIEDFSLIAVGGYGRHDLSPKSDVDLLFIYKKSNKNIRDFITQLNNTLWDIGLEVGISFLTIKQALIDSKKDTKTITKFVETRFIIGDEIQYGEFVRSIKILIGKQNPLKLSELKLIELVERHDYRIGIKSNLEPNIKEGIGGLRDIHTILWVSIFMFNIYKLEDLTSINIYTKEEIKELKNAWKFLLTIRAFIHLFNESKGDVLSIENQLKISKKLSYKDKKKEKGVEIFMKDLFVNVAKINSLLRTFYSKLPEDLIIKTIYKRKPTKTKSLEKEFIIEKGFLNLKNNTAKNLQLKWANVFEKSLEHNLLIHPRFLKTVEEKRKV

SEQ ID NO: 133548 - protein, 101 aa, Unknown
  Bacterial polypetide isolated from the Sargasso Sea
MLKELQKQKNNDISSLSKQFESWLYRERGRQVRGIEYFLNKRSENIDNLIMAASEKSGLTSISKLGIFAVGGYGRGELHPFSDIDLLLLTTSELSPTENKK

SEQ ID NO: 133549 - protein, 512 aa, Unknown
  Bacterial polypetide isolated from the Sargasso Sea
FLRCPKELLDVHPYALRLISNNLGLIDDVLRKNQVANQLFLEMLTSPTDPETTLRRLNESGVFGKFVLEFGKIVAQMEFSMYHSYTVDEHTIRAIGVLSKIESGAYKNDMPNVTRAMNELQSRNALYFAVFLHDIAKGQQGDHSVLGSELAITLCPRFGLSEEETDTVAWLVREHLTMSNTAFKRDLEDPDTIKIFASIVKTVERLKLLTVLTCADIKAVGPKTWTSWKSRLLRSLYTKTLEHLSGDMLEENTDFRVQHAKDILVSKLKSWQKEAVETHITTCPPKYWLKFDHETHLRHFEAIRRSLLKNDLVHIEHSINDEFEYSEITVIAPDKIGLFSKIASVLALYGVNVVDAKIITLGNGKVIDSLSFLDGNDKAVTNKKVVNNIICKIEEVLLENTNLNDDVTRIKKNKRSKRKEAFSVASRVILDNITSSEDTIIEVTGHDRVGLLYDITSALTSLNLKISSAHVTTFGVEAVDNFYVKDRNNEKLSAPEEIAIVKKVVLEAVNKT

SEQ ID NO: 133550 - protein, 202 aa, Unknown
  Bacterial polypetide isolated from the Sargasso Sea
MSSVPAVTQSHATSLKADYKVAKAQLLERFKTASNVDSLMAALSRATDESLRAAWNTCELPPELALLAVGGYGRGELAPHSDIDILVLLPDAPIEHLAARIERFISLAWDLGLELGSSVRSVAQCIEEAANDVTVRTSLLEARRITGSATLFDDFAKRYREALDPRAFFQAKVLEMRQRHAKFQDTPYSLEPNIKESPGGLR

SEQ ID NO: 133551 - protein, 183 aa, Unknown
  Bacterial polypetide isolated from the Sargasso Sea
MDIDTDILMNPKSLALSISKILSKNKGNVSKTREGLVAVLSNTIESARKKAESSLKRHGNGIRTARSISEFQDTLIKTMYEFIVQNVYSPKDQKNIDKICLVAVGGYGRGTLAPFSDIDLLFLHSNKLNNWTESVIEYMLYILWDLGFKVGHATRNLDHCLELSKSDLTIRTSILEARYIHGA

SEQ ID NO: 133552 - protein, 386 aa, Unknown
  Bacterial polypetide isolated from the Sargasso Sea
MQLFRHPYSTLVIIGGCILLLVSFGIRHSSGLYLIPISEHIQTGREVFGFAIAIQFLMIGIGSPIFGAIADKYSSSAAGLLGVIFFLIGLYLMSLVEGSILLIISQVIFGFGCAGCGTAVILGAVGKAVTGKYQTLSLGVVMAAGSLGQFLIVPLTGFLIEMSDWQRSILYLCFISLIMILFSLVLTKHSSKSEINDEVNRSLASVLNEAFANKSYVLLTIGFFVCGFHISFIATHLPAYLDDLSLPMWIGSWSLALIGLFNVIGTLVFGHLGDLRSKKNLLVILYTLRALLFLIFIFLPKTEITVLIFASLLGILWLSTVPLTSGIISVIFGSKYMSMLYGFTFLSHQVGSFVGSWFGGRFYDYYGSYDIMWWACVILGFASAVV

SEQ ID NO: 133553 - protein, 305 aa, Unknown
  Bacterial polypetide isolated from the Sargasso Sea
MNAIVNQRAILDRRTLLSKIKSIFPENNYEPAKRDELLSLLKRSFDSGFLEIESRFDFNKNGLVVLKSNSFLVDQVIRVLFEVATTLAYPRGNPSTAEKISLVAVGGYGREELAPYSDIDIMFLHPYKKTPYIEQVVEFLLYFLWDLGLKVGHSTRSIGDCIRLSKNDLIIETSLLDSRWLWGYQKPYLDFVKAFQEAIVSGNGSRFAEAKLKERDQRHEDLGDVRYVLEPNIKDGKGGLRDLQTLFWITKHIYGTSNLAELAEKGVFLRQDVSRFRKALEFYASVRCNLHYLARRPEERITFDI

SEQ ID NO: 133554 - protein, 301 aa, Unknown
  Bacterial polypetide isolated from the Sargasso Sea
LISSTVCDVRATNPNLWNSWKERLFKDLYQLTKNALRMGLENTLDKEEIVKEKIEIMTKNLEIQGLDITEMDAAIRKLSEEYFLRFNQDEINYHLQKLISNTSKDKENTIIGLKLIEEEGLMLLFIKTAINFDTFSIITNNLVDKNVSIRDAKVIELNDGSCIYNFYTDMPKGDAYDIDNKLESLIRNLSLRLEKKQITSKKQFKLPRRLRSFSTSTKVNFLEDHIHNRTVLEMVSIDRPGLLVDISEVLRRNNIWIESAKIATIGERAEDVFYLRNEHQDAIPLETKKRLESELIESLDN

SEQ ID NO: 133555 - protein, 259 aa, Unknown
  Bacterial polypetide isolated from the Sargasso Sea
MDINLRENRQIYQELVSTTKEIIKNSLERAKKNLEEGHYKGSQCAEEISNLYDHVIKNYYNYLNAHSYISQNKTDFEKMAIIATGGYGRGKISPGSDIDLLFLMPFKKTAWAESIAENLLYFLWDLGLKIGHATRNINECLTLSSKDQTITTSLLDARYICGDKEVKNVFDKKFRNTISKRSTGDFIAAKLEEREMRHIKEGQSRYLVEPNVKNGKGGLRDLESLSWMTNFCYEAPRPEQMVKNGVLTKSEAEAFRRCE

SEQ ID NO: 133556 - protein, 463 aa, Unknown
  Bacterial polypetide isolated from the Sargasso Sea
TQKYLNQRSDIFDELIIDEFLKRKLENDFAIVALGGYGRRELYPSSDIDLSIIQLTKKTKKIDDVRDFIGWLWTLKVKIGHSVRTIKDIDKITKSDLKEFTSYLSNRVIYCHRNNINDLNQNLKKISSNWNKTKFFNAKKLEQQRRYQSFDSTEFSLEPDLKESPGCLRDFQTALWVLEHCFEIEKLEDCIKIKLFKKIEIKNVKKSYDHIKSLRYILNLNNHSNRISFENQLLLAKKSKLKSSKKSSAVEKFMRTFFLHASNLSDFNELVFQAYEDQLTILKRSYSRDFYIFKDRLGISDRINLVKKPEFILESLKKVGELKKINGLDFKSIKKIKSALSQIDPNYFLSPQAGNQFIDILKSTTNLSTILKKLKQLGLLRLLIPEFGEIEGQMQFDMFHIYTVDEHTFKVVRNMRQMQIGKVDEALKIEHELINKLPKIELLYLAGIFHDLGKGKGGNHSEI

SEQ ID NO: 133557 - protein, 581 aa, Unknown
  Bacterial polypetide isolated from the Sargasso Sea
AKEVGDLTRIICSVLEERQKDKFSFFSYIKKIFTIPAKLISSGGSLGLYVSSGRLNISNEEVFKKDPSKIILFFDFLEKKNLFAHPNAIRLIRKSTKLIDHKLRNNIRTNEVFTNILSSPEAEKTLRAMNESGVLGKFVPDFGKIVGLMQFNMYHHYTADEHLIKAVGELNKIFHSENKDYTILNSLSLDEEEKRVLSLAIFFHDIAKGRENDHSEEGQKVVKKMAKRLGLSEKDEEMISWLVLDHLVMSDFAQRRDISDPVTISDFAEKIQNTKRLKLLLFLTVADIRAVGPGVWNDWKGELLKNLYNETYLALTGNYSEQDRLYKTNEIKERIKKEITEVSEENKITWFNLVDEKYWISVPEKIQIQNLITWHAGIGDKENNIIDFYNSDDYSSTIMTVITQDKKRLFERITSGCLEMNINIVDARIFSNNDNVIDILWIQDNFGKKIVDPKRLSRIKQKILFFINEKNIPMISYENSIDKRSSAFNISPDVSIDNSLSNKYSVIEVSGKDRPGLLNDLTRKISDLDINIRSAHIATFGERATDVFYVLSKNGDKITSKSKLKNIQNELIKSMSFDEYV

SEQ ID NO: 133558 - protein, 541 aa, Unknown
  Bacterial polypetide isolated from the Sargasso Sea
LDSAANDIRERVARVVDNLPSESDAPQILKQSAGFSTTMWLALSSSTWSDLELGDYAERYLVDQFSSVKNVGRIRTGGLRDLSVRVWIDPIKLAANDLTIQEVESALRTENISLPAGTLEANNIDLTLNLDKSYNEINKLKGLPLKKIKNSIVRLDDIANIEFGPVSEKTLFKAQKKDSLNLKTVGIGIYAKSGSSTVELSKSIKKKLVQVRKTLPDDLKLEIAFNRANYVGAAIKEVYKTLVIAFLLVVLIIYLFLGNLKAVIVPAVALPVSLIASFLGLYLFDLSINIFVLLSFILAIGIITDDSVIMTDAIYRRIENGETPLVAAYKGSKQITFAIVATTLILIAVFLPLIFIDGIAGTLFRETAIALSFSIVISSFVALTLSPMLGSKFLKRTPKQNYFVTKFGGFFNSFLKIYQETLLFWLNKKKTIISFIIAIIICSAGLYSFAKKELLPMEDRGVYIIIGNTDEGSSFEYTEKRAEEVEKRLIPLLQSSDTPYKRLIMRVPGFGDNKNSFNSFIIIALLDHWKNRDLDSLTVMR

SEQ ID NO: 133559 - protein, 358 aa, Unknown
  Bacterial polypetide isolated from the Sargasso Sea
MVVSNLRRLALDRFNHEYPEDSKKMQLIESQEILYLAGLFHDIAKGRGGDHSILGAKDAEEFCISHGMTRYQSKLVSWLVENHLIFSLTAQKKDIHDPLVVKELAEIIGDEERLEYLYLLTVCDVRATNPNLWNSWKERLFKDLYQLTKNALRMGLENTLDKKEIVKEKIEIATKFIGDQSLDIDKIREEIRKLSEDYFLRFNQDEINYHLEKLITDGAQDEKNTIIGLKIIEDEGLMLLFIKTLMDIDTFSIITNNLVEKNISIKDAKVIELNDGRCIYNFYTDMPKGDAYDIENKIESLIENLSLRLKKKQIIKKKKFKLPRRLRSFTTKTKVNFLADDIHNRTVLEMISIDRPGL

SEQ ID NO: 133560 - protein, 274 aa, Unknown
  Bacterial polypetide isolated from the Sargasso Sea
RNIFMEILTAKDGQTHTLRRMHQYGILGKYLPEFDKITGQMQYDLYHTYTVDEHSLMVIRNLRRFAIPQMAHEFPLCSSIMSNFKEPEILYIAGLYHDIGKGSGKDHSLVGKILVKKFCTMHEISKRNTKIITWLVENHLLMSVFSQKKDLSNQNEIKEFTQIVKTKKKLDALYLLTVADIRGTSPKVWNSWKANLLENLYNSSKNYLQSEKNNNDDLESIKVSVVKKLSNEVNNEKIIKFFLNSLEISYFLNHSRDEIEWHAKVLHHYYIKRI

SEQ ID NO: 133561 - protein, 293 aa, Unknown
  Bacterial polypetide isolated from the Sargasso Sea
FPIEGGRITIDSVKALKEDTTQILRIFQVAQYQKFDIHPRAMRVISQNLNLIGPDLRENATANRIFLEILTGPEPRTALMWLNETGVFGRFIPDFGRVVGQMQYDMYHVYTVDEHTIRAIEILDGIFTGRLKSEHPISCGVILELKSRRALFVATLLHDIAKGRGGDHSILGAEVAEKLCPRLGLTEWETETVVWLVRWHLLMTHVAFKRDLEDPKTISDFVEQVQSPERLRMLLVLTVSDIRAVGPEVWNTWKAGLLRELYWRAQDFFSGSVSTEHRDKRAERVKLRLSEKL

SEQ ID NO: 133562 - protein, 268 aa, Unknown
  Bacterial polypetide isolated from the Sargasso Sea
MGIQNVDLKHNKNLIFEIFIEIGKSKEITLINTETKSLMKSNIGLIDDSFRQNSIYTEQFLHILKSKYNLSSILKTMKTLGVLQAYIPEFAEVVGQMQFDLFHVYTVDEHTFKVVRNMRQMKLYEQEGFELEHELINKIPKIEILYIAGIFHDLGKGKGGDHSEIGAKTSLNFAKRLGMSSIDANLISWLVKKHLIMSSISQKKDISEPETINEFIKHVEQDEKLDYLYLLTINDIRATNPALWNGWKHQLLKDLYILSRSKINQQPV

SEQ ID NO: 133563 - protein, 268 aa, Unknown
  Bacterial polypetide isolated from the Sargasso Sea
TAKSALKKSNDVLNYRYKEGQDINCIVRGRAGVVDEILKLAWRALNWPNPSDICLIAVGGYGRGELLPHSDVDLLILTKSSWHKKYQHYVSSFLTMLWDIGLEPGHSVRSIRQCKSEAIKEITIATALMESRILIGNPELFSEMYKATNNQRVWPIKKFVAAKLNEQKVRHQKFLGVDYALEPNIKTSPGGLRDIQTISWVCKRRFGTDTFKDLVNLGFLNEHEQAALKHGQEFLWKIRYGLHMLDSRSEDRLLFEKQKELARLLGYQ

SEQ ID NO: 133564 - protein, 250 aa, Unknown
  Bacterial polypetide isolated from the Sargasso Sea
YQELMECEAYLWQMRFALHVESGRNENRILFDYQPAVAKRLGFGDDGKASVERMMKRFFQTVQRVAELNDMLLQHFDGSILNSQSKLKQQKLDDFFELTGHLIRATDNAVFARRENILRLFWHIANNSNITGIHSDTIRLLRLVRRRLMGDLQDYEACRQLFMSIIRHPRGMDRAITLMHRHGILASYLPAWRNIVGQMQFDLFHAYTVDEHTHRVLKNLYRYSQAGFENEFPLCTDIVKRMEKPEILYL

SEQ ID NO: 133565 - protein, 279 aa, Unknown
  Bacterial polypetide isolated from the Sargasso Sea
VATAMGYKDSQARRGVEIFMQDYFRHATRVGDLTRIFLTSLEAVHAKDEPLLERIFKRKPKIGEEYAVIHNRLAIKSEEKFLKNPINLLKLFSEALRTGLLIHPNAMRLVSANLSSIDKEFRRSPEAQTIFLELLLKHGNPERALRRMNELGFLAKFIPEFEPIVAMMQFNMYHSYTVDEHTIQCLKTLAQIEKGELVEELPIASSILKDGVNRKVIYVALLLHDIGKGRSDDHSILGAKIARQVSPRLGLKKQETETVEWLVRYHLLMSDMAQKRDIS

SEQ ID NO: 133566 - protein, 283 aa, Unknown
  Bacterial polypetide isolated from the Sargasso Sea
ASRRCEDFLWHIRCQLHFLEKNPNDVINFNVQMEMADKLGYHDRKGLKPVERFMKHYFLTAKEVGDLTRIICSVLEERQKDKFSFFSYIKKIFTIPAKLISSGGSLGLYVSSGRLNISNEEVFKKDPSKIILFFDFLEKKNLFAHPNAIRLIRKSTKLIDHKLRNNIRTNEVFTNILSSPEAEKTLRAMNESGVLGKFVPDFGKIVGLMQFNMYHHYTADEHLIKAVGELNKIFHSENKDYTILNSLSLDEEEKRVLSLAIFFHDIAKGRENDHSEEGQKVVK

SEQ ID NO: 133567 - protein, 216 aa, Unknown
  Bacterial polypetide isolated from the Sargasso Sea
MDASLLSPHLLPDAQLTRENCKEYLSRFLGWLHARFDAGDNIIELVATRSEYMDELLTRLWQKFGFDKTELTLIAVGGYGRGELHPHSDIDLLILYEGDELDEVLGLRIGEFITLLWDLKLEVGQAVRNVAECLEQGRGDITVATNLIEARYITGREAGFQQLKEATGPQHFWPSEQFFQGQREEQAQRHQQFLGTALQLEPDLSEHPGRPARHPD

SEQ ID NO: 133568 - protein, 318 aa, Unknown
  Bacterial polypetide isolated from the Sargasso Sea
ESGVFGKFLPDFGRIVAMMQFDMYHSYTVDEHTLKAIGILHGIENGELFDAAPVATEAMPEVGSRRALFVAMLLHDIAKGRGGDHSVIGSDIALALCPRLGLTSEETDTVSWLVLNHLMMSKIAFRYDLNDPQTIKDFAAIVQSPERLKLLLVLTVADIRAVGPNVWNGWKAALMRDLYYRCDAVLRGADPAVIAQGNAEEARLEARQQLRDWDGPRFLAHAANMPVIYWTGFDCESHVRHARLCEKFDELDVPLLIDFLPDPERRMTELTVLTVDDPGLFSRIAGAVAAAGANIVGARITTCHDGTVLDVFLLQDMQ

SEQ ID NO: 133569 - protein, 298 aa, Unknown
  Bacterial polypetide isolated from the Sargasso Sea
MENTINDKSLFDKKAFGNELKETKEPLLLFKKILKNGYHYLTECFIPGKNIELLVKKQTWFVDQLITSAWKIFFDSDELCLVAVGGYGRSELLLGSDIDLMILIKPHKKNKHKKELEHFLTFLWDFGLEVGHSVRTIKECQYEAKKDITTMTNIMEARCIIGNNILFEEMCKLTSPKKIWPTDNYFEKKIHEQKNRHKKFNDTAYKLEPNIKESPGGLRDIQMIGWVAKRHFDNIDLKNLVKHKFITSSEYEVLRRGRNLLWGVRFALHMLTKRREDRLLFEYQRSIAELFGFKEKNN

SEQ ID NO: 133570 - protein, 308 aa, Unknown
  Bacterial polypetide isolated from the Sargasso Sea
GFQKDSGLLAVENFMQKYFLHAKNIGELTRILLSKMESMHVKKSPSLLKKIKSAISNNNSILDKGFIISNGRIDVIDKDKFLKEPLNQIKLFQNGLKSRRLIHPNSLHLISKNINNVDLNFLKNSEASKIFIDVLLNYGDPERALRRMNEVGFLGKYIPEFQKIVGMMQFNMYHKYTVDEHIIQCVKILSQIEQGFLREDLPLASKILKDGINRKVLYLALLLHDVGKGQTESHSILGSKIATKVTERLGFESHEVELTSWLIKNHLLMSDISQKRDLSEEKTIRDFANVVKTTNRLRLLTVLTVCDI

SEQ ID NO: 133571 - protein, 243 aa, Unknown
  Bacterial polypetide isolated from the Sargasso Sea
EEFLWAVRCQMHHLSERAIEQLSFDLQVEVATAMGYKDSQARRGVEIFMQDYFRHATRVGDLTRIFLTSLEAVHAKDEPLLERIFKRRPKIGEEYAVIHNRLAIKSEEKFLENPINLLKLFSEALRTGLLIHPNAMRLVSANLSSIDKEFRQSPEAQTIFLELLLKHGNPERALRRMNELGFLAKFIPEFEPIVAMMQFNMYHSYTVDEHTIQCLKTLAQIEKGELVEELPIASSILKDGVNR

SEQ ID NO: 133572 - protein, 310 aa, Unknown
  Bacterial polypetide isolated from the Sargasso Sea
AIEEEHQRKPRLKLSAPWRRPKSLGDFELEGGRLNAKDPEIFSKDPVNFLRMFHVAQENDLEFHPQILKLVNQDLKFIDKKLRHDQKANSLFLKILTSKKGPERILRRMNEAQVFGRFIPDFGKVVAQMQYDMYHVYTVDEHTIIMLGILFKIEKRELEEIAPTASSVVGKVISRRELYVAVLLHDIAKGRRGDHSILGEKVARRLCPRFGMTAEETETVAWLVRWHLLMSYAAFKRDINDPKTIEDFTAIVRSPERLRLLLVLTVADIRAVGPNVWNSWKGTLLSELYWLAEEALLGHSSIKAQTARMK

SEQ ID NO: 133573 - protein, 290 aa, Unknown
  Bacterial polypetide isolated from the Sargasso Sea
ISKKARLGKRSAKNSVEKMMKKFYEMAAVLSYFNEIVYEKYNEKYPKKNYFRKIEGIHKYGSKIGIENINLSDNKNLIFEIFIEIGKSKTINSIDTRTKSLIRKNINLIDKEFRKNKEYASQFLEILRSKYNLSSILRTMKSLGVMQGYIPEFKGVVGQMQFDLFHTYTVDEHTFKVVRNMRQMKLNKQTGFELEHELINKLPKVEILYLAGLFHDLGKGKGGDHSEIGAKTSQRFAKRLGMSKTDADLISWLVKKHLIMSSISQKKDIGDPNTVDEFASEVVSKVKKLD

SEQ ID NO: 133574 - protein, 276 aa, Unknown
  Bacterial polypetide isolated from the Sargasso Sea
TGIIFLDILRVSEAVPKLLRQMHETGVLGQVCPDFKRITGHGQFDRYHHYTVDAHTIVAVSHLRELEKFIEDKSSASLVVSLLKELDRPELLYIAVIYHDIAKGRGGDHSELGAELAKKFSVRMGISSHDAELISWLVLNHLNFSKTAQHHNLNDTAVIEEFSKFIGDRQRLIYLFLLTIVDVAAVGPGTLTDWKLHLFVQLFYATDDFLRTGRLDVTEQLERIDSRKTAASLLLAPKDRASLQSQVEILPETLLLNLAPESIVAVCDALKAPFGI

SEQ ID NO: 133575 - protein, 602 aa, Unknown
  Bacterial polypetide isolated from the Sargasso Sea
MICQPKQIFDTTKVKVFLKSDRAERTELVSLLKELKSSGFEKISLELTKKPLNAKKAVTSYAFLTDCLVKATWEFATKIKFPTYNPTDAERLSIISVGGYGRREMAPYSDVDLLFLTPYKITPWAESVIETVLYLLWDLKLKVGHSSRSIRDCLRMGSEDYTIRTAMLEHRFVCGDTGLASELNEKLWKNLFEGTAKEFISAKLKERENRHEKYGQRYMVEPNVKEGKGGLRDLQSLYWIAKYVYKTQNISDLIKLNVFRSDEYEQFDKAEEFLWAVRCQMHHLSDRAIEQLSFDLQVEVATAMGYKDSQARRAVEIFMQDYFRHATRVGDLTRIFLTSLEAVHAKDEPLLERIFKRRPKIGDEYAVIHNRLAVKSEEKFLENPINLLKLFSEALRTGLLIHPNAMRLVSANLSSVDKEFRQSPEAQTIFLELLLKHGNPERALRRMNELGFLAKFIPEFEPIVAMMQFNMYHSYTVDEHTIQCLKTLAQIEKGELVEELPIASSILKDGVNRKVIYVALLLHDIGKGRSDDHSILGAKIARQVSPRLGLKKQETETVEWLVRYHLLMSDMAQKRDISDPRTVRDFAKAVQSVKRLDLLTVL

SEQ ID NO: 133576 - protein, 553 aa, Unknown
  Bacterial polypetide isolated from the Sargasso Sea
LYLISINEVSKSNLFKNEVKDAVNAYNFIKSLRFATNIIANKNRLDFETQVEISNKAKLTKNKTNMSVELMMKRYYEMASVLSHFNNIVFEKYLEKNISKIKKSIGIYKNKNKIGINVDSLKQNKNLIFQIFIEIGKNKKINLIDTDTKSILKENTYLINDQFRKNKLYANQFLEILKSKYNLSSILKTMKDLGILQKYIPEFGEVVGQMQFDLFHAYTVDEHTFKVVRNMRQMKLYKQKGFEIEHELINKIPKIEILYISGLFHDLGKGKGGDHSKIGAKTSFDFAKRIGMSKTDANLISWLVKEHLIMSSISQKKDISDYQTIEEFAAKVKQIEKLDYLYLLTVNDIRATNPSLWNGWKHQLLKDLYRLTRLKINKQPMQASSEIAKDRKANVFDNFKKKDHPFLENYFNFLSKDYLNKISSESLKWQAKLIINNNSNDLIVGCRKRFENLIEIFIRVKNSDGLFLKMARILEHSGLEVIDANIFTSSDNVFAVNTFIAKFTHHERPFTKDELKELANRIRKNFKYFSKIIQIPKKPIKRVSFEKIINISH

SEQ ID NO: 133577 - protein, 316 aa, Unknown
  Bacterial polypetide isolated from the Sargasso Sea
MQKAKKNLEQGNYKGSECAREIANLYDHVIKNYYQYLNAHNYISQNKTDFEKMVIIATGGYGRGKISPGSDIDLLFLMPFKKTAWAESVTENLLYFLWDLGLKIGHASRNINECLTLSANDQTITTSLLDARYICGDIEVKKVFDKKFRNTISKRSSKEFIDAKLEERESRHIKEGQSRYLVEPNIKNGKGGLRDLESLSWMTNFCYQASRPEQMFKKGVLTEREAESFKKCEDFLWYIRCQLHFIEKNPNDIINFNVQIEMADKLNYNDRKGLKPVERFMKHYFLIAKEVGDLTRVICSDLEEKQKNKNSLISII

SEQ ID NO: 133578 - protein, 431 aa, Unknown
  Bacterial polypetide isolated from the Sargasso Sea
VIANTRRFMRADYTDRFPVSTRIARRLRDPRLLYIAALFHDIGKGRGGDHSELGAVEAETFCIDHGLSKTDTQLIVWLVKNHLLMSQIAQRRDISDPEEIQRFAEIVVTEERLDYLYTLTVADIAGTNPELWNAWRASLMRQLYTQTRRALSRGLDNPLDRDEVIRETKRSAAAALEYRGFLEVELEGLWSTRGEDYFLRERAEDIAWHTEAIADHNHERGALVLVRQAGESPIGNATQIFVHTLDEPSTFARICAALETLDLTIHDARIYSDTDGSTLDTFFVLKSDGASLDSHPDAFQEIEDRIRQHLSESELKPVSRHTPRTVKAFTIPTTVQFSQDETSHLTTLEVTTADRPGLLARLGSVLSGYDVSVQGAKIQTLGERVQDIFFLADAAGGQLKDDALLASLENDLIQALGGGQQEDSAVSELSI

SEQ ID NO: 133579 - protein, 544 aa, Unknown
  Bacterial polypetide isolated from the Sargasso Sea
MKEKFESINKDFYKNITDIYLEPRKINKYLRKHSNIIENLIKRKFKDLNLHENFVIYANGGFGRKEMFPTSDVDISIVEIKKNKNFNNLEKFISYLWDQGFKVGHSVRTIKDIKNISKSEIKEFTSYLTRRSIISNKDIDKEITMTLSKLWTKNNFYNEKYIEQQKRHNQFFSTAFNLEPDLKESPGTMRDFQTALWILQHCFGLDSQPAIKKSKLLDGQYKNTVIAYNFIKFLRFHANLLTDRNRLSFESQIEISKNINSISEKDTKSTVEKMMRKYYEMAADISYFNSTVFEKYNETYPKNLFKNANPIYKHKSKIGINENIDIKTNKDLIFKLFIEIGKSKKINLIDTKTKALLRKNLNLIDQEFRKDKYFAEQFIDILKSKHNLSSILKTMKSLGILQKYIPEFGEVVGQMQFDLFHVYTVDEHTLKVVRNMRQMKLYEQAGFLLEHELINKLPKIEILYIAGLFHDLGKGKGGDHSEIGAKTSFNFAKRLGMSSTDAKLISWLVKKHLIMSSISQKKDISDPQTVNEFAKEVEQNEKLN

SEQ ID NO: 133580 - protein, 465 aa, Unknown
  Bacterial polypetide isolated from the Sargasso Sea
MKEKIQSINKEFYKNFQEIYSKPSKTNKYLKKYSNIVEKDIKNKFLELNLNQDFVIYANGGFGRKEIFPNSDIDLSIVEKNKIKDFTNLEKFISLLWDEGYKIGHSVRSISHIKKISKEDLKEFTSYLTRRPIISCDEIDIKITKALSRLWTKNNFYNGKYIEQQQRHSEFFSTAYNLEPDLKESPGTLRDFQSALWILQHCFELSSVEEISRSRLLNGELNNAINAYNFIKSLRFATNITTKKNRLNFEAQIEIAKKAKLSKRNSTKSVEIMMKKFYEMASTLSYFNDIVYEKYNEKFPRNYFKKVAGIYKYKNKIGIQNINLKKNKNLIFEIFIEIGKSKKINIIDTVTKSLIKKNINLIDKEFRNNRIYAEQFLTILRSKYNLSSILRTMKTLGVLQKYIPEFSEVIGQMQFDLFHTYTVDEHTFKVVRNIRQMKLYKQSGFELEHELVNKLPKLEILYIAG

SEQ ID NO: 133581 - protein, 441 aa, Unknown
  Bacterial polypetide isolated from the Sargasso Sea
MKDKVSRINNEFNKNFPEIYLKPSKVNKFLKKYTNEVEKEIKNKFLKLKLDKNFVIYANGGFGRKEIFPISDIDISIVEKNKPKDFKNLEEFISFLWDQGYKVGHSVRTISDIKKISKSDLKEYTSYLTRRPIISTNEMDKKINYALSTIWTKNNFYNAKYVEQQQRHSEFFSTAYNLEPDLKESPGTLRDFQSALWILQHCFDLKSVNEISKSRLFNGELNNAIDAYNFIKSLRFATNISTNKNRLDFEAQIEISKKAKLGKRTTKKSVEMMMKKFYEMASSLSYFNEIVYEKYNEKYPRKSFFKKIEGIHKYKNKIGIQNINLKNNKSMIFEIFIEIGKSKIINSIDTETKSLIRKNISLIDKEFRRNEHYANQFLEILKSKYNLSSILRTMKSLGVLQKYIPEFDSVVGQMQFDLFHVYTVDEHTFKVVRNMRANEIK

SEQ ID NO: 133582 - protein, 402 aa, Unknown
  Bacterial polypetide isolated from the Sargasso Sea
IGQMQFDLFHVYTVDEHTFKVVRNMRQMKLNKQPGFELEHELINKLPKIEILYIAGLFHDLGKGKGGNHSEIGAKSSFRFAKRLGMSNTDASLISWLVKKHLIMSSISQKKDIADPNTVSEFLAEVKQDEKLNYLYLLTINDIRATNPALWNGWKHQLLRDLYLLTRSKINKEPVKASSQISLDRQKNVINNFKNKDEKLLIKKHFKNFEDSYFNKHSSKSLIWQSELIIKNKNNKLIVGCKRKFDDLIEIFIKVEDSPGLFYKSVKILEHSGLEIIDANIFSSENNKLAANTFITKYSRHDRTLNKSELTELCTKIEKNFNKEDGASKMQSLKKKNTRFEKNIKINESINFDKNRNLITIETVDSSGLLANIAKVFLENKVSIYSARINTLGERVEDTFEI

SEQ ID NO: 133583 - protein, 493 aa, Unknown
  Bacterial polypetide isolated from the Sargasso Sea
MKDKVSRINNEFYKNFPEIYLKPSKVNKFLKKYTNKVEKEIKNKFLKLKLDKNFVIYANGGFGRKEIFPISDIDISIVEKNKPKDFKDLEQFISFLWDEGYKVGHSVRTISDIKKISKSDLKEYTSYLTRRPIISTNEMDKKINYALSKLWTKNNFYNAKYVEQQQRHSEFFSTAYNLEPDLKESPGTLRDFQSALWILQHCFDLKSVNEISKSRIFNGELNNAIDAYNFIKSLRFATNISTNKNRLDFEAQVEISKKAKLGKRTTKKSVEMMMKKFYEMASSLSYFNEIVYEKYNEKYPRKSFFKKIEGIYKYKNKIGIQNINLKNNKSLIFEIFIEIGKSKIINSIDTETKSLIRKNISLIDKEFRRNERYANQFLEILKSKYNLSSILRTMKSLGVLQKYIPEFDSVIGQMQFDLFHVYTVDEHTFKVVRNMRQMKLNKQPGFELEHELINKLPKIEILYIAGLFHDLGKGKGGNHSEIGAKSSFRLQKD

SEQ ID NO: 133584 - protein, 384 aa, Unknown
  Bacterial polypetide isolated from the Sargasso Sea
GKRTTKKSVEMMMKKFYEMASSLSYFNEIVYEKYNEKYPRKSFFKKIEGIHKYKNKIGIQNINLKNNKSLIFEIFIEIGKSKIINSIDTETKSLIRKNISLIDKEFRRNEHYANQFLEILKSKYNLSSILRTMKSLGVLQKYIPEFDSVVGQMQFDLFHVYTVDEHTFKVVRNMRQMKLNKQPGFELEHELINKLPKIEILYIAGLFHDLGKGKGGNHSEIGAKSSFRFAKRLGMSNTDASLISWLVKKHLIMSSISQKKDIADPNTVSEFLAEVKQDEKLNYLYLLTINDIRATNPALWNGWKHQLLRDLYLLTRSKINKKPLKASSQISLDRQKNVINNFKNKDEKLLIKKHFKNFEDSYFNKHSSESLIWQSELIIKNKNN

SEQ ID NO: 133585 - protein, 833 aa, Unknown
  Bacterial polypetide isolated from the Sargasso Sea
MKEQISTINNDYINDFSNIYLDPSKVNKYLNNYSKIIEKDIKDKFIKLNLNKNFVIYANGGFGRKEMFPSSDVDISIIEIKKTKNYEDLEKFISYLWDQGYKVGHSVRTIKDIRKISKKDVKEYTSYLTRRPLITNNVIDKKISNTLLNLWDKKKFFNRKLQEQKERHSQFHSTAYNLEPNLKESPGTLRDFQTALWILQHCFNLNSINEISESDIFKDEIEDAIDAYNFIKSLRFATNITSKENRLNFETQLEISSLAKLRKNKTNKTVEEMMKKYYEMASVLSHFNSIVFEKFDEINSSRFKKYKGIYKHKNKIGINVADLSKSKELIFKIFIEIGKNKTINLIDTETKSLLKRNANLIDSQFRKNKTFANQFLKILKSKHNLSSILKTMKDLGILQQYIPEFGEVVGQMQFDLFHVYTVDEHTFKLVRNMRQMKLHEQKGFEIEHELINKIPKIEILYIAGLFHDLGKGKGGDHSKIGAKTSFNFAKRIGMSDTDANLISWLVKEHLIMSSISQKKDISDKETIKEFAENIQQIEKLDYLYLLTVNDIRATNPALWNGFKHQLLKDLYKLTRLRINKEPMQASSEIALDRKTNVIKSIEKKDHKILDNYFDLLNNNYFNKISTEALKWQARLIIDNNNKDMIIGCRKRFENLIEVFIKVKNTEGLFLKMARILEHSGLEVIDANIFTSKDNGFAANTFITKYSHHDRPFTKDELKELAQRIKRNFKDFSKILQIPKKPIKKVSFEKIINISHSINKEKDRDMITIETADRPGLLVDIAKVFFKKDMSIFSSRINTLGDKVEDTFEIEGKNKAKISTNKVNGIIKALKEVV

SEQ ID NO: 133586 - protein, 336 aa, Unknown
  Bacterial polypetide isolated from the Sargasso Sea
KKDITIMTNIMESRLIIGNEKLFNEMLKITSPKKIWTAKKFFESKLLEQKNRHKKYNHSEYKLEPNIKESPGGLRDIQMIAWVAKRHFDNINLKNLISYKFLSNEEYETLRNGRNLLFAIRFGLHMIAKRREDRLLFDYQKNIAELFGFKNNEKNKGIEDFMKMYFKTVREISRLNEILLQHFQEDIIYKKNKDKIVKINSRFQKRNDLIEIINESIFERYPYSLFEIFLLIQQDPKIKGIRATTIRSIRKYIYLIDKKFRNDVINKSLFIEILKQPNLVGHKLRLMHKYGILGAYMPAFSKIEGLMQFDLYHIFTVDEHILRVIRNLRLFGLDEY

SEQ ID NO: 133587 - protein, 481 aa, Unknown
  Bacterial polypetide isolated from the Sargasso Sea
GVLTKSEAEAFRRFEDFLWHIRCQLHFLEKNPNDVINFNVQMEMADKLGYHDRKGLKPVERFMKHYFLTAKEVGDLTRIICSVLEERQKDKFSFFSYIKKIFEIPAKLISSGGSLGLYVSSGRLNISNEEIFKKDPSKIILFFDFLEKKNLFAHPNAIRLIRKSVKLIDHKLRNNIRTNEVFTNILSSPEAEKTLRAMNESGVLGKFVPDFGKIVGLMQFNMYHHYTADEHLIKAVGELNKIFHSENKDYTILNSLSLDEKEKRILSLAIFFHDIAKGRENDHSEEGQKVVKKMAKRLGLSEKDEEMISWLVLDHLVMSDFAQRRDISDPVTISDFAEKIQNTKRLKLLLFLTVADIRAVGPGVWNDWKGELLKNLYNETYLALTGNYSEQDRLYKTNEIKERIKKEITEVSKEDKIRWFNLVDEKYWISVPEKIQIQNLITWHTGIGDKENNIIDFYNSDDYSSTILTVITQDKKRLFER

SEQ ID NO: 133588 - protein, 626 aa, Unknown
  Bacterial polypetide isolated from the Sargasso Sea
IKKSKLLDDQYKNTVIAYNFIKFLRFHANLLTDRNRLSFESQIEISKNINSISEKDTKSTVEKMMRKYYEMAEYISYFNSTVFEKYNETYPKNLFKNANPIYKHKSKIGINENIDIKTNKDLIFKLFIEIGKSKKINLIDTKTKALLRNNLNLIDQEFRKDKYFAEQFLDILKSKHNLSSILKTMKSLGILQKYIPEFGEVVGQMQFDLFHVYTVDEHTLKVVRNMNQMKLYEQAGFLLEHELINKIPKIEILYIAGLFHDLGKGKGGDHSEIGAKISFNFAKRLGMSSTDANLISWLVKKHLIMSSISQKKDISDPLTVNDFAKEVEQNEKLNYLYLLTVNDIRATNPALWNGWKHQLLRDLYTLTRSKINKNPIKASSDIALDRKNSVLSELNKDEKSFVKNYFSKFSDSYFNKNATESLKWQSQLIIQNKNCDLVIACKNKFDNLLEIFIKVDNSKGLFLKLTKTLEKSGLEIIDANIFTSTDNKLAANTFITKFSHHDRTLNQSELKELSIRIIKNFNNYEDFSDSIKIANKKIKFQNKLNITNTHNTSKGRNLITIETSDRPGLLSDIARVFYDNNLSIFSARINTLGDKVEDTFELENFNKTLIPNKKMKEIIASLKKVV

SEQ ID NO: 133589 - protein, 304 aa, Unknown
  Bacterial polypetide isolated from the Sargasso Sea
ILWRIRFALHLVVSRYDTALLLDRQLSVAQRLNYGGEGNEPIERMMKDYFRVTRRVSELNHMLLQLFDEAILALPADEKPRPIDDDFQLRGTLIDLRNDDLFIRKPEAILRMFYIMVRNSAISGIYSTTLRHLRHARRHLTQPLCYIPEARSLFLSMLRHPGAVSRGLLPMHRHSVLWAYMPQWSHIVGQMQFDLFHAYTVDEHTIRVMLKLESFANEETRPRHPLCVDLWPRLRQPELILIAALFHDIAKGRGGDHSVLGAQDVLKFAELHGLNSRETQLIVWLVRQHLLMSVTAQRRDIQDP

SEQ ID NO: 133590 - protein, 241 aa, Unknown
  Bacterial polypetide isolated from the Sargasso Sea
MLEELINQKKTDSDLLSKQFDQWLYKDRGRKIRGIEYFLNQRSENIDKLIRKAHDMSDLCSIKDFGIFSVGGYGRGELHPFSDIDLLLLSESNLSTGEQKKIEKFISLLWDLGLDIGHSVRTLEQAMKQAREDIFTMTNMLEFRKLTGSEDLHKMYLDIIDTKNLWRNKSFIQEKIKEQIERHETFNNTSYNLEPDIKSSPGGLRDIHTIDWLIKNSLRSVSEKEKLSGALTFDERKELNK

SEQ ID NO: 133591 - protein, 121 aa, Unknown
  Bacterial polypetide isolated from the Sargasso Sea
IRFGLEQAITQRSWQPPQPRRQPAKLRHFTVDTEVTFLPTHTDRKSFLELIALDQPGLLARVGQIFADLGISLHGARITTIGERVEDLFIIATADRRALNNELQQEVHQRLTEALNPNDKG

SEQ ID NO: 133592 - protein, 277 aa, Unknown
  Bacterial polypetide isolated from the Sargasso Sea
MNTLPEQHANTALPTLPGQPQNPGTWPQHDLNCTGIKAHIDTFQSWLGEAFDSGISAEQLIEARTEFIDQLLQRLWIEAGFGQIADLALVAVGGYGRGELHPLSDIDLLILSRKKLPDSQAEKVGELLTLLWDVRLEVGHSVRTLEECLLEGLSDLTVATNLIETRLLIGDVALFLELQKHIFSEGFWPSDKFYAAKVEEQNQRHQRYHGTSYNLEPDIKSSPGGLRDIHTLQWVARRHFGATSLDEMVGFGFLTLAERAELNECLHILWRIRSPCI

SEQ ID NO: 133593 - protein, 314 aa, Unknown
  Bacterial polypetide isolated from the Sargasso Sea
FVNWDWLRRDIEGFPVQRGRLSVSSSNEFKENPVRILKLFHVAQKRNIDIHPNALKLVTRNLRRIDTIRNDAEANRLFLEMLMSSRGAEATLRRLNEASVFGRFVPDFGRVVAQMQHDMYHVYTVDEHTIFAIGILHGIEQGKYRDDMPVATDVIQKISSQRALFVALFLHDIAKGRGGDHSILGAEVAEALCPRLGLSAEETETVAWLVRHHLLMSRIAFHRDLADPKSIRDFANIVQSLERLRLLMLLTVADIRAVGPSVWNNWKASLIRELYFATEAQLSGGHEATGREVRIEGAKLAVRERWRIGGRKKR

SEQ ID NO: 133594 - protein, 256 aa, Unknown
  Bacterial polypetide isolated from the Sargasso Sea
HAELRVRFFEEVVKGKGLFVEAKLEERDERHARMGDSRYVLEPNIKDGKGGLRDLHTLFWIAKYLYRCESIAQLRDEGVFSQDELARFDKAQRFLWTVRCYLHYLTARSEERLTFDLQPELAREMGYVEREGVSGVERFMKHYFLVAKDVGDLTRIFCASLEARHQRSWNFKLPGLGLFTREVEGFKIEGGRLNVTEHDHFQERPVEMLRLFEVAQRHELDIHPNALHLITRSLSRITKDVQNDPKANALFVHMMT

SEQ ID NO: 133595 - protein, 283 aa, Unknown
  Bacterial polypetide isolated from the Sargasso Sea
MQVYYRWMKTLSQLNELLIEVFEHRLADAADSDIRVIDDDFEVSNSRIRARHDSVFQDNPSNLLRVFVLIGNDPLVDRIEPNTQRLLRRDSPLVDDAFRASQENRDLFMDVLGVPHNMTKQLRRMSRHGVLGRYLPAFGKIIGQMQFDLFHAYTVDAHTTEVIANTRRFMRADYTDRFPVSTRIARRLRDPRLLYIAALFHDIGKGRGGDHSELGAVDAGTFCTDHGLSQTDTELIVWLVKNHLLMSQIAQRRDISDPEEIQRFAQIVVTEERLDYLYTLTVA

SEQ ID NO: 133596 - protein, 246 aa, Unknown
  Bacterial polypetide isolated from the Sargasso Sea
MPRKKAISSSQRQSSIDKVALDNALKTTNKSIKFFRDALKKANDSLATRFYNNESIDVLVKDRALIIDEIILAVWTHFATDAKKQCALIAVGGYGRGELHPYSDIDLMILLSENESTDIDAKISRFLTLLWDIGLEVGHSVRTAQDCAIQSKDDVTVLTTLMEARLLSGPTELFKTMKRRISKDNIWAPAAFYEAKLSEQIKRHHRYDDTGYNLEPNIKGSPGGLRDIQMIGWIARRHLDTESLNE

SEQ ID NO: 133597 - protein, 280 aa, Unknown
  Bacterial polypetide isolated from the Sargasso Sea
LDFDAQMAIAPRMGFSDPVGMRAVERFMKRYYLAIRHVGDLTRIFCAVMETDFRKQLTFWRPDFLRAKNLDPFYIESGRVRLRENLRFRDDPLRIFRLFNIAQTYNADVHPHSLQRVTRGLPSVGAKIRQDPEANALFLDILTASKNSERVLRLMNECGVLGKFLPDFGRIVAMMQFDMYHSYTVDEHTLKAIGILQAIEAGDLESTAPVATEAMPEIQSRRALFVATLLHDIAKGRGGDHSILGAEVALLACPRLGLTPEETETVSWLVRHHLLMSKTA

SEQ ID NO: 133598 - protein, 275 aa, Unknown
  Bacterial polypetide isolated from the Sargasso Sea
VANTPEVQGLSTICIRQLRNAHRAFEAEYYVERPLCREKFMRLMKQPEFFDFAWDIMHQYGILQAYLPEWDAIVGMMQFDLFHAYTVDEHTHRLVKHVNYFFSKANKDFPRCGRICRNLDKPEVLYIAAIFHDIAKGRNGDHSTLGAQDVAKFCQQHDVPSDDAEMIAWLVENHLLMSVVAQRRDIYDPDVISEFAGAVRSHNHLNLLYTLTLADIRATNDNLWNDWKASLLRELYLMTQKALDNGLQCQVTLNERVTTHKHQARQILQERAIEP

SEQ ID NO: 133599 - protein, 491 aa, Unknown
  Bacterial polypetide isolated from the Sargasso Sea
PHTSLFIELFKCREGIHRNLRRMNRYGILGRYLPEFGHIVGQMQHDLFHIYTVDAHTLNLIKHLRKFRWPELAEKFPLASKLIDKLPKSELIYLAGLYHDIGKGRGGDHSELGAVDAEAFARRHHLPAWDSALIVWLVQHHLVMSTTAQRKDLSDPQVIHDFAQFVGDQTHLDYLYVLTVADINATNPSLWNSWRASLLRQLYTETKRALRRGLENPLDREEQIRQTQSAALDTLVRGGTDPDDAEQLWSQLGDDYFLRHTATDVAWHTDAILQHPNDGGPLVLMKETTQREFEGGTQIFIYAPDQHDFFAVTVAAMSQLNLNIHDARIITSTSQFTLDTYVVLDADGGSIGNNPARIQQIREGLIEALKNPDDYPTIIQRRVPRQLKHFAFAPQVTIHNDAQRPVTILELTAPDRPGLLARIGRIFLEYDLSLQNAKIATLGERVEDVFFVTDANNQPLSDPELCARLQETIVRRLSEPSAQPQTLQINI

SEQ ID NO: 133600 - protein, 842 aa, Unknown
  Bacterial polypetide isolated from the Sargasso Sea
MIDDLVIKAPIKETISKRCELNDDVIHFVANQFFSNDESKLNIIAVGGYGRGEFYPKSDTDLLILLDKNTKNDLKNNISKFLTFLWDIGIEASHSTRTVNECIKESKRDISVGTSLLESRSIFGSKTLFSEYQKKVLLKQAWKNEKFFSAKIDEQNNRHNSFNNTAYNLEPNIKDGPGGLRDAHTIFWIAKKLGYGNIADLEQDNILNIDQIRLLQEAWGLISKIRYALHSLAKRPEDRLLFDYQRVLAENFGYKDSEHLMAVEVFMQDYYKAAKTISRFNEICLQIFDQKINARRFIAKKNINKNFHIRNKLIGLRKGVEFENDPSLLLEIFLHFQENNITGIESKTINQILENLDLINDGFRDNPDNKKLFLKILKAPEGVTHELKRMNLYGVLGLYLPIFGQIEGRMQFDLFHTLTVDEHTLNVVSNLRRLALDRFNHEYPEDSKKMQSIESQEILYLAGLFHDIAKGRGGDHSVLGARDAEEFCIAHGMTRYESKLVSWLVENHLIFSLTAQKKDIHDPLVVKELAEIIGDEEKLEYLYLLTVCDVRATNPNLWNSWKERLFKDLYHLTKNALRMGLENTIDKEEIVKEKIEIANIHIGDQGLDISKLRTEIEKLSEDYFLRFNQGEINFHLEKLITNSVTDEENTIIGLKIIEEEGLMLLFIKTLMDIDTFSIITNNLVEKNISIKDAKVIELNDGNCIYNFYTDVPKGDAYDIENKIESLIEKLSWRLKKKQIIKKKKFKLPRRLRSFTTKTRVNFLVDHIHNRTVLEIVSIDRPGLLVDVSEVLRKNNIWIESAKIATIGERAEDVFYLRDEYQDAIAIETNKKLESELIESLDG

SEQ ID NO: 133601 - protein, 861 aa, Unknown
  Bacterial polypetide isolated from the Sargasso Sea
MNTALLAKQSLIEQNQTLLARFKAKTPIEELVTQRCQFVDSLVKQAWQQHGLDQYPIALIAVGGYGRGELHPHSDVDLLFLFEGELSQAAETALSEFIAFLWDASLEIGHSVRTLSDTLNLGREDITIATNLLEARLLSGPETLFDQLYDAIRQSDFWTSSQFFIAKRDEQTARHAKASAFDLEPNIKSCPGGLRDIQTIAWVAMRHFGASRLEELVQYEFLEPAELEELLECQHFLWKLRFALHMAVGRDENRLLFDVQRQVAELMGYEDATQLAVEQMMKRYYRTVRRVMELNEMLLQLFKRATLGQTKALEIQAIDNNYQRRGAFIEALKDDLFDSGEEIVRLFVHVAKNSNIKGIYAPTLRSLRRARRAQQQPLQENPQCRQAFMEILKHPRGIAALSLMHKHGVLSAYLPAWRNIEGQMQFDLFHAYTVDEHTHRLLLNIERFSQPEQKEEFPLGSVLINQLPKKGLLVLGAIFHDIAKGRGGDHSKLGSSDALAFCKLHGLNDHDGRLVAWLVENHLVMSVTAQRRDISDPDVVADFASKVRDAVHLSYLYCLTVADICATNEKTWNNWKGSLLRDLYFSTQRVLARGKEKPVDIRARVREYQAKAKKELLRRGVKEKELDTLWQRFKADYFLRHQPNQVAWHAEAILKHKQLDEPLVLVSKHTTRGGTELFVYCQDRPKLFATVMAVLDNKNINVHDANIMTSKDNYALDTFVILEQDGAPVSQLSRIQSIRKALEKALASDNPKLPRFRKLSRKMKPFNVPTQVSFLESNRHGTSMMELIALDTPGLLAKVGDIFYRCNTTLLAAKITTIGERAEDFFILQTNDGLQLNETQENTLKEALISALSAINTESTN

SEQ ID NO: 133602 - protein, 834 aa, Unknown
  Bacterial polypetide isolated from the Sargasso Sea
MKGKIISIKEDFLNEFPQIYQKPSKINKYLKKYSNKIEIDIKNKFKKLELDKNFAIYANGGFGRKEMFPSSDIDLSIVELNKIQDYGNLEKFISFMWDRGYKVGHSVRSINDIKKISKNDLKEFTSYLTRRAIISNQNIDNKITKALNGLWTRNNFYNQKFIEQQRRHSEFHSSAYNLEPDLKESPGTLRDFQSALWILQHCYGFDSQDAINKSGVIDGEFKKTIEAYNFIKSLRFATNIATQKNRLNFEAQIEVSKYAKLNKKNSKASVEKMMKNYYENASILSYFNEIIFEKYNEKKVNIFSKKISGIYKNKNKIGIRNIDIKKNKDLIFQIFIEIGKNKNINLIDTSTKSLLKKHINLIDKKFRKQNIYSKQFLEILRSKYNLSSILKAMKNLGVLQAYIPEFAQVVGQMQFDLFHVYTVDEHTFKVVRNMRQMKLFKQKEFELEYELINKIPKIEILYLAGIFHDLGKGKGGDHSDIGAKTSYDFAIRIGMSETDAGLISWLVKKHLIMSSISQKKDIGQEETIIEFAKQVEQSEKLDYLYLLTINDIRATNPALWNGWKHQLLKDLYILTRSKINKEPLIASSSIALERKKNTLLAFTSNDGEVLESYLSNLGNSYFNKNLSESLKWQAALIVKNKDKDLIVGCRNIFENLIEIFIKVKNSKGLFYKFTKILDHSGLEVIDANIFSSTDNTFAANTFIAKFSHHDRKLLNSDLIELKKRIEKNFTEFNKIKDFQKKSIKKNRFEKVINISNSINKDKGRNLITIETSDSQGLLANIAKVFFDNNVSIFSARINTLGDRVEDTFEIENHNKTLIGSNKIEKIVADLEKVV

SEQ ID NO: 133603 - protein, 863 aa, Unknown
  Bacterial polypetide isolated from the Sargasso Sea
MKTYSNKELALKFKSNNEINSFVHKKYSSNRNNIEKLLYLKTQIVDSILIEAWIENKLDKYPITLVAVGGYGREEIFPYSDIDILIIYNSKVDKNFKHCISSFIAKIWDYKLQLSHSVRKINECLKESKSDISTETNMLESRYIFGNKEIYSSFKNKIKQDSASSKKNFINKKIIEQEIRHNKFNATSYMLEPNIKECIGGMRDLNNIFWVSKKIYGISDFHGHYDNKIISKKEFNQVKSSRNFLFNVRYLLHYLNKKPLERLYFENQILLAKFLNYRGNGNQPVERFMKNLYKNISVVKHTNNIILNYINFNLKALRGRFIKINKYFYSKDNMIFINNDESFLKNPSLLLEIFYVMQNKNLQEIEPRTLRLINDSLYLIDSKFRNSKTNQIVFMNILKNDFNVTKILRKMSESGVLGSYWPTFKKSIGQMQFDLFHIYTVDEHTLSVLSNLRFMGTNECNKKYKFIYEVYKNIKDKEVLYLSSLFHDIGKGSNKDHSKVGKDLIYKFAIKHGLSEHQSNTASWLVENHLLMSLTVQKKDINDPIEVIKFATNVKTQERLDYLYLLTIADIRGTNPKLYTDWKDHLLKEFYLLTSKYIATNSILDSSKDSYIKNIKSSVLKKLNTLNNKKFLEDMWGQLPIDYYQKHNDEDLEWHSECLMKKGTNKDFMQIKESPYRGCTQLMIYQKTRKNLLRKITSVFEKLKIQITEANIVTLSNNSSIDTYLLLDSSGKQIKNKYMLNDLKNNIEQVLIDPKKVKISKRTKKASYTKDFTSVLDVEVYSKNNSVTIEVNALDSPGLLSSICEVMDDSNLIIKDAKVSTLGEQVNDIFFVESINFDNFDNFSKKIKNKLKQKLSDLYNSQM

SEQ ID NO: 133604 - protein, 884 aa, Unknown
  Bacterial polypetide isolated from the Sargasso Sea
MDASLLSPHLLPDAQLTRENCKEYLSRFLGWLHARFDAGDNIIELVATRSEYMDELLTRLWQKFGFDKTELTLIAVGGYGRGELHPHSDIDLLILYEGDELDEVLGLRIGEFITLLWDLKLEVGQAVRNVAECLEQGRGDITVATNLIEARYITGREAGFQQLKEATGPQHFWPSEQFFKAKREEQAQRHQQFLGTAYKLEPDLKSNPGGLRDIQTLAWVARRHFGATTLFEMTSHGFLNRAEYRELLDCQNFLWKVRFALHMAINKGDNRLLFDRQRTVAQMLGFEGEGNAPVEQMMKRFYQTVRRVSELNEMLLQLFDEAILGNTAMDVRRLSDEFQLRGRLIDAVDSELFGREPAAILRLFYQIAQHPEIAGIHSATLRQLREARRKLNCWLQDLPECRRLFMALLRHPNGIGQPLTLMHKYGILAAYLPQWNLIVGQMQFDMFHAYTVDEHTHRLLKNIHQFPNPASRQTHPLCHEVFTRLRKPELLSIAALFHDIAKGRRGDHSELGAVDALEFCQLHGLDRYESRLVAWLVRHHLLMSVTAQRRDIYDPEVVTDFAQKVRDEQHLDLLYCLTVADICATNDTLWNDWKGTLLRELYFATQKALRQGLENPPDMRLKIRENQRQAKQILAQRDVPEEAINQLWSDFKADYFLRHTPEQIAWHCRKIIEHGDNPAPLVIIGKHPTRGGSEVFIYCRDTPNLFATVASALDQKNLNIHDAQIMNSRSDYVLDTFVVLEPNGEPISPNRTATIKKALEKALQEPGKLVLRSKPLSRRHRQFSVPTRVVFLPHKGETRHTLLELTALDTPGLLARIGAVFQQCGLSLHAAKITTIGERVEDFFSLTTLAGEPLTQAEQQALEERLVNQLNPQESADDEGRPGL

SEQ ID NO: 133605 - protein, 661 aa, Unknown
  Bacterial polypetide isolated from the Sargasso Sea
MNDGVIRYVAEQFFKKDESKLNIIAVGGYGRGEFYPKSDTDLLILLDKNSKNDLKNNISKFLTFLWDIGIEASHSTRTINECIKQSKKDISVGTSLLESRSIFGSSELFTEYEKRVLLKQSWKNEKFFAAKIDEQSNRHNRFNNTAYNLEPNIKDGPGGLRDAHTIFWIAKKLGYKSIAGLEKDNILNNEQVKLLLESWGLLSKIRFALHSLAKRPEDRLLFDYQRILADNFGYKDSEHLMAVEVFMQDYYKAAKTISRFNEICLQIFDQKINARRFMAKKNINKNFHIRNKLIGLRKDIGFKDNPSLLLEIFLHFQENNIIGIESKTINQILENLDLINDEFRADPNNKKLFIKILKAPEGVTHELKRMNLYGVLGLYLPIFGQIEGRMQFDLFHTLTVDEHTLNVVSNLRRLALKRFDHEYPEDSKKMQSLESQEILYLAGLFHDIAKGRGGDHSILGAKDAEDFCISHGMTRYQSKLVSWLVENHLIFSLTAQKKDIHDPLVIKELASIIGDEERLEYLFLLTVCDVRATNPNLWNSWKERLFKDLYQLTKNALRMGLENTLDKEEIVKEKIEIMTKHLEIQGLDITEMDAAIGKLSEEYFLRFNQDEINYHLQKLISNKSKDEENTIIGLKLIEEEGLMLLFIKTVIDFDTFLDNHK

SEQ ID NO: 133606 - protein, 861 aa, Unknown
  Bacterial polypetide isolated from the Sargasso Sea
MNTALLAKQSLIEQNQTLLARFKAKTPIEELVTQRCQFVDSLIKQAWLQHGLDQYPIALIAVGGYGRGELHPHSDVDLLFLFEGELAAVAEAALSEFIAFLWDASLEIGHSVRTLDDTLRLGRDDITIATNLLEARLLSGPESLFDQLYDAIRQSDFWTSSQFFIAKRDEQTARHAKASAFDLEPNIKSCPGGLRDIQTIAWVAMRHFGASRLEELVQYEFLEPAELEELLECQHFLWKLRFALHMTVGRDENRLLFDVQRQVAELMGYEDATQLAVEQMMKRYYRTVRRVMELNEMLLQLFKRATLGQTKALEIQAIDNNYQRRGAFIEALSDDLFDSGEEIVRLFVHVAKNSNIKGIYAPTLRSLRRARRAQQQPLQENPQCRQAFMEILKHPRGIAALSLMHKHGVLSAYLPAWRNIEGQMQFDLFHAYTVDEHTHRLLLNIERFSQPEQKEEFPLGSVLINQLPKKGLLVLGAIFHDIAKGRGGDHSKLGSSDALAFCKLHGLNDHDGRLVAWLVENHLVMSVTAQRRDISDPDVVADFASKVRDAVHLSYLYCLTVADICATNEKTWNNWKGSLLRDLYFSTQRVLARGKEKPVDIRARVREYQAKAKKELLRRGIKEKDLDTLWQRFKADYFLRHQPNQVAWHAEAILKHKQLDEPLVLVSKHTTRGGTELFVYCQDRPKLFATVMAVLDNKNINVHDANIMTSKDNYALDTFVILEQDGEPVSQLSRIQSIRKALEKALASDNPKLPRFRKLSRKMKPFNVPTQVSFLESNRHGTSMMELIALDTPGLLAKVGDIFYRCNTTLLSAKITTIGERAEDFFILQTNDGLQLNENQEHTLKEALISALNAINTESTN

SEQ ID NO: 133607 - protein, 868 aa, Unknown
  Bacterial polypetide isolated from the Sargasso Sea
MQKAKKNLEQGNYKGSECAREIANLYDHVIKNYYQYLNAHNYISQNKTDFEKMAIIATGGYGRGKISPGSDIDLLFLMPFKKTAWAESITENLLYFLWDLGLKIGHASRNINECLTLSAKDQTITTSLLDARYICGDREVKKVFDKKFRNTISKRSSKEFIDAKLEERESRHIKEGQSRYLVEPNIKNGKGGLRDLESLSWMTNFCYQASRPDQMVKKGVLTEREAESFKKCEDFLWYIRCQLHFIEKNPNDIINFNVQMEMADKLSYNDRKGLKPVERFMKHYFLIAKEVGDLTRVICSVLEEKQKNKTSLISIIRNFFEVPAKYVYTGGGLGLYSSKGRLNVSNEDIFKRDPSKIILFFNLLEKNNLFAHPNAVRIIRKSANLIDHRLRNNIKTNELFTNILSSPKAEKTLRAMNECGVLGKFIPDFGRIVGLMQFNMYHHYTADEHLIKAVGELNKIFHSKDEGFDILNSLNLDDDEKRILSLAIFFHDIAKGRENDHSEEGQKVVRKMAKRLGLSEKDEEMISWLVLDHLAMSDFAQRRDISDPVTISDFAEKIQTTKRLKLLLFLTVADIRAVGPGVWNDWKGELLKNLYKETYLALTGNYSSKDRVYRANEIKEKIKSKINNISEEKKLRWFDLVDEKYWSSVPEKIQIQNLIAWEKGNQDKENDIIDFYNSDDYSSTIMTVITQDKKRLFERITSGCLDMNINIVDARIFSNKSNVIDILWIQDNFGKKIVDRKRLSRIKEKILLFINEDEIPLINYEDNIDKRSSAFNILPDVSIYNSLSKKYSVIEVSAKDRPGLLNDLTRKISDLSIDIRSAHIATFGERATDVFYVLNKSGEKISSKNKIENIQKELIKSISFSEYV

SEQ ID NO: 133608 - protein, 858 aa, Unknown
  Bacterial polypetide isolated from the Sargasso Sea
MSAHAAPPPEALSRRAEFKAAKTEMLERFRRAANVASLMHALSKLTDEALKRVWDDCGLPATLALVAVGGYGRGELAPYSDVDILVLLPDAHDPALDGRIERFIGMAWDLGLEIGSSVRTVAQCIEEASQDVTVQTSLLEARRIVGSTALFERFTVRYREALDARAFFTAKVLEMRQRHAKCQDTPYSLEPNVKESPGGLRDLQTILWIARAAGFGSSWRELDTRGLITDREARELRRNEGFLKTLRARLHVIAGRRQDMLVFDLQTQAAESFGYQPTQAKRASEQLMRRYYWAAKAVTQLATILIQNIEAQLFPATSGITRVLSPDRFVEKQGMLEIVDDGVFERHPDAILEAFLLYETTRGVKGLSARTLRALYNSREIMNNTWRRDPQNRDTFMRILQQPEGITHAFRLMNQTSVLGRYLLNFRRIVGQMQHDLYHVYTVDQHILMVLRNIRRFAVAEHAHEYPFCSQLIGNFERPWVLYVAALFHDIAKGRGGDHSTLGMADARRFCREHGIAGDDAALIVWLVQHHLTMSQVAQKQDTSDPEVVKRFAEVVGNERYLTALYLLTVADIRGTSPKVWNTWKGKLLEDLYRITLAVLGGASPDAHSELKSRQEQALALLRLETVPDDAHRALWDQLDVGFFLRHDAADIAWQTRVLYRHVNAETAIVRARPSPIGDALQVLVYVKDRPDLFAGICAYFDRNGLSVLDARVSTTRHGYALDNFIVTQTERDVRYRDIANLVEQQLASRLTETAPLPEPSKGRLSRLSRTFPITPRVDLRADERGQYYILSVSANDRPGLLYSIARVLAEHRIGVHAARINTLGERVEDIFLLAGAGLSDNRLQIQLETELLRAIAV

SEQ ID NO: 133609 - protein, 393 aa, Unknown
  Bacterial polypetide isolated from the Sargasso Sea
MQSLESQEILYLAGLFHDIAKGRGGDHSILGAKDAEDFCISHGMTRYQSKLVSWLVENHLIFSLTAQKKDIHDPLVIKELASIIGDEERLEYLFLLTVCDVRATNPNLWNSWKERLFKDLYQLTKNALRMGLENTLDKEEIVKEKIEITTKYLEIQGLDVTEMDAAIGKLTEEYFLRFNQDEINYHLEKLISNKVKDHGNTIIGLKLIEEEGLMLLFIKTLIDFDTFSIITNNLVDKNVSIRDAKVIELNDGSCIYNFYTDMPKGDAYDIENKIESLIGNLSLRLEKKQITRKKKFKLPRRLRSFKTSTKVNFLEDHVHNRTVLEMVSIDRPGLLVDISEVLRINNIWIESAKIATIGERAEDVFYLRNEHQDAIPLETTKRLESELIESLDS

SEQ ID NO: 133610 - protein, 442 aa, Unknown
  Bacterial polypetide isolated from the Sargasso Sea
VLGRYLLNFRRIVGQMQHDLYHVYTVDQHILMVLRNLRRFAVAEHAHEYPFCSQLIANFDRPWVLYVAALFHDIAKGRGGDHSTLGMADARRFCRSHGIEGEDGELVVWLVQQHLTMSQVAQKQDTSDPEVIKRFAELVGNERRLTALYLLTVADIRGTSPKVWNTWKGKLLEDLYRTTLAVLGGARPDAHSELKSRQEEALALLRLETVPEGAQKALWDKLDIGYFLRHDAADIAWQTRVLYRHVETATPIVRARPSPIGEALQVLVYVKDQPDLFAGICAYFDRNGLSVLDARVSTTRHGYALDNFLVAHTEEDVHYRDIANLVEQELTARLTGDGTLLPGPSKGRLSRLSRTFPVTPRVDLRADERGQYYILSVSANDRPGLLYSIARVLAEHRVGVASARINTLGERVEDVFLLDGHGLSDNRLQIQVETELLRAIAV

SEQ ID NO: 133611 - protein, 730 aa, Unknown
  Bacterial polypetide isolated from the Sargasso Sea
MTNMLEHRKLVGNEGIHRQFLSILNTKNLWRNKIFLEAKMEEQMLRHERFNNTEYNLEPDIKSSPGGLRDIHTIDWVLKNFQRNISQDAVNLDSIITQEEKHELLKSKHWLWTIRYLLHEEANREEDRLLFEHQITIAQKLFPSVKDSNSAAEKLMHRYFRSALNISEINSTALQACKEITATSKLKRKKIIDTNFYEKNNLIHLTDLNGFKKNPSLLLELFVKLTENPKIKGISSNTLRMLKRDRTLIDARFRAKTKNINLFLKLLKSKRLIVTQLENMKNLGILGRYLPEFGRVTGQMQYDLFHIYTVDAHTLQVLRNIRRMILRKSNDIYPLATKLVTKLPKIELLYIAGLYHDIGKGRGSDHSNLGKSIAGKFCTKHLFTDEDKKTVQWLVVNHLLMSVKSQKEDLSDPQVISDFAKTVKTKDRLNYLYCLTVADVSATNPNLWNSWNASLLSELYTKTLEYLENKNSIILSPKENKAEALMLIETMQSKVVSKVKNTWKNFYSDYFENFNYRDLVLHAKYLSTLEDETLVEIIEKNSDSLSTVMIHTKDRANVFATIIGILDSENINFLDAKLFGMRNGYCLDFITISDQSGQMIKKNSSIANSLVTRLIEALDQETLLPKIVQRRQPRHLKHFNTDTIIEYKHDMTHRWTEMDIKTSDRPGLLASICKVFLDHGALIKKARIATYGERAEDKFCITSKENTPFLKKTELEKLINDMNVSLSKKK

SEQ ID NO: 133612 - protein, 385 aa, Unknown
  Bacterial polypetide isolated from the Sargasso Sea
ILYLAGLFHDIAKGRGGDHSILGAKDAEDFCISHGMTRYQSKLVSWLVENHLIFSLTAQKKDIHDPLVIKELASIIGDEERLEYLFLLTVCDVRATNPNLWNSWKERLFKDLYQLTKNALRMGLENTLDKEEIVKEKIEITTKYLEIQGLDITEMDAAIGKLSEEYFLRFNQDEINYHLEKLISNKAKDGENTIIGLKLIEEEGLMLLFIKTVIDFDTFSIITNNLVDKNVSIRDAKVIELNDGSCIYNFYTDMPKGDAYDIDNKLESLIGNLSLRLEKKQITSNKKFKLPRRLRSFSTSTKVNFLEDHVHNRTVLEMVSIDRPGLLVDISEVLRRNNIWIESAKIATIGERAEDVFYLRNEHQDAIPLETTKRLESELIESLDN

SEQ ID NO: 133613 - protein, 588 aa, Unknown
  Bacterial polypetide isolated from the Sargasso Sea
MLEELKNQKKTDSNILSKQFDQWLYKDRGRKIRGIEYFLNQRSENIDKLIRKAHDMSDLCSIKDFGIFSVGGYGRGELHPFSDIDLLLLSESNLSTGEQKKIEKFISLLWDLGLDIGHSVRTLEQAKKQAREDIFTMTNMLEFRKLTGSEDLHKMYLDIIDTKNLWRNKSFIQEKIKEQIERHETFNNTSYNLEPDIKSSPGGLRDIHTIDWLIKNSLRSVSEKEKLTGALTFEERKELNKAKYWLWVIRYLTHIEANREEDRLLFEHQIPVAMKLFPSSKTSNQAAEKLMHRYYRSSLSVSEINSTFIQNIKETYDLTKFSRKKNLDSNFFIKNNLIHLYEMDGFKKNPSLLLELFIKLSENPTVKGIGSQTLRALKRDRDLIDSKFRSNKKNIRLFLKLLKSKRLLVTQLEKMKDLGILGRYLPEFGRITGQMQYDLFHIYTVDAHTLEVLRNMRWMSLGKSEERFPLASKLINKLPKLEILYISGLYHDIGKGRGTDHSNLGKSIVNSFCKRHLFQEEDTLLIEWLVENHLLMSVTSQKKDLSNNLVVKEFAEKVGNLETLDYLYCLTVADVSATNPSLWNSWNA

SEQ ID NO: 133614 - protein, 181 aa, Unknown
  Bacterial polypetide isolated from the Sargasso Sea
LLLDPNSGTLNSLLLNYQIIETPINLLGQKYIEISIFGFDFKLRLALTTVIMFEIWRYFPLAFLFILARLQAIPKELYEAADVDGASPFQKFFKITLPQITAVISILFMIRFIWNFNKFEDVFLLTGGASGTRTLPINVYQQGFAISDIGMGSAVSIVIVVLLLMFMFFYFRLLGKRVDEN

SEQ ID NO: 133615 - protein, 226 aa, Unknown
  Bacterial polypetide isolated from the Sargasso Sea
MKKELTDLFKGSEISDAQNFNSIKISLASPEKIKSWTYGEIKKPETINYRTFRPEKDGLFCARIFGPIKDYECLCGKYKRMKFRGIICEKCGVEVTKSNVRRERMGHINLATPVAHIWFLKSLPSRIALAVDMKLKEVERVLYFENFIVIEPGLTGLNKNQLLNEEELTKYQDEFGEEAFTAGIGAEAVLEMLKNLDLELEKKNLVNYIKETKSKVNEERAIKRLK

SEQ ID NO: 133616 - protein, 127 aa, Unknown
  Bacterial polypetide isolated from the Sargasso Sea
AEDAVAYSARSFQEQLKMFINFDEPVEAPVKEVSTEPEFNKNLLRKVDELELSVRSMNCLKNDNIIYIGDLVQKSEGEMLRTPNFGRKSLNEIKEVLTGMSLYLGMEIPNWPPDNIAEMSKKLEETI

SEQ ID NO: 133617 - protein, 317 aa, Unknown
  Bacterial polypetide isolated from the Sargasso Sea
GARKGLADTALKTANSGYLTRRLVDVSQDSVVLEEDCGTLDGIEMTALIESGEIIEPLGDRILGRVLLEDVIDPESEYDILIPAGTLINEKERDAIQNTRIEKVQIRSPLTCMTEKGVCRSCYGRDLCHGGLVNLGETVGVIAAQSIGEPGTQLTMRTFHIGGTASRSVEQNKWEANFSGVLRFDDLKEVKNREGNIVILGRRGEALIVEGDKTIKPKSLGNLENERERERRPLPMGATLIKQEGEFVEQGDLIAEWDPFSVPIITDVSGIVEFRDISEGETFKEQVDEVSGVSRKVIHESQSMEQRPLIAICDKKK

SEQ ID NO: 133618 - protein, 315 aa, Unknown
  Bacterial polypetide isolated from the Sargasso Sea
KAYRMLEDDGMVATESGVDGGDILIGKTSPPRFMEEYKEFETSGPYRRDTSVGVRPSEHGVVDTVVMTQSNEGGKMYKIRVRDMRIPEIGDKFASRHGQKGVLGILAKQEDLPYTEDGTQPDVLINPHAFPSRMTVGMMMESVCGKAAALRGKQFDGSAFVGEKMDIVKEILDKQGFKYSGKEKMYDGRTGKAFEVDTFIGVVYYQKLHHMVSDKIHARARGQVQMLTKQPTEGRARGGGLRFGEMERDCLIAYGASMLLKDRLLDESDKTDILLCEKCGLTGYHDARKRKFVCAQCGENAPISSVSVAYAFKLL

SEQ ID NO: 133619 - protein, 39 aa, Unknown
  Bacterial polypetide isolated from the Sargasso Sea
FINRLPQGFLAVDAVFMPVRKVNFFVELLEIVHFLLRKV

SEQ ID NO: 133620 - protein, 236 aa, Unknown
  Bacterial polypetide isolated from the Sargasso Sea
AEPVVLTLEVEKEGEITAADISPAEGIEIINPEQLIMTTDRKQKIVAEMTVSVGRGFCLGEDSKTDDQAIGIINVDALYSPVKLVKYNVENTRVGQMTDYDKLILEVNTDGRISPDDALKQSAAILRHHLDVFDQISEEQIEFESHSKEVSEEQNRLRNLLSMSVNEIELSVRAANCLNNANITTVGELATKSEPEMLKYRNFGKKSLNEIKAKLEQLGLSLGMKFENRLLDSASN

SEQ ID NO: 133621 - protein, 144 aa, Unknown
  Bacterial polypetide isolated from the Sargasso Sea
MEEDHEDYGDDDVDRDDAIDHDLPDEDADEDADAREVIESDERLDGRGRRGLGRAVPRHERTTTPYMTKYERARILGTRALQISMNAPVLVQLEGETDPLEIAGKELREKRVPFIVRRYMPDGSYEDWGLEELIVADPDQRRAG

SEQ ID NO: 133622 - protein, 200 aa, Unknown
  Bacterial polypetide isolated from the Sargasso Sea
NTNFHMEMNVGTGKGYVSADMNKPEDPPLGLIPIDSLYSPVKRVSYSVSTAREGKALDYDKLTMEVETNGSISAEDAVAYAARIFQDQLGMFVNFDEPQEVIVREQPAEPEFNKNLLRKVDELELSVRSMNCLKNDNIIYIGDLVQKSEGEMLRTPNFGRKSLNEIKEVLTGMSLYLGMEIPNWPPDNIAELSKKLEEAI

SEQ ID NO: 133623 - protein, 296 aa, Unknown
  Bacterial polypetide isolated from the Sargasso Sea
VPRVKQDNNQRMEDDLTHKYCDIVKTNRTLKNKIKSQSASHIIDEWVSLLQYHVATLIDNQIPGLPSSTQRSGRPLKSLRERCKGKEGRVRGNLMGKRVDFSARSVITPDPNIGIDELGVPKKIAKNLTYPEIVNQFTIERLTQAVRNGPHHYPGALSFTHTKSKITKSLLHIPDRDVIELEFGDVVNRHLIDGDIVMFNRQPSLHKMSMMGHRIRVMDYDTFRLNVTVTSPYNADFDGDEMNMHVPQSILASTEIEKLALIPTQIVGPREHQPRIGIVQDTLLGSNRFTKYDVYL

SEQ ID NO: 133624 - protein, 244 aa, Unknown
  Bacterial polypetide isolated from the Sargasso Sea
MSKELSDLFKSSEISDAQNFNSIKITLASPEKIKSWTFGEIKKPETINYRTFRPEKDGLFCARIFGPIKDYECLCGKYKRMKFRGIICEKCGVEVTKSNVRRERMGHINLATPVAHIWFLKSLPSRISLAIDMKLKEVERVLYFENFIVIEPGLTGLKKNQLLGEEELIKYQDDYGEEAFTAGIGAEAILEILKSIDLKEEREALIKSIKETKSKVSEERSIKRLKLIESFIETGNKPEWMILT

SEQ ID NO: 133625 - protein, 100 aa, Unknown
  Bacterial polypetide isolated from the Sargasso Sea
VKEVKSSEPEFNRNLLKRVEELELSVRSMNCLKNDNIIYIGDLVQKTEPEMLRTPNFGRKSLNEIKEVLNTMSLYLGMEIPNWPPDNIAELSKKLEENSY

SEQ ID NO: 133626 - protein, 284 aa, Unknown
  Bacterial polypetide isolated from the Sargasso Sea
DRDGNPRPGVVVERHLIDGDVAIFNRQPSLHRMSMLVHEVRVMPGKTFRFNLADCTPYNADFDGDEMNLHVIQSEEARAEAKILMRVQEHIITPRYGGAVIGGIHDHISGAYLLTHGERIIPKELAMEVLGSVGWDGDMPEEVTSKDGVVGYRGADLLSLIVPAGFKLNYTSRSGDEVNVTSKGLVSGTIDKRGIGAEDGRLLDAVVQTHGTDKGAEFLNRMTKMTIAICTSLGFTTGIDDEDLPLAAIKEISDINVRASDEVDAELAKFGKNGRGYETRPGRT

SEQ ID NO: 133627 - protein, 71 aa, Unknown
  Bacterial polypetide isolated from the Sargasso Sea
MNCLKNDNIIYIGDLVQKSEGEMLRTPNFGRKSLNEIKEVLSGMSLYLGMEIPNWPPDNIAELSKKLEDAI

SEQ ID NO: 133628 - protein, 149 aa, Unknown
  Bacterial polypetide isolated from the Sargasso Sea
REGKALDYDKLIMEVETNGSISAEDAVAYSARIFQDQLKMFINFDEPVEAPVKEVSTEPEFNKNLLRKVDELELSVRSMNCLKNDNIIYIGDLVQKSEGEMLRTPNFGRKSLNEIKEVLTGMSLYLGMEIPNWPPDNIAEMSKKLEEAI

SEQ ID NO: 133629 - protein, 64 aa, Unknown
  Bacterial polypetide isolated from the Sargasso Sea
MENAIINHNWKDLIKPNKLNIKSSDDKSYTTVTAEPLEKGYALTIGNSLRRILLSSIQGSAITA

SEQ ID NO: 133630 - protein, 169 aa, Unknown
  Bacterial polypetide isolated from the Sargasso Sea
MLINYQIIETPINLLGQKYIAVNILGFDFKLRLALTTVIIFEIWRYFPLAFLFILARLQAIPKELYEAADVDGASPFQKFFKITLPQITAVISILFMIRFIWNFNKFEDVFLLTGGASGTRTLPINVYQQGFAISDIGTGSAVSIVIVILLLLFMFFYFKLLGKRVDEN

SEQ ID NO: 133631 - protein, 270 aa, Unknown
  Bacterial polypetide isolated from the Sargasso Sea
MSRELSDLFKEKSISESQNFNSIKITLASPEKIKSWTYGEIKKPETINYRTFRPEKDGLFCARIFGPIKDYECLCGKYKRMKFRGIICEKCGVEVTKSNVRRERMGHINLATPVAHIWFLKSLPSRISLVIDMKLKDVEKVLYFENFIVIEPGLTGLQKNQLLSEEELIKYQDQYGEESFSTGIGAEAILEILKSIDLKLEREKLAKSIKETKSKVTEERNIKRLKLIDSFIETGNKPEWMILTTIPVIPPELRPLVPLDGGRFATSDLN

SEQ ID NO: 133632 - protein, 81 aa, Unknown
  Bacterial polypetide isolated from the Sargasso Sea
VDELELSVRSMNCLKNDNIVYIGDLVQKTEPEMLRTPNFGRKSLNEIKEVLNSMSLYLGMEIPNWPPDNIAEMSKKLEESI

SEQ ID NO: 133633 - protein, 208 aa, Unknown
  Bacterial polypetide isolated from the Sargasso Sea
MKKEITNLFKSSEISEAQNFNSIKITLASPDKIKSWTYGEIKKPETINYRTFRPEKDGLFCARIFGPIKDYECLCGKYKRMKFRGIICEKCGVEVTKSNVRRERMGHINLATPVAHIWFLKSLPSRISLAIDMKLKEVERVLYFENFIVIEPGLTSLKKNQLLNEEELTKYQDEYGEESFTAGIGAEAILEILKSINLEEEKNALIKA

SEQ ID NO: 133634 - protein, 279 aa, Unknown
  Bacterial polypetide isolated from the Sargasso Sea
VIGEFTELLQYHIMTFMDNTVAGMPRALTRSGRPIKSISERLKGKNGRIRGNLMGKRVDFSARTVITPDPNLMLDELGVPWSIALNMTYPETVTPYNIERLKKLVENGPHPPPGETGAKYIIREDGQRMDLRFLKKESEKRLEYGYRVERHMINGDCVLFNRQPSLHKMSIMGHRVRIMPYSTFRMNISVTPPYNADFDGDEMNMHLPQSMETRAEVQELMMVPKMIVSPQANKPVMAIVQDTLLACRLMTKRDTFITKDVFMNILMWLENWDGKVPKP

SEQ ID NO: 133635 - protein, 157 aa, Unknown
  Bacterial polypetide isolated from the Sargasso Sea
VSYSVSTAREGKALDYDKLIMEVETNGSISAEDAVAYSARIFQDQLKMFINFDEPVDVPVKEVSTEPEFNKNLLRKVDELELSVRSMNCLKNDNIIYIGDLVQKSEGEMLRTPNFGRKSLNEIKEVLTGMSLYLGMEIPNWPPDNIAEMSKKLEEAI

SEQ ID NO: 133636 - protein, 137 aa, Unknown
  Bacterial polypetide isolated from the Sargasso Sea
MEVETNGSISAEDAVAYSARIFQDQLKMFINFDEPVEAPVIEVSTEPEFNKNLLRKVDELELSVRSMNCLKNDNIIYIGDLVQKSEGEMLRTPNFGRKSLNEIKEVLTGMSLYLGMEIPNWPPDNIAEMSKKLEEAI

SEQ ID NO: 133637 - protein, 258 aa, Unknown
  Bacterial polypetide isolated from the Sargasso Sea
MKKELKDIFKNTEISDSQNFNSIKISLASPEKIKSWTYGEIKKPETINYRTFRPEKDGLFCARIFGPIKDYECLCGKYKRMKFRGIICEKCGVEVTKSNVRRERMGHINLATPVAHIWFLKSLPSRISLAIDMKLKEVERVLYFENFIVIEPGLTGLKKNQLLSEDELIKYQNEYGDESFTAGIGAEAILEILKNINLEQEREILVKNINETKSKVSEERSIKRLKLIDSFIKTGNQPEWMILTVIPVIPPELRPLVH

SEQ ID NO: 133638 - protein, 124 aa, Unknown
  Bacterial polypetide isolated from the Sargasso Sea
MAILNFQKPDKVIMIDSTESHGKFEFRPLEPGYGLTIGNALRRVLLSSLEGYAFTSVKIEGVDHEFSTIEGVVEDVTEIILNIKQIRLKRQIDDFDEEKINIVIGNQKELKASDFQKFISGFQI

SEQ ID NO: 133639 - protein, 70 aa, Unknown
  Bacterial polypetide isolated from the Sargasso Sea
MEVENVNVKNWKSLIKPSKLDVQISDDLTHAKIVAEPLEKGYGLTLGNSLRRILLSSIRGAAVTSIQIDG

SEQ ID NO: 133640 - protein, 307 aa, Unknown
  Bacterial polypetide isolated from the Sargasso Sea
KTANSGYLTRRLVDVSQDSVVLEEDCGTLDGIEMTALIESGEIIEPLGDRILGRVLLEDVIDPESEYDILIPAGTLINEKERDAIENTRIEKVQIRSPLTCMTEKGVCRACYGRDLCHGGLVNLGETVGVIAAQSIGEPGTQLTMRTFHIGGTASRSVEQNKWESNFSGVLRFDDLKEVKNREGNIVILGRRGEAVVVEGDKTIKQKSLGNLENERERERRPLPMGATLIKQEGEFVEQGELIAEWDPFSVPIITDVSGIVEFRDISEGETFKEQVDEVSGVSRKVIHESQSMEQRPLIAICNKKKK

SEQ ID NO: 133641 - protein, 252 aa, Unknown
  Bacterial polypetide isolated from the Sargasso Sea
MKKELTDLFKNSEISEAQNFNSIKISLASPEKIKSWTYGEIKKPETINYRTFRPEKDGLFCSRIFGPIKDYECLCGKYKRMKFRGIICEKCGVEVTKANVRRERMGHINLATPVAHIWFLKSLPSRISLAVDMKLKEIERVLYFENFIVIEPGLTGLQKNQLLNEEELAKYQDQFGEEAFTAGIGAEAVLEMLKSLDLESERKNLVNYIKETKSKVNEERAIKRLKLIESFIETGQKPEWMIMTVVPVIPPE

SEQ ID NO: 133642 - protein, 61 aa, Unknown
  Bacterial polypetide isolated from the Sargasso Sea
METENVNVKNWKSLIKPAKLDVKISDDFSQATIVAEPLEKGFGLTLGNSLRRILLSSIRGA

SEQ ID NO: 133643 - protein, 191 aa, Unknown
  Bacterial polypetide isolated from the Sargasso Sea
MNKQLTDLFKSSEISETQNFNSIKITLASPEKIKSWTYGEIKKPETINYRTFRPEKDGLFCARIFGPIKDYECLCGKYKRMKFRGIICEKCGVEVTKSNVRRERMGHINLATPVAHIWFLKSLPSRISLSVDMKLKDVEKVLYFENFIVIEPGLTGLKKNQLLSEEELTKFQDEYGEENFTAGIGAEAILE

SEQ ID NO: 133644 - protein, 247 aa, Unknown
  Bacterial polypetide isolated from the Sargasso Sea
MKKELTDLFKSNEITDSQNFSSIKITLASPEKIKSWTYGEIKKPETINYRTFRPEKDGLFCARIFGPIKDYECLCGKYKRMKFRGIICEKCGVEVTKSNVRRERMGHINLATPVAHIWFLKSLPSRISLAVDMKLKEVERVLYFENFIVIEPGLTGLKKNQLLNEDELVKYQDEYGEEAFTAGIGAEAILEILKAINLEEEKQILVKAINETKSKVSEERAIKRLKLIDSFIETGNKPEWMILTTIP

SEQ ID NO: 133645 - protein, 247 aa, Unknown
  Bacterial polypetide isolated from the Sargasso Sea
MKKDLTDLFKGSEISESQNFNSIKITLASPEKIKSWTYGEIKKPETINYRTFRPEKDGLFCARIFGPIKDYECLCGKYKRMKFRGIICEKCGVEVTKSNVRRERMGHINLATPVAHIWFLKSLPSRISLAIDMKLKDVERVLYFENFIVIEPGLTSLKKYQLLGEEELAKYQDEYGDESFTAGIGAEAILEILKSIDLKAERENLIKTINETKSKVSEERSIKRLKLIESFIETGNKPEWMILTVIP

SEQ ID NO: 133646 - protein, 90 aa, Unknown
  Bacterial polypetide isolated from the Sargasso Sea
EFNKNLLRKVDELELSVRSMNCLKNDNIIYIGDLVQKSEGEMLRTPNFGRKSLNEIKEVLTGMSLYLGMEIPNWPPDNIAEMSKKLEEAI

SEQ ID NO: 133647 - protein, 337 aa, Unknown
  Bacterial polypetide isolated from the Sargasso Sea
VINMDKIFDELSISLATSDQMRSWSLGEVKKPETINYRTLKPEKDGLFDERIFGPTKDWECSCGRYKRIRYRGIVCERCGVEVTRREVRRERMGHIELAAPVTHIWYFKGVPSRLGYFLDMSPKELEKVIYFAAYLVVSIDSKKRTKDLAELEEAVIAEVEIVNEDFEEWEQKRIKQMDTELKAMENAKIPEPEIQIRKKEVLKEIEGKKKKSQEEIKVIEEAFSTLKTLKPKTLIENDTLWREMVDKYDDYFTGGMGAEAVRELVQHVDLKAEMEKLETDLDSKSAQRRQRAIQRMKVIKPFADGKNPPEAMILEVVPVIPPELRPMVQLDGGRFA

SEQ ID NO: 133648 - protein, 295 aa, Unknown
  Bacterial polypetide isolated from the Sargasso Sea
PLGDRILGRVLLEDVIDPESEYDILIPAGTLINEKERDAIEKTRIEKVQIRSPLTCMTEKGVCRACYGRDLCHGGLVNLGETVGVIAAQSIGEPGTQLTMRTFHIGGTASRSVEQNKWEANFSGILRFDDLKEVKNREGNIVILGRRGEAVIVEGDKTIKPKSLGNLENERERERRPLPMGATLIKHEGQFVEQGELIAEWDPFSVPIITDVSGIVEFRDISEGETFKEQVDEVSGVSRKVIHESQSMEQRPLIAICDKKKKTIVRKNDTPTEIAPAIKSELMGETVFEFMPEMY

SEQ ID NO: 133649 - protein, 273 aa, Unknown
  Bacterial polypetide isolated from the Sargasso Sea
FQNFSQAELDWQYNNRKRVPEVESLYKRWVEPSSGIIEQYESFLDIPYGNSDREILDIILPPTSGPYALNLYLHGGYWMSRSKSDQTFLAKPILDSGAIFAAIEYDLIPNVRMADIVRQCRNAVSWIFKNAERFNIDINQVYVSGHSAGAHIASILISTDWDAIDQYSNISLRGACLISGIYDLLPVKLSYMQNILSFSDEEVRNFSPAHFKLNFSGPIIVAVGSEESEEFRRQSSDLVNEWSEQGIHCSYLELNGCNHFDILESFANLDGLL

SEQ ID NO: 133650 - protein, 245 aa, Unknown
  Bacterial polypetide isolated from the Sargasso Sea
MKKQLADLFKNSEIQEAQNFNSIKITLASPEKIKSWTYGEIKKPETINYRTFRPEKDGLFCARIFGPIKDYECLCGKYKRMKFRGIICEKCGVEVTKSNVRRERMGHINLATPVAHIWFLKSLPSRISLVLDMKLKDVERVLYFENFIVIEPGLTNLKKNQLLSEEELTKYQDEYGEESFTAGIGAEAVLEILKSIKLEEEKQKLVTAIKETKSKVAEERAIKRLKLIESFIETGNKPEWMILTV

SEQ ID NO: 133651 - protein, 153 aa, Unknown
  Bacterial polypetide isolated from the Sargasso Sea
QKYIEISLLGFDFKLRLALTTVIMFEIWRYFPLAFLFILARLQAIPKELYEAADVDGASPFQKFFNITLPQITAVISILFMIRFIWNFNKFEDVFLLTGGASGTRTLPINVYQQGFAISDIGMGSAVSIVIVVLLLMFMFFYFKLLGKRVDEN

SEQ ID NO: 133652 - protein, 252 aa, Unknown
  Bacterial polypetide isolated from the Sargasso Sea
MNTSTYVRQHFMLYPQTPIVSTRAMNLLGMEERPAGVNCVVAVLPFDGYNIEDAIVLNRSSVDRGLFRTFFYRIYDTEAKQYPGGMRDNFEIPNADDNVRGYKGEKAYRMLEDDGIVATESGVDGGDILIGKTSPPRFMEEYKEFETSGPYRRDTSIGVRPSEHGVVDTVVMTQSNEGGKMYKIRVRDMRIPEIGDKFASRHGQKGVLGILAKQEDLPYTEDGTQPDVLINPHAFPSRMTVGMMMESVCGKA

SEQ ID NO: 133653 - protein, 132 aa, Unknown
  Bacterial polypetide isolated from the Sargasso Sea
FPATGEPIVTPSQDMVLGSYYLTALQPNYKKPDFGKNNSTFASLEDVIYAFEDKRLGLHEWVWVRFNGEVEDEDEGKSPRDFKELEDGSKLEIWNFRRDRFDSENNLISRYILTTVGRVVMNHTIIDSVSKT

SEQ ID NO: 133654 - protein, 263 aa, Unknown
  Bacterial polypetide isolated from the Sargasso Sea
MNQDLTNVFNSNFSQSQIFDQIKITIASPEKMLSWSFGEIKKPETINYRTFKPERDGLFCSRIFGPIKDYECLCGKYKRMKYRGVICEKCGVEVTLSKVRRDRMGHIELAAPVAHIWFLKSLPSRIGLLLDMKLKDLERVLYFENFIVIEPGLTPLKELQLLTEDELITYKDEYGDDSFTVGIGAEAIRDILIGLDLEKLAESLRVEIDESTSELKPIKLAKRLKVVEAFLSSGNKPEWMIMTIVPVIPPELRPLVPLDGGRF

SEQ ID NO: 133655 - protein, 117 aa, Unknown
  Bacterial polypetide isolated from the Sargasso Sea
FQDQLSMFVNFEDPQEVVKEVKSTEPEFNRNLLKRVEELELSVRSMNCLKNDNIIYIGDLVQKTEPEMLRTPNFGRKSLNEIKEVLNTMSLYLGMEIPNWPPDNIAELSKKLEENNY

SEQ ID NO: 133656 - protein, 59 aa, Unknown
  Bacterial polypetide isolated from the Sargasso Sea
MNCLKNDNIIYIGDLVQKTELEMLRTPNFGRKSLNEIKEVLSCMSLYLGMEIPNWPPDN

SEQ ID NO: 133657 - protein, 97 aa, Unknown
  Bacterial polypetide isolated from the Sargasso Sea
KEVSTEPEFNKNLLRKVDELELSVRSMNCLKNDNIIYIGDLVQKSEGEMLRTPNFGRKSLNEIKEVLTGMSLYLGMEIPNWPPDNIAEMSKKLEEAI

SEQ ID NO: 133658 - protein, 250 aa, Unknown
  Bacterial polypetide isolated from the Sargasso Sea
MKKELTDLFKNSEISESQNFNSIKISLASPEKIKSWTYGEIKKPETINYRTFRPEKDGLFCARIFGPIKDYECLCGKYKRMKFRGIICEKCGVEVTKSNVRRERMGHINLATPVAHIWFLKSLPSRIALAVDMKLKEIERVLYFENFIVIEPGLTGLQKNQLLNEEELAKYQDEFGEEAFTAGIGAEAVLEMLKSLDLEIEKNNLSKYIKETKSKVNEERAIKRLKLIESFIETGQKPEWMIMTVVPVIP

SEQ ID NO: 133659 - protein, 285 aa, Unknown
  Bacterial polypetide isolated from the Sargasso Sea
MIETTSEDSFDSISTSLLKLSKGEVSSCELVELAINNINKFDTHTNAVVYKDFDAAISAAKNSDKQRKNKAKLGPLHGIPITIKEAFDVCGQPTTWGVPKFKNNIAQRDSLIVEKLKDAGAILIGKTNVPFMLSDWQTFNDIYGTTNNPWDLSRSPGGSSGGAAAAVASGYVPAEIGSDIGGSIRGPAHYCGIYGHKSSYGLVPMDGHTLPGIDIDLDLIVAGPLARHANDLRMVLNIIKGPSRINSPAWDVNLPERPRSHLSNFRVAIFCEEKNCSVDNEILEK

SEQ ID NO: 133660 - protein, 248 aa, Unknown
  Bacterial polypetide isolated from the Sargasso Sea
MKKEIKDLFKSSEISDSQNFNSIKITLASPEKIKSWTYGEIKKPETINYRTFRPEKDGLFCARIFGPIKDYECLCGKYKRMKFRGIICEKCGVEVTKSNVRRERMGHINLATPVAHIWFLKSLPSRISLAIDMKLKEVERVLYFESFIVVEPGLTPLKKNQLLTEEELAKYQEEHGDESFTAGIGAEAILEILKSIDLKNEREILIKNINETKSKVAEERSIKRLKLIDSFIETGNKPEWMILTTNSL

SEQ ID NO: 133661 - protein, 94 aa, Unknown
  Bacterial polypetide isolated from the Sargasso Sea
SSEPDFNKNLLRKVDELELSVRSMNCLKNDNIIYIGDLVQKSEGEMLRTPNFGRKSLNEIKEVLTGMSLYLGMEIPNWPPDNIAELSKKLEESI

SEQ ID NO: 133662 - protein, 282 aa, Unknown
  Bacterial polypetide isolated from the Sargasso Sea
SPQKVRESSLTVRHGEKGTVDSVMLSETENGSRIARIRVRDQRVPEMGDKFASRHGQKGVIGHMVPPEGMPFTESGVTPDLIINPHAIPSRMTVAHVLEMIGGKFGSMEGRVVDGSAFSGEKEVDLRAGLADYGFRHSGREVLYDGQTGRRIDAEIFIGVIYYQKLHHMVSGKMHARSRGPVQLLTRQPTEGRARMGGLRFGEMERDCLIAHGASMVIKDRLLDESDKTVQYVDSQSGHIGYLDRRGVLTSPMGDNTSIYPVAMSYAFKLLLEELKSLGIAA

SEQ ID NO: 133663 - protein, 324 aa, Unknown
  Bacterial polypetide isolated from the Sargasso Sea
ACSEIRVMEGKTFRFNLADCTPYNADFDGDEMNLHVIQSEEARAEARILMRVQEHIISPRYGGSVIGGIHDHITGAYLLTHDNVFLPTHVVMDVLSSINYEGDLPPAKEENGQEGYSGSDIFSLLVKGGFSLNFKNRAGEDVTVASNEGSVSGAIDKRGIGAEDGRLLDAVVQTHGTAEGADFINKMTKMTIAICTAMGFTTGIDDEDLPPEAKDEISRINAEASANVDAELEKFGKDGRKYEARPGRTPHETLEENILTILDAAKAETGNVAKAQLGDDNSAVLMATSGARGSMDNLAMMAGSIGQPKVRGKRLERGYQDRVL

SEQ ID NO: 133664 - protein, 77 aa, Unknown
  Bacterial polypetide isolated from the Sargasso Sea
MVDNLTQFDKPKNPILFDAIRVRIASPEKIRSWSYGEVKKPETINYRTFKPERDGLFCAKIFGPVKDWECTCGNIRG

SEQ ID NO: 133665 - protein, 297 aa, Unknown
  Bacterial polypetide isolated from the Sargasso Sea
FDGDQMAVHIPLSLEAQLEARVLMMSTNNILSPSNGKPIIVPSQDIVLGIYYLSQAQENDKKPKGIFSTVEEIEQALENKSISLHTKIISIFKTVDSEGLEKSDKYTSTAGRFLLANLLPKNHNIKFSLVNRLLTKKNVSEVIDTIFRYCGQKETVIFCDKIKTLGFKHAFKAGISFGKDDLLIPKTKENLILNTKKQIEDYEKQYSNGLITRGEKYNKVVDIWSKCTDTVANEMMKEISSAEKIYKDDRIETNSVFMMADSGARGSQAQMKQLAGMRGLIAKPSGEIIETPNYIKF

SEQ ID NO: 133666 - protein, 60 aa, Unknown
  Bacterial polypetide isolated from the Sargasso Sea
MIEKNWKEIIKPSKLEVKEESKSENTSTIIAEPLERGYGVTIGNALRRILLSSLQGSAIT

SEQ ID NO: 133667 - protein, 154 aa, Unknown
  Bacterial polypetide isolated from the Sargasso Sea
MSDTVLTPNIVNVKNVGPNKSSLVIEPLSRGMGHTLGCALRRILLSSIPGAAVTEVMIDKVEHEFSAHPSLKEDVVDVLLNLKKLPLKISFEKDLVTVHLQKKGDGEIKASDILPSEDIEIVDPDFVIGHVVNKGEISMELTVEKGYGYRPANY

SEQ ID NO: 133668 - protein, 65 aa, Unknown
  Bacterial polypetide isolated from the Sargasso Sea
MARITVEDCIDKVPNRFDLVLLAAHRAREISLGSELTVNRDNDKNPVVALREIADETLTSDQIRE

SEQ ID NO: 133669 - protein, 281 aa, Unknown
  Bacterial polypetide isolated from the Sargasso Sea
MNKELTNIFNQNQGVQNFNSLKISIASPDDIRSWSFGEIKKPETINYRTFKPEKDGLFCSRIFGPVKDYECLCGKYKRMKFRGIICEKCGVEVTLSKVRRDRMGHIELAAPVSHIWFMKSLPSRIATLLDMTIKNLEKVLYFEQFIVVEPGLTDLNKGEIISEEQFIEYQDEYGEDSFSAAIGAEAIEQMLLSIDLDADYNQLKIDLQETKSELKKTKITKRLKLIESFIVSKNKPEWMIMRVLPVIPPELRPLVPLDGGRFATSDLNDLYRRGINRNNRI

SEQ ID NO: 133670 - protein, 68 aa, Unknown
  Bacterial polypetide isolated from the Sargasso Sea
METTEVNTKNWKSLIKPAKLDVQLSEDKSNAKIIAEPLEKGYGLTLGNSLRRILLSSIRGTAVTSIQI

SEQ ID NO: 133671 - protein, 262 aa, Unknown
  Bacterial polypetide isolated from the Sargasso Sea
MKKTKSLVDLIGNTPIVQAKNLDTGKCNLFLKMESLNPGSSIKDRVALRIIEDAEAQGKLKKGSTVVEATAGNTGLGLALIALLKGYKSKVVILDKMNHNKILHLKSLGAEVILARSDVGPDSPEHYVNVAKEVAKNTPDSFMANQFTNMSNPQAHEYSTGPEILDQMNNDVDAVVCGVGTGGTISGLGKFFSEHSPKTEMVLADPKGSIVKDAVENKPLKKADYSWLVEGIGEDFIPETLELKYIKKAYEVTNEEAFSMIR

SEQ ID NO: 133672 - protein, 73 aa, Unknown
  Bacterial polypetide isolated from the Sargasso Sea
MENAEVNIKNWKSLIKPAKLDVQLSEDKSFAKIVAEPLEKGYGLTLGNSLRRILLSSIRGTAVTSIQIDGVLH

SEQ ID NO: 133673 - protein, 72 aa, Unknown
  Bacterial polypetide isolated from the Sargasso Sea
MEQTEVNSKNWKSLIKPAKLDVQISDDKAFAKITAEPLEKGYGLTLGNSLRRILLSSIRGTAVTSIQIDGVL

SEQ ID NO: 133674 - protein, 79 aa, Unknown
  Bacterial polypetide isolated from the Sargasso Sea
MQYQIDRIDHQIADDRSQTGTFLIGPLERGQATTLGNSLRRVLMGGLEGSAVTAVRIAGINHEYATIPGVREDVLDILL

SEQ ID NO: 133675 - protein, 309 aa, Unknown
  Bacterial polypetide isolated from the Sargasso Sea
KILKKISDEDVNFLGFSPMWSRPEWMVCQVIAIPPPAVRPSVKHDVQQRSEDDLTHIIINIIKANKTLQEKLEQNSSPNILDDWTTVLQYYVATLIDNKIPGVAAVAQRSGRPLKAIKDRLNGKGGRIRGNLMGKRVDFSARSVITPDPNLSISELGIPLKIAKNLTKPITVNSKNKNYLMQLILNGPDVYPGAKIYEKKSGDCISLRYIDRESIKLENGDIVHRHILDGDSVLFNRQPTLHRMSMMSHIAKIMNMGDTFRMNVGDTKPYNADFDGDEMNLHMPQDEESEIELKMLAAVKYQIISPANN

SEQ ID NO: 133676 - protein, 97 aa, Unknown
  Bacterial polypetide isolated from the Sargasso Sea
VTAIRIDGVNHEYATVPGVREDVLDILLNCKELSVNSRSTELEIGRLVVAGPAEVTANDLQFSSQVDVVDGNRPIATVADGYSLELEVHVERGVGYR

SEQ ID NO: 133677 - protein, 60 aa, Unknown
  Bacterial polypetide isolated from the Sargasso Sea
DLVQKSESEMLRTPNFGRKSLNEIKEVLQQMELNLGMSVPDWPPENIDELAKKYEDPFNK

SEQ ID NO: 133678 - protein, 244 aa, Unknown
  Bacterial polypetide isolated from the Sargasso Sea
MSKELSDLFKSSEISEAQNFNSIKITLASPEKIKSWTFGEIKKPETINYRTFRPEKDGLFCARIFGPIKDYECLCGKYKRMKFRGIICEKCGVEVTKSNVRRERMGHINLATPVAHIWFLKSLPSRISLVVDMKLKEVERVLYFENFIVIEPGLTGLKKNQLLGEEELIKYQDEYGEEAFTAGIGAEAILEILKSINLEEERDFLIKDIKETKSKVNEERSIKRLKLIESFIETGNKPEWMILT

SEQ ID NO: 133679 - protein, 64 aa, Unknown
  Bacterial polypetide isolated from the Sargasso Sea
MQTTTNVIDKNWKALIKPNKLDITSNEDRTIAKVVAEPLEKGFGQTIGNSLRRILLSSIQGAAV

SEQ ID NO: 133680 - protein, 129 aa, Unknown
  Bacterial polypetide isolated from the Sargasso Sea
ISAEDAVAYSARIFQDQLKMFINFDEPVEAPVKEVSSEPEFNKNLLRKVDELELSVRSMNCLKNDNIIYIGDLVQKSEGEMLRTPNFGRKSLNEIKEVLTGMSLYLGMEIPNWPPDNIAEMSKKLEEAI

SEQ ID NO: 133681 - protein, 161 aa, Unknown
  Bacterial polypetide isolated from the Sargasso Sea
VKKVSFSVENTIAGSALDYDKLIMTVETNGTVDAEDAIAYSARIFQDQLSMFVNFEDPQEVVKEVKSTEPEFNRNLLKRVEELELSVRSMNCLKNDNIIYIGDLVQKTEPEMLRTPNFGRKSLNEIKEVLNTMSLYLGMEIPNWPPDNIAELSKKLEENNY

SEQ ID NO: 133682 - protein, 112 aa, Unknown
  Bacterial polypetide isolated from the Sargasso Sea
MKMFINFDEPQEVIVKEKPTEPEFNKNLLRKVDELELSVRSMNCLKNDNIIYIGDLVQKSEGEMLRTPNFGRKSLNEIKEVLTGMSLYLGMEIPNWPPDNIAELSKKLEETI

SEQ ID NO: 133683 - protein, 66 aa, Unknown
  Bacterial polypetide isolated from the Sargasso Sea
MARVTVEDCIDKVSNRFELVLLAAHRARMISGGVEPGLDRDNDKNPVLALREIAVETVTFDELMES

SEQ ID NO: 133684 - protein, 101 aa, Unknown
  Bacterial polypetide isolated from the Sargasso Sea
EAPVKEVSTEPEFNKNLLRKVDELELSVRSMNCLKNDNIIYIGDLVQKSEGEMLRTPNFGRKSLNEIKEVLTGMSLYLGMEIPNWPPDNIAEMSKKLEEAI

SEQ ID NO: 133685 - protein, 198 aa, Unknown
  Bacterial polypetide isolated from the Sargasso Sea
LLFPYVAPVVALAYTWELLLDPNSGTLNSLLLNYQIIETPINLLGQKYIEISIFGFDFKLRLALTTVIMFEIWRYFPLAFLFILARLQAIPKELYEAADVDGASPFQKFFNITLPQITAVISILFMIRFIWNFNKFEDVFLLTGGASGTRTLPINVYQQGFAISDIGMGSAVSIVIVVLLLMFMFFYFKLLGKRVDEN

SEQ ID NO: 133686 - protein, 307 aa, Unknown
  Bacterial polypetide isolated from the Sargasso Sea
CIVHRQPSLHQMSIMAHYVRVLPGKTFRLHPSVCPPYNADFDGDEMNLHVPQSEEARSEAILLMRVQDQLISPRFGGPIIGGLRDFITGAYLLTKDGTTLSSQEFANLAMLGGFAGHLPEPENKKENLYTGKQLFSLFLPEDFNYVMTSKWSKGTKGQQKDVVIKNGQLISGVIDKSSIGAEEPESVLHRIAKDYGNEKAKVFLNSELIIIKQFITHYGFSYGYGDLEVPAEGRESIKDETQKTYDEIHDLIAQEKKGTLKAIRGMTTKETLEAYIMRNLSRLRDSAASTANLSLDDNNAGKIMATT

SEQ ID NO: 133687 - protein, 53 aa, Unknown
  Bacterial polypetide isolated from the Sargasso Sea
MLVTSPEDFEYLEIGLCSPDKVRYWSRGEVEKPETINYRTFKPERKGLFCEKI

SEQ ID NO: 133688 - protein, 49 aa, Unknown
  Bacterial polypetide isolated from the Sargasso Sea
MLRTPNFGRKSLNEIKEVLNSMSLYLGMEIPNWPPENIAELSKKLEENN

SEQ ID NO: 133689 - protein, 71 aa, Unknown
  Bacterial polypetide isolated from the Sargasso Sea
MNCLKNDNIIYIGDLVQKSEGEMLRTPNFGRKSLNEIKEVLTGMSLYLGMEIPNWPPDNIAELSKKLEEAI

SEQ ID NO: 133690 - protein, 125 aa, Unknown
  Bacterial polypetide isolated from the Sargasso Sea
MPKQVVRDDEVSTETYGKFYAEPFEGGYGRTMGNSLRRVLLSSLEGAAVSSVTIKGAPHEYCSLDGVKEDVTEIVLNIKKLIFRSYSRDVQTVKIKVEGPGEVRAGDIVTSDSIEVSILILLFVI

SEQ ID NO: 133691 - protein, 70 aa, Unknown
  Bacterial polypetide isolated from the Sargasso Sea
MENTVIDKNWKSLIKPNKLNIKSSDDKSITTVVAEPLEKGYALTIGNSLRRILLSSIQGSAITAIQIDGV

SEQ ID NO: 133692 - protein, 145 aa, Unknown
  Bacterial polypetide isolated from the Sargasso Sea
MQVICPHCGSPDNEWGERTRVEDRLSTVDIHGNPRPGMLVERHLIDGDVAIFNRQPSLHRMSMMVHEVRVMEGHTFRFNLAVCTPYNADFDGDEMNLHVIQGEEARAEAKILMRVQEHILTPRYGGAVIGGIHDHISGAYLLSRP

SEQ ID NO: 133693 - protein, 256 aa, Unknown
  Bacterial polypetide isolated from the Sargasso Sea
MALRDLFEIAENPNNYSAVRIKIASSDEVTSWSHGEVRTSETINYRTFKPERDGLFCGKIFGPVHDYECICGKYKRMKHRGITCEKCGVEVIESKVRRDRMGNIKLACPVSHVWFLKGVPSRIATILDMMLRDLERVLYFDAYIVLDPGDSDLEPLELVEEDQSRELEENHPDLMLGMGAEAIQTLLRRIELDELENQLQTEMREVNSETRRKRIAKRLNVIGSLLKSGNAVDSMIIDNLPVLPPELRPLVPLEGG

SEQ ID NO: 133694 - protein, 184 aa, Unknown
  Bacterial polypetide isolated from the Sargasso Sea
MERNIKKFSKTSISEKELQYLKITLASPDKIKSWSWGEIKKPETINYRTFRPEKDGLFCARIFGPVKDYECLCGKYKRMKFRGIVCEKCGVEVTKSKVRRERMGHIDLASPVAHIWFLKSLPSRISLSIDMKLKEVEKVLYFESFIVIEPGLTELKKGQLLSEEEYLKAQEKYGEDGFTAGIGA

SEQ ID NO: 133695 - protein, 144 aa, Unknown
  Bacterial polypetide isolated from the Sargasso Sea
LDYDKLTMEVETNGSISAEDAVAYSARIFQDQLGMFVNFDEPQEVVIRDKPTEPEFNKNLLRKVDELELSVRSMNCLKNDNIIYIGDLVQKSEGEMLRTPNFGRKSLNEIKEVLTGMSLYLGMEIPNWPPDNIAELSKKLEEAI

SEQ ID NO: 133696 - protein, 266 aa, Unknown
  Bacterial polypetide isolated from the Sargasso Sea
SSAQEIAKIDPYEAAGIITAQSIGEPGTQMTMRTFHYAGVATVNVTQGLPRIIEIVDARKVPDTPTMTIRLEGKNAESADAARKLAASIEITTTVNIADIETDVAQRRLVLKLRKGNLKQKAMTGAEVKDKLERALRLYVEADKEKNPSTLTLIPGIQTEDDMKTLAENPPSYTELLQLEDKIRDLRLKGVPNIQRANVQLDDSTGEYYLSTIGSNLSRISDMDGIDRSRTYTNNIIEIYEYLGIEAARQAIINELQATLDGARLE

SEQ ID NO: 133697 - protein, 260 aa, Unknown
  Bacterial polypetide isolated from the Sargasso Sea
STVVEATAGNTGLGLALIALLKGYKSKVVILDKMNHNKILHLKSLGAEVILARSDVGPDSPEHYVNVAKEVAKNTPDSFMANQFTNMSNPKAHEYSTGPEILDQMSNDVDAVVCGVGTGGTISGLGKFFSEHSPKTEMILADPKGSIVKDAAENKPLKKADYSWLVEGIGEDFIPDTLELKYIKKAYEVTNEEAFSMIRELALKEGILGGSSSGTLISAAIKYCKDQNKEKNVVTFVCDNGEKYLNTAYNEEWLKEKNLI

SEQ ID NO: 133698 - protein, 202 aa, Unknown
  Bacterial polypetide isolated from the Sargasso Sea
MEKQITKNFKKGLSERSFSNIKITLASPDKIKSWSFGEIKKPETINYRTFRPEKDGLFCARIFGPVKDYECLCGKYKRMKFRGIICEKCGVEVTKSNVRRERMGHIDLASPVAHIWFLKSLPSRISLAIDMKLKEVEKVLYFESFIVIEPGLTELKKGQLLNEEEYIKAQEKFGEDAFTAGIGAEAVREILLSIDLKKEKEK

SEQ ID NO: 133699 - protein, 89 aa, Unknown
  Bacterial polypetide isolated from the Sargasso Sea
LNPNLLRKVDELELSVRSANCLKNDNILYIGDLVLKTENEMLRTPNFGRKSLNEIREVLSNMGLGLGMHIENWPPENIETLAKQIEDPY

SEQ ID NO: 133700 - protein, 86 aa, Unknown
  Bacterial polypetide isolated from the Sargasso Sea
NLLRKVDELELSVRSMNCLKNDNIIYIGDLVQKSEGEMLRTPNFGRKSLNEIKEVLTGMSLYLGMEIPNWPPDNIAELSKKLEEAI

SEQ ID NO: 133701 - protein, 116 aa, Unknown
  Bacterial polypetide isolated from the Sargasso Sea
MARVTVEDCVDKIPNRFDLVMLASHRAREISSGSAITVDRDNDKNPVVALREIADEMQSADELRERLIESNQTQIEIDEPEEDSMAMLMGGETDEPAEDDISEEKLLRALMAAQGQ

SEQ ID NO: 133702 - protein, 148 aa, Unknown
  Bacterial polypetide isolated from the Sargasso Sea
GAALDYDKLLMEVETNGTVAAEDAIAFAARIFQDQLSMFINFEDPKEVSKPTTSSEPEFNKNLLKRVEELELSVRSMNCLKNDNIIYIGDLVQKTEPEMLRTPNFGRKSLNEIKEVLSSMSLYLGMEIPNWPPDNIAELSKKLEENTY

SEQ ID NO: 133703 - protein, 78 aa, Unknown
  Bacterial polypetide isolated from the Sargasso Sea
ISILFMIRFIWNFNKFEDVFLLTGGASGTRTLPINVYQQGFAISDIGMGSAVSIVIVVLLLMFMFFYFKLLGKRVDEN

SEQ ID NO: 133704 - protein, 148 aa, Unknown
  Bacterial polypetide isolated from the Sargasso Sea
EGKALDYDKLTMEVETNGSISAEDAVAYSARIFQDQLKMFINFDEPVEAPVKEVSTEPEFNKNLLRKVDELELSVRSMNCLKNDNIIYIGDLVQKSEGEMLRTPNFGRKSLNEIKEVLTGMSLYLGMEIPNWPPDNIAEMSKKLEEAI

SEQ ID NO: 133705 - protein, 304 aa, Unknown
  Bacterial polypetide isolated from the Sargasso Sea
TRSTADQKWMIIKNLPVAPPAVRPSVAMPNCYRSEDDLTYAYQQVIKTNNILKMQIDRGTNSSTLNEILQQLQFFVATLMDNDLCGQPKQKHKSGKTLRTLRARLKGKEGRLRGNLMGKRVDFSSRTVITPDPNLNLDQLGVPYEIATNLTFPETVTHSNYDEMKKLIQNGPQNWPGAKYIIRHDEKQIDLSYLKHRSDAHIEIGYKVERHIRDGDYVVFNRQPSLHKMSIMGHRVKVLPHRTFRMNLSVTTPYNADFDGDEMNMHVPQSYETIAEVKEIMMVQKQIMNPQSNKPIMGIVQDSL

SEQ ID NO: 133706 - protein, 187 aa, Unknown
  Bacterial polypetide isolated from the Sargasso Sea
MKKELTDLFKNSEILETQNFNSIKISLASPEKIKSWTYGEIKKPETINYRTFRPEKDGLFCARIFGPIKDYECLCGKYKRMKFRGIICEKCGVEVTKSNVRRERMGHINLATPVAHIWFLKSLPSRIALAVDMKLKEIERVLYFENFIVIEPGLTGLQKNQLLNEEELAKYQDEFGEEAFTAGIGAE

SEQ ID NO: 133707 - protein, 144 aa, Unknown
  Bacterial polypetide isolated from the Sargasso Sea
DYDKLIMEVETNGTVPAEDSIAFAARIFQDQLSMFVNFEDPKEAPKPKTSIEPEFNKNLLKKVEELELSVRSMNCLKNDNIIYIGDLVQKTEPEMLRTPNFGRKSLNEIKEVLSSMSLYLGMEIPNWPPDNIAELSKKLEENTY

SEQ ID NO: 133708 - protein, 216 aa, Unknown
  Bacterial polypetide isolated from the Sargasso Sea
MEKNITKNFENQNLAAENSFDSIKITLASPEKIKSWSYGEIKKPETINYRTFRPEKDGLFCSRIFGPVKDYECLCGKYKRMKFRGIICEKCGVEVTKSNVRRERMGHIDLACPVAHIWFLKSLPSRISLAVDMKLKEVEKVLYFESFIVVEPGLTTLKKGQLLSEESLIKAQDEFGEDAFTAGIGAEAVREILVNLDLIKEQKKLRDSLPEIKSKV

SEQ ID NO: 133709 - protein, 28 aa, Unknown
  Bacterial polypetide isolated from the Sargasso Sea
MASRGLSLGMRLDNWPPASLKKDDKVSA

SEQ ID NO: 133710 - protein, 138 aa, Unknown
  Bacterial polypetide isolated from the Sargasso Sea
MTEQILIFFQIVFIDLVLAGDNAIIIGMVASQFPAEKRKKIIFLGIGAAIILRIIFTLITAYLLQITGLRLIGGLLLLYICYRLYIDVVKENPNEENKIKVDNSSFIKAITTVIIADVTMSLDNVLGVAGAARDHYLL

SEQ ID NO: 133711 - protein, 43 aa, Unknown
  Bacterial polypetide isolated from the Sargasso Sea
IQRSEMDLLKTPNLGKKSLNEIKDELASRGLSMGTVLKNWPPM

SEQ ID NO: 133712 - protein, 289 aa, Unknown
  Bacterial polypetide isolated from the Sargasso Sea
KWKKGRVRGNLMGKRVYYSARSVITPDPNLSIRELGIPIKVAKNITKPVYVNDTNKKFLLKLIQNGPDVYPGAKILQKKNGDSISLRYIDRNSVVLQNGDVVHRHMMDGDAILFNRQPTLHRMSMMSHIAKILPKGDTFRMNVGCTKPYNADFDGDEMNLHMPQDVEAETELRNLAAVHNQIISPANNQSIIGIFQDSLLGCYRFTRKDISFTPREVMSLMINVNNFDSDIFNKKEMINNFDVLSQIIPPMSLNLKTKQFKEGEDKKTSNNIIEIQNGKYIRGQIDKSV

SEQ ID NO: 133713 - protein, 222 aa, Unknown
  Bacterial polypetide isolated from the Sargasso Sea
MEKNITRNFDNQNIIPENNFDSIKITLASPDKIKSWSYGEIKKPETINYRTFRPEKDGLFCSRIFGPVKDYECLCGKYKRMKFRGIICEKCGVEVTKSNVRRERMGHIDLACPVAHIWFLKSLPSRISLAIDMKLKEVEKVLYFESFIVVEPGLTTLKKGQLLSEDALVKAQDEFGEDAFTAGIGAEAVREILINLDLKKEQAKLRDSLPTIKSKVTEERTI

SEQ ID NO: 133714 - protein, 234 aa, Unknown
  Bacterial polypetide isolated from the Sargasso Sea
MSQSVMNIFNPAASRDDFNQVKISIASPERILSWSYGEIKKPETINYRTFKPERDGLFCARIFGPIKDYECLCGKYKRMKFKGIICEKCGVEVTKKDVRRERMGHIKLAAPVAHIWFLKSLPSRIALMMDMKLKDLEKVLYFEKFMVTEPGLTNLIQNQLLDEEELENAKEEFGEDSFSAGIGAEAVRIVLERIELEPELELLRSKLAETKAVALSEKLIKRIKIFEAFLSSGN

SEQ ID NO: 133715 - protein, 224 aa, Unknown
  Bacterial polypetide isolated from the Sargasso Sea
MKKQITDIFKNSEISESQNFNSIKITLASPEKIKSWTYGEIKKPETINYRTFRPEKDGLFCARIFGPIKDYECLCGKYKRMKFRGIICEKCGVEVTKSNVRRERMGHINLATPVAHIWFLKSLPSRISLTIDMKLKEVERVLYFENFIVIEPGLTELKKFQLLNEEELIKYQDQYGEEAFTAGIGAEAILEILKSINLEEEKNSLVKTIKETKSKVAEERSIKR

SEQ ID NO: 133716 - protein, 47 aa, Unknown
  Bacterial polypetide isolated from the Sargasso Sea
MFSADNPCIYVNKIISEMDELVGIVPEVCHDPTLPRTDDHQCPKVTF

SEQ ID NO: 133717 - protein, 254 aa, Unknown
  Bacterial polypetide isolated from the Sargasso Sea
MIFFNPAASRDDFNQVKISIASPERILSWSYGEIKKPETINYRTFKPERDGLFCARIFGPIKDYECLCGKYKRMKFKGIICEKCGVEVTKKDVRRERMGHIQLAAPVAHIWFLKSLPSRIALMMDMKLKDLEKVLYFEKFMVTEPGLTPLIQNQLLDEEELEKAKEEYGEDSFTAGIGAEAVRKVLERIELESELEALRTKLSETKAVALSEKLIKRIKIFEAFISSGNRPEWMILTSVPVIPPELRPLVPLDG

SEQ ID NO: 133718 - protein, 71 aa, Unknown
  Bacterial polypetide isolated from the Sargasso Sea
MNCLKNDNIIYIGDLVQKSEGEMLRTPNFGRKSLNEIKEVLTGMSLYLGMEIPNWPPDNIAEMSKKLEEAI

SEQ ID NO: 133719 - protein, 188 aa, Unknown
  Bacterial polypetide isolated from the Sargasso Sea
MPTPVEDRLSTVDIRGNPKPGMQVERHLIDGDVAIFNRQPSLHRMSMMVHEVRVMEGHTFRFNLAVCTPYNADFDGDEMNLHVIQSEEARAEAKILMRVQEHILTPRYGGAVIGGIHDHISGAYLLSRPGTLVSKAHGLEMLGSIAYTGELPEIVKDDNGNDAFRGQDIISLIVPDNINLHFMSRSRD

SEQ ID NO: 133720 - protein, 100 aa, Unknown
  Bacterial polypetide isolated from the Sargasso Sea
VIVREQPTEPEFNKNLLRKVDELELSVRSMNCLKNDNIIYIGDLVQKSEGEMLRTPNFGRKSLNEIKEVLTGMSLYLGMEIPNWPPDNIAELSKKLEEAL

SEQ ID NO: 133721 - protein, 313 aa, Unknown
  Bacterial polypetide isolated from the Sargasso Sea
TGPYNADFDGDEMNWHVLQNFMAIAEAKHICGVPHQLLSAKDSKPCIGLVQDAVIGSYLLTSKDTFLTRSQFFDGMMCAKYMESEDVPIPTIFAKNADGTWDVRYTGKQLASYVLPKKVSMQKCVRSLEYTDFDSVMDIDERMVIIQEGELLAGKLCKASVGSSNRGIVHRTVHEQGGWRASHWVSDMQRVACHFMSSYGFSIGFEDILHSKDIQRKIDQTIESAIDAVVRGQKLAHDAGVNEDRIEAERMRVLSNVLNDVGRICLSMDENNSILQCIEAGSKGKRLNACQIHGVVGQQVVGGKRVQYRTNPT

SEQ ID NO: 133722 - protein, 67 aa, Unknown
  Bacterial polypetide isolated from the Sargasso Sea
KNDNIIYIGDLVQKSEGEMLRTPNFGRKSLNEIKEVLNTMSLYLGMEIPNWPPDNIAELSKKLEEAI

SEQ ID NO: 133723 - protein, 82 aa, Unknown
  Bacterial polypetide isolated from the Sargasso Sea
KVDELELSVRSMNCLKNDNIIYIGDLVQKSEGEMLRTPNFGRKSLNEIKEVLTGMSLYLGMEIPNWPPDNIAEMSKKLEEAI

SEQ ID NO: 133724 - protein, 261 aa, Unknown
  Bacterial polypetide isolated from the Sargasso Sea
NGANSNVINDWATILQYYVATMVDNKIPGVASVAQRTGRPLKSIKERLNGKHGRIRGNLMGKRVDFSARSVITPDPNISIKELGVPMSIAKNITKPVIVNEKNKDYLLKLVQNGPDIHPGAKILERKNGDSISLRYIDRDSITLNHGDIVHRHMLNGDAILFNRQPTLHRMSMMSHTVRVMPVGDTFRMNVADTKPYNADFDGDEMNLHMPQDPESEAELRNLAAVPWQLISPANNKSIVGIFQDSLLGAFLLSRSDINFS

SEQ ID NO: 133725 - protein, 177 aa, Unknown
  Bacterial polypetide isolated from the Sargasso Sea
MKQLFRDVDSDDEMFIQLDKAVKETDSNLTPRMIDQLVQGLHSRGEKKVTPAKAKKIIDSATNFYNDAKAVPHEAVGITTAQSIGEPGTQMTMRTFHYAGVATVNVTQGLPRIIEIVDARKVPQTPTMIIYMDEKNSKGKPLRTNEKLVRDLAASIETTTAIDIATVDVDVAQRNIL

SEQ ID NO: 133726 - protein, 148 aa, Unknown
  Bacterial polypetide isolated from the Sargasso Sea
GSALDYDKLIMTVETNGTIAAEDAIAYSARIFQDQLAMFINFEDPKEIVKEVKSSEPEFNRNLLKRVEELELSVRSMNCLKNDNIIYIGDLVQKTEPEMLRTPNFGRKSLNEIKEVLNTMSLYLGMEIPNWPPDNIAELSKKLEENNY

SEQ ID NO: 133727 - protein, 188 aa, Unknown
  Bacterial polypetide isolated from the Sargasso Sea
MKKDIKDLFKETSVSDTQNFNSIKITLASPEKIKSWTYGEIKKPETINYRTFRPEKDGLFCARIFGPIKDYECLCGKYKRMKFRGIICEKCGVEVTKSNVRRERMGHINLATPVAHIWFLKSLPSRISLAIDMKLKEVERVLYFESFIVIEPGLTSLKKNQLLNEEELNKYQEEFGEESFTAGIGAEA

SEQ ID NO: 133728 - protein, 76 aa, Unknown
  Bacterial polypetide isolated from the Sargasso Sea
SVRSMNCLKNDNIIYIGDLVQKTEPEMLRTPNFGRKSLNEIKEVLSSMSLYLGMEIPNWPPDNIAELSKKLEENTY

SEQ ID NO: 133729 - protein, 249 aa, Unknown
  Bacterial polypetide isolated from the Sargasso Sea
KKVLFENDFIDLLLTTFYYTFFGTVGSIVFGILTAQMVNQKFYGRTFMRSVLLFPYVAPVVALAYTWELLLDPNSGTLNSLLLNYQIIETPINLLGQKYIEISILGFDFKLRLALTTVIMFEIWRYFPLAFLFILARLQAIPKELYEAADVDGASPFQKFFNITLPQITAVISILFMIRFIWNFNKFEDVFLLTGGASGTRTLPINVYQQGFAISDIGMGSAVSIVIVVLLLMFMFFYFKLLGKRVDEN

SEQ ID NO: 133730 - protein, 222 aa, Unknown
  Bacterial polypetide isolated from the Sargasso Sea
MSNIENKKILLIICGGISAYKSLEIIRLLKKKGARIKTILTKSAKEFVTALSVASLSQEKVYDDLFSHKNESEMDHISLSRWSDLILVAPATANTISKLSAGTSNDLASTVVLASNKEIFLVPAMNVRMWEHQSTKDNLKKLKEFGYNFIGPEIGDMACGEYGQGKMTEPTEIINIIEQYFYNLKKNKKLKALVTAGPTHEYIDPVRYISNRSSGKQGYELA

SEQ ID NO: 133731 - protein, 60 aa, Unknown
  Bacterial polypetide isolated from the Sargasso Sea
MAIELFQPFVIHRLIRQNIVNNIKAAKNLIQRPDDEVMHVLHEVIDGHPILLNRAPTLHR

SEQ ID NO: 133732 - protein, 131 aa, Unknown
  Bacterial polypetide isolated from the Sargasso Sea
IIFEIWRYFPLAFLFILARLQAIPKDLYEAADVDGASPFQKFFKITLPQITAVISILFMIRFIWNFNKFEDVFLLTGGASGTRTLPINVYQQGFAISDIGMGSAVSIVIVLLLLLFMFFYFKLLGKRVDEN

SEQ ID NO: 133733 - protein, 128 aa, Unknown
  Bacterial polypetide isolated from the Sargasso Sea
VPEDAVALAGRIISDQASYFVNFEEEEEVKEVETETEPKLNPNLLRKVDELELSVRSANCLKNDNILYIGDLVLKTENEMLRTPNFGRKSLNEIREVLSDMGLGLGMHIDNWPPENIESLAKQIDEPY

SEQ ID NO: 133734 - protein, 149 aa, Unknown
  Bacterial polypetide isolated from the Sargasso Sea
REGKALDYDKLTMEVETNGSISAEDAVAYAARIFQDQLGMFVNFDEPQEVIVREQPTEPEFNKNLLRKVDELELSVRSMNCLKNDNIVYIGDLVQKSEGEMLRTPNFGRKSLNEIKEVLTGMSLYLGMEIPNWPPDNIAELSKKLEESI

SEQ ID NO: 133735 - protein, 286 aa, Unknown
  Bacterial polypetide isolated from the Sargasso Sea
WLDLKKPDEMEIKISEYNPSQAVVAVGPFERGFGVTIGNALRRVLLSSLQGAAVTSVQIQGVVHEFSSIPSVREDVTDLVLNLKGVAVRMEEEGPKRLRLAVDGPATVTAGMITETANVDIMNPDHVLCHLDKGAKLAMELTVDTGKGYVPASVHRTEDSPIGLIPIDAIFSPVRQVAYKVENARIGQITDYDKLLLTIETDGSISPEDAVAYAARILQEQLQTFINFEEPKGEPVPTEPELPFSRNLLRKVDELELSVRSANCLKNDNIVYIGDLVLRPSMKCSG

SEQ ID NO: 133736 - protein, 241 aa, Unknown
  Bacterial polypetide isolated from the Sargasso Sea
MSKELSDLFKSSEISEAQNFNSIKITLASPEKIKSWTFGEIKKPETINYRTFRPEKDGLFCARIFGPIKDYECLCGKYKRMKFRGIICEKCGVEVTKSNVRRERMGHINLATPVAHIWFLKSLPSRISLVVDMKLKEVERVLYFENFIVIEPGLTGLKKNQLLGEEELIKYQDDYGEEAFTAGIGAEAILEILKSINLEEERDALIKTINETKSKVAEERSIKRLKLIESFIETGNKPEWM

SEQ ID NO: 133737 - protein, 200 aa, Unknown
  Bacterial polypetide isolated from the Sargasso Sea
MTQENDFNSIKITLASPEKIKSWSYGEIKKPETINYRTFRPEKDGLFCSRIFGPVKDYECLCGKYKRMKFRGIICEKCGVEVTKSNVRRERMGHIDLACPVAHIWFLKSLPSRISLAIDMKLKEVEKVLYFESFIVIEPGLTTLKKGQLISEEALIKAQDEFGEDAFTAGIGAEAVREILVNLDLKKEQKKLRDSLAEIK

SEQ ID NO: 133738 - protein, 117 aa, Unknown
  Bacterial polypetide isolated from the Sargasso Sea
FQDQLSMFVNFEDPQEVIKEVKSSEPEFNRNLLKRVEELELSVRSMNCLKNDNIIYIGDLVQKTEPEMLRTPNFGRKSLNEIKEVLNTMSLYLGMEIPNWPPDNIAELSKKLEENNY

SEQ ID NO: 133739 - protein, 99 aa, Unknown
  Bacterial polypetide isolated from the Sargasso Sea
KIQDQPKEPEFNQNLLRKVDELELSVRSMNCLKNDNIIYIGDLVQKSEGEMLRTPNFGRKSLNEIKEVLSGMSLYLGMEIPNWPPDNIAELSKKLEDAI

SEQ ID NO: 133740 - protein, 229 aa, Unknown
  Bacterial polypetide isolated from the Sargasso Sea
EKIKSWTFGEIKKPETINYRTFRPEKDGLFCARIFGPIKDYECLCGKYKRMKFRGIICEKCGVEVTKSNVRRERMGHINLATPVAHIWFLKSLPSRISLVVDMKLKEVERVLYFENFIVIEPGLTGLKKNQLLGEEELIKYQDDYGEEAFTAGIGAEAILEILKSINLEEEREILIKNIKETKSKVNEERSIKRLKLIESFIETGNKPEWMILTTVPVIPPELRPLVPL

SEQ ID NO: 133741 - protein, 260 aa, Unknown
  Bacterial polypetide isolated from the Sargasso Sea
GGRVRGNLMGNRVDFSARSVITPDPNLSIKELGIPLKIAKNITKPVVVNEMNYNYLMKLLENGASKYPGANILEKKNGALIALKYVDLKSIKLETGDIVHRHLMDGDAVLFNRQPTLHRMSMMCHLAKILHVGDTFRMNVGDTKPYNADFDGDEMNMHVPQDIMSEIELKYIAAVPNQIVSPAQNNPIIGIFQDSLLGIYRFTKRDNKFTKQKVMNFLACLPTLNIDVLQQQFVDNKGVLNGLHVIRHIMKNVSLKYKTK

SEQ ID NO: 133742 - protein, 218 aa, Unknown
  Bacterial polypetide isolated from the Sargasso Sea
MDKSFNLKVKTDEKSLTNTSGKFLIQPLDRGYGITLGNAMRRVLLTSIPGAAVTHVKIEGVDHEFSTIKGIKDDVADIIMNLKKVRFKLMDNNPDKVNLSLKGKRIVTAQDIQSASDQFEILNPDQYITEVNTSGKIEMELRIGIGKGYVPSEENELPNLTVGTLSIDSIFNPVTNVSYSVKPVPGAKEPIEILTVEVETDGSINPKDAISYSATYIR

SEQ ID NO: 133743 - protein, 271 aa, Unknown
  Bacterial polypetide isolated from the Sargasso Sea
MNDLVNPFSQAQSPQSFDQIRVTISAPQRIRSWSFGEIKKPETINYRTFKPERDGLFCSRIFGPVRDYECLCGKYKRMKYRGIICEKCGVEVTLSKVRRDRMGHIELASPVAHIWFLKSLPSRIGLLVDMTLKDLEKVLYFENFIVIDSGLTDLKTGQLLSEEEYYESLEEFGEDSFTAMIGAEAIQFLLSNIDLEKERLKVSTELKETGSEVKRKKLVKRLKLIESFIQSNSRPEWMILEVVPVIPPELRPLVPLDGGRFATSDLNDLYR

SEQ ID NO: 133744 - protein, 194 aa, Unknown
  Bacterial polypetide isolated from the Sargasso Sea
MEKKLTKLFENQNITKENNFDSIKITLASPEKIKSWSYGEIKKPETINYRTFRPEKDGLFCSRIFGPVKDYECLCGKYKRMKFRGIICEKCGVEVTKSNVRRERMGHIDLACPVAHIWFLKSLPSRISLAIDMKLKEVEKVLYFESFIVVEPGLTTLKKGQLISEEALIKSPEEFGEDSFTAGIGAEAVREILV

SEQ ID NO: 133745 - protein, 254 aa, Unknown
  Bacterial polypetide isolated from the Sargasso Sea
MNNALLLDGKVAMISGAASARGIGLATARLFASHGAKVAILDLDEGAAVEAAAAIGPEHRGYACNVADKDACLKATERAIADFGRIDVLINNAGITQPVKTLEIDPASWDRILDVNLRGVLYLSQAVIPHMQAQGSGSIACMSSVSAQRGGGILGGPHYSAAKAGVLGLAKAMAREFGPSNIRVNCVTPGLIQTDISSGKLSDQQKAEIAASIPLNRLGNAEEVAGAYLFLASNLSAYITGAVIDVNGGMLIHG

SEQ ID NO: 133746 - protein, 189 aa, Unknown
  Bacterial polypetide isolated from the Sargasso Sea
MSKELTNLFSKKVNKQEFSKIKITLASPEKIRSWSFGEIKKPETINYRTFKPEKDGLFCARIFGPVKDYECLCGKYKGMKFRGIICEKCGTEICKSKVRRERMGHIELSTPVSHIWFLKSLPSRIALSLDIKLKELEKVLYYENFIVIEPGLTKLEKNQIISEEDYIKAQEEYGEESFTAGIGASAIRE

SEQ ID NO: 133747 - protein, 121 aa, Unknown
  Bacterial polypetide isolated from the Sargasso Sea
MARVTVEDCIDKVSNRFELVLLAAHRARMISAGAEPSLDRDNDKNPVLALREIAIETVTFDELMESTIESHQRQIEVDEPDDEDLSLLIRDGQRGKEESADETANEDLLRALMDAQTSEDK

SEQ ID NO: 133748 - protein, 272 aa, Unknown
  Bacterial polypetide isolated from the Sargasso Sea
LTHKLCDIIKSNNTLKQKIDNNSRIEVVNDWTKVLQYHIATFVDNELPGVAQAVHRSGRALKAIRQRLKGKDGRIRNNLMGKRVDFSGRSVITPDPNIELDELGVPITIAKNLTYPEIVNKFNKGKLENLLVNGIDKYPGIKLIIKDGIQITLTSNNINDIELNYGDIVHRHLIDGDHVLFNRQPSLHKMSMMGHRVRVMKGNTFRLNVSATSPYNADFDGDEMNMHAPQSIATVSELMNIASVIYQIVSPRENKPIITIVQDTLLGINKLT

SEQ ID NO: 133749 - protein, 202 aa, Unknown
  Bacterial polypetide isolated from the Sargasso Sea
MRSVLLFPYVAPVVALAYTWELLLDPNSGTLNSLLLNYQIIETPINLLGQKYIEISILGFDFKLRLALTTVIMFEIWRYFPLAFLFILARLQAIPKELYEAADVDGASPFQKFFKITLPQITAVISILFMIRFIWNFNKFEDVFLLTGGASGTRTLPINVYQQGFAISDIGMGSAVSIVIVVLLLMFMFFYFRLLGKRVDEN

SEQ ID NO: 133750 - protein, 145 aa, Unknown
  Bacterial polypetide isolated from the Sargasso Sea
MHFPPPGAPLRMQPPAHSDASPAAAPRALDAAQLDDAPAVRLLTDTLHAARVRDASDIHVEPFEAGWRIRLRIDGVLHEHARPPLHLRDALVTRIKVLARMDIAERRLPQDGRLRIVIDGGTRGDYRVSSLPTLFGEKLVLRRLE

SEQ ID NO: 133751 - protein, 259 aa, Unknown
  Bacterial polypetide isolated from the Sargasso Sea
QQEEVFDAIKIGLASPDKIRSWSFGEVKKPETINYRTFKPERDGLFCAKIFGPIKDYECLCGKYKRLKHRGVICEKCGVEVTLAKVRRERMGHIELASPVAHIWFLKSLPSRLGMVLDMTLRDIERVLYFEAYVVIEPGMTPLKARQIMTEEDYYNKVEEYGDEFRAEMGAEGVRELLRAINIDEQVETLRTELKNTGSEAKIKKYAKRLKVLEAFQRSGIKPEWMILEVLPVLPPELRPLVPLDGGSFATSDLNDLYR

SEQ ID NO: 133752 - protein, 155 aa, Unknown
  Bacterial polypetide isolated from the Sargasso Sea
YSVSTAREGKALDYDKLTMQVETNGSISAEDAVAYSARIFQDQLKMFINFDEPVEAPVKEVSTEPEFNKNLLRKVDELELSVRSMNCLKNDNIIYIGDLVQKSEGEMLRTPNFGRKSLNEIKEVLTGMSLYLGMEIPNWPPDNIAEMSKKLEEAI

SEQ ID NO: 133753 - protein, 232 aa, Unknown
  Bacterial polypetide isolated from the Sargasso Sea
RLDVSGEGVITAGDIMVPGDFEIVNPELYIATLDSPDAHLVIEFNVEKGAGYISASSNDGYPIGVLPVDSIFTPVSKVSYAVEPMRVGQVTDYEKLIVEIWTDGTIMPSEALIESGNILVKSATLLTTIGTTITEGGEEDTSSSPNSSVPPEIYNSLVDGLGLSARTLNCLKRAKLNRVGEILEKDKSELMQIRNFGQKSMDELFDKLKELNLLPEENAENTESSDEENTEE

SEQ ID NO: 133754 - protein, 121 aa, Unknown
  Bacterial polypetide isolated from the Sargasso Sea
CCKIFQDQLSMFVNFEDPKEVPKPVPTTEPEFNKNLLKRVEELELSVRSMNCLKNDNIIYIGDLVQKTEPEMLRTPNFGRKSLNEIKEVLSSMSLYLGMEIPNWPPDNIAELSKKLEENTY

SEQ ID NO: 133755 - protein, 57 aa, Unknown
  Bacterial polypetide isolated from the Sargasso Sea
MIHKNWAELIKPAQLQVKQANDPTRQGTVIAEPLERGFGLTIGNALRRVLMSSLQGA

SEQ ID NO: 133756 - protein, 230 aa, Unknown
  Bacterial polypetide isolated from the Sargasso Sea
GDIVERHLHDGDILLFNRQPSLHKMSIMAHKARIMPCRTLRFNECVCTPYNADFDGDEMNIHCPQTEEARAEAMQLMGVHHNLCTPKNGEILIAATQDFLTAAFLLTIKDAFFDRSQFGALVSYMGDALLSVDLPTPAIVKPVELWTGKQVFSVLIRPKVSDKIFVNLEVAEKLYNKRDKTMCPDDGYVCIRNSEIMSGQLGKATLGSGNKAGLFYVLNMEYGPQAAAEA

SEQ ID NO: 133757 - protein, 84 aa, Unknown
  Bacterial polypetide isolated from the Sargasso Sea
MRKVDELELSVRSMNCLKNDNIIYIGDLVQKSEGEMLRTPNFGRKSLNEIKEVLTGMSLYLGMEIPNWPPDNIAEMSKKLEEAI

SEQ ID NO: 133758 - protein, 230 aa, Unknown
  Bacterial polypetide isolated from the Sargasso Sea
MRWRRPYFWQGGGQKVRLRTTAGGRFNNYELDFEEPWLMGKKLRFTTNLYNREMEYFHEKFDVEETGMRLGLERAMFGNDYFRGRVNYTVENIGMVDMKSTASQELLDERGHDLISKIGVGLTLDTRGGGIIPTKGQRSSIDVDFAPDLLGSEKEFYGVHLKSAWYFKGLGEGHTIELLSQAATIDSLTGGQTVPYLYRHALGGSRNLRGYDFREVGPRGTAGDYIGGNT

SEQ ID NO: 133759 - protein, 50 aa, Unknown
  Bacterial polypetide isolated from the Sargasso Sea
LRTPNFGRKSLNEIKEVLQQMELNLGMSVPDWPPENIDELAKKYEDPFNK

SEQ ID NO: 133760 - protein, 100 aa, Unknown; identical to SEQ ID NO: 133625
  Bacterial polypetide isolated from the Sargasso Sea

SEQ ID NO: 133761 - protein, 253 aa, Unknown
  Bacterial polypetide isolated from the Sargasso Sea
MFLIFSFFITFFSSYLTLYLLIPLLKKNIIDTPNERSSHKSPIPSGGGIVFALIGSLMCSYFENNIPLFCMPLAFLGLMDDRYNLPSSIRYVIQTLVSTILIFNSPLKNYIVSSNIFLSLITFIVLIVFCTGNINFFNFMDGIDGLVSSCVIVFLISASLIAQPSFMPMVGALCGFTILNWSPAKVFMGDAGSTFLGALVTALIINSMNLNNFLGMLIIIFPIFGDASICVMRRYLAGQNVFKPHKLHLYQRL

SEQ ID NO: 133762 - protein, 230 aa, Unknown
  Bacterial polypetide isolated from the Sargasso Sea
MLTNSEARVNLAAQSVCDGSVRGQLSVAPNLLPAVGDVDLGMDLRLQFQQSAGQLSVPVHANSADGILVNYQVEVTMDPAVFYASECAAGAVNGFTCTLNDPLERIKLIATDTASTSMGSRVHIGTFTLRVDRTAVTLITGTIVELVRNADGGSREVRTSNAPIVAGHGYASVQVGGRRLAGSAPPPETPQRDARALLLQRLHRRRMQTAISCYSQSAPSGACLAGAWGD

SEQ ID NO: 133763 - protein, 227 aa, Unknown
  Bacterial polypetide isolated from the Sargasso Sea
MSKELTDLFKGSEIAEAQNFNSIKITLASPEKIKSWTYGEIKKPETINYRTFRPEKDGLFCARIFGPIKDYECLCGKYKRMKFRGIICEKCGVEVTKSNVRRERMGHINLATPVAHIWFLKSLPSRISLAIDMKLKEVERVLYFENFIVIEPGLTGLKKNQLLGEEELIKYQDEFGEESFTAGIGAEAILEILKSINLDDERQNLIKTIKETKSKVAEERSIKRLNL

SEQ ID NO: 133764 - protein, 245 aa, Unknown
  Bacterial polypetide isolated from the Sargasso Sea
MRPNEYPEKGSKILLGDVTSTLIKISGPHDSIQFTNPPSFDEQRWSLELISSELNINIESFPYWGFGLFSSCYLNKVELKGSLIRRAKLIFDLVASLGRNPWEPKFTFFWEKVTKNRTGEHRDEWLKLLNFAKNGMEEEIEEINSRYLIVEKNTKEAKLFPPGWDQENSKMSLKEVKKHIEIARQALHDQNAGGLKRALDRAEAKLIEADPLVGLQNEELLQNQNLKTLEIDNIPFLDLVNDEEE

SEQ ID NO: 133765 - protein, 210 aa, Unknown
  Bacterial polypetide isolated from the Sargasso Sea
MKKELTDLFKNTEISEAQNFNSIKISLASPEKIKSWTYGEIKKPETINYRTFRPEKDGLFCARIFGPIKDYECLCGKYKRMKFRGIICEKCGVEVTKSNVRRERMGHINLATPVAHIWFLKSLPSRIALAVDMKLKEIERVLYFENFIVIEPGLTGLQKNQLLNEEELAKYQDEYGEEAFTAGIGAEAVLEMLKNLDLETERKNLTTSLK

SEQ ID NO: 133766 - protein, 204 aa, Unknown
  Bacterial polypetide isolated from the Sargasso Sea
YLITRSPKYLFWALEFDPNVLMDPYFVETVNYWSTLLNSNNCNDKDSVKNLLGNVGESLRNSRNNNLFYHYDSGFVHSTKNPNEPIITFEVHPPRRCFRVIDNFDSIIRFLEISLKTHADLKEEIMNKYKISDINIDFGDLKITAAVIISELHNRIPKKDKLGLYLTPFLAYEIYKDAVEHSVNLNYIVDTFRIVDYWDPDKKR

SEQ ID NO: 133767 - protein, 259 aa, Unknown
  Bacterial polypetide isolated from the Sargasso Sea
MPAPPGGKALKDLLNLLKNQGQIEEFDAIRIGLASPEMIRSWSFGEVKKPETINYRTFKPERDGLFCAKIFGPVKDYECLCGKYKRLKHRGVICEKCGVEVALAKVRRERMAHIELASPVAHIWFLKSLPSRIGLLMDMTLRDIERVLYFESYVVIDPGMTTLEKGQLLNDEQYFEALEEFGDDFDARMGAEAVRELLHAIDLDHEIGRLREEIPQTNSETKIKKLSKRLKLMEAFKDSGNLPEWMVLTVLPVLPPDLR

SEQ ID NO: 133768 - protein, 216 aa, Unknown
  Bacterial polypetide isolated from the Sargasso Sea
MQNQGSISENNFGSIKITLASPDKIKSWSYGEIKKPETINYRTFRPEKDGLFCSRIFGPVKDYECLCGKYKRMKFRGIVCEKCGVEVTKSNVRRERMGHIDLACPVAHIWFLKSLPSRISLAIDMKLKEVEKVLYFESFIVIEPGLTKLKKGQLMSEDELVKAQDEYGEDSFTAGIGAEAVREILLSLDLEKEQKKLREALKEVKSKVTEERTIKR

SEQ ID NO: 133769 - protein, 184 aa, Unknown
  Bacterial polypetide isolated from the Sargasso Sea
MHIRWRGLELPGSVVADTATLTNTYGKFTAEPFERGFGTTVGNSLRRILLSSLEGSAVTQIKLGGAQHEFTTIKGVQEDVTDIVLAVKSMVVKNHSDSTRVVHVEKSLKGPITAADVQTDESVEVVNKDLVLATLTDDVPFELEMVIENGRGYVPSSEHSPDGHEIGIVPVDAVFSPVTRVRYE

SEQ ID NO: 133770 - protein, 424 aa, Unknown
  Bacterial polypetide isolated from the Sargasso Sea
MHFPPPGAPLRMQPPAHSDASPAAAPRALDAAQLDDAPAVRLLTDTLHAARVRDASDIHVEPFEAGWRIRLRIDGVLHEHARPPLHLRDALVTRIKVLARMDIAERRLPQDGRLRIVIDGGTRGDYRVSSLPTLFGEKLVLRRLETMPPDLTLARLGFDAQQAAAMEAAIRAPHGLVLVTGPTGSGKTLSLYCALQMLDRDAHNVCTVEDPAEIQLDGISQVGVAEKAGLTFATALRALLRQDPDIIMVGEIRDAETADVAIKAAQTGHLVLSTLHTNDAPAAVARLLDIGVAPYNLAAALHLVTAQRLVRRLCTACRVHSDAPVPVLREAGCDPAALATGWRPFVARGCPACHGIGYRGRIGLHQTMPVSSGLAERIVARASVGELAQCVAAEGVRNLRDAALARVRDGTTSIAEALTATPAA

SEQ ID NO: 133771 - protein, 324 aa, Unknown
  Bacterial polypetide isolated from the Sargasso Sea
MSKKEYKLKIKTEKNTLTNTYGKFILQPLERGYGVTVGNALRRVLLTSLPGAAITNVKVEGVLHEFSTISGVKEDMADIIQNLKSVRFKLSDSDVDSVKLALKGKKVFTAADIQNATDQFEVLNKDQYITEINANGKLEIELRIGVGKGYVPSEENELPNAPIGTLAMDSIFNPVTKVTFNVQPVPGAKDPIEILSIEVETDGSVTPQDAISYSATFLMDHLKLVEAIAKPEVLEVTEKISEEIIKIRNLLNLTIDEMELSVRSHNCLQAAGIKHIYELVSKEENEMLKYKNFGRKSLTELVEKLDDMGISFGMDVDKYLKLEV

SEQ ID NO: 133772 - protein, 224 aa, Unknown
  Bacterial polypetide isolated from the Sargasso Sea
MRKELSELFKEKSISESQNFSKIKITLASPEKIKSWTYGEIKKPETINYRTFRPEKDGLFCARIFGPIKDYECLCGKYKRMKFRGIICEKCGVEVTKSNVRRERMGHINLATPVAHIWFLKSLPSRISLVIDMKLKDVEKVLYFENFIVVEPGLTGLIKNQLLSEEELIKYQNQYGDESFTAGIGAEAILEILKSIDLKAERDKLSKSIKETKSKVTEERNVKR

SEQ ID NO: 133773 - protein, 219 aa, Unknown
  Bacterial polypetide isolated from the Sargasso Sea
MHNTVENLINIEKNIQSNLSDLKINNQTKIIAVSKTFGKEKILPLIHHGHTDFGENKVQEAVDKWTELRKANPNVNLHMIGKLQTNKVKYAVKIFDYIHSVDNEKLARKISEEEKKINKKIKVFIQVNIGGEEQKSGVSKVDVHKLISYCKEVKLEVIGLMCIPPLNEDPSNYFKEISELNKDLGFSELSMGMSLDYLRASEYSATYLRIGSSIFGQRS

SEQ ID NO: 133774 - protein, 796 aa, Unknown
  Bacterial polypetide isolated from the Sargasso Sea
MSSRVQCGCQSCALGTALRAAFGAAVQRAGVLPRTRRAEGPDRVRRGAGCQQPSVTGPPLPGARAGGKGGRQDKRMRHRATSKASLHVGLAQHGAASPPCRLGRVARTNTGMSACSARPDTPQLSGRATMTDRRDDDFRVRPNPPKAPKNRGKGQGQSFVSKVLKQTGKASSGKSTVRPRGTGQRPGSRLGRGHTAARFAGAKLTPMSRRVTIKTLLVNQRQASPQSLAKHLRYIERDGVGRDGEPGQAYGPQTDVADLGAFKVRCADDRHHFRFILSPEDGAELEDLRTYTRHLMGRMEADLGTRLEWVAVDHWNTDNPHTHIVVRGRDDTGKDLIIAGDYITDGFRHRAAELATEWLGPRTELEIQQTLQREVNQERWMSLDRTLKREIGEAGDDGLVHVERLNEPRLQDQRLLLIGRLQCLQRLGLADETKPGTWAVHADAEKTLRALGERGDIIRTMQRAMRGEPRELAVFEPDQDADGSGRTILGRVAAKGLADELHDRGYLVIDGVDGKAHYVALNARDELVNYPTGSVVEVKGSTDARAADRNIAALASNGLYRTDHHLAVAQGQAVPGRDPQEVLAAHVRRLEALRRAGIVERVAEGLWKVPGDLPEQGRRYDAQRLGGVAVELKSHLSIERQARVIGATWLDQQLIGGGSGLGDLGFGAEVKQQMQQRADFLAEQGLAERRGQRVILARKLLGTLRNRELAQAVKDIAAETGLEHRPVADGQRVAGIYRRSVMLSSGRYAMLDDGIGFSLVPWRPVIEQRLGRRLAAIVRGGSVSWEVGQQRSPSVG

SEQ ID NO: 133775 - protein, 200 aa, Unknown
  Bacterial polypetide isolated from the Sargasso Sea
MNQNSIQENSFDSIKITLASPEKIKSWSYGEIKKPETINYRTFRPEKDGLFCSRIFGPVKDYECLCGKYKRMKFRGIICEKCGVEVTKSNVRRERMGHIDLACPVAHIWFLKSLPSRIALAIDMKLKEVEKVLYFESFIVIEPGLTTLKKGQLITEEALLKAQEEFGEDAFTAGIGAEAVREILVNLDLKKEQKKLRESL

SEQ ID NO: 133776 - protein, 383 aa, Unknown
  Bacterial polypetide isolated from the Sargasso Sea
MHSRGEKKVTAAKAKKIINSASNFYNDAKAVPHEAVGITTAQSIGEPGTQMTMRTFHYAGVATVNVTQGLPRIIEIVDARKVPQTPTMIIYMDEKNSKGKPLRTNEKLVRDLAASIETTTAIDIATIDVDVAQRNILLQLNNKNMKLKKMTGAEVRDKLSRALRLYVQADDDDRPKSLRIIPGVSKEEDLASLASDPPTYTALLQLEDKIKKLRLKGLPGISRATVQGPMSETGEYYISTIGSNLSKVSEFDGVDRSRTYTNNINEIHDYLGIEAARQAIINEMWDTLEGAGLDVDVRHLIMVSDVMTTGGEVRAIGRHGVSGTKHSILARSAFEVTVTHLLKAGVIGERDNLSGVTENIIVGQPVALGTGSVELFYIPEENN

SEQ ID NO: 133777 - protein, 851 aa, Unknown
  Bacterial polypetide isolated from the Sargasso Sea
MLLLTSSISADEVDEVVVSGYFIPDEKRDTTEINVVLDSTAIERTGDDNIAVALTRLTGLSLVRGKYVYVRGLGERYSAATLNGGVLPSPEPLKRVVPLDLFPTEAIESAIVQKTYSADMNGEFGGGMIAIKTKAVPSERIASLSLSTGYNTNHKEDGLLYDGGGDDDWGYDDGIRDYPASVASAIAAGKKIDRSNFEPYQLANMAREFENSKLWVIQKGNVPANGSFNVTYGNQLDWDLGNDLSSGFLLTAGVKSSWQTQEGLRQTGDLQANSDGTVSVIKAEDKTFMSTSNDATTYGMGVFGVESDSAEVKLTSLYIHKGTKEARSITGYDPSDAADVREDYTEFFERTLRNNQLSFDKIFQNEITLNGRVSFGTASRNAPYERSVFYEDSDNDGIFLYDVNTGRNQTQFSSVDDDVFNIGLDLTLPVETDTADLIFKIGLDQKVNDREAEVRSYRFLAAGGPLPDDLLGKRVDYIFADQNLDPNRLYVIENTGSSSPAGYEGELETDAYYASVEALISDQFRISAGARYEDGTQEINTYDLFTGKDNSIDKTIDEDYILPSLTFTYLPENYENLQIRFGYSETIARPTFRELSPTLFVDVDTDRVIAGSLYLENSEIENFDLRLEYYFDQNQFLTLGAFYKEIDKPIEESVTEIGDLVITSYQNVPLAEISGFEFEFERIFDGFESSWFASKELLVKVNYTFTNSEIVIGEGDTFVNLVGVTELASSLLANGRDDRLQGQSDNILNFQIGFNDFIANSQGTLIFNYVDDRVRARGIDVLPDIIEEVPTTLDFVYSRNFDVDDLENTLKLSLEIRNILDESYEATVADNIFYDQYDLGRSFSLGLKYEF

SEQ ID NO: 133778 - protein, 225 aa, Unknown
  Bacterial polypetide isolated from the Sargasso Sea
MKKELSELFKNSEISESQNFNSIKITLASPEKIKSWTYGEIKKPETINYRTFRPEKDGLFCARIFGPIKDYECLCGKYKRMKFRGIICEKCGVEVTKSNVRRERMGHINLATPVAHIWFLKSLPSRISLVVDMKLKDVERVLYFENFIVIEPGLTGLKKNQLLDEEELIKYQDEYGEESFTAGIGAEAVLEILKSINLEDERNLLIKNIKETKSKVSEERSIKRL

SEQ ID NO: 133779 - protein, 384 aa, Unknown
  Bacterial polypetide isolated from the Sargasso Sea
MEKKIRGGALIARALKEKGIDKVFTLSGGFCNPAIEGFMECQIEVTNCPHEQIAGHMADGYTRITRKPSVCLVGPEGFANAVPSMMEAWGERTPIIYITGSSSLKRQGSGGFKEIDDVAIAAPLTKYSASITDGNRIREFVDKAYRIATNGYPGAVHLSLPVDLMFSSFSEDAGLEERPFSHKAKPIAKAWPDPNSMSEILEIATNSKKPILIGGHGVWWSHSEKKLENAGNNLSIPIFNIPYHQKLLGEESSSYMGLADIHQYPPSEFALNNADLILMVGARLDNQMNFGNPPFIPKNTKLVCINGSHEEIEFNRAADINLLCDPGVFLDTLSNLKKNKKWILDRNWFDENKNKKKEWVDKSLNDLEIEAKETKKNGGKIHPL

SEQ ID NO: 133780 - protein, 553 aa, Unknown
  Bacterial polypetide isolated from the Sargasso Sea
MAAKDVKFNTDARDRMLRGVNILADAVKVTLGPKGRNVVLDKSFGAPRITKDGVSVAKEIELDDKFENMGAQMVKEVASRTNDEAGDGTTTATLLAQAIVKEGMKAVAAGMNPMDLKRGIDMATSNVVDAIRKMARDVADSDEVAQVGTISANGEAEIGKQIADAMQKVGNEGVITVEENKGLETETDVVEGMQFDRGYLSPYFVTNPDKMTAELEDCMVLLHEKKLSSLQSMVPLLESVIQSQKPLLIIAEDVEGEALATLVVNKLRGGLKIAAVKAPGFGDRRKAMLQDIAILTGGQVISEDLGMKLENVTMDMLGTAKKIQITKDETTIVDGSGEKAEIEARVAQIRTQIEETSSDYDREKLQERVAKLAGGVAVIRVGGMSEVEVKERKDRVDDALNATRAAVQEGIIVGGGVALIQSANGLDKLKGGNADQDAGITIVRRALEAPLRQIAENAGVDGAVVAGKIRESKDSAFGFNAQTEEYGDMFKFGVIDPAKVVRTALEDAASVASLLITTEAMVADKPEPKGAAGGGGMPDMGGMGGMGGMGGMM

SEQ ID NO: 133781 - protein, 1364 aa, Unknown
  Bacterial polypetide isolated from the Sargasso Sea
MTSSSSKSSKSRKSSKAAKDIAPVLESASRPLSKTPPPFRNHIVDKRGLKQLVAWAYKNHGTAVTSSMADKLKDLGFRYATQAAVSISVNDLRVPEAKKALLGEAEEQITATEERYRLGEITEVERHTKVIDTWTETNERLVDAVKKNFNQNAPLNSVWMMANSGARGNMSQVRQLVGMRGLMANPQGEIIDLPIRTNFREGLTVTEYVISSYGARKGLVDTALRTADSGYLTRRLVDVAQDVIVREDDCGTTRHIVVEAEDGRFGNRLVGRLTASQVVSADGEVLAERDTEIDPPLSKRIEKAGVTAVSVRSPLTCEANRSVCRKCYGWALAHNELVDLGEAVGIIAAQSIGEPGTQLTMRTFHTGGVSTAETGVVRSVVSGTIEFSAKARVRPYRTPHGVNAQQAEVDFNLSIKPSGKGKTQKIEITNGSLLFVENGQTIDADVTVAQIAAGAVKKSVEKATKDVICDLAGQVRYEDAIQPREVTDRQGNITLKAQRLGRMWVLAGDVYNLPPNAQPVVQGDTEVTEGQVLAEASQRSEYGGDVRLRDSIGDSREVQIVTTAMTLKDFKLLEESTHSGEIWNLEAKDGTRYRLNTIPGSKIGSGEVIAELADDRFRTGTGGLVKFAPGLAIKKARSAKNGYEVNKGGTLLWIPQETHEINKDISLLMITDGQWIEAGTEVVKDIFSQTAGIVTVTQKNDILREIIVRSGDFHLSSDSKALERFEGDGQMVNPGEEIAKGLSIEEMKYVQTVETPEGKGLLLRPVEEYTIPNEAQLPELSHVKQANGPHLGIKATQRLAFKDNELIKSVEGVELLKTQLILETFDTTPQMTVDVEKAPDKRAKTISRLRLVILESILVRRDTMSDSSHGSTHTELQVEDGISVKAGEVIATTQILCKQAGVAQLPEATEADPVRRLLVERPEDTTTLSTSGKPVVAVGQRIVDGELLAEGEPSSCCGEVEAVDSNSVTLRLGRPYMVSPDSVLHVRDGDLVQRGDGLALLVFERQKTGDIVQGLPRIEELLEARRPRESAVLCKKPGTVEIKQGDDDESLTVTVIEADDAIGEYPILLGRNVMVSDGQQVTAGELLTDGPINPHELLECFFEDLRSRKPLMDAAQEAIANLQHRLVTEVQNVYKSQGVSIDDKHIEVIVRQMTSKVRVEDAGDTTLLPGELIELRQVEDTNQAMAITGGAPAEFTPVLLGITKASLNTDSFISAASFQETTRVLTEAAIEGKSDWLRGLKENVIIGRLIPAGTGFSGFEEELQKEAGPHPDILSEDPAGYRRMQNLRPDYTVEMPPAASSTAVLDDPSDADLEATRTRHNIDPSTSNFAAFARPDADNELKEEQVVDAEAVEGLQEEGLLSDD

SEQ ID NO: 133782 - protein, 197 aa, Unknown
  Bacterial polypetide isolated from the Sargasso Sea
MKKELTDLFKNSEISEAQNFNSIKISLASPEKIKSWTYGEIKKPETINYRTFRPEKDGLFCSRIFGPIKDYECLCGKYKRMKFRGIICEKCGVEVTKANVRRERMGHINLATPVAHIWFLKSLPSRIALAVDMKLKEIERVLYFENFIVIEPGLTGLQKNQLLNEEELAKYQDQFGEEAFTAGIGAEAVLEMLKNLD

SEQ ID NO: 133783 - protein, 238 aa, Unknown
  Bacterial polypetide isolated from the Sargasso Sea
MLLTTFYYTFFGTVGSIIFGILTAQMVNQKFYGRTFMRSVLLFPYVAPVVALAYTWELLLDPNSGTLNSLLLNYQIIETPINLLGQKYIEISILGFDFKLRLALTTVIMFEIWRYFPLAFLFILARLQAIPKELYEAADVDGASPFQKFFNITLPQITAVISILFMIRFIWNFNKFEDVFLLTGGASGTRTLPINVYQQGFAISDIGMGSAVSIVIVVLLLMFMFFYFKLLGKRVDEN

SEQ ID NO: 133784 - protein, 323 aa, Unknown
  Bacterial polypetide isolated from the Sargasso Sea
MKKIKSLIDLIGNTPIVQAKNLDTGKCNLFLKMESLNPGSSIKDRVALRIIEDAEAQGKLKKGSTVVEATAGNTGLGLALIALLKGYKSKVVILDKMNHNKILHLKSLGAEVILARSDVGPDSPEHYVNVAKEVAKNTPDSFMANQFTNMSNPQAHEYSTGPEILDQMNNDVDAVVCGVGTGGTISGLGKFFSEHSPKTEMVLADPKGSIVKDAVEKKPLKKADYSWLVEGIGEDFIPETLDLKYIKKAYEVTNEEAFSMIRELALKEGILGGSSSGTLISAAIKYCKDQDKEKNVVTFVCDNGEKYLNTAYNEEWLKEKNLI

SEQ ID NO: 133785 - protein, 84 aa, Unknown
  Bacterial polypetide isolated from the Sargasso Sea
MAILNFQKPDKVIMIDSSESHGKFEFRPLEPGYGLTIGNALRRVLLSSLEGYAFTSIKIDGVDHEFSTIEGVVEDVTEIILNIK

SEQ ID NO: 133786 - protein, 145 aa, Unknown
  Bacterial polypetide isolated from the Sargasso Sea
LGFDFKLRLALTTVIIFEIWRYFPLAFLFILARLQAIPKELYEAADVDGASPFQKFFKITLPQITAVISILFMIRFIWNFNKFEDVFLLTGGASGTRTLPINVYQQGFAISDIGTGSAVSIVIVILLLLFMFFYFKLLGKRVDEN

SEQ ID NO: 133787 - protein, 348 aa, Unknown
  Bacterial polypetide isolated from the Sargasso Sea
MFSPILGNLARAIQLCRDSEQLALRQQAELVDMQRFNESLLKAIPIPVFYKDVEGRFISCNPTFTQITGISKAELLGKRVDEILPPEMADEYTQRDLEVLRSRQPQYFEHTLFDRSGHRYQVLNFKDLFYDHQGEVAGIIGALVDITHIKESEQQQRTLLFQTIAALSSAIAHKDPGTAGHERRVHDLALAIGQHLQLSQERLDGLGLAAMVHNIGLLQIPAEILTRPRALREVEFELIKQHPQAGCEILQQIDFPWPITAIVQQHHENLDGSGYPQGLQGDAISLEARIIRVADSLAAMTAHRPFRRAMSLTDAFAELTRYAGVHYDEQVVSACFAVWQAGYRFAPL

SEQ ID NO: 133788 - protein, 419 aa, Unknown
  Bacterial polypetide isolated from the Sargasso Sea
MNNTLAKTEKKTAYILTLPAVFLVFAIVLFPIFANVWISFKEVELKDIRIPEPRAKKIVKSISDENTKIKILYKLRNSSLLQEIRNVKFVDKYPNNLQPINLDQRCEFKKNKLKCEFGNWPAKYRENFQLIFESKDGSNINKKKIKLIKPKLNGESDNILLNTKFTLKNFKKVLFENEFIDLFLTTFYYTFFGTVGSIVFGVMAAQMVNQKFFGRTFMRSVLLFPYVAPVVALAYTWELLLDPNSGTLNSLLINYQIIETPINLLGQKYITVNILGFDFKLRLALTTVIIFEIWRYFPLAFLFILARLQAVPKELYEAADVDGASPFQKFFKITLPQITAVISILFMIRFIWNFNKFEDVFLLTGGASGTRTLPINVYQQGFAISDIGTGSAVSIVIVILLLIFMFFYFKLLGKRVDEN

SEQ ID NO: 133789 - protein, 219 aa, Unknown
  Bacterial polypetide isolated from the Sargasso Sea
MHKTVQNLINIENEIKSNLNDLTDTNLPKIIAVSKTFKIDKIFPLIEHGHLDFGENKVQEAVDKWSKIKEEKPELKLHMIGRLQTNKVKIAVKLFDFIHSVDSKKLAKKIADEQIKIQRKIKIFIQVNIGGEEQKSGVNKNELEGLISYGKEIGLDIIGLMCIPPIDLDPLKFFIKMDEINKSFSFQDLSMGMSSDYLDAAKNHSTYLRIGSSIFGQRT

SEQ ID NO: 133790 - protein, 575 aa, Unknown
  Bacterial polypetide isolated from the Sargasso Sea
VVSADGEVLAERNTEIDPPLSSTFEKAGITAVSVRSPLTCEANRSVCRKCYGWALAHNELVDLGEAVGIIAAQSIGEPGTQLTMRTFHTGGVSTAETGVVRSTIAGTVDFSAKARVRPYRTPHGVEAQQAEVDFNLTIKPSGKGKAQKIEVTNGSLLFVDNGQTIDTDVTVAQIAAGAVKKSVEKATKDVICDLAGQVRYEDKIQPKEVTDRQGNITVKAQRLGRMWVLAGDVYNLPPNAQPVVGSQSSVVEGQVLAEASQRSEYGGEVRLRDSIGDSREVQIVTTAMTLKDFKLLEESTHSGEIWNLEAKDGTRYRLNTIPGSKIGSGEVIAELADDRFRTQTGGLVRFAPGLAIKKARSAKNGYEVNKGGTLLWIPQETHEINKDISLLMITDGQWIEAGTEVVKDIFSQTAGIVTVTQKNDILREIIVRGGEFHLSSDSKALERFEGDGQMVNPGEEIAKGLSSEEMRFVQTVETPEGKGLLLRPVEEYTIPNEAQLPELSHVKQANGPHLGIKATQRLAFKDGELIKSVEGVELLKTQLLLETFDTTPQMTVDVEKAPDKRAKTISRLRLV

SEQ ID NO: 133791 - protein, 98 aa, Unknown
  Bacterial polypetide isolated from the Sargasso Sea
VREQPTEPEFNKNLLRKVDELELSVRSMNCLKNDNIIYIGDLVQKSEGEMLRTPNFGRKSLNEIKEVLTGMSLYLGMEIPNWPPDNIAELSKKLEEAI

SEQ ID NO: 133792 - protein, 275 aa, Unknown
  Bacterial polypetide isolated from the Sargasso Sea
MNKELINIFNQNLGVKTFDSIKISIASPENIRSWSFGEIKKPETINYRTFKPEKDGLFCARIFGPVKDYECLCGKYKRMKFRGIICEKCGVEVTLSKVRRDRMGHIELAAPVSHIWFMKSLPSRIATLLDMTIKNLEKVLYFEQFIVVEPGLTDLTRGQIISEDQYIDYQDQHGEDSFSASIGAEAIEQMLQNIDLQSDYDQLKQDLLETKSELKKAKITKRLKLIEHFISSKNKPEWMILRVLPVIPPELRPLVPLDGGRFATSDLNDLYRKGN

SEQ ID NO: 133793 - protein, 69 aa, Unknown
  Bacterial polypetide isolated from the Sargasso Sea
LKNDNIIYIGDLVQKTEPEMLRTPNFGRKSLNEIKEVLNTMSLYLGMEIPNWPPDNIAELSKKLEENNY

SEQ ID NO: 133794 - protein, 299 aa, Unknown
  Bacterial polypetide isolated from the Sargasso Sea
LQPLERGYGTTLGNAMRRVLLTSIPGAAITHMKIDGVQHEFSTIKGVKEDVADIIMNLKKVRFRLMDNEPDKITLKLKGKKVFTAQDIQDASDQYEILNPEEYITEINSSGKMDIELRIGIGKGYVPSEDNDKPNLPLGTLSIDSIFNPVTNVTFNVQPVPGAKEPIEILNLDVATDGSITAKDAVSYSATYLREHLKFVEAISNPSVLEISDGVSDETMALRKLLNQTIDEMELSVRSYNCLQAAGIKYIHELVSKEENQMLKYKNFGRKSLTELIEKLDSMGLHFGMEVDKIMAEEG

SEQ ID NO: 133795 - protein, 59 aa, Unknown
  Bacterial polypetide isolated from the Sargasso Sea
MEATEVNIKNWKSLIKPAKLDVQLSDDKSTAKIIAEPLEKGYGLTLGNSLRRILLSSIR

SEQ ID NO: 133796 - protein, 245 aa, Unknown
  Bacterial polypetide isolated from the Sargasso Sea
MIEKNWKELIKPSKLSVQHDSNDEFKATIVAEPIERGFGVTIGNALRRILLSSLQGSSITSIQIQGVLHEFSSLPGVREDITDVILNVKGIKVKMDVEGPKKINLNVTGPLKVTAGHIEEITDVEIMNPDHEICTLDEGANLSIEFNIENGNGYVPAGSKVVDEKPIGLIPIDAIFSPIVQVSYDVDNARVGQQTDYDKLLLTVQTNGSVTPEDAVAFAARIMQDQKQNFINFEEPEEPEEVPEV

SEQ ID NO: 133797 - protein, 1115 aa, Unknown
  Bacterial polypetide isolated from the Sargasso Sea
MTENYNQRWPVIQDILRREGIARQHLTSFDEFLDNGLQSIIQEVGQIEIENAEYPYKIQLGKIKLQQPRMMELDGSITHVTPAEARLRNISYVAPIMMEASVVEDGKTLETRFVHIGDMPVMVKSHACILNTFTDQKLIDHQEDPRDPGGYFIINGSERVVVGLEDLSYNKIIVDAEKVGGKIVHKAKVYSSIIGYRAKLELIMKDDGMIVAKIPGSPVDIPVVTLMRALGLESDKDIAGAVSLVDEIQDHLEGSFEKAGDVPTSKDAIVYISKRIAPGMLEEFQIKRAETLLDWGLLPHLGKHPENRKEKAHFMGEAACKLLELKLGWIDPDDKDHYGNKVIKFAGQMLADLFRTAFRNLVRDMKYQLERSGQKRGINAVAAAIRPGIVSDKLNNAIATGNWGRGRVGVTQLLDRTNYLSTISHLRRVQSPLSRTQPNFEARDLHSTHFGRICPSETPEGSNCGLVKNLALSAIISQNVPSEEIVEKLFDIGVSDLVSTSNDIKKDGTRVFVDGKLIGFHKDGQNLVDQMREFRRTSKIHPHVGISIHKPEEEGATQRLYVNCNAGRVLRPLVIIKDGKTLLSNDILEKISKKLISWNDLVRMGVIELLDANEEENCYVTFDDKNTKKFTHMEIFPSAILGAGASIIPYPEHNQSPRNTYESAMAKQSLGFSTPMMNTSTYVRQHFMLYPQTPIVSTRAMNLLGMEERPAGVNCVVAVLPFDGYNIEDAIVLNRSSVDRGLFRTFFYRIYDTEAKQYPGGMRDNFEVPNADDNVRGYKGEKAYRMLEDDGIVATESGVDGGDILIGKTSPPRFMEEYKEFETSGPYRRDTSVGVRPSEHGVVDTVVMTQSNEGGKMYKIRVRDMRIPEIGDKFASRHGQKGVLGILAKQEDLPYTEQGTQPDVLINPHAFPSRMTVGMMMESVCGKAAALRGKQFDGSAFVGEKMDIVKEILDKQGFKYSGKEKMYDGRTGKAFEVDTFIGVVYYQKLHHMVSDKIHARARGQVQMLTKQPTEGRARGGGLRFGEMERDCLIAYGASMLLKDRLLDESDKTDILLCEKCGLTGYHDARKRKFVCAQCGENAPISSVSVAYAFKLLLQEILSLNIAPRLKLKERV

SEQ ID NO: 133798 - protein, 197 aa, Unknown
  Bacterial polypetide isolated from the Sargasso Sea
MKKELSELFKSSEIIESQNFNSIKISLASPEKIKSWTYGEIKKPETINYRTFRPEKDGLFCARIFGPIKDYECLCGKYKRMKFRGIICEKCGVEVTKSNVRRERMGHINLATPVAHIWFLKSLPSRIALAVDMKLKEIERVLYFENFIVIEPGLTGLQKNQLLNEEELAKYQDEFGEEAFTAGIGAEAVLEMLKSLD

SEQ ID NO: 133799 - protein, 175 aa, Unknown
  Bacterial polypetide isolated from the Sargasso Sea
MSTKSFSKGLVEIIGSSENSERVESEILQVFNAIADHKEALDVFRNFGVPAEKKIEAMSNLLGKRVDSLTLDLISLTISQGYGDNLLEISSYVSEYFAENRGASLAKVVSAIELDDKTQNSIKRVLKKKFGRKVELQVEVDESVIGGLSVSVGERTFDGLVSSRLQEVKSVLEGR

SEQ ID NO: 133800 - protein, 52 aa, Unknown
  Bacterial polypetide isolated from the Sargasso Sea
MTNSNTRTESHFDYVKIKLASPERIREWGQRTLPNGQVVGEVTKPETINYRT

SEQ ID NO: 133801 - protein, 364 aa, Unknown
  Bacterial polypetide isolated from the Sargasso Sea
MRAIAPDSEGSLKPRANGFPANAAVGTRLEPGPTDSDSAPAVRLLTDTLQEATRRNASDLHIEPAERGWRMRLRIDGVLHEIPPPPAHLRDAFITRVKVLARMDIAERRVPQDGRLRIATSPGRVEDYRVNSLPTLFGEKLVLRRLDALPADLSLDSLGLDPQQRAAVDAAIRAPHGLVLVTGPTGSGKTLSLYCFLHMLNDEARNLCSVEDPAEIQLAGINQVSVREKAGLTFALALRAFLRQDPDVIMVGEIRDDETADVAVKAAQTGHLVLSTLHTNDAPAAVARLIDIGVEPYNLAAALKMVTAQRLVRRLCVACRAPAPQSAAALRAAGFADEHLDGWQPFGAAGCAACHGIGYRGRVG

SEQ ID NO: 133802 - protein, 148 aa, Unknown
  Bacterial polypetide isolated from the Sargasso Sea
MSNDLKFKISHKVTEDNSSNFTIKPLDRGYGITVGNSLRRALLTAVPGAAITNVKIEGAHHEFSTIDGVTEDVADVIMNLKGVRFHLFESSVEPIFLKVKGPKAFTAADIQAASDDFTILNPDHYITDIAKGTTLEVELRLGIGKGYK

SEQ ID NO: 133803 - protein, 294 aa, Unknown
  Bacterial polypetide isolated from the Sargasso Sea
TTIGHALRRVLLSSVRGSAIFAVQIEGVTHEFSNISGVVEDVLQIILNIKELQLEQYFDGVIELELIGEGPCILTGKDIATFEKAKVLNPNKVIATLQEGATISMTLYAQFNKGYVTSEVNQENELPVGTIYLDSNHSPIKKIHYEVENSRVDQRTDYDRLNFELWTNASVKPADSLAYAAKILKEHMDVFINFDESAIVIEHEEEDDDEPLNENLYRSVSELELSVRSINCLQNAKIETIGDLVQKTEAEMLKTKNFGRKSLNEIKSILSGMGLQLGMVLDRFDPNNNPHLKI

SEQ ID NO: 133804 - protein, 273 aa, Unknown
  Bacterial polypetide isolated from the Sargasso Sea
MNKNIKDKIESIPIWKNDISIQNLDGGMTNENFLVQENNIKYVVRLGDNIPEHLVSRSNELIVSKAAANAGISPKVIFHSKGILVLDYIESTTLSAEEVRKNIKSIIPIIKNIHNEIPKKLYGQSLIFWVFHVIRNYAKFLKDNQSTHLKILSDLISKSELLEKNSAPYEIVFCHNDLLPANFLDDGSRLWVIDWEYAGYNTPLFDLGGLSSNNNFSLEEEIYLLENYFEKKINDKLMLQYNCLKSASLLRETMWSMVSEISSKINADYASYT

SEQ ID NO: 133805 - protein, 279 aa, Unknown
  Bacterial polypetide isolated from the Sargasso Sea
MTSIPGAAITHVKIDGVQHEFSTIDGVKDDVADIIMNLKKVRFKLMDSEPDKVVLSMKGKKSFTAQDIQNASDQFEVLNPEEYITEVNSKGKLDIELRIGIGKGYVPSEDNDKPNLSVGTLSIDSIFNPVTNVTFNVQPVPGAKDPIEILSLDVSTDGSITAKDAVSYTATYLREHFKFIEAISNPSVLEISDGVSDETMALRKLLNQTIDEMELSVRSYNCLQAAGIKYIHELVSKEENQMLKYKNFGRKSLTELVEKLDSMGLHFGMAVDKIMAEEG

SEQ ID NO: 133806 - protein, 111 aa, Unknown
  Bacterial polypetide isolated from the Sargasso Sea
QAIPKELYEAADVDGASPFQKFFKITLPQITAVISILFMIRFIWNFNKFEDVFLLTGGASGTRTLPINVYQQGFAISDIGMGAAVSIVIVVLLLMFMFFYFRLLGKRVDEN

SEQ ID NO: 133807 - protein, 168 aa, Unknown
  Bacterial polypetide isolated from the Sargasso Sea
LINYQVIETPINLLGQKYITINILGFDFKLRLALTTVIMFEIWRYFPLAFLFILARLQAIPKELYEAADVDGASPFQKFFKITLPQITAVISILFMIRFIWNFNKFEDVFLLTGGASGTRTLPINVYQQGFAISDIGMGSAVSIVIVVLLLLFMFFYFKLLGKRVDEN

SEQ ID NO: 133808 - protein, 103 aa, Unknown
  Bacterial polypetide isolated from the Sargasso Sea
MQTNLLKPKAINVEQLGHNRAKVALEPFERGYGHTLGNAIRRVLLSSMVGYAATEVTIAGVLHEYSSIDGVQEDVVNILLNLKGVVFKLHNRDEVTLSLRKDG

SEQ ID NO: 133809 - protein, 161 aa, Unknown
  Bacterial polypetide isolated from the Sargasso Sea
MSNVLGAYALGLDYGSDSVRALLVDTQTGAEVATNVVYYPRWKKGLFCEPAKNQFRQHPLDYIESLIEVVQGLWAKAPSGAAQRVCGLSVDTTGSTPIAVDEAGVALALKPEFANNPNAMFLLWKDHSAILEAQQITAAANNASENYLKYEGGIYSSEWFW

SEQ ID NO: 133810 - protein, 1142 aa, Unknown
  Bacterial polypetide isolated from the Sargasso Sea
MSIHVALHHTTRYRYDRLVNLGPQVVRLRPAPHCRTPILAYSMTVEPAQHFINWQQDPFSNYLARLVFPERTEHFEITIDLVAEMSVYNPFDFFLEASAEQYPFSYDDALKTELAPYLVCDPPTSASPLFRTYLDGVDRTPAGTVNFLVALNQQLQRDIGYLVRMEPGVQTPEQTLELASGSCRDSAWLLVQLCRHLGIAARFVSGYLIQLTPDVKSLDGPSGTSVDFTDLHAWCEVYLPGAGWIGFDPTSGLLAGEGHIPLACTPQPTSAAPVEGLIDECEVSFEHEMTVTRVYESPRVTKPYTESQWDGVLALGTQVDGALAAGDVRLTQGGEPTFVSIDDRDGAEWNTDALGPTKRGYATELVQRLRAEYGDGGFLHFGQGKWYPGEQLPRWALSIFWRADGQPVWHDPSLFADEREPSAYTTDDAKRFIDALAARLNLTGEFIRPGYEDVWYYLWRERRLPVNVDPFDSRLDDELERARLRKVFEQQLDSVVGYVLPVKRTDDVDGRDRPGLDGPRWQTGPWFFRDERMYLVPGDSPMGYRLPLDSLPWASRADHPYLVERDPFAPRDALPDAAAIRARYAGPSDAPRYLSGVHREAAAQTVMQWRDDGTAGNGRPAARDPGRAPERFESAAWITRTALCVEVRNGILYLFMPPLAALEDYLDLLGAIELTAHALGVKLVLEGYPPPRDARLKLLQVTPDPGVIEVNIHPAGNFDELVDHTEFLYDAAWQSRLCSEKFMVDGRHVGTGGGNHFVLGGATPADSPFLRRPDLLASLIAYWHNHPSLSYLFSGLFIGPTSQAPRVDEARNDQLYELDIAFAEIQRNKLLFGQDMPPWLVDRVLRNLLIDVTGNTHRSEFCIDKLYSPDSSTGRLGLLELRAFEMPPHARMSIVQQLLLRALVARFWAAPYTTPLTRWGTALHDRFMLPAFLQMDFDDVLTELRDAGFAFDPAWFAPHFEFRFPLFGQIAVNGMQLSLRGALEPWHVMGEEGAPGGTVRYVDSSVERLEVRVTGLNDNRHVVTVNGRALPLQPTGTVGEYVAGVRYKAWSPPSALHPTLGVHAPLTFDIVDTWLQRSLGGCRYHVAHPGGRNYATFPVNAYEAESRRLARFVEMGHTPGRMDVAAAAPSREFPFTLDLRRP

SEQ ID NO: 133811 - protein, 375 aa, Unknown
  Bacterial polypetide isolated from the Sargasso Sea
MPGLLPDVDREGLLEYSVVYTDRSVNHMSQRFQGVMRDISGTLKKVYNAKSVVIVPGSGTFGMEAVARQFATNKKCLVIRNGWFSFRWSQIFDMGSIPSETTVLKARPVEAGRQAAYAPAPIDEVVAAINEHKPDLVFAPHVETASGMMLPDGYLRAVSDAVHAVGGMFVLDCIASGTVWVDMQASGVDILISAPQKGWSASPCCAMVMLGERARERIDGTTSTSFACDLRKWLQIMEAYEGGGFAYHATMPTDSLATLRDVMKETEAYGFDKVKEEQLELGKRIRALLAEKGFRSAAAQGFEAPGVVVSYTDDDGIRTGKKFVDVGLQIAAGVPLMCDEGDDFKTFRLGLFGLDKLHDVDGAVARFADALERIL

SEQ ID NO: 133812 - protein, 516 aa, Unknown
  Bacterial polypetide isolated from the Sargasso Sea
AEVVQNSGIKKVKIRSPIKCEASLGLCAKCYGRDLARGHLVHVGESVGVVAAQSIGEPGTQLTMRTFHIGGAASGSAEDDSITTLRGGKIVFDASLKTVEKKNGEAIVISRNAYLTIQDDDENLLEKYSIPYGAEILHTNNTKVDPGTLIAKWDPLTLPIISEQEGTIVFADLTEDVTMKVDIDELTGSTKREVIDVNERPLKGKGMTPTISVLNDKKKALATYTLPSKSILMKNNSNKVSKGEFIARVPVEGTKTKDITGGLPRVADLFEARKPKDGAIYSELSGVLSYGKETKGRKRLVITPEKGEPWEVMVHKYRAVSFLEGDTVQRGDILCYGPTDTHSLLHLHGVEELAKHLISEVQDVYRLQGVVINDKHIEVITRQMLKKVTVIDSGDSGFIEGDVLEIAKVRAENKTLEDSGKNPVKFERMLLGITKAALSTDSFISAASFQETTRVLTEAAVTSRKDILKGLKENVVVGRLIPAGTGFAANQKASVSSEEIQDIEEALKKELLESFQ

SEQ ID NO: 133813 - protein, 318 aa, Unknown
  Bacterial polypetide isolated from the Sargasso Sea
GLSPIDDISVSEPEVPELSIRMIEGTDTYGKFIAEPLDKGWGVTLGNPLRRTLLSGLPGTAINWVKIEGIEHEYSTLKGMREEVNEFLMNAKGIRLRSLSDRSGRLRLEVEGEGEVKAGDIMATADFEIVNPGHHLATLDSSDAHLSVEFSVEQGQGYKKATEEDDTNIGVLPIDSIFTPIKKANFSVQPTRVGQRSDWERLTLEIWTDGSIDPQSALQKASESLMDNFYTFSKFDQASEEQSPAAGLGISPDIYNTPVETLDLSARTLNCLKRAGINRVGEVIAMPEGDLLKIRNFGRKSLDELFDVLAERNMLPQS

SEQ ID NO: 133814 - protein, 181 aa, Unknown
  Bacterial polypetide isolated from the Sargasso Sea
MSKNYSNMLNRVLDGSSLSEEESYKLMIAMANESVSPILSGALLAGLRAKGETADEIRGFAKAMRFLAIQPEIPLHEPIVDTVGTGGDSSGSLNLSTGTGLLAAACGIKVVKHGNRSVSSKCGSADMLEHIGMQFPQDKKSALDALNKLGFTFLFSPAFHPAMKAIMPVRNTLAVRTVFNM

SEQ ID NO: 133815 - protein, 381 aa, Unknown
  Bacterial polypetide isolated from the Sargasso Sea
SFKEVELKDIRIPEPRAKKIIKSISDDPSKIKILYKLRNSSLIQEIRDVSFQDNFPKNYEIKNLDPRCSYKKYNLKCEFGNWPAKYRENFQVIFATNDGSKVDKKRLKSIKPKLEGESDNILLNTNFTLKNFKKVLFENEFIDLLLTTFYYTFFGTVGSIVFGILTAQMVNQKFYGRTFMRSVLLFPYVAPVVALAYTWELLLDPNSGTLNSLLLNYQIIETPINLLGQKYIEISILGFDFKLRLALTTVIMFEIWRYFPLAFLFILARLQAIPKELYEAADVDGASPFQKFFNITLPQITAVISILFMIRFIWNFNKFEDVFLLTGGASGTRTLPINVYQQGFAISDIGMGSAVSIVIVVLLLMFMFFYFKLLGKRVDEN

SEQ ID NO: 133816 - protein, 43 aa, Unknown
  Bacterial polypetide isolated from the Sargasso Sea
MSIINNWQALIKPSKLKLISDEDTQYKATLIAEPLERGFGLTL

SEQ ID NO: 133817 - protein, 291 aa, Unknown
  Bacterial polypetide isolated from the Sargasso Sea
NADFDGDQMAVHVPLSLEAQLEARILMLSTNNILSPSNGKPIIVPSQDMILGIYYLSQEPISDKPVGYFTNADQIDYALSSGEIKVHSTIISRIETIDENGNKKYEKYTSTAGRFLLADLLPKNSNIKFSLVDRLLPKKVVSEIIDIVFRFCGQKNTVIFCDKLKDLGFKHAFKAGISFGKDDLVIPQNKTQLIDDTKKLIADYETQYAEGLITRGEKYNKVVDAWSKCTDKVAGEMMKGISATEKTAEGLKINSVFMMADSGARGSAAQMKQLAGMRGLIAKPSGEINES

SEQ ID NO: 133818 - protein, 195 aa, Unknown
  Bacterial polypetide isolated from the Sargasso Sea
MEMNVNTGKGYVPAELNKPEEPPLGLIAIDSLYSPVKKVSYSVSTAREGKALDYDKLTMEVETNGSISAEDAVAYSARIFQDQLKMFVNFDEPVEAPVKEVSTEPEFNKNLLRKVDELELSVRSMNCLKNDNIIYIGDLVQKSEGEMLRTPNFGRKSLNEIKEVLTGMSLYLGMEIPNWPPDNIAEMSKKLEEAI

SEQ ID NO: 133819 - protein, 182 aa, Unknown
  Bacterial polypetide isolated from the Sargasso Sea
HIWFLKSLPSRIALMMDMKLKDLEKVLYFEKFMVTEPGLTPLIQNQLLDEEELEKAKEEYGEDSFSAGIGAEAVRKVLERIELEPELEALRIKLSETKAVALSEKLVKRIKIFESFISSGNRPEWMILTSVPVIPPELRPLVPLDGGRFASSDLNDLYRRVINRNNRLYRLIELRAPDIIIR

SEQ ID NO: 133820 - protein, 176 aa, Unknown
  Bacterial polypetide isolated from the Sargasso Sea
DAPIGLIPIDAIFSPIKTVSYKIENSRVGQDTDFDRLLLDIETDGTITPEDATALAARILIEQMGNFVNFEDPQPEVVEEEPTPEALLNPHLLRKVEELELSVRSANCLKNDNIVYIGDLVQKSESEMLRTPNFGRKSLNEIKEVLTNMGLNLGQMIPEWPPENLEQLAKQIDDQF

SEQ ID NO: 133821 - protein, 278 aa, Unknown
  Bacterial polypetide isolated from the Sargasso Sea
VREHPVLLNRAPTLHRLGVQAFEPKLIEGDAIELHPLTCAAFNADFDGDQMAVHVPLSLEAQLEARILMLSTNNILSPSNGKPIIVPSQDMILGIYYLSQEPINDKSIGYFLDADQIEFALSSGQIKVHSTIISRFETVDEKGNKKFEKYTTTAGRFLLANLLPKNFNIKFSLIDRLLPKKTVSEIIDIVFRFCGQKTTVIFCDKLKDLGFKHAFKAGISFGKDDLVIPENKTQLIDDTKKLIADYETQYSEGLITRGEKYNKVVDAWSKCTDKVAGE

SEQ ID NO: 133822 - protein, 154 aa, Unknown
  Bacterial polypetide isolated from the Sargasso Sea
MQYQIDRIDYQIADDRSQTGTFLIGPLERGQATTLGNSLRRVLMGGLEGSAVTAVRIAGINHEYATIPGVREDVLDILLNCKQLSINSSNPELEIGRLVVNGPMEVKANDIQFSSQVEIVDGDKPIATIQEGHNLELEIHVERGIGYRPVDRRN

SEQ ID NO: 133823 - protein, 163 aa, Unknown
  Bacterial polypetide isolated from the Sargasso Sea
FSPVKKVSYSVSTAREGKALDYDKLTMEVETNGSISAEDAVAYSARIFQDQLSMFVNFDEPQEVLVREKPTEPEFNRNLLRKVDELELSVRSMNCLKNDNIIYIGDLVQKSEGEMLRTPNFGRKSLNEIKEVLNGMSLYLGMEIPNWPPDNIAELSKKLEEAI

SEQ ID NO: 133824 - protein, 311 aa, Unknown
  Bacterial polypetide isolated from the Sargasso Sea
FEPKLIEGDAIELHPLTCAAFNADFDGDQMAVHIPLSLEAQLEARVLMMSTNNILSPSNGKPIIVPSQDMILGIYYLSQSPYQTEKVEGYFVNNSEIEHALESRQIKVHSRIVSRFITVDENGKEKYEKYISTAGRFLLANLLPKNINNKFSLIDRLLPKKVVSEIIDHVFRFCGQKSTVIFCDKLKDLGFKHAFKAGISFGKDDLIIPENKQQLIEETKKLISDYENQYSEGLITRGEKYNKVVDAWSKCTDRVAAEMMKRISATEVTEKGLKINSVFMMADSGARGSAAQMKQLAGMRGLIAKPSGELL

SEQ ID NO: 133825 - protein, 188 aa, Unknown
  Bacterial polypetide isolated from the Sargasso Sea
MAKLKFQYFKSSVEESGKLKGHFLLQSLEAGQGLTIGNALRRVLLSNLEGIAITGIRIPGIVHEFSTIPNVREDVLEIFLNLKQIVLKSEKQAPTFGHVSIKGPGVITASSIKFDDDTIKVINPNQYIATLSGNETLNFDLKVEKGIGYQFAEQTNNTEDIEFLAIDTVFMPVLKVNYKINNVYIGYS

SEQ ID NO: 133826 - protein, 94 aa, Unknown
  Bacterial polypetide isolated from the Sargasso Sea
MTNSNLRTENHFDYVKISIASPQRIMDWGQRTLPNGQVVGEVTKPETINYRTLKPEMDGLFCEKIFGPSKDWECHCGKYKRVRHRGIVCERCGV

SEQ ID NO: 133827 - protein, 234 aa, Unknown
  Bacterial polypetide isolated from the Sargasso Sea
LDAKGPGEIKASDIASVPDVKFLNPDLVICNLDENTHFHMEMNVNTGKGYVPADLNKPEEPPLGLIAIDSLYSPVKKVSYSVSTAREGKALDYDKLTMEVETNGSISAEDAVAYSARIFQDQLKMFINFDEPVEAPVKEVSTEPEFNKNLLRKVDELELSVRSMNCLKNDNIIYIGDLVQKSEGEMLRTPNFGRKSLNEIKEVLTGMSLYLGMEIPNWPPDNIAEMSKKLEESI

SEQ ID NO: 133828 - protein, 82 aa, Unknown
  Bacterial polypetide isolated from the Sargasso Sea
MALEIFKPFVMKRLVELGLAQNIKSAKRMVERSRAQVWEVLAEVIEEHPGLLNRAPTLHRLGIQAFEPILVEGKAIQVHPLV

SEQ ID NO: 133829 - protein, 283 aa, Unknown
  Bacterial polypetide isolated from the Sargasso Sea
PLTCAAFNADFDGDQMAVHVPLSLEAQLEARILMLSTNNILSPSNGKPIIVPSQDMILGIYYLSQEPVTDKSAGYFVDADQIEFALSSGQIKVHSTIISRFETVDADGKKKFEKYTTTAGRFLLANLLPKNSNIKFSLIDRLLPKKTVSEIIDIVFRFCGQKTTVIFCDKLKDLGFKHAFKAGISFGKDDLVIPENKTQLIDDTKKLIADYETQYAEGLITRGEKYNKVVDAWSKCTDKVAGEMMKGISATEKTSEGLKINSVFMMADSGARGSAAQMKTLAG

SEQ ID NO: 133830 - protein, 333 aa, Unknown
  Bacterial polypetide isolated from the Sargasso Sea
EPKLIEGDAIELHPLTCAAFNADFDGDQMAVHIPLSLEAQLEARVLMMSTNNILSPSNGKPIIVPSQDMILGIYYLSLQPYQEKKIEGYFVNDSEIEQGLESGKIKIHSRIISRFETVDEKGNQIFEKHTSTAGRFLLANLLPKNKDIKFSLIDRVLPKKVVSEIIDFVFRYTGQKSTVIFCDKLKDLGFKHAFKAGISFGKDDLIIPNNKEQLIDETKQLIKDYENQYSEGLITRGEKYNKVVDAWSKCTDKVASEMMKGISATNKSEKGLDINSVFMMADSGARGSAAQMKQLAGMRGLIAKPSGEIIEITITSNFKEGLTALEYFNSTHG

SEQ ID NO: 133831 - protein, 234 aa, Unknown
  Bacterial polypetide isolated from the Sargasso Sea
MYGEDGIDVAKSDHGEAFNVDRLIESESIVDSGKAATKDEIAPIIKKYTSEFNPRLTNAVSTSLENSKLSKQGVEKVAKKGLSLYNNAKAEPGQAVGIVTAQSIGEPGTQMTLRTFHFAGIAERNVTLGLPRLIELVDARKKPVTPTMDIYLSGDAKTDQAKTVEVARNILQTTVNDLILDADTDYKTKITLNLNERKLTDRGCTLDDVKAALESNKKFKMEDNGINSVVLNLV

SEQ ID NO: 133832 - protein, 304 aa, Unknown
  Bacterial polypetide isolated from the Sargasso Sea
MGFVKSNYRDGLSTLEFFFHAMGGREGLVDTAVRTQQSGYMQRRLINALEHIKLEYDGTVRDPHGHIIQFLYGEDGIDVAKSDHGEAFNVDRLIESESIVDSGKAATKDEIAPIIKKYTSEFNPRLTNAVSTSLENSKLSKQGVEKVAKKGLSLYNNAKAEPGQAVGIVTAQSIGEPGTQMTLRTFHFAGIAERNVTLGLPRLIELVDARKKPVTPTMDIYLSGDAKTDQAKTVEVARNILQTTVNDLILDADTDYKTKITLNLNERKLTDRGCTLDDVKAALESNKKFKMEDNGINSVVLNLV

SEQ ID NO: 133833 - protein, 192 aa, Unknown
  Bacterial polypetide isolated from the Sargasso Sea
ETGKGYVSAEVAEDENKVIGEIKLDAMFSPVIKASYKIENSRVGQVTDFDKLIFEVETNGAITPDDAIALAARIMQDQLQPFINFDEPEVLPDQSQVESLSFNSNLLKKVEELELSVRSANCLKNDNIIYIGDLVQKSESEMLRTPNFGRKSLNEIKEVLQQMELNLGMSVPDWPPENIDELAKKYEDPFNK

SEQ ID NO: 133834 - protein, 243 aa, Unknown
  Bacterial polypetide isolated from the Sargasso Sea
TGLKKMYIKASGPGEIRAGNFETDSETEIMNRDQLIMTLDTNADIEIEANIETGKGYVSAEVAEDENKIIGEIKLDAMFSPVVKATYKIENSRVGQVTDYDKLIFEVETNGVISPDDAIALASRILQDQLQPFINFDEPEVQQDQGSAEQLSFNSNLLKKVEELELSVRSANCLKNDNIIYIGDLVQKSESEMLRTPNFGRKSLNEIKEVLQQMELNLGMSVPDWPPENIDELAKKYEDPFNK

SEQ ID NO: 133835 - protein, 170 aa, Unknown
  Bacterial polypetide isolated from the Sargasso Sea
LIAIDSLYSPVKKVSYTISTAREGKALDYDKLTMEVETNGSISAEDAVAYSARIFQDQLNMFVNFDEPVEVPVKEVSTEPEFNKNLLKKVDELELSVRSMNCLKNDNIIYIGDLVQKSEGEMLRTPNFGRKSLNEIKEVLTSMSLYLGMEIPNWPPENIAEMSKKLEEQI

SEQ ID NO: 133836 - protein, 215 aa, Unknown
  Bacterial polypetide isolated from the Sargasso Sea
IEILNPDLVICNLDENTNFHMEMTVGNGKGYVSADFNKPEEPPLGLIAIDSLFSPVKKVSYSVSTAREGKALDYDKLTMEIETNGSISAEDAVAYSARIFQDQLGMFVNFDEPQETIVREKPSEPEFNKNLLRKVDELELSVRSMNCLKNDNIIYIGDLVQKSEGEMLRTPNFGRKSLNEIKEVLNTMSLYLGMEIPNWPPDNIAELSKKLEEAI

SEQ ID NO: 133837 - protein, 214 aa, Unknown
  Bacterial polypetide isolated from the Sargasso Sea
EILNPDLVICNLDENTNFHMEMTVSNGKGYVSADMNKPEEPPLGLIPIDSLFSPVKKVSYSISTAREGKALDYDKLTMEVETNGSISAEDAVAYSARIFQDQLGMFVNFDEPQEVIVREQPTEPEFNKNLLRKVDELELSVRSMNCLKNDNIIYIGDLVQKSEGEMLRTPNFGRKSLNEIKEVLTGMSLYLGMEIPNWPPDNIAELSKKLEEAI

SEQ ID NO: 133838 - protein, 121 aa, Unknown
  Bacterial polypetide isolated from the Sargasso Sea
YSARIFQDQLGMFVNFDEPQEVIVRDAPTEPEFNKNLLRKVDELELSVRSMNCLKNDNIIYIGDLVQKSEGEMLRTPNFGRKSLNEIKEVLTGMSLYLGMEIPNWPPENIAELSKKLEEAI

SEQ ID NO: 133839 - protein, 291 aa, Unknown
  Bacterial polypetide isolated from the Sargasso Sea
KKMALELFKPFVYGKLEQRELATTIKGAKKLVERETPEVWEVLEEVIREHPVLLNRAPTLHRLGLQAFEPKLIEGKAIQLHPLVCVAFNADFDGDQMAVHVPLTLEAQLEARALMMSTNNILSPADGSPIINPTQDIVLGLYYMTRDNANASGAGRVFSNSDEVLRAYETESLEIHSPIKVRIDHGNGESTLEETTVGRILIWRITPKEVGFENINDVLNKKSVSKLVDISYRKAGLKKTVIFADQLMYLGFDFSTRSGSSIGVNDFVIPKEKAQIIDSSEKEVKAIEKQL

SEQ ID NO: 133840 - protein, 267 aa, Unknown
  Bacterial polypetide isolated from the Sargasso Sea
TIKQAKKLVEKETNAVWDALELIVREHPVILNRAPTLHRLGVQAFEPKLIEGDAIELHPLTCAAFNADFDGDQMAVHVPLSLEAQLEARILMLSTNNILSPSNGKPIIVPSQDMILGIYYLSQEPFSDKPVGYFTNADQIDYALSSGEIKVHSTIISRIETIDENGNKKYEKYTSTAGRFLLADLLPKNSNIKFSLVDRLLPKKVVSEIIDIVFRFCGQKNTVIFCDKLKDLGFKHAFKAGISFGKDDLVIPQNKTQLIDDTKKIDR

SEQ ID NO: 133841 - protein, 257 aa, Unknown
  Bacterial polypetide isolated from the Sargasso Sea
MELIKPSKMDVNVQNDTNKKGVLIAEPLERGFGLTLGNAIRRVLLSSLQGAAITSVKIKGVVHEFSTIQGVKEDLTDILLNLKSVAVKVHSPGLKKMYIKSSGSGEIRAGNFETDSETEIMNPDQLIMTLDSNADIEIEANIETGKGYVSAEVAEDENKVIGEIKLDAMFSPVIRASYKVENSRVGQVTDYDKLIFDVETNGVITPDDAIALASRILQDQLQPFINFDEPEIQNDQSSAEKLSFNSNLLKKVEELEL

SEQ ID NO: 133842 - protein, 72 aa, Unknown
  Bacterial polypetide isolated from the Sargasso Sea
MNCLRNDNIIYIGDLVQKSEIEMLRTPNFGRKSLNEIKEVLGTMSLYLGMEVPNWPPENIEELARKIEDPYN

SEQ ID NO: 133843 - protein, 282 aa, Unknown
  Bacterial polypetide isolated from the Sargasso Sea
TLRTFHFAGIAERNVTLGLPRLIELVDARKKPVTPTMDIYLLGDAKTDQTKTVQIARNILQTTINDLILDADTDYKTKITLNLNERKLSDRGCTIDNVTSALESNKKFKMETMGNSVVLNLVDEEADAPAVITIRNKVLKTTVKGVPDIARVTIVKKGDEYVIQTTGSNLSKVLEVEGIDKNNVRTNNVSEIAETLGIEAARNALINELSTTLEDAGLEVDQRYLMLVADLMCHRGYMQQIGRHGIAGTKDSVLARAAFEITVPTIAGAARTGETEQLRGIT

SEQ ID NO: 133844 - protein, 118 aa, Unknown
  Bacterial polypetide isolated from the Sargasso Sea
MTAVNDFLTPRSIAVNAINQTHAKVVLEPLERGFGHTLGTALRRILISSMPGCAITEVEIDGVQHEYSSIEGVQEDVINILLNLKGVALKWKIAKKRPLSWSRKVLVSLPRMISSVIT

SEQ ID NO: 133845 - protein, 175 aa, Unknown
  Bacterial polypetide isolated from the Sargasso Sea
EPPLGLIAIDSLFSPVKKVSYAVSTAREGKALDYDKLTMEVETNGSISAEDAVAYSARIFQDQLGMFVNFDEPQEVIVREQPSEPEFNKNLLRKVDELELSVRSMNCLKNDNIIYIGDLVQKSEGEMLRTPNFGRKSLNEIKEVLTGMSLYLGMEIPNWPPDNIAELSKKLEEAI

SEQ ID NO: 133846 - protein, 193 aa, Unknown
  Bacterial polypetide isolated from the Sargasso Sea
MNVNTGKGYVPADLNKPEEPPLGLIAIDSLYSPVKKVSFSVSTAREGKALDYDKLIMEVETNGSISAEDAVAYSARIFQDQLKMFINFDEPVEAPVKEVSTEPEFNKNLLRKVDELELSVRSMNCLKNDNIIYIGDLVQKSEGEMLRTPNFGRKSLNEIKEVLTGMSLYLGMEIPNWPPDNIAEMSKKLEEAI

SEQ ID NO: 133847 - protein, 275 aa, Unknown
  Bacterial polypetide isolated from the Sargasso Sea
MALELFKPFLYARLNKLGLASTIKQAKKLVERERNEVWDALELIVREHPVILNRAPTLHRLGVQAFEPKLIEGNAIELHPLTCAAFNADFDGDQMAVHVPLSLEAQLEARVLMMSTNNILSPSNGKPIIVPSQDMILGIYYLSQPPVQTDKIDGYFVNTSEIEHALETGQIKVHSRIVSRFETLDEKGNSKFEKHISTAGRFLLSNLIPKNINNKFSLVDRLLPKKIVSEVIDHVFRFSGQKNTVIFCDKLKDIGFKHAFKGGISFGKDDLVNTG

SEQ ID NO: 133848 - protein, 122 aa, Unknown
  Bacterial polypetide isolated from the Sargasso Sea
MQYQIDRIEHQVEEDRSQSGVFLIGPLERGQATTLGNALRRVLMGGLEGSAVTAIRIAGVNHEYATVPGVREDVLDILLNCKELSVNSRSPELEIGRLVVAGPAEVTANDLQFSSPGGCGGR

SEQ ID NO: 133849 - protein, 85 aa, Unknown
  Bacterial polypetide isolated from the Sargasso Sea
KKVEELELSVRSANCLKNDNIIYIGDLVQKSESEMLRTPNFGRKSLNEIKEVLQQMELNLGMSVPDWPPENIDELAKKYEDPFNK

SEQ ID NO: 133850 - protein, 53 aa, Unknown
  Bacterial polypetide isolated from the Sargasso Sea
KGKQGRFRQNLLRKRVDYSGRSVIVVGPNLELHQCGYPKKMALETFKPFISTT

SEQ ID NO: 133851 - protein, 322 aa, Unknown
  Bacterial polypetide isolated from the Sargasso Sea
DSGKAATKDEIAPIIKKYTSEFNPRLTNAVSTSLENSKLSKQGVEKVAKKGLSLYNNAKAEPGQAVGIVTAQSIGEPGTQMTLRTFHFAGIAERNVTLGLPRLIELVDARKKPVTPTMDIYLSGDAKTDQAKTVEVARNILQTTVNDLILDADTDYKTKITLNLNERKLTDRGCTLDDVKAALESNKKFKMEDNGINSVVLNLVDEEADAPAVIVVRNKVLKTTVKGVPDIARVTIVKKNDEYVIQTTGSNLSKVLEVEGIDKNNVRTNNVSEIAETLGIEAARNALINELSNTLEDQGLEVDQRYLMLVSDLMCHRGYMQP

SEQ ID NO: 133852 - protein, 277 aa, Unknown
  Bacterial polypetide isolated from the Sargasso Sea
MNLLSREKNEDFDAIRIGLASPEMIRSWSFGEVKKPETINYRTFKPERDGLFCAKIFGPVKDYECLCGKYKRLKHRGVICEKCGVEVALAKVRRERMGHIELASPVAHIWFLKSLPSRIGLLLDMTLRDIERILYFEAYVVTDPGLSALEHGQLLNDEQYYEAMEEYGDEFTAKMGAEAIQDLMMEINLKGEIEQLREEIPQTNSETKIKKLSKRLKLMEAFDKSGNKPEWMILNALPVLPPDLRPLVPLDGGRFATSDLNDLYRRVIHRNNRLKRL

SEQ ID NO: 133853 - protein, 275 aa, Unknown
  Bacterial polypetide isolated from the Sargasso Sea
SPLEPGFGHTLGNSLRRTLLSSIPGAAITQVNFDDAIHEFDVIEGVYEDVTDILLNLKDVVVRLDSDEPAVLRLDAQGPGEVTAGQFSQTADVEVLSGDLVIATLSQNGRIGMEVTIEKGRGYLSAEGNKDSTTVGQIPVDSIFSPVRRVSFEVEPTRVEQSTDFDRLTLEIETDGSMSPREALASAGGTLRNLIQLVEEMSEEPQSLELTEVVTGTAGSPDLELGIEDLELSERPNNCLKRAQIHTIGELILKSEADLLSITNLDKSLLMKSLR

SEQ ID NO: 133854 - protein, 134 aa, Unknown
  Bacterial polypetide isolated from the Sargasso Sea
MTGQLNLEDALAFSARILIDQLNPFINFDEPEEEIIEENEDELEFNASLLRKVDELELSVRSANCLKNDNIVYIGDLILKSENEMLRTPNFGRKSLNEIKEVLIEMNLSLGMDIPNWPPENIEELARKHAADKF

SEQ ID NO: 133855 - protein, 149 aa, Unknown
  Bacterial polypetide isolated from the Sargasso Sea
MVKNNEIITQKKFNKISIGLASPEVILSKSLGEVLKPETINYRTHKPERDGLFCERIFGPVKDYECACGKYKRIRYKGIVCDRCGVEVTEKKVRRDRVGHISLVVPVAHIWYFRSLPNKIGYLLGLPSKKLDMIIYYERYVVIQPGLAK

SEQ ID NO: 133856 - protein, 104 aa, Unknown
  Bacterial polypetide isolated from the Sargasso Sea
MARINEIVTQKKFNKIVIGLSSPEVILNNSRGEVLKPETINYRTHKPERDGLFCERIFGPVKDYECACGKYKRIRYKGIVCDRCGVEVTEKKGKRDRVGHINLV

SEQ ID NO: 133857 - protein, 288 aa, Unknown
  Bacterial polypetide isolated from the Sargasso Sea
VSVVQAPTVEDDDDADASPVVRYVNHIIQTAVREGASDIHIEPSDGDPRVRFRIDGVLHEAMSPPRRMQASITSRLKIMASLDIAERRLPQDGRIRASVLGRTLDLRVSTCPTPHGEKTVMRILDARTIRVPLDELGFSQSVLQSWRRQMARPHGIVLVTGPTGSGKTTTLYASLQELDLGRLNVSTVEDPVEYHLGGITQIQTHERIGLSFAASLRTLLRQDPDVVMVGEIRDKETATIATQAALTGHLVLSTLHTNDAPSSVTRLINIGIEPYLVSGAVNGVLAQR

SEQ ID NO: 133858 - protein, 212 aa, Unknown
  Bacterial polypetide isolated from the Sargasso Sea
FRKAEILNPDLTLATLQKGATVSMTMYSRFNKGYVTSEDNQEVELPVGTIFIDSNHSPVSRINYEVENSRVDQKTDFDRLNFELWTNGSVKPADSLAYAAKIIKEHMDVFINFDESSIKDEPEDEVEEEQLNENLYRSVSELELSVRSINCLQNAKIETIGDLVRKTEQEMLKTKNFGRKSLNEIKVILTDMGLALGTSLENFDPTNNPHEK

SEQ ID NO: 133859 - protein, 129 aa, Unknown
  Bacterial polypetide isolated from the Sargasso Sea
DAAALAARILQDQLKPFINFEEPTEDERKKLQSSNEPQFNKNLLKKVDELELSVRSANCLKNDNIFYIGDLVQKTEGEMLRTPNFGRKSLDEIKEVLSSMSLSMGMDLPGWPPENIEELSKKYEDPFKV

SEQ ID NO: 133860 - protein, 205 aa, Unknown
  Bacterial polypetide isolated from the Sargasso Sea
MKNLETWVKFDQKDLTYGVFEMSPVERGMGLTIGNSLRRVLLSSLQGVAPILIKIEGAEHEFDTIEGIQEDILDIIFNLKGVVFNLFEGEDKREVSLDVSGEKDVKASDLVLPSDVQIINPDQHLFSITNKKTSFQMTMTIERNIGYRASEDQKREGYDINTIFLDSSFSPIDRVNHKIEDVRVGQELNFDKLILEVWTNGSITT

SEQ ID NO: 133861 - protein, 66 aa, Unknown
  Bacterial polypetide isolated from the Sargasso Sea
NDEIIYIGDLVQKTESEMLRTPNFGRKSLNEIKEILSTMNLELGMKIEGWPPENIEEIRRKLDDPY

SEQ ID NO: 133862 - protein, 200 aa, Unknown
  Bacterial polypetide isolated from the Sargasso Sea
KTNFHMEMTVGNGKGYISAEMNKPEEPPLGLIPIDSLFSPVKKVSYSVSTAREGKALDYDKLTMEVETNGSISAEDAVAYSARIFQDQLAMFVNFDEPQEVVIREKPSEPEFNRNLLRKVDELELSVRSMNCLKNDNIIYIGDLVQKSEGEMLRTPNFGRKSLNEIKEVLNGMSLYLGMEIPNWPPDNIAELSKKLEEAI

SEQ ID NO: 133863 - protein, 135 aa, Unknown
  Bacterial polypetide isolated from the Sargasso Sea
VQTNGSISAEDAVAYSARIFQDQLGMFVNFDEPQEVIIREKPSEPEFNKNLLRKVDELELSVRSMNCLKNDNIIYIGDLVQKSEGEMLRTPNFGRKSLNEIKEVLTGMSLYLGMEIPNWPPENIVELSKKLEEAI

SEQ ID NO: 133864 - protein, 299 aa, Unknown
  Bacterial polypetide isolated from the Sargasso Sea
QYWDALELIVREHPVILNRAPTLHRLGVQAFEPKLIEGDAIELHPLTCAAFNADFDGDQMAVHIPLSLEAQLEARILMMSTNNILSPSNGKPIIVPSQDMILGIYYLSQPPYQTKKVEGYFVNNSEIEQGLESGSINVHSRIISRFQTADKDGKLISEKHISTVGRFLLANLLPKHKDIKFSLIDRLLPKKTVSEIIDMVFRFTGQKSTVIFCDKLKDLGFKHAFKAGISFGKDDLIIPENKEQLIDETKKLIKDYENQYAEGLITRGEKYNKVVDAWSKCTDRVAGEMMKRISATETT

SEQ ID NO: 133865 - protein, 239 aa, Unknown
  Bacterial polypetide isolated from the Sargasso Sea
SKKLILDAKGPGEIKASNITPVTDIEILNPDLVICNLDENTNFHMEMVIGSGKGYVSADLNKPEEPPLGLIPIDSLFSPVKKVSYSVSTAREGKALDYDKLTMEVETNGSISAEDAVAYSARIFQDQLGMFVNFDEPQEVIVRDKPSEPEFNKNLLRKVDELELSVRSMNCLKNDNIIYIGDLVQKSEGEMLRTPNFGRKSLNEIKEVLTGMSLYLGMEIPNWPPDNIAELSKKLEESI

SEQ ID NO: 133866 - protein, 201 aa, Unknown
  Bacterial polypetide isolated from the Sargasso Sea
ENTIFHMEMNVGTGKGYVSADLNKPDEPPLGLIAIDSLFSPVKKVSYSISTAREGKALDYDKLTMEVETNGSISAEDAVAYAARIFQDQLGMFVNFDEPKEVITKEQPTEPEFNKNLLRKVDELELSVRSMNCLKNDNIIYIGDLVQKSEGEMLRTPNFGRKSLNEIKEVLTGMSLYLGMEIPNWPPDNIAELSKKLEEAI

SEQ ID NO: 133867 - protein, 307 aa, Unknown
  Bacterial polypetide isolated from the Sargasso Sea
FSRTVISPDPNLDLSEVGVPETVAKKLTIPEIVTDWNIEKLKKLVINGPSTFPGVNYITRPDGVKIRLDFVEDRSLIADSLEIGFLVERHLMDGDIVLFNRQPSLHQMSIMAHYVRVLPGKTFRLHPSVCPPYNADFDGDEMNLHVPQSEEARSEAILLMRVQDQLISPRFGGPIIGGLRDFITGAYLLTKDGTTLSSQEFANLAMLGGYTGQLPEPENKKENLYSGKQLFSLFLPEDFNYVMTSKWSKGTKGQQKDVVIKNGQLISGVIDKSSIGAEEPESVLHRIAKDYGNEKAKVFLNSELVII

SEQ ID NO: 133868 - protein, 286 aa, Unknown
  Bacterial polypetide isolated from the Sargasso Sea
IVREHPVILNRAPTLHRLGVQAFEPKLIEGDAIELHPLTCAAFNADFDGDQMAVHIPLSLEAQLEARVLMMSTNNILSPSNGKPIIVPSQDMILGIYYLSLPPYQEKKVEGYFVNNAEIEQALETGSIKIHSRIISRFETVDDTGKIKYEKHTSTAGRFLLANLLPKDKDITFNLIDRVLPKKIVSEIIDIVFRFTGQKSTVIFCDKLKDLGFKHAFKAGISFGKDDLIIPDSKESLIDETKKLIKDYENQYSEGLITRGEKYNKVVDAWSKCTDKVASEMMKGIS

SEQ ID NO: 133869 - protein, 272 aa, Unknown
  Bacterial polypetide isolated from the Sargasso Sea
LHEFSSIKGVREYVTDIVLNVKNLAIKLDSDGPKKLVLDAEGPKEVKAKDISLVSDIKILNPDQTICNLDEKTKFHMELIVNNGRGYVLAQQNKSDDTPLGMIPIDSLFSPVKKVSFKIDSTRAGSALDYDKLEMEVETNGTVAAEDAIAFAARIFQDQLSMFVNFEDPKEVPKPTTSTEPEFNKNLLKRVEELELSVRSMNCLKNDNIIYIGDLVQKTEPEMLRTPNFGRKSLNEIKEVLSSMSLYLGMEIPNWPPDNIAELSKKLEENTY

SEQ ID NO: 133870 - protein, 221 aa, Unknown
  Bacterial polypetide isolated from the Sargasso Sea
MKAITFLKPNLVDIEMISDSKSKIVIQPLERGFGHTLGNALRRVLLSSMPGSAVTEVSIDNILHEYSTIDGVQEDVLEIILNIKKLALVLHEKDKIEVVLRKIGKGPVLASDIEEHPNLEIKNPDFCLANITNDKTELIVNLTISQGKGYQPATKRKFNELEDLGIGKMQVDASFTPVEKVSYSVDNARVKQKADLDKLIIELETNSTINPEDAIRTAGKI

SEQ ID NO: 133871 - protein, 86 aa, Unknown
  Bacterial polypetide isolated from the Sargasso Sea
LLLKKVDELELSVRSANCLKNDNIVYIGDLIQKTEAEMLRTPNFGRKSLNEIKEVLSGMGLHLGMDVEDWPPDNIEELAKKFEDNF

SEQ ID NO: 133872 - protein, 306 aa, Unknown
  Bacterial polypetide isolated from the Sargasso Sea
EPKLIEGNAIELHPLTCAAFNADFDGDQMAVHVPLSLEAQLEARVLMMSTNNILSPSNGKPIIVPSQDMILGIYYLSQLPYQTDKIEGYFVNTSEIEHALEIGQIKVHSRIVSRFETLDDKGKVKFEKHISTAGRFLLANLIPKNENNKFSLIDRLLPKKVVSEIIDHVFRFSGQKNTVIFCDKLKDLGFKHAFKAGISFGKDDLVIPENKQQLIDETKKLISDYENQYAEGLITRGEKYNKVIDAWSKCTDKVASEMMKRISATEVTKEGLKINSVFMMADSGARGSAAQMKQLAGMRGLIAKPS

SEQ ID NO: 133873 - protein, 120 aa, Unknown
  Bacterial polypetide isolated from the Sargasso Sea
MTTKSSSDFNSIRISLASPEQIRAWSYGEVTKPETINYRTLRPEKDGLFCEKIFGPTKDWECYCGKYKKIRYKGVICDRCGVEVTRAKVRRERMGHIKLAAPVDHIWFSKSYSLKIRITA

SEQ ID NO: 133874 - protein, 112 aa, Unknown
  Bacterial polypetide isolated from the Sargasso Sea
EILRISATILQHQLSAFAELGRLEEVIEEKEEAKIDPIMLRPVDELELTVRSANCLKAENIHYIGDLVTRMESDLLRTPNLGKKSLNEIKEVLLSRGLSLGLILDNWPPESN

SEQ ID NO: 133875 - protein, 123 aa, Unknown
  Bacterial polypetide isolated from the Sargasso Sea
VLDLETDGTIDAKQAVKYAATIMQHQLSVFVDEELVSRKEKRKDKYDFDPLLLRSIEELELTVRSTNCLKAENIFLIGDLIQRSEMDLLKTPNLGKKSLNEIKDELASRGLSMGTVLKNWPPM

SEQ ID NO: 133876 - protein, 269 aa, Unknown
  Bacterial polypetide isolated from the Sargasso Sea
FNADFDGDQMAVHVPLSLEAQLEARVLMMSTNNILSPSNGKPIIVPSQDMILGIYYLSQPPYQTDRVEGYFVNTSEIEHALEIGQIKVHSRIVSRFATVDEKGNTKYEKHISTAGRFLLANLIPKNINNKFALVDRLLPKKIVSEVIDHVFRFSGQKSTVIFCDKLKDLGFKHAFKAGISFGKDDLVIPDNKQQLIDETKKLISDYENQYAEGLITRGEKYNKVIDAWSKCTDKVASEMMKRISATEMTEDGLKINSVFMMADSGARGS

SEQ ID NO: 133877 - protein, 218 aa, Unknown
  Bacterial polypetide isolated from the Sargasso Sea
LQAFEPKLIEGKAIQLHPLVCVAFNADFDGDQMAVHVPLTLEAQLEARALMMSTNNILSPADGSPIINPTQDVVLGLYYMTRDNANASGGGRIFSNPDEVLRAYETENLEIHSPVKVRITHENGETSIEETTVGRILIWRITPAEVGFKNINTVLNKKTVSKLVDTSYRKAGLKKTVIFADQLMYLGFDFSTRSGSSIGVNDFVIPQEKASIIESSEK

SEQ ID NO: 133878 - protein, 196 aa, Unknown
  Bacterial polypetide isolated from the Sargasso Sea
MAKNNELLTQKKFNTISIGLSSPEVILGNSRGEVLKPETINYRTHKPERDGLFCERIFGPVKDYECACGKYKRIRYKGIVCDRCGVEVTEKKVRRDRVGHINLVVPVAHIWYFKSLPNKIGYLLGLPSKKLDMIIYYERYVVIQPGEAKNAEGESVNKMDFLTEEEYLTIMESLPADNQFLDDADERKFIAKMGAE

SEQ ID NO: 133879 - protein, 243 aa, Unknown
  Bacterial polypetide isolated from the Sargasso Sea
VCAAFNADFDGDQMAVHVPLSLEAQVEARVLMLSSNNILSPSNGSPIIVPSQDIVLGIYYMSREKPNAKGEGMIFSDVEEVHRAYQEKIVDLQAKVRVRIKIKDDSSDESITKIVETTAGRSVLAELLPREIPFSYINKDLDKKAISELFDVSYRLAGLKATVVLADQIMYTGFRYSTRAGVSIGVNDMVIPTQKTKMVQNAEKEVKEIEKQYNSGLLTSGERYNKVVDIWSHTNDQVSQAMI

SEQ ID NO: 133880 - protein, 282 aa, Unknown
  Bacterial polypetide isolated from the Sargasso Sea
AAFNADFDGDQMAVHIPLSLEAQLEARVLMMSTNNILSPSNGKPIIVPSQDMILGIYYLSLPPYQEKKIEGYFVNNSEIEQALESGSIKIHSKIISRFETVDENGKIKFEKYTSTAGRFLLANVLPKDKDITFSLIDRVLPKKIVSEIIDIVFRFTGQKSTVIFCDKLKDLGFKHAFKAGISFGKDDLIIPNSKETLIEETKNLIKDYENQYSEGLITRGEKYNKVVDAWSKCTDKVASEMMKGISATEKTDQGLNINSVFMMADSGARGSAAQMKQLAGMR

SEQ ID NO: 133881 - protein, 263 aa, Unknown
  Bacterial polypetide isolated from the Sargasso Sea
REEVWDALELIVREHPVLLNRAPTLHRLGVQAFEPKLIEGDAIELHPLTCAAFNADFDGDQMAVHIPLSLEAQLEARVLMMSTNNILSPSNGKPIIVPSQDMILGIYYLSQPPYQNEKIEGYFVNNSEIEHALEVGQIKVHSRIVSRFETLDQKGELKYENHISTAGRFLLANILPKNLNNKFALIDRLLPKKIVSEIIDHVFRFSGQKATVIFCDKLKDLGFKHAFKAGISFGKDDLVIPENKQQLIDETKKLISDYENQYQ

SEQ ID NO: 133882 - protein, 144 aa, Unknown
  Bacterial polypetide isolated from the Sargasso Sea
YDKLIFEVETNGVITPDDAIALASRILQDQLQPFINFDEPEAQQDQTASEKLSFNSNLLKKVEELELSVRSANCLKNDNIIYIGDLVQKSESEMLRTPNFGRKSLNEIKEVLQQMELNLGMSVPDWPPENIDELAKKYEDPFNK

SEQ ID NO: 133883 - protein, 167 aa, Unknown
  Bacterial polypetide isolated from the Sargasso Sea
NADFDGDQMAVHVPLAIEAQTEARMLMLASNNILSPATGDPIVTPSQDMVLGSYYLTAIQPEAIQPKFGDYSHTYASLKDVIQALEDKRIDLHDWVWVRFSGEVQDDDELQEPRKSETLKDGTRVEEWTYRRDRLDEDGGLISRYVLTTVGRVVMNHTIIDAVAATS

SEQ ID NO: 133884 - protein, 170 aa, Unknown
  Bacterial polypetide isolated from the Sargasso Sea
MIPIDSLFSPVKKVSYSVSTAREGKALDYDKLTMEVETNGSISAEDAVAYSARIFQDQLGMFVNFDEPQEVIIKEQPSEPEFNKNLLRKVDELELSVRSMNCLKNDNIIYIGDLVQKSEGEMLRTPNFGRKSLNEIKEVLTGMSLYLGMEIPNWPPDNIAELSKKLEEAI

SEQ ID NO: 133885 - protein, 80 aa, Unknown
  Bacterial polypetide isolated from the Sargasso Sea
METENVNLKNWKSLIKPSKLDVKISDDLTKATIIAEPLEKGYGLTLGNSLRRILLSSIRGSAVTSIQIDGVLHEFTSIKG

SEQ ID NO: 133886 - protein, 306 aa, Unknown
  Bacterial polypetide isolated from the Sargasso Sea
HPLTCAAFNADFDGDQMAVHVPLSLEAQLEARVLMMSTNNILSPSNGKPIIVPSQDMILGIYYLSQPSYQNDKIEGYFVNTDEIVQALENNSIKIHSRIVSRFETVDENGNKKFEKYISTAGRFLLANIIPKNLNNKFSLVDRLLPKRVVSEVIDHIFRFSGQKNTVIFCDKLKDLGFKYAFKAGISFGKDDLVIPENKEQLIDETKKLISEYENQYAEGLITRGEKYNKVVDAWSKCTDKVASEMMKRISATEVTEQGLKINSVFMMADSGARGSAAQMKQLAGMRGLIAKPSGEIIESPITSNF

SEQ ID NO: 133887 - protein, 287 aa, Unknown
  Bacterial polypetide isolated from the Sargasso Sea
LIEGDAIELHPLTCAAFNADFDGDQMAVHVPLSLEAQLEARILMLSTNNILSPSNGKPIIVPSQDMILGIYYLSQEPISDKPAGYFTNSDQIEFALSSGQINVHSTIISRFETVDDQGNKKMEKYTSTAGRFLLANLLPKNSNIKFSLVDRLLPKKVVSEIIDVVFRFCGQKTTVIFCDKLKDLGFKHAFKAGISFGKDDLVIPANKTQLIDDTKKLISDYETQYAEGLITRGEKYNKVVDAWSKCTDKVAGEMMRGISATEKTDEGLKINSVFMMADSGAQRICCS

SEQ ID NO: 133888 - protein, 274 aa, Unknown
  Bacterial polypetide isolated from the Sargasso Sea
MKKELTDLFKGSEISEAQNFNSIKISLASPEKIKSWTFGEIKKPETINYRTFRPEKDGLFCARIFGPIKDYECLCGKYKRMKFRGIICEKCGVEVTKSNVRRERMGHINLATPVAHIWFLKSLPSRIALAVDMKLKEIERVLYFENFIVIEPGLTGLQKNQLLNEEELAKYQDEFGEESFTAGIGAEAVLEMLKNLDLELERKNLVSFIKETKSKVNEERAIKRLKLIESFIETGQKPEWMIMTVVPVIPPELRPLVPLDGGRFATSDLNDLYR

SEQ ID NO: 133889 - protein, 294 aa, Unknown
  Bacterial polypetide isolated from the Sargasso Sea
MEYDGTVRDPHGHIIQFLYGEDGIDVAKSDHGEAFNIDRLIESESIVDSGKPATKDEAANIIKKYTSTFNPRLTKSVSNSLENAKLSKDGIEKVAKKGLMLYNNAKAEPGQAVGIVTAQSIGEPGTQMTLRTFHFAGIAERNVTLGLPRLIELVDARKKPVTPTMDIYLLGDAKTDQTKTVQVARNILQTTVNDLILDVDTDYKTKITLNLNERKLSDRGCIIENVTTALESNKKFKMETMGNSIVLNLVDEEADAPAVITIRNKVLKTTVKGVPDIARVTIVKKGDEYVIQTT

SEQ ID NO: 133890 - protein, 270 aa, Unknown
  Bacterial polypetide isolated from the Sargasso Sea
NEVSGIPQAHHRSGRPLKTLTQRLKGKEGRFRGSLSGKRVDFSSRTVISPDPNLDLSEVGVPETVAKKLTIPEIVTDWNIEKLKKLVINGPLTFPGVNYITRPDGVKIRLDFVEDRSLIADSLEIGFLVERHLMDGDIVLFNRQPSLHQMSIMAHYVRVLPGKTFRLHPSVCPPYNADFDGDEMNLHVPQSEEARSEAILLMRVQDQLISPRFGGPIIGGLRDFITGAYLLTKDGTTLSSQEFANLAMLGGYTGQLPEPDNKKENLYTGK

SEQ ID NO: 133891 - protein, 263 aa, Unknown
  Bacterial polypetide isolated from the Sargasso Sea
MAKKEYKLKIKTDKDTLTDTYGKFVLQPLERGYGVTVGNALRRVLLTSLPGAAITNVKVDGVLHEFSTISGVKEDMADIIQNLKSVRFKLSDSDVDNVKLTLKGKKVFTAADIQKATDQFEVLNQDQYITEINSNGKMEIELRIGVGKGYIPSEENELPNAPIGTLAMDSIFNPVTKVTYNIQPVPGAKDPIEILSMEIETDGSVTPQDAISYSATVLMDHLKLVEAIAKPEVLEVTEKISEEIIQVRNLLNLTIDEMELSVR

SEQ ID NO: 133892 - protein, 261 aa, Unknown
  Bacterial polypetide isolated from the Sargasso Sea
VILNRAPTLHRLGVQAFEPKLIEGNAIELHPLTCAAFNADFDGDQMAVHVPLSLEAQLEARVLMMSTNNILSPSNGKPIIVPSQDMILGIYYLSQPPIQTERVEGYFVNNSEIEHALETGQIKVHSRIVSRFETVDEKGNTKFEKYISTAGRFLLSNIIPKNVNNKFSLIDRLLPKKIVSEVIDHVFRFSGQKSTVIFCDKLKDIGFKHAFKAGISFGKDDLLIPDNKEQLIEETKKLIADYEGQYAKGLITRGEKYNKVI

SEQ ID NO: 133893 - protein, 253 aa, Unknown
  Bacterial polypetide isolated from the Sargasso Sea
MFVNDPREFDFLEIGLASPDRIRYWSYGEVEKPETINYRTFKPERKGLFCEKIFGPVKDWECSCGKYRRIRYRGIVCERCGVEVTHSKVRRERMGHLELAAPVTHIWFLKGIPSYLGIILDISSRNLEEVIYYDSYIITSVSDDLKGELAKGDLLSTLDYFDLKAKHGTKFVAEIGASAIKTLLSQLNVKQLIKELRDDLSTSKGQKRLKLVKRLRILESVEKSRNQPEWMVLEAIPVMPPDLRPMVQLEGWR

SEQ ID NO: 133894 - protein, 260 aa, Unknown
  Bacterial polypetide isolated from the Sargasso Sea
LTDVLLNLKSVAVKVYSPGLKKMYLKSSGSGELRAGNFETDSETEIMNPDQLIMTLDSNADVEIEANVETGKGYVSAEVAEDENKIIGEIKLDAMFSPVIKASYKVENSRVGQVTDYDKLIFEVETNGVITPDDAIALSARILQDQLQPFINFDEPEVMPDQSQVEKLSFNSNLLKKVEELELSVRSANCLKNDNIIYIGDLVQKSESEMLRTPNFGRKSLNEIKEVLQQMELNLGMSVPDWPPENIDEKAKKYEDPFNK

SEQ ID NO: 133895 - protein, 277 aa, Unknown
  Bacterial polypetide isolated from the Sargasso Sea
KKLVERERNEVWDALELIVREHPVILNRAPTLHRLGVQAFEPKLIEGNAIELHPLTCAAFNADFDGDQMAVHVPLSLEAQLEARVLMMSTNNILSPSNGKPIIVPSQDMILGIYYLSQEPYQTDKVEGYFVNTSEIEHALETGEIKVHSRIVSRFETIDEKGNKKFEKHISTAGRFLLSNLIPKNTNNKFTLVDRLLPKKVVSEIIDHVFRFSGQKSTVIFCDKLKDLGFKHAFKAGISFGKDDLVIPENKQQLIDETKKLISDYENQYSEGLITRG

SEQ ID NO: 133896 - protein, 260 aa, Unknown
  Bacterial polypetide isolated from the Sargasso Sea
AAFNADFDGDQMAVHIPLSLEAQLEARVLMMSTNNILSPSNGKPIIVPSQDMILGIYYLSQPPVQTEKVEGYFVNTSEIEHALETGQIKVHSRIVSRFETVDKEGNKKIEKYTSTAGRFLLANLLPKNLNNKFSLIDRLLPKKIVSEIIDHVFRFSGQKNTVIFCDKLKDLGFKHAFKAGISFGKDDLVIPENKEQLIDETKKLIKDYENQYSEGLITRGERYNKVVDAWSKCTDKVASEMMKRISATEVTDEGLKVNSV

SEQ ID NO: 133897 - protein, 217 aa, Unknown
  Bacterial polypetide isolated from the Sargasso Sea
DLQKFISGFQILNPDLVICNLEKDIKLSIELNIDKGRGYVPAEENKKSNDSIGFIPLDSIYTPIKNVKYNIENYRVEQKTDFEKLVFEIFTDGSIHPKEALTEAAKILIHHFMLFSDELITLEADEIAQSETYDEESLHMRQLLKTKLIDMDLSVRALNCLKAAEVDTLGDLVSFNKNDLMKFRNFGRKSLTELEELVILKGLSFGMDLTKYKLDKD

SEQ ID NO: 133898 - protein, 163 aa, Unknown
  Bacterial polypetide isolated from the Sargasso Sea
YSPVKKVSYSVSTAREGKALDYDKLTMEVETNGSISAEDAVAYSARIFQDQLKMFINFDEPVEVPVKETSSEPEFNKNLLRKVDELELSVRSMNCLKNDNIIYIGDLVQKSEGEMLRTPNFGRKSLNEIKEVLTGMSLYLGMEIPNWPPDNIAEMSKKLEEAI

SEQ ID NO: 133899 - protein, 305 aa, Unknown
  Bacterial polypetide isolated from the Sargasso Sea
IRCSAFEPKLIEGDAIELHPLTCAAFNADFDGDQMAVHVPLSLEAQLEARILMLSTNNILSPSNGKPIIVPSQDMILGIYYLSQEPLTDSPAGYFLNADQIEFALSSGQLKVHSTIISRFETVDENGNKKFEKYTSTAGRFLLANLLPKNKDIKFSLVDRLLPKKVVSEVIDIVFRFCGQKTTVIFCDKLKDLGFKHAFKAGISFGKDDLVIPESKNKLIDDTKKQIADYETQYAEGLITRGEKYNKVVDAWSKCTDQVASEMMKGISATEKTSQGLKINSVFMMADSGARGSAAQMKQLAGMRG

SEQ ID NO: 133900 - protein, 101 aa, Unknown
  Bacterial polypetide isolated from the Sargasso Sea
HQLSAFAELGRLEEVIEEKEEAKIDPIMLRPVDELELTVRSANCLKAENIHYIGDLVTRMESDLLRTPNLGKKSLNEIKEVLLSRGLSLGLILDNWPPENN

SEQ ID NO: 133901 - protein, 146 aa, Unknown
  Bacterial polypetide isolated from the Sargasso Sea
KALDYDKLIMEIETNGSISADDAVAYAARIFQDQLSMFVNFDEPQEVIIREKPTEPEFNKNLLRKVDELELSVRSMNCLKNDNIIYIGDLVQKSEGEMLRTPNFGRKSLNEIKEVLQGMSLYLGMEIPNWPPENIAELSKKLEEQI

SEQ ID NO: 133902 - protein, 176 aa, Unknown
  Bacterial polypetide isolated from the Sargasso Sea
EEPPLGLIPIDSLFSPVKKVSYSVSTAREGKALDYDKLTMEVETNGSISAEDAVAYSARIFQDQLGMFVNFDEPQEVIVKEQPSEPEFNKNLLRKVDELELSVRSMNCLKNDNIIYIGDLVQKSEGEMLRTPNFGRKSLNEIKEVLTGMSLYLGMEIPNWPPDNIAELSKKLEEAI

SEQ ID NO: 133903 - protein, 252 aa, Unknown
  Bacterial polypetide isolated from the Sargasso Sea
VKNLAIKSSSSSSKKIILDIKGPKEVKAKDITLVPEIEILNPDQTICNLDEKTHFHMELMVSTGKGYVQAPKNKSEDSPLGLISIDSLFSPVKKVSFSVENTRAGSALDYDKLVMTVETNGTVDAEDAIAYSARIFQDQLSMFVNFEDPQEVIKEVKSSEPEFNRNLLKRVEELELSVRSMNCLKNDNIIYIGDLVQKTEPEMLRTPNFGRKSLNEIKEVLNTMSLYLGMEIPNWPPDNIAELSKKLEENNY

SEQ ID NO: 133904 - protein, 237 aa, Unknown
  Bacterial polypetide isolated from the Sargasso Sea
IILDIKRPKEVKAKDITLVPEIEILNPDQTICNLDEKTHFHMELMVSTGKGYVQAPKNKSEDSPLGLISIDSLFSPVKKVSFSVENTRAGSALDYDKLVMTVETNGTVDAEDAIAYSARIFQDQLSMFVNFEDPQEVIKEVKSSEPEFNRNLLKRVEELELSVRSMNCLKNDNIIYIGDLVQKTEPEMLRTPNFGRKSLNEIKEVLNTMSLYLGMEIPNWPPDNIAELSKKLEENNY

SEQ ID NO: 133905 - protein, 279 aa, Unknown
  Bacterial polypetide isolated from the Sargasso Sea
ELIVREHPVLLNRAPTLHRLGVQAFEPKLIEGDAIELHPLTCAAFNADFDGDQMAVHVPLSLEAQLEARILMLSTNNILSPSNGKPIIVPSQDMILGIYYLSQEPVTDKPAGYFLNADQIEFALSSGQIKVHSTIISRFETVDEKGNQKFEKYTSTAGRFLLANLLPKNNNIKFSLIDRILPKKTVSEIIDIVFRFCGQKRTVIFCDKLKDLGFKHAFKAGISFGKDDLVIPESKNKLIDDTKKLIADYETQYSEGLITRGEKYNKVVDAWSKCTDQVA

SEQ ID NO: 133906 - protein, 134 aa, Unknown
  Bacterial polypetide isolated from the Sargasso Sea
MWVITPDDAIALAARILQDQLQPFINFDEPEVLPDQSQAEKLSFNSNLLKKVEELELSVRSANCLKNDNIIYIGDLVQKSESEMLRTPNFGRKSLNEIKEVLTQMELNLGMSVPDWPPDNIDDLAKKYEDPFNK

SEQ ID NO: 133907 - protein, 81 aa, Unknown
  Bacterial polypetide isolated from the Sargasso Sea
MDTTEVNIKNWKSLIKPPKLDINLSDDKSYAKIIAEPLEKGYGLTLGNSLRRILLSSIRGTAVTAIQIDGVLHEFTSIKGV

SEQ ID NO: 133908 - protein, 225 aa, Unknown
  Bacterial polypetide isolated from the Sargasso Sea
KHLTSHLVQDIEILNPDLVICNLDENTNFHMEMMVGNGKGYVSAEMNKPEEPPLGLIPIDSLFSPVKKVSYSVSTAREGKALDYDKLTMEVETNGSISAEDAVAYSARIFQDQLSMFVNFDEPQEVLVREKPTEPEFNRNLLRKVDELELSVRSMNCLKNDNIIYIGDLVQKSEGEMLRTPNFGRKSLNEIKEVLNGMSLYLGMEIPNWPPDNIAELSKKLEEAI

SEQ ID NO: 133909 - protein, 319 aa, Unknown
  Bacterial polypetide isolated from the Sargasso Sea
CLKTTCNSCSKALLHDAPQTHPIDPEKSEQDYYRDRVNDIILKHGVGGREFKKIIKDIENICAGPKRAICMHCGAEQGKIILDKPTTFKEKKADKGEHKLNARDIREWLEKIPDEHLIFLGMEKDVSRPEWTIMKVLPVPPITVRPSITLESGDRSEDDLTHKLVDVLRINQRLRENRDSGAPQLIVEDLWELLQYHCTTYFDNQTSGIPPARHRSGRPLKTLSQRLKGKEGRFRSNLSGKRVNFCARTVISPDPNLGINEVGVPVKTAKELTVPIRATSRNREQLRQMILRGPDVHPGVNYIIRGDRFRVRITDRTKY

SEQ ID NO: 133910 - protein, 64 aa, Unknown
  Bacterial polypetide isolated from the Sargasso Sea
MTNSNLRTENHFDYVKIKLASPERVMEWGQRTLPNGQVVGEVTKPETINYRTLKPEMDGLFCEK

SEQ ID NO: 133911 - protein, 110 aa, Unknown
  Bacterial polypetide isolated from the Sargasso Sea
INFDEPEIQQDTSSHEKLSFNPNLLKKVEELELSVRSANCLKNDNIIYIGDLVQKSESEMLRTPNFGRKSLNEIKEVLQQMELGLGISVPDWPPENIEELAKKFEDPFNK

SEQ ID NO: 133912 - protein, 265 aa, Unknown
  Bacterial polypetide isolated from the Sargasso Sea
DLKLHECGLPKKMALELFKPFLYARLNKLGLASTIKQAKKLVEKETNAVWDALELIVREHPVLLNRAPTLHRLGVQAFEPKLIEGDAIELHPLTCAAFNADFDGDQMAVHVPLSLESQLEARILMLSTNNILSPSNGKPIIVPSQDMILGIYYLSQEPITDKPSGYFLDADQIEFALSSGQIKVHSTIISRFETVDENGNKKFEKYTSTAGRFLLANLLPKNKDINFSLIDRLLPKKVVSEIIDIVFRFCGQKTTVIFCDKLKDL

SEQ ID NO: 133913 - protein, 175 aa, Unknown
  Bacterial polypetide isolated from the Sargasso Sea
EPPLGLIPIDSLFSPVKKVSYSISTAREGKALDYDKLTMEVETNGSISAEDAVAYSARIFQDQLGMFVNFDEPQEVIVREQPTEPEFNKNLLRKVDELELSVRSMNCLKNDNIIYIGDLVQKSEGEMLRTPNFGRKSLNEIKEVLTGMSLYLGMEIPNWPPDNIAELSKKLEEAI

SEQ ID NO: 133914 - protein, 268 aa, Unknown
  Bacterial polypetide isolated from the Sargasso Sea
LLPKRNSIKLLLGLSSPEVILGNSRGEVLKPETINYRTHKPERDGLFCERIFGPVKDFECACGKYKRIRYKGIVCDRCGVEVTEKKVRRDRVGHINLVVPVAHIWYFRSLPNKIGYLLGLPSKKLDMIIYYERYVVIQPGNTKNSEGDPIQMMDFLTEEEYLNIMEQLPIENQFLEDSDPEKFIAKMGAECLIELLSRIDLEALSFELRNKANNETSKQRKTEALKRLQVVEALKEANENRENLPEWMILKVIPVIPPELRPLVPLDG

SEQ ID NO: 133915 - protein, 51 aa, Unknown
  Bacterial polypetide isolated from the Sargasso Sea
IFLIGDLIHRSEFDLLKTPNLGKKSLNEIKDVLASKELSLGMNVENWPPVG

SEQ ID NO: 133916 - protein, 98 aa, Unknown
  Bacterial polypetide isolated from the Sargasso Sea
LGAFVDLDAIAEQEAKKDQNDFDPILLRSIEELELTVRSTNCLKAESIFLIGDLIHRSEFDLLKTPNLGKKSLNEIKDVLASKDLSLGMNVENWPPVG

SEQ ID NO: 133917 - protein, 186 aa, Unknown
  Bacterial polypetide isolated from the Sargasso Sea
GYVPASMNKPDEPPLGLIPIDSLYSPVKKVTYSVSTAREGKALDYDKLTMEVKTNGSISAEDAVAYSAKIFQDQLNMFVNFDEPQEVIVREKPSEPEFNKNLLRKVDELELSVRSMNCLKNDNIIYIGDLVQKSEGEMLRTPNFGRKSLNEIKEVLNGMSLYLGMEIPNWPPDNIAEMSKKLEEAI

SEQ ID NO: 133918 - protein, 55 aa, Unknown
  Bacterial polypetide isolated from the Sargasso Sea
MELNKIKSFNKISIGLASPETILASSRGEVLKPETINYRTHKPERDGLFCERIFG

SEQ ID NO: 133919 - protein, 69 aa, Unknown
  Bacterial polypetide isolated from the Sargasso Sea
MTNSNLRTENHFDYVKITLASPERVMEWGQRTLPNGQVVGEVTKPETINYRTLKPEMDGLFCEKIFGPS

SEQ ID NO: 133920 - protein, 303 aa, Unknown
  Bacterial polypetide isolated from the Sargasso Sea
LYARLNKLGLASTIKQAKKLVERERNEVWDALEEIVREHPVILNRAPTLHRLGVQAFEPKLIEGDAIELHPLTCAAFNADFDGDQMAVHVPLSLEAQLEARVLMMSTNNILSPSNGKPIIVPSQDMILGIYYLSQPPYQTEKIEGYFTNISEIDHGLETGQIKVHSRIVSRFETIDENGNTKYEKHISTAGRFLLANLLPKNINNKFSLIDRLLPKRTVSEIIDHVFRFSGQKSTVIFCDKLKNLGFKHAFKAGISFGKDDLVIPENKQQLIDETKKLISEYETQYSEGLITRGEKYNKVVDA

SEQ ID NO: 133921 - protein, 87 aa, Unknown
  Bacterial polypetide isolated from the Sargasso Sea
MIEKNWKEIIKPSKLQVKSDVDNENTSTIIAEPLERGYGVTLGNALRRILLSSLQGSAITSMYVQGVLHEFSSIQGVREDLTDIILN

SEQ ID NO: 133922 - protein, 125 aa, Unknown
  Bacterial polypetide isolated from the Sargasso Sea
DALAFAARILQDQLSIFVNFDEPEAANQNDEDDGLEFNPLLLKKVDELELSVRSANCLKNDNIVYIGDLIQKTEAEMLRTPNFGRKSLNEIKEVLSGMGLHLGMDVEDWPPDNIEELAKKFEDNF

SEQ ID NO: 133923 - protein, 258 aa, Unknown
  Bacterial polypetide isolated from the Sargasso Sea
PTLHRLGVQAFEPKLIEGDAIELHPLTCAAFNADFDGDQMAVHVPLSLEAQLEARILMLSTNNILSPSNGKPIIVPSQDMILGIYYLSQEPISDKPAGYFTNSDQIEFALSSGQINVHSTIISRYETVDEQGNKKIEKYTSTAGRFLLANLLPKNSNIKFSLVDRLLPKKVVSEIIDVVFRFCGQKTTVIFCDKLKDLGFKHAFKAGISFGKDDLVIPENKTQLIDDTKKLIADYETQYAEGLITRGEKYNKVVDAWS

SEQ ID NO: 133924 - protein, 300 aa, Unknown
  Bacterial polypetide isolated from the Sargasso Sea
VCAAFNADFDGDQMAVHVPLSVEAQTEARVLMMATNNILSPSNGSPIIVPSQDMVLGIYYMSREKPNCKGEGMIFSDIEEVSKAYQSKLIDMHAKIKVRMNITEHEGDQLVEKTKIVDTTTGRALISEILPKNIPYSFIDQDLNKKAISKLFDVAYRLAGLKDTVLFADQIKNMGFKYSTLAGVSIGVDDMVIPKEKTTITAKAEKEVKDIEKQYNSGLLTAGERYNKVVDIWSHTNDQVSQAMMKQLGTEVTKTSDGKKVEHKSFNSIYMMADSGARGSAAQIRQLSGMRGLMAKPRRL

SEQ ID NO: 133925 - protein, 83 aa, Unknown
  Bacterial polypetide isolated from the Sargasso Sea
RKVDELELSVRSMNCLKNDNIIYIGDLVQKTEPEMLRTPNFGRKSLNEIKEVLNSMSLYLGMEVPNWPPENISELSKKLEDNN

SEQ ID NO: 133926 - protein, 69 aa, Unknown
  Bacterial polypetide isolated from the Sargasso Sea
SIEELELTVRSTNCLKAENIFLIGDLIQRSEMDLLKTPNLGKKSLNEIKDELASRGLSLGTVLKNWPPM

SEQ ID NO: 133927 - protein, 295 aa, Unknown
  Bacterial polypetide isolated from the Sargasso Sea
KDESSAIIKKYTSTFNPRLTHTVSKSLESAKLSKNGIEKVAKKGLMLYNNAKSEPGQAVGIVTAQSIGEPGTQMTLRTFHFAGIAERNVTLGLPRLIELVDARKKPVTPTMDIYLLGDAKTDQTKTVQIARNILQTTINDLILDAETDYKSKITLNLIERKLSDRGCTVDDVVTALESNKKFKMETMGNSIVLNLVDEEADAPAVITIRNKVLKTTVKGVPDIARVTIVKKGDEYVIQTTGSNLSKVLEVEGIDKNNVRTNNVSEIAETLGIEAARNALINELSTTLEDAGLEVT

SEQ ID NO: 133928 - protein, 286 aa, Unknown
  Bacterial polypetide isolated from the Sargasso Sea
MVRPSITLDSGDRSEDDLTHKLVDVLRINQRLRENRDSGAPQLIVEDLWELLQYHVTTYFDNQTSGIPPARHRSGRTLKTLTQRLKGKEGRFRSNLSGKRVNFCARTVISPDPKLGINEVGVPLPTAKELTVPIRVTPRNMEQMRQMILRGPDVHPGVNYIVRGDSFRVRITDRTKWIWAGFRCLNGECVSGASDEEPYTGARPDLNTCLPAPNFLPGLEIRKLQHQTDSGTVEEKIEVDLENTLRNLRGEDEHGLPLPDTDTRAIIHHRWLFERNNPGEAFPEHL

SEQ ID NO: 133929 - protein, 282 aa, Unknown
  Bacterial polypetide isolated from the Sargasso Sea
TNAVWDALELIVREHPVILNRAPTLHRLGVQAFEPKLIEGDAIELHPLTCAAFNADFDGDQMAVHIPLSLEAQLEARILMLSTNNILSPSNGKPIIVPSQDMILGIYYLSQPPFQTEKIEGYFINNSEIEQALETGDIKVHSTIISRFETIDEKGNRISEKYTSTAGRFLLANLLPKNKDIKFSLIDRILPKKVVSEIIDIVFRFCGQKRTVIFCDKLKDLGFKHAFKAGISFGKDDLIIPSNKEQLIDDTKKLIADYENQYSEGLITRGEKYNKVVDAWSK

SEQ ID NO: 133930 - protein, 46 aa, Unknown
  Bacterial polypetide isolated from the Sargasso Sea
TSVPVIPPELRPLGPLDGGRIATSDLNDLYRRVINRNNRLKRLLDL

SEQ ID NO: 133931 - protein, 80 aa, Unknown
  Bacterial polypetide isolated from the Sargasso Sea
MELSVRSANCLKNDNIIYIGDLVQKSESEMLRTPNFGRKSLNEIKEVLQQMELNLGMSVPDWPPENIDDLAKKYEDPFNK

SEQ ID NO: 133932 - protein, 56 aa, Unknown
  Bacterial polypetide isolated from the Sargasso Sea
MPELRPLVPLEGGRFATSDLNDLYRRVIHRNNRLKRLIEVRAPGIIVKKKKECYKS

SEQ ID NO: 133933 - protein, 219 aa, Unknown
  Bacterial polypetide isolated from the Sargasso Sea
EVADIEILNPELVICNLDENTNFHMEMTVGSGKGYVSAEMNKQEEPPLGLIPIDSLFSPVKKVSYSVSTAREGKALDYDKLIMEVETNGSISAEDAVAYSARIFQDQLGMFVNFDEPKEVITREKPSEPEFNKNLLRKVDELELSVRSMNCLKNDNIIYIGDLVQKSEGEMLRTPNFGRKSLNEIKEVLNTMSLYLGMEIPNWPPDNIVELSKKLEEAI

SEQ ID NO: 133934 - protein, 316 aa, Unknown
  Bacterial polypetide isolated from the Sargasso Sea
DFDGDQMAVHVPLSLEAQIEARVLMMSTNNILSPSNGKPIIVPSQDIVLGIYYLSQHKEDSNTKPVGIFSNVDEIENAIERKDISVHSKIVSIFNTVDKDGNKISEKYTSTAGRFLLAKTLPKNHRIKFELVNKLLTKKAVSEVIDTVYRYCGQKETVIFCDRIKDLGFKHAFKAGISFGKNDLIIPKTKEKLVSQTKKQIEDYEKQYQDGLITRGEKYNKVVDIWSKCTDSVANEMMKEISSAEKIYPDGRIETNSVFMMADSGARGSPAQMKQLAGMRGLIAKPSGEIIETPIISNFKEGLTVLEYFNSTHGAR

SEQ ID NO: 133935 - protein, 114 aa, Unknown
  Bacterial polypetide isolated from the Sargasso Sea
DQLNNFINFEEPEEEETPEVLEDLPFNKNLLRKVDELELSVRSANCLKNDNIVYIGDLVQRSEPEMLRTPNFGRKSLNEIREVLKIMGLELGMDVENWPPENIEELVKRIEEPF

SEQ ID NO: 133936 - protein, 29 aa, Unknown
  Bacterial polypetide isolated from the Sargasso Sea
KAIQCIPLVCSAFNADFDGDQMAVIFHYL

SEQ ID NO: 133937 - protein, 299 aa, Unknown
  Bacterial polypetide isolated from the Sargasso Sea
EPLLIEGKAIQLHPLVCVAYNADFDGDQMAVHVPLTVEAQLEARALMMSTNNILSPADGAPIINPTQDVVLGLYYMTREKVNSHGEGRVFSNPDEVQRAFESEQIDLHAKIKVRIENAEKGVFIEDTTVGRTLIWRITPIEVGFDNVNKTLDKKAVSSLIDLSYRKAGLKKTVIFADQLMYLGFDFSTRSGSSIGVDDFVIPEEKYQIVDKAEDEVKEIENQFSSGLVTRGERYNKVVDIWSRANERVAKAMMEKISKDSVEDSDGNEVEQASFNSVYIYADSGARGSPAQIRQLSGMR

SEQ ID NO: 133938 - protein, 301 aa, Unknown
  Bacterial polypetide isolated from the Sargasso Sea
LELFKPFLYARLNKLGLASTIKQAKKLVEKETNAVWDALELIVREHPVLLNRAPTLHRLGVQAFEPKLIEGDAIELHPLTCAAFNADFDGDQMAVHVPLSLEAQLEARILMLSTNNILSPSNGKPIIVPSQDMILGIYYLSQEPVTDKPAGYFLNADQIEFALSSGQIKVHSTIISRFETIDEKGNQKFEKYTSTAGRFLLANLLPKNNNIKFSLIDRILPKKTVSEIIDIVFRFCGQKTTVIFCDKLKDLGFKHAFKAGISFGKDDLVIPDSKNKLIDDTKKLIADYETQYSEGLITRGE

SEQ ID NO: 133939 - protein, 268 aa, Unknown
  Bacterial polypetide isolated from the Sargasso Sea
FSSIPGVREDVTDLVLNLKGVAVRVDDDSPKRLRLAAEGPATVTAGMISESAGVEIMNPDHVLCQLDKGASVSMELTVTSGKGYVPAGSMRSEDSPIGLIPIDAIYSPVRQVAYKVDNARVGQITDYDKLLLTVETDGSVTPEDAVAYAARILQEQLQPFINFEEPKEQPSDEENEDLPFSRNLLRKVDELELSVRSANCLKNDNIVYIGDLVLKTEYEMLRTPNFGRKSLNEIKEVLKGMNLELGMDIPAWPPENVEELARRLDEPF

SEQ ID NO: 133940 - protein, 169 aa, Unknown
  Bacterial polypetide isolated from the Sargasso Sea
IAIDSLYSPVKKVSYTVSTAREGKALDYDKLTMNVETNGSISAEDAVAYSARIFQDQLKMFINFDEPVEAPVKEVSTEPEFNKNLLRKVDELELSVRSMNCLKNDNIIYIGDLVQKSEGEMLRTPNFGRKSLNEIKEVLTGMSLYLGMEIPNWPPDNIAEMSKKLEEAI

SEQ ID NO: 133941 - protein, 291 aa, Unknown
  Bacterial polypetide isolated from the Sargasso Sea
MALELFKPFLYARLNKLGLASTIKQAKKLVEKETNAVWDALEVIVREHPVILNRAPTLHRLGVQAFEPKLIEGDAIELHPLTCAAFNADFDGDQMAVHIPLSLEAQLEARVLMMSTNNILSPSNGKPIIVPSQDMILGIYYLSLPPYQEKKVEGYFVNDSEIEQGLESGKIKIHSRIISRFETVDEKGNQVFEKHTSTAGRFLLANLLPKNKDIKFSLIDRVLPKKVVSEIIDFVFRYTGQKSTVIFCDKLKDLGFKHAFKAGISFGKDDLIIPQNKEQLIDETLTLIKDY

SEQ ID NO: 133942 - protein, 271 aa, Unknown
  Bacterial polypetide isolated from the Sargasso Sea
AFNADFDGDQMAVHVPLSLEAQLEARVLMMSTNNILSPSSGKPIIVPSQDIVLGIYYLSIMRNNQKGEGRNFLDTNEILKAVDLKDISLHSKINVRIKNFDGSFSKVETTAGRMLLADSLPNNEKINFSLINKTLTKKEVSNLIDTVYRFCGQKETVLFADSIMQIGFKYAAIAGISFGKDDLIIPEEKQKLLDETQSKVQEYENQYQDGLITQGEKYNKVVDAWSECTNRVSDKMLDVISKPEDDKPINSVYMMAHSGARGSAAQLKQLA

SEQ ID NO: 133943 - protein, 112 aa, Unknown
  Bacterial polypetide isolated from the Sargasso Sea
MAFRNDIKKQSSFNSITISLASPEVVLENSSGEVLKPETINYRTYKPERDGLFCERIFGPVKDYECHCGKYKRIRYKGIVCDRCGVEVTEKKVRRERMGHISLVVPVAHIWY

SEQ ID NO: 133944 - protein, 128 aa, Unknown
  Bacterial polypetide isolated from the Sargasso Sea
PEDAIAFAARIIQDQLQSFINFEEPEEIQVEPDTLEPQFNKNLLRKVEELELSVRSMNCLRNDNIIYIGDLVQKSEIEMLRTPNFGRKSLNEIKEVLGVMSLYLGMEVPNWPPENIEELARKVEDPYN

SEQ ID NO: 133945 - protein, 316 aa, Unknown
  Bacterial polypetide isolated from the Sargasso Sea
RGASNLLNRAPTLHRLGVQAFEPKLIEGDAMNLHPLTCAAFNADFDGDQMAVHIPLSLEAQLEARVLMMSTNNILSPSNGKPIIVPSQDMILGIYYLSQQPYQEERVEGYFVNTSEIEHGLETGQIKVHSRIVSRFETLDEKGKTKFEKHISTAGRFLLASLLPKNVSNKFSLVDRLLPKKIVSEIIDHVFRFSGQKNTVIFCDKLKDLGFKHAFKAGISFGKDDLIIPDNKEQLIDETKKLIKDYENQYSEGLITRGERYNKVVDAWSKCTDKVASEMMKKISATEATKDGLKINSVFMMADSGARGSAAQMKQL

SEQ ID NO: 133946 - protein, 79 aa, Unknown
  Bacterial polypetide isolated from the Sargasso Sea
MQYQIDRIEHQVEEDRSQSGVFLIGPLERGQATTLGNALRRVLMGGLEGSAVTAIRIAGVNHEYATVPGVREDVLDILL

SEQ ID NO: 133947 - protein, 126 aa, Unknown
  Bacterial polypetide isolated from the Sargasso Sea
MHESLIHGILKNEHGSISKAVTLIENGGTEIVPLLNNIHEYSTNSLRIGITGPPGAGKSTITNALIEILLKNKKTVGVIAVDPTSPFSGGSLLGDRIRMNHYAWDDRVFVRSMGSNGELGGLARKS

SEQ ID NO: 133948 - protein, 66 aa, Unknown
  Bacterial polypetide isolated from the Sargasso Sea
MIQKNWKELISPENLTIEKGEDPNREATIVAEPLERGFGLTLGNALRRVLLSSLQGTAVTSVQIDG

SEQ ID NO: 133949 - protein, 240 aa, Unknown
  Bacterial polypetide isolated from the Sargasso Sea
MSISKPRKLQFETENLKSDYGKFTLDPLEPGYGVTIGHSLRRVLLSSIRGSAVFAVQIDGVTHEFTNIPGIVEDMLQVILNIKELKIEQYVDEIIELELIGEGPCEIKAGEISTFEKAEILNPDLTLATLQKGATVSMTMYSRFNKGYVTSEDNQGVELPVGTIFLDSNHSPVSRINYEIENSRVDQKTDYDRLNFELWTNGSVKPADSLAYAAKIIKEHMDVFINFDESSIKDEPSDEV

SEQ ID NO: 133950 - protein, 209 aa, Unknown
  Bacterial polypetide isolated from the Sargasso Sea
DLVICNLDENTSFHMEMNVNTGKGYVPAELNKPEEPPLGLIAIDSLYSPVKKVSYSVSTAREGKALDYDKLTMEVETDGSISAEDAVAYSARIFQDQLKMFINFDEPVEAPVKEVSTEPEFNKNLLRKVDELELSVRSMNCLKNDNIIYIGDLVQKSEGEMLRTPNFGRKSLNEIKEVLTGMSLYLGMEIPNWPPDNIAEMSKKLEEAI

SEQ ID NO: 133951 - protein, 134 aa, Unknown
  Bacterial polypetide isolated from the Sargasso Sea
MQTSQKKKSLNYKEIKVLQKNWMELIKPSKMDVNVQNDSNKKGVLIAEPLERGFGLTLGNAIRRVLLSSLQGAAITSVKIKGVVHEFSTIQGVKEDLTDILLNLKSVAVKVHSPGLKKMYIKSTGSGEIRAGNL

SEQ ID NO: 133952 - protein, 298 aa, Unknown
  Bacterial polypetide isolated from the Sargasso Sea
FVYGKLENRELATTIKAAKKLVERETPEVWEVLEEVIREHPVLLNRAPTLHRLGLQAFEPKLIEGKAIQLHPLVCVAFNADFDGDQMAVHVPLTLEAQLEARALMMSTNNILSPADGSPIINPTQDVVLGLYYMTRDNANASGAGRTFSNPDEVLRAYETENLEIHSPIKVRVTHENGETSIENTTVGRILIWRITPTEVGFKNINNVLNKKSVSKLVDTSYRKAGLKKTVIFADQLMYLGFDFSTRSGSSIGVNDFVIPERKANIIDSSEKEVKAIEKQFDSGASTRGEKIYKGIDI

SEQ ID NO: 133953 - protein, 139 aa, Unknown
  Bacterial polypetide isolated from the Sargasso Sea
MSLDVTTDGTITPEDTVAFAARILQDQFQLFVNFDEPAPVVEEDVADELPFNKNLLRKVDELELSVRSANCLKNDNIIYIGDLVLKSESDMLRTPNFGRKSLNEIKEVLGQMSLHLGMEIGSWPPENIEELAKKLEDPF

SEQ ID NO: 133954 - protein, 165 aa, Unknown
  Bacterial polypetide isolated from the Sargasso Sea
LFSPVKKVSFAVENTRAGSALDYDKLLMTVETNGTIAAEDAIAYSARIFQDQLSMFVNFEDPQEIVKEVKSSEPEFNRNLLKRVEELELSVRSMNCLKNDNIIYIGDLVQKTEPEMLRTPNFGRKSLNEIKEVLNTMSLYLGMEIPNWPPDNIAELSKKLEENNY

SEQ ID NO: 133955 - protein, 115 aa, Unknown
  Bacterial polypetide isolated from the Sargasso Sea
MKVENVNVKNWKSLIKPPKLDVQLSEDKSFAKIIAEPLEKGYGLTLGNSIRRILLSSIRGAAVTSIQIDGVLHEFTSIKGVREDVTDIVLNVKSLALKSLSDGNKKLILDVKGPG

SEQ ID NO: 133956 - protein, 217 aa, Unknown
  Bacterial polypetide isolated from the Sargasso Sea
SDIEILNPDLVICNLDENTNFHMEMTVSNGKGYVPADMNKPEEPPLGLIPIDSLFSPVKKVSYSVSTAREGKALDYDKLTMEVETNGSISAEDAVAYSARIFQDQLGMFVNFDEPQEVIVREQPTEPEFNKNLLRKVDELELSVRSMNCLKNDNIIYIGDLVQKSEGEMLRTPNFGRKSLNEIKEVLTGMSLYLGMEIPNWPPDNIAELSKKLEEAI

SEQ ID NO: 133957 - protein, 309 aa, Unknown
  Bacterial polypetide isolated from the Sargasso Sea
SYKDEISDAVKKYTKEFNPRLTKSVTDGFENSKLSKDGIEKVAKKGLELYNNAKAEPGQAVGIVTAQSIGEPGTQMTLRTFHFAGIAERNVTLGLPRLIELVDARKKPVTPTMDIYLDKESKNDQAKAVEVARNILETSVNDLILDDPTDYATKITLNLNEKKISDRGCTINDVQNALENNKKFKVEVLGSSLILNLVDKELDAPTVITLRNKIRKTTVKGVKDIKRVTIVKKDNEWVIQTTGSNLSDVLKVSGIDKNNVRTNNVSEIAETLGIEAARNALINELSSTLEDQGLEVDQRYLMLVSDLMC

SEQ ID NO: 133958 - protein, 282 aa, Unknown
  Bacterial polypetide isolated from the Sargasso Sea
RLGVQAFEPKLIEGNAIELHPLTCAAFNADFDGDQMAVHVPLSLEAQLEARVLMMSTNNILSPSNGKPIIVPSQDMILGIYYLSQPPVQTERIEGYFVNTSEIEHALETGQIKVHSRIVSRFETIDEKGNAKFEKHISTAGRFLLSSIIPKNLNNKFSLIDRLLPKKIVSEVIDHVFRFSGQKSTVIFCDKLKDIGFKHAFKAGISFGKDDLLIPENKEQLIDETKKLIADYEGQYAEGLITRGEKYNKVIDAWSKCTDRVASEMMKRISATEVTDEGLKIN

SEQ ID NO: 133959 - protein, 306 aa, Unknown
  Bacterial polypetide isolated from the Sargasso Sea
LHPLTCAAFNADFDGDQMAVHVPLSLEAQLEARILMLSTNNILSPSNGKPIIVPSQDMILGIYYLSQEPISDKPAGYFTNSDQIEFALSSGQINVHSTIISRYETVDGQGNKKTEKYTSTAGRFLLANLLPKNSNIKFSLVDRLLPKKVVSEIIDIVFRFCGQKTTVIFCDKLKDLGFKHAFKAGISFGKDDLVIPENKTQLIDDTKKLIADYETQYAEGLITRGEKYNKVVDAWSKCTDKVAGEMMKGISATEKTDEGLKINSVFMMADSGARGSAAQMKQLAGMRGLIAKPSGEIIESPNYFKL

SEQ ID NO: 133960 - protein, 81 aa, Unknown
  Bacterial polypetide isolated from the Sargasso Sea
MENAEVNIKNWKSLIKPTKLDVQLNDDKSYAKIIAEPLEKGYGQTLGNSLRRILLSSIRGTAVTAIQIDGVLHEFTSIKGV

SEQ ID NO: 133961 - protein, 176 aa, Unknown
  Bacterial polypetide isolated from the Sargasso Sea
MFLLEENSSSSDVDFISIDSVFTPIINVKYSIENTRVEQKTDFEKLILDIQTDGSIHPEDALKGSAQLLIKHFYLFSDKDMEFAEDNSDEIEVVDEELLHMRKLLKTSLNDLDLSVRAYNCLKAADIKTLGDLVSIEISDMMKFRNFGKKSLTELEELVDNKGLNFGMDLSKYNLD

SEQ ID NO: 133962 - protein, 44 aa, Unknown
  Bacterial polypetide isolated from the Sargasso Sea
MQTSVIDLLVPTEIQVEDINETTSKITLEPLERGFGHTLGNALR

SEQ ID NO: 133963 - protein, 136 aa, Unknown
  Bacterial polypetide isolated from the Sargasso Sea
MSSSNNSARELLGLDRVNLVDYVQVSVASPETIRRWSKGEVKNPETINYRTFKPEKGGLFCERIFGPVKDWECSCGKYKRIKYKGVVCDRCGVEVTLARVRRERMGHIELSVPVTHIWFFKCMPSRLGLMLDMTGR

SEQ ID NO: 133964 - protein, 155 aa, Unknown
  Bacterial polypetide isolated from the Sargasso Sea
FSVENTREGKSLDYDKLVMVVETDGSVNAEDAVAYAARIFQDQLSLFVNFEEPKEIEQKPTPTEPQFNKNLLKKVDELELSVRSMNCLKNDNIVYIGDLVQKTEPEMLRTPNFGRKSLNEIKEVLNGMSLYLGMEIPNWPPDNIAELSKKLEENV

SEQ ID NO: 133965 - protein, 262 aa, Unknown
  Bacterial polypetide isolated from the Sargasso Sea
KKMALELFKPFLYARLNKLGLASTIKQAKKLVEKETNAVWDALELIVREHPVLLNRAPTLHRLGVQAFEPKLIEGDAIELHPLTCAAFNADFDGDQMAVHVPLSLEAQLEARILMLSTNNILSPSNGKPIIVPSQDMILGIYYLSQEPITDKPVGYFLNADQIEFALSSGQIKVHSTIISRFETVDEKGRKKFEKYTSTAGRFLLANLLPKNKDIKFSLVDRLLPKKVVSEVIDIVFRFCGQKTTVIFCDKLKDLGFKHAFK

SEQ ID NO: 133966 - protein, 306 aa, Unknown
  Bacterial polypetide isolated from the Sargasso Sea
CLVNRAPTLHRLGVQAFEPKLIEGDAIELHPLTCAAFNADFDGDQMAVHVPLSLEAQLEARILMLSTNNILSPSNGKPIIVPSQDMILGIYYLSQEPLTDKPMGYFLNADQIEYALSLGQLKVHSTIVSRFETVDEKGNKKYEKYTSTAGRFLLANLLPKNKDIKFSLVDRLLPKKVVSEIIDIVFRFCGQKSTVIFCDKLKDLGFKHAFKAGISFGKDDLVIPQNKTQLIDDTKKLISDYETQYAEGLITRGEKYNKVVDAWSKCTDRVAGEMMKGISATEKTSEGLKINSVFMMADSGARGSAA

SEQ ID NO: 133967 - protein, 257 aa, Unknown
  Bacterial polypetide isolated from the Sargasso Sea
TDIVLNVKSLALKSNIEGSKKLILDAKGPGEIKAADITAVTDIEILNPELVICNLDEKTHFHMEMTVGNGKGYVPADMNKPEEPPLGLIPIDSLFSPVKKVSYSISTAREGKALDYDKLTMEVETNGSISAEDAVAYSARIFQDQLGMFVNFDEPQEVAIREKPSEPEFNKNLLRKVDELELSVRSMNCLKNDNIIYIGDLVQKSEGEMLRTPNFGRKSLNEIKEVLNTMSLYLGMEIPNWPPDNIAELSKKLEESI

SEQ ID NO: 133968 - protein, 278 aa, Unknown
  Bacterial polypetide isolated from the Sargasso Sea
ALRRVLLSSLEGFAFTSIKIDNVEHEFTSLAGIVEDVTEIILNLKQVRLKRQIESVDNETVSVSLNAQNQLKAGDLQKFISGFQILNPETVICNMEKNVKVNFELNIDKGRGYVSAEENKKVGFPIGTIFMDSVFTPIKNVKYTIEDFRVEQKTDYEKLVFEIVTDGSIDPKNALTEGAKVLIHHFMLFSDERITLEADEIAQTETYDEESLHMRQLLKSRLIDMDLSVRALNCLKAAEVDTLGDLVSFNKSDLMKFRNFGKKSLTELEELVLVKGLN

SEQ ID NO: 133969 - protein, 178 aa, Unknown
  Bacterial polypetide isolated from the Sargasso Sea
KPEEPPLGLIPIDSLFSPVKKVSYSVSTAREGKALDYDKLTMEVETNGSISAEDAVAYSARIFQDQLGMFVNFDEPQEVIVKEQPSEPEFNKNLLRKVDELELSVRSMNCLKNDNIIYIGDLVQKSEGEMLRTPNFGRKSLNEIKEVLTGMSLYLGMEIPNWPPDNIAELSKKLEEAI

SEQ ID NO: 133970 - protein, 196 aa, Unknown
  Bacterial polypetide isolated from the Sargasso Sea
LYARLNKLGLASTIKQAKKLVEKETNAVWDALELIVREHPVLLNRAPTLHRLGVQAFEPKLIEGDAIELHPLTCAAFNADFDGDQMAVHVPLSLEAQLEARILMLSTNNILSPSNGKPIIVPSQDMILGIYYLSQEPLTDKPSGYFVNADQIEFALSSGEIKVHSTIISRFETIDEKGNKKFEKYTSTAGRFLLAN

SEQ ID NO: 133971 - protein, 109 aa, Unknown
  Bacterial polypetide isolated from the Sargasso Sea
IEHSATIFQQQLSSFVDLDAIAEQEAKKDQNDFDPILLRSIEELELTVRSTNCLKAESIFLIGDLIHRSEFDLLKTPNLGKKSLNEIKDVLASKELSLGMNVENWPPVG

SEQ ID NO: 133972 - protein, 248 aa, Unknown
  Bacterial polypetide isolated from the Sargasso Sea
MPKKMALELFKPFLYARLNKLGLASTIKQAKKLVERERTEVWDALELIVREHPVILNRAPTLHRLGVQAFEPKLIEGNAIELHPLTCAAFNADFDGDQMAVHVPLSLEAQLEARVLMMSTNNILSPSNGKPIIVPSQDMILGIYYLSQPPVQTDKVDGYFVNTSEIEHALETGQIKVHSRIVSRFETVDDKGKTKFEKHISTAGRFLLSNIIPKNVNNKFSLIDRLLPKKVVSEVIDHVFRFSGQKST

SEQ ID NO: 133973 - protein, 277 aa, Unknown
  Bacterial polypetide isolated from the Sargasso Sea
MNRELVNIFNQNQGIKNFNSLKVSIASPEDIRSWSFGEIKKPETINYRTFKPEKDGLFCSRIFGPVKDYECLCGKYKRMKFRGIICEKCGVEVTLSKVRRDRMGHIELAAPVSHIWFMKSLPSRIATLLDMTIKNLEKVLYFEQFIVVEPGLTDLKKGEVISEDQYIDYQDQFGEDSFNAAIGAEAIENMLMNIDLESEFEHSKNELAETKSELKKTKLTKRIKLLESFIVSKNKPEWMILRVLPVIPPELRPLVPLDGGRFATSDLNDLYRRVINR

SEQ ID NO: 133974 - protein, 64 aa, Unknown
  Bacterial polypetide isolated from the Sargasso Sea
MIQKNWTELITPENLTIEKGEDPNREATIVAEPLERGFGLTLGNALRRVLLSSLQGTAVTSVQI

SEQ ID NO: 133975 - protein, 313 aa, Unknown
  Bacterial polypetide isolated from the Sargasso Sea
DFDGDQMAVHLPLGPEAILEAQLLMLGSHNILNPANGSPITVPSQDMVLGLYYMTKSRRSSDNLKLKGEGSIFFSPEEVTMAYNEKKVDLNAIIKCRVKTSDIENSYKIIETTPGRVFFNEVVPSKAGYFNEVLTKKNLREIIGKILQNTSVPETAEFLDKIKDLGYSFAFKGGLSFSLGDIIIPQQKQNLIDDANNQVDTIISNYNMGLITNNERYNQVIDVWTSANATLTELAMKQISEDQQGFNSVYMMLDSGARGSKEQIRQLTGMRGLMAKPKKSNVGGGEIIENPILSNFKEGLSILEYFISTHEQE

SEQ ID NO: 133976 - protein, 279 aa, Unknown
  Bacterial polypetide isolated from the Sargasso Sea
QAFEPKLIEGDAIELHPLTCAAFNADFDGDQMAVHVPLSLEAQLEARILMLSTNNILSPSNGKPIIVPSQDMILGIYYLSQEPISDKPAGYFTNSDQIEFALSSGQINVHSTIISRYETVDEQGNKKTEKYTSTAGRFLLANLLPKNSNIKFSLVDRLLPKKVVSEIIDVVFRFCGQKTTVIFCDKLKDLGFKHAFKAGISFGKDDLVIPANKTQLINDTKKLIADYETQYAEGLITRGEKYNKVVDAWSKCTDKVAGEMMKGISATEKTDEGLKINSV

SEQ ID NO: 133977 - protein, 55 aa, Unknown
  Bacterial polypetide isolated from the Sargasso Sea
MQISVIDLLVPTEIQVENVSDTVSKVTLEPLERGFGHTLGNALRRILLSSMPGAA

SEQ ID NO: 133978 - protein, 225 aa, Unknown
  Bacterial polypetide isolated from the Sargasso Sea
KASDITSVSDIEILNPDLVICNLDENTKFHMEMTVGTGKGYVSADMNKPEEPPLGLIAIDSLYSPVKKVSYSVSTAREGKALDYDKLTMEVETNGSISAEDAVAYSARIFQDQLGMFVNFDEPQEVIVKEQPSEPEFNKNLLRKVDELELSVRSMNCLKNDNIIYIGDLVQKSEGEMLRTPNFGRKSLNEIKEVLTGMSLYLGMEIPNWPPDNIAELSKKLEEAI

SEQ ID NO: 133979 - protein, 151 aa, Unknown
  Bacterial polypetide isolated from the Sargasso Sea
RVGQVTDYDKLVLEVETNGAVSPDDAIALASRILQDQLQPFINFDEPEIQQETSAQEKLPFNHNLLKKVEELELSVRSANCLKNDNIVYIGDLVQKSESEMLRTPNFGRKSLNEIKEVLQHMELGLGISVPEWPPENIEELAKQFEDPFNK

SEQ ID NO: 133980 - protein, 173 aa, Unknown
  Bacterial polypetide isolated from the Sargasso Sea
MEMNVGTGKGYVPAVMNKPEEPPLGLIAIDSLYSPVKKVSYTISTAREGKALDYDKLTMEVETNGSISAEDAVAYSARIFQDQLNMFVNFDEPVEAPVKEVSTEPEFNKNLLKKVDELELSVRSMNCLKNDNIIYIGDLVQKSEGEMLRTPNFGRKSLNEIKEVLTSMSLYLG

SEQ ID NO: 133981 - protein, 193 aa, Unknown
  Bacterial polypetide isolated from the Sargasso Sea
KKMYIRTKGPGEIRAGNFETDSETEIMNPDQIIMTLDSNADIELEANIDTGKGYLSAEVAEDEEKIIGEIKLDAMFSPVKRASYKVENSRVGQVTDYDKLILEVETNGAVSPDDAIALAARILQDQLQPFINFDEPEVQMETSSHEKLSFNPNLLKKVEELELSVRSANCLKNDNIIYIGDLVQKTESEMLRT

SEQ ID NO: 133982 - protein, 274 aa, Unknown
  Bacterial polypetide isolated from the Sargasso Sea
TWCSAFEPKLIEGDAIELHPLTCAAFNADFDGDQMAVHVPLSLEAQLEARILMLSTNNILSPSNGKPIIVPSQDMILGIYYLSQEPVTDKPAGYFVDSDQIEFALSSGQIKVHNTIISRFETVDENGNKKFEKYTSTAGRFLLANLLPKNSNIKFSLIDRLLPKKVVSEIIDIVFRFCGQKTTVIFCDKLKDLGFKHAFKAGISFGKDDLVIPESKTQLIDDTKKLIADYETQYAEGLITRGEKYNKVVDAWSKCTDKVAGEMMKGISATEKTS

SEQ ID NO: 133983 - protein, 103 aa, Unknown
  Bacterial polypetide isolated from the Sargasso Sea
MIEKNWKELIKPAKLSVKKNETNPFKATIIAEPIERGFGVTIGNSLRRILLSSLQGSSITSIQIQGVLHEFSSVPGVREDITDVILNIKGIKVKMDSDSSKKL

SEQ ID NO: 133984 - protein, 73 aa, Unknown
  Bacterial polypetide isolated from the Sargasso Sea
VDELELTVRSANCLKAENANYIGDLVQKTEVELLRTPNLGKKSLNEIKEVLASHGLSLGMELDNWPPKEAVVD

SEQ ID NO: 133985 - protein, 287 aa, Unknown
  Bacterial polypetide isolated from the Sargasso Sea
HPLVCTAFNADFDGDQMAVHVPLSLEAQLEARVLMMSTNNILSPSSGKPIIVPSQDIVLGIYYLSIMRNNQKGEGRNFIDTNEILKAVELKDITLHSRINVRIKNYDETYSKVETTAGRMLLADSLPQNSKINFSLINKVLTKKEVSNLIDTVYRFCGQKETVLFADSIMQIGFKYAAIAGISFGKDDLIIPEEKQKLLDETQSKVQEYENQYQDGLITQGEKYNKVVDAWSECTNKVADKMLDVISNPEDDKPINSVYMMAHSGARGSAAQLKQLAGMRGLMAKPS

SEQ ID NO: 133986 - protein, 74 aa, Unknown
  Bacterial polypetide isolated from the Sargasso Sea
MIHKNWAELIKPAQLEVKQAIDPTRQGTVIAEPLERGFGLTIGNALRRVLMSSLQGAAITSVQIDNVLHEFSSV

SEQ ID NO: 133987 - protein, 49 aa, Unknown
  Bacterial polypetide isolated from the Sargasso Sea
WINFRKFFRRILLSSIRGAAVTSVQIDGVLHEFTSIKGVREDVTVIVFD

SEQ ID NO: 133988 - protein, 233 aa, Unknown
  Bacterial polypetide isolated from the Sargasso Sea
MDAKGPGEIKASNILPVTDIEILNPDLVICNLDENTNFHMEMTVGSGKGYASADMNKPEEPPIGLIPIDSLFSPVKKVSYSVSTAREGKALDYDKLTMEVETNGSISAEDAVAYSARIFQDQLSMFVNFDEPEEKVISEKPSEPEFNKNLLRKVDELELSVRSMNCLKNDNIIYIGDLVQKSEGEMLRTPNFGRKSLNEIKEVLTGMSLYLGMEIPNWPPDNIAELSKKLEEA

SEQ ID NO: 133989 - protein, 196 aa, Unknown
  Bacterial polypetide isolated from the Sargasso Sea
MELMVSTGKGYVQAPKNKSEDSPLGLISIDSLFSPVKKVSFSVENTRAGSALDYDKLIMTVETNGTVDAEDAIAYSARIFQDQLSMFVNFEDPQEVIKEVKTTEPEFNRNLLKRVEELELSVRSMNCLKNDNIIYIGDLVQKTEPEMLRTPNFGRKSLNEIKEVLNTMSLYLGMEIPNWPPDNIAELSKKLEENNF

SEQ ID NO: 133990 - protein, 180 aa, Unknown
  Bacterial polypetide isolated from the Sargasso Sea
MGHLELASPVAHIWFLKSLPSRIGLLLDMTLREIERVLYFEAYLVTDPGMTDLTQGQMLSEEQYIEALEMYGDDFSAAMGAEAIHDILKDLDLQESLNQIQEDMEATASQIKIKRFQKRLKLIESLISSGNRPEWMILKVLPILPPDLRPLVPLDGGRFATSELNDLYRRVINRNNRLQR

SEQ ID NO: 133991 - protein, 194 aa, Unknown
  Bacterial polypetide isolated from the Sargasso Sea
MGGLEGSAVTAVRIAGINHEYATIPGVREDVLDILLNCKQLSLNSTNPELEIGRLVVNGPMEVKANDIQFSSQVEIVDGEKPIATIQEGHNLELEIHVERGVGYRPVDRRNQETTPIDLLQIDAVFMLVKRVNFTIDETAVAEGGTGRERLKMEVVTDGSTSPDDAIAEAANQLIELFQPLATVTMVEEIPEEP

SEQ ID NO: 133992 - protein, 232 aa, Unknown
  Bacterial polypetide isolated from the Sargasso Sea
GPGEIRAGNFETDSETEIMNRDQLIMTLDTNADIEIEANIETGKGYVSAEVAEDENKIIGEIKLDAMFSPVTKASYKIENSRVGQVTDYDKLIFDVETNGVISPDDAIALAARIIQDQLQPFINFDEPEIQQDLSSAEKLSFNSNLLKKVEELELSVRSANCLKNDNIIYIGDLVQKSESEMLRTPNFGRKSLNEIKEVLQQMELNLGMSVPEWPPENIDELAKKYEDPFNK

SEQ ID NO: 133993 - protein, 239 aa, Unknown
  Bacterial polypetide isolated from the Sargasso Sea
FERFIYRLTEVEDAELTINKSGTGVVKAGDIELPNGVEVINPDHHIATLNEEGSLSMTMRVTRGRGFVPVKALAEEEGQEAGLLRLDATYSPINRVTYQVDNARVEQRTNLDRLTVDIDTDGTLDAEEILRISATILQHQLSAFAELGRLEEVIEEKEEAKIDPIMLRPVDELELTVRSANCLKAENIHYIGDLVTRMESDLLRTPNLGKKSLNEIKEVLLSRGLSLGLILDNWPPETN

SEQ ID NO: 133994 - protein, 217 aa, Unknown
  Bacterial polypetide isolated from the Sargasso Sea
DIKVMNSDLVLCTLDENISFRMELYIKNGNGYVSAEENRNEDDPIGMIPVDSIFSPVTNVSYEIDNAREGEYLDYDRLSLSIETDGSVKPEDALAFSARILIDQLNPFINFDEPEEEVEEENEDELEFNISLLKKVDELELSVRSANCLKNDNIVYIGDLILKSENEMLRTPNFGRKSLNEIKEVLSEMNLSLGMDIPNWPPENIEELARRYVADKF

SEQ ID NO: 133995 - protein, 303 aa, Unknown
  Bacterial polypetide isolated from the Sargasso Sea
RPNLLGKRVDYSGRSVIVIGPELKLNQCGLPKKMALVLFEPFIIRRLKELGYVHTVRSAKKLIERQTPEVWDVLEEVTKDHPVLLNRAPTLHRLSVQAFEPKLIEGEAIRVHPLVCTAYNADFDGDQMAVHVPLSVEAQMEARMLMIATNNIFSPSSGKPIMTPTQDITLGCYYLTANPRQAPAKNGKAKAEPRKPMFASKAEVFFALDEGDLHHHTPIILANPDRGQETVFGDSVAAVIETTAGRVVFSEIWPAELGFPNFAVTKGQLGDLIDKSYKHAGHEKTVEMLDKLKELGFKEATQA

SEQ ID NO: 133996 - protein, 33 aa, Unknown
  Bacterial polypetide isolated from the Sargasso Sea
PNLGKKSLNEIKDVLASKGFSLGTTLENWPPMG

SEQ ID NO: 133997 - protein, 99 aa, Unknown
  Bacterial polypetide isolated from the Sargasso Sea
EEENEDELEFNISLLKKVDELELSVRSANCLKNDNIVYIGDLILKSENEMLRTPNFGRKSLNEIKEVLSEMNLSLGMDIPNWPPENIEELARRYVTDKF

SEQ ID NO: 133998 - protein, 77 aa, Unknown
  Bacterial polypetide isolated from the Sargasso Sea
SVRSANCLKNDNIIYIGDLVQKSESEMLRTPNFGRKSLNEIKEVLQQMDLNLGMSVPDWPPENIDELAKKYEDPFNK

SEQ ID NO: 133999 - protein, 258 aa, Unknown
  Bacterial polypetide isolated from the Sargasso Sea
GIQAFEPVLVEGKAIQLHPLVCKAFNADFDGDQMAVHVPLSIEAQLESRALMMSSNNILSPANGEPIIVPSQDVVLGLYYMTREKVKDKGEGGIFANIEEVERAFHNGFLGLHAKIKLKIATRNEEKPTEIVETTSGRALFSKIVPDEIPFSVINKTMDSKEISRLINRCYREVGLKATVIFADKLMYLGFEYATKSGVSIALDDMVVPENKEEILNDAESQVKSIQNQFTSGLLTQGERYNKVVDIWSRTNDQVANA

SEQ ID NO: 134000 - protein, 207 aa, Unknown
  Bacterial polypetide isolated from the Sargasso Sea
VICNLDENTNFHMEMTVGTGKGYISAEMNKPEEPPLGLIPIDSLFSPVKKVSYSVSTAREGKALDYDKLTMEVETNGSISAEDAVAYSARIFQDQLGMFVNFDEPQEVIVREQPTEPEFNKNLLRKVDELELSVRSMNCLKNDNIIYIGDLVQKSEGEMLRTPNFGRKSLNEIKEVLTGMSLYLGMEIPNWPPDNIAELSKKLEEAI

SEQ ID NO: 134001 - protein, 296 aa, Unknown
  Bacterial polypetide isolated from the Sargasso Sea
ARLNKLGLASTIKQAKKLVEKETNAVWDALELIVREHPVLLNRAPTLHRLGVQAFEPKLIEGDAIELHPLTCAAFNADFDGDQMAVHVPLSLEAQLEARILMLSTNNILSPSNGKPIIVPSQDMILGIYYLSQEPLTDKSAGYFLDADQIEFALSSGQIKVHSTIISRFETVDEKGNKKFEKYTSTAGRFLLANLLPKNFNIKFSLIDRLLPKKTVSEIIDIVFRFCGQKTTVIFCDKLKDLGFKHAFKAGISFGKDDLVIPESKNKLIEDTKKLIADYETQYAEGLITRGEKYNK

SEQ ID NO: 134002 - protein, 270 aa, Unknown
  Bacterial polypetide isolated from the Sargasso Sea
MRLPKKMALELFKPFLYARLNKLGLASTIKQAKKLVERERNEVWDALEEIVREHPVLLNRAPTLHRLGVQAFEPKLIEGDAIELHPLTCAAFNADFDGDQMAVHVPLSLEAQLEARVLMMSTNNILSPSNGKPIIVPSQDMILGIYYLSQPPYQEKKIEGYFTNISEIEHAIEIGQIKVHSRIISRFETMNEEGKIKIEKYTSTAGRFLLANILPKNINNKFSLIDRLLPKRVVSEIIDHVFRFSGQKATVIFCDKLKNLGFKHAFKAGI

SEQ ID NO: 134003 - protein, 206 aa, Unknown
  Bacterial polypetide isolated from the Sargasso Sea
MELIKPSKMDVNVQENDGRFGTLIAEPLERGFGLTLGNALRRILLSSLQGAAIISVKFKGVVHEFTTIPGVKEDLTDILLNLKSVDIKVHSPGLKKMYINTKGPGEIRAGNFETDSETEIMNPDQLIMTLDSNADIELEANVDTGKGYLSAEVAEDEDKTIGEIKLDAMFSPVKKASYKVENSRVGQVTDYDKLNLEVETNGAVSP

SEQ ID NO: 134004 - protein, 418 aa, Unknown
  Bacterial polypetide isolated from the Sargasso Sea
KLGLASTIKQAKKLVEKETNEVWDALELIVREHPVILNRAPTLHRLGVQAFEPKLIEGNAIELHPLTCAAFNADFDGDQMAVHVPLSLEAQLEARVLMMSTNNILSPSNGKPIIVPSQDMILGIYYLSQPPYQSEKVEGYFVNTSEIEHALEIGQIKVHSRIVSRFETIDEKGNIKFEKHISTVGRFLLANLLPKNINNKFSLVDRLLPKKIVSEVIDHVFRFSGQKSTVIFCDKLKDLGFKHAFKAGISFGKDDLVIPDNKQQLIDETKKLISDYENQYAEGLITRGEKYNKVIDAWSKCTDRVASEMMKRISATEMTDDGLKINSVFMMADSGARGSAAQMKQLAGMRGLIAKPSGEIIESPITSNFKEGLTALEYFNSTHGARKGLADTALKTASSGYLTRRLCDVAQDLTITKT

SEQ ID NO: 134005 - protein, 425 aa, Unknown
  Bacterial polypetide isolated from the Sargasso Sea
MYGEDGIDVAKSDHGEAFNVDRLIESESIVDSGKAATKDEIAPIIKKYTSEFNPRLTNAVSNSLENSKLSKQGVEKVAKKGLSLYNNAKAEPGQAVGIVTAQSIGEPGTQMTLRTFHFAGIAERNVTLGLPRLIELVDARKKPVTPTMDIYLSGDAKTDQAKTVEVARNILQTTVNDLILEADTDYKTKITLNLNERKLTDRGCTLDDVKAALESNKKFKMEDNGINSVVLNLVDEEADAPAVIVVRNKVLKTTVKGVPDIARVTIVKKNDEYVIQTTGSNLSKVLEVEGIDKNNVRTNNVSEIAETLGIEAARNALINELSNTLEDQGLEVDQRYLMLVSDLMCHRGYMQQIGRHGIAGTKDSVLARAAFEITVPTIAGAARTGETEQLRGITENVIVGSQIPIGSGTVDLYMQVAKKRGSDKS

SEQ ID NO: 134006 - protein, 185 aa, Unknown
  Bacterial polypetide isolated from the Sargasso Sea
YVPAELNKPEEPPLGLIAIDSLYSPVKKVSYSVSTAREGKALDYDKLIMEVETNGSISAEDAVAYSARIFQDQLKMFINFDEPVEAPIKEVSTEPEFNKNLLRKVDELELSVRSMNCLKNDNIIYIGDLVQKSEGEMLRTPNFGRKSLNEIKEVLTGMSLYLGMEIPNWPPDNIAEMSKKLEEAI

SEQ ID NO: 134007 - protein, 954 aa, Unknown
  Bacterial polypetide isolated from the Sargasso Sea
ADFDGDQMAVHVPLTVEAQLEARALMMSTNNILSPADGAPIINPTQDVVLGLYYMTREKVNSHGEGRVFSNPDEVQRAFESEQIDLHAKIKVRIENAEKGVFIEDTTVGRTLIWRITPIEVGFDNVNKTLDKKAVSSLIDLSYRKAGLKKTVIFADQLMYLGFDFSTRSGSSIGVDDFVIPEEKYEIVDKAEDEVKEIENQFSSGLVTRGERYNKVVDIWSRANERVAKAMMEKISKDSVEDSDGNEVEQASFNSVYIYADSGARGSPAQIRQLSGMRGLMSKPDGSIIETPITANFREGLSVLQYFISTHGARKGLADTALKTANSGYLTRRLCDVSMDSVITEEDCGTEDSIEMNAIIDGGEIIQDLTDRILGRVIAEPILDNEGNELFPKDTLIDEDALLKIEPLNLSTLKVRSPMTCESSFGVCAKCYGRDLARGHLVHRGEAVGVVAAQSIGEPGTQLTMRTFHIGGAASSSSEDDSIISRNDGSVIFSDDIKSVKNKDKLEVVISRNSTLSISDNQGKIVEQYKIPYGSTLLVANNAKVELGQKIATWDPYTRPIISEASGKVKFADIEEGVSVRASTDELTGLSSIEVIDGSERPSAGKDLVPSVSLTDGRGKQLTHPENNQPFTYALPASALLNLEDGQKITAGEVIARIPLEGSKTKDITGGLPRVADLFEARTPKDAAVLAEESGMVSFGKETKGKVRLVITPDGASKKSQNVEMLIPKHRTLSVFEGERVEKGDIVSDGPYSPHDILRLKGIPSLTNFIVNEIQQVYRLQGVSINDKHIETILRQMLRKALIVDGGDTKFIQGDQVEYAELVEANKMAESNDQQPATYERVLLGITKASLATNSFISAASFQETTRVLTEAAVTGKKDGLRGLKENVVVGRLIPAGTGMDFHDKLKTKSPDSDEYTLSSDDLEAALRQEIQDTNTEAEEQSEPESEKPVDDNE

SEQ ID NO: 134008 - protein, 239 aa, Unknown
  Bacterial polypetide isolated from the Sargasso Sea
NKKLILDAKGPGEIKASNITPVAGIEILNPELVICNLDEKTNFHMEMHVGTGKGYVSAIMNKPDEPPLGLIPIDSLFSPVKKVSYSVSTAREGKALDYDKLTMEVETNRSISAEDAVAYSARIFQDQLGMFVNFDEPQEVIVREKPSEPEFNKNLLRKVDELELSVRSMNCLKNDNIIYIGDLVQKSEGEMLRTPNFGRKSLNEIKEVLTGMSLYLGMEIPNWPPDNIAELSKKLEEAI

SEQ ID NO: 134009 - protein, 466 aa, Unknown
  Bacterial polypetide isolated from the Sargasso Sea
LASTIKQAKKLVEKETNAVWDALELIVREHPVLLNRAPTLHRLGVQAFEPKLIEGDAIELHPLTCAAFNADFDGDQMAVHVPLSLEAQLEARILMLSTNNILSPSNGKPIIVPSQDMILGIYYLSQEPITDKPLGYFLDSDQIEFALSSGQIKVHSTIISRFETVDEKGNKKFEKYTSTAGRFLLANLLPKNKDIKFSLIDRLLPKKTVSEIIDIVFRFCGQKTTVIFCDKLKDLGFKHAFKAGISFGKDDLVIPANKTQLIDDTKKLIADYETQYAEGLITRGEKYNKVVDAWSKCTDKVAGEMMKGISATEKTSEGLKINSVFMMADSGARGSAAQMKQLAGMRGLIAKPSGEIIESPITSNFKEGLTALEYFNSTHGARKGLADTALKTASSGYLTRRLCDVAQDLTVTKKECDCKNPGFIELSEILEGGNVVVSLSERALGRITFDDVKNPLTGDIVLKKQQ

SEQ ID NO: 134010 - protein, 259 aa, Unknown
  Bacterial polypetide isolated from the Sargasso Sea
MNVLAPEVAKVDELDKNNLRVVLEPFERGFGYTIGHSLRRIMLSYMPGAAITEVKIDGVSHEYGTIEGIKEDILDVLLNLKDLAIKLDGPAEAELKLDVKTPKTITASDLELPAGVEVMDPDHVIATLVEPKKLVMTLKVETGTGYVPSENNKNKSVDSLHLDAIFSPVKRVNYKVENTRVENRTDLDKLILDLETDGTIDPKQAVKYAATIMQHQLAVFVDEELVSRKEKRKDKYDFDPLLLRSIEELELTVRSTNCL

SEQ ID NO: 134011 - protein, 323 aa, Unknown
  Bacterial polypetide isolated from the Sargasso Sea
MSKKLEIKIKAEDKSLTKTFGKFIVKPLERGYGITIGNALRRVLLTCLPGAAITNIRIDGVLHEFSSIEGVHEDVSDIIQNLKGVRFKLDDNDPEKISIKLEGPCKFTAADIQKATSELKVLNKKHYITEINEGTKLDIEIKIGVGKGYTPSEENELPNAPLGTIAIDSIFNPVTKVMFNVTPVPGAKEPIELLSLEVTTDGSIEPQDAVSYSATVLMDQLRIVESISKPEVLEISEPVSEEVLEIRKLLNLTIDEMELSVRSHNCLQAAGIKFIYELVSKEENQMLKYKNFGRKSLTELVEKLDEMGLSFGIEVDKYLKEEV

SEQ ID NO: 134012 - protein, 158 aa, Unknown
  Bacterial polypetide isolated from the Sargasso Sea
MAVHVPLALEAQTEARMLMLASNNILSPATGEPIVTPSQDMVLGSYYLTALQPNYQQPEFGEYKTTFASLEDVIFAFEDKRLSLHEWVWVRFNGEVEDEDEMRSPQKTKELEDGSRLEIWNLRRDRFDSDNNLISRFVLTTVGRVVMNYTIIDSVSKT

SEQ ID NO: 134013 - protein, 195 aa, Unknown
  Bacterial polypetide isolated from the Sargasso Sea
MEMNVSTGKGYVPADLNKPEEPPLGLIAIDSLYSPVKKVSFSVSTAREGKALDYDKLIMEVETNGSISAEDAVAYSARIFQDQLKMFINFDEPVEAPVKEVSTEPEFNKNLLRKVDELELSVRSMNCLKNDNIIYIGDLVQKSEGEMLRTPNFGRKSLNEIKEVLTGMSLYLGMEIPNWPPDNIAEMSKKLEEAI

SEQ ID NO: 134014 - protein, 222 aa, Unknown
  Bacterial polypetide isolated from the Sargasso Sea
DITSVADIEILNPDLVICNLDENTKFHMEMTVGTGKGYVSADMNKPEEPPLGLIPIDSLFSPVKKVSYSVSTAREGKALDYDKLTMEVETNGSISAEDAVAYSARIFQDQLGMFVNFDEPQEVIVKEQPSEPEFNKNLLRKVDELELSVRSMNCLKNDNIIYIGDLVQKSEGEMLRTPNFGRKSLNEIKEVLTGMSLYLGMEIPNWPPDNIAELSKKLEEAI

SEQ ID NO: 134015 - protein, 193 aa, Unknown
  Bacterial polypetide isolated from the Sargasso Sea
MTVGNGKGYVSADFNKPEEPPLGLIPIDSLFSPVKKVSYSVSTAREGKALDYDKLTMEVETNGSISAEDALAYSARIFQDQLAMFVNFDEPQEVAISEAPKEPEFNRNLLRKVDELELSVRSMNCLKNDNIIYIGDLVQKSEGEMLRTPNFGRKSLNEIKEILNGMSLYLGMEIPNWPPDNIAELSKKLEESI

SEQ ID NO: 134016 - protein, 32 aa, Unknown
  Bacterial polypetide isolated from the Sargasso Sea
NLGKKSLNEIKDVLASKNLSLGMNVENWPPVG

SEQ ID NO: 134017 - protein, 226 aa, Unknown
  Bacterial polypetide isolated from the Sargasso Sea
IKASNIAPVTDIEILNPDLVICNLDENTNFHMEMNVNTGKGYVSADLNKPEDPPLGLIPIDSLYSPVKRVSYSVSTAREGKALDYDKLIMEVETNGSISAEDAVAYAARIFQDQLGMFVNFDEPQEVIVRDKPTEPEFNKNLLRKVDELELSVRSMNCLKNDNIVYIGDLVQKSEGEMLRTPNFGRKSLNEIKEVLTGMSLYLGMEIPNWPPDNIAELSKKLEEAI

SEQ ID NO: 134018 - protein, 156 aa, Unknown
  Bacterial polypetide isolated from the Sargasso Sea
MHESLIHGILKNEHGSISKAVTLIENGGTEIVPLLNNIHEYSTNSLRIGITGPPGAGKSTITNALIEILLKNKKTVGVIAVDPTSPFSGGSLLGDRIRMNHYAWDDRVFVRSMGSNGELGGLARKSQDVGDVLAASGKDVVLYETVGVGQSEHDIV

SEQ ID NO: 134019 - protein, 168 aa, Unknown
  Bacterial polypetide isolated from the Sargasso Sea
PIDSLFSPVKKVSYSVSTAREGKALDYDKLTMEVETNGSISAEDAVAYSARIFQDQLSMFVNFDEPQEVLVREKPTEPEFNRNLLRKVDELELSVRSMNCLKNDNIIYIGDLVQKSEGEMLRTPNFGRKSLNEIKEVLNGMSLYLGMEIPNWPPDNIAELSKKLEEAI

SEQ ID NO: 134020 - protein, 28 aa, Unknown
  Bacterial polypetide isolated from the Sargasso Sea
MGLHLGMEVPNWPPENIEELAKKLDDNF

SEQ ID NO: 134021 - protein, 453 aa, Unknown
  Bacterial polypetide isolated from the Sargasso Sea
DFDGDQMAVHVPLALEAQMEARMLMLASHNILHPANGQPIAVPSQDMVLGCYYLTRPKEGDHGEGKIFGSIQEGLLAYENKAVGLHAIVDVRDKGKWVKKTTVGRIIFNSILPDDVDFVNDIVGKKMLTKIVNNAYLVSGNFQTVLFLDRLKDLGFGMATISGASIAISDVIIPDEKDEILSLAQNEVDDIKSKFERHILTDGERYNKVIDVWTHTANQMAMTMMNALKQDRQGFNPVFMMADSGARGSQDQIKQLAGMRGLMAKPQKSMKGGVGEIIESPITSNFKEGLSVFEYFISTHGARKGLADTALKTADAGYLTRRLVDVAQDVVVYEPDCGTINGIVIADLKEGEKIVEPLSDRILGRTILDDFIVKGEVVVKAGSVISESEAELIGDSGVENVRIRSILTCEAKRGVCAKCYGWDLSTHKIVDNGTAVGIRAAQSIGEPGTQLTL

SEQ ID NO: 134022 - protein, 122 aa, Unknown
  Bacterial polypetide isolated from the Sargasso Sea
ELETDGTLDPKMAIEHSATILQQQLGAFVDLDAIAEQEAKKDQNDFDPILLRSIEELELTVRSTNCLKAESIFLIGDLIHRSEFDLLKTPNLGKKSLNEIKDVLASKDLSLGMNVENWPPVG

SEQ ID NO: 134023 - protein, 51 aa, Unknown
  Bacterial polypetide isolated from the Sargasso Sea
IFLIGDLIQRSEFDLLKTPNLGKKSLNEIKDVLASKGLSLGMVLDNWPPMG

SEQ ID NO: 134024 - protein, 330 aa, Unknown
  Bacterial polypetide isolated from the Sargasso Sea
MATFTFQKPDKVIMIDSTDFEGKFEFRPLEPGYGLTVGNALRRVLLSSLEGFAFTSIKIENVDHEFTSLPGIVEDVTEIILNLKQIRLKRQIDSVDNETVSVSVNAQNQLKAADLQKFISGFQILNPDVVICNLEKNVKLNFELNIEKGRGYVSAEENKKLGAPLGTIFMDSVFTPIKNVKYTIEDFRVEQKTDYEKLVFEIMTDGSIDPKNALTEGAKVLIHHFMLFSDERITLEADEIAQTETYDEESLHMRQLLKTRLIDMDLSVRALNCLKAAEVDTLGDLVSFNKSDLMKFRNFGKKSLTELEELVLVKGLSFGMDLSKYKLDKD

SEQ ID NO: 134025 - protein, 257 aa, Unknown
  Bacterial polypetide isolated from the Sargasso Sea
DIVFNIKSLSLNMHSEGVRKMNLNVTGPGEITAGMINTPSEIDIINPELVICNLDDNTEFNMELTVAKGKGYVAAEHNKPEDSAIGLIPIDSIFSPVKQVSYSIENTREGKVLDYDKLTMSIETNGSVSPEDAIAFAARIIQDQLQSFINFEEPEEIQEEPDALEPQFNKNLLRKVEELELSVRSMNCLRNDNIIYIGDLVQKSEIEMLRTPNFGRKSLNEIKEVLGTMSLYLGMEVPNWPPENIEEMARKIEDPYN

SEQ ID NO: 134026 - protein, 243 aa, Unknown
  Bacterial polypetide isolated from the Sargasso Sea
MELNKTKKFNKISIGLASPETILASSRGEVLKPETINYRTHKPERDGLFCERIFGPVKDYECACGKYKRIRYKGIVCDRCGVEVTEKKVRRDRVGHINLVVPVAHIWYFRSLPNKIGYLLGLPTKKLDMIIYYERYVVVQPGAALDAEGNTYNKMDFLTEEEYLNVLEKLPPENQFLEDSDPEKFIAKMGAECLIELLSRIDLDELSYELRHKANNETSKQRKTESLKRLQVVESLREANINK

SEQ ID NO: 134027 - protein, 100 aa, Unknown
  Bacterial polypetide isolated from the Sargasso Sea
MQYQIDRIDHQIADDRSQTGTFLIGPLERGQATTLGNSLRRVLMGGLEGSAVTAVRISGINHEYATIPGVREDVLDILLNCKQLSINSSNPELEIGRLVA

SEQ ID NO: 134028 - protein, 227 aa, Unknown
  Bacterial polypetide isolated from the Sargasso Sea
MTTRSSSDFNSIRISLASPDQIKAWSYGEVTKPETINYRTLRPEKDGLFCEKIFGPTKDWECYCGKYKKIRYKGVICDRCGVEVTRAKVRRERMGHIKLAAPVAHIWFSKSTPSRLGLLLDVSPKNLERVLYFAQYIVTEINNNEKLDAINFFKQDAEQKIEEIKTRLEAVLESKEYLEELERLEIKVKKTDAKKPEKLEEIVKTIYAEFIDEEQNNTEETIQDLES

SEQ ID NO: 134029 - protein, 92 aa, Unknown
  Bacterial polypetide isolated from the Sargasso Sea
ELTFNPALLKKVDELELSVRSANCLKNDNIVYIGDLILKSESEMLRTPNFGRKSLNEIKEVLAQMGLHLGMNIPNWPPENIDDLAKRYEESY

SEQ ID NO: 134030 - protein, 74 aa, Unknown
  Bacterial polypetide isolated from the Sargasso Sea
PLLLRSIEELELTVRSTNCLKAENIFLIGDLIQRSEMDLLKTPNLGKKSLNEIKDELASRGLSMGTVLKNWPPM

SEQ ID NO: 134031 - protein, 226 aa, Unknown
  Bacterial polypetide isolated from the Sargasso Sea
IKASDIASVADIEILNPELVICNLDENTNFHMEMTVGNGKGYIPADMNKPEEPPLGLIPIDSLFSPVKKVSYSVSTAREGKALDYDKLTMEVETNGSISAEDAVAYSARIFQDQLGMFVNFDEPKEVIVREQPTEPEFNKNLLRKVDELELSVRSMNCLKNDNIIYIGDLVQKSEGEMLRTPNFGRKSLNEIKEVLNTMSLYLGMEIPNWPPDNIAELSKKLEEAI

SEQ ID NO: 134032 - protein, 94 aa, Unknown
  Bacterial polypetide isolated from the Sargasso Sea
DELELNASLLKKVMKLELSVRSANCLKNDNIVYIGDLILKSENEMLRTPNFGRKSLNEIKEVLSEMNLSLGMDIPNWPPENIEELARKHAADKF

SEQ ID NO: 134033 - protein, 330 aa, Unknown
  Bacterial polypetide isolated from the Sargasso Sea
MAILNFQKPDKVIMIDSTESHGKFEFRPLEPGYGLTIGNALRRVLLSSLEGHAFTSVKIDGVDHEFSTIKGVVEDVTEIILNIKQIRLKRQIDDIDNETINVIVGNQKVFKASDLQKFISGFQILNPDLVICNLEKDVKLSIELNIEKGRGYVPAEENKKYNESVGVIAIDSIFTPIKNVKYDIENYRVEQKTDYEKLIFEIITDGSIHPKDALTEAAKILIHHFMLFSDELITLEADEIAQSETYDEESLHMRQLLKTKLIDMDLSVRALNCLKAAEVDTLGDLVSFNKNDLMKFRNFGRKSLTELEELVILKGLSFGMDLTKYKLDKD

SEQ ID NO: 134034 - protein, 330 aa, Unknown
  Bacterial polypetide isolated from the Sargasso Sea
MAILNFQKPDKVVMIDSSDFEGKFEFRPLEPGYGLTIGNALRRVLLSSLEGFAITSIKIDGIDHEFSTIPGIVEDITEIVLNLKQIRFKRQIDDVEDEKVKLNVSGQDQIKAADLQKFISGFQILNPEQVICNLEKAVQFNFELTIEKGRGYIPAEENKNIDSALGLIAIDSIFTPVKNVKYTIENYRVEQKTDYEKLVFEIITDGSIHPKDALTEAAKTLIHHFLLFSDERITLEADEIAQTETYDEESLHMRQLLKTKLIDMDLSVRALNCLKAAEVDTLGDLVSYNKNDLMKFRNFGKKSLTELEELVILKGLSFGMDLSKYKLDRD

SEQ ID NO: 134035 - protein, 212 aa, Unknown
  Bacterial polypetide isolated from the Sargasso Sea
PDQLIMTLDSNADVEIEANIETGKGYVSAEVAEDENKVIGEIKLDAMFSPVIRASYKVENSRVGQVTDYDKLIFEVETNGVITPDDAIALASRILQDQLQPFINFDEPEAQQDQTASEKLSFNSNLLKKVEELELSVRSANCLKNDNIIYIGDLVQKSESEMLRTPNFGRKSLNEIKEVLQQMELNLGMSVPDWPPENIDELAKKYEDPFNK

SEQ ID NO: 134036 - protein, 328 aa, Unknown
  Bacterial polypetide isolated from the Sargasso Sea
IVTAQSIGEPGTQMTLRTFHFAGIAERNVTLGLPRLIELVDARKKPVTPTMDIYLSGDAKTDQAKTVEVARNILQTTVNDLILDADTDYKTKITLNLNERKLTDRGCTLDDVKAALESNKKFKMEDNGINSVVLNLVDEEADAPAVIVVRNKVLKTTVKGVPDIARVTIVKKNDEYVIQTTGSNLSKVLEVEGIDKNNVRTNNVSEIAETLGIEAARNALINELSNTLEDQGLEVDQRYLMLVSDLMCHRGYMQQIGRHGIAGTKDSVLARAAFEITVPTIAGAARTGETEQLRGITENVIVGSQIPIGSGTVDLYMQVAKKRGSDKS

SEQ ID NO: 134037 - protein, 97 aa, Unknown
  Bacterial polypetide isolated from the Sargasso Sea
LAVFVDEELVSRKEKRKDKYDFDPLLLRSIEELELTVRSTNCLKAENIFLIGDLIQRSEMDLLKTPNLGKKSLNEIKDELASRGLSMGTVLKNWPPM

SEQ ID NO: 134038 - protein, 273 aa, Unknown
  Bacterial polypetide isolated from the Sargasso Sea
MKALLDLFRQVQQEEQFDAIKIGLASPEKIRSWSFGEVKKPETINYRTFKPERDGLFCAKIFGPIKDYECLCGKYKRLKHRGVICEKCGVEVTLAKVRRERMGHIELAAPTAHIWFLKSLPSRLGMVLDMTLRDIERVLYFEAFVVVEPGMTALKKSQIMSEDDYLAKCDEYGEGEFVAMMGAEGIRELLRGIDIEKQIETIRAELQATGSEAKIKKFAKRLKVLEAFQRSGIKPDWMILEVLPVLPPELRPLVPLDGGRFATSDLNDLYRRV

SEQ ID NO: 134039 - protein, 145 aa, Unknown
  Bacterial polypetide isolated from the Sargasso Sea
QTDYDKLLFDIETDGTVTPEDAIAFGARILTEQLKPFINFDEPEPEIEEDLESVLPFSRSLLKKVDELELSVRSANCLKNDNIVYIGDLVQKTEPEMLRTPNFGRKSLNEIKEVLKMMSLELGMDVEGWPPENIEELAKKHEDPY

SEQ ID NO: 134040 - protein, 89 aa, Unknown
  Bacterial polypetide isolated from the Sargasso Sea
LVQRKEKRKDKYDFDPLLLRSIEELELTVRSTNCLKAENIFLIGDLIQRSEMDLLKTPNLGKKSLNEIKDELASRGLSMGTVLKNWPPM

SEQ ID NO: 134041 - protein, 80 aa, Unknown
  Bacterial polypetide isolated from the Sargasso Sea
MSQKEYKLKIKTEKKSLTNTYGKFVIQPLERGYGITLGNTLRRVLLTSLPGAAITNVKVENVLHEFSTIPGVKDDMSEII

SEQ ID NO: 134042 - protein, 181 aa, Unknown
  Bacterial polypetide isolated from the Sargasso Sea
MKVTRGRGFVPVRPLDEDEGQETGLLRLDATYSPIKRVTYQVDNARVEQRTNLDRLTVDIDTDGTLEAEEILRISATILQHQLSAFAELGRLEEVIEEKEEAKIDPIMLRPVDELELTVRSANCLKAENIHYIGDLVTRMESDLLRTPNLGKKSLNEIKEVLLSRGLSLGLILDNWPPENN

SEQ ID NO: 134043 - protein, 91 aa, Unknown
  Bacterial polypetide isolated from the Sargasso Sea
MEFQKNWLGLHRPKSIQIDQKSKTDDYAKFTCQPLEKGYGVTIGNTLRRILLSSIQGPAITKVKIDGVMHEFSTIPGVTEDVTEIILNLKQ

SEQ ID NO: 134044 - protein, 327 aa, Unknown
  Bacterial polypetide isolated from the Sargasso Sea
ELHPLTCAAFNADFDGDQMAVHVPLSLEAQLEARVLMMSTNNILSPSNGKPIIVPSQDMILGIYYLSQPPVQTERVDGYFVNTSEIEHALETGQIKVHSRIVSRFETVDEKGKTKFEKHISTAGRFLLSSIIPKNLNNKFSLIDRLLPKKIVSEVIDHVFRFSGQKSTVIFCDKLKDIGFKHAFKAGISFGKDDLLIPDNKEQLIDETKKLIADYEGQYAEGLITRGEKYNKVIDAWSKCTDRVASEMMKRISATEVTDDGLKINSVFMMADSGARGSAAQMKQLAGMRGLIAKPSGEIIETPITSNFKEGLTALEYFNSLMAQGRG

SEQ ID NO: 134045 - protein, 141 aa, Unknown
  Bacterial polypetide isolated from the Sargasso Sea
MVKNNELLTQKKFNTISIGLSSPEVILGNSRGEVLKPETINYRTHKPERDGLFCERIFGPVKDYECACGKYKRIRYKGIVCDRCGVEVTEKKVRRDRVGHISLVVPVAHIWYFKSLPNKIGYLLGLPSKKLDMIIYYERYV

SEQ ID NO: 134046 - protein, 410 aa, Unknown
  Bacterial polypetide isolated from the Sargasso Sea
FKPFLYARLNKLGLASTIKQAKKLVEKETNAVWDALELIVREHPVLLNRAPTLHRLGVQAFEPKLIEGDAIELHPLTCAAFNADFDGDQMAVHVPLSLEAQLEARILMLSTNNILSPSNGKPIIVPSQDMILGIYYLSQEPLTDKPMGYFLDADQIEFALSSGDIKVHNTIISRFETIDEKGNKKYEKYTSTAGRFLLANLLPKNHNIKFSLIDRLLPKKVVSEVIDIVFRFCGQKTTVIFCDKLKDLGFKHAFKAGISFGKDDLVIPESKTQLIEDTKKLIADYETQYSEGLITRGEKYNKVVDAWSKCTDKVAGEMMKGISATEKTSEGLKINSVFMMADSGARGSAAQMKQLAGMRGLIAKPSGEIIESPIISNFKEGLTALEYFNSTQRARKGLADTALKTSKLRI

SEQ ID NO: 134047 - protein, 416 aa, Unknown
  Bacterial polypetide isolated from the Sargasso Sea
LYARLNKLGLASTIKQAKKLVERERNEVWDALEEIVREHPVILNRAPTLHRLGVQAFEPKLIEGDAIELHPLTCAAFNADFDGDQMAVHVPLSLEAQLEARVLMMSTNNILSPSNGKPIIVPSQDMILGIYYLSQAPYQTDKIEGYFTNISEIDHGLESGQIKVHSRIVSRFETVDENGKIKYEKHISTAGRFLLANLLPKNINNKFSLIDRLLPKRTVSEIIDHVFRFSGQKSTVIFCDKLKNLGFKHAFKAGISFGKDDLVIPENKQQLIDETKKLISEYETQYSEGLITRGEKYNKVVDAWSKCTDRVAAEMMKKISATEITKEGLKINSVFMMADSGARGSAAQMKQLAGMRGLIAKPSGEIIESPITSNFKEGLTALEYFNSTHGARKGLADTALKTANSGYLTRRLCDVA

SEQ ID NO: 134048 - protein, 89 aa, Unknown
  Bacterial polypetide isolated from the Sargasso Sea
MTNSNLRTENHFDYVKISIASPQRIMDWGQRTLPNGQVVGEVTKPETINYRTLKPEMDGLFCEKIFGPSKDWECHLWKVQKGKTSRHRL

SEQ ID NO: 134049 - protein, 165 aa, Unknown
  Bacterial polypetide isolated from the Sargasso Sea
GNALRRVLMGGLEGSAVTAIRIAGVNHEYATVPGVREDVLDILLNCKELSVNSRSPELEIGRLVVAGPAEVTAKDLQFSSQVEVVDGNRSIATVADGYSLELEVHVERGVGYRPVDRHSEDTSAIDLLQIDAVFMPVIRVNFTIDETAVAEGGSARERLRMEIVT

SEQ ID NO: 134050 - protein, 288 aa, Unknown
  Bacterial polypetide isolated from the Sargasso Sea
LELFKPFIYGKLEARGLATTIKAAKKMVEREEGAVWDVLDEVIREHPVLLNRAPTLHRLGIQAFEPVLIEGKAIQLHPLVCAAYNADFDGDQMAVHVPLTIEAQLEARALMMSTNNVLSPANGEPIIVPSQDVVLGLYYMTRDAVNAKGEGMIFKHAKEAEKAFRAGVASLHARVKVRITEVTIAEDGTRSSVTAVRDTTVGRAILYSIMPEGLAFDSINQAMGKKQISRLLNGSYRRIGLKNTVILADQIMYTGFHYAMLSGVSVGIDDMVIPAARLISFLLQKQKV

SEQ ID NO: 134051 - protein, 296 aa, Unknown
  Bacterial polypetide isolated from the Sargasso Sea
VSSGNKPEWMILTSVPVIPPELRPLVPLDGGRFATSDLNDLYRRVINRNNRLKRLLDLKAPDIIVRNEKRMLQESVDALFDNGRRGRVITGTGKRPLKSLAEMLKGKQGRFRQNLLGKRVDYSGRSVIVVGPELKLHQCGLPKKMALELFKPFLYARLDKLGLATTIKQAKRLVEKEKSEVWDSLEHIIREHPILLNRAPTLHRLGVQAFEAKLIEGNAIELHPLVCAAFNADFDGDQMAVHIPLSLEAQLEARVLMMSTNNILSPSNGKPIIVPSQDIVLGIYYLSQADKEDKKP

SEQ ID NO: 134052 - protein, 254 aa, Unknown
  Bacterial polypetide isolated from the Sargasso Sea
MQISLSDFLTPQVIQVDEYDNCHSKVVLEPLERGFGHTLGNALRRILLSSMPGSAIEEVEIDGVVHEYSTIEGVGEDVIEILLNLKGLAVVLNERDEAILSISKKGSGVVTAADIQEDHDVDIINPDHVIANLNSNGELNMRLTVRKGRGYSPADSRLKTDDETRSVGKLLLDASYSPVVRVSYSVENARVEQRTDLDKLIIDLETNGTIEPEEAIRRAATILQHQLSVFVDLQSEIIAEPEEREAEIDPILLR

SEQ ID NO: 134053 - protein, 322 aa, Unknown
  Bacterial polypetide isolated from the Sargasso Sea
QCGLPKKMALELFKPFVYGRLEHKELATTIKAAKRLVERETPEVWEALEEVIREHPVLLNRAPTLHRLGIQAFEPLLIEGKAIQLHPLVCVAYNADFDGDQMAVHVPLTVEAQLEARALMMSTNNILSPADGAPIINPTQDVVLGLYYMTREKVNSHGEGRVFSNPDEVQRAFESEQIDLHAKIKVRIENAEKGVFIEDTTVGRTLIWRITPIEVGFDNVNKTLDKKAVSSLIDLSYRKAGLKKTVIFADQLMYLGFDFSTRSGSSIGVDDFVIPEEKYEIVDKAEDEVKEIENQFSSGLVTKGERYNKVVDIWSRANERVL

SEQ ID NO: 134054 - protein, 323 aa, Unknown
  Bacterial polypetide isolated from the Sargasso Sea
TEVWDILEEVIREHPVLLNRAPTLHRLGIQAFEPVLIEGKAIQLHPLVCAAFNADFDGDQMAVHVPLSLEAQLEARVLMMSTNNILHPANGDPIIVPSQDIILGLYYLSQMKQNEPGEGRHFDDINEIEFALENKDITLHSKISFRFNTDDGYKKFDTTPGRILISKELPKNENISFEIVNKLLTKKEISRMIDDVYRHCGQKETVIFCDHIMKLGFKHACNAGISFGKDDMIIPEEKVNLINDTNELVKEFEQQYIDGFITRGEKYNKVVDAWAKCTDKVEDKMMDIISSSQINEDTEREDPINSIYMMAHSGARGSAAQMK

SEQ ID NO: 134055 - protein, 231 aa, Unknown
  Bacterial polypetide isolated from the Sargasso Sea
MIHKNWAELIKPAQLEVKQANDPTRQGTVIAEPLERGFGLTIGNALRRVLMSSLQGAAITSVQIDNVLHEFSSVAGVREDVTDIVLNLKGVSLSMEVEGPKRLTVSSKGPGVVTAGNIEETAGIEILNKDHVICHLDDGADLNMELTVNTGNGYVAAEKNKPEDAPIGLIPIDAIYSPVKKVSYDVQPTREGQVLDYDKLTMNIETDGSVSPDDALAFAARILQDQLSIFV

SEQ ID NO: 134056 - protein, 348 aa, Unknown
  Bacterial polypetide isolated from the Sargasso Sea
MILTTIPVIPPELRPLVPLDGGRFATSDLNDLYRRVINRNNRLKRLMDLKAPDIIVRNEKRMLQESVDALFDNGRRGRVITGTGKRPLKSLAEMLKGKQGRFRQNLLGKRVDYSGRSVIVVGPDLKLHECGLPKKMALELFKPFLYARLNKLGLASTIKQAKKLVERERNEVWDALELIVREHPVILNRAPTLHRLGVQAFEPKLIEGNAIELHPLTCAAFNADFDGDQMAVHVPLSLEAQLEARVLMMSTNNILSPSNGKPIIVPSQDMILGIYYLSQPPYQTDRVEGYFVNTSEIEHALEIGQIKVHSRIVSRFGTVDENGNTKYEKHISTAGRFLLASLIPKKYK

SEQ ID NO: 134057 - protein, 274 aa, Unknown
  Bacterial polypetide isolated from the Sargasso Sea
MESTEVNPKNWKTLIKPAKLDVQLSDDKSQAKITAEPLEKGYGLTLGNSLRRILLSSIRGTAVTAIQIDGVLHEFTSIKGVREDVTDIVLNVKSLALKSSSDAQKKLILDAKGPGEIKASDITQIADVEILNPELVICNLDENTNFHMEMIVGHGKGYVSADMNKPDEPPLGLIPIDSLFSPVKKVSYSVSTAREGKALDYDKLIMEVETNGSISAEDAVAYSARIFQDQLGMFVNFDEPQEVIVREQSTEPEFNKNLLRKVDELELSVRSMNC

SEQ ID NO: 134058 - protein, 252 aa, Unknown
  Bacterial polypetide isolated from the Sargasso Sea
KKNQLLGEEELIKYQDDYGEEAFTAGIGAEAILEILKSINLEEERDLLIKNIKETKSKVNEERSIKRLKLIESFIETGNKPEWMILTTVPVIPPELRPLVPLDGGRFATSDLNDLYRRVINRNNRLKRLIDLKAPDIIVRNEKRMLQESVDALFDNGRRGRVITGTGKRPLKSLAEMLKGKQGRFRQNLLGKRVDYSGRSVIVVGPDLKLHECGLPKKMALELFKPFLYARLNKLGLASTIKQAKKLVEKER

SEQ ID NO: 134059 - protein, 224 aa, Unknown
  Bacterial polypetide isolated from the Sargasso Sea
GKGPVLASDIEDHPNLEIKNPDFCIANMTNDKTELVINLLISKGKGYQPAVKRKFNELDDLGIGKMQIDASFTPVEKVSYSVDNARVKQKADLDKLIIELETNETIEPEDAIRTAGKILREQLEVFSHLEIKNDTLDEVDENHIDPVLLRPVDDLELTVRSANCLKAENIHYIGDLVQRSENELLKTPNLGKKSLTEIKDVLSTHSLTLGQTIEDWPPKNIEKR

SEQ ID NO: 134060 - protein, 235 aa, Unknown
  Bacterial polypetide isolated from the Sargasso Sea
METSNVNLKNWKSLIKPSKIDVNQNEDKTFAKVIAEPLEKGYGLTIGNSLRRILLSSIRGTAVTAIQIDGVQHEYSSIKGVREDVTDIVLNIKSLALKSDFEGNKKLILDAKGPGEIKASQITQITDIEILNPDLVICNLDENTNFHMELFVGNGKGYVSAELNKPEEPPLGLIPIDSLFSPVKKVSYSVSTAREGKALDYDKLTMEIETNGSITAEDALAYSARIFQDQLGMFV

SEQ ID NO: 134061 - protein, 320 aa, Unknown
  Bacterial polypetide isolated from the Sargasso Sea
AKVRRERMGHIDLAAPVAHIWFLKSLPSRIGLLLNVTLREIERVLYFESYIVTDPGLTELEKGQILTEEEWVEKYEEFGDEFSAGMGAEAVQILLEELDIDDEIRIIREEIPQTNSETKLKKFSKRLKLLEAFKNSGNKPEWMIMNVLPVLPPDLRPLVPLEGGRFATSDLNDLYRRVINRNNRLKRLLELNAPEIIVRNEKRMLQESVDALLDNGRRGRVITGTNKRPLKSLADMIKGKGGRFRQNLLGKRVDYSGRSVIVAGPNLKLHQCGLPKKMALELFKPFVYGKLDNRELATTIKAAKKLVKEKLQKFGKCSKK

SEQ ID NO: 134062 - protein, 309 aa, Unknown
  Bacterial polypetide isolated from the Sargasso Sea
MVFKSLPSRISLAIDMKLKEVEKVLYFESFIIVEPGLTNLKKGQLISEEALLRAQDEFGEDAFTAGIGAEAVREILVNLDLKKEQQKLRESLKDIKSKVTEERTIKRLKLIESFINSGNKPEWMILTSVPVIPPELRPLVPLDGGRFATSDLNDLYRRVINRNNRLKRLLDLKAPDIIVRNEKRMLQESVDALFDNGRRGRVITGTGKRPLKSLAEMLKGKQGRFRQNLLGKRVDYSGRSVIVVGPELKLHQCGLPKKMALELFKPFLYARLDKLGLATTIKQAKRLVEKEKSEVWDSLEHIIREHPIL

SEQ ID NO: 134063 - protein, 367 aa, Unknown
  Bacterial polypetide isolated from the Sargasso Sea
KGQKRAKLIKRIRVIDNFIATNAKPEWMVLDAIPVIPPDLRPMVQLDGGRFATSDLNDLYRRVINRNNRLARLQEILAPEIIVRNEKRMLQEAVDALIDNGRRGRTVVGANNRALKSLSDIIEGKQGRFRQNLLGKRVDYSGRSVIVVGPKLKMHQCGLPKEMAIELFQPFVIHRLIRQNIVNNIKAAKKLIQKADDEVMQVLQEVIEGHPILLNRAPTLHRLGIQAFEPKLVGGRAIQLHPLVCPAFNADFDGDQMAVHVPLALEAQTEARMLMLASNNILSPATGEPIVTPSQDMVLGSYYLTALQPNYQKPEFGHNNTTFASLEDVIIAFEDKRLSLHEWVWVRFNGEVEDEDEMRSPLKTQDL

SEQ ID NO: 134064 - protein, 316 aa, Unknown
  Bacterial polypetide isolated from the Sargasso Sea
NKLDITSNDDKSVAKVVAEPLEKGFGQTIGNSLRRILLSSIQGAAVTAIQIDGVLHEFSSIKGVREDVTDIVLNVKNLAIKSSSSNPKKIVLDIKGPKEVKAKDITLVPEVKILNPEQTICNLDEKTNFHMELMVSTGKGYVQAPKNKSDDSPLGLIAIDSLFSPVKKVSFSVENTRAGSALDYDKLVMTVETNGTVDAEDAIAYSARIFQDQLSMFVNFEDPQEVVKEVKSSEPEFNRNLLKRVEELELSVRSMNCLKNDNIIYIGDLVQKTEPEMLRTPNFGRKSLNEIKEVLNTMSLYLGMEIPNWPPDNIAE

SEQ ID NO: 134065 - protein, 294 aa, Unknown
  Bacterial polypetide isolated from the Sargasso Sea
MKSLPSRIGLLLDMTLRDIERVLYFESYVVTEPGMTSLERRQMLTEEEYLDVLEEHGDEFEAKMGAEAILDILRGIDLATEIKQMREELPTINSETKRKKISKRLKLMEAFHTSGNKPEWMIMTVLPVLPPDLRPLVPLDGGRFATSDLNDLYRRVINRNNRLKRLLDLSAPDIIVRNEKRMLQEAVDALLDNGRRGRAITGSNKRPLKSLADMIKGKQGRFRQNLLGKRVDYSGRSVITVGPTLRLHQCGLPKKMALELFKPFIYGKLEARGLATTIKAAKKMVNVKKALYGT

SEQ ID NO: 134066 - protein, 321 aa, Unknown
  Bacterial polypetide isolated from the Sargasso Sea
MQSTSNIIDKNWKALIKPNKLEITSNEDKTIAKVIAEPLEKGFGQTIGNSLRRILLSSIQGAAVTAIQIDGVLHEFSSIKGVREDVTDIVLNVKNLAIKSSSTSPKKIILDIKGPKEVKAKDISLVPEIEILNPEQTICNLDEKTNFHMELMISTGKGYVPAPKNRSEDNPLGLISIDSLFSPVKKVSFAVENTRAGSALDYDKLVMSVETNGTVAAEDAVAYSARIFQDQLSMFVNFDDPKEVVKEVKSSEPEFNRNLLKRVEELELSVRSMNCLKNDNIIYIGDLVQKTEPEMLRTPNFGRKSLNEIKEVLNTMSLYLG

SEQ ID NO: 134067 - protein, 306 aa, Unknown
  Bacterial polypetide isolated from the Sargasso Sea
METTEVKIKNWKSLIKPPKLDVNLSDDKTYAKIVAEPLEKGYGLTLGNSLRRILLSSIRGTAVTAIQIDGVLHEFTSIKGVREDVTDIVLNVKSLALKSNSETTTKLILDAKGPGEIKASNITTSGDIEILNPDLVICNLDENTNFHMEMTVNNGKGYVSADMNKPEEPPLGLIPIDSLFSPVKKVSYSISTAREGKALDYDKLTMEVETNGSISAEDAVAYSARIFQDQLGMFVNFDEPQEVIVREQPTEPEFNKNLLRKVDELELSVRSMNCLKNDNIIYIGDLVSKSEGEMLRTPNFGRNLLM

SEQ ID NO: 134068 - protein, 189 aa, Unknown
  Bacterial polypetide isolated from the Sargasso Sea
MENLNIIDKNWKTLTKPSKLEITSNEDKSIAKVVAEPLEKGFGQTIGNALRRILLSSIQGAAVTAIQIDGVLHEFSSIKGVREDVTDIVLNVKNLAIKINSAGSKKLVLDATGPKEVKAKDITLVSGVEILNLDQTICNLDEKTKFHMEFIVNSGRGYVLAQKNKTDDTPLGLIAIDSLFSPVKKVSYK

SEQ ID NO: 134069 - protein, 331 aa, Unknown
  Bacterial polypetide isolated from the Sargasso Sea
CAKIFGPIKDYECLCGKYKRLKHRGVVCEKCGVEVTLSKVRRERMGHIELATPIAHIWYLKSLPSRMGLMLDMTLREIERILYFEAYVVVEPGMTDLERGQMLTEENYLEALENYGDDFEAKMGAEAIRELLLSIDLETEVQDLREEIPNTNSETKLRKLTKRLKLLEAFMNSGNKPEWMVMKVLPVLPPELRPLVPLDGGRFATSDLNDLYRRVINRNNRLKRLLDLNAPDIIVRNEKRMLQESVDALLDNGRRGRAITGTNKLPLKSLADMIKGKQGRFRQNLLGKRVDYSGRSVIVVGPTLRLHQCGIPKKMALELFKPFIFSKLERR

SEQ ID NO: 134070 - protein, 325 aa, Unknown
  Bacterial polypetide isolated from the Sargasso Sea
IIVRNEKRMCKEAVDALLDNGRRGRAMSGSNKRPLKSLTDMIKGKQGRFRQNLLGKRVDYSGRSVIVVGPELKLHQCGLPKKMALELFKPFIFSLLQRREFATTIKAAKKLVDSESPEVWDILDEVIREHPVLLNRAPTLHRLGIQAFEPVLVEGKAIQLHPLVCAAYNADFDGDQMAVHVPLTLEAQLEARSLMMATNNVLHPANGEPIIVPSQDVVLGLYYMTREAANEPGEGSIFSNTDQVKMAYDNDAVSLQSKIVVRVTEYQKDPDTGSLSSNVRRVETTVGRALVWEIVPKGLSYDIVNKTLTKKEISNLLNVSYRHLG

SEQ ID NO: 134071 - protein, 379 aa, Unknown
  Bacterial polypetide isolated from the Sargasso Sea
NSEISEAQNFNSIKISLASPEKIKSWTYGEIKKPETINYRTFRPEKDGLFCARIFGPIKDYECLCGKYKRMKFRGIICEKCGVEVTKSNVRRERMGHINLATPVAHIWFLKSLPSRIALAVDMKLKEIERVLYFENFIVVEPGLTGLQKNQLLNEEELAKYQDEYGEEAFTAGIGAEAVLEMLKNLDLENERKNLSIYIKETKSKVNEERAIKRLKLIESFIETGQKPEWMIMTVVPVIPPELRPLVPLDGGRFATSDLNDLYRRVINRNNRLKRLMDLKAPDIIVRNEKRMLQESVDALFDNGRRGRVITGTGKRPLKSLAEMLKGKQGRFRQNLLGKRVDYSGRSVIVVGPDLKLHECGLPKKMALELFKPFLYARL

SEQ ID NO: 134072 - protein, 303 aa, Unknown
  Bacterial polypetide isolated from the Sargasso Sea
FKTSEISEAQNFSKIKITLASPEKIKSWTYGEIKKPETINYRTFRPEKDGLFCARIFGPIKDYECLCGKYKRMKFRGIICEKCGVEVTKSNVRRERMGHINLATPVAHIWFLKSLPSRISLAIDMKLKEVERVLYFENFIVIEPGLTGLKKNQLLNEEELNKYQDEYGEEAFTAGIGAEAILEILKSINLEEERDLLKKTIKETKSKVAEERSIKRLKLIDSFIETGNKPEWMILTIVPVIPPELRPLVPLDGGRFATSDLNDLYRRVINRNNRLKRLMDLKAPDIIVRNEKRMLQESVDALF

SEQ ID NO: 134073 - protein, 332 aa, Unknown
  Bacterial polypetide isolated from the Sargasso Sea
GIVCDRCGVEVTEKKVRRDRVGHINLVVPVAHIWYFKSLPNKIGYLLGLPTKKLDMIIYYERYVVVQPGAATDAEGNPFNKMDFLTEEEYLNVLEKLPPENQFLEDSDPEKFIAKMGAECLIELLSRIDLDELSYELRHKANNETSKQRKTESLKRLQVVESFREANINKENKPEWMILKAIPVIPPELRPLVPLDGGRFATSDLNDLYRRVIIRNNRLKRLVEIKAPEVILRNEKRMLQESVDSLFDNTRKSSAVKTEANRPLKSLSDSLKGKQGRFRQNLLGKRVDYSARSVIVGGPTLKLYECGLPKDMAAELYKPFIVKKLIERGIVK

SEQ ID NO: 134074 - protein, 279 aa, Unknown
  Bacterial polypetide isolated from the Sargasso Sea
RIQIDGVLHEFSSISGVREDVIDIALNIKKIIFGADFNGSKILTIEKTGPGVVVAGDISTTDDIEVMNSDLVLCTLDENISFRMELYIRNGNGYVSAEENRNEDDPIGMIPVDSIYSPVTNVSYEVDNAREGEFLDYDRLSLSIETDGSVKPEDALAFSARILIDQLNPFINFDEPEEEIIEDSEDELEFNASLLKKVDELELSVRSANCLKNDNIVYIGDLILKSENEMLRTPNFGRKSLNEIKEVLSEMSLSLGMDIPNWPPENIEELARKHNADKF

SEQ ID NO: 134075 - protein, 319 aa, Unknown
  Bacterial polypetide isolated from the Sargasso Sea
KSNVRRERMGHINLATPVAHICFLKSLPSRISLAIDMKLKEVERVLYFENFIVIEPGLTGLKKNQLLGEEELIKYQDDYGEEAFTAGIGAEAILEILKSINLEEERDTLIKSIKETKSKVSEERSIKRLKLIESFIETGNKPEWMILTTVPVIPPELRPLVPLDGGRFATSDLNDLYRRVINRNNRLKRLIDLKAPDIIVRNEKRMLQESVDALFDNGRRGRVITGTSKRPLKSLAEMLKGKQGRFRQNLLGKRVDYSGRSVIVVGPDLKLHECGLPKKMALELFKPFLYARLNKLGLASTIKQAKKLVKRKEPKFGMH

SEQ ID NO: 134076 - protein, 332 aa, Unknown
  Bacterial polypetide isolated from the Sargasso Sea
MGAEAVRELVQHVDLKAEMEKLETDLESKSAQRRQRAIQRMKVIKPFADGKNPPEAMILEVVPVIPPELRPMVQLDGGRFATSDLNDLYRRLINRNNRLKKLIELGAPDIIISNEKRMLQESVDALFDNGRRGRAVAGAGGRGLKSLSDMLKGKQGRFRQNLLGKRVDYSARSVIVVGPHLELQQCGLPKMMALELFKPFVMKRLVELGLAQNIKSAKRMVERARAQVWDVLAEVIEEHPVLLNRAPTLHRLGIQAFEPILVEGKAIQVHPLVCEAFNADFDGDQMAVHVPLSAEAQAEARVLMMSTNNVLSPASGNPIVSQAKTWLLGFIT

SEQ ID NO: 134077 - protein, 315 aa, Unknown
  Bacterial polypetide isolated from the Sargasso Sea
MAAPVSHIWFMKSLPSRIATLLDMTIKNLEKVLYFEQFIVVEPGLTDLKKGEIISEEQYIDYQDEYGEDSFSASIGAEAIEQMLLNIDLEADYNQLKIELTETKSELKKTKITKRLKLIESFMVSKNKPEWMILRVLPVIPPELRPLVPLDGGRFATSDLNDLYRRVINRNNRLKRLIDLRAPDIIIRNEKRMLQESVDALFDNGRRGRVITSTNKRPLKSLSDMLKGKQGRFRQNLLGKRVDYSGRSVIVVGPNLKLHQCGLPKKMALELFKPFIFHKLDIYGWANTIKAAKKLVEKEDPRVWDILEEVIREHP

SEQ ID NO: 134078 - protein, 317 aa, Unknown
  Bacterial polypetide isolated from the Sargasso Sea
NRLKRLIDLRAPDIIIRNEKRMLQESVDALFDNGRRGRVITSTNKRPLKSLSDMLKGKQGRFRQNLLGKRVDYSGRSVIVVGPNLKLHQCGIPKKMALELFKPFIFHKLDIYGWANTIKAAKKLVEKEDPRVWDILEEVIREHPVLLNRAPTLHRLGIQAFEPILIEGKSIQLHPLVCTAFNADFDGDQMAVHVPLSLEAQLEARVLMMSTNNILHPASGKPIIVPSQDIILGIYYLSIMREKQIGEGRSFVDLNEILKALENNDITLHSKILARIETSEGNLLKAETTPGRMILGNILPKNKNINYEMINKVLTKK

SEQ ID NO: 134079 - protein, 297 aa, Unknown
  Bacterial polypetide isolated from the Sargasso Sea
RAPTLHRLGIQAFEPILVEGKAIQVHPLVCEAFNADFDGDQMAVHVPLSAEAQAEARVLMLATNNVLSPASGNPIVSPSQDMVIGLYYITECHDELDTAEYAFADLNEAQLAYEAGHISLQTPIKVRVGNLAGSEDIYKKIKNRFSELLTPEYVSGDTLTNTTLGRMHFNSILPDDFPYIEASVRKPEMKKIISEVIETYNKAELRQFLDSMKKVGFNFGAKAGLSVAMTDVKTPPTKNQILEKYENEAEKVEKLYTDDIITETERKQKIIEIWNEATDQVQYAMSAELESERFNPR

SEQ ID NO: 134080 - protein, 278 aa, Unknown
  Bacterial polypetide isolated from the Sargasso Sea
AESIHDILKDLDLQDSLNQIQQDMEATASQIKIKRYQKRLKLIESLISSGNRPEWMILKVLPILPPDLRPLVPLDGGRFATSDLNDLYRRVINRNNRLQRLLDLNAPDIIVRNEKRMLQKSVDALLDNGRMGRAVTGSNKRPLKSLADMIKGKQGRFRQNLLGKRVDYSGRSVIVVGPTLKLHQCGIPKKMALELFKPFVFSKLIYQGEASTIKSAKRLVELEGPEIWDILDGVIRQHPVLLNRAPTLHRLGIQAFEPVLVEGKAIQLHPLVARHQCR

SEQ ID NO: 134081 - protein, 329 aa, Unknown
  Bacterial polypetide isolated from the Sargasso Sea
GIPKKMALELFKPFIYAKLELYGMATTIKAAKRMVEKDRPEVWDILEEVIREHPVLLNRAPTLHRLGVQAFEPILVEGKAIRLHPLVCTAFNADFDGDQMAVHVPLSIESQLEARVLMMSTNNILSPANGKPIIVPSQDIILGLYFMTMERDNEKGQGMEFADKAEVLMALNTNVISLHAKIKARMNYPSEDGKHKVKLVNTTPGRVKLSEILPDNASVNFDVLNQLMTKKQVTNVIDYIYRHCGQKDTVIFADKMMSLGFNQACQSGISFGISDLTTPVKKDGMVKDADNKVKEFEQQYLDGLITKREKYNKVIDLWTNVSDNLAAEM

SEQ ID NO: 134082 - protein, 313 aa, Unknown
  Bacterial polypetide isolated from the Sargasso Sea
MNVLAPEVAKVDELDKNNLRVVLEPFERGFGYTIGHSLRRIMLSYMPGAAITEVKIDGVSHEYGTIEGIKEDILDVLLNLKDLAIKLDGPAKAELKLDVKTPKTITASDLELPAGVEVMDPDHVIATLVEPKKLVMTLKVETGTGYVPSENNKNKSVDSLHLDAIFSPVKRVNYKVENTRVENRTDLDKLILDLETDGTIDPKQAVKYAATIMQHQLAVFVDEELVSRKEKRKDKYDFDPLLLRSIEELELTVRSTNCLKAENIFLIGDLIQRSEMDLLKTPNLGKKSLNEIKDELASRGLSLGTILKNWPPM

SEQ ID NO: 134083 - protein, 240 aa, Unknown
  Bacterial polypetide isolated from the Sargasso Sea
RLIRQNIVNNIKAAKKLIQKADDEVMQVLQEVIDGHPILLNRAPTLHRLGIQAFEPKLVAGRAIQLHPLVCPAFNADFDGDQMAVHVPLAIEAQTEARMLMLASNNILSPATGDPIVTPSQDMVLGSYYLTAIQPHANQPKFGDHAHTYASLEDVLQALEDKRIDLHDWVWVRFSGEIEDDDELQKPRKSETLKDGTRIEEWTYRRDRLDEEGSLISRYILTTVGRVVMNHTIIDAVAAT

SEQ ID NO: 134084 - protein, 176 aa, Unknown
  Bacterial polypetide isolated from the Sargasso Sea
MQYQIDRIDHQIADDRSQTGTFLIGPLERGQATTLGNSLRRVLMGGLEGSAVTAVRIAGINHEYATIPGVREDVLDILLNCKQLSLNSSNPELEIGRLVASGPMDVKANDIQFSSQVEIVDGEKPIATIQEGHNLELEIHVERGVGYRPVDRKSEETNAIDLLQVDAVFMPVKRVN

SEQ ID NO: 134085 - protein, 263 aa, Unknown
  Bacterial polypetide isolated from the Sargasso Sea
FVPEFFGPTKDYECLCGKYKRMKFKGITCEKCGVEVTLSKVRRERMAHIELAAPVAHIWFLKSLPSRIGLALDITLKNLEKVLYFESHIVIDPLMSGLSHNQLLNDEELDEAIDQFGEDSFKHGIGAEAVQEILSKINLQTEIEKLVEESEATSSETKKKKILKRMKVMEGFKNSNIKPEWMVLKVLPVIPPELRPLVPLEGGRFATSDLNDLYRRVINRNNRLKRLLDLRAPDIIVRNEKRMLQESVDALFDNGRRGRVITS

SEQ ID NO: 134086 - protein, 296 aa, Unknown
  Bacterial polypetide isolated from the Sargasso Sea
EPNLNESKAIQLHPLVCTAFNADFDGDQMAVHIPLSLEAQLEARVLMMSTNNILSPSSGKPIIVPSQDIVLGIYYLSLINEKEDAKKYYSHVGEVEFALENKTIELHTPILFRTKVYNLETDSFEHKKFKTSAGRVILFKTVPQNKNLPFDVINKVLTKKDISNLLDSVYRFTGQKATCIFVDQIMNVGFKYAAKAGISFGKDDLVIPDEKNVLIQDTQKLVNSLENQYQEGLITEREKYNKVVGLWSTCTDKVAKAMMKTVSSNKDSQINSVYIMADSGARGSEAQLKQLAGMRG

SEQ ID NO: 134087 - protein, 285 aa, Unknown
  Bacterial polypetide isolated from the Sargasso Sea
MKDLLKLFNQGEQEDFNAIKAGLASPQQIRSWSFGEVKKPETINYRTFKPERDGLFCAKIFGPIKDYECICGKYKRMKHRGVVCEKCGVEVTLAKVRRERMGHIELAAPVAHIWFLKSLPSRIALLLDMTLRELERILYFESFVVTDPGMTDLESCQILDEEEYYEALENYGEEFRAGMGAEAVKTLLIEMDLEEEIALIEQQMTETKSEAKIKKLSKRMKIIKSFSNSSNKPEWMILDVLPVLPPDLRPLVPLEGGRFATSDLNDLYRRVINRNNRLKRLMELN

SEQ ID NO: 134088 - protein, 290 aa, Unknown
  Bacterial polypetide isolated from the Sargasso Sea
MLKGKQGRFRQNLLGKRVDYSGRSVIVVGPELKLHQCGLPKKMALELFKPFLYARLDKLGFATTIKQAKRMVEKQKSEVWDALEHIIREHPVILNRAPTLHRLGVQAFEAKLIEGNAIELHPLVCAAFNADFDGDQMAVHVPLSLEAQIEARVLMMSTNNILSPSNGKPIIVPSQDIVLGIYYLSQHKDDTKSKPVGIFSDVDEIENAIERKDISVHSKIVSVFNTIDKDGNKISEKHTSTAGRFLLSKTLPKNHKIKFDLVNKLLTKKAVSETIDTVYRYCGQKETVIF

SEQ ID NO: 134089 - protein, 261 aa, Unknown
  Bacterial polypetide isolated from the Sargasso Sea
NEKRMLQESVDALFDNGRRGRVITSTNKRPLKSLSDMLKGKQGRFRQNLLGKRVDYSGRSVIVVGPNLKLHQCGIPKKMALELFKPFIFHKLDIYGWANTIKAAKKLVEKEDPRVWDILEEVIREHPVLLNRAPTLHRLGIQAFEPVLIEGKSIQLHPLVCTAFNADFDGDQMAVHVPLSLEAQLEARVLMMSTNNILSPSSGKPIIVPSQDIVLGIYYLSVMRNNQKGEGRNFLDTNEILKAVELKDITLHSKINVRIKQ

SEQ ID NO: 134090 - protein, 257 aa, Unknown
  Bacterial polypetide isolated from the Sargasso Sea
QQLELANTIKLAKRMVDREEPEVWDILDEVIREHPVMLNRAPTLHRLGIQAFEPVLVEGKAIQLHPLVCKAYNADFDGDQMAVHVPLTLEAQLECRALMMATNNILSPSNGKPIIDPSQDVVLGLYYMSREKVNDLGEGRIMSSPDEVNRAYYSRTVGLQAKIKVRLKPNKLDDEPSEIVETTTGRTLLYELLPEGMSFDLVNKTLDSKQISSLIDFVYRKAGLKRTVIFADRLMYLGYEFSTKSGSSIGIDDFCHS

SEQ ID NO: 134091 - protein, 294 aa, Unknown
  Bacterial polypetide isolated from the Sargasso Sea
MGHINLATPVAHIWFLKSLPSRIALAVDMKLKEIERVLYFENFIVIEPGLTGLQKNQLLNEEELAKYQDEFGEESFTAGIGAEAVLEMLKNLDLEQERKNLVNFIKETKSKVNEERAIKRLKLVESFIETGQKPEWMIMTVVPVIPPELRPLVPLDGGRFATSDLNDLYRRVINRNNRLKRLMDLKAPDIIVRNEKRMLQESVDALFDNGRRGRVITGTGKRPLKSLAEMLKGKQGRFRQNLLGKRVDYSGRSVIVVGPDLKLHECGLPKKMALELFKPFLYARLNKLGLASTL

SEQ ID NO: 134092 - protein, 289 aa, Unknown
  Bacterial polypetide isolated from the Sargasso Sea
MAKNIIKNETNNLQEKSFTSIMITLASPEKIKSWSFGEIKKPETINYRTFRPEKDGLFCARIFGPVKDYECLCGKYKRMKFRGIICEKCGVEITKSNVRRERMGHIELACPVAHIWFLKSLPSRISLAIDMKLKEVEKVLYFESFIVIEPGLTTLKKGQLLTEEALIKAQEEFGEDAFSAGIGAEAVREILLNLDLQKEQKKLRDSLKEIKSKVTEERTVKRLKLIESFINSGNKPEWMILTTVPVIPPELRPLVPLDGGRFATSDLNDLYRRVINRNNRLKRLLDLKA

SEQ ID NO: 134093 - protein, 232 aa, Unknown
  Bacterial polypetide isolated from the Sargasso Sea
MSIEKNWRELLKPNVVNMESGSDPLKKSTLVVEPLERGYGITLGNALRRVLLSSLQGSAVYGFKIDGVLHEFSSISGVREDVIDIALNIKKIIFGADFNGSKILTIEKTGPGVVVAGDISTTDDIEVMNSDLVLCTLDENISFRMELYIRNGNGYVSAEENRNEDDPIGMIPVDSIYSPVTNVSYEVDNAREGEFLDYDRLSLSIETDGSVKPEDALAFSARILIDQLNPFI

SEQ ID NO: 134094 - protein, 100 aa, Unknown
  Bacterial polypetide isolated from the Sargasso Sea
MTNSNLRTENHFDYVKISIASPQRIMDWGQRTLPNGQVVGEVTKPETINYRTLKPEMDGLFCEKIFGPSKDWECHCGKYKRVRHRGIVCERCGVEVTESR

SEQ ID NO: 134095 - protein, 142 aa, Unknown
  Bacterial polypetide isolated from the Sargasso Sea
METENVNIKNWKSLIKPAKLEVKMSDDLVNAKIVAEPLEKGFGLTLGNSLRRILLSSIRGAAVTSIQIDGVLHEFTSIKGVREDVTDIVLNVKSLALKCSSEGAKKLILDAKGPGEIKASDITPVADVEILNPDLVICNLDE

SEQ ID NO: 134096 - protein, 87 aa, Unknown
  Bacterial polypetide isolated from the Sargasso Sea
MIHKNWQELIRPSSVSIKPGGDSKSKATIVTEPLERGFGLTLGNALRRILLSSLQGASIVSVQIDGVLHEFSSLAGVREDVTDIILN

SEQ ID NO: 134097 - protein, 291 aa, Unknown
  Bacterial polypetide isolated from the Sargasso Sea
IEPGLTGLKKNQLLGEEELIKSIKMSMGEESFTAGIGAEAILEILKSIDLEQEKELLIKSIKETKSKVSEERSIKRLKLIESFIETGNKPEWMILTTIPVIPPELRPLVPLDGGRFATSDLNDLYRRVINRNNRLKRLMDLKAPDIIVRNEKRMLQESVDALFDNGRRGRVITGTGKRPLKSLAEMLKGKQGRFRQNLLGKRVDYSGRSVIVVGPDLKLHECGLPKKMALELFKPFLYARLNKLGLASTIKQAKKLVERERNEVWDALELIVREHPVILNRAPTLHRLGVQ

SEQ ID NO: 134098 - protein, 252 aa, Unknown
  Bacterial polypetide isolated from the Sargasso Sea
MTNSNLRTENHFDYVKISIASPQRIMDWGQRTLPNGQVVGEVTKPETINYRTLKPEMDGLFCEKIFGPSKDWECHCGKYKRVRHRGIVCERCGVEVTESRVRRHRMGYIKLAAPVSHVWYLKGIPSYVAILLDIPLRDVEQIVYFNCYVVLDPGDHKELKYKQLLTEDEWLEIEDEIYAEDSTIENEPFVGIGAEALKQLLEDLDLNQVAEELREEITNSKGQKRAKLIKRIRVIDNFIATKCETRMDGFRR

SEQ ID NO: 134099 - protein, 301 aa, Unknown
  Bacterial polypetide isolated from the Sargasso Sea
VNKRPLKSLSDMLKGKQGRFRQNLLGKRVDYSGRSVIVVGPELKLHQCGLPKKMALELFKPFIYSKLELYGLANTIKAAKRMVEKERPEVWDILEEVIREHPVLLNRAPTLHRLGIQAFEPVLIEGKAVNLHPLVCTAFNADFDGDQMAVHVPLSLEAQLEARVLMMSTNNILSPSSGKPIIVPSQDIILGLYYLSMLKNKAKGENMIFASSDEALIALDHGKVDLQAKVKIRISSVDENGNKNIKLVETSPGRAKLSKILPNHSSITFEILNKLMTKKEVTNVIDYVYRHCGQKETVIFL

SEQ ID NO: 134100 - protein, 299 aa, Unknown
  Bacterial polypetide isolated from the Sargasso Sea
VLDPGDSELETLELVEEDQYRELEENHPDLKLGMGAEAIQTLLRRIELEELENQLQIEMREVNSETRRKRIAKRLNVISRLLKSGNAVDSMIIDNLPVLPPELRPLVPLEGGRFATSDLNDLYRRVIHRNNRLKRLIELRAPAIIVKNEKRMLQESVDALFDNGRRGRPMVGSNKRPLKSISDMLKGKQGRFRQNLLGKRVDYSGRTVIVVGPELKLHQCGLPKKMALELFKPFIFHKLIDYQEIHTIKNAKKVLEENPPEVWAILEEVVREHPVLLNRAPTLHRLGIQAFEPILIEGK

SEQ ID NO: 134101 - protein, 195 aa, Unknown
  Bacterial polypetide isolated from the Sargasso Sea
MQISVIDLLVPTEIQVENVSDTVSKVTLEPLERGFGHTLGNALRRILLSSMPGAAVTDVVIDGISHEYSTIEGVREDVIDILLNLKDMPVKLIEGNEAELKLSVNGPCEVTSSSFEAPGNVELTDADHHVVSLVDKIKLNMSVFVRTGRGYEPADIRDDENNTVGGLKVDASFSPVKRVSYSVENARFEKRTDLD

SEQ ID NO: 134102 - protein, 143 aa, Unknown
  Bacterial polypetide isolated from the Sargasso Sea
MEVENVNIKNWKSLIKPSKLDVQISDDLTHAKIVAEPLEKGFGLTLGNSLRRILLSSIRGTAVTSIQIDGVLHEFTSIKGVREDVTDIVLNVKSLALKSSSEGTKKLVLDAKGPGEIKASDIMQVADVEILNPDLVICNLDEK

SEQ ID NO: 134103 - protein, 252 aa, Unknown
  Bacterial polypetide isolated from the Sargasso Sea
VPVIPPELRPLVPLDGGRFATSDLNDLYRRVINRNNRLKRLLDLKAPEIIVRNEKRMLQESVDALFDNGRRGRVITGTGKRPLKSLAEMLKGKQGRFRQNLLGKRVDYSGRSVIVVGPELKLHQCGLPKKMALELFKPFLYARLAKLGLATTIKQAKRMVEKQRSEVWDSLEHIIREHPILLNRAPTLHRLGVQAFEAKLIEGNAIELHPLVCAAFNADFDGDQMAVHIPLSLEAQLEARVLMMSTNNILSP

SEQ ID NO: 134104 - protein, 183 aa, Unknown
  Bacterial polypetide isolated from the Sargasso Sea
MQGSVTEFLKPRLVGIEKINPTRAKVTLEPLERGFGHTLGNALRRILLSSMPGCAVTEVEIDGVLHEYSAKEGVQEDIIDILLNLKGLAVRLEDKDEVTLTLTKKGAGPVTAGDIQRGDGVVIVNPEHVICNLTGETEFSMRLKVQRGRGYVPASARVSSEDDERPIGRLLLDASFSPVERIA

SEQ ID NO: 134105 - protein, 303 aa, Unknown
  Bacterial polypetide isolated from the Sargasso Sea
PIKDYECLCGKYKRMKFRGIICEKCGVEVTKSNVRRERMGHINLATPVAHIWFLKSLPSRIALAVDMKLKEIERVLYFENFIVIEPGLTGLQKNQLLNEEELAKYQDEFGEEAFTAGIGAEAVLEMLKNLDLELERKNLTNYIKETKSKVNEERAIKRLKLIESFIETGQKPEWMIMTVVPVIPPELRPLVPLDGGRFATSDLNDLYRRVINRNNRLKRLMDLKAPDIIVRNEKRMLQESVDALFDNGRRGRVITGTGKRPLKSLAEMLKGKQGRFRQNLLGKRVDYSGRSEIVVGPDLKLHE

SEQ ID NO: 134106 - protein, 102 aa, Unknown
  Bacterial polypetide isolated from the Sargasso Sea
MTNSNLRTENHFDYVKITLASPERVMEWGQRTLPNGQVVGEVTKPETINYRTLKPEMDGLFCEKIFGPSKDWECHCGKYKRVRHRGIVCERCGVEVTESRVR

SEQ ID NO: 134107 - protein, 323 aa, Unknown
  Bacterial polypetide isolated from the Sargasso Sea
IPPELRPLVPLDGGRFATSDLNDLYRRVINRNNRLKRLIDLRAPDIIIRNEKRMLQESVDALFDNGRRGRVITSTNKRPLKSLSDMLKGKQGRFRQNLLGKRVDYSGRSVIVVGPNLKLHQCGIPKKMALELFKPFIFHKLDIYGWANTIKAAKKLVEKEDPRVWDILEEVIREHPVLLNRAPTLHRLGIQAFEPTLIEGKSIQLHPLVCTAFNADFDGDQMAVHVPLSLESQLEARVLMMSTNNILSPSSGKPIIVPSQDIVLGIYYLSIMRSNQKGEARNFVDLNEVLKALENNDVTLHSKILARIRNNDGSFSKTETTPG

SEQ ID NO: 134108 - protein, 192 aa, Unknown
  Bacterial polypetide isolated from the Sargasso Sea
MLDIFKSFLTPNNIQVQMFSPTHSKIVLEPLERGFGHTLGNALRRILLSSMPGAAITQVKITDVLHEYGSIDGIREDVVDILMNLKGIAINLHDREEVVLHLRKSGEGVVTAGDITLEQDVEIINPDHVIAHMTESGSLEMQLVVRTGRGYQPVNRMLPDETSREIGALLLDASYSPVSRVTYSVENARVEN

SEQ ID NO: 134109 - protein, 292 aa, Unknown
  Bacterial polypetide isolated from the Sargasso Sea
MATEIKQMREELPTINSETKRKKISKRLKLMEAFHTSGNKPEWMIMTVLPVLPPDLRPLVPLDGGRFATSDLNDLYRRVINRNNRLKRLLDLSAPDIIVRNEKRMLQEAVDALLDNGRRGRAITGSNKRPLKSLADMIKGKQGRFRQNLLGKRVDYSGRSVITVGPTLRLHQCGLPKKMALELFKPFIYGKLEARGLATTIKAAKKMVEREEGAVWDVLDEVIREHPVLLNRAPTLHRLGIQAFEPVLIEGKAIQLHPLVCAAYNADFDGDQMAVHVPLTLEAQLEARALMM

SEQ ID NO: 134110 - protein, 336 aa, Unknown
  Bacterial polypetide isolated from the Sargasso Sea
RVITGTNKRPLKSLADMIKGKGGRFRQNLLGKRVDYSGRSVIVAGPNLKLHQCGLPKKMALELFKPFVYGKLENRELATTIKAAKKLVERETPEVWEVLEEVIREHPVLLNRAPTLHRLGLQAFEPKLIEGKAIQLHPLVCVAFNADFDGDQMAVHVPLTLEAQLEARALMMSTNNILSPADGSPIINPTQDVVLGLYYMTRDNANAIGAGRTFSNPDEVLRAYETENLEIHSPIKVRVTHENGETSIEDTTVGRILIWRITPAEVGFKNINNVLNKKLVSKLVDTSYRKAGLKKTVIFADQLMYLGFDFSTRSGSSIGVNDFVIPEEKAKIIDFI

SEQ ID NO: 134111 - protein, 281 aa, Unknown
  Bacterial polypetide isolated from the Sargasso Sea
ERGFGLTLGNALRRVMLSSLQGAAITSVKFKGVVHEFTTIPGVKEDLTDILLNLKSVAVKVYSPGLKKMYIKTSASGEIRAGNFETDSETEIMNPDQLIMTLDDNADVEIEANIETGKGYVSADVAVEEDKTIGEIQLDAMFSPVKKVTYKVDNSRVGQVTDYDKLVMEVETNGSIPPDDAIALASRILQDQLQPFINFDEPEIQQDTSAHQKLSFNPNLLKKVEELELSVRSANCLKNDNIIYIGDLVQKSESEMLRTPNFGRKSLNEIKEVLQQMELNL

SEQ ID NO: 134112 - protein, 295 aa, Unknown
  Bacterial polypetide isolated from the Sargasso Sea
EGNAIELHPLVCAAFNADFDGDQMAVHIPLSLEAQLEARVLMMSTNNILSPSNGKPIIVPSQDMILGIYYLSQPPLQTKRIDGYFVDNSEIEHALESGQIKVHSRIISRFQTVDEKGNTKYEKYTSTAGRFLLANLLPNNKNINFSLIDRSLPKKVVSEIIDIVFRFTGQKKTVIFCDKLKDLGFKHAFNAGISFGKDDLIIPDNKELLINETKKLISDYETQYSEGLITRGEKYNKVVDAWSKCTDKVAGEMMKKISETKVINEELKINSVFMMADSGARGSAAQMKQLAGMRG

SEQ ID NO: 134113 - protein, 201 aa, Unknown
  Bacterial polypetide isolated from the Sargasso Sea
METTNVNIKNWKSLIKPAKLDIQLSDDKSYAKIIAEPLEKGYGLTLGNSLRRILLSSIRGTAVTSIQIDGVLHEFSSIKGVREDVTDIVLNVKSLALKSNIESSKKLILDAKGPGQIKASDISSIADIEILNPDLVICNLDENTNFHMEMTVGSGKGYIPADMNKPEEPPLGLIPIDSLFSPVKKVSYSVSTAREGKALDY

SEQ ID NO: 134114 - protein, 223 aa, Unknown
  Bacterial polypetide isolated from the Sargasso Sea
SDIAPVADVEILNPDLVICNLDENTTFHMEMNVNTGKGYVPAELNKPEEPPLGLIAIDSLYSPVKKVSYSVSTAREGKALDYDKLIMEVETNGSISAEDAVAYSARIFQDQLKMFINFDEPVEAPVKEVSTEPEFNKNLLRKVDELELSVRSMNCLKNDNIIYIGDLVQKSEGEMLRTPNFGRKSLNEIKEVLTGMSLYLGMEIPNWPPDNIAEMSKKLEEAI

SEQ ID NO: 134115 - protein, 248 aa, Unknown
  Bacterial polypetide isolated from the Sargasso Sea
FCARIFGPIKDYECLCGKYKRMKFRGIICEKCGVEVTRSNVRRDRMGHIELATPVAHIWFLKSLPSRISAAIDMKLKDVEKVLYFESFLVIEPGLTKLKKNQLLTEEEYVKAQEEYGTDSFEAGIGAEAIREILLKLDLKEEKEKLRLILKDIKSKVSEERAIKRLKLIESFIDSGNKPEWMILTCIPVIPPELRPLVPLDGGRFATSDLNDLYRRVINRNNRLKRLIDLKAPDIIVRNEKRMLQESV

SEQ ID NO: 134116 - protein, 290 aa, Unknown
  Bacterial polypetide isolated from the Sargasso Sea
EQGFGHTLGNALRRIILSSMPGTAVSEVKIDGVLHEYSTIEGVQEDVIDILLNLKDLSVRLTEVEDALLTLSKSGSGVVTAADIELSTGVEVINPDHHIATLNEEGSINMTMKVTRGRGFVPVRPLDEDEGQETGLLRLDATYSPIKRVTYQVDNARVEQRTNLDRLTVDIDTDGTLEAEEILRISATILQHQLSAFAELGRLEEVIEEKEEAKIDPIMLRPVDELELTVRSANCLKAENIHYIGDLVTRMESDLLRTPNLGKKSLNEIKEVLLSRGLSLGLILDNWPPE

SEQ ID NO: 134117 - protein, 221 aa, Unknown
  Bacterial polypetide isolated from the Sargasso Sea
MQPSNIIDKNWKALIKPSKLEIVNNEDKSIAKVIAEPLEKGFGQTIGNSLRRILLSSIQGAAVTAIQIDGVLHEFSSIKGVREDVTDIVLNVKNLAIKSETTSSKKIILDVKGPKEVKAKDITLVAGVEILNPEQTICNLDEKTNFHMELFVNSGKGYMPAPKNKSDESPLGLIALDSLFSPVKKVSFIIENTRAGSGFDYDKLVMTVETNGTVAAEDAML

SEQ ID NO: 134118 - protein, 218 aa, Unknown
  Bacterial polypetide isolated from the Sargasso Sea
MQYQIERIDHQIADDRSQTGTFLIGPLERGQATTLGNSLRRVLMGGLEGSAVTAVRIAGINHEYATIPGVREDVLDILLNCKQLSINSSNPELEIGRLVASGPMEVKANDIQFSSQVEIVDGEKPIATIQDGHNLELEIHVERGVGYRPVDRKSEETTAIDLLQIDAVFMPVKRVNFTIDETAVAEGGTGRERLKMEVVTDGSTSPDDAIAEAANQLI

SEQ ID NO: 134119 - protein, 278 aa, Unknown
  Bacterial polypetide isolated from the Sargasso Sea
CGLPKDMAAELYKPFIIRKLIERGIVKTVKSAKKIIDRREPVVWDILENVLKGHPVLLNRAPTLHRLGIQAFQPKLIEGKAIQLHPLTCTAFNADFDGDQMAVHLPLGPEAILEAQLLMLGSHNILNPANGSPITVPSQDMVLGLYYMTKSRKSSESLQLKGEGLTFYSPEEVNMAYNEKIVDLNAIIKCKVKTSKSDESYEIIETTPGRIFFNEVVPVKAGFFNEVLTKKNLREIIGQILYSTSVPETAEFLDKIKDLGYTFAFKGGLSFSLGDIII

SEQ ID NO: 134120 - protein, 240 aa, Unknown
  Bacterial polypetide isolated from the Sargasso Sea
LLNIKDMPINLIEGDSAEVTLDVKGPCDVLASSFDVPGNVELVNQDFHIATIVDKVNLKMTLTVRNGRGYEPADLREDEDRVVGALKVDASYSPVRRVSYTVDNARSGKRTDLDKLVLELETDGTLDPKMAIEHSATILQQQLGAFVDLDAIAEQEAKKDQNDFDPILLRSIEELELTVRSTNCLKAESIFLIGDLIHRSEFDLLKTPNLGKKSLNEIKDVLASKDLSLGMNVENWPPVG

SEQ ID NO: 134121 - protein, 282 aa, Unknown
  Bacterial polypetide isolated from the Sargasso Sea
MEKNLTKNILNRLPENNFSNIKITLASPDKIKSWSFGEIKKPETINYRTFRPEKDGLFCARIFGPVKDYECLCGKYKRMKFRGIICEKCGVEITKSNVRRERMGHIDLACPVAHIWFLKSLPSRIALTIDMKLKEVEKVLYFESFIVIEPGLTNLKKGQLLTEEELTKAQDEFGEDSFTAGIGAEAVREILINLDLLAEQKKLRSSLNEIKSKVTEERTIKRLKLVESFISSGNKPEWMILTTVPVIPPELRPLVPLDGGRFATSDLNDLYRRVINRNNRLK

SEQ ID NO: 134122 - protein, 165 aa, Unknown
  Bacterial polypetide isolated from the Sargasso Sea
YRPVDRKSEETNAIDLLQVDAVFMPVKRVNFTIDETAVAEGGSGRERLKMEVVTDGSTSPDDAIAEAANQLIELFQPLATVTMVEEIPEEPEPSPEAQIPLEELNLSVRAYNCLKRAQVNSVSDLMGFSYEDLLEIKNFGSKSADEVIEALERIGISIPQSRTSV

SEQ ID NO: 134123 - protein, 247 aa, Unknown
  Bacterial polypetide isolated from the Sargasso Sea
ATTIKQAKRLVEKEKSEVWDSLEHIIREHPILLNRAPTLHRLGVQAFEAKLIEGNAIELHPLVCAAFNADFDGDQMAVHIPLSLEAQLEARVLMMSTNNILSPSNGKPIIVPSQDIVLGIYYLSQSEDNDKKPKGIFSGIEEIEQGLENKSISLHSKITSIFKTIDEKGAVIIEKYTSTAGRFLLADVLPKNSNIKFSLINRLLTKKNVSEVIDTIFRYCGQKETVIFCDKIKTLGFKHAFKAGISF

SEQ ID NO: 134124 - protein, 278 aa, Unknown
  Bacterial polypetide isolated from the Sargasso Sea
IHCFDNTRKSSAVKTESNRPLKSLSDSLKGKQGRFRQNLLGKRVDYSARSVIVVGPELKLYECGLPKDMAAELYKPFIIRKLIERGIVKTVKSAKKIIDRREPIVWDILENVLKGHPVLLNRAPTLHRLGIQAFQPKLIEGKAIQLHPLTCTAFNADFDGDQMAVHLPLGPEAILESQLLMLGSHNILNPANGSPITVPSQDMVLGLYYMTKSRKSDDKKKLVGEGLTFYSSEEVKMAYNEEKVELNAIIKCKISNYDNELDQTTFKIIETTPGRIFF

SEQ ID NO: 134125 - protein, 246 aa, Unknown
  Bacterial polypetide isolated from the Sargasso Sea
MEVENVNIKNWKSLIKPSKLDVQISEDLTHAKIVAEPLEKGYGLTLGNSLRRILLSSIRGAAVTSIQIDGVLHEFTSIKGVREDVTDIVLNVKSLALKCNSEGAKKLVLDAKGPGEIKASDITPVSDVEILNPDLVICNLDENTNFHMEMNVNTGKGYVPAELNKPEEPPLGLIAIDSLYSPVKKVSYSISTAREGKALDYDKLIMEVETNGSISAEDAVAYSARIFQDQLKMFINFDEPVEAPVK

SEQ ID NO: 134126 - protein, 262 aa, Unknown
  Bacterial polypetide isolated from the Sargasso Sea
KKLVEKERPEVWDVLEEVITEHPVLLNRAPTLHRLGIQAFEPMLIEGKAIQLHPLVCTAFNADFDGDQMAVHVPLSLEAQLEARVLIMSTNNILSPSSGKPIIVPTQDMVLGIYYLSLMFEDDIGSGMAFTDIAEIEHALLAKKITLHSKIKCRYKFLNDDLKEESSIAETTAGRMMIYEILPKHQKIGLDLINKILTKKEVSNVIDAIYRHCGQTETVKFCDKIMVLGFEHACTAGISFGKDDLIIPKEKDQLVSEAKKDI

SEQ ID NO: 134127 - protein, 154 aa, Unknown
  Bacterial polypetide isolated from the Sargasso Sea
TAIDLLQIDAVFMPVKRVNFTIDETAVAEGGTGRERLKMEVVTDGSTSPDDAIAEAANQLIELFQPLATVTMVEEIPEEPEPSPEAQIPLEELNLSVRAYNCLKRAQVNSVSDLMGFSYEDLLEIKNFGSKSADEVIEALERIGISIPQSRTSV

SEQ ID NO: 134128 - protein, 320 aa, Unknown
  Bacterial polypetide isolated from the Sargasso Sea
MKKELTDLFRGSEISEAQNFNSIKISLASPEKIKSWTFGEIKKPETINYRTFRPEKDGLFCARIFGPIKDYECLCGKYKRMKFRGIICEKCGVEVTKSNVRRERMGHINLATPVAHIWFLKSLPSRIALAVDMKLKEIERVLYFENFIVIEPGLTGLQKNQLLNEEELAKYQDEFGEESFTAGIGAEAVLEMLKSLDLELERKNLVSFIKETKSKVNEERAIKRLKLIESFIETGQKPEWMIMTVVPVIPPELRPLVPLDGGRFATSDLNDLYRRVINRNNRLKRLMDLKAPDIIVRNEKRMLQESVDALFDNGRRGRVI

SEQ ID NO: 134129 - protein, 139 aa, Unknown
  Bacterial polypetide isolated from the Sargasso Sea
MTVNMKNWQELKKPNALEIKPTSDGKRKATFVAEPLERGFGLTLGNALRRVLLSSLQGAAVTSIKIENVLHEFSSLAGVREDVTDIVLNIKQVALRMEGDGPKRLQLSATGPAVVKAGDISVVGDIEVMNPDLVICHLD

SEQ ID NO: 134130 - protein, 251 aa, Unknown
  Bacterial polypetide isolated from the Sargasso Sea
METANVNLKNWKSLIKPGKLDINLNDDKSYAKIVAEPLEKGYGLTLGNSLRRILLSSIRGTAVTAIQIDGVLHEFTSIKGVREDVTDIVLNVKSLALKSTSEGSKKLVLDAKGPGVIKASDITKVNEIEILNPDLVICNLDENTNFHMEMTIGNGKGYVPAELNKPDEPPLGLIPIDSLFSPVKKVSYSVSTAREGKALDYDKLTMEIETNGSISAEDALAYSARIFQDQLGMFVNFDEPQEVTITEKPSE

SEQ ID NO: 134131 - protein, 272 aa, Unknown
  Bacterial polypetide isolated from the Sargasso Sea
FRQNLLGKRVDYSGRSVIVVGPELKLHQCGLPKKMALELFKPFLYARLAKLGLATTIKQAKRMVEKQRSEVWDSLEHIIREHPVILNRAPTLHRLGVQAFEAKLIEGNAIELHPLVCAAFNADFDGDQMAVHIPLSLEAQLEARVLMMSTNNILSPSNGKPIIVPSQDIVLGIYYLSQSKEAEDEKPKGIFLNVDEINNALERKLISVHSKIISQFSSVDKDGNKIIEKHQSTAGRFLLAETLPKHHKISFSLVNKLLNKKSVSEIIDTVYR

SEQ ID NO: 134132 - protein, 248 aa, Unknown
  Bacterial polypetide isolated from the Sargasso Sea
GRVITGTGKRPLKSLAEMLKGKQGRFRQNLLGKRVDYSGRSVIVVGPDLKLHECGLPKKMALELFKPFLYARLNKLGLASTIKQAKKLVDKETNAVWDALELIVREHPVILNRAPTLHRLGVQAFEPKLIEGDAIELHPLTCAAFNADFDGDQMAVHIPLSLEAQLEARILMMSTNNILSPSNGKPIIVPSQDMILGIYYLSQPPYQTEKVEGYFVNNSEIEQGLESGSINVHSRIISRFKTADKEGK

SEQ ID NO: 134133 - protein, 298 aa, Unknown
  Bacterial polypetide isolated from the Sargasso Sea
IKKPETINYRTFRPEKDGLFCARIFGPIKDYECLCGKYKRMKFRGIICEKCGVEVTKSNVRRERMGHINLATPVAHIWFLKSLPSRISLAIDMKLKEVERVLYFENFIVIEPGLTSLKKNQLLGEEELIKYQDEYGDEAFTAGIGAEAILEILKSINLEEEKSKLVNAIKETKSKVAEERSIKRLKLIESFIETGNKPEWMILTTIPVIPPELRPLVPLDGGRFATSDLNDLYRRVINRNNRLKRLMDLKAPDIIVRNEKRMLQESVDALFDNGRRGRVITGTGKRPLKSLAEMLKGK

SEQ ID NO: 134134 - protein, 248 aa, Unknown
  Bacterial polypetide isolated from the Sargasso Sea
TTRSKQANDPTRQGTVIAEPLERGFGLTIGNALRRVLMSSLQGAAITSIQIDNVLHEFSSVAGVREDVTDIVLNLKGVSLNMEVEGPKRLTVSSKGPGVVTAGDIEETAGIEILNKDHVICHLDDGADLNMELTVNTGNGYVAAEKNKPEDAPIGLIPIDAIYSPVKKVSYDVQPTREGQVLDYDKLTMNIETDGSVSPDDALAFAARILQDQLSIFVNFDEPEAANQNDEDDGLEFNPLLLKKVDEL

SEQ ID NO: 134135 - protein, 293 aa, Unknown
  Bacterial polypetide isolated from the Sargasso Sea
PQMVRSWSFGEVKKPETINYRTFKPERDGLFCAKIFGPIKDYECICGKYKRMKHRGVVCEKCGVEVTLAKVRRERMGHIELAAPVAHIWFLKSLPSRIGLLLDVTLREIERVLYFESFIVTDPGMTDLETGDILTEEEYIEAYDQYGDEFKAGMGAEAVKLLLEELDIEEEIRILREEIPQTNSETKLKKISKRLKLLEAFKASGNKPEWMIMDVLPVLPPDLRPLVPLEGGRFATSDLNDLYRRVINRNNRLKRLLELNAPDIIVRNEKRMLQESVDALLDNGRRGRVITGT

SEQ ID NO: 134136 - protein, 312 aa, Unknown
  Bacterial polypetide isolated from the Sargasso Sea
RMKFRGIICEKCGVEITKSNVRRERMGHINLATPVAHIWFLKSLPSRIALAVDMKLKEIERVLYFENFIVIEPGLTGLQKNQLLNEEELAKYQDEFGEEAFTAGIGAEAVLEMLKNLDLDQERKNLVNYIKETKSKVNEERAIKRLKLIESFIETGQKPEWMIMTVVPVIPPELRPLVPLDGGRFATSDLNDLYRRVINRNNRLKRLMDLKAPDIIVRNEKRMLQESVDALFDNGRRGRVITGTGKRPLKSLAEMLKGKQGRFRQNLLGKRVDYSGRSVIVVGPDLKLHECGLTKKMALELFKPFLYARLNK

SEQ ID NO: 134137 - protein, 83 aa, Unknown
  Bacterial polypetide isolated from the Sargasso Sea
VLIDPIMLRPVDELELTVRSANCLKAENANYIGDLVQKTEVELLRTPNLGKKSLNEIKEVLASHGLSLGMELENWPPKEAVVD

SEQ ID NO: 134138 - protein, 189 aa, Unknown
  Bacterial polypetide isolated from the Sargasso Sea
QAFEPKLVGGRAIQLHPLVCPALNADFDGDQMAVHVPLALESQTEARMLMLASNNILSPATGEPIVTPSQDMVLGSYYLTALQPNYHKPEFGDYKTTFASLEDVIFAFEDKRLSLHEWVWVRFNGEVEDEDEMLNPQKTQELEDGSKLEIWNFRRDRFDSYNNLISRFVLTTVGRVVMNYTIIDSVSKT

SEQ ID NO: 134139 - protein, 159 aa, Unknown
  Bacterial polypetide isolated from the Sargasso Sea
EGRRATAIDLLQIDAVFMPVKRVNFSIDETAVAEGGSGRERLKMEVVTDGSMSPDDAIAEAANQLIELFQPLATVTMVEEIPEEPEPSPEAQIPLEELNLSVRAYNCLKRAQVNSVSDLMGFSYEDLLEIKNFGSKSADEVIEALERIGISIPQSRTSV

SEQ ID NO: 134140 - protein, 267 aa, Unknown
  Bacterial polypetide isolated from the Sargasso Sea
MGGEAIKEMLTRISIMDLKKELEDIVKTSKSKQKRTDALKRLKVAYSFVPDPTKKRLNKPEWMIVSILPVIPPELRPLVPLEGGRFAASDLNDLYRRIIIRNNRLKQLMEIKAPDVILRNEKRMLQESVDALFDNSRRKTAIRSGSRRPLKSLSDMLRGKTGRFRQNLLGKRVDYSGRSVIVVGPQLKLQECGLPKNMALELFKPHMIRELMSRGYTQTPRSAKLMIENTEPVVYKVLEYVVKDHPVMLNRAPTLHRLGIQAFSPLS

SEQ ID NO: 134141 - protein, 162 aa, Unknown
  Bacterial polypetide isolated from the Sargasso Sea
ENNTVGGLKVDASFSPVKRVSYSVENARFEKRTDLDKLILELETDGTIDAKMAIEHSATIMQQQLAAFVDLEAIAEQEAKKEQNDFDPLLLRSIEELELTVRSTNCLKAESIFLIGDLIQRSEFDLLKTPNLGKKSLNEIKDVLASKGLSLGMVLDNWPPMG

SEQ ID NO: 134142 - protein, 295 aa, Unknown
  Bacterial polypetide isolated from the Sargasso Sea
YECLCEKYKRMKFRGIICEKCGVEVTKSNVRRERMGHINLATPVAHIWFLKSLPSRISLAIDMKLKEVERVLYFENFIVIEPGLTGLKKNQLLSEEELLKYQDEFGEESFSAGIGAEAILEILKSIDLAEERKNLVKSINETKSKVSEERSIKRLKLIESFVETGQKPEWMILTVIPVIPPELRPLVPLDGGRFATSDLNDLYRRVINRNNRLKRLMDLKAPDIIVRNEKRMLQESVDALFDNGRRGRVITGTGKRPLKSLAEMLKGKQGRFRQNLLGKRVDYSGRSVIVVGPDS

SEQ ID NO: 134143 - protein, 163 aa, Unknown
  Bacterial polypetide isolated from the Sargasso Sea
FSPVRKVAYKVDNTRVGQVTDHDKLSIDVTTNGAVNPEDAVALAARILQDQLNLFVNFEEPEDEVSEADKEELPFNKNLLRKVDELELSVRSANCLKNDNILYIGDLVQKSESDMLRTPNFGRKSLNEIKEVLGQMGLNLGMDVQSWPPENIENLVKRMEDPF

SEQ ID NO: 134144 - protein, 313 aa, Unknown
  Bacterial polypetide isolated from the Sargasso Sea
QKNQLLNEEELAKYQDEFGEEAFTAGIGAEAVLEMLKNLDLELEKTNLVKYINETKSKVNEERAIKRLKLIESFIETGQKPEWMIMTVVPVIPPELRPLVPLDGGRFATSDLNDLYRRVINRNNRLKRLMDLKAPDIIVRNEKRMLQESVDALFDNGRRGRVITGTGKRPLKSLAEMLKGKQGRFRQNLLGKRVDYSGRSVIVVGPDLKLHECGLPKKMALELFKPFLYARLNKLGLASTIKQAKKLVEKETNAVWDALELIVREHPVLLNRAPTLHRLGVQAFEPKLIEGDAIELHPFTCAAFNADFDGDQM

SEQ ID NO: 134145 - protein, 296 aa, Unknown
  Bacterial polypetide isolated from the Sargasso Sea
NWKALIKPNKLDITSNEDKTVAKVVAEPLEKGFGQTIGNSLRRILLSSIQGAAVTAIQIDGVLHEFSSIKGVREDVTDIVLNVKNLAIKSSSSNPKKIILDIKGPKEVKAKDITLVPEIEILNPEQTICNLDEKTHFHMELMVSTGKGYVQAPKNKTEDSPLGLISIDSLFSPVKKVSFSVENTRAGSALDYDKLIMTVETNGTVDAEDAIAYSARIFQDQLSMFVNFEDPKELVKEVKSSEPEFNRNLLKRVEELELSVRSMNCLKNDNIIYIGDLVQKTEPEMLRTPNFGRKSL

SEQ ID NO: 134146 - protein, 283 aa, Unknown
  Bacterial polypetide isolated from the Sargasso Sea
EKLRSSLKEIKSKVTEERTLKRLKLIESFIDSGNKPEDMILTTIPVIPPELRPLVPLDGGRFATSDLNDLYRRVINRNNRLKRLMDLKAPDIIVRNEKRMLQESVDALFDNGRRGRVITGTGKRPLKSLAEMLKGKQGRFRQNLLGKRVDYSGRSVIVVGPELKLHQCGLPKKMALELFKPFLYARLDKLGLATTIKQAKKMVEKQKPEVWDALEHIIREHPILLNRAPTLHRLGVQAFEAKLIEGNAIELHPLVCAAFNADFDGDQMAVHIPLSLEAQIEAR

SEQ ID NO: 134147 - protein, 267 aa, Unknown
  Bacterial polypetide isolated from the Sargasso Sea
NNRLKRLIDLRAPDIIIRNEKRMLQESVDALFDNGRRGRVITSTNKRPLKSLSDMLKGKQGRFRQNLLGKRVDYSGRSVIVVGPNLKLHQCGIPKKMALELFKPFIFHKLDIYGWANTIKAAKKLVEKEDPRVWDILEEVIREHPVLLNRAPTLHRLGIQAFEPVLIEGKSIQLHPLVCTAFNADFDGDQMAVHVPLSLESQLEARVLMMSTNNILSPSSGKPIIVPSQDIVLGIYYLSIIRENQKGENRFFLDINEIYKALENKDL

SEQ ID NO: 134148 - protein, 296 aa, Unknown
  Bacterial polypetide isolated from the Sargasso Sea
NYINGGLPKKMALELFKPFLYARLDKLGFATTIKQAKRMVEKQKSEVWDALEHIIREHPVILNRAPTLHRLGVQAFEAKLIEGNAIELHPLVCAAFNADFDGDQMAVHVPLSLEAQIEARVLMMSTNNILSPSNGKPIIVPSQDIVLGIYYLSQHKEDSNAKPVGIFSDVDEIENAIERKDISVHSRIVSIFNTVDKDGNKISEKYTSTAGRFLLSKTLPKNHRIKFELVNKLLTKKAVSEVIDTVYRYCGQKETVIFCDRIKDLGFKHAFKAGISFGKNDLIIPKTKEKLVSQTK

SEQ ID NO: 134149 - protein, 296 aa, Unknown
  Bacterial polypetide isolated from the Sargasso Sea
SIKITLASPEKIKSWTFGEIKKPETINYRTFRPEKDGLFCARIFGPIKDYECLCGKYKRMKFRGIICEKCGVEVTKSNVRRERMGHINLATPVAHIWFLKSLPSRISLVVDMKLKEVERVLYFENFIVIEPGLTNLKKNQLLSEEELIKYQDDYGEEAFTAGIGAEAILEILKSINLEEERELLIKNIKETKSKVNEERSIKRLKLIESFIETGNKPEWMILTTVPVIPPELRPLVPLDGGRFATSDLNDLYRRVINRNNRLKRLIDLKAPDIIVRNEKRMLQESVDALFDNGRRG

SEQ ID NO: 134150 - protein, 208 aa, Unknown
  Bacterial polypetide isolated from the Sargasso Sea
MEVENVNVKNWKSLIKPSKLDVQISDDLTHAKIIAEPLEKGYGLTLGNSLRRILLSSIRGAAVTSIQIDGVLHEFTSIKGVREDVTDIVLNVKSLALKCNSEGTKKLVLDAKGPGEIKASDINSVTDVEILNPELVICNLDENTTFHMEMNVNTGKGYVPAELNKPEEPPLGLIAIDSLYSPVKKVSYSVSTAREGKALDYDKINDGS

SEQ ID NO: 134151 - protein, 315 aa, Unknown
  Bacterial polypetide isolated from the Sargasso Sea
MKFRGIICEKCGVEVTKSNVRRERMGHIDLACPVAHIWFLKSLPSRISLAIDMKLKEVEKVLYFESFIVVEPGLTTLKKGQLISEEALIKAQEEFGEDAFTAGIGAEAVREILVNLDLKKEQQKLREALKEIKSKVTEERTIKRLKLIESFINSGNKPEWMILTSVPVIPPELRPLVPLDGGRFATSDLNDLYRRVINRNNRLKRLLDLKAPDIIVRNEKRMLQESVDALFDNGRRGRVITGTGKRPLKSLAEMLKGKQGRFRQNLLGKRVDYSGRSVIVVGPELKLHQCGLPKKMALELFKPFLYARLDKLGLA

SEQ ID NO: 134152 - protein, 146 aa, Unknown
  Bacterial polypetide isolated from the Sargasso Sea
QNLLGKRVDYSGRSVIVVGPELRLHQCGLPKKMALELFKPFIYSKLELYSLASTVKMAKRMVEKERPEVWDILEEVIREHPVMLNRAPTLHRLGIQAFEPVLVEGKAIQLHPLVCTAFNADFDGDQMAVHVPLSLEAQLEARVLMM

SEQ ID NO: 134153 - protein, 295 aa, Unknown
  Bacterial polypetide isolated from the Sargasso Sea
LEEEREALIKSIKETKSKVSEERSIKRLKLIESFIETGNKPEWMILTTVPVIPPELRPLVPLDGGRFATSDLNDLYRRVINRNNRLKRLIDLKAPDIIVRNEKRMLQESVDALFDNGRRGRVITGTGKRPLKSLAEMLKGKQGRFRQNLLGKRVDYSGRSVIVVGPDLKLHECGLPKKMALELFKPFLYARLNKLGLASTIKQAKKLVEKERNEVWDALELIVREHPVILNRAPTLHRLGVQAFEPKLIEGNAIELHPLTCAAFNADFDGDQMAVHVPLSLEAQLEAGVLMMSTK

SEQ ID NO: 134154 - protein, 124 aa, Unknown
  Bacterial polypetide isolated from the Sargasso Sea
TNATIEPEDAIRKAGKILREQLDVFTHLEVKEEEIEAADGPQIDPVLLRPVDDLELTVRSANCLKAESIYYIGDLVQRSENELLKTPNLGKKSLTEIKDVLATHSLSLGIKLEDWPPKNMEKRT

SEQ ID NO: 134155 - protein, 262 aa, Unknown
  Bacterial polypetide isolated from the Sargasso Sea
RRGRVITSTNKRPLKSLSDMLKGKQGRFRQNLLGKRVDYSGRSVIVVGPTLKLHQCGIPKKMALELFKPFIFHKLDTYGWANTIKSAKKLVEKEDPRVWDILEEVIREHPVLLNRAPTLHRLGIQAFEPLLIEGKSIQLHPLVCTAFNADFDGDQMAVHVPLSLEAQLEARVLMMSTNNILSPSSGKPIIVPSQDIVLGIYYLSIMRENQKGENRFFLDINEILKALENKDVTLHTKILCRIKNFEDNILKVETTPWKNDSC

SEQ ID NO: 134156 - protein, 292 aa, Unknown
  Bacterial polypetide isolated from the Sargasso Sea
NLTKNFNNNLLVPENNFNSIKITLASPEKIKSWSYGEIKKPETINYRTFRPEKDGLFCSRIFGPVKDYECLCGKYKRMKFRGIICEKCGVEVTKSNVRRERMGHIDLACPVAHIWFLKSLPSRISLAIDMKLKEVEKVLYFESFIVIEPGLTNLKKGQLLSEEALTKAQNEFGEDAFTAGIGAESVREILINLDLKKEQKKLRDSLAEIKSKVTEERTIKRLKLIESFISSGNKPEWMILTSVPVIPPELRPLVPLDGGRFATSDLNDLYRRVINRNNRLKRLLDLKAPDII

SEQ ID NO: 134157 - protein, 261 aa, Unknown
  Bacterial polypetide isolated from the Sargasso Sea
SNVRRERMGHINLATPVAHIWFLKSLPSRIALAVDMKLKEIERVLYFENFIVIEPGLTGLQKNQLLNEEELAKYQDEFGEETFTAGIGAEAVLEMLKNLDLELERKNLVSFIKETKSKVNEERAIKRLKLIESFIETGQKPEWMIMTVVPVIPPELRPLVPLDGGRFATSDLNDLYRRVINRNNRLKRLMDLKAPDIIVRNEKRMLQESVDALFDNGRRGRVITGTGKRPLKSLAEMLKGKQGRFRQNLLGKKGRLLWKIQ

SEQ ID NO: 134158 - protein, 278 aa, Unknown
  Bacterial polypetide isolated from the Sargasso Sea
MFDNGRRGRVITGTGKRPLKSLAEMLKGKQGRFRQNLLGKRVDYSGRSVIVAGPELKLHQCGLPKKMAVELFKPFLYARLDKLGLATTIKQAKKMVEKEKPEVWDALETIIREHPVILNRAPTLHRLGVQAFEAKLIEGSAIELHPLVCSAFNADFDGDQMAVHVPLSLESQIEARVLMMSTNNILSPSNGKPIIVPSQDMVLGIYYLSQSSEIKQEKDETKGYFTNVTEIEQAIESGSISLHTNVIGRFESIDEKGNMILEKHKSTAGRFILSSILP

SEQ ID NO: 134159 - protein, 300 aa, Unknown
  Bacterial polypetide isolated from the Sargasso Sea
MKKELTDLFKGSEISEAQNFNSIKISLASPEKIKSWTFGEIKKPETINYRTFRPEKDGLFCARIFGPIKDYECLCGKYKRMKFRGIICEKCGVEVTKSNVRRERMGHINLATPVAHIWFLKSLPSRIALAVDMKLKEIERVLYFENFIVIEPGLTGLQKNQLLNEEELAKYQDEFGEESFTAGIGAEAVLEMLKNLDLELERKNLVSFIKETKSKVNEERAIKRLKLIESFIETGQKPEWMIMTVVPVIPPELRPLVPLDGGRFATSDLNDLYRRVINRNNRLKRLMDLKAPRYHCKKEK

SEQ ID NO: 134160 - protein, 267 aa, Unknown
  Bacterial polypetide isolated from the Sargasso Sea
MNVCGGKYKRMKFRGIICEKCGVEVTKSNVRRERMGHINLATPVAHIWFLKSLPSRISLAIDMKLKDVERVLYFENFIVIEPGLTNLKKNQLLSEEEMIKYQDEYGDEAFTAGIGAEAILEILKSINLEEEKQNLIKSINETKSKVAEERSIKRLKLIESFIETGNKPEWMILTTIPVIPPELRPLVPLDGGRFATSDLNDLYRRVINRNNRLKRLMDLKAPDIIVRNEKRMLQESVDALFDNGRRGRVITGTGKRPLKSLAEMLKG

SEQ ID NO: 134161 - protein, 294 aa, Unknown
  Bacterial polypetide isolated from the Sargasso Sea
ELRPLVPLDGGRFATSDLNDLYRRVINRNNRLKRLIDLKAPDIIVRNEKRMLQESVDALFDNGRRGRVITGTGKRPLKSLAEMLKGKHGRFRQNLLGKRVDYSGRSVIVAGPELKLHQCGLPKKMAVELFKPFLYAKLDKLGLATTIKQAKRLVEKEKSEVWDALETIIREHPVILNRAPTLHRLGVQAFEAKLIEGNAIELHPLVCAAFNADFDGDQMAVHIPLSLEAQLEARVLMMSTNNILSPSNGKPIIVPSQDMVLGIYYLSQSSEGQNDKKAKGYFSDVSEIEQALET

SEQ ID NO: 134162 - protein, 180 aa, Unknown
  Bacterial polypetide isolated from the Sargasso Sea
MTNSNLRTENHFDYVKISIASPQRIMDWGQRTLPNGQIVGEVTKPETINYRTLKPEMDGLFCEKIFGPSKDWECHCGKYKRVRHRGIVCERCGVEVTESRVRRHRMGYIKLAAPVSHVWYLKGIPSYVAILLDIPLRDVEQIVYFNCYVVLDPGDHKELKYKQLLTEDEWLEIEDEIYAE

SEQ ID NO: 134163 - protein, 296 aa, Unknown
  Bacterial polypetide isolated from the Sargasso Sea
KDYECLCGKYKRMKFRGIICEKCGVEVTKSNVRRERMGHINLATPVAHIWFLKSLPSRISLVVDMKLKEVERVLYFENFIVIEPGLTGLKKNQLLGEEELIKYQDDYGEEAFTAGIGAEAILEILKSINLEEEKELLIKNIKETKSKVNEERSIKRLKLIESFIETGNKPEWMILTTVPVIPPELRPLVPLDGGRFATSDLNDLYRRVINRNNRLKRLIDLKAPDIIVRNEKRMLQESVDALFDNGRRGRVITGTGKRPLKSLAEMLKGKQGRFRQNLLGKRVDYSGRSVIVVGPD

SEQ ID NO: 134164 - protein, 257 aa, Unknown
  Bacterial polypetide isolated from the Sargasso Sea
YKRMKFRGIICEKCGVEVTKSNVRRERMGHINLATPVAHIWFLKSLPSRIALAVDMKLKEIERVLYFENFIVIEPGLTGLQKNQLLNEEELAKYQDEFGEEAFTAGIGAEAVLEMLKNLDLELEKKNLVSFIKETKSKVNEERAIKRLKLVESFIETGQKPEWMILTVVPVIPPELRPLVPLDGGRFATSDLNDLYRRVINRNNRLKRLMDLKAPDIIVRNEKRMLQESVDALFDNGRRGRVITGTGKRPLKSLAEM

SEQ ID NO: 134165 - protein, 179 aa, Unknown
  Bacterial polypetide isolated from the Sargasso Sea
METSNVNIKNWKSLIKPAKLDIKLSDDKSYAKIIAEPLEKGYGLTLGNSLRRILLSSIRGTAVTAIQIDGVLHEFSSIKGVREDVTDIVLNVKSLALKSNSEGTKKLILDAKGPGEIKASDIAQVADIEILNPDLVICNLDEKTNFHMEMNVGNGKGYVSADMNKPEEPPLGLIPIDSL

SEQ ID NO: 134166 - protein, 251 aa, Unknown
  Bacterial polypetide isolated from the Sargasso Sea
TSDLNDLYRRVINRNNRLKRLIDLRAPDIIIRNEKRMLQESVDALFDNGRRGRVITSTNKRPLKSLSDMLKGKQGRFRQNLLGKRVDYSGRSVIVVGPNMKLHQCGIPKKMALELFKPFIFHKLDVYGWANTIKAAKKLVEKEDPRVWDILEEVIREHPVLLNRAPTLHRLGIQAFEPVLIEGKSIQLHPLVCTAFNADFDGDQMAVHVPLSLEAQLEARVLMMSTNNILSPSSGKPIIVPSQDIVLGNIL

SEQ ID NO: 134167 - protein, 305 aa, Unknown
  Bacterial polypetide isolated from the Sargasso Sea
FKSLAEMLKGKQGRFRQNLLGKRVDYSGRSVIVVGPELKLHQCGLPKKMALELFKPFLYARLDKLGLATTIKQAKRLVEKEKSEVWDSLEQIIREHPILLNRAPTLHRLGVQAFEAKLIEGNAIELHPLVCAAFNADFDGDQMAVHIPLSLEAQLEARVLMMSTNNILSPSNGKPIIVPSQDIVLGIYYLSQAEENDKKPKGIFSSVDEIEQALESKSISLHSKIVSVFKTIDDNGAKKVEKYTSTAGRFLLADLLPVNQNIKFSLINRLLTKKNVSEVIDTIFRYCGQKETVLFCDRIKTLGFK

SEQ ID NO: 134168 - protein, 130 aa, Unknown
  Bacterial polypetide isolated from the Sargasso Sea
MSIINNWQALIKPSKLRLINDEESQYKATLVAEPLERGFGLTLGNALRRVLLSSLQGTAVTAIKIDNVLHEFSSIDGVREDVTDIVLNIKSLALNMHSEGIRKMNLNVTGPGEITAGMINTPSEIDIIKS

SEQ ID NO: 134169 - protein, 172 aa, Unknown
  Bacterial polypetide isolated from the Sargasso Sea
MGTFTSNWPPASPGGGRVKGVKVPNLDDLGTFTSNWPPASPGGGRVKGVKVPNLDDLGTFTSNWPPASPGGGRVKGLQVHNLDALGTFTSNWPPASPGGGRVKGVKVPNLDDLRTFASNWPPASPGGGRVKGVKVPNWDDLGTFTCNWPPASPGGGRVKGAKVHNLDALGTF

SEQ ID NO: 134170 - protein, 91 aa, Unknown
  Bacterial polypetide isolated from the Sargasso Sea
METSEVNVKNWKSLIKPPKLDVNISEDKSYAKIIAEPLEKGYGLTLGNSLRRILLSSIRGTAVTAIQIDGVLHEFTSIKGVREDVTRYSFK

SEQ ID NO: 134171 - protein, 312 aa, Unknown
  Bacterial polypetide isolated from the Sargasso Sea
EHPVLLNRAPTLHRLGIQAFEPILMKGKSIQLHPLVCTAFNADFDGDQMAVHVPLSLEAQLEARVLMMSTNNILSPSSGKPIIVPSQDIVLGIYYLSIMRENQKGENRFFLDINEILKALENKDVMLHTKINCRIKNFDGVTTKVETTPGRMILANSLPKNENINFSLINKTLTKKEVSNIIDTVYRFCGQKETVLFADHIMQIGFKYAAIAGISFGKDDLIIPEEKQKLLEDTQSKVQEYENQYQDGLITQGEKYNKVVDAWSECTNKVADKMLDVISKPDDDKPINSVFMMAHSGARGSAAQLKQLAGMR

SEQ ID NO: 134172 - protein, 289 aa, Unknown
  Bacterial polypetide isolated from the Sargasso Sea
MLSSIRGAAVTSIQIDGVLHEFTSIKGVREDVTDIVLNVKSLALKCNSEGTKKLVLDAKGPGEIKASDIAPVADVEILNPDLVICNLDENTNFHMEMNVNTGKGYVPADLNKPEEPPLGLIAIDSLYSPVKKVSYSISTAREGKALDYDKLTMEVETNGAISAEDAVAYSARIFQDQLKMFVNFDEPVEAPVKEVSTEPEFNKNLLRKVDELELSVRSMNCLKNDNIIYIGDLVQKSEGEMLRTPNFGRKSLNEIKEVLTGMSLYLGMEIPNWPPDNIAEMSKKLEEAI

SEQ ID NO: 134173 - protein, 197 aa, Unknown
  Bacterial polypetide isolated from the Sargasso Sea
MPKQMALELFEPFIVKRLKELNHVYTIRSAKKMIQRQDPVVWDVLEDIIRKHPVLLNRAPTLHRLGIQAFEPTLIEGKAIRVHPLVCQAFNADFDGDQMAVHVPLSVEAQIEAKVLMMAPDNIFLPSSGKPVAMPDQDMTLGLYYLMHDPVYDPEKEGKKVKAFANREEVLLALSPAGDIYNRKDLNWAGCERHDNT

SEQ ID NO: 134174 - protein, 102 aa, Unknown
  Bacterial polypetide isolated from the Sargasso Sea
MTDNYDIIKDFLTPTEIVVEESGPNRSKIVLEPLEQGFGHTLGNALRRIILSSMPGTAVSEVKIDGVLHEYSTIEGVQEDVIDILLNLKDLSVRLTEVKTPS

SEQ ID NO: 134175 - protein, 260 aa, Unknown
  Bacterial polypetide isolated from the Sargasso Sea
LEILKSIDLEQEKEVLIKSIKETKSKVSEERSIKRLKLIESFIETGNKPEWMILTTIPVIPPELRPLVPLDGGRFATSDLNDLYRRVINRNNRLKRLMDLKAPDIIVRNEKRMLQESVDALFDNGRRGRVITGTGKRPLKSLAEMLKGKQGRFRQNLLGKRVDYSGRSVIVVGPDLKLHECGLPKKMALELFKPFLYARLNKLGLASTIKQAKKLVERERNEVWDALELIVREHPVILNRAPTLHRLGVQAFEPKLIEGN

SEQ ID NO: 134176 - protein, 309 aa, Unknown
  Bacterial polypetide isolated from the Sargasso Sea
KPETINYRTFKPERDGLFCARIFGPTKDYECLCGKYKRMKYRGVVCEKCGVEVTLQKVRRERMGHIELASPVAHIWFLKSLPSRIGLMLDMTLRDLERVLYFENYVVIEPGLTDLTYGQMMSEEEFMDAQDTYGMDAFTANIGAEAIREMLAAIDLEAEAEQLRVDLKEATGELKPKKIIKRLKVVESFLESGNRPEWMILTVVPVIPPELRPLVPLDGGRFATSDLNDLYRRVINRNNRLKRLIELRAPDIIVRNEKRMLQESVDALFDNGRRGRVITGANKRPLKSLSDMLKGKQGRFSQNLLGKRS

SEQ ID NO: 134177 - protein, 175 aa, Unknown
  Bacterial polypetide isolated from the Sargasso Sea
MENIDVNIKNWKSLIKPPKLDIKLSDDKSFAKIIAEPLEKGYGLTLGNSLRRILLSSIRGAAVTSIQIDGVLHEFTSIKGVREDVTDIVLNIKSLALKNLAEGKKKLILDAKGPGEIKASDITNIPDIEILNPDLVICNLDENTHFHMEMNVGTGKGYVSANMNKPEEPPLGLFQ

SEQ ID NO: 134178 - protein, 273 aa, Unknown
  Bacterial polypetide isolated from the Sargasso Sea
MENAKIPEPEIQIRKKEVEKEIKQKKVKSDAEIKVIEEAFSTLKTLKPKTLIENDVLWREMIDKYDEYFTGGMGAEAVRELVQLVDLKSEMEKLETDLDSKSAQRRQRAIQRMKVIKPFADGKNPPEAMILEVVPVIPPELRPMVQLDGGRFATSDLNDLYRRLINRNNRLKKLIELGAPDIIISNEKRMLQESVDALFDNGRRGRAVAGAGGRGLKSLSDMLKGKQGRFRQNLLGKRVDYSARSVIVVGPHLELQQCGLPKMMALELFKPFV

SEQ ID NO: 134179 - protein, 262 aa, Unknown
  Bacterial polypetide isolated from the Sargasso Sea
LIESFIETGNKPEWMILTVIPVIPPELRPLVPLDGGRFATSDLNDLYRRVINRNNRLKRLIDLKAPDIIVRNEKRMLQESVDALFDNGRRGRVITGTGKRPLKSLAEMLKGKQGRFRQNLLGKRVDYSGRSVIVVGPDLKLHECGLPKKMALELFKPFLYARLNKLGLASTIKQAKKLVEKERDEVWDALEIIVREHPVILNRAPTLHRLGVQAFEPKLIEGNAIELHPLTCAAFNADFDGDQMAVHVPLSLEAQLEARVLM

SEQ ID NO: 134180 - protein, 243 aa, Unknown
  Bacterial polypetide isolated from the Sargasso Sea
NSEGTKKLILDAKGPGEIKASDISPVTDVEILNPDLVICNLDENTNFHMEMNVNTGKGYVPAELNKPEEPPLGLIAIDSLYSPVKKVSYSVSTAREGKALDYDKLTMEVETNGSISAEDAVAYSARIFQDQLKMFINFDEPVEAPVKEVSTEPEFNKNLLRKVDELELSVRSMNCLKNDNIIYIGDLVQKSEGEMLRTPNFGRKSLNEIKEVLTGMSLYLGMEIPNWPPDNIAEMSKKLEEAI

SEQ ID NO: 134181 - protein, 301 aa, Unknown
  Bacterial polypetide isolated from the Sargasso Sea
LYTINWESYGFASTLKSARKMVESERPEVWDILDEVIREHPILLNRAPTLHRLGIQAFEPILIEGKAIQLHPLVCTAFNADFDGDQMAVHIPLSLEAQLEARVLMMSTNNILSPSSGKPIIVPSQDIVLGIYYLSLINEKEDPKKYYSHVGEVEFALENKTIELHTPILYRTKVYNSEKDSFEYKKYTTSAGRVILFKTVPESKNLSFDVVNKTLTKKDISNLLDNVYRFTGQKATCIFVDQIMTVGFKYAAKAGISFGKDDLVIPDEKNILIQDTQKLVNSLENQYQEGLITEREKYNKV

SEQ ID NO: 134182 - protein, 264 aa, Unknown
  Bacterial polypetide isolated from the Sargasso Sea
VNVQNDSNKKGTLIAEPLERGFGLTLGNAIRRVLLSSLQGAAITSVKIKGVVHEFSTIPGVKEDLTDILLNIKSVAVKVHSPGLKKMYVKSSGSGEIRAGNFETDSETEIMNPDQLIMTLDSNADVEIEANIETGKGYVSAEVAEDEDKVIGEIKLDAMFSPVIRASYKVENSRVGQVTDYDKLIFDVETNGVITPDDAIALASRILQDQLQPFINFDEPEIQQDQASAEKLSFNSNLLKKVEELELSVRSANCLKNDNIIYIG

SEQ ID NO: 134183 - protein, 280 aa, Unknown
  Bacterial polypetide isolated from the Sargasso Sea
MKYGDESFTAGIGAEAILEILKSINLEQEREILVKNINETKSKVSEERSIKRLKLIDSFIKTGNKPEWMILTVIPVIPPELRPLVPLDGGRFATSDLNDLYRRVINRNNRLKRLMDLKAPDIIVRNEKRMLQESVDALFDNGRRGRVITGTGKRPLKSLAEMLKGKQGRFRQNLLGKRVDYSGRSVIVVGPDLKLHECGLPKKMALELFKPFLYARLNKLGLASTIKQAKKLVEKETNAVWDALEVIVREHPVILNRAPTLHRLGVQAFEPKLIEGDAIE

SEQ ID NO: 134184 - protein, 304 aa, Unknown
  Bacterial polypetide isolated from the Sargasso Sea
MVEKERPEVWDVLDRVIREHPVILNRAPTLHRLGVQAFEPVLIEGKAIQLHPLVCTAFNADFDGDQMAVHVPLSLEAQLEARVLMMSTNNILNPANGKPVIVPSQDIVLGIYYLSQEKENEPGQGSVFKDIYEVQQALENNATTVHAKVHARINFIDPEGNKKLKRIETTPGRMLLWNLVPQHKDLDPKLVNRLLGKKEISGLIDTVYRYCGQKDTVIFADQLMALGFHYAYKAGISFGKDDMIIPETKEKLVSETAGQIEKYEKQYNDGLITNREKYNKVIDAWAKCTDRVAQEMMNEISSKK

SEQ ID NO: 134185 - protein, 309 aa, Unknown
  Bacterial polypetide isolated from the Sargasso Sea
TINYRTHKPERDGLFCERIFGPVKDYECACGKYKRIRYKGIICDRCGVEVTEKKVRRDRVGHINLVVPVAHIWYFKSLPNKIGYLLGLPSKKLDMIIYYERYVVIQPGEAKNAEGEPINKMDFLSEEEYLAIMETIPVDNQFLEDSDERKFIAKMGAECLIDLLSRIDLEELSYELRHKANNETSKQRKTEALKRLQVVESFREGNERKENLPEWMLVKVIPVIPPELRPLVPLDGGRFATSDLNDLYRRVIIRNNRLKRLVEIKAPEVILRNEKRMLQESVDSLFDNTRKSSAVKTESNRPLNLYRIH

SEQ ID NO: 134186 - protein, 297 aa, Unknown
  Bacterial polypetide isolated from the Sargasso Sea
KLSNENNFSSIKITLASPEKIKSWSFGEIKKPETINYRTFRPEKDGLFCSRIFGPVKDYECLCGKYKRMKFRGIICEKCGVEVTKSNVRRERMGHIELSCPVAHIWFLKSLPSRISLAIDMKLKEVEKVLYFESFIVIEPGLTKLSKGQLLSEEDLVKAQDEYGEDAFTAGIGAEAVREILISLDLKKEQKKLRDSLKEVKSKVTEERMIKRLKLIESFITSGNKPEWMILTTVPVIPPELRPLVPLDGGRFATSDLNDLYRRVINRNNRLKRLMELKAPDIIVRNEKRMLQESVDA

SEQ ID NO: 134187 - protein, 237 aa, Unknown
  Bacterial polypetide isolated from the Sargasso Sea
KVRLHAVGPGQVTGSQIELGHDVELMNPSHVICTLDEGASIRMEMTIENGKGYVAADLEKSEDQPIGLVPVDAVYSPVRRVSYKVDNTREGQKLDYDKLTLKVLTNGTISPEDAVAFAARILQEQFQLFINFEEPKPDVPEESGSEPEINPNLLRKVDELELSVRSANCLKNDNLVYIGDLIQKTEGEMLRTPNFGRKSLNEIKEVLAQMGLHLGMEVPNWPPENIEELAKKLDDNF

SEQ ID NO: 134188 - protein, 288 aa, Unknown
  Bacterial polypetide isolated from the Sargasso Sea
SETKLKKLSKRLNLLEAFNNSGNKPEWMIMNVLPVLPPDLRPLVPLEGGRFATSDLNDLYRRVINRNNRLKRLLELNAPEIIVRNEKRMLQESVDALLDNGRRGRVITGTNKRPLKSLADMIKGKGGRFRQNLLGKRVDYSGRSVIVAGPNLRLHQCGLPKKMALELFKPFVYGKLEQRELATTIKGAKKLVERETPEVWEVLEEVIREHPVLLNRAPTLHRLGLQAFEPKLIEGKAIQLHPLVCVAFNADFDGDQMAVHVPLTLEAQLEARALMMSTNNILSPADGS

SEQ ID NO: 134189 - protein, 293 aa, Unknown
  Bacterial polypetide isolated from the Sargasso Sea
ATSDLNDLYRRVINRNNRLKRLIDLKAPDIIVRNEKRMLQESVDALFDNGRRGRVITGTGKRPLKSLAEMLKGKQGRFRQNLLGKRVDYSGRSVIVVGPDLKLHQCGLPKKMALELFKPFLYARLNKLGLASTIKQAKKLVERERTEVWDALELIVREHPVILNRAPTLHRLGVQAFEPKLIEGNAIELHPLTCAAFNADFDGDQMAVHVPLSLEAQLEARVLMMSTNNILSPSNGKPIIVPSQDMILGIYYLSQPPVQTDRIDGYFVNTSEIEHALETGQIKVHSRIVSRFD

SEQ ID NO: 134190 - protein, 298 aa, Unknown
  Bacterial polypetide isolated from the Sargasso Sea
EEYLTIMESLPADNQFLDDSDERKFIAKMGAECLIELLSRIDLEELSYELRHKANNETSKQRKTEALKRLQVVESFREGNERKENLPEWMVVKVIPVIPPELRPLVPLDGGRFATSDLNDLYRRVIIRNNRLKRLVEIKAPEVILRNEKRMLQESVDSLFDNTRKSSAVKTESNRPLKSLSDSLKGKQGRFRQNLLGKRVDYSARSVIVVGPELKLYECGLPKDMAAELYKPFIIRKLIERGIVKTVKSAKKIIDRREPVVWDILENVLKGHPVLLNRAPTLHRLGIQAFQPKTYEGK

SEQ ID NO: 134191 - protein, 185 aa, Unknown
  Bacterial polypetide isolated from the Sargasso Sea
YVPGDKHRDEDVAIGLISVDAMYSPVKKVSYKVDSTREGQVLDYDKLSLSIETDGSVSPEDAIAFAARILQDQLTIFVNFDEPEAEEIAGEEDELAFNPLLLKKVEELELSVRSANCLKNDNIVYIGDLILKTESEMLRTPNFGRKSLNEIKEVLTSMGLHLGMDVSEWPPENIEELAKKHEDQY

SEQ ID NO: 134192 - protein, 295 aa, Unknown
  Bacterial polypetide isolated from the Sargasso Sea
MILTTIPVIPPELRPLVPLDGGRFATSDLNDLYRRVINRNNRLKRLMDLKAPDIIVRNEKRMLQESVDALFDNGRRGRVITGTGKRPLKSLAEMLKGKQGRFRQNLLGKRVDYSGRSVIVVGPDLKLHECGLPKKMALELFKPFLYARLNKLGLASTIKQAKKLVEREREEVWDALENIVREHPVILNRAPTLHRLGVQAFEPKLIEGDAIELHPLTCAAFNADFDGDQMAVHIPLSLEAQLEARVLMMSTNNILSPSNGKPIIVPSQDMILGIYYLSQPPYQSDKIEGYFIDNS

SEQ ID NO: 134193 - protein, 171 aa, Unknown
  Bacterial polypetide isolated from the Sargasso Sea
MQTTSNVIDKNWKALIKPNKLDITSNDDKTIAKVVAEPLEKGFGQTIGNSLRRILLSSIQGAAVTAIQIDGVLHEFSSIKGVREDVTDIVLNVKNLAIKSSSSSSKKIILDIKGPKEVKAKDITLVPEIEILNPEQTICNLDEKTNFHMELMVSTGKGYVQAPKNKTEDSP

SEQ ID NO: 134194 - protein, 318 aa, Unknown
  Bacterial polypetide isolated from the Sargasso Sea
MKLKEVEKVLYFESFIVIEPGLTTLKKGQLISEEALLKAQEEFGEDAFTAGIGAEAVREILLNLDLKNEQKKLRDSLKEIKSKVTEERTIKRLKLIESFISSGNKPEWMILTSVPVIPPELRPLVPLDGGRFATSDLNDLYRRVINRNNRLKRLLDLKAPDIIVRNEKRMLQESVDALFDNGRRGRVITGTGKRPLKSLAEMLKGKQGRFRQNLLGKRVDYSGRSVIVVGPELKLHQCGLPKKMALELFKPFLYARLDKLGLATTIKQAKRLVEKEKSEVWDSLEHIIREHPVLLNRAPTLHRLGVQAFEAKLIEGNA

SEQ ID NO: 134195 - protein, 115 aa, Unknown
  Bacterial polypetide isolated from the Sargasso Sea
MENTNIFDKNWKSLTKPSKLEIESNEDKTIAKVVAQPLEKGFGQTIGNSLRRILLSSIQGAAVTAIQIDGVLHEFSSIKGVREDVTDIVLNVKNLAIKLDSDGPKKLVLDSVWAK

SEQ ID NO: 134196 - protein, 140 aa, Unknown
  Bacterial polypetide isolated from the Sargasso Sea
METENVNVKNWKSLIKPTKLDVKISDDLTRATIIAEPLEKGYGLTLGNSLRRILLSSIRGAAVTSLQIDGVLHEFTSIKGVREDVTDIVLNVKSLALKCNSEVTKKLVLDVKGPGEIKASDITYVPDVEILNPDLVICNL

SEQ ID NO: 134197 - protein, 226 aa, Unknown
  Bacterial polypetide isolated from the Sargasso Sea
MEIENVNVKNWKSLIKPTKLDVKMSDDLSYAKIIAEPLEKGYGLTLGNSLRRILLSSIRGAAVTSIQIDGVLHEFTSIKGVREDVTDIVLNVKSLALKSSSEGTKKLILDAKGPGEIKASDITAVTDVEILNPDLVICNLDENTNFHMEMNVNTGKGYVPAELNKPEEPPLGLIAIDSLYSPVKKVSYSVSTAREGKALDYDKLIMEVETNGSISAEDAVAYSARI

SEQ ID NO: 134198 - protein, 252 aa, Unknown
  Bacterial polypetide isolated from the Sargasso Sea
RVWDILEDVIREHPVLLNRAPTLHRLGIQAFEPILIEGKSIQLHPLVCTAFNADFDGDQMAVHVPLSLEAQLEARVLMMSTNNILSPSSGKPIIVPSQDIVLGIYYLSIIRENQIGQGRNFIDLNEIEKALESGDITLHTKIYARILDNNNQLIKVETTPGRMILGNILPKNKNINFDIINKVLTKKEVSNIIDSVYRFCGQKETVLFADHIMQIGFKYAAIAGISFGKDDLIIPSEKDDLLNQTQAKVQEI

SEQ ID NO: 134199 - protein, 267 aa, Unknown
  Bacterial polypetide isolated from the Sargasso Sea
MQYQIDRIEHQVSEDRAQSGVFLIGPLERGQATTLGNALRRVLMGGLEGSAVTAIRIAGVNHEYATVPGVREDVLDILLNCKELTVNSRSGELEIGRLVVAGPAEVKACDLQFSSQVQVVDTDRPIATVADGHSLELEVHVERGVGYRPVDRYNEETSAIDLLQIDAVFMPVTRVNFTIDETAVAEGGSARERLRIEIVTDGSITPDDALAQSANQLIELFQPLATVTLVEEVPAEPEPSAEAQIPLEELNLSVRAYNCLKRAQVNS

SEQ ID NO: 134200 - protein, 282 aa, Unknown
  Bacterial polypetide isolated from the Sargasso Sea
SKVAEERSIKRLKLIESFLETGNKPEWMILTVIPVIPPELRPLVPLDGGRFATSDLNDLYRRVINRNNRLKRLIDLKAPDIIVRNEKRMLQESVDALFDNGRRGRVITGTGKRPLKSLAEMLKGKQGRFRQNLLGKRVDYSGRSVIVVGPDLKLHECGLPKKMALELFKPFLYARLNKLGLASTIKQAKKLVEKERDEVWDALEIIVREHPVILNRAPTLHRLGVQAFEPKLIEGEAIELHPLTCAAFNADFDGDQMAVHIPLSLEAQLEARVLMMSTNNIL

SEQ ID NO: 134201 - protein, 151 aa, Unknown
  Bacterial polypetide isolated from the Sargasso Sea
DLLQIDAVFMPVKRVNFSIDETAVAEGGSGRERLKMEVVTDGSMSPDDAIAEAANQLIELFQPLATVTMVEEIPEEPEPSPEAQIPLEELNLSVRAYNCLKRAQVNSVSDLMGFSYEDLLEIKNFGSKSADEVIEALERIGISIPQSRTSV

SEQ ID NO: 134202 - protein, 292 aa, Unknown
  Bacterial polypetide isolated from the Sargasso Sea
INYFSEEELLKNQEEFGDEAFTAGIGAEAILEILKSLNLEEEKKALVKNINETKSKVSEERSIKRLKLIESFIETGQKPEWMILTVIPVIPPELRPLVPLDGGRFATSDLNDLYRRVINRNNRLKRLMDLKAPDIIVRNEKRMLQESVDALFDNGRRGRVITGTGKRPLKSLAEMLKGKQGRFRQNLLGKRVDYSGRSVIVVGPDLKLHECGLPKKMALELFKPFLYARLNKLGLASTIKQAKKLVEKESNAVWDALELIVREHPILLNRAPTLHRLSVQAFEPKLIEGRCY

SEQ ID NO: 134203 - protein, 287 aa, Unknown
  Bacterial polypetide isolated from the Sargasso Sea
IYAPAIIVHNEKRMLQEAVDALIDNGKRGRKALGAHNRALKSLSDIIEGKHGRFRQNLLGKRVDYSGRSVIIVGPSLKLNQCGLPHEIALELFQPFIIHQLIIHGLASNMKLAKKLIQTGEPIIWTILENILKEHPILLNRAPTLHRLGIQAFEPILVEGRAIQLHPLVCPAFNADFDGDQMAIHVPLSIEAQLEAKTLMLAPNNFLSPATGDPIILPSQDMVLGCYYLTVDNPTAKENSNHYFANYDDVILAYEQKKITVHTPVWVKTLDVDTNNSIDLENSRNSE

SEQ ID NO: 134204 - protein, 296 aa, Unknown
  Bacterial polypetide isolated from the Sargasso Sea
MILTSVPVIPPELRPLVPLDGGRFATSDLNDLYRRVINRNNRLKRLLDLKAPDIIVRNEKRMLQESVDALFDNGRRGRVITGTGKRPLKSLAEMLKGKQGRFRQNLLGKRVDYSGRSVIVVGPELKLHQCGLPKKMALELFKPFLYARLDKLGLATTIKQAKRLVEKEKSEVWDSLEHIIREHPILLNRAPTLHRLGVQAFEAKLIEGNAIELHPLVCAAFNADFDGDQMAVHIPLSLEAQLEARVLMMSTNNILSPSNGKPIIVPSQDIVLGIYYLSQASEEDSKPKGSFSSVEE

SEQ ID NO: 134205 - protein, 291 aa, Unknown
  Bacterial polypetide isolated from the Sargasso Sea
FNSLKISIASPDDIRSWSFGEIKKPETINYRTFKPEKDGLFCSRIFGPVKDYECLCGKYKRMKFRGIICEKCGVEVTLSKVRRDRMGHIELAAPVSHIWFMKSLPSRIATLLDMTIKNLEKVLYFEQFIVVEPGLTDLNKGEIISEEQYIDYQDEYGEDSFSAAIGAEAIEQMLLSIDLESDYNQLKIDLTETKSELKKTKITKRLKLIESFIISKNKPEWMIMRVLPVIPPELRPLVPLDGGRFATSDLNDLYRRVINRNNRLKRLIDLRAPDIIIRNEKRMLQESVDAL

SEQ ID NO: 134206 - protein, 323 aa, Unknown
  Bacterial polypetide isolated from the Sargasso Sea
NDLYRRVIIRNNRLKRLVEIKAPEVILRNEKRMLQESVDSLFDNTRKSSAVKTESNRPLKSLSDSLKGKQGRFRQNLLGKRVDYSARSVIVVGPELKLYECGLPKDMAAELYKPFIIRKLIERGIVKTVKSAKKIIDRREPVVWDILENVLKGHPVLLNRAPTLHRLGIQAFQPKLIEGKAIQLHPLTCTAFNADFDGDQMAVHLPLGPEAILEAQLLMLGSHNILNPANGSPITVPSQDMVLGLYYMTKSRKSSENLKLKGEGSIYFSAEEVNMAYNEKKVDLNAIIKCRIKTSDLEDSYEIIETTPGRIFFNEVVPVKAGF

SEQ ID NO: 134207 - protein, 116 aa, Unknown
  Bacterial polypetide isolated from the Sargasso Sea
MTDNYDIIKDFLVPTEILVEELGPTRSKIILEPLEQGFGHTLGNALRRIMLSSMPGTAVSEVKIDGVLHEYTTIEGVQEDVIDILLNLKELSVRLLESEESELKVSKKSKGKLVAG

SEQ ID NO: 134208 - protein, 263 aa, Unknown
  Bacterial polypetide isolated from the Sargasso Sea
PVMLNRAPTLHRLGIQAFEPVLIEGKAIQLHPLVCSAFNADFDGDQMAVHVPLSLEAQLEARVLMMSTNNVLSPANGAPIIVPSQDMILGLYYTTIMREGMKGEGMIFGSIEEVQYALDNGDVHLHAKITARIPQIDEHGTEIEKRFETTPGRVRIGSLLPKNAKAPFELVNNLLRKKDVQNVIDTVYRYCGQKESVIFCDQIMSMGFREAFKAGISFGKDDMVIPETKWDIVNDTRGQVTDFEQQYMDGLITQGEKYNKVVD

SEQ ID NO: 134209 - protein, 259 aa, Unknown
  Bacterial polypetide isolated from the Sargasso Sea
LPKKMALELFKPFLYARLDKLGLATTIKQAKRLVEKEKSEVWDSLEHIIREHPILLNRAPTLHRLGVQAFEAKLIEGNAIELHPLVCAAFNADFDGDQMAVHVPLSLEAQLEARVLMMSTNNILSPSNGKPIIVPSQDIVLGIYYLSQSNEIDDIKPKGLFSNVEEIEQALENKSISLHSKIISKFNTIDNDGKKISEKYTSTAGRFLLANILPINHNIKFSLVNKLLTKKNVSEVIDTIFRYCGQKETVIFCDRIKTL

SEQ ID NO: 134210 - protein, 272 aa, Unknown
  Bacterial polypetide isolated from the Sargasso Sea
NYRTFRPEKDGLFCARIFGPIKDYECLCGKYKRMKFRGIICEKCGVEVTKSNVRRERMGHINLATPVAHIWFLKSLPSRISLVIDMKLKDVERVLYFENFIVIEPGLTGLKKNQLLGEEELIKYQDEYGEEAFTAGIGAEAVLEILKSINLEDEKSLLIKNIKETKSKVSEERSIKRLKLIESFIETGNKPEWMILTTIPVIPPELRPLVPLDGGRFATSDLNDLYRRVINRNNRLKRLIDLKAPDIIIRNEKRMLQESVDALFDNGRRGRV

SEQ ID NO: 134211 - protein, 226 aa, Unknown
  Bacterial polypetide isolated from the Sargasso Sea
IKASDIAPVADVEILNPELVICNLDEKTSFHMEMNVSTGKGYVPADLNKPEEPPLGLIAIDSLYSPVKKVSFSVSTAREGKALDYDKLIMEVETNGSISAEDAVAYSARIFQDQLKMFINFDEPVEAPVKEVSTEPEFNKNLLRKVDELELSVRSMNCLKNDNIIYIGDLVQKSEGEMLRTPNFGRKSLNEIKEVLTGMSLYLGMEIPNWPPDNIAEMSKKLEEAI

SEQ ID NO: 134212 - protein, 130 aa, Unknown
  Bacterial polypetide isolated from the Sargasso Sea
SITPDDAVAFAARILQDQLSIFVNFEEPESATRADEDDGLEFNPLLLKKVDELELSVRSANCLKNDNIVYIGDLIQKTEAEMLRTPNFGRKSLNEIKEVLSGMGLHLGMDVEDWPPENIEDLAKKFEDQF

SEQ ID NO: 134213 - protein, 278 aa, Unknown
  Bacterial polypetide isolated from the Sargasso Sea
MRNEKRMLQESVDSLFDNTRKSSAVKTESNRPLKSLSDSLKGKQGRFRQNLLGKRVDYSARSVIVVGPELKLYECGLPKDMAAELYKPFIIRKLIERGIVKTVKSAKKIIDRREPVVWDILENVLKGHPVLLNRAPTLHRLGIQAFQPKLIEGKAIQLHPLTCTAFNADFDGDQMAVHLPLGPEAILEAQLLMLGSHNILNPANGSPITVPSQDMVLGLYYMTKSRKSSESHKLKGEGLTFYSPDEVNMAYNEKIVDLNAIIKCRIKTYESDDSYEII

SEQ ID NO: 134214 - protein, 269 aa, Unknown
  Bacterial polypetide isolated from the Sargasso Sea
EGVREDVTDIIMNLKNVTFNSKSNHPQKLSLNIKGPKEVLSSDFDENPEVEIVDKDAVIMNVDSNREVNLEIFLDVNKGYVSAEKNKDNENKSVGQIILDATYSPVKRVSFNVENSRIGQDTEFDKLILDIETNGTVSPDDAAALAARILQDQLKPFINFEEPTEDERKKLQSSNEPQFNKNLLKKVDELELSVRSANCLKNDNIFYIGDLVQKTEGEMLRTPNFGRKSLDEIKEVLSSMSLSMGMDLPGWPPENIEELSKKYEDPFKV

SEQ ID NO: 134215 - protein, 250 aa, Unknown
  Bacterial polypetide isolated from the Sargasso Sea
QLEMASTIKLAKKMVEREDPEVWDILAEVIREHPVLLNRAPTLHRLGIQAFEPVLVEGKAIQLHPLVCKAYNADFDGDQMAVHVPLTIEAQLECRALMMATNNILSPANGKPIIDPSQDVVLGIYYMTREKINAKGEGSILSSPEEANRSFQLDAIDVHAKIKVRLRPNKLPEEKTEIVETTLGRTLLYELLPEGMPFELINKTLDSKSISELIDVSYRRSGLKKTVIFADRIMYMGYEFSTKSGSSLCV

SEQ ID NO: 134216 - protein, 129 aa, Unknown
  Bacterial polypetide isolated from the Sargasso Sea
METENVNLKNWKSLIKPSKLDVKISDDLSHATIIAEPLEKGYGLTLGNSLRRILLSSIRGAAVTSIQIDGVLHEFTSIKGVREDVTDIVLNVKSLALKSASEGTKKLILDAKGPGEIKASDITSIPDVE

SEQ ID NO: 134217 - protein, 291 aa, Unknown
  Bacterial polypetide isolated from the Sargasso Sea
LVEGSAIRLHPLVCPAFNADFDGDQMAVHVPLSQEAIQECRSLMLSSENMLSPGSGTPIVAPTLDLVLGNYYLTEFDEDQVVKDKDIKKFSSTEDAIYSYEVGTIKLKEKIEILALSDGKNPFFTSVGRVIFNEILPDSINFINETINKKRLQEIVVQCHENESTDTTTKLLDNLKLLGFKYSTKSGTTIAIKDIVVPKTKNNLLKNADSKIDKLEQLFKDGLVNDENERYQKTVDVWTETNEKLTQAVKETLPYFGGVYAMSESGAKGNIEQIRQMAGMRGLMSDPKGRI

SEQ ID NO: 134218 - protein, 189 aa, Unknown
  Bacterial polypetide isolated from the Sargasso Sea
GRRGRVITGTGKRPLKSLAEMLKGKQGRFRQNLLGKRVDYSGRSVIVVGPDLKLHECGLPKKMALELFKPFLYARLNKLGLASTIKQAKKLVEKERTEVWDALELIVREHPVILNRAPTLHRLGVQAFEPKLIEGNAIELHPLTCAAFNADFDGDQMAVHVPLSLEAQLEARVLMMSTNNILSPSNGKP

SEQ ID NO: 134219 - protein, 259 aa, Unknown
  Bacterial polypetide isolated from the Sargasso Sea
RMLQESVDALFDNGRRGRVITGTGKRPLKSLAEMLKGKQGRFRQNLLGKRVDYSGRSVIVVGPDLKLHECGLPKKMALELFKPFLYARLNKLGLASTIKQAKKLVEKETNAVWDALELIVREHPVLLNRAPTLHRLGVQAFEPKLIEGDAIELHPLTCAAFNADFDGDQMAVHVPLSLEAQLEARILMLSTNNILSPSNGKPIIVPSQDMILGIYYLSQEPISDKPAGYFTNSDQIEFALSSGQINVHSTIISRYETED

SEQ ID NO: 134220 - protein, 142 aa, Unknown
  Bacterial polypetide isolated from the Sargasso Sea
KLIFEVETNGVITPDDAIALAARILQDQLQPFINFDEPEVLPDQSQVEKLSFNSNLLKKVEELELSVRSANCLKNDNIIYIGDLVQKSESEMLRTPNFGRKSLNEIKEVLQQMELNLGMSVPDWPPENIDELAKKYEDPFNK

SEQ ID NO: 134221 - protein, 269 aa, Unknown
  Bacterial polypetide isolated from the Sargasso Sea
IWFLKSLPSRIGLMLDLTLKDLERVLYFENYIVVDPGLTALKRYQVLTEDEYLAAQDEYGQDDFEAGIGAEAIRKLLENLDLDRERQNIRKELAETTSTVRPKKLIKRLKLVEAFISSGNRPEWMILTVIPVIPPDLRPLVPLDGGRFATSDLNDLYRRVINRNNRLKRLIDLRAPDIIIRNEKRMLQESVDALFDNGRRGRVITGTNKRPLKSLADMLKGKQGRFRQNLLGKRVDYSGRSVIVVGPELKLQQCGLPKKMALELFKPFV

SEQ ID NO: 134222 - protein, 320 aa, Unknown
  Bacterial polypetide isolated from the Sargasso Sea
KLGSIIKPIKLEINSNDDKSVAKVTVEPLEKGFGQTIGNSLRRILLSSIQGAAVTSIQIDGVLHEFSSIKGVREDVTDIVLNVKNLAIKSSTSNPKKIILDIQGPKEVKAKDITLVPEIEILNPEQIICNLDEKTHFHMELMISTGKGYVQAKKNKSEDSPLGLISIDSLFSPVKKVSFSVENTRAGSALDYDKLLMTVETNGTVDAEDAIAYAARIFQDQLSVFVNFEDPQETIKETKSAEPEFNRNLLKRVEELELSVRSMNCLKNDNIIYIGDLVQKTEPEMLRTPNFGRKSLNEIKEVLNTMSLYLGMEVPNWPPD

SEQ ID NO: 134223 - protein, 324 aa, Unknown
  Bacterial polypetide isolated from the Sargasso Sea
ICEKCGVRVTKSNVEEKEWPYYPATPVAHIWFWKSLPSRIALAVDMKLKEIERVLYFENFIVIEPGLTGLQKNQLLNEEELAKYQDEFGEESFTAGIGAEAVLEMLKNLDLELERKNLVSFIKETKSKVNEERAIKRLKLIESFIETGQKPEWMIMTVVPVIPPELRPLVPLDGGRFATSDLNDLYRRVINRNNRLKRLMDLKAPDIIVRNEKRMLQESVDALFDNGRRGRVITGTGKRPLKSLAEMLKGKQGRFRQNLLGKRVDYSGRSVIVVGPDLKLHECGLPKKMALELFKPFLYARLNKLGLASTIKQAKKLVKKKQMQ

SEQ ID NO: 134224 - protein, 141 aa, Unknown
  Bacterial polypetide isolated from the Sargasso Sea
MIENNWITLVKPNKVDYKISDNKKFGTVVIEPLEKGFGTTLGNALRRVLLSSLQGTAISSIKINGVLHEFSTIEGVREDVTDIIMNLKNVTFSSKSNNPQKLSLNVKGPKEVLSSDFDDNPEVEIIDKEAVIMNVDSNREV

SEQ ID NO: 134225 - protein, 192 aa, Unknown
  Bacterial polypetide isolated from the Sargasso Sea
MTNSNLRTENHFDYVKISIASPQRIMDWGQRTLPNGQVVGEVTKPETINYRTLKPEMDGLFCEKIFGPSKDWECHCGKYKRVRHRGIVCERCGVEVTESRVRRHRMGYIKLAAPVSHVWYLKGIPSYVAILLDIPLRDVEQIVYFNCYVVLDPGDHKELKYKQLLTEDEWLEIEDEIYAEDSTIENEPFVGI

SEQ ID NO: 134226 - protein, 288 aa, Unknown
  Bacterial polypetide isolated from the Sargasso Sea
LLSRIDLDNLSYELRHKANNETSKQRKTEALKRLQVVESFREGNLNRENLPEWMIMKAIPVIPPELRPLVPLDGGRFATSDLNDLYRRVIIRNNRLKRLIEIKAPEVILRNEKRMLQESVDSLFDNTRKSSAVKTESNRPLKSLSDSLKGKQGRFRQNLLGKRVDYSARSVIVVGPDLKLFECGLPKNMAAELYKPFIIRKLMERGIVKTVKSARKIIDRRDPVVWDILENVLRGHPVLLNRAPTLHRLGIQAFQPKLIEGKAIQLHPLVCTAFNADFDGDQMAVHLP

SEQ ID NO: 134227 - protein, 294 aa, Unknown
  Bacterial polypetide isolated from the Sargasso Sea
RVLNRNNRLRRLIELNAPDIIIKNEKRMLQEAVDALFDNGRRGRAILGSNKRPLKSLSEMLKGKQGRFRQNLLGKRVDYSGRSVIVPGPHLLLHQCGIPKKMAIELFKPFIYSKLEQYGLSNTIKTAKKLVEKERPEVWDVLEEVIKEHPVLLNRAPTLHRLGIQAFEPMLIEGKAIQLHPLVCTAFNADFDGDQMAVHVPLSLEAQLEARVLIMSTNNILSPSSGKPIIVPTQDMVLGIYYLSLMFENDIGTGMAFVDVAEVEHALLAKKITLHSKIKCRYKFINDDKKEETS

SEQ ID NO: 134228 - protein, 324 aa, Unknown
  Bacterial polypetide isolated from the Sargasso Sea
VEDLLHPDLNDLYRRVINRNNRLKRLIDLKAPNIIVRNEKRMLQESVDALFDNGRRGRVITGTGKRPLKSLAEMLKGKQGRFRQNLLGKRVDYSGRSVIVVGPDLKLHECGLPKKMALELFKPFLYARLNKLGLASTIKQAKKIVEKERNEVWDALELIVREHPIILNRAPTLHRLGIQAFEPKLIEGNAIELHPLVCAAFNADFDGDQMAVHIPLSLEAQLEARVLMMSTNNILSPSNGKPIIVPSQDMILGIYYLSQPPLQTKRIEGYFVDNSEIEHALESGQIKVHSRIISRFETVDEDGNTKYEKYTSTAGRFLLANLLP

SEQ ID NO: 134229 - protein, 302 aa, Unknown
  Bacterial polypetide isolated from the Sargasso Sea
VDYSGRSVIVVGPDLKLHECGLPKKMALELFKPFLYARLNKLGLASTIKQAKKLVEKERDEVWDALEIIVREHPVLLNRAPTLHRLGVQAFEPKLIEGDAIQLHPLTCAAFNADFDGDQMAVHVPLSLEAQLEARVLMMSTNNILSPSNGKPIIVPSQDMILGIYYLSQPPYQTEKIEGYFVNVDEMLQALENGSVKIHSRIISRFETVDEKGNKKIEKYTSTVGRFLLADIIPKNINNKFSLVDRLLPKRTVSEVIDHIFRFSGQKSTVIFCDRLKDLGFKYAFKAGISFGKDDLIIPENK

SEQ ID NO: 134230 - protein, 266 aa, Unknown
  Bacterial polypetide isolated from the Sargasso Sea
AKVVAEPLEKGFGQTIGNSLRRILLSSIQGAAVSAIQIDGVLHEFSSIKGVREDVTDIVLNVKNLAIKSSSASPKKIILDIKGPKEVKAKDITLVPEIEILNPEQTICNLDEKTNFHMELMISTGKGYVAAPKNKNEDSPLGLISIDSLFSPVKKVSFSIENTRAGSALDYDKLLMTVETNGTVAAEDAIAYSARIFQDQLSMFVNFEDPKEIVKEVKSTEPEFNRNLLKRVEELELSVRSMNCLKNDNIIYIGDLVQKTEPEMLR

SEQ ID NO: 134231 - protein, 308 aa, Unknown
  Bacterial polypetide isolated from the Sargasso Sea
FATSDLNDLYRGVINRNSRLRRLLELKAPEIIARNEKRMLQEAVDSLLDNGRRGKAMTGANKRALKSLADMIKGKSGRFRQNLLGKRVDYSGRSVITVGPYLKLHQCGLPKLMALELFKPFIFAQLEQRGIATTIKAAKKEVEAGTPVVWDILEEVIKEHPIMLNRAPTLHRLGIQAFEPILIEGKALQLHPLVCAAFNADFDGDQMAVHVPLSVEAQMEARVLMLASNNVLFPASGEPSIVPSQDVVLGLYHATREKINGKGEGMVFADLMELQRALDAGETELHAKISVHLTEWNKNKETGEFEPV

SEQ ID NO: 134232 - protein, 167 aa, Unknown
  Bacterial polypetide isolated from the Sargasso Sea
MESAEVNNKNWKTLIKPSKIDIKLSDDKSFAKIIAEPLEKGYGLTLGNSLRRILLSSIRGTAVTSIQIDGVLHEFTSIKGIREDVTDIVLNVKSLALKSTSEVNKKLILDVKGPGEIKASDITPVADVEILNPDLVICNLDENTKFHMEMNVSSSKGYVSADNNKPE

SEQ ID NO: 134233 - protein, 135 aa, Unknown
  Bacterial polypetide isolated from the Sargasso Sea
FTVDETAVGEGGSARERLRLEINTNGSITPDDALAYAANQLIALFQPLATVTLAEEPGQEPEPSAESQIPLEELNLSVRAYNCLKRAQVNSVSDLMGFSYEDLLEIKNFGAKSADEVIEALERIGISLPQSRTTA

SEQ ID NO: 134234 - protein, 144 aa, Unknown
  Bacterial polypetide isolated from the Sargasso Sea
VEAARVEQRTDLDKLVIDMTTNGTIDPEEAIRRSATILAEQLDAFVELRDVTEPEMKEEKPEFDPILLRPVDDLELTVRSANCLKAEAIHYIGDLVQRTEVELLKTPNLGKKSLTEIKDVLASRGLSLGMRLENWPPASLADDL

SEQ ID NO: 134235 - protein, 273 aa, Unknown
  Bacterial polypetide isolated from the Sargasso Sea
METANVNLKNWKSLIKPGKLDINLNDDKSYAKIVAEPLEKGYGLTLGNSLRRILLSSIRGTAVTAIQIDGVLHEFTSIKGVREDVTDIVLNVKSLALKSTSEGSKKLVLDAKGPGVIKASDITKINEIEILNPDLVICNLDENTNFHMEMTIGNGKGYVPAELNKPDEPPLGLIPIDSLFSPVKKVSYSVSTAREGKALDYDKLTMEIETNGSISAEDALAYSARIFQDQLGMFVNFDEPQEVTITEKPSEPEFNKNLLGKVDELELSVRSMN

SEQ ID NO: 134236 - protein, 310 aa, Unknown
  Bacterial polypetide isolated from the Sargasso Sea
DQKKMGYLCKNICPIKDYECLCGKYKRMKFRGIICEKCGVEVTKSNVRRERMGHINLATPVAHIWFLKSLPSRIALAVDMKLKEVERVLYFENFIVIEPGLTGLQKNQLLNEEELAKYQDEFGEEAFTAGIGAEAVLEMLRNLDLELERKNLANYIKETKSKVNEERAIKRLKLIESFIETGQKPEWMIMTVIPVIPPELRPLVPLDGGRFATSDLNDLYRRVINRNNRLKRLMDLKAPDIIVRNEKRMLQESVDALFDNGRRGRVITGTGKRPLKSLAEMLKGKQGRFRQNLLGKRVDYSGRSVIVVGP

SEQ ID NO: 134237 - protein, 213 aa, Unknown
  Bacterial polypetide isolated from the Sargasso Sea
METNNVNLKNWKSLIKPSKIDVDQNDNKTFAKVVAEPLEKGYGLTIGNSLRRILLSSIRGTAVTAIQIDGVQHEYSSIKGVREDVTDIVLNIKSLALKSNAEGNKKLILDAKGPGEIKASQISPVTDIEILNPDLVICNLDENTNFHMELFVGNGKGYVSAELNKPEEPPLGLIPIDSLFSPVKKVSYSVSTAREGKALDYDKLDMEIETNGS

SEQ ID NO: 134238 - protein, 308 aa, Unknown
  Bacterial polypetide isolated from the Sargasso Sea
LKAPDIMLENEKRMLQESVDALFDNGRRGRVITGTGKRPLKSLAEMLKGKQGRFRQNLLGKRVDYSGRSVIVVGPDLKLHECGLPKKMALELFKPFLYARLNKLGLASTIKQAKKLVEKETNAVWDALELIVREHPVLLNRAPTLHRLGVQAFEPKLIEGDAIELHPLTCAAFNADFDGDQMAVHVPLSLEAQLEARILMLSTNNILSPSNGKPIIVPSQDMILGIYYLSQEPLTDKPEGYFLNADQIEFALSSGQLKVHSTIISRFETVDEKGNKKFEKYTSTAGRFLLAHLLPKNKDIKFSLVDRL

SEQ ID NO: 134239 - protein, 262 aa, Unknown
  Bacterial polypetide isolated from the Sargasso Sea
VREDVTDIVLNIKSLALKSNSEGSKKLILDAKGPGEIKASNITPVADIEILNPDLVICNLDEKTHFHMEMIVGSGKGYVSADMNKPEEPPLGLIPIDSLFSPVKKVSYSISTAREGKALDYDKLTMEIETNGSISAEDALAYSARIFQDQLGMFINFDEPQEVLIKEKPTEPEFNKNLLRKVDELELSVRSMNCLKNDNIIYIGDLVQKSEGEMLRTPNFGRKSLNEIKEVLTGMSLYLGMEIPNWPPDNIAELSKKLEESI

SEQ ID NO: 134240 - protein, 143 aa, Unknown
  Bacterial polypetide isolated from the Sargasso Sea
ESARVEQRTDLDKLIIDMETNGTLDPEEAIRRSATILAEQLDAFVDLRDVSEPEAKEEKPEFDPILLRPVDDLELTVRSANCLKAEAIQYIGDLVQRTEVELLKTPNLGKKSLTEIKDVLASRGLSLGMRLENWPPESIAEKD

SEQ ID NO: 134241 - protein, 291 aa, Unknown
  Bacterial polypetide isolated from the Sargasso Sea
CARIFGPVKDYECLCGKYKRMKFRGIVCEKCGVEITKSNVRRERMGHIDLACPVAHIWFLKSLPSRIALAVDMKLKEVEKVLYFESFIVIEPGLTTLKKCQLLTEEQLNKAQEEFGEDAFSAGIGAEAVREILISLDLLKEQKKLRDSLSEIKSKVTEERTIKRLKLIESFINSGNKPEWMILTTVPVIPPELRPLVPLDGGRFATSDLNDLYRRVINRNNRLKRLLDLKAPDIIVRNEKRMLQESVDALFDNGRRGRVITGTGKRPLKSLAEMLKGKQGRFRQNLLGKRG

SEQ ID NO: 134242 - protein, 306 aa, Unknown
  Bacterial polypetide isolated from the Sargasso Sea
RSAKMMMKNCEPVVYKVLEYVVKDHPVMLNRAPTLHRLGIQAFQPVLVDGKAIQLHPLVCSAFNADFDGDQMAVHVPLSLEAQMEARMLMLASHNILHPANGQPIAVPSQDMILGSYYLTKLKDGDLGEGKIFGSIDEVVLAYENRVVGLHSKVSLKHNGDWIKDTTIGRAIFNSILPDEMEYINDLIDKKRLTNIVNQCYLIVGNYKTVIFLDNLKDLGFNMATQSGLSISVSDVLIPKGKDSILSTAFEKVEDIKRKYDRHVLTEGERYNKVIDVWTHTTNHIAQVMEDELRMDNKGFNALSMM

SEQ ID NO: 134243 - protein, 259 aa, Unknown
  Bacterial polypetide isolated from the Sargasso Sea
FRQNLLGKRVDYSGRSVIVVGPTLKLHQCGLPKLMALELFKPFVMRTLVHDNMAPNIRSAKRMVERRRPAVWPVLDEVIKEHPVLLNRAPTLHRLGIQAFEPVLVEGKAIQLHPLVCTAFNADFDGDQMAVHLPLSTEAQAEARVLMLSAHNILSPANGNPLTVPTQDMIIGAFYLTEHVEGAKGEGSVFRRLDQVERAIEAGEVSLHAQVEFRSPRTQISGGNEDEKVSYLATTAGRVLFNQALPEDFPWVNTKVTKR

SEQ ID NO: 134244 - protein, 169 aa, Unknown
  Bacterial polypetide isolated from the Sargasso Sea
REHPVMLNRAPTLHRLGIQAFEPVLVEGKAIQLHPLVCKAYNADFDGDQMAVHVPLTLEAQLECRALMMATNNILSPSNGKPIIDPSQDVVLGLYYMSREKINDLGEGRIMSSPDEVNRAYYSGTVGLQAKIKVRLKPNKLDDEPSQIVETTTGRTLLYELLPEGMSFD

SEQ ID NO: 134245 - protein, 298 aa, Unknown
  Bacterial polypetide isolated from the Sargasso Sea
GKSIQLHPLVCTAFNADFDGDQMAVHVPLSLEAQLEARVLMMSTNNILSPSSGKPIIVPSQDIVLGIYYLSIQRDNQKGEGRSFVDLFEILKALENKDVTLHTKISARIINFDGIYEKVETTPGRMILGNNLPKNKNIKFDMVNKILTKKEVSNIIDTVYRFCGQKETVLFADHIMQTGFKYAAIAGISFGKDDLIIPDDKQKLLNDTQLKVQEYESQYQDGLITQGEKYNKVVDAWSECTNKVADKMLEVISTPSDDKPINSVYMMAHSGARGSAAQLKQLSGMRGLMAKTSGELLK

SEQ ID NO: 134246 - protein, 274 aa, Unknown
  Bacterial polypetide isolated from the Sargasso Sea
DKIKSWSYGEIKKPETINYRTFRPEKDGLFCSRIFGPVKDYECLCGKYKRMKFRGIICEKCGVEVTKSNVRRERMGHIDLACPVAHIWFLKSLPSRISLAIDMKLKEVEKVLYFESFIIIEPGLTTLKKGQLISEEALVKAQEEFGEDAFSAGIGAEAVREMLVNLDLKKEQKKLRESLSEIKSKVTEERTIKRLKLIESFLSSGNKPEWMILTSVPVIPPELRPLVPLDGGRFATSDLNDLYRRVINRNNRLKRLLDLKAPDIIVRKKKECSK

SEQ ID NO: 134247 - protein, 232 aa, Unknown
  Bacterial polypetide isolated from the Sargasso Sea
METNNVNLKNWKSLIKPAKIDVDQNDDKTFAKVIAEPLEKGYGLTIGNSLRRILLSSIRGTAVTAIQIDGVQHEYSSIKGVREDVTDIVLNIKSLALKSNFEGNKKLVLDAKGPGEITASQITSVPDIEILNPNLVICNLDENTNFHMELFVGNGKGYVSAELNKPEEPPLGLIPIDSLFSPVKKVSYSVSTAREGKALDYDKLTMEIETNGSITAEDALAYSARIFQDQLG

SEQ ID NO: 134248 - protein, 293 aa, Unknown
  Bacterial polypetide isolated from the Sargasso Sea
KLEITSNDDKTIAKVIAEPLEKGFGQTIGNSLRRILLSSIQGAAVTAIQIDGVLHEFSSIKGVREDVTDIVLNVKNLAIKSSSTGAKKIILDIKGPKEVKAKDITLVPEVEILNPEQTICNLDEKTNFHMELMISNGKGYVPAPKNRSEESPLGLISIDSLFSPVKKVSFTVENTRAGSALDYDKLVMTVETNGTVAAEDAIAYSARIFQDQLSMFVNFEDPQEVVKEVKSAEPEFNRNLLKRVEELELSVRSMNCLKNDNIIYIGDLVQKTEPEMLRTPNLEENLLMKLKKF

SEQ ID NO: 134249 - protein, 286 aa, Unknown
  Bacterial polypetide isolated from the Sargasso Sea
SEAQNFNSIKITLASPEKIKSWTFGEIKKPETINYRTFRPEKDGLFCARIFGPIKDYECLCGKYKRMKFRGIICEKCGVEVTKSNVRRERMGHINLATPVAHIWFLKSLPSRISLVVDMKLKEVERVLYFENFIVIEPGLTGLKKNQLLNEEELIKYQDDYGEEAFTAGIGAEAILEILKSINLEEEKQILIKNIKETKSKVNEERSIKRLKLIESFIETGNKPEWMILTTVPVIPPELRPLVPLDGGRFATSDLNDLYRRVINRNNRLKRLIDLKAPDIIVRNEK

SEQ ID NO: 134250 - protein, 248 aa, Unknown
  Bacterial polypetide isolated from the Sargasso Sea
PLKSLAEMLKGKQGRFRQNLLGKRVDYSGRSVIVVGPDLKLHECGLPKKMALELFKPFLYARLNKLGLASTIKQAKKLVDKETNAVWDALELIVREHPVILNRAPTLHRLGVQAFEPKLIEGDAIELHPLTCAAFNADFDGDQMAVHIPLSLEAQLEARVLMMSTNNILSPSNGKPIIVPSQDMILGIYYLSQPPYQTEKVEGYFVNNSEIEQGLESGSINVHSRIISRFQTADKDGKLITEKHTSTA

SEQ ID NO: 134251 - protein, 248 aa, Unknown
  Bacterial polypetide isolated from the Sargasso Sea
VREDVIDILLNIKDMPINLIEGDSAEVTLDVKGPCDVLASSFDVPGNVELVNQDFHIATIVDKVNLKMTLTVRNGRGYEPADLREDEDRVVGALKVDASYSPVRRVSYTVDNARSGKRTDLDKLVLELETDGTLDPKMAIEHSATILQQQLGAFVDLDAIAEQEAKKDQNDFDPILLRSIEELELTVRSTNCLKAESIFLIGDLIHRSEFDLLKTPNLGKKSLNEIKDVLASKDLSLGMNVENWPPVG

SEQ ID NO: 134252 - protein, 101 aa, Unknown
  Bacterial polypetide isolated from the Sargasso Sea
KLLESFIETGQKPEWMILTVVPVIPPELRPLVPLDGGRFATSDLNDLYRRVINRNNRLKRLMDLKAPDIIVRNEKRMLQESVDALFDNGRRGRVITGTGNR

SEQ ID NO: 134253 - protein, 148 aa, Unknown
  Bacterial polypetide isolated from the Sargasso Sea
MESSVIFDKNWKSLIKPSKLQVTSNDDKSLAKVIAEPLEKGFAQTLGNSLRRILLSSIQGAAVTAIQIDGVLHEFSSIKGVREDVTDIVLNVKNLAIKQGADGPKKLILDATGPKEVKAKDITLVSDVEIINPEQTICNLDEKTKFHM

SEQ ID NO: 134254 - protein, 278 aa, Unknown
  Bacterial polypetide isolated from the Sargasso Sea
AYLVTDPGMTDLKRGQLMSEEEYLESLEQYGDDFTAAMGAEAIYEILKKIDLKVVMDQIHDDMQATSSQIKIKRYQKRLKLLESLKQSGNRPEWMILKVLPILPPDLRPLVPLDGGRFATSDLNDLYRRVINRNNRLQRLLDLNAPEIIVRNEKRMLQKSVDALLDNGRMGRAVTGSNKRPLKSLADMIKGKQGRFRQNLLGKRVDYSGRSVIVVGPTLKLHQCGIPKKMALELFKPFVFSKLIYQGEASTIKSAKRLVEQEGPEIWDILDEVIRQHP

SEQ ID NO: 134255 - protein, 273 aa, Unknown
  Bacterial polypetide isolated from the Sargasso Sea
CGKYKRLKHRGVVCEKCGVEVTQSKVRRERMGHLELASPVAHIWFLKSLPSRIGLLLDMTLREIERVLYFEAYLVTDPGMTDLTQGQMLSEEQYIEALEMYGDDFSAAMGAEAIHDILKDLDLQDNLNQIQEDMEATASQIKIKRYQKRLKLIESLISSGNRPEWMILKVLPILPPDLRPLVPLDGGRFATSDLNDLYRRVINRNNRLQRLLDLNAPDIIVRNEKRMLQKSVDALLDNGRMGRAVTGSNKRPLKSLADMIKGKQGRFRQNLLG

SEQ ID NO: 134256 - protein, 153 aa, Unknown
  Bacterial polypetide isolated from the Sargasso Sea
METAEVNTKNWKSLIKPPKLDIQLSDDKSYAKITAEPLEKGYGLTLGNSLRRILLSSIRGTAVTAIQIDGVLHEFTSIKGVREDVTDIVLNIKSLALKSNSETTSKLILDAKGPGEIKASNITTTPDIEILNPDLVICNLDENTNFHMEMTVS

SEQ ID NO: 134257 - protein, 135 aa, Unknown
  Bacterial polypetide isolated from the Sargasso Sea
MTDNYDIIKDFLTPTEIVVEESGPTRSKIVLEPLEQGFGHTLGNALRRIILSSMPGTAVSEVKIDGVLHEYSTIEGVQEDVIDILLNLKDLSVRLTEVEDAELTLSKSGSGVVTAADIELSTGVEVINPDHHIAT

SEQ ID NO: 134258 - protein, 304 aa, Unknown
  Bacterial polypetide isolated from the Sargasso Sea
EFGEDAFSAGIGAEAVREILVNLDLKNEQKKLRESLKDIKSKVTEERTIKRLKLVESFISSGNKPEWMILTSVPVIPPELRPLVPLDGGRFATSDLNDLYRRVINRNNRLKRLLDLKAPDIIVRNEKRMLQESVDALFDNGRRGRVITGTGKRPLKSLAEMLKGKQGRFRQNLLGKRVDYSGRSVIVVGPELKLHQCGLPKKMALELFKPFLYARLDKLGLATTIKQAKRLVEKEKSEVWDSLEHIIREHPILLNRAPTLHRLGVQAFEAKLIEGNAIELHPLVCAAFNADFDGDQMAVHIPLS

SEQ ID NO: 134259 - protein, 291 aa, Unknown
  Bacterial polypetide isolated from the Sargasso Sea
METAEVNPKNWKSLIKPPKLDIQLSDDKSYAKIIAEPLEKGYGLTLGNSLRRILLSSIRGTAVTALQIDGVLHEFTSIKGVREDVTDIVLNVKSLALKSNSEVNSKLVLDANGPGEIKASNITTTADIEILNPDLVICNLDENTNFHMEMTVNSGKGYVSAEMNKPEEPPLGLIPIDSLFSPVKKVSYSVSTAREGKALDYDKLTMEIETNGSISAEDAVAYSARIFQDQLGMFVNFDEPQEVIVREQPSEPEFNKNLLRKVDELELSVRSMNCLKNDNIIYIGDLVQKIR

SEQ ID NO: 134260 - protein, 58 aa, Unknown
  Bacterial polypetide isolated from the Sargasso Sea
IGDLIQRTEVELLKTPNLGKKSLTEIKDVLATRGLSLGVKLENWPPASLQREKRDNLH

SEQ ID NO: 134261 - protein, 288 aa, Unknown
  Bacterial polypetide isolated from the Sargasso Sea
MKKELTDLFKNTEISEAQNFNSIKISLASPEKIKSWTYGEIKKPETINYRTFRPEKDGLFCARIFGPIKDYECLCGKYKRMKFRGIICEKCGVEVTKSNVRRERMGHINLATPVAHIWFLKSLPSRIALAVDMKLKEIERVLYFENFIVIEPGLTGLQKNQLLNEEELAKYQDDFGEESFTAGIGAEAVLEMLKNLDLEQERKNLVNFIKETKSKVNEERAIKRLKLIESFIETGQKPEWMIMTVVPVIPPELRPLVPLDGGRFATSDLNDLYRRVINRNNRLKRLMD

SEQ ID NO: 134262 - protein, 278 aa, Unknown
  Bacterial polypetide isolated from the Sargasso Sea
AEAILEILKSLNLEEEKNILVKTINETKSKVAEERSIKRLKLIESFIETGNKPEWMILTVVPVIPPELRPLVPLDGGRFATSDLNDLYRRVINRNNRLKRLIDLKAPDIIIRNEKRMLQESVDALFDNGRRGRVITGTGKRPLKSLAEMLKGKQGRFRQNLLGKRVDYSGRSVIVVGPDLKLHECGLPKKMALELFKPFLYARLNKLGLASTIKQAKKLVEKERDEVWDALEIIVREHPVILNRAPTLHRLGVQAFEPKLIEGDAIELHPLTCAAFNA

SEQ ID NO: 134263 - protein, 290 aa, Unknown
  Bacterial polypetide isolated from the Sargasso Sea
MKEVERVLYFESFIVIEPGLTDLKKNQLLTEDELAKYQEEHGEDAFSAGIGAEAILEILKSVDLKKEREVLLKNIKETKSKVAEERSIKRLKLIDSFIETGNKPEWMILTTIPVIPPELRPLVPLDGGRFATSDLNDLYRRVINRNNRLKRLMDLKAPDIIIRNEKRMLQESVDALFDNGRRGRVITGTGKRPLKSLAEMLKGKQGRFRQNLLGKRVDYSGRSVIVVGPDLKLHECGLPKKMALELFKPFLYARLNKLGLASTIKQAKKLVEKETNAVWDALELIVREHP

SEQ ID NO: 134264 - protein, 307 aa, Unknown
  Bacterial polypetide isolated from the Sargasso Sea
FGEDAFTAGIGAEAVREILVNLDLKKEQKKLRESLNEIKSKVTEERTIKRLKLIESFINSGNKPEWMILTSVPVIPPELRPLVPLDGGRFATSDLNDLYRRVINRNNRLKRLLDLKAPDIIVRNEKRMLQESVDALFDNGRRGRVITGTGKRPLKSLAEMLKGKQGRFRQNLLGKRVDYSGRSVIVVGPELKLHQCGLPKKMALELFKPFLYARLDKLGLATTIKQAKRLVEKEKSEVWDSLEHIIREHPILLNRAPTLHRLGVQAFEAKLIEGNAIELHPLVCAAFNADFDGDQMAVHIPLSLEAQ

SEQ ID NO: 134265 - protein, 240 aa, Unknown
  Bacterial polypetide isolated from the Sargasso Sea
FEPVLIEGKAIQLHPLVCTAFNADFDGDQMAVHVPLSLEAQLEARVLMMSTNNILSPANGKPIIVPSQDIILGLYYMSMERDNEKGEGMMFSNVQEILLALGNGSVSLHAKVKARVPTRDTEDRSRVMKVIDTTPGRAQLADLLPDNPACSFELVNKLMTKREVSDVIDHVYRHCGQKDTVIFCDRLMGLGFGQACDAGISFGIADLTTPELKTKYVTEAETEVKTFEQQYLDGLITQGE

SEQ ID NO: 134266 - protein, 250 aa, Unknown
  Bacterial polypetide isolated from the Sargasso Sea
LNRAPTLHRLGIQAFEPILIEGKAIQLHPLVCTAFNADFDGDQMAVHVPLSLEAQLEARVLMMSTNNILNPSNGKPIIVPSQDIVLGLYYMTISQPGELGEGMVFGDVDEIEHALASGVVSLHARIKARFKTINEQGDSVISIVESTPGRMLLSAILPRHPRISFELINKLLTKKEVSQVIDEVYRHTGQKETVMFADKLMSLGFSHAARAGISFGKDDMIVPDAKERLVDETRKLVKEYELQYLDGLIT

SEQ ID NO: 134267 - protein, 280 aa, Unknown
  Bacterial polypetide isolated from the Sargasso Sea
LVPLDGGRFATSDLNDLYRRVIIRNNRLKRLVEIKAPEVILRNEKRMLQEAVDSLFDNTRKASAVKTDSNRPLKSLSDSLKGKQGRFRQNLLGKRVDYSARSVIVVGPELKLYECGIPKDMAAEIYKPFIIRKLIERGIVKTVKSAKKIIDRKEPVVWDILENVLKGHPVLLNRAPTLHRLGIQAFQPKLIEGKAIQLHPLVCTAFNADFDGDQMAVHLPLGPEAILEAQLLMLASHNILNPANGSPITVPSQDMVLGLYYMTKAKKSTKNNPVIGEGLT

SEQ ID NO: 134268 - protein, 160 aa, Unknown
  Bacterial polypetide isolated from the Sargasso Sea
LLKLDASFSPIKTVTYSVEAARVENRTDLDKLIVDLETDGTIDPERAIKFAGAILQNQLSIFTNLTRVQEQKKEEEIVLIDPIMLRPVDELELTVRSANCLKAENANYIGDLVQKTEVELLRTPNLGKKSLNEIKEVLASHGLSLGMELENWPPKEAVVD

SEQ ID NO: 134269 - protein, 216 aa, Unknown
  Bacterial polypetide isolated from the Sargasso Sea
GRFATSDLNDLYRRVINRNNRLKRLIDLKAPDIIIRNEKRMLQESVDALFDNGRRGRVITGTGKRPLKSLAEMLKGKQGRFRQNLLGKRVDYSGRSVIVVGPDLKLHECGLPKKMALELFKPFLYARLNKLGLASTIKQAKKLVEKERNEVWDALELIVREHPVILNRAPTLHRLGVQAFEPKLIEGNAIELHPLTCAAFNADFDGDQMAVHVPLS

SEQ ID NO: 134270 - protein, 299 aa, Unknown
  Bacterial polypetide isolated from the Sargasso Sea
LIKTINETKSKVSEERSIKRLKLIESFIETGNKPEWMILTVVPVIPPELRPLVPLDGGRFATSDLNDLYRRVINRNNRLKRLIDLKAPDIIVRNEKRMLQESVDALFDNGRRGRVITGTGKRPLKSLAEMLKGKQGRFRQNLLGKRVDYSGRSVIVVGPDLKLHECGLPKKMALELFKPFLYARLNKLGLASTIKQAKRLVEKERDEVWDALEHIVREHPVILNRAPTLHRLGVQAFEPKLIEGNAIELHPLTCAAFNADFDGDQMAVHVPLSLEAQLEARVLMMSTNNILSPSKMVSQ

SEQ ID NO: 134271 - protein, 311 aa, Unknown
  Bacterial polypetide isolated from the Sargasso Sea
EPVVYKVLEYVVKDHPVMLNRAPTLHRLGIQAFQPVLVDGKAIQLHPLVCSAFNADFDGDQMAVHVPLSLEAQMEARMLMLASHNILHPANGQPIAVPSQDMILGSYYLTKLKQGDLGEGKIFGSIDEVLLAYENRVVGLHSKISLKHDGSWVKDTTIGRAIFNSILPVEMDYVNDLIDKKRLTDIVNQCYLIVGNYKTVIFLDNLKDLGFSMATQSGLSISVSDVLIPQEKDTILSTAFDKVEDIKRKFDRHVLTEGERYNKVIDVWTHTTNHIAQVMEDDLRKDNKGFNALSMMTDSGARGSKDQIKQL

SEQ ID NO: 134272 - protein, 308 aa, Unknown
  Bacterial polypetide isolated from the Sargasso Sea
TEEEYLDICDELPSDNQYLDNDDPNKFIAAMGAEALELLLKRLDLDALSYELRHKANTETSQQRKAEALKRLQVVEAFRSANKHIENRPEWMIIKVVPVIPPELRPLVPLDGGRFATSDLNDLYRRVIIRNNRLKRLIEIKAPEVILRNEKRMLQEAVDSLFDNSRKANAVKTDANRALKSLSDSLKGKSGRFRQNLLGKRVDYSARSVIIVGPTLKLHECGLPKNMAAELYKPFIIRKMIERGIVKTVKSAKKMVDKKDPVVWDILENVLKGHPVLLNRAPTLHRLGIQAFQPKLIEGKAIQLHPLA

SEQ ID NO: 134273 - protein, 281 aa, Unknown
  Bacterial polypetide isolated from the Sargasso Sea
LLNIDLKKEKEKLRESLKSIKSKVTEERTLKRLKLIESFLDSGNKPEWMILTTVPVIPPELRPLVPLDGGRFATSDLNDLYRRVINRNNRLKRLLDLKAPDIIVRNEKRMLQESVDALFDNGRRGRVITGTGKRPLKSLAEMLKGKQGRFRQNLLGKRVDYSGRSVIVVGPELKLHQCGLPKKMALELFKPFLYARLDKLGLATTIKQAKRMVEKQKPEVWDALEHIIREHPVLLNRAPTLHRLGVQAFEAKLIEGNAIELHPLVCAAFNADFDGDQMAVH

SEQ ID NO: 134274 - protein, 282 aa, Unknown
  Bacterial polypetide isolated from the Sargasso Sea
MDTTEVNIKNWKSLIKPPKLDINLSDDKSYAKIIAEPLEKGYGLTLGNSLRRILLSSIRGTAVTAIQIDGVLHEFTSIKGVREDVTDIVLNVKSLALKSNSETANKLILDAKGPGEIKASNITTSADIEILNPDLVICNLDENTNFHMEMTVSNGKGYVSADMNKPEEPPLGLIPIDSLFSPVKKVSYSISTAREGKALDYDKLTMEVETNGSISAEDAVAYSARIFQDQLGMFVNFDEPQEVIIREQPTEPEFNKNLLRKVDELELSVRSMNCLKNDNIIY

SEQ ID NO: 134275 - protein, 261 aa, Unknown
  Bacterial polypetide isolated from the Sargasso Sea
FKKILLSSMPGAAVTDVSIDGISHEYSTIEGIREDVINILLNIKDMPINLIEGDSAEITLDVTGPCDVLASSFDVPGNVELVNQDFHVATIVDKVNLKMTLTVKTGRGYEPADLREDEDIVVGALKVDASYSPVRRVSYTVDNARSGKRTDLDKLVVELETDGTIDPKMAIEHCATILQQQLSAFVDLDAIAEQEAKKDQNDFDPILLRSIEELELTVRSTNCLKAESIFLIGDLIHRSEFDLLKTPNLGKKSLNEIKDVL

SEQ ID NO: 134276 - protein, 176 aa, Unknown
  Bacterial polypetide isolated from the Sargasso Sea
EDQPIGLVPIDAIYSPVRRVSFRVDNTRVGQVTDYDKLTIDVETDGTVTPDDAIALAARILQDQLRPFVNFEEPTVPEDTEVPAEPAFNRNLLRKVDELELSVRSANCLKNDNIIYIGDLVQKSEQEMLRTPNFGRKSLNEIKEVLSQMGLHLGMDILEWPPENIEELAKRLEEPY

SEQ ID NO: 134277 - protein, 305 aa, Unknown
  Bacterial polypetide isolated from the Sargasso Sea
DDKSYAKIIAEPLEKGYGLTLGNSLRRILLSSIRGTAVTAIQIDGVLHEFTSIKGVREDVTDIVLNVKSLALKSSSENVNKLILDVKGPGEIKASNITTSADIEILNPDLVICNLDENTNFHMEMTVNSGKGYVSAEINKPEEPPLGLIPIDSLFSPVKKVSYSVSTAREGKALDYDKLTMEVETNGSISAEDAVAYSAKIFQDQLGMFVNFDEPQEVIVRDQPSEPEFNKNLLRKVDELELSVRSMNCLKNDNIIYIGDLVQKSEGEMLRTPNFGRKSLNEIKEVLTGMSLYLGMEIPKLATRQ

SEQ ID NO: 134278 - protein, 280 aa, Unknown
  Bacterial polypetide isolated from the Sargasso Sea
TINETKSKVSEERSIKRLKLIDSFIKTGNKPEWMILTVIPVIPPELRPLVPLDGGRFATSDLNDLYRRVINRNNRLKRLMDLKAPDIIVRNEKRMLQESVDALFDNGRRGRVITGTGKRPLKSLAEMLKGKQGRFRQNLLGKRVDYSGRSVIVVGPDLKLHECGLPKKMALELFKPFLYARLNKLGLASTIKQAKKLVEKETNAVWDALELIVREHPVILNRAPTLHRLGVQAFEPKLIEGDAIELHPLTCAAFNADFDGDQMAVHIPLSLEAQLEARVL

SEQ ID NO: 134279 - protein, 228 aa, Unknown
  Bacterial polypetide isolated from the Sargasso Sea
RIGLALDITLKNLEKVLYFESHIVIDPLMSGLSQNQLLTDEELEEAIDQFGEDSFKHGIGAEAVQEILSKIDLEAEIETLVEESEATSSETKKKKILKRMKVMEGFKNSNIKPEWMVLKVLPVIPPELRPLVPLEGGRFATSDLNDLYRRVINRNNRLKRLLDLRAPDIIVRNEKRMLQESVDALFDNGRRGRVITSTNKRPLKSLSEMLKGKQGRFRQNLLGKRVDY

SEQ ID NO: 134280 - protein, 292 aa, Unknown
  Bacterial polypetide isolated from the Sargasso Sea
MVPLDGGRFATSDLNDLYRRVINRNNRLKRLMDLKAPDIIVRNEKRMLQESVDALFDNGRRGRVITGTGKRPLKSLAEMLKGKQGRFRQNLLGKRVDYSGRSVIVVGPDLKLHECGLPKKMALELFKPFLYARLNKLGLASTIKQAKKLVEKETNAVWDALELIVREHPVLLNRAPTLHRLGVQAFEPKLIEGDAIELHPLTCAAFNADFDGDQMAVHVPLSLEAQLEARILMLSTNNILSPSNGKPIIVPSQDMILGIYYLSQEPISDKPAGYFTNSDQIEFALSSSQINV

SEQ ID NO: 134281 - protein, 318 aa, Unknown
  Bacterial polypetide isolated from the Sargasso Sea
LFCARIFGPIKDYECLCGKYKRMKFRGIICEKCGVEVTKSNVRRERMGHINLATPVAHIWFLKSLPSRISLAIDMKLKEVERVLYFENFIVIEPGLTGLKKNQLLSEDELIKFQNEYGDESFTAGIGAEAILEILKNINLEQEREILVKNINETKSKVSEERSIKRLKLIDSFIKTGNKPEWMILTVIPVIPPELRPLVPLDGGRFATSDLNDLYRRVINRNNRLKRLMDLKAPDIIVRNEKRMLQESVDALFDNGRRGRVITGTGKRPLKSLAEMLKGKQGRFRQNLLGKRVDYSGRSVIVVGPDLKLHECGLPKKK

SEQ ID NO: 134282 - protein, 234 aa, Unknown
  Bacterial polypetide isolated from the Sargasso Sea
MPINLIEGDSAEVTLDVKGPCDVLASSFDVPGNVELVNQDFHIATIVDKVNLKMTLTVRNGRGYEPADLREDEDRVVGALKVDASYSPVRRVSYTVDNARSGKRTDLDKLVLELETDGTLDPKMAIEHSATILQQQLGAFVDLDAIAEQEAKKDQNDFDPILLRSIEELELTVRSTNCLKAESIFLIGDLIHRSEFDLLKTPNLGKKSLNEIKDVLASKDLSLGMNVENWPPVG

SEQ ID NO: 134283 - protein, 272 aa, Unknown
  Bacterial polypetide isolated from the Sargasso Sea
IPVIPPELRPLVPLDGGRFATSDLNDLYRRVINRNNRLKRLMDLKAPDIIIRNEKRMLQESVDALFDNGRRGRVITGTGKRPLKSLAEMLKGKQGRFRQNLLGKRVDYSGRSVIVVGPDLKLHECGLPKKMALELFKPFLYARLNKLGLASTIKQAKKLVEKETNAVWDALELIVREHPIILNRAPTLHRLGVQAFEPKLIEGDAIELHPLTCAAFNADFDGDQMAVHIPLSLEAQLEARVLMMSTNNILSPSNGKPIIVPSQDMILGIYYL

SEQ ID NO: 134284 - protein, 169 aa, Unknown
  Bacterial polypetide isolated from the Sargasso Sea
METAEVNSKNWKSLIKPPKLDIQLSDDKSYARITAEPLEKGYGLTLGNSLRRILLSSIRGTAVTALQIDGVLHEFTSIKGVREDVTDIVLNVKSLALKSNTEGNNKLILDANGPGEIKASNISTTADIEILNPDLVICNLDENTNFHMEMTVSSGKGYVSADMNKPEEP

SEQ ID NO: 134285 - protein, 306 aa, Unknown
  Bacterial polypetide isolated from the Sargasso Sea
MEVENVNVKNWKSLIKPSKLDVQISDDLTHAKIVAEPLEKGYGLTLGNSLRRILLSSIRGAAVTSIQIDGVLHEFTSIKGVREDVTDIVLNVKSLALKSNSEGTKKLILDAKGPGEIKASDIAPVADVEILNPDLVICNLDENTTFHMEMNVNTGKGYVPAELNKPEEPPLGLIAIDSLYSPVKKVSYSVSTAREGKALDYDKLIMEVETNGSISAEDAVAYSARIFQDQLKMFVNFDEPVEAPVKEVSTEPEFNKNLLRKVDELELSVRSMNCLKNDNIIYIGDLGFKSEGEMLRTPNFGRNHLM

SEQ ID NO: 134286 - protein, 294 aa, Unknown
  Bacterial polypetide isolated from the Sargasso Sea
MILTTIPVIPPELRPLVPLDGGRFATSDLNDLYRRVINRNNRLKRLMDLKAPDIIVRNEKRMLQESVDALFDNGRRGRVITGTGKRPLKSLAEMLKGKQGRFRQNLLGKRVDYSGRSVIVVGPDLKLHECGLPKKMALELFKPFLYARLNKLGLASTIKQAKKLVERERNEVWDALELIVREHPVILNRAPTLHRLGVQAFEPKLIEGNAIELHPLTCAAFNADFDGDQMAVHVPLSLEAQLEARVLMMSTNNILSPSNGKPIIVPSQDMILGIYYLSQPPYQTDRVEGYFVIL

SEQ ID NO: 134287 - protein, 173 aa, Unknown
  Bacterial polypetide isolated from the Sargasso Sea
LDIDDEIRIIREEIPQTNSETKLKKFSKRLKLLEAFNNSGNKPEWMIMNVLPVLPPDLRPLVPLEGGRFATSDLNDLYRRVINRNNRLKRLLELNAPEIIVRNEKRMLQESVDALLDNGRRGRVITGTNKRPLKSLADMIKGKGGRFRQNLLGKRVDYSGRSVIVAGPNLKLH

SEQ ID NO: 134288 - protein, 267 aa, Unknown
  Bacterial polypetide isolated from the Sargasso Sea
IKRLKLIESFIETGQKPEWMIMTVVPVIPPELRPLVPLDGGRFATSDLNDLYRRVINRNNRLKRLMDLKAPDIIVRNEKRMLQESVDALFDNGRRGRVITGTGKRPLKSLAEMLKGKQGRFRQNLLGKRVDYSGRSVIVVGPDLKLHECGLPKKMALELFKPFLYARLNKLGLASTIKQAKKLVEKETNAVWDALELIVREHPVLLNRAPTLHRLGVQAFEPKLIEGDAIELHPLTCAAFNADFDGDQMAVHVPLSLEAQLEARILM

SEQ ID NO: 134289 - protein, 207 aa, Unknown
  Bacterial polypetide isolated from the Sargasso Sea
SVTASDLQFSSQVSVVNADRPIATVADGHALELEVHVERGVGYRPVERTSEDAAALDLLQIDAVFMPVRRVNFTVDETAVGEGGSARERLRLEINTNGSITPDDALAYAANQLIALFQPLATVTLAEEPGQEPEPSAESQIPLEELNLSVRAYNCLKRAQVNSVSDLMGFSYEDLLEIKNFGAKSADEVIEALERIGISLPQSRTTA

SEQ ID NO: 134290 - protein, 281 aa, Unknown
  Bacterial polypetide isolated from the Sargasso Sea
ETINYRTFKPERDGLFCAKIFGPVRDYECLCGKYKRMKYRGIICEKCGVEVTLSKVRRERMGHIDLAAPVAHIWFLKSLPSRIGLLVDMTLKDLEKVLYFENFLVTEPGLTSLNKGQLLSEEDYESSLDEFGDESFEVSIGAEAIKKILIDMNLDEEVVKIREELIKTGSEIKRKKLVKRLKLVESFLQSGAKPEWMILDVVPVIPPELRPLVPLDGGRFATSDLNDLYRRVINRNNRLKRLIELRAPDIIIRNEKRMLQESVDALFDNGRRGRVITGVNK

SEQ ID NO: 134291 - protein, 265 aa, Unknown
  Bacterial polypetide isolated from the Sargasso Sea
FESFIVIEPGLTELKKGQLLTEDEYAKALEKYGEDGFTAGIGAEAVREILLSIDLESEKKKLRDSLKDIKSKVTEERTLKRLKLIESFIESGNKPEWMILTTVPVIPPELRPLVPLDGGRFATSDLNDLYRRVINRNNRLKRLLDLKAPDIIVRNEKRMLQESVDALFDNGRRGRVITGTGKRPLKSLAEMLKGKQGRFRQNLLGKRVDYSGRSVIVVGPELKLHQCGLPKKMALELFKPFLYARLDKLGFATTIKQAKRMVEKQ

SEQ ID NO: 134292 - protein, 299 aa, Unknown
  Bacterial polypetide isolated from the Sargasso Sea
MQTTSNVIDKNWKALIKPNKLDITSNDDKTIAKVIAEPLEKGFGQTIGNSLRRILLSSIQGAAVTAIQIDGVLHEFSSIKGVREDVTDIVLNVKNLAIKSSSSSSKKIILDIKGPKEVKAKDITLVPEIEILNPEQTICNLDEKTHFHMELMVSTGKGYVQAPKNKSEDSPLGLISIDSLFSPVKKVSFSVENTRAGSALDYDKLIMTVETNGTVDAEDAIAYSARIFQDQLSMFVNFEDPQEVIKEVKSAEPEFNRNLLKRVEELELSVRSMNCLKNDNIIYIGDLVQKTEPEMLRTP

SEQ ID NO: 134293 - protein, 193 aa, Unknown
  Bacterial polypetide isolated from the Sargasso Sea
LERGFGLTLGNALRRVLLSSLQGTSVTAVQIDGVLHEFSSVPGVREDVTEIVLNIKQIALRMHGEGPKKARLHATGPGQVTARQIELGHDIEVMNPNHVICTLDEGSSISMELTIQNGKGYVAAERDSSEDQPIGLIPVDAVYSPVRKVSYKVDNTREGKKLDYDKLTLSILTNGALTPEDAIAFAARILHRA

SEQ ID NO: 134294 - protein, 201 aa, Unknown
  Bacterial polypetide isolated from the Sargasso Sea
MIKDFLTPKEILVEEVDSNNSKIVLEPLERGFGHTLGNALRRIILSSIPGAAVSEAKINGVLHEFGSIDGVKEDVINILLNLKDLSVRLSDQEEVEISVNKSGSGDIKGSDFELPAGVEIVNPDHVVATLADKGSLEMTAKVTKGRGYVPVDIIALAESEDTEVGSLKIDASYSPIKKVSYSVENGRVENRTDLDKLILEV

SEQ ID NO: 134295 - protein, 77 aa, Unknown
  Bacterial polypetide isolated from the Sargasso Sea
MSATTNIIDKNWKALIKPNKLDINSNDDKTVAKVVAEPLEKGFGQTIGNSLRRILLSSIQGAAVTAIQIDGVLHEFH

SEQ ID NO: 134296 - protein, 176 aa, Unknown
  Bacterial polypetide isolated from the Sargasso Sea
QNLLGKRVDYSARSVIVVGPELKLYECGLPKDMAAELYKPFIIRKLIERGIVKTVKSAKKIIDRREPVVWDILENVLKGHPVLLNRAPTLHRLGIQAFQPKLIEGKAIQLHPLTCTAFNADFDGDQMAVHLPLGPEAILEAQLLMLGSHNILNPANGSPITGSSQDMVLGLYYMTK

SEQ ID NO: 134297 - protein, 299 aa, Unknown
  Bacterial polypetide isolated from the Sargasso Sea
MKKELTDLFKNSEISEAQNFNSIKISLASPEKIKSWTYGEIKKPETINYRTFRPEKDGLFCARIFGPIKDYECLCGKYKRMKFRGIICEKCGVEVTKSNVRRERMGHINLATPVAHIWFLKSLPSRIALAVDMKLKEVERVLYFENFIVIEPGLTGLQKNQILSEEELNKYQDEYGEESFTAGIGAEAVLEMLKNLDLELERKNLASYIKETKSKVNEERAIKRLKLIESFIETGQKPEWMIMTVVPVIPPELRPLVPLDGGRFATSDLNDLYRRVINRNNRLKRLMDLKAPEYYFRKK

SEQ ID NO: 134298 - protein, 137 aa, Unknown
  Bacterial polypetide isolated from the Sargasso Sea
ARVEQRTNLDRLTVDIDTDGTLDAEEILRISATILQHQLSAFAELGRLEEVIEEKEEAKIDPIMLRPVDELELTVRSANCLKAENIHYIGDLVTRMESDLLRTPNLGKKSLNEIKEVLLSRGLSLGLILENWPPETN

SEQ ID NO: 134299 - protein, 305 aa, Unknown
  Bacterial polypetide isolated from the Sargasso Sea
DRMGHIELAAPVSHIWFMKSLPSRIATLLDMTIKNLEKVLYFEQFIVVEPGLTDLTKGQIISEDQYIDYQDQHGEDSFSASIGAEAIEQMLQNIDLQSDYDQLKQDLLDTKSELKKAKITKRLKLIEHFISSKNKPEWMILRVLPVIPPELRPLVPLDGGRFATSDLNDLYRRVINRNNRLKRLIDLRAPDIIIRNEKRMLQESVDALFDNGRRGRIITSTNKRPLKSLSDMLKGKQGRFRQNLLGKRVDYSGRSVIVVGPNLKLHQCGLPKKMALELFKPFIFHKLEIYGWANTIKAAKKLVKK

SEQ ID NO: 134300 - protein, 281 aa, Unknown
  Bacterial polypetide isolated from the Sargasso Sea
GRFRQNLLGKRVDYSGRSVIVAGPELKLHQCGLPKKMAVELFKPFLYARLDKLGLATTIKQAKRMVEKEKSEVWDALETIIREHPVILNRAPTLHRLGVQAFEAKLIEGNAIELHPLVCAAFNADFDGDQMAVHIPLSLEAQLEARVLMMSTNNILSPSNGKPIIVPSQDMVLGIYYLSQSLDNGKKDDTKGYFSNVSEVEQAIESKSISIHSKIICRFETVDDKNNKITEKYKTTAGRFILSSVLPKHHKIKFSLIDRLLSKKDVSEIIDIVYRFCGQKR

SEQ ID NO: 134301 - protein, 292 aa, Unknown
  Bacterial polypetide isolated from the Sargasso Sea
PSRISLVVDMKLKDVERVLYFENFIVIEPGLTGLKKNQLLGEEELIKYQDEYGEESFTAGIGAEAVLEILKSINLEDEKNLLMKTIKETKSKVSEERSIKRLKLIESFIETGNKPEWMILTTIPVIPPELRPLVPLDGGRFATSDLNDLYRRVINRNNRLKRLMDLKAPDIIVRNEKRMLQESVDALFDNGRRGRVITGTGKRPLKSLAEMLKGKQGRFRQNLLGKRVDYSGRSVIVVGPDLKLHECGLPKKMALELFKPFLYARLNKLGLASTIKQAKKLVEKERNEVWDA

SEQ ID NO: 134302 - protein, 313 aa, Unknown
  Bacterial polypetide isolated from the Sargasso Sea
FGPVKDYECLCGKYKRMKFRGIICEKCGVEVTKSNVRRERMGHIDLACPVAHIWFLKSLPSRISLAIDMKLKEVEKVLYFESFIVIEPGLTTLKKGQLINEEDLLKAQEEFGEDAFSAGIGAEAVREILVNLDLKQEQKKLRDSLSEIKSKVTEERTIKRLKLIESFINSGNKPEWMILTSVPVIPPELRPLVPLDGGRFATSDLNDLYRRVINRNNRLKRLLDLKAPDIIVRNEKRMLQESVDALFDNGRRGRVITGTGKRPLKSLAEMLKGKQGRFRQNLLGKRVDYSGRSVIVVGPELKLHQCGLPKKWL

SEQ ID NO: 134303 - protein, 284 aa, Unknown
  Bacterial polypetide isolated from the Sargasso Sea
GQLLSEEALSKAQEEFGEDAFTAGIGAEAVRDILLSLDLAKEQKKLRDALKEIKSKVTEERTIKRLKLVESFISSENKPEWMILTTVPVIPPELRPLVPLDGGRFATSDLNDLYRRVINRNNRLKRLLDLKAPDIIIRNEKRMLQESVDALFDNGRRGRVITGTGKRPLKSLAEMLKGKQGRFRQNLLGKRVDYSGRSVIVVGPELKLHQCGLPKKMALELFKPFLYARLDKLGLATTIKQAKRLVEKEKSEVWDALEHIIREHPVILNRAPTLHRLGVQAFEA

SEQ ID NO: 134304 - protein, 295 aa, Unknown
  Bacterial polypetide isolated from the Sargasso Sea
NLKVAEERSIKRLKLIESFIETGNKPEWMILTVIPVIPPELRPLVPLDGGRFATSDLNDLYRRVINRNNRLKRLIDLKAPDIIVRNEKRMLQESVDALFDNGRRGRVITGTGKRPLKSLAEMLKGKQGRFRQNLLGKRVDYSGRSVIVVGPDLKLHECGLPKKMALELFKPFLYARLNKLGLASTIKQAKKLVEKERDEVWDALEIIVREHPVILNRAPTLHRLGVQAFEPKLIEGDAIELHPLTCAAFNADFDGDQMAVHIPLSLEAQLEARVLMMSTNNILSPSNGKPIIVPS

SEQ ID NO: 134305 - protein, 265 aa, Unknown
  Bacterial polypetide isolated from the Sargasso Sea
RRERMGHINLATPVAHIWFLKSLPSRISLAIDMKLKEVERVLYFENFIVIEPGLTGLKKNQLLGEEELIKYQDDYGEEAFTAGIGAEAILEILKSINLEEERDALIKSIKETKSKVSEERSIKRLKLIESFIETGNKPEWMILTTVPVIPPELRPLVPLDGGRFATSDLNDLYRRVINRNNRLKRLIDLKAPDIIVRNEKRMLQESVDALFDNGRRGRVITGTSKRPLKSLAEMLKGKQGRFRQNLLGKRVDYSGRSVIVVGPDL

SEQ ID NO: 134306 - protein, 242 aa, Unknown
  Bacterial polypetide isolated from the Sargasso Sea
KSLPSRIALAVDMKLKDIEKVLYFENFIVIEPGLTGLKKNQLLNEEDLAKYQDEFGEEAFSTGIGAEAVLEMLKNLDLEAERKNLVNYIKETKSKVNEERAIKRLKLIESFIETGQKPEWMIMTVVPVIPPELRPLVPLDGGRFATSDLNDLYRRVINRNNRLKRLMDLKAPDIIVRNEKRMLQESVDALFDNGRRGRVITGTGKRPLKSLAEMLKGKQGRFRQNLLGKRVDYSGRSVIVVG

SEQ ID NO: 134307 - protein, 304 aa, Unknown
  Bacterial polypetide isolated from the Sargasso Sea
MGLKKNQLLNEEELIKYQDEFGEESFTAGIGAEAILDILKSINLEEEKNLLIQTIKETKSKVSEERSIKRLKLIESFLETGNKPEWMILTTIPVIPPELRPLVPLDGGRFATSDLNDLYRRVINRNNRLKRLMDLKAPDIIVRNEKRMLQESVDALFDNGRRGRVITGTGKRPLKSLAEMLKGKQGRFRQNLLGKRVDYSGRSVIVVGPDLKLHECGLPKKMALELFKPFLYARLNKLGLASTIKQAKKLVEKERNEVWDALELIVREHPVILNRAPTLHRLGVQAFEPKLIEGNAIELHPLTC

SEQ ID NO: 134308 - protein, 199 aa, Unknown
  Bacterial polypetide isolated from the Sargasso Sea
MTNSNLRTENHFDYVKISIASPQRIMDWGQRTLPNGQIVGEVTKPETINYRTLKPEMDGLFCEKIFGPSKDWECHCGKYKRVRHRGIVCERCGVEVTESRVRRHRMGYIKLAAPVSHVWYLKGIPSYVAILLDIPLRDVEQIVYFNCYVVLDPGDHKELKYKQLLTEDEWLEIEDEIYAEDSTIENEPFVGIGAEALKQ

SEQ ID NO: 134309 - protein, 306 aa, Unknown
  Bacterial polypetide isolated from the Sargasso Sea
MGHIELASPVAHIWFLKSLPSRIGLMLDMTLRDLERILYFEQYVVVESGLTDLATGQLLTEEEYLDAQDQYGSDAFTAGIGAEAIRSMLGSINLPEEVDKLREELAEATGELKVKKIIKRLKLLESFKDSKNRPEWMILTVVPVIPPELRPLVPLDGGRFATSDLNDLYRRVINRNNRLKRLMELRAPDIIIRNEKRMLQESVDALFDNGRRGRVITGGNKRPLKSLSDMLKGKQGRFRQNLLGKRVDFSGRSVIVTGPELKLHQCGLPKKMALELFKPFIYSRLEAKGLSSTVKQAKKLVEKERP

SEQ ID NO: 134310 - protein, 252 aa, Unknown
  Bacterial polypetide isolated from the Sargasso Sea
RIGLLLDMTLKELERILYFESFVVLDEGFTSLNRRQLLSEDEYFDAMDEFGEDTFKASIGAEALKEMLSELDLEQEVVEIREGLRTTGSEMKRKKYVKRLKLIEAFIESGCRPEWMILDVVPVIPPELRPLVPLDGGRFATSDLNDLYRRVINRNNRLKRLIELRAPDIIVRNEKRMLQESVDALFDNGRRGRVITGANKRPLKSLSDMLKGKQGRFRQNLLGKRVDYSGRSVIVVGPELRLHQCGLPKKMA

SEQ ID NO: 134311 - protein, 122 aa, Unknown
  Bacterial polypetide isolated from the Sargasso Sea
PEEAIRRAATILQQQLAAFVDLKGDSEPVVVEQEDEIDPILLRPVDDLELTVRSANCLKAENIYYIGDLIQRTEVELLKTPNLGKKSLTEIKDVLASRGLSLGMRLDNWPPASLKKDDKATA

SEQ ID NO: 134312 - protein, 268 aa, Unknown
  Bacterial polypetide isolated from the Sargasso Sea
FGEEAFSAGIGAEAVLEMLKNLDLELEKKNLVSYIKETKSKVNEERAIKRLKLIESFIDTGQKPEWMIMTVVPVIPPELRPLVPLDGGRFATSDLNDLYRRVINRNNRLKRLMDLKAPDIIVRNEKRMLQESVDALFDNGRRGRVITGTGKRPLKSLAEMLKGKQGRFRQNLLGKRVDYSGRSVIVVGPDLKLHECGLPKKMALELFKPFLYARLNKLGLASTIKQAKKLVEKETNAVWDALELIVREHPVLLNRASTLHRLGVQAFE

SEQ ID NO: 134313 - protein, 310 aa, Unknown
  Bacterial polypetide isolated from the Sargasso Sea
FLYARLDKLGLATTIKQAKRLVEKEKSEVWDSLEHIIREHPILLNRAPTLHRLGVQAFEAKLIEGNAIELHPLVCAAFNADFDGDQMAVHIPLSLEAQLEARVLMMSTNNILSPSNGKPIIVPSQDIVLGIYYLSQAEDNEKKPKGIFSSIEEIEQALENKSISLHSKIVSIFKTLDKDGKPITEKYTSTAGRFLLANVLPKNNNIKFALINKLLTKKNVSEVIDTIFRYCGQKETVIFCDRIKTLGFKHAFKAGISFGKDDLIIPKTKENLISSTKKQIEEYEKQYSDGLITRGEKYNKVVDIWSKCTD

SEQ ID NO: 134314 - protein, 240 aa, Unknown
  Bacterial polypetide isolated from the Sargasso Sea
KRPLKSLAEMLKGKQGRFRQNLLGKRVDYSGRSVIVVGPELKLHQCGLPKKMALELFKPFLYARLDKLGLATTIKQAKRLVEKEKSEVWDALEHIIREHPVLLNRAPTLHRLGVQAFEAKLIEGNAIELHPLVCAAFNADFDGDQMAVHIPLSLEAQLEARVLMMSTNNILSPSNGKPIIVPSQDIVLGIYYLSQASKSEKPKGIFSNIDEIEQALENKSISLHTKIISIFETVDQNNKE

SEQ ID NO: 134315 - protein, 250 aa, Unknown
  Bacterial polypetide isolated from the Sargasso Sea
EGVREDVIDILLNIKDMPINLIEGDSAEVTLDIKGPCDVLASSFDVPGNVELVNQDFHIATIVDKVSLKMTLTVRNGRGYEPADLREDEDRVVGALKVDASFSPVRRVSYTVDNARSGKRTDLDKLVLELETDGTLDPKMAIEHSATILQQQLGAFVDLDAIAEQEAKKDQNDFDPILLRSIEELELTVRSTNCLKAESIFLIGDLIHRSEFDLLKTPNLGKKSLNEIKDVLASKELSLGMNVENWPPVG

SEQ ID NO: 134316 - protein, 223 aa, Unknown
  Bacterial polypetide isolated from the Sargasso Sea
FETDSETEIMNPDQLIMTLDSNADVEIEANVETGKGYVSAEVAEDENKVIGEIKLDAMFSPIIKATYKVENSRVGQVTDFDKLVLEVETNGAITPDDAIALAARILQDQLQPFINFDEPETQPDQSKVEALSFNSNLLKKVEELELSVRSANCLKNDNIIYIGDLVQKSESEMLRTPNFGRKSLNEIKEVLQQMELNLGMSVPDWPPENIDELAKKYEDPFNK

SEQ ID NO: 134317 - protein, 314 aa, Unknown
  Bacterial polypetide isolated from the Sargasso Sea
EKFALIEEDEYLDYEEQFGYMAVSEEDRDNENYFYAIMGGEAMKEMLSRLSIVDLKNELIDIVKTSKSKQKRGDALKRLKVVQSFVADPTKKRINKPEWMIVSILPVIPPELRPLVPLEGGRFAASDLNDLYRRIIIRNNRLKQLMEIKAPDVILRNEKRMLQEAVDALFDNNRRKTAIRSGSRRPLKSLSDMLRGKTGRFRQNLLGKRVDYSGRSVIVVGPQLQLHECGMPKNMALELFKPHMIHELMARGYTQTPRSAKLMVENQEPVVYKVLEYVVQDHPVLLNRAPTLHRLGIQAFQPVLVDGKAIQLHP

SEQ ID NO: 134318 - protein, 308 aa, Unknown
  Bacterial polypetide isolated from the Sargasso Sea
LLNRAPTLHRLGVQAFEAKLIEGNAIELHPLVCAAFNADFDGDQMAVHIPLSLEAQLEARVLMMSTNNILSPSNGKPIIVPSQDIVLGIYYLSQSSKSDKPKGIFSNIDEIEQALENKSISLHTKIISIFQTVDKDNNIVKQKYASTAGRFLLANLLPKNYNIKFTLIDKLLTKKNVSEVIDTIFRYCGQKETVIFCDRIKTLGFKHAFKAGISFGKDDLIIPKTKENLINDTKKKIEEYEKQYSDGLITRGEKYNKVVDIWSKCTDTVANEMMKEISSAEKVYENDRIETNSVYMMADSGARVPKRK

SEQ ID NO: 134319 - protein, 303 aa, Unknown
  Bacterial polypetide isolated from the Sargasso Sea
GGRFATSDLNDLYRRVINRNNRLKRLMDLKAPDIIVRNEKRMLQESVDALFDNGRRGRVITGTGKRPLKSLAEMLKGKQGRFRQNLLGKRVDYSGRSVIVVGPDLKLHECGLPKKMALELFKPFLYARLNKLGLASTIKQAKKLVEKETNAVWDALELIVREHPILLNRAPTLHRLGVQAFEPKLIEGDAIELHPLTCAAFNADFDGDQMAVHIPLSLEAQLEARVLMMSTNNILSPSNGKPIIVPSQDMILGIYYLSQPPYQTDKVEGYFVNNSEIEQGLESGSINVHSRIISRFETVDETR

SEQ ID NO: 134320 - protein, 289 aa, Unknown
  Bacterial polypetide isolated from the Sargasso Sea
ARIFGPIKDYECLCGKYKRMKFRGIICEKCGVEVTKSNVRRERMGHINLATPVAHIWFLKSLPSRISLTIDMKLKEVERVLYFENFIVIEPGLTNLKKHQLLNEEELIKYQDEYGEEAFTAGIGAEAILEILKSLNLEDERNLLIKTINETKSKVAEERSIKRLKLIESFIETGNKPEWMILTVIPVIPPELRPLVPLDGGRFATSDLNDLYRRVINRNNRLKRLMDLKAPDIIVRNEKRMLQESVDALFDNGRRGRVITGTGKRPLKSLAEMLKGKQGRFRQNLLGKR

SEQ ID NO: 134321 - protein, 231 aa, Unknown
  Bacterial polypetide isolated from the Sargasso Sea
PSKDWECHCGKYKRVRHRGIVCERCGVEVTESRVRRHRMGYIKLAAPVSHVWYLKGIPSYVAILLDIPLRDVEQIVYFNCYVVLDPGDHKELKYKQLLTEDEWLEIEDEIYAEDSTIENEPFVGIGAEALKQLLEDLDLNQVAEELREEITNSKGQKRAKLIKRIRVIDNFIATNAKPEWMVLDAIPVIPPDLRPMVQLDGGRFATSDLNDLYRRVINRNNRLARLQEILA

SEQ ID NO: 134322 - protein, 308 aa, Unknown
  Bacterial polypetide isolated from the Sargasso Sea
LNQNWVDISTISSTHAKISIEPLERGFGHTLGNALRRVLLSSLPGSAVTEVTIENILHEYSTIEGVQEDVLEILLNIKKLALVLPSKDTLDITLRKKGLGPVLASDISDNPDLEIKNPNFCLANITNDKTELVINMTVTKGRGYQQAQKRKFNELDDLGIGKMQLDASFSPVVLVTYNVETARVKQRTDLDKLVIDLKTNATIEPEDAIRKAGQLLRNQLDVFTYLEVHEETEEESDTPQIDPVLLRPVDDLELTVRSANCLKAENIYYIGDLVQRSENELLKTPNLGKKSLTEIKDVLATHSLQLGQ

SEQ ID NO: 134323 - protein, 200 aa, Unknown
  Bacterial polypetide isolated from the Sargasso Sea
MTDNYDIIKDFLTPTEIVVEELGPTRSKIVLEPLEQGFGHTLGNALRRIILSSMPGTAVSEVKIDGVLHEYSTIEGVQEDVIDILLNLKDLSVRLVEVEDAELTLSKSGSGVVTASDIELSTGVEVINPDHHIATLNEEGSINMTMKVTRGRGFVPVRPLDEDEGQETGLLRLDATYSPIKRVTYQVDNARVEQRTNLDR

SEQ ID NO: 134324 - protein, 273 aa, Unknown
  Bacterial polypetide isolated from the Sargasso Sea
MFHIFGFFKATPSRMGLILGMTMRDLERVLYYDNHIVIDSGNTPLKEKQLLSEEEYREAIDQFGYDSFTAMIGAAGIRELLSKINPSEMLKELEEAMMNTRSKQTRQKIVNQMKVMEGFLKNGSRPEWMILEVLPVIPPNLRPLVPLEGGRFATSDLNDLYRRVINRNNRLRTLLALKTPEVIIRNEKRMLQQSVDALFDNGRHGRAVTGPGNRPLKSLSDMLKGKQGRFRQNLLGKRVDYSGRSVIVVGPTLKLNQCGLPKKMALILFEPFI

SEQ ID NO: 134325 - protein, 207 aa, Unknown
  Bacterial polypetide isolated from the Sargasso Sea
MEVENVNVKNWKSLIKPSKLDVQISDDLTHAKIVAEPLEKGYGLTLGNSLRRILLSSIRGAAVTSIQIDGVLHEFTSIKGVREDVTDIVLNVKSLALKSNSDGTKKLILDAKGPGEIKASDIAPVADVEILNPDLVICNLDENTTFHMEMNVNTGKGYVPAELNKPEEPPLGLIAIDSLYSPVKKVSYSVSTAREGKALDYDKLIME

SEQ ID NO: 134326 - protein, 297 aa, Unknown
  Bacterial polypetide isolated from the Sargasso Sea
KLDLKAEREKLRLLLKDIKSKVSEERAIKRLKLIESFIHSGNKPEWMILTCIPVIPPELRPLVPLDGGRFATSDLNDLYRRVINRNNRLKRLIDLKAPDIIVRNEKRMLQESVDALFDNGRRGRVITGTGKRPLKSLAEMLKGKQGRFRQNLLGKRVDYSGRSVIVAGPELKLHQCGLPKKMAVELFKPFLYARLDKLGLATTIKQAKKMVEKEKPEVWDSLETIIREHPVILNRAPTLHRLGVQAFEAKLIEGSAIELHPLVCSAFNADFDGDQMAVHIPLSLESQIEARVLMMST

SEQ ID NO: 134327 - protein, 201 aa, Unknown
  Bacterial polypetide isolated from the Sargasso Sea
QIDGVLHEFSSIKGVREDVTDIVLNIKSLALKSHSEGTKKLILDAKGPGEIKASNIAPVSDIEILNPDLVICNLDDNTNFHMEMNVNTGKGYVSADLNKPEDPPLGLIPIDSLYSPVKRVSYSVSTAREGKALDYDKLIMEVETNGSISAEDAVAYAARIFQDQLGMFVNFDEPQEVIVRDKPTEPEFNKNLLRKVDELEL

SEQ ID NO: 134328 - protein, 293 aa, Unknown
  Bacterial polypetide isolated from the Sargasso Sea
GEVTKPETINYRTLKPEMDGLFCEKIFGPSKDWECHCGKYKRVRHRGIVCERCGVEVTESRVRRHRMGFIKLAAPVSHVWYLKGIPSYVAILLDMPLRDVEQIVYFNCYVVLDPGDHKDLKYKQLLTEDEWLEIEDEIYAEESEIENEPVVGIGAEALKQLLEDLTLDEVAEQLREEINGSKGQKRAKLIKRLRVIDNFIATSARPEWMVLDVIPVIPPDLRPMVQLDGGRFATSDLNDLYRRVINRNNRLARLQEILAPEIIVRNEKRMLQEAVDALIDNGRRAARWWAPTT

SEQ ID NO: 134329 - protein, 242 aa, Unknown
  Bacterial polypetide isolated from the Sargasso Sea
MEITSNDDKSVAKVIAEPLEKGFGQTIGNALRRILLSSIQGAAVTAIQIDGVLHEFSSIQGVREDVTDIVLNVKNLAIKSSSSGSKKIILDIKGPKEVKASDITLVPDIEILNPDLTICNLDEKTHFHMELIINTGKGYVPAPKNKSEDSPLGLISIDSLFSPVKKVSFSIENTRAGSALDYDKLVMTVETNGTVAAEDAVAYSARIFQDQLSMFVNFEDPKETIKETKSVEPEFNKNLLKR

SEQ ID NO: 134330 - protein, 278 aa, Unknown
  Bacterial polypetide isolated from the Sargasso Sea
NILKGHPVLLNRAPTLHRLGIQAFQPKLIEGKAIRLHPLVTTAFNADFDGDQMAVHLPLGNAAILEAQMLMLASHNILNPANGAPISVPSQDMVLGLYYLTKGRKSTKEKVIKGEGSIFYSPEEVIIAYNEKQLDLHAHIKVKVKDLDENNEFVTKLIETTCGRVIFSQYVPEEAGFINTDLTKKALRDIIGHVLKLSGTSTTAKFLDDIKTLGYNMAFKGGLSFNLDDVIIPLEKDKLVNKADADVKEVMANYNMGLITNNERYNQIIDIWTHTNSR

SEQ ID NO: 134331 - protein, 229 aa, Unknown
  Bacterial polypetide isolated from the Sargasso Sea
METNNVNIKNWKSLIKPAKIDIDQNDDKTFAKVIAEPLEKGYGLTIGNSLRRILLSSIRGTAVTAIQIDGVQHEYSSIKGVREDVTDIVLNVKSLALKSNLEGNKKLILDAKGPGEIKASQITPVSDIVILNPDLVICNLDENTNFHMELFVGNGKGYVSAELNKPEEPPLGLIPIDSLFSPVKKVSYSVSTAREGKALDYDKLIMEIETNGSITAEDALAYSARIFQD

SEQ ID NO: 134332 - protein, 290 aa, Unknown
  Bacterial polypetide isolated from the Sargasso Sea
NPERDGLFCARIFGPIKDYECLCGKYKRMKYRGIICEKCGVEVTLSKVRRERMAHIELASPVAHIWFLKSLPSRIALLLDMTLKDVERVLYFENYIVTEPGLSPLEEGQLLTEEGFIEAQDDYGEDAFEAMIGAEALKKMLSEIDLEEEREELRIDMKETGSEAKRKKYVKRLKLVESFIESGARPEWMILEVVPVIPPELRPLVPLDGGRFATSDLNDLYRRVINRNNRLKRLIELRAPDIIVRNEKRMLQEAVDALFDNGRRGRTITGANKRPLKSLSDMLKGKQGRF

SEQ ID NO: 134333 - protein, 314 aa, Unknown
  Bacterial polypetide isolated from the Sargasso Sea
KEQQKLRESLKEIKSKVTEERTIKRLKLIESFINSGNKPEWMILTSVPVIPPELRPLVPLDGGRFATSDLNDLYRRVINRNNRLKRLLDLKAPDIIVRNEKRMLQESVDALFDNGRRGRVITGTGKRPLKSLAEMLKGKQGRFRQNLLGKRVDYSGRSVIVVGPELKLHQCGLPKKMALELFKPFLYARLDKLGLATTIKQAKRLVEKEKSEVWDSLEHIIREHPILLNRAPTLHRLGVQAFEAKLIEGNAIELHPLVCAAFNADFDGDQMAVHIPLSLEAQLEARVLMMSTNNILSPSNGKPIIVPKSGYSIR

SEQ ID NO: 134334 - protein, 100 aa, Unknown
  Bacterial polypetide isolated from the Sargasso Sea
MDTSEVNIKNWKSLIKPPKLDVNLSDDKSYAKIVAEPLEKGYGLTLGNSLRRILLSSIRGTAVTAIQIDGVLHEFTSIKGVREDVTDIVLNIKSLALKSN

SEQ ID NO: 134335 - protein, 260 aa, Unknown
  Bacterial polypetide isolated from the Sargasso Sea
VRNEKRMLQESVDALFDNGRRGRVITGTGKRPLKSLAEMLKGKQGRFRQNLLGKRVDYSGRSVIVVGPELKLHQCGLPKKMALELFKPFLYARLDKLGLATTIKQAKRLVEKEKSEVWDALENIIREHPILLNRAPTLHRLGVQAFEAKLIEGNAIELHPLVCAAFNADFDGDQMAVHIPLSLEAQLEARVLMMSTNNILSPSNGKPIIVPSQDIVLGIYYLSQASKKDNKPKGIFSNIDEIEQALENKSISLHTKIIQN

SEQ ID NO: 134336 - protein, 252 aa, Unknown
  Bacterial polypetide isolated from the Sargasso Sea
ELETISSTTKSKQKREDALKRLKVVKDFAQDRNNKPEWMIVSILPVMPPELRPLVPLEGGRFAASDLNDLYRRIIIRNNRLKQLMDIQAPEVILRNEKRMLQESVDALFDNTKRKTAIRSGSKRPLKSISDMLRGKQGRFRQNLLGKRVDYSGRSVIVVGPELRMTECGIPKNMALELFKPHLIRELIRRDLAATPRSAKLMIENKESFVYEILESVVKDHPVLLNRAPTLHRLGIIAFPAIYLLTVKLFES

SEQ ID NO: 134337 - protein, 301 aa, Unknown
  Bacterial polypetide isolated from the Sargasso Sea
IALMMDMKLKDLEKVLYFEKFMVTEPGLTPLIQNQLLDEEELENAKEEYGEDSFSAGIGAEAVRKVLERIELEPELEALRTKLSETKAVALSEKLVKRIKIFEAFISSGNRPEWMILTSVPVIPPELRPLVPLDGGRFASSDLNDLYRRVINRNNRLSRLIELRAPDIIIRNEKRMLQESVDALFDNGRRGRVITGTNKRPLKSLAEMLKGKQGRFRQNLLGKRVDYSGRSVIVVGPELKLHQCGLPKKMAIELFKPFIYARLESLGLATTLKQAKKMGEKERPEVWDVLDRVIREHPVIL

SEQ ID NO: 134338 - protein, 297 aa, Unknown
  Bacterial polypetide isolated from the Sargasso Sea
ALELFKPFIFHKLDIYGWANTIKAAKKLVEKEDPRVWDILEEVIREHPVLLNRAPTLHRLGIQAFEPILIEGKSIQLHPLVCTAFNADFDGDQMAVHVPLSLEAQLEARVLMMSTNNILSPSSGKPIIVPSQDIVLGIYYLSIQRDNQKGEGRYFVDLNEIEKALENSDLSLHSKINARIKDNNDQNIIIQTTPGRMILGNILPKNENINFEMINKVLTKKEVSNIIDTVYRFCGQKETVLFADHIMQIGFKYAAIAGISFGKDDLIIPNDKNDLLNETQIKVQEYEDQYQDGLITQ

SEQ ID NO: 134339 - protein, 284 aa, Unknown
  Bacterial polypetide isolated from the Sargasso Sea
PLEKGYGLTLGNSLRRILLSSIRGAAVTSIQIDGVLHEFTSIKGVREDVTDIVLNVKSLALKSNSEGTKKLILDAKGPGEIKASDITPVADVEILNPDLVICNLDENTTFHMEMNVNTGKGYVPAELNKPEEPPLGLIAVDSLYSPVKKVSYSVSTAREGKALDYDKLIMEVETNGSISAEDAVAYSARIFQDQLKMFVNFDEPVEAPVKEVSTEPEFNKNLLRKVDELELSVRSMNCLKNDNIIYIGDLVQKSEGEMLRTPNFGRKSLNEIKEVLTGMSLYLG

SEQ ID NO: 134340 - protein, 70 aa, Unknown
  Bacterial polypetide isolated from the Sargasso Sea
MQISVIDLLVPTEIQVENVSDTVSKVTLEPLERGFGHTLGNALRRILLSSMPGAAVTDVVIDGISHEYST

SEQ ID NO: 134341 - protein, 196 aa, Unknown
  Bacterial polypetide isolated from the Sargasso Sea
VMDPDHVIATLVEPKKLVMTLKVETGTGYVPSENNKNKSVDSLHLDAIFSPVKRVNYKVENTRVENRTDLDKLILDLETDGTIDPKQAVKYAATIMQHQLAVFVDEELVSRKEKRKDKYDFDPLLLRSIEELELTVRSTNCLKAENIFLIGDLIQRSEMDLLKTPNLGKKSLNEIKDELASRGLSMGTVLKNWPPM

SEQ ID NO: 134342 - protein, 237 aa, Unknown
  Bacterial polypetide isolated from the Sargasso Sea
LKDMPVKLIEGNEAELKLSVDGPCEVTSSSFEAPGNVELTDADHHVVSLVDKIKLNMSVFVRTGRGYEPADIRDDENNTVGGLKVDASFSPVKRVSYSVENARFEKRTDLDKLILELETDGTIDAKMAIEHSATIMQQQLAAFVDLEAIAEQEAKKEQNDFDPLLLRSIEELELTVRSTNCLKAESIFLIGDLIQRSEFDLLKTPNLGKKSLNEIKDVLASKGLSLGMVLDNWPPMG

SEQ ID NO: 134343 - protein, 314 aa, Unknown
  Bacterial polypetide isolated from the Sargasso Sea
KVGDLLNESMYRDFKDKFGPVFVAEMGADAVLKLLKKIDLDEISGNLKEEIAVTSGQKRKKSLKRLRVVEAFRTSGNKPEWMILNVLPVLPPDLHPMVQLDGGRFATSDLNDLYRRVINRNNRLKHLLDLEAPEIIVRNEKRMLQEAVDALVDNGRRGRAIQGSHNHVLKSLTDLLRGKQGRFRQNLLGKRVDYSGRSVIVVGPDLKLNECGLPRKMALELFKPLVMNALVIQGYAHNIKSAKRKAESGDEEVWDILQEVIKDHPVLLNRAPTLHRLGIQAFQPVLVEGSAIRLHPLVCPAFNADFDGDQMAVH

SEQ ID NO: 134344 - protein, 296 aa, Unknown
  Bacterial polypetide isolated from the Sargasso Sea
SVDALFDNGRRGRVITGTNKRPLKSLAEMLKGKQGRFRQNLLGKRVDYSGRSVIVVGPELKLHQCGLPKKMAIELFKPFIYARLESLGLATTLKQAKKMVEKERPEVWDVLDRVIREHPVILNRAPTLHRLGVQAFEPVLIEGKAIQLHPLVCTAFNADFDGDQMAVHVPLSLEAQLEARVLMMSTNNILNPANGKPVIVPSQDIVLGIYYLSQEKDNEPGEGKVFKDVYEVQQALENNATTVHAKVNARINFIDLDGNKKIKRIETTPGRVLLWNLVPQHKDLDPKIVNRLLGKK

SEQ ID NO: 134345 - protein, 278 aa, Unknown
  Bacterial polypetide isolated from the Sargasso Sea
NQLFDEEELENAKEEYGEDSFSAGIGAEAVRKVLERIELEPELEALRTKLSETKAVALSEKLVKRIKIFEAFISSGNRPEWMILTSVPVIPPELRPLVPLDGGRFASSDLNDLYRRVINRNNRLSRLIELRAPDIIIRNEKRMLQESVDALFDNGRRGRVITGTNKRPLKSLAEMLKGKQGRFRQNLLGKRVDYSGRSVIVVGPELKLHQCGLPKKMAIELFKPFIYARLESLGLATTLKQAKKMVEKERPEVWDVLDRVIREHPVILNRAPTLHRLG

SEQ ID NO: 134346 - protein, 248 aa, Unknown
  Bacterial polypetide isolated from the Sargasso Sea
MIEKNWKEIIKPSKLEVRNEQNPEYTSTIVAEPLERGYGVTIGNALRRILLSSLQGSAITSIQVQGVLHEFSSIPGVREDLTDIILNVKGIKVRMDFDGIKKIQLNVDGPSTVTAGMIVCPPEVEIMNKDHEICTLDQGAKLNVEFSVENGKGYVSSAINRKEDIPIGVIPIDAIFSPVVQVSYNVDNARVGQQTDYDKLSLMVTTDGSVSPEDAVAFSARIMQDQLNNFINFEEPEEEEVAEVLEDL

SEQ ID NO: 134347 - protein, 204 aa, Unknown
  Bacterial polypetide isolated from the Sargasso Sea
MTNSNLRTENHFDYVKITLASPERVMEWGQRTLPNGQVVGEVTKPETINYRTLKPEMDGLFCEKIFGPSKDWECHCGKYKRVRHRGIVCERCGVEVTESRVRRHRMGFIKLAAPVSHVWYLKGIPSYVAILLDMPLRDVEQIVYFNCYVVLDPGDHKDLKYKQLLTEDEWLEIEDEIYAEESEIENEPVVGIGAEALKQLLEDL

SEQ ID NO: 134348 - protein, 278 aa, Unknown
  Bacterial polypetide isolated from the Sargasso Sea
NSDTKLKKLSKRLKLMEAFKDSGNAPEWMVLTVLPVLPPDLRPLVPLDGGRFATSDLNDLYRRVINRNNRLKRLLDLSAPDIIVRNEKRMLQESVDALLDNGRRGRAITGSNKRPLKSLADMIKGKQGRFRQNLLGKRVDYSGRSVIVVGPTLKLHECGLPKKMALELFKPFIFAKLEGRGLATTIKAAKKMVERETAEVWDILAEVIREHPVMLNRAPTLHRLGIQAFEPVLIEGKAIQLHPLVCAAFNADFDGDQMAVHVPLTLEAQLEARASMMS

SEQ ID NO: 134349 - protein, 328 aa, Unknown
  Bacterial polypetide isolated from the Sargasso Sea
MEIDLPSLNEHLRKEMREVTSETRRKRIHKRLNLVSALVDSGNTASSMIIENLPVLPPELRPLVPLEGGRFATSDLNDLYRRVIHRNNRLKRLIELRAPGIIVKNEKRMLQESVDALFDNGRRGRPMVGSNKRPLKSLSDMLKGKQGRFRQNLLGKRVDYSGRTVIVVGPDLKLHQCGLPKKMALELFKPFIFHRLIDYQEVHTIKNAKRKLEENDPRVWAILEEVVKEHPILLNRAPTLHRLGIQAFEPVLIEGKAIQLHPLVCTAFNADFDGDQMAVHVPLSVEAQLESKILMLSTNNVLSPANGKPLMSPTQDMVLGVYWITRER

SEQ ID NO: 134350 - protein, 285 aa, Unknown
  Bacterial polypetide isolated from the Sargasso Sea
GSRRPLKSLSDMLRGKTGRFRQNLLGKRVDYSGRSVIVVGPQLRLQECGLPKNMALELFKPHMIRELMGRGYTQTPRSAKLMIENCEPVVYKVLEYVVKDHPVMLNRAPTLHRLGIQAFQPVLVDGKAIQLHPLVCSAFNADFDGDQMAVHVPLSLEAQMEARMLMLASHNILHPANGQPIAVPSQDMILGSYYLTKLKDGDLGEGKIFGSLDEVVLAYENRVVGLHCKVSLKHAGSWIKETTVGRAIFNSILPDEMEYINELIDKKRLTNIVNQCYLIVGNYKS

SEQ ID NO: 134351 - protein, 318 aa, Unknown
  Bacterial polypetide isolated from the Sargasso Sea
EKDGLFCEKNFGPQKDWECYCEKYKKIRYRGVICDRCGVEVARSKVRRERMGTITLAAPVAHIWFAKGSPSRLGMILDLSPRNLERILYFAQYLVTKVNDESKESLKEKIEDEIKNLNLNLEEDKKEEKNKSDQPIETSDEEEMEDDEPILTKEQIKEKIDELNVILSDLKTLKLGLLLTDQKYKSIRNISIRYQIDVFSAEMGAEAVTKVLKTINLDSLRDELQKEIRETTGQRLKKAVKRLRVVEAFRKSGNALESMILEVIPVLPPELRPMVQLDGGRFAASDLNDLYRRVINRNNRLKRLLELSAPEIIVRKKN

SEQ ID NO: 134352 - protein, 245 aa, Unknown
  Bacterial polypetide isolated from the Sargasso Sea
IDLEADFEKAKVELTETKSELKKTKLTKRIKLLESFIVSKNKPEWMILRVLPVIPPELRPLVPLDGGRFATSDLNDLYRRVINRNNRLKRLIDLRAPDIIIRNEKRMLQESVDALFDNGRRGRVITSTNKRPLKSLSDMLKGKQGRFRQNLLGKRVDYSGRSVIVVGPNLKLHQCGIPKKMALELFKPFIFHKLDIYGWANTIKAAKKLVEKEDPRVWDILEEVIREHPILLNRAPTLHRLGIQA

SEQ ID NO: 134353 - protein, 264 aa, Unknown
  Bacterial polypetide isolated from the Sargasso Sea
IDGVQHEYSSIKGVREDVTDIVLNIKSLALKSNFEGSKKLILDAKGPGEIKAAQITPIPDIEILNPDLVICNLDENTNFHMELFIGNGKGYISAELNKPEEPPLGLIPIDSLFSPVKKVSYSVSTAREGKALDYDKLTMEIETNGSITAEDALAYSARIFQDQLGMFINFDEPQEIKIQDQPKEPEFNQNLLRKVDELELSVRSMNCLKNDNIIYIGDLVQKSEGEMLRTPNFGRKSLNEIKEVLSGMSLYLGMEIPNWPPDNI

SEQ ID NO: 134354 - protein, 143 aa, Unknown
  Bacterial polypetide isolated from the Sargasso Sea
VDNARVKQKADLDKLIIELETNSTINPEDAIRTAGKILREQLEVFSHLEIKDDTQDEVDEHDIDPVLLRPVDDLELTVRSANCLKAENIHYIGDLVQRSENELLKTPNLGKKSLTEIKDVLSTHSLSLGQIIEDWPPKSIERR

SEQ ID NO: 134355 - protein, 206 aa, Unknown
  Bacterial polypetide isolated from the Sargasso Sea
VCPAFNADFDGDQMAVHVPLGLEAQAEARLLMLATHNWLSPATGEPSILPSQDMILGFYYLTTLKPTISHKRTTNLASGLTNKVPYQLNTIYNSFESVLHAYDINKIDLHEMVWLRWSSYIQTQNPFPLQLNISPNGHVTSIYDSFVIESDSDQQDCLVKSPEITQTTKKIVSYQSEMSVTGSSFYIRTTPGRVLFNNLIYENLFL

SEQ ID NO: 134356 - protein, 239 aa, Unknown
  Bacterial polypetide isolated from the Sargasso Sea
VFLLEGRDDVLLLLKKSGPGNIVVGDFELPHDVKVVNPDHLVARLSKEAELDLQIRVQKGRGYVPGNFRRYDDEETKTIGKIVIDASFSPVKRVSYLVENARVEQRTDLDKLVMEVETNGVISPEDAVRQAARILVEQLKVFAALDKGEPEDEQPKGQQFDPTLLRPVDDLELTVRSANCLKAESIYYIGDLIQRSENELLKTPNLGRKSLNEIKEVLATKGLTLGMKLENWPPTGFEH

SEQ ID NO: 134357 - protein, 311 aa, Unknown
  Bacterial polypetide isolated from the Sargasso Sea
VRNEKRMLQESVDALFDNGRRGRVITGTGKRPLKSLAEMLKGKQGRFRQNLLGKRVDYSGRSVIVVGPELKLHQCGLPKKMALELFKPFLYARLDKLGLATTIKQAKRLVEKEKSEVWDSLEHIIREHPILLNRAPTLHRLGVQAFEAKLIEGNAIELHPLVCAAFNADFDGDQMAVHIPLSLEAQLEARVLMMSTNNILSPSNGKPIIVPSQDIVLGIYYLSQSDENDKKPKGIFSNIEEIEQALESNVISLHSKIISTFNTIDNNGKPIVEKYTSTAGRFLLANVLPKNSNIKFSLINKLFNKKECFRG

SEQ ID NO: 134358 - protein, 285 aa, Unknown
  Bacterial polypetide isolated from the Sargasso Sea
MTNSNLRTENHFDYVKIKLASPERVMEWGQRTLPNGQVVGEVTKPETINYRTLKPEMDGLFCEKIFGPSKDWECHCGKYKRVRHRGIVCERCGVEVTESRVRRHRMGFIKLAAPVSHVWYLKGIPSYVAILLDMPLRDVEQIVYFNCYVVLDIGDSKDLKYKQLLTEDEWLEIEDEIYAEDSTIENEPIVGIGAEALKQLLEDLNLKEVAEQLREEIATSKGQKRAKLIKRLRVIDNFIATSASPEWMVLDAIPVIPPDLRPMVQLDGGRFATSDLNDLYRKSKS

SEQ ID NO: 134359 - protein, 307 aa, Unknown
  Bacterial polypetide isolated from the Sargasso Sea
TSDLNDLYRRVINRNNRLKRLLELNAPEIIVRNEKRMLQESVDALLDNGRRGRVITGTNKRPLKSLADMIKGKGGRFRQNLLGKRVDYSGRSVIVAGPNLRLHQCGLPKKMALELFKPFVYGKLEQRELATTIKGAKKLVERETPEVWEVLEEVIREHPVLLNRAPTLHRLGLQAFEPKLIEGKAIQLHPLVCVAFNADFDGDQMAVHVPLTLEAQLEARALMMSTNNILSPADGSPIINPTQDIVLGLYYMTRDNANAFGAGRVFSNSDEVLRAYETENLEIHSPIKVRIDNGEGETSLQETTVGR

SEQ ID NO: 134360 - protein, 193 aa, Unknown
  Bacterial polypetide isolated from the Sargasso Sea
IVDDEKPIATIQEGHNLELEIHVERGVGYRPVDRKSEETTAIDLLQIDAVFMPVKRVNFTIDETAVAEGGAGRERLKMEVVTDGSTSPDDAIAEAANQLIELFQPLATVTMVEEIPEEPEPSPEAQIPLEELNLSVRAYNCLKRAQVNSVSDLMGFSYEDLLEIKNFGSKSADEVIEALERIGISIPQSRTSV

SEQ ID NO: 134361 - protein, 270 aa, Unknown
  Bacterial polypetide isolated from the Sargasso Sea
MTDNYDIIKDFLTPTEIVVEESGPTRSKIVLEPLEQGFGHTLGNALRRIILSSMPGTAVSEVKIDGVLHEYSTIEGVQEDVIDILLNLKDLSVRLTEVEDALLTLSKSGSGVVTAADIELSTGVEVINPDHHIATLNEEGSINMTMKVTRGRGFVPVRPLDEDEGQETGLLRLDATYSPIKRVTYQVDNARVEQRTNLDRLTVDIDTDGTLEAEEILRISATILQHQLSAFAELGRLEEVIEEKEEAKIDPIMLRPVDELELTVRSANCL

SEQ ID NO: 134362 - protein, 271 aa, Unknown
  Bacterial polypetide isolated from the Sargasso Sea
KVRRERMGHIPLAAPVAHIWFLKSLPSRIGLLLDLALKDLEKVLYFESFIVTEPGMVKSLKKFQILSDEENSSLKEEFGDSFQSMIGAEAIQKLLSEINLVDDQKLVRDELGSTSSETKKKKLVKRLKLIEAFIGSKLKPEWMILNVIPVIPPELRPLVPLDGGRFATSDLNDLYRRVINRNNRLQRLLTLKAPDIIVRNEKRMLQEACDALFDNGRRGRVITGTNKRPLKSLSDMLKGKQGRFRQNLLGKRVDYSGRSVIVVGPELNYTN

SEQ ID NO: 134363 - protein, 262 aa, Unknown
  Bacterial polypetide isolated from the Sargasso Sea
MTNSNLRTENHFDYVKITLASPDRVMEWGQRTLPNGQVVGEVTKPETINYRTLKPEMDGLFCEKIFGPSKDWECHCGKYKRVRHRGIVCERCGVEVTESRVRRHRMGFIKLAAPVSHVWYLKGIPSYVAILLDMPLRDVEQIVYFNCYVVLDPGDHKDLKYKQLLTEDEWLEIEDEIYAEDSEIENEPVVGIGAEALKQLLEDLTLDEVAEQLREEINGSKGQKRAKLIKRLRVIDNFIATNARPEWMVLDVIPVIPPDLRP

SEQ ID NO: 134364 - protein, 268 aa, Unknown
  Bacterial polypetide isolated from the Sargasso Sea
RLMDLKAPDIIVRNEKRMLQESVDALFDNGRRGRVITGTGKRPLKSLAEMLKGKQGRFRQNLLGKRVDYSGRSVIVVGPDLKLHECGLPKKMALELFKPFLYARLNKLGLASTIKQAKKLVEKERNEVWDALELIVREHPVILNRAPTLHRLGVQAFEPKLIEGNAIELHPLTCAAFNADFDGDQMAVHVPLSLEAQLEARVLMMSTNNILSPSNGKPIIVPSQDMILGIYYLSQPPVQSERVDGYFVNTSEIEHALETGQIKVHSRI

SEQ ID NO: 134365 - protein, 258 aa, Unknown
  Bacterial polypetide isolated from the Sargasso Sea
EKRMLQESVDALFDNGRRGRVITGTGKRPLKSLAEMLKGKQGRFRQNLLGKRVDYSGRSVIVVGPELKLHQCGLPKKMALELFKPFLYARLDKLGLATTIKQAKRLVEKEKSEVWDSLEHIIREHPILLNRAPTLHRLGVQAFEAKLIEGNAIELHPLVCAAFNADFDGDQMAVHIPLSLEAQLEARVLMMSTNNILSPSNGKPIIVPSQDIVLGIYYLSQSDVNEKKPKGIFSSVDEIEQALENKSISLHSKIISVF

SEQ ID NO: 134366 - protein, 221 aa, Unknown
  Bacterial polypetide isolated from the Sargasso Sea
METENVNIKNWKSLIKPSKIDVQLSDDLSRAKIVAEPLEKGYGLTLGNSLRRILLSSIRGAAVTSIQIDGVLHEFTSIKGVREDVTDIVLNVKSLALKSSSEGTKKLILDAKGPGEIKASDITPVNDVEILNPDLVICNLDENTSFHMEMNVNTGKGYVPAELNKPEEPPLGLIAIDSLYSPVKKVSYSVSTAREGKALDYDKLTMEVETDGSISAEDAVA

SEQ ID NO: 134367 - protein, 289 aa, Unknown
  Bacterial polypetide isolated from the Sargasso Sea
LLNIDLETDFNQTKNYLLETKSELKKTKLTKRLKLLESFIVSKNKPEWMILRVLPVIPPELRPLVPLDGGRFATSDLNDLYRRVINRNNRLKRLIDLRAPDIIIRNEKRMLQESVDALFDNGRRGRIITSTNKRPLKSLSDMLKGKQGRFRQNLLGKRVDYSGRSVIVVGPTLKLHQCGIPKKMALELFKPFIFHKLDIYGWANTIKAAKKLVEKEDPRVWDILEEVIREHPVLLNRAPTLHRLGIQAFEPVLIEGKSIQLHPLVCTAFNADFDGDQMAVHVPLSLEAQ

SEQ ID NO: 134368 - protein, 308 aa, Unknown
  Bacterial polypetide isolated from the Sargasso Sea
MGHLELASPVAHIWFLKSLPSRIGLLLDMTLREIERVLYFEAYLVTDPGMTDLTQGQMLSEEQYIEALEMYGDDFSAAMGAEAIHDILKDLDLQDNLNQIQEDMEATASQIKIKRYQKRLKLIESLISSGNRPEWMILKVLPILPPDLRPLVPLDGGRFATSDLNDLYRRVINRNNRLQRLLDLNAPDIIVRNEKRMLQKSVDALLDNGRMGRAVTGSNKRPLKSLADMIKGKQGRFRQNLLGKRVDYSGRSVIVVGPTLKLHQCGIPKKMALELFKPFVFSKLIYQGEASTIKSAKRLVELEGAEIG

SEQ ID NO: 134369 - protein, 282 aa, Unknown
  Bacterial polypetide isolated from the Sargasso Sea
LIEIGAPDVILRNEKRMLQEAVDALFDNSRRKTAIRSGTRRPLKSISDMLRGKTGRFRQNLLGKRVDYSGRSVIVVGPKLRMSECGLPKNMALELFKPHMIYELMARGYTETPRSAKLMIEKQEQVVYKVLEYVVKDHPVLLNRAPTLHRLGIQAFQPILVDGKAIQLHPLVCAAFNADFDGDQMAVHVPLSSQSQMEARVLMLSSHNVLHPANGKPISVPSQDMVLGCYYLTRPLVGAKGEGKSFSSIDEVLLAYENKSISMHAVINVRIDSVWHKETTVE

SEQ ID NO: 134370 - protein, 258 aa, Unknown
  Bacterial polypetide isolated from the Sargasso Sea
LPPDLRPLVPLEGGRFATSDLNDLYRRVINRNNRLKRLLELNAPEIIVRNEKRMLQESVDALLDNGRRGRVITGTNKRPLKSLADMIKGKGGRFRQNLLGKRVDYSGRSVIVAGPNLRLHQCGLPKKMALELFKPFVYGKLEQRELATTIKGAKKLVERETPEVWEVLEEVIREHPVLLNRAPTLHRLGLQAFEPKLIEGKAIQLHPLVCVAFNADFDGDQMAVHVPLTLEAQLEARALMMSTNNILSPADGSPIINP

SEQ ID NO: 134371 - protein, 153 aa, Unknown
  Bacterial polypetide isolated from the Sargasso Sea
VDASFSPVKRVAYYVENARFEKRTDLDKLIVELETDGTLNPKEAIEHSATIMQQQLAAFVNLDAIAEQEAKKEQNDFDPLLMRSIEELELTVRSTNCLKAESIFLIGDLIQRSEFDLLKTPNLGKKSLNEIKDVLASKGFALGTTIDNWPPMG

SEQ ID NO: 134372 - protein, 298 aa, Unknown
  Bacterial polypetide isolated from the Sargasso Sea
RIALAVDMKLKEIERVLYFENFIVIEPGLTGLQKNQLLNEEELAKYQDEFGEENFTAGIGAEAVLEMLKNLDLELERKNLVSFIKETKSKVNEERAIKRLKLIESFIETGQKPEWMIMTVVPVIPPELRPLVPLDGGRFATSDLNDLYRRVINRNNRLKRLMDLKAPDIIVRNEKRMLQESVDALFDNGRRGRVITGTGKRPLKSLAEMLKGKQGRFRQNLLGKRVDYSGRSVIVVGPDLKLHECGLPKKMALELFKPFLYARLNKLGLASTIKQAKKLVEKETNAVWDALELILEST

SEQ ID NO: 134373 - protein, 305 aa, Unknown
  Bacterial polypetide isolated from the Sargasso Sea
RNEKRMCKESVDALFDNAERGRVYRGVNKRPLKSLSDMLKGKQGRLRQNLLGKRVDYSGRSVIVVGPELKLHQCGIPKKMALELFKPFIYSKLELYGLANTIKAAKRMVEKERPEVWDILEEVIREHPVLLNRAPTLHRLGIQAFEPVLIEGKAINLHPLVCTAFNADFDGDQMAVHVPLSLEAQLEARVLMMSTNNILSPSSGKPIIVPSQDIILGLYYLSLVKEKSKGEGMIFSSVEEVLIALDHDVVDLQASVKLRIPVNNENDKKEYKTIDTTPGRAKISNVIPKHASVDYEIVNKLMTKK

SEQ ID NO: 134374 - protein, 291 aa, Unknown
  Bacterial polypetide isolated from the Sargasso Sea
AISVIDLLVPTEIQVENVSDTVSKVTLEPLERGFGHTLGNALRRILLSSMPGAAVTDVVIDGISHEYSTIEGVREDVIDILLNLKDMPVKLIEGNDAELKLSVNGPCEVTSSSFEAPGNVELTDADHHVVSLVDKIKLNMSVFVRTGRGYEPADIRDDENNTVGGLKVDASFSPVKRVSYSVENARFEKRTDLDKLILELETDGTIDAKMAIEHSATIMQQQLAAFVDLEAIAEQEAKKEQNDFDPLLLRSIEELELTVRSTNCLKAESIFLIGDLIQRSEFDLLKTPNLG

SEQ ID NO: 134375 - protein, 285 aa, Unknown
  Bacterial polypetide isolated from the Sargasso Sea
YGEIKKPETINYRTFRPEKDGLFCARIFGPIKDYECLCGKYKRMKFRGIICEKCGVEVTKSNVRRERMGHINLATPVAHIWFLKSLPSRISLAIDMKLKEVERVLYFENFIVIEPGLTGLKKNQLLSEEELIKFQDEFGEESFTAGIGAEAILEILKSIDLQKEKELLVKTINETKSKVSEERSIKRLKLVDSFIKTGNKPEWMILTVIPVIPPELRPLVPLDGGRFATSDLNDLYRRVINRNNRLKRLMDLKAPDIIVRNEKRMLQESVDALFDNGRRGRVITG

SEQ ID NO: 134376 - protein, 225 aa, Unknown
  Bacterial polypetide isolated from the Sargasso Sea
GNFETDSETEIMNPDQLIMTLDSNADIEIEANVETGKGYVSAEVAEDENKIIGEIKLDAMFSPVVKATYKVENSRVGQVTDFDKLVFEVETNGAITPDDAIALAARILQDQLQPFINFDEPEVLPDQSKAEALSFNSNLLKKVEELELSVRSANCLKNDNIIYIGDLVQKSESEMLRTPNFGRKSLNEIKEVLQQMELNLGMSVPDWPPENIDELAKKYEDPFNK

SEQ ID NO: 134377 - protein, 81 aa, Unknown
  Bacterial polypetide isolated from the Sargasso Sea
MIEKNWKELIKPSKIDVQSSDDKKISKIVVEPLERGFALTLGNALRRVLLSSIQGTAVTAIQIDGVLHEFSSINGVRDGCN

SEQ ID NO: 134378 - protein, 309 aa, Unknown
  Bacterial polypetide isolated from the Sargasso Sea
YSFKVRRDRMGHIELAAPVSHIWFMKSLPSRIATLLDMTIKNLEKVLYFEQFIVVEPGLTDLTKGQILTEDQYIEYQDLHGEDSFSASIGAEAIEQMLQNIDLQSDYDQLKQDLLETKSELKKVKITKRLKLIEHFISSKNKPEWMILRVLPVIPPELRPLVPLDGGRFATSDLNDLYRRVINRNNRLKRLIDLRAPDIIVRNEKRMLQESVDALFDNGRRGRVITSTNKRPLKSLSDMLKGKQGRFRQNLLGKRVDYSGRSVIVVGPNLKLHQCGLPKKMALELFKPFIFHKLDIYGWANTIKAAKKL

SEQ ID NO: 134379 - protein, 286 aa, Unknown
  Bacterial polypetide isolated from the Sargasso Sea
KRVDYSGRSVIVVGPELKLHQCGLPKKMALELFKPFIYNKLESYGFASTLKSARKMVESERPEVWDILDEVIREHPILLNRAPTLHRLGIQAFEPILIEGKAIQLHPLVCTAFNADFDGDQMAVHIPLSLEAQLEARVLMMSTNNILSPSSGKPIIVPSQDIVLGIYYLSLINENEDPKKYYSHVGEVEFALENKSIELHTPIIYRTKIYNSEIDSFEYKKYTTSAGRVVLFKTVPENNNLPFDVINKVLTKKDISNLLDNVYRFTGQKATCIFVDQIMNVGFKYA

SEQ ID NO: 134380 - protein, 197 aa, Unknown
  Bacterial polypetide isolated from the Sargasso Sea
MPAQRAFGSYCDCEATSVIQKNWQQLIKPTKLDIVPGSDPERAATIVAEPLERGFGLTLGNALRRVLLSSLHGAAVTAVQIDGVLHEFSSVPGVREDVTDIVLNIKAIGLRMHVEGPKRMTLKASGPGEVKASDIEAGADIEIMNPELVLCHLDKGAKLSMELTVEAGKGYVAATQNRPEDSPIGLIPVDAVSPRFV

SEQ ID NO: 134381 - protein, 251 aa, Unknown
  Bacterial polypetide isolated from the Sargasso Sea
MQYQIDRIDHQTADDRSQTGTFLIGPLERGQATTLGNSLRRVLMGGLEGSAVTAVRIAGINHEYATIPGVREDVLDILLNCKQLSINSSNPELEIGRLVASGPMEVKANDIQFSSQVEIVDGEKPIATIQEGHNLELEIHVERGVGYRPVDRKNEETTAIDLLQIDAVFMPVKRVNFTIDETAVAEGGTGRERLTMEVVTDGSTTPDDAIAEAANHLIELFQPLATVTMVEEIPEEPEPSPEAQIPLEELN

SEQ ID NO: 134382 - protein, 313 aa, Unknown
  Bacterial polypetide isolated from the Sargasso Sea
ERMGHIDLASPVAHICFFKSLPSRIGLMLDMTLRDLERVLYFEQYIVIEPGLTELKHGQLLTEEEFLDFQDQYGTDSFTAGIGAEAIREMLSSIDLEAEGEKLRAELAEATGELKPKKIIKRLKLVENFIDGGNRPEWMILTVVPVIPPELRPLVPLDGGRFATSDLNDLYRRVINRNNRLKRLIELRAPDIIIRNEKRMLQESVDALFDNGRRGRVITGGNKRPLKSLSDMLKGKQGRFRQNLLGKRVDFSGRSVIVTGPELKLHQCGLPKKMALELFKPFIYSRLEAKGLSSTVKQAKKLVKKRDLKFGIS

SEQ ID NO: 134383 - protein, 319 aa, Unknown
  Bacterial polypetide isolated from the Sargasso Sea
YENALDEFGDESFEVAIGAEAIKKILVEMDLEEEVVKIREDLLKTGSEIKRKKLVKRLKLVESFIESGSKPEWMILEVIPVIPPELRPLVPLDGGRFATSDLNDLYRRVINRNNRLKRLIELRAPDIIIRNEKRMLQESVDALFDNGRRGRVITGVNKRPLKSLSDMLKGKQGRFRQNLLGKRVDYSGRSVIVVGPELKLHQCGLPKKMALELFKPFIYSRLELYGLASTVKAAKRMVEKERPEVWDILDEVIREHPVMLNRAPTLHRLGIQAFEPVLIEGKAINLHPLVCTAFNADFDGDQMAVHVPLSLEAQLEARV

SEQ ID NO: 134384 - protein, 267 aa, Unknown
  Bacterial polypetide isolated from the Sargasso Sea
GVEVTKSNVRRERMGHINLATPVAHIWFLKSLPSRIALAVDMKLKEIERVLYFENFIVIEPGLTGLQKNQLLNEEELAKYQDEFGEESFTAGIGAEAVLEMLKNLDLESERKNLVSFIKETKSKVNEERAIKRLKLIESFIETGQKPEWMIMTVVPVIPPELRPLVPLDGGRFATSDLNDLYRRVINRNNRLKRLMDLKAPDIIVRNEKRMLQESVDALFDNGRRGRVITGTGKRPLKSLAEMLKGKQGRFRQNLLGKRVDYSGRSV

SEQ ID NO: 134385 - protein, 278 aa, Unknown
  Bacterial polypetide isolated from the Sargasso Sea
KRFWTPLGNALRRILLSSMPGAAVTDVAIDGISHEYSTIEGVREDVIDILLNIKDMPINLIEGDSAEVTLDVKGPCDVLASSFDVPGNLELVNQDFHIATIVDKVNLKMTLTVRNGRGYEPADLREDEDRVVGALKVDASYSPVRRVSYTVDNARSGKRTDLDKLVLELETDGTLDPKMAIEHSATILQQQLGAFVDLDAIAEQEAKKDQNDFDPILLRSIEELELTVRSTNCLKAESIFLIGDLIHRSEFDLLKTPNLGKKSLNEIKDVLASKDLSL

SEQ ID NO: 134386 - protein, 292 aa, Unknown
  Bacterial polypetide isolated from the Sargasso Sea
MKFGEEAFTAGIGAEAVLEMLKNLDLELERKNLVNYIQETKSKVNEERAIKRLKLIESFIETGQKPEWMIMTVVPVIPPELRPLVPLDGGRFATSDLNDLYRRVINRNNRLKRLMDLKAPDIIVRNEKRMLQESVDALFDNGRRGRVITGTGKRPLKSLAEMLKGKQGRFRQNLLGKRVDYSGRSVIVVGPDLKLHECGLPKKMALELFKPFLYARLNKLGLASTIKQAKKLVEKETNAVWDALELIVREHPVLLNRAPTLHRLGVQAFEPKLIEGDAIELHPLTCAAFNAD

SEQ ID NO: 134387 - protein, 285 aa, Unknown
  Bacterial polypetide isolated from the Sargasso Sea
GEIKKPETINYRTFRPEKDGLFCSRIFGPIKDYECLCGKYKRMKFRGIICEKCGVEVCRANVRRERMGHIELACPVAHIWFLKSLPSRISLAVDMKLKEVEKVLYFESFMVIEPGLTKLKKKQLLSEEEYVKAQEQYGEDSFVASIGAEAIRDLLINLDLKAEKEKLRSILKEVKSKVAEERTTKRLKLVESFLESGNKPEWMILTTIPVIPPELRPLVPLDGGRFATSDLNDLYRRVINRNNRLKRLMDLKAPDIIVRNEKRMLQESVDALFDNGRRGRVITGT

SEQ ID NO: 134388 - protein, 168 aa, Unknown
  Bacterial polypetide isolated from the Sargasso Sea
DAMFSPVIKTSYKVKNSRVGQVTDYDKLIFEVETNGVIAPDDAIALAARILQDQLQPFINFDEPEILPDQSQVEKLSFNSNLLKKVEELELSVRSANCLKNDNIIYIGDLVQKSESEMLRTPNFGRKSLNEIKEVLQQMELNLGMSVPEWPPENIDELAKKYEDPFNK

SEQ ID NO: 134389 - protein, 184 aa, Unknown
  Bacterial polypetide isolated from the Sargasso Sea
MEATDINIKNWKSLIKPGKLDIKLSDDKSYAKIIAEPLEKGYGLTLGNSLRRILLSSIRGTAVTAIQIDGVLHEFSSIKGVREDVTDIVLNVKSLALKSNIEGTKKLILDAKGPGEIKASNITPVSDVEILNPDLVICNLDENTNFHMEMTVGNGKGYVSADMNKPEEPPLGLIPIDSLFSPVK

SEQ ID NO: 134390 - protein, 258 aa, Unknown
  Bacterial polypetide isolated from the Sargasso Sea
MQSGTNIVDKNWKDLIKPNKLDITSNNDKSVAKVVAEPLEKGFGQTIGNTLRRILLSSIQGAAVTAIQIDGVLHEFSSIKGVREDVTDIVLNVKNLAIKCESNSQKKIVLDVKGPKEVKAKDITLVSEVEILNPEQTICNVDEKTNFHMELFVNSGKGYVPAPKNRSEDSPLGLISIDSLFSPVKKVSFSIENTRAGSALDYDKLIMNVETNGTVAAEDAIAYSARIFQDQLSMFVNFDDPKEVIKEVKSSEPEFNKN

SEQ ID NO: 134391 - protein, 296 aa, Unknown
  Bacterial polypetide isolated from the Sargasso Sea
YFENFIVIEPGLTGLQKNQLLNEEELAKYQDEFGEEAFTAGIGAEAVLEMLKSLDLELEKKNLVNYIKETKSKVNEERAIKRLKLIESFIETGQKPEWMIMTVVPVIPPELRPLVPLDGGRFATSDLNDLYRRVINRNNRLKRLMDLKAPDIIVRNEKRMLQESVDALFDNGRRGRVITGTGKRPLKSLAEMLKGKQGRFRQNLLGKRVDYSGRSVIVVGPDLKLHECGLPKKMALELFKPFLYARLNKLGLASTIKQAKKLVERETNAVWDALELIVREHPVLLNRAPTLHRLGV

SEQ ID NO: 134392 - protein, 271 aa, Unknown
  Bacterial polypetide isolated from the Sargasso Sea
SWSFGEIKKPETINYRTFKPEKDGLFCARIFGPIKDYECLCGKYKRMKFRGIICEKCGVEITRSNVRRERMGHIELASPVAHIWFLKSLPSRIASAIDMKLKDVEKVLYFESFLVIEPGLTKLKKNQLLTEEEYVKAQEEYEEGSFEAGIGAEAIRKILINLDLKAEREKLKASLKEIKSKVTEEKVTKRLKLMESFIESGNKPEWMILTSIPVIPPELRPLVPLDGGRFATSDLNDLYRRVINRNNRLKRLIDLKAPDIIVRNEKRMLQE

SEQ ID NO: 134393 - protein, 294 aa, Unknown
  Bacterial polypetide isolated from the Sargasso Sea
EPGLTDLKKGEIISEEQYIQYQDDYGEDSFSAAIGAEAIEQMLLNIDLESDHKQIKIDLSETKSELKKTKLTKRLKLIESFLVSKNKPEWMILRVLPVIPPELRPLVPLDGGRFATSDLNDLYRRVINRNNRLKRLIDLRAPDIIIRNEKRMLQESVDALFDNGRRGRVITSTNKRPLKSLSDMLKGKQGRFRQNLLGKRVDYSGRSVIVVGPNLKLHQCGIPKKMALELFKPFIFHKLDIYGWANTIKAAKKLVEKEDPRVWDILEEVIREHPILLNRAPTLHRLGIQAFEPY

SEQ ID NO: 134394 - protein, 104 aa, Unknown
  Bacterial polypetide isolated from the Sargasso Sea
METENVNIKNWKSLIKPAKLDVKISDDLTHATIIAEPLEKGYGLTLGNSLRRILLSSIRGAAVTSIQIDGVLHEFTSIKGVREDVTDIVLNVKSLALKCSAEGT

SEQ ID NO: 134395 - protein, 262 aa, Unknown
  Bacterial polypetide isolated from the Sargasso Sea
QIKIKRYQKRLKLIESLISSGNRPEWMILKVLPILPPDLRPLVPLDGGRFATSDLNDLYRRVINRNNRLQRLLDLNAPDIIVRNEKRMLQKSVDALLDNGRMGRAVTGSNKRPLKSLADMIKGKQGRFRQNLLGKRVDYSGRSVIVVGPTLKLHQCGIPKKMALELFKPFVFSKLIYQGEASTIKSAKRLVELEGAEIWDILDGVIRQHPILLNRAPTLHRLGIQAFEPVLVEGKAIQLHPLVCKAFNADFDGDQDGSSCAT

SEQ ID NO: 134396 - protein, 269 aa, Unknown
  Bacterial polypetide isolated from the Sargasso Sea
EPLEKGYGLTLGNSLRRILLSSIRGTAVTSIQIDGVLHEFTSIKGVREDVTDIVLNVKSLALKGNSEGTKKLILDAKGPGVIKASNITPINEIEILNPDLVICNLDENTNFHMEMTVGNGKGYVSADLNKPEEPPLGLIPIDSLFSPVKKVSYSVSTAREGNALDYDKLTMEVETNGSISAEDALAYSARIFQDQLSMFINFDEPQEVSITESPKEPEFNRNLLRKVDELELSVRSMNCLKNDNIIYIGDLVQKSEGEMLRTPNLEESH

SEQ ID NO: 134397 - protein, 195 aa, Unknown
  Bacterial polypetide isolated from the Sargasso Sea
MTNSNLRTENHFDYVKISIASPQRIMDWGQRTLPNGQVVGEVTKPETINYRTLKPEMDGLFCEKIFGPSKDWECHCGKYKRVRHRGIVCERCGVEVTESRVRRHRMGYIKLAAPVSHVWYLKGIPSYVAILLDIPLRDVEQIVYFNCYVVLDPGDHKELKYKQLLTEDEWLEIEDEIYAEDSTIENEPFVGIGAE

SEQ ID NO: 134398 - protein, 280 aa, Unknown
  Bacterial polypetide isolated from the Sargasso Sea
TFRPEKDGLFCSRIFGPVKDYECLCGKYKRMKFRGIICEKCGVEVTKSNVRRERMGHIDLACPVAHIWFLKSLPSRISLAIDMKLKEVEKVLYFESFIVIEPGLTKLKKGQLLSEEELIKSQDEFGEDAFTAGIGAEAVREILINLDLQSEQKKLRESLKEVKSKVTEERTIKRLKLIESFINSGNKPEWMILTTVPVIPPELRPLVPLDGGRFATSDLNDLYRRVINRNNRLKRLLDLKAPDIIVRNEKRMLQESVDALFDNGRRGRVITGTGKRPLKS

SEQ ID NO: 134399 - protein, 325 aa, Unknown
  Bacterial polypetide isolated from the Sargasso Sea
RFATSDLNDLYRRVINRNNRLKRLLDLNAPDIIVRNEKRMLQESVDALLDNGRRGRAITGSNKRPLKSLADMIKGKQGRFRQNLLGKRVDYSGRSVIVTGPTLKLHQCGLPKKMALELFKPFIFGKLELRGLASTIKAAKKMVEREPPEVWDILAEVIREHPVLLNRAPTLHRLGIQAFEPVLIEGKAIQLHPLVCAAYNADFDGDQMAVHVPLTLEAQLEARALMMSTNNILSPASGDPIIVPSQDVVLGLYYMTRDRVNAKGEGMSFADTEEVQRAYGSGRVELHARVKVRIHETLMNLGEETTEQTRIVETTVGRALLWDIV

SEQ ID NO: 134400 - protein, 75 aa, Unknown
  Bacterial polypetide isolated from the Sargasso Sea
MPTTNNVIDKNWKDLIKPNKLQITSNKDKSVAQVVAEPLEKGFGQTIGNSLRRILLSSIQGAAVTAIQIDGVLHE

SEQ ID NO: 134401 - protein, 295 aa, Unknown
  Bacterial polypetide isolated from the Sargasso Sea
VDALFDNGRRGRVITGVNKRPLKSLSDMLKGKQGRFRQNLLGKRVDYSGRSVIVVGPDLKLHQCGLPKKMALELFKPFIYSKLELYGLASTVKAAKRMVEKERPEVWDILEEVIREHPVMLNRAPTLHRLGIQAFEPVLIEGKAINLHPLVCTAFNADFDGDQMAVHVPLSLEAQLEARVLMMSTNNILSPSSGKPIIVPSQDIILGLYYLSMISDGQKGEGMIFSKPAEALIALDNSQVHLQAKVKIRVETYDDKGNKSIELVETTPGRAKLSTLLPAHRSVDYNTINKLRQKK

SEQ ID NO: 134402 - protein, 312 aa, Unknown
  Bacterial polypetide isolated from the Sargasso Sea
LYFVKTINETKSKVAEERSIKRLKLIESFIETGNKPEWMILTVIPVIPPELRPLVPLDGGRFATSDLNDLYRRVINRNNRLKRLIDLKAPDIIVRNEKRMLQESVDALFDNGRRGRVITGTGKRPLKSLAEMLKGKQGRFRQNLLGKRVDYSGRSVIVVGPDLKLHECGLPKKMALELFKPFLYARLNKLGLASTIKQAKKLVEKERDEVWDALEIIVREHPVILNRAPTLHRLGVQAFEPKLIEGDAIELHPLTCAAFNADFDGDQMAVHIPLSLEAQLEARVLMMSTNNILSPSNGKPIIVPSQDMILGI

SEQ ID NO: 134403 - protein, 294 aa, Unknown
  Bacterial polypetide isolated from the Sargasso Sea
AKVIAEPLEKGFGQTIGNSLRRILLSSIQGAAVTSIQIDGVLHEFSSIKGVREDVTDIVLNVKNLAIKSSSSSPKKIILDIKGPKEVKAKDITLVPEVEILNPEQTICNLDEKTQFHMELMVSTGKGYVQAPKNKSDDSPLGLISIDSLFSPVKKVSFSVENTRAGSALDYDKLVMTVETNGTVDAEDAIAYSARIFQDQLSMFVNFEDPQEIVKEVKSAEPEFNRNLLKRVEELELSVRSMNCLKNDNIIYIGDLVQKTEPEMLRTPNFGRKSLNEIKEVLNTMSLYLGMEIP

SEQ ID NO: 134404 - protein, 275 aa, Unknown
  Bacterial polypetide isolated from the Sargasso Sea
MKDLTNLFKTNNQTLNFDQIKISVSSPEQIRSWSFGEIKKPETINYRTFKPEREGLFCARIFGPTKDYECLCGKYKRMKFKGITCEKCGVEVTLSKVRRERMAHIELAAPVAHIWFLKSLPSRIGLALDMTLKNLEKVLYFESHIVIDPLMSGLSSNQLLTDEELEEAIDQFGEDSFKHGIGAEAVQEILSKINLEAEIEKLVEESESTSSETKKKKILKRMKVMEGFKNSNIKPEWMVLKVLPGIPPELRPLVPLEGGRFATSDLNDLYRRVIN

SEQ ID NO: 134405 - protein, 300 aa, Unknown
  Bacterial polypetide isolated from the Sargasso Sea
MTVVPVIPPELRPLVPLDGGRFATSDLNDLYRRVINRNNRLKRLMDLKAPDIIVRNEKRMLQESVDALFDNGRRGRVITGTGKRPLKSLAEMLKGKQGRFRQNLLGKRVDYSGRSVIVVGPDLKLHECGLPKKMALELFKPFLYARLNKLGLASTIKQAKKLVERETNAVWDALELIVREHPVLLNRAPTLHRLGVQAFEPKLIEGDAIELHPLTCAAFNADFDGDQMAVHVPLSLEAQLEARILMLSTNNILSPSNGKPIIVPSQDMILGIYYLSQEPLTDKSAGYFIDADQIEYALSS

SEQ ID NO: 134406 - protein, 281 aa, Unknown
  Bacterial polypetide isolated from the Sargasso Sea
NLVVPVAHIWYFRSLPNKIGYLLGLASKKLDMIIYYERYVVIEPGEAINDEGEKLQKMDFLTEEEYLNVRERLPEDNQYLEDSDPKKFIAKMGAECLIELLSRIDLESLSYELRHKANNETSKQRKTEALKRLQVVEAFRDADTRKENRPEWMIMKVIPVIPPELRPLVPLDGGRFATSDLNDLYRRVIIRNNRLKRLVEIKAPEVILRNEKRMLQESVDSLFDNTRKSSAVKTDSNRPLKSLSDSLKGKQGRFRQNLLGKRVDYSARSVIVVGPELKLYE

SEQ ID NO: 134407 - protein, 271 aa, Unknown
  Bacterial polypetide isolated from the Sargasso Sea
NQLLSEEELIKYQDEFGEEAFSAGIGAEAILEILKSIDLQKEKELLVKTINETKSKVSEERSIKRLKLIDSFIKTGNKPEWMILTVIPVIPPELRPLVPLDGGRFATSDLNDLYRRVINRNNRLKRLMDLKAPDIIVRNEKRMLQESVDALFDNGRRGRVITGTGKRPLKSLAEMLKGKQGRFRQNLLGKRVDYSGRSVIVVGPDLKLHECGLPKKMALELFKPFLYARLNKLGLASTIKQAKKLVERETNAVWDALELIVREHPVILNRA

SEQ ID NO: 134408 - protein, 84 aa, Unknown
  Bacterial polypetide isolated from the Sargasso Sea
AKKEQNDFDPLLLRSIEELELTVRSTNCLKAESIFLIGDLIQRSEFDLLKTPNLGKKSLNEIKDVLASKGLSLGMVLENWPPLG

SEQ ID NO: 134409 - protein, 305 aa, Unknown
  Bacterial polypetide isolated from the Sargasso Sea
NVRRERMGHINLATPVAHIWFLKSLPSRISLTIDMKLKEVERVLYFENFIVIEPGLTPLKKYQLLNEEELIKYQDEYGDEAFTAGIGAEAILEILKSINLENEKALLVKTINETKSKVAEERSIKRLKLIESFIETGNKPEWMILTVIPVIPPELRPLVPLDGGRFATSDLNDLYRRVINRNNRLKRLIDLKAPDIIVRNEKRMLQESVDALFDNGRRGRVITGTGKRPLKSLAEMLKGKQGRFRQNLLGKRVDYSGRSVIVVGPDLKLHECGLPKKMALELFKPFLYARLNKLGLASTIKQAKK

SEQ ID NO: 134410 - protein, 255 aa, Unknown
  Bacterial polypetide isolated from the Sargasso Sea
HLELFKPFVFSKLIYQGEASTIKSAKRLVELEGAEIWDILDGVIRQHPVLLNRAPTLHRLGIQAFEPVLVEGKAIQLHPLVCKAFNADFDGDQMAVHVPLSIEAQLESRALMMSSNNILSPANGEPIIVPSQDVVLGLYYMTREKVKDTGEGGIFADIEEVERAFHNGFLGLHAKIKLKISTHNEEKPTEIVETTTGRALFSKIVPDEIPFALINKTMDSKEISRLINRCYREVGLKATVIFADKLMYLGFEYAT

SEQ ID NO: 134411 - protein, 277 aa, Unknown
  Bacterial polypetide isolated from the Sargasso Sea
IQIDGVLHEFTSIKGIREDVTDIVLNVKSLALKSTSEVNKKLILDVKGPGEIKASDITPVADVEILNPDLVICNLDENTKFHMEMNVSSGKGYVSADNNKPEEQPLGLIAIDSLFSPVKKVSYSVSTAREGKALDYDKLTMEIETNGSISAEDAIAYAARIFQDQLGMFVNFDEPQEVIVKDQPQEPEFNKNLLRKVDELELSVRSMNCLKNDNIIYIGDLVQKSEGEMLRTPNFGRKSLNEIKEVLTAMSLYLGMEIPNWPPDNIAELSKKLEEAI

SEQ ID NO: 134412 - protein, 303 aa, Unknown
  Bacterial polypetide isolated from the Sargasso Sea
MKELLNLLQSNQDEFSSISAGLASPQMVRSWSFGEVKKPETINYRTFKPERDGLFCAKIFGPIKDYECICGKYKRMKHRGVVCEKCGVEVTLAKVRRERMGHIELAAPVAHIWFLKSLPSRIGLLLDVTLREIERVLYFESFIVTDPGMTDLETGDILTEEEYIEAYDQYGDEFKAGMGAEAVKLLLEELDIEEEIRILREEIPQTNSETKLKKISKRLKLLEAFKASGNKPEWMIMDVLPVLPPDLRPLVPLEGGRFATSDLNDLYRRVINRNNRLKRLLELNAPDIIVRNEKRMLQESVDA

SEQ ID NO: 134413 - protein, 280 aa, Unknown
  Bacterial polypetide isolated from the Sargasso Sea
GYGLTLGNSLRRILLSSIRGTAVTAIQIDGVLHEFTSIKGVREDVTDIVLNVKSLALKSDSNTNGKLILDAKGPGEIKAADIANSGDIEILNPDLVICNLDENTNFHMEMTVSSGKGYVSADLNKPEEPPLGLIPIDSLFSPVKKVSYSISTAREGKALDYDKLTMEVETNGSISAEDAVAYSARIFQDQLGMFVNFDEPQEVIVREQPSEPEFNKNLLRKVDELELSVRSMNCLKNDNIIYIGDLVQKSEGEMLRTPNFGRKSLNEIKEVLTGMSLYLG

SEQ ID NO: 134414 - protein, 242 aa, Unknown
  Bacterial polypetide isolated from the Sargasso Sea
DEFSAGMGAEAVQVLLEELDIEDEIREIREEIPQTNSETKLKKLSKRLKLLEAFKDSGNKPEWMIMNVLPVLPPDLRPLVPLEGGRFATSDLNDLYRRVINRNNRLKRLLELSAPEIIVRNEKRMLQESVDALLDNGRRGRVITGTNKRPLKSLADMIKGKGGRFRQNLLGKRVDYSGRSVIVSGPNLKLHQCGLPKKMALELFKPFVYGKLENRELATTIKAAKKLVERKHLKFGKCLKKL

SEQ ID NO: 134415 - protein, 307 aa, Unknown
  Bacterial polypetide isolated from the Sargasso Sea
MGHINLATPVAHIWFLKSLPSRIALAVDMKLKEIERVLYFENFIVIEPGLTGLQKNQLLNEEELAKYQDEFGEESFTAGIGAEAVLEMLKNLDLELERKKLVNFIKETKSKVNEERAIKRLKLVESFIETGQKPEWMIMTVVPVIPPELRPLVPLDGGRFATSDLNDLYRRVINRNNRLKRLMDLKAPDIIVRNEKRMLQESVDALFDNGRRGRVITGTGKRPLKSLAEMLKGKQGRFRQNLLGKRVDYSGRSVIVVGPDLKLHECGLPKKMALELFKPFLYARLNKLGLASTIKQAKKLVEKETNA

SEQ ID NO: 134416 - protein, 230 aa, Unknown
  Bacterial polypetide isolated from the Sargasso Sea
GPGEIKASNITPVADVEILNPDLVICNLDENTNFHMEMTVGNGKGYVSADLNKPEEPPLGLIPIDSLFSPVKKVSYSISTAREGKALDYDKLIMEVETNGSISAEDAVAYSARIFQDQLGMFVNFDEPQEVIVREAPSEPEFNKNLLRKVDELELSVRSMNCLKNDNIIYIGDLVQKSEGEMLRTPNFGRKSLNEIKEVLNTMSLYLGMEIPNWPPDNIAELSKKLEEAI

SEQ ID NO: 134417 - protein, 294 aa, Unknown
  Bacterial polypetide isolated from the Sargasso Sea
ESFTAGIGAEAVLEMLKNLDLDLERKNLVSFIKETKSKVNEERAIKRLKLIESFLETGQKPEWMIMTVVPVIPPELRPLVPLDGGRFATSDLNDLYRRVINRNNRLKRLMDLKAPDIIVRNEKRMLQESVDALFDNGRRGRVITGTGKRPLKSLAEMLKGKQGRFRQNLLGKRVDYSGRSVIVVGPDLKLHECGLPKKMALELFKPFLYARLNKLGLASTIKQAKKLVEKETNAVWDALELIVREHPVLLNRAPTLHRLGVQAFEPKLIEGDAIELHPLTCAAFNADFDGDQMA

SEQ ID NO: 134418 - protein, 220 aa, Unknown
  Bacterial polypetide isolated from the Sargasso Sea
DSETEILNPDQLIMTLDSNADVEIEANVETGKGYVSAEVAEDENKIIGEIKLDAMFSPVRRATYKVENSRVGQVTDFDKLILDVETTGAISPDDAIALAARILQDQLQPFINFDEPEIEQETSAQDKLPFNPNLLKKVEELELSVRSANCLKNDNIIYIGDLVQKSESEMLRTPNFGRKSLNEIKEVLQQMELNLGITVLDWPPENIEELAKKYEDPFNK

SEQ ID NO: 134419 - protein, 274 aa, Unknown
  Bacterial polypetide isolated from the Sargasso Sea
LACPVAHIWFLKSLPSRISLAIDMKLKEVEKVLYFESFIVVEPGLTTLKQGQLLSEEALLKAQDEFGEDAFTAGIGAEAVREILVNLDLKKEQKRLRDSLSEIKSKVTEERTIKRLKLIESFISSNNKPEWMILTSVPVIPPELRPLVPLDGGRFATSDLNDLYRRVINRNNRLKRLLDLKAPDIIVRNEKRMLQESVDALFDNGRRGRVITGTGKRPLKSLAEMLKGKQGRFRQNLLGKRVDYSGRSVIVVGPELKLHQCGLPKKMALELFKP

SEQ ID NO: 134420 - protein, 87 aa, Unknown
  Bacterial polypetide isolated from the Sargasso Sea
EEEEVLIDPIMLRPVDELELTVRSANCLKAENANYIGDLVQKTEVELLRTPNLGKKSLNEIKEVLASHGLSLGMELENWPPKEAVVD

SEQ ID NO: 134421 - protein, 165 aa, Unknown
  Bacterial polypetide isolated from the Sargasso Sea
YSPVDRKNEETTAMIYFQIDAVFMPVKRVNFTIDETAVAEGGTGRERLKMEVVTDGSTTPDDAVAEAANQLIELFQPLATVTMVEEIPEEPEPSPEAQIPLEELNLSVRAYNCLKRAQVNSVSDLMGFSYEDLLEIKNFGSKSADEVIEALERIGISIPQSRTSA

SEQ ID NO: 134422 - protein, 86 aa, Unknown
  Bacterial polypetide isolated from the Sargasso Sea
MLQWSRKFLEEPEPSPEAQIPLEELNLSVRAYNCLKRAQVNSVSDLMGFSYEDLLEIKNFGSKSADEVIEALERIGISIPQSRTSV

SEQ ID NO: 134423 - protein, 184 aa, Unknown
  Bacterial polypetide isolated from the Sargasso Sea
METTEVNIKNWKSMIKPGKLDVQISDDKSYAKIIAEPLEKGYGLTLGNSLRRILLSSIRGTAVTAIQIDGVLHEFSSIKGVREDVTDIVLNVKSLALKSTGESNKKLILDAKGPGEIKASDITQVNDIEILNPDLVICNLDENTRFHMEMSVGSGKGYVSADMNKPEEPPLGLIPVDSLFSPVK

SEQ ID NO: 134424 - protein, 242 aa, Unknown
  Bacterial polypetide isolated from the Sargasso Sea
CGLPKKMALELFKPFLYARLDKLGFATTIKQAKRMVEKQKSEVWDALEHIIREHPVILNRAPTLHRLGVQAFEAKLIEGNAIELHPLVCAAFNADFDGDQMAVHVPLSLEAQIEARVLMMSTNNILSPSNGKPIIVPSQDIVLGIYYLSQHKEDSNVKPVGIFSDVDEIENAIERKDISVHSKIVSIFNTVDKDGNKISEKHTSTAGRFLLSKTLPKNHRIKFELVNKLLTKKAVSEVIDTV

SEQ ID NO: 134425 - protein, 107 aa, Unknown
  Bacterial polypetide isolated from the Sargasso Sea
METTEVNIKNWKSLIKPPKLEVNLSDDKSYAKIVAEPLEKGYGLTLGNSLRRILLSSIRGTAVTAIQIDGVLHEFTSIKGVREDVTDIVLNVKSLALKSNTETTNKL

SEQ ID NO: 134426 - protein, 279 aa, Unknown
  Bacterial polypetide isolated from the Sargasso Sea
SYPSRISLAIDMKLKEVERVLYFESFIVIEPGLPSLKKNQLLNEDELNKYQEEFGEEAFTAGIGAEAILEILKSIDLNKEREILRKNINETKSKVAEERSIKRLKLIDSFIETGNKPEWMILTTIPVIPPELRPLVPLDGGRFATSDLNDLYRRVINRNNRLKRLMDLKAPDIIVRNEKRMLQESVDALFDNGRRGRVITGTGKRPLKSLAEMLKGKQGRFRQNLLGKRVDYSGRSVIVVGPDLKLHECGLPKKMALELFKPFLYARLNKLGLASTIKQ

SEQ ID NO: 134427 - protein, 305 aa, Unknown
  Bacterial polypetide isolated from the Sargasso Sea
IAKMGAECLIELLSRIDLETLSYELRHKANNETSKQRKTEALKRLQVVEAFREANHRGENLPEWMIMKVIPVIPPELRPLVPLDGGRFATSDLNDLYRRVIIRNNRLKRLVEIKAPEVILRNEKRMLQESVDSLFDNTRKASAVKTDSNRPLKSLSDSLKGKQGRFRQNLLGKRVDYSARSVIVVGPELKLFECGLPKDMAAELYKPFIIRKIIERGIVKTVKSAKKIIDRKEPVVWDILENVLKGHPVLLNRAPTLHRLGIQAFQPKLIEGKAIQLHPLVCTAFNADFDGDQNGSSSSSRTRSD

SEQ ID NO: 134428 - protein, 150 aa, Unknown
  Bacterial polypetide isolated from the Sargasso Sea
MENVDVNIKNWKSLIKPPKLDIKLNDDKSFAKITAEPLEKGYGLTLGNSLRRILLSSIRGAAVTSLQIDGVLHEFSSIKGVREDVTDIVLNIKSLALKCHSDGIKKLVLDAKGPGEIKASDISKVADIEILNPDLVICNLDENTNFHMEM

SEQ ID NO: 134429 - protein, 165 aa, Unknown
  Bacterial polypetide isolated from the Sargasso Sea
MENATIIQNWKSLIKPGKLNIKSNDDKSICTIVAEPLEKGYALTIGNSLRRILLSSIQGSAITAIQIDGVLHEFSSIKGVREDVTDIVLNVKSLSLKVMSKESKKLILDVKGPGEIKAKDIQANPDVKILNPDLILCHLDENTKFHMELIADNGKGYCPAEKNKK

SEQ ID NO: 134430 - protein, 251 aa, Unknown
  Bacterial polypetide isolated from the Sargasso Sea
IFGPVKDYECLCGKYKRMKFRGIVCEKCGVEVTKSKVRRERMGHIDLASPVAHIWFLKSLPSRISLSIDMKLKEVEKVLYFESFIVIEPGLTELKKGQLLSEEEYLKSQEKYGEDGFTAGIGAEAVREILISMDLKKERDKLRNSLKEIKSKVTEERTLKRLKLLESFIESGNKPEDMILTTVPVIPPELRPLVPLDGGRFATSDLNDLYRRVINRNNRLKRLMDLKAPDIIVRNEKRMLQESVDALFDNG

SEQ ID NO: 134431 - protein, 254 aa, Unknown
  Bacterial polypetide isolated from the Sargasso Sea
IFSKLHTRGLATTIKAAKKLVEKEGAEVWDILDEVIREHPVLLNRAPTLHRLGIQAFEPILIEGKAIQLHPLVCAAFNADFDGDQMAVHVPLSVEAQLEARSLMMSTNNILSPANGEPIIVPSQDIVLGIYYLTREDINVQGEGMIFSNIDEVSRAYYSGNVHIHARVTVRMDLVESNSDKIVNKRIETTVGRALFSKILPKGLPFELVNKTMDKKSISSAIDTCYRVLGLKATVIFADQLMYMGYEYATKSGV

SEQ ID NO: 134432 - protein, 248 aa, Unknown
  Bacterial polypetide isolated from the Sargasso Sea
IESFIETGNKPEWMILTTVPVIPPELRPLVPLDGGRFATSDLNDLYRRVINRNNRLKRLIDLKAPDIIVRNEKRMLQESVDALFDNGRRGRVITGTGKRPLKSLAEMLKGKQGRFRQNLLGKRVDYSGRSVIVVGPDLKLHECGLPKKMALELFKPFLYARLNKLGLASTIKQAKKLVERERTEVWDALELIVREHPVILNRAPTLHRLGVQAFEPKLIEGNAIELHPLTCAAFNADFDGDQMAVHVP

SEQ ID NO: 134433 - protein, 223 aa, Unknown
  Bacterial polypetide isolated from the Sargasso Sea
FETDSETEIMNPDQLIMTLDSNADVEIEANIETGKGYVTAEVAEDENKNIGEIKLDAMFSPVVKASYKIENSRVGQVTDFDKLVFEVETNGAISPDDAIALAARILQDQLQPFINFDEPEVLPDQSTAESLSFNSNLLKKVEELELSVRSANCLKNDNIIYIGDLVQKSESEMLRTPNFGRKSLNEIKEVLQQMELNLGMSVPDWPPENIDDLAKKYEDPFNK

SEQ ID NO: 134434 - protein, 291 aa, Unknown
  Bacterial polypetide isolated from the Sargasso Sea
DLKAPDIIVRNEKRMLQESVDALFDNGRRGRVITGTGKRPLKSLAEMLKGKQGRFRQNLLGKRVDYSGRSVIVVGPELKLHQCGLPKKMALELFKPFLYARLSKLGLATTIKQAKKIVEKQKPEVWDALEHIIREHPILLNRAPTLHRLGVQAFEAKLIEGNAIELHPLVCAAFNADFDGDQMAVHIPLSLEAQLEARVLMMSTNNILSPSNGKPIIVPSQDIVLGIYYLSQSKDDSEAKPTGIFSNVDEIVNALDNNNISIHSKIISQFTTVDKDGKEIKEKYKSTAGRF

SEQ ID NO: 134435 - protein, 270 aa, Unknown
  Bacterial polypetide isolated from the Sargasso Sea
AIGAEAIEQMLIGIDLESDYKQLKIDLTETKSELKKSKITKRLKLLESFIVSKNKPEWMIMRVLPVIPPELRPLVPLDGGRFATSDLNDLYRRVINRNNRLKRLIDLRAPDIIIRNEKRMLQESVDALFDNGRRGRVITSTNKRPLKSLSDMLKGKQGRFRQNLLGKRVDYSGRSVIVVGPNLKLHQCGIPKKMALELFKPFIFHKLDIYGWANTIKAAKKLVEKEDPRVWDILEEVIREHPVLLNRAPTLHRLGIQAFEPILIEGKSIQ

SEQ ID NO: 134436 - protein, 301 aa, Unknown
  Bacterial polypetide isolated from the Sargasso Sea
MTDNYDIIKDFLTPTEIVVEESGPTRSKIVLEPLEQGFGHTLGNALRRIILSSMPGTAVSEVKIDGVLHEYSTIEGVQEDVIDILLNLKDLSVRLTEVEDALLTLSKSGSGVVTAADIELSTGVEVINPDHHIATLNEEGSINMTMKVTRGRGFVPVRPLDEDEGQETGLLRLDATYSPIKRVTYQVDNARVEQRTNLDRLTVDIDTDGTLEAEEILRISATILQHQLSAFAELGRLEEVIEEKEEAKIDPIMLRPVDELELTVRSANCLKAENIHYIGDLVTRMESDLLRTPKLRKEILK

SEQ ID NO: 134437 - protein, 292 aa, Unknown
  Bacterial polypetide isolated from the Sargasso Sea
CGKYKRMKFRGIICEKCGVEVTKSNVRRERMGHINLATPVAHIWFLKSLPSRISLVVDMKLKEVERVLYFENFIVIEPGLTGLKKNQLLGEEELIKYQDDYGEEAFTAGIGAEAILEILKSINLEEERDALIKTIKETKSKVAEERSIKRLKLIESFIETGNKPEWMILTTVPVIPPELRPLVPLDGGRFATSDLNDLYRRVINRNNRLKRLIDLKAPDIIVRNEKRMLQESVDALFDNGRRGRVITGTGKRPLKSLAEMLKGKQGRFRQNLLGKRVDYSGRSVIVVGPDLK

SEQ ID NO: 134438 - protein, 191 aa, Unknown
  Bacterial polypetide isolated from the Sargasso Sea
MQLRIERGRGYQPADMRVFDDETRAVGRLKLDATFSPVYSVSYSVESARVENRTDLDKLVLELDTNGTLDPESAIRRASTILQQQLSVFVDIQDQSVAEPEEEEVAIDPILLRPVDDLELTVRSANCLKAESIYYIGDLIQRTEVELLKTPNLGKKSLTEIKDVLASRGLSLGMRLENWPPVSIKNEREMV

SEQ ID NO: 134439 - protein, 257 aa, Unknown
  Bacterial polypetide isolated from the Sargasso Sea
TLGNSLRRILLSSIRGTAVTAIQIDGVLHEFTSIKGVREDVTDIVLNVKSLALKSNSETISKLILDAKGPGEIKASNITTSNDIEILNPELVICNLDENTNFHMEMTVSNGKGYVSADMNKPEEPPLGLIPIDSLFSPVKKVSYSISTAREGKALDYDKLTMEVETNGSISAEDAVAYSARIFQDQLGMFVNFDEPQEVIVREQPTEPEFNKNLLRKVDELELSVRSMNCLKNDNIIYIGDLVQKSEGEMLRTPNFW

SEQ ID NO: 134440 - protein, 233 aa, Unknown
  Bacterial polypetide isolated from the Sargasso Sea
LEGVREDVVDIVLNIKQLALRMHAEGPKRMTLRATGPGPVTAAQIDLPADIEVLNPDHVICTLDDGASVRMELTVQNGKGYVAAELNRPEDAPIGLIAVDALYSPVKRVAYRVEPTRQGQSLDYDKLILEVETNGAVSPVDAVAYAARILQDQLQIFITFDEPTKAVEQSDGKPELPFNPSLLKKVDELELSVRSANCLKNDNIVYIGDLIQKTEGEMLRTPNFGRKSLNEIK

SEQ ID NO: 134441 - protein, 292 aa, Unknown
  Bacterial polypetide isolated from the Sargasso Sea
KSLSDMLKGKQGRFRQNLLGKRVDYSGRSVIVVGPQLKLHQCGLPKQMALELFKPFVMKRLVDLNHAQNIKSAKRMVERSRSIVWDVLEEVIAEHPVLLNRAPTLHRLGIQAFEPQLIEGKAIQIHPLVCTAFNADFDGDQMAVHLPLSAEAQAEARILMLSTNNILSPANGRPIATPTQDMVLGIYYLTTQNGANASTKDEELPSYASVAEALMAFDAGALDLQARAKIRIETTEPPHGWPVPEGWEAGQPFTLITTLGRALFNEALPADYPFVNDQVDKKLLGATVNRLA

SEQ ID NO: 134442 - protein, 248 aa, Unknown
  Bacterial polypetide isolated from the Sargasso Sea
MQYQIDRIEHQVEEDRSQSGVFLIGPLERGQATTLGNALRRVLMGGLEGSAVTAIRIAGVNHEYATVPGVREDVLDILLNCKELSVNSRSSELEIGRLVVAGPAEVTANDLQFSSQVDVVDGNRPIATVADGYSLELEVHVERGVGYRPVDRHSEDTSAIDLLQIDAVFMPVIRVNFTIDETAVAEGGSARERLRMEIVTDGSITPDDALAQSANHLIELFQPLATVTLVEEPGVEPEPSAEAQIPLE

SEQ ID NO: 134443 - protein, 293 aa, Unknown
  Bacterial polypetide isolated from the Sargasso Sea
MQSSTNIIDKNWKDLIKPNKLNITSSDDKSFAKVVAEPLEKGFGQTIGNSLRRILLSSIQGAAVTAIQIDGVLHEFSSIKGVREDVTDIVLNVKNLAIKCNSTSSKKIILDIKGPKEVKAKDITLGPEVEILNPEQTICNVDEKTNFHMELFVNSGKGYVPAPKNRSEDSPLGLISIDSLFSPVKKVSFSIENTRAGSALDYDKLVMNVETNGTVAAEDAIAYSARIFQDQLSMFVNFEDPKEIVKEVKSSEPEFNKNLLKRVEELELSVRSMNCLKNDNIIYIGDLVQKTEP

SEQ ID NO: 134444 - protein, 322 aa, Unknown
  Bacterial polypetide isolated from the Sargasso Sea
TIEIVESLHKSGNRPEWMILEAIPIMPPDLRPMVQLEGGRFATSDLNDLYRRVVNRNNRLKRLMDIGAPEMIIRNEKRMLQESVDVLISNGKRGRSVTGSNGRPLKSLGNIIEGKQGRFRQNLLGKRVDYSARSVIVVGPHLKFHQCGLPKEMVLELFKPFVIRKLVQDGVVSNVKSAKRKIEKREVEVWDALESVIKGQLVLLNRAPTLHRLGIQAFEPVLVEGSAIQIHPLVCSAFNADFDGDQMAVHLPLSIEAQTECRMLICSTNNILSPSSGRSIVTPTQDMTLGCYFLTVEDEEEKKKETFLMFFRHGRSLESLGE

SEQ ID NO: 134445 - protein, 153 aa, Unknown
  Bacterial polypetide isolated from the Sargasso Sea
MNKNNFLKPKLVDIEALSSSHAKITIEPLERGFGHTLGNALRRVLLSSMPGSAVTEVTIENILHEYSAIEGVQEDVLEILLNIKKLALVLHDKDSLDVTLRKKGTGAVLASDITDNPELEVKNPDFCIANITNDKTELVIHMTITNGRGYQPA

SEQ ID NO: 134446 - protein, 79 aa, Unknown
  Bacterial polypetide isolated from the Sargasso Sea
MENTIINQNWKNLIKPNKLNIQSSDDKSFTTVTAEPLEKGYALTIGNSLRRILLSSIQGSAITAIQIDGVLHEFSSIKG

SEQ ID NO: 134447 - protein, 225 aa, Unknown
  Bacterial polypetide isolated from the Sargasso Sea
PSRIALAVDMKLKEVERVLYFENFIVIEPGLTGLQKNQLLNEEELAKYQDEYGEEAFTAGIGAEAVLEMLKNLDLDLERKNLVDYIKETKSKVNEERAIKRLKLIESFIETGQKPEWMIMTVVPVIPPELRPLVPLDGGRFATSDLNDLYRRVINRNNRLKRLMDLKAPDIIIRNEKRMLQESVDALFDNGRRGRVITGTGKRPLKSLAEMLKGKQGRFRQNLLG

SEQ ID NO: 134448 - protein, 160 aa, Unknown
  Bacterial polypetide isolated from the Sargasso Sea
METANVNLKNWKSLIKPGKLDINLNDDKSYAKIVAEPLEKGYGLTLGNSLRRILLSSIRGTAVTAIQIDGVLHEFTSIKGVREDVTDIVLNVKSLALKSTSEGSKKLVLDAKGPGVIKASDITKVNEIEILNPDLIICNLDENTNFHMEMTIGNGKGYVP

SEQ ID NO: 134449 - protein, 309 aa, Unknown
  Bacterial polypetide isolated from the Sargasso Sea
TSKQRKTESLKRYKVVESLREANINKENKPEWMILKAIPVIPPELRPLVPLDGGRFATSDLNDLYRRVIIRNNRLKRLVEIKAPEVILRNEKRMLQESVDSLFDNTRKSSAVKTEANRPLKSLSDSLKGKQGRFRQNLLGKRVDYSARSVIVGGPTLKLYECGLPKDMAAELYKPFIVKKLIERGIVKTVKSAKKIIDKREPLVWDILENVLKGHPVLLNRAPTLHRLGIQAFQPILIEGKAIQVHPLVCTAFNADFDGDQMAVHLPLGPEAILESQLLMLASHNILNPANGSPITVPSQDMVLDYTTD

SEQ ID NO: 134450 - protein, 307 aa, Unknown
  Bacterial polypetide isolated from the Sargasso Sea
RKNLISFIKETKSKVNEERAIKRLKLIESFIETGQKPEWMIMTVVPVIPPELRPLVPLDGGRFATSDLNDLYRRVINRNNRLKRLMDLKAPDIIVRNEKRMLQESVDALFDNGRRGRVITGTGKRPLKSLAEMLKGKQGRFRQNLLGKRVDYSGRSVIVVGPDLKLHECGLPKKMALELFKPFLYARLNKLGLASTIKQAKKLVEKETNAVWDALELIVREHPVLLNRAPTLHRLGVQAFEPKLIEGDAIELHPLTCAAFNADFDGDQMAVHVPLSLEAQLEARILMLSTNNILSPSNGKPIIVPSQ

SEQ ID NO: 134451 - protein, 304 aa, Unknown
  Bacterial polypetide isolated from the Sargasso Sea
METQDVNIKNWKSLIKPGKLDIQSSDDKSFAKIIAEPLEKGYGLTLGNSLRRILLSSIRGAAVTAIQIDGVLHEFTSIKGIREDVTDIVLNIKSLALKSTSDTPKKLILDAKGPGEIKASDITKIADIEILNPDLTICNLDENTHFHMEMTVGTGKGYVPASMNKPEDPPIGLIPIDSLFSPVKKVSYSISTAREGKALDYDKLTLEVETNGSISAEDALAYSARIFQDQLGMFVNFDEPQEVTIREKPTEPEFNKNLLRKVDELELSVRSMNCLKNDNIIYIGDLVQKSEGEMLRTPNLEENH

SEQ ID NO: 134452 - protein, 298 aa, Unknown
  Bacterial polypetide isolated from the Sargasso Sea
MSQSLMNIFNPTASRDDFNQIKIAIASPERILSWSYGDIKKPETINYRTFKPERDGLFCARIFGPVKDYECLCGKYKRMKFKGIICEKCGVEVTKKDVRRERMGHIQLAAPVAHIWFLKSLPSRIALMMDMKLKDLEKVLYFEKFMVTEPGLTPLEQNQLLDEEELEAAKEEYGEDGFSASIGAEAVRKVLERIVLVDELEALKKKLEETKAVALSEKLVKRIKIFEAFISSGNRPEWMILTSIPVIPPELRPLVPLDGGRFASSDLNDLYRRVINRNNRLSRLMELRAPDIILERKK

SEQ ID NO: 134453 - protein, 298 aa, Unknown
  Bacterial polypetide isolated from the Sargasso Sea
QLATTIKAAKKMVERETTEVWDILADVIREHPILLNRAPTLHRLGIQAFEPVLIEGKAIQLHPLVCTAYNADFDGDQMAVHVPITLEAQLESRTLMMSTNNVLSPASGEPIIVPSQDVVLGIYYMTREKVNAKGEGLVFADVEEVQRAYHSKNVDLQARVKVRVKNMDLVNGNPSKIFETTVGRALLYNIVPDQLPFDVVNKTMDKKSISNLINDCYRRCGLKDTVIFADQLMYAGFAYSTYSGASIGVEDFVVPKDKQALIQEAQSEVAEIEAQYSSGLVTQGEKYNKVVDIWGRTN

SEQ ID NO: 134454 - protein, 278 aa, Unknown
  Bacterial polypetide isolated from the Sargasso Sea
MILTTVPVIPPELRPLVPLDGGRFATSDLNDLYRRVINRNNRLKRLIDLKAPDIIVRNEKRMLQESVDALFDNGRRGRVITGTSKRPLKSLAEMLKGKQGRFRQNLLGKRVDYSGRSVIVVGPDLKLHECGLPKKMALELFKPFLYARLNKLGLASTIKQAKKLVEKERTEVWDALELIVREHPVILNRAPTLHRLGVQAFEPKLIEGNAIELHPLTCAAFNADFDGDQMAVHVPLSLEAQLEARVLMMSTNNILSPSNGKTIIVPSQDMILGIYYLS

SEQ ID NO: 134455 - protein, 314 aa, Unknown
  Bacterial polypetide isolated from the Sargasso Sea
QNLLVKRVDYSGRSVIVVGPNLKLHQCGLPKKMALELFKPFIFHKLDIQGFANTIKAAKKLVEKEDPRVWDILEEVIREHPVLLNRAPTLHRLGIQAFEPTLIEGKSIQLHPLVCTAFNADFDGDQMAIHVPLSLEAQLEARVLMMSTNNILSPSSGKPIIVPSQDIVLGIYYLSIMRDKQKGDGKFFVDLNEIIKALDNGDINLHTKIVTRINNFRNEVSRMETTAGRMLLGNLLPKNKNIDFSLLNKVLTKKEISNIIDTVYRFCGQKETVIFADQIMALGFKYAAKAGISFGKDDLIIPSDKNILIEQTQQ

SEQ ID NO: 134456 - protein, 287 aa, Unknown
  Bacterial polypetide isolated from the Sargasso Sea
LEKEREILLKNINETKSKVAEERSIKRLKLIDSFIETGNKPEWMILTTIPVIPPELRPLVPLDGGRFATSDLNDLYRRVINRNNRLKRLMDLKAPDIIIRNEKRMLQESVDALFDNGRRGRVITGTGKRPLKSLAEMLKGKQGRFRQNLLGKRVDYSGRSVIVVGPDLKLHECGLPKKMALELFKPFLYARLNKLGLASTIKQAKKLVEKETNAVWDALELIVRQHPILLNRAPTLHRLGVQAFEPKLIEGDAIELHPLTCAAFNADFDGDQMAVHIPLSLEAQLEA

SEQ ID NO: 134457 - protein, 239 aa, Unknown
  Bacterial polypetide isolated from the Sargasso Sea
WMILTTIPVIPPELRPLVPLDGGRFATSDLNDLYRRVINRNNRLKRLMDLKAPDIIIRNEKRMLQESVDALFDNGRRGRVITGTGKRPLKSLAEMLKGKQGRFRQNLLGKRVDYSGRSVIVVGPDLKLHECGLPKKMALELFKPFLYARLNKLGLASTIKQAKKLVEKETNAVWDALELIVREHPIILNRAPTLHRLGVQAFEPKLIEGDAIELHPLTCAAFNADFDGDQMAVHIPLSL

SEQ ID NO: 134458 - protein, 180 aa, Unknown
  Bacterial polypetide isolated from the Sargasso Sea
PLEKGYGLTLGNSIRRILLSSIRGAAVTSIQIDGVLHEFTSIKGVREDVTDIVLNVKSLALKSLSDGNKKLILDVKGPGEIKASNITPVQDIEILNPDLVICNLDENTNFHMEMMVGNGKGYVSAEMNKPEEPPLGLIPIDSLFSPVKKVSYSVSTAREGKALDYDKLTMEVETNGSISA

SEQ ID NO: 134459 - protein, 292 aa, Unknown
  Bacterial polypetide isolated from the Sargasso Sea
NDLYRRVINRNNRLRRLLELGAPDIIVRNEKRMLQESVDALLDNGRRGRVITGTNKRPLKSLADMIKGKGGRFRQNLLGKRVDYSGRSVIVAGPNLKLHQCGLPKKMALELFKPYVYGKLEQRELATTIKAAKKLVERETPEVWEILEEVIREHPVLLNRAPTLHRLGIQAFEPLLVEGKAIQLHPLVCVAFNADFDGDQMAVHVPLTIEAQLEARALMMSTNNILSPANGEPIINPSQDVVLGLYYMTREKIGATGSGRVFSNPDEVLRAYESETIDLHAQIKVRITNADK

SEQ ID NO: 134460 - protein, 257 aa, Unknown
  Bacterial polypetide isolated from the Sargasso Sea
LYFEQFIVVEPGLTDLKKGDIISEDQYIDYQDEYGEDSFSAAIGAEAIEQMLLNIDLEADFNKTKNDLLETKSELKKTKLTKRLKLLESFILSKNKPEWMILRVLPVIPPELRPLVPLDGGRFATSDLNDLYRRVINRNNRLKRLIDLRAPDIIIRNEKRMLQESVDALFDNGRRGRVITSTNKRPLKSLSDMLKGKQGRFRQNLLGKRVDYSGRSVIVVGPNLKLHQCGLPKKMALELFKPFIFNKLDIYGWANTI

SEQ ID NO: 134461 - protein, 223 aa, Unknown
  Bacterial polypetide isolated from the Sargasso Sea
SDITPVTDVEILNPDLVICNLDEKTNFHMEMNVNTGKGYVPAELNKPEEPPLGLIAIDSLYSPVKKVSYSVSTAREGKALDYDKLTMEVETNGSISAEDAVAYSARIFQDQLKMFINFDEPVEAPVQEVSTEPEFNKNLLRKVDELELSVRSMNCLKNDNIIYIGDLVQKSEGEMLRTPNFGRKSLNEIKEVLTGMSLYLGMEIPNWPPDNIAEMSKKLEEAI

SEQ ID NO: 134462 - protein, 265 aa, Unknown
  Bacterial polypetide isolated from the Sargasso Sea
ERVLYFENYVVIEPGLTDLIYGQMMSEEEFMDAQDTYGMDAFTANIGAEAIREMLAAIDLEAEAEQLRVDLREATGELKPKKIIKRLKVVESFLESGNRPEWMILTVVPVIPPELRPLVPLDGGRFATSDLNDLYRRVINRNNRLKRLIELRAPDIIVRNEKRMLQESVDALFDNGRRGRVITGANKRPLKSLSDMLKGKQGRFRQNLLGKRVDFSGRSVIVTGPELKLHQCGLPKKMALELFKPFIYSRLEAKGLSSTVKQAKK

SEQ ID NO: 134463 - protein, 267 aa, Unknown
  Bacterial polypetide isolated from the Sargasso Sea
ISQENTFDNIKITLASPEKIKSWSFGEIKKPETINYRTFRPEKDGLFCSRIFGPVKDYECLCGKYKRMKFRGIICEKCGVEVTKSNVRRERMGHIDLACPVAHIWFLKSLPSRISLAIDMKLKEVEKVLYFESFIVIEPGLTTLKKGQLISEEALIKAQEEFGEDAFTAGIGAEAVREILLNLDLKKEQKKLRDSLSEIKSKVTEERTIKRLKLIESFISSGNKPEWMILTSVPVIPPELRPLVPLDGGRFATSDLNDLYRRVINRN

SEQ ID NO: 134464 - protein, 252 aa, Unknown
  Bacterial polypetide isolated from the Sargasso Sea
DGVQHEYSSIKGVREDVTDIVLNIKSLALKSSSESNKKLILDVKGPGEIKASQITPVQDIEILNPDLVICNLDENTNFHMELFVGNGKGYVSAELNKPEEPPLGLIPIDSLFSPVKKVSYSVSTAREGKALDYDKLTMEIETNGSITAEDALAYSARIFQDQLGMFVNFDEPQEIKMQDQPKEPEFNQNLLRKVDELELSVRSMNCLKNDNIIYIGDLVQKSEGEMLRTPNFGRKSLNEIKEVLSGMSLYLG

SEQ ID NO: 134465 - protein, 269 aa, Unknown
  Bacterial polypetide isolated from the Sargasso Sea
GPIKDYECLCGKYKRMKFRGIICEKCGVEVTKSNVRRERMGHINLATPVAHIWFLKSLPSRISLAVDMKLKEVERVLYFENFIVIEPGLTGLKKNQLLTEEELIKYQDEHGDESFTTGIGAEAILEILKSIDLESEKVTLTNAIKETKSKVAEERAIKRLKLIESFIETGNKPEWMILTTIPVIPPELRPLVPLDGGRFATSDLNDLYRRVINRNNRLKRLMDLKAPDIIIRNEKRMLQESVDALFDNGRRGRVITGTAKRPLKSLAEM

SEQ ID NO: 134466 - protein, 108 aa, Unknown
  Bacterial polypetide isolated from the Sargasso Sea
METAEVNAKNWKGLIKPTKLDVQLSDDKSYAKIIAEPLEKGYGLTLGNSLRRILLSSIRGTAVTSIQIDGVLHEFTSIKGVREDVTDIVLNIKSLALKSASEESKKLI

SEQ ID NO: 134467 - protein, 262 aa, Unknown
  Bacterial polypetide isolated from the Sargasso Sea
VREDVTDIVLNVKSLALKSDSNTNSKLILDAKGPGEIKAADITNSGDIEILNPDLVICNLDENTNFHMEMTVSSGKGYVSADMNKPEEPPLGLIPIDSLFSPVKKVSYSISTAREGKALDYDKLTMEVETNGSISAEDAVAYSARIFQDQLGMFVNFDEPQEVIIREQPTEPEFNKNLLRKVDELELSVRSMNCLKNDNIIYIGDLVQKSEGEMLRTPNFGRKSLNEIKEVLTGMSLYLGMEIPNWPPDNIAELSKKLEEAI

SEQ ID NO: 134468 - protein, 204 aa, Unknown
  Bacterial polypetide isolated from the Sargasso Sea
MSIINNWQALIKPSKLKLISDEETQYKATLIAEPLERGFGLTLGNALRRVLLSSLQGTAVTAIKIDNVLHEFSSIDGVREDVTDIVLNIKSLSLNMHSEGVRKMNLNVTGPGEITAGMINTPSEIDIINPELVICNLDDNTEFNMELTVAKGKGYVAAEHNKPEDSAIGLIPIDSIFSPVKQVSYSIENTREGKVLDYDKLTMS

SEQ ID NO: 134469 - protein, 292 aa, Unknown
  Bacterial polypetide isolated from the Sargasso Sea
STNKRPLKSLSDMLKGKQGRFRQNLLGKRVDYSGRSVIVVGPNLKLHQCGIPKKMALELFKPFIFHKLDIYGWANTIKAAKKLVEKEDPRVWDILEEVIREHPVLLNRAPTLHRLGIQAFEPILIEGKSIQLHPLVCTAFNADFDGDQMAVHVPLSLEAQLEARVLMMSTNNILSPSSGKPIIVPSQDIVLGIYYLSIMRDKQIGEGRNFVDLNEILKALENGDVNLHSKINARIKMNDGQLSKVVTTPGRMILGDILPKNKNVNYEMINKVLTKKEVSNIIDNVYRFCGQK

SEQ ID NO: 134470 - protein, 107 aa, Unknown
  Bacterial polypetide isolated from the Sargasso Sea
MTNSNLRTENHFDYVKIKLASPERVMEWGQRTLPNGQVVGEVTKPETINYRTLKPEMDGLFCEKIFGPSKDWECHCGKYKRVRHRGIVCERCGVEVTESRVRRHRMG

SEQ ID NO: 134471 - protein, 144 aa, Unknown
  Bacterial polypetide isolated from the Sargasso Sea
METSNVNVKNWKSLIKPGKLDIQLSDDKSYAKIIAEPLEKGYGLTLGNSLRRILLSSIRGTAVIAIQIDGVLHEFSSIKGVREDVTDIVLNVKSLALKSNIEGSKKLILDAKGPGEIKASDITQVADIEILNPDLVICNLDEKT

SEQ ID NO: 134472 - protein, 310 aa, Unknown
  Bacterial polypetide isolated from the Sargasso Sea
LFIQGLNLLGISSTVKQAKRMVEKQTPEVWDILEEVIREHPVLLNRAPTLHRLGIQAFEPVLIEGKAIQLHPLVCAAFNADFDGDQMAVHVPLSLEAQLEARVLMMSTNNILHPANGDPIIVPSQDIILGLYYLSQMKQNEPGEGRHFDDINEIEFALDNKNITLHTMISFRFNAEDGYKKFDTTPGRVLISKELPSNENISFELVNKLLTKKEISRMIDDVYRHCGQKETVIFCDHIMKLGFKHACNAGISFGKDDMIIPEEKVSLINDTNELVKEFEQQYIDGFITRGENIIKLLMHGRNVLIRSRIK

SEQ ID NO: 134473 - protein, 137 aa, Unknown
  Bacterial polypetide isolated from the Sargasso Sea
METENVNLKNWKSLIKPTKLDVKMSDDLTHAKIVAEPLEKGYGLTLGNSLRRILLSSIRGAAVTSIQIDGVLHEFTSIKGVREDVTDIVLNVKSLALKCSAEGTKKLVLDAKGPGEIKASDITPVTDVEILNPDLVI

SEQ ID NO: 134474 - protein, 248 aa, Unknown
  Bacterial polypetide isolated from the Sargasso Sea
IPPELRPLVPLDGGRFATSDLNDLYRRVINRNNRLKRLIDLKAPDIIIRNEKRMLQESVDALFDNGRRGRVITGTGKRPLKSLAEMLKGKQGRFRQNLLGKRVDYSGRSVIVVGPDLKLHECGLPKKMALELFKPFLYARLNKLGLASTIKQAKKIVEKEKNEVWDALELIVREHPVILNRAPTLHRLGVQAFEPKLIEGEAIELHPLVCAAFNADFDGDQMAVHIPLSLEAQLEARVLMMSTNNILS

SEQ ID NO: 134475 - protein, 294 aa, Unknown
  Bacterial polypetide isolated from the Sargasso Sea
AIKRLKIVASFNRRDEHGRRVNEPGAMILDAVPVIPPDLRPMVQLDGGRFATSDLNDLYRRVINRNNRLKRLLDLGAPRIIVNNEKRMLQEAVDALFDNGRRGRPVTGPGNRPLKSLSDMLKGKQGRFRQNLLGKRVDYSGRSVIVAGPTLKFHQCGLPKLMALELFKPFVMKRLVDGELAQNIKSAKRMVERRKPQVWDVLEEVIQEHPVMLNRAPTLHRLGIQAFEPVLVEGKAIRIHPLVCTAFNADFDGDQMAVHLPLSAEAQAEARVLMLSANNVLSPAHGRPLVTPTP

SEQ ID NO: 134476 - protein, 272 aa, Unknown
  Bacterial polypetide isolated from the Sargasso Sea
MNFLQFLGVKEDLTDILLNLKAVCLKVHSPGLKKMYIKTKGPGEIRAGNFETDSETEIMNPDQIIMTLDSNADIELEANIDTGKGYLSAEVAEDDEKIIGEIKLDAMFSPVKRASYKVENSRVGQVTDYDKLILEVETNGAVSPDDAIALAARILQDQLQPFINFDEPEVQMETSSHEKLSFNPNLLKKVEELELSVRSANCLKNDNIIYIGDLVQKTESEMLRTPNFGRKSLNEIKEVLQQMELGLGISVPDWPPENIEELAKKFEDPFNK

SEQ ID NO: 134477 - protein, 272 aa, Unknown
  Bacterial polypetide isolated from the Sargasso Sea
NSETRRKRIAKRLNVISALLKSGNAVDSMVIDNLPVLPPELRPLVPLEGGRFATSDLNDLYRRVIHRNNRLKRLIELRAPGIIVKNEKRMLQESVDALFDNGRRGRPMVGSNKRPLKSISDMLKGKQGRFRQNLLGKRVDYSGRTVIVVGPELKLHQCGLPKKMALELFKPFIFHKLIDYQEIHTIKNAKKVLEENPPEVWAILEEVVREHPVLLNRAPTLHRLGIQSFEPILIEGKAIQLHPLVCTAFNADFDGDQMAVHVPLSVEAQLES

SEQ ID NO: 134478 - protein, 228 aa, Unknown
  Bacterial polypetide isolated from the Sargasso Sea
SFTAGIGAEAILEILKSIDLDQEKETLIKSIKETKSKVSEERSIKRLKLIESFIETGNKPEWMILTTIPVIPPELRPLVPLDGGRFATSDLNDLYRRVINRNNRLKRLMDLKAPDIIVRNEKRMLQESVDALFDNGRRGRVITGTGKRPLKSLAEMLKGKQGRFRQNLLGKRVDYSGRSVIVVGPDLKLHECGLPKKMALELFKPFLYARLNKLGLASTIKQAKKLVE

SEQ ID NO: 134479 - protein, 273 aa, Unknown
  Bacterial polypetide isolated from the Sargasso Sea
VAHIWFLKSLPSRIGLLLDMTLRDIERILYFEAFVVIDPGFTELEKCQLLSDETYYEAIEQYGDEFVAKMGAEAILDMLDDLDLTQETEKLREELSSTKSEAKIKRLTKRLKLVEYFISSGNKPQWMILRALPVLPPDLRPLVPLDGGRFATSDLNDLYRRVINRNNRLRRLLELNAPDIIVRNEKRMLQEAVDALLDNGRRGRAITGSNKRPLKSLAELIKGKQGRFRQNLLGKRVDYSGRSVIVTGPTLMLHQCGIPKKMALELFKPFIFS

SEQ ID NO: 134480 - protein, 289 aa, Unknown
  Bacterial polypetide isolated from the Sargasso Sea
LSQIQGAAVTAIKIDGVLHEFSSIKGVREDVTDIVLNVKNLALKLNSDGPKKLILDSVGPKEVKAKDITQIADVEILNPEQTICNLDEKTKFHMELIVNSGRGYVLAQKNKSEDTPLGMIAIDSLFSPVKKVSFKIDSTRAGSALDYDKLVMQVETNGTVAAEDAIAFAARIFQDQLSMFVNFEDPKEAPKPVTSTEPEFNKNLLKRVEELELSVRSMNCLKNDNIIYIGDLVQKTEPEMLRTPNFGRKSLNEIKEVLSSMSLYLGMEIPNWPPDNIAELSKKLEENTY

SEQ ID NO: 134481 - protein, 298 aa, Unknown
  Bacterial polypetide isolated from the Sargasso Sea
TLREIERVLYFESYIVTDPGLTELEKGDILTEEEWVEKYEEFGDEFTAGMGAEAVQILLEELDIDDEIRIIREEIPETNSETKLKKLSKRLKLLEAFNNSGNKPEWMIMNVLPVLPPDLRPLVPLEGGRFATSDLNDLYRRVINRNNRLKRLLELNAPEIIVRNEKRMLQESVDALLDNGRRGRVITGTNKRPLKSLADMIKGKGGRFRQNLLGKRVDYSGRSVIVAGPNLRLHQCGLPKKMALELFKPFVYGKLEQRELTTTIKGAKKLVERETPEVWGVLEEVIREHPVLLNRAPT

SEQ ID NO: 134482 - protein, 294 aa, Unknown
  Bacterial polypetide isolated from the Sargasso Sea
MQTTSNVIDKNWKALIKPNKLEITSNDDKTIAKVIAEPLEKGFGQTIGNSLRRILLSSIQGAAVTAIQIDGVLHEFSSIKGVREDVTDIVLNVKNLAIKSSSSSPKKIILDIKGPKEVKAKDITLVPEIEILNPDQTICNLDEKTNFHMELMVSTGKGYVQAPKNKTEDSPLGLISIDSLFSPVKKVSFSVENTRAGSALDYDKLIMTVETNGTVDAEDAIAYSARIFQDQLSMFVNFEDPQEVVKEVKSSEPEFNRNLLKRVEELELSVRSMNCIKNDNIIYIGDLVQKTEPE

SEQ ID NO: 134483 - protein, 281 aa, Unknown
  Bacterial polypetide isolated from the Sargasso Sea
ESVDALFDNGRRGRVITGTGKRPLKSLAEMLKGKQGRFRQNLLGKRVDYSGRSVIVVGPDLKLHECGLPKKMALELFKPFLYARLNKLGLASTIKQAKKLVEKETNAVWDALELIVREHPVLLNRAPTLHRLGVQAFEPKLIEGDAIELHPLTCAAFNADFDGDQMAVHVPLSLEAQLEARILMLSTNNILSPSNGKPIIVPSQDMILGIYYLSQDPISDKPAGYFTNSDQIEFALSSGQINVHSTIISRYETLDEKGNKKIEKYTSTAGRFLLANLLPKK

SEQ ID NO: 134484 - protein, 139 aa, Unknown
  Bacterial polypetide isolated from the Sargasso Sea
MEQTEVNVKNWKSLIKPTKLDVKLSDDKTNAKIIAEPLEKGYGLTLGNSLRRILLSSIRGAAVTAIQIDGVLHEFTSIKGVREDVTDIVLNVKSLALKSNSEGIKKLVLDAKGPGEIKASDITAVPDIEILNPDLVICN

SEQ ID NO: 134485 - protein, 118 aa, Unknown
  Bacterial polypetide isolated from the Sargasso Sea
METADVNIKNWKSLIKPPKLDVKLSDDKSHAKITAEPLEKGYGLTLGNSLRRILLSSIRGAAVTSVQIDGVLHEFSSIKGVREDVTDIVLNIKSLALKSHSEGTKKLILDAKGPGKSK

SEQ ID NO: 134486 - protein, 224 aa, Unknown
  Bacterial polypetide isolated from the Sargasso Sea
MDVENVNVKNWKSLIKPAKLDVKISDDLTHATIIAEPLEKGYGLTLGNSLRRILLSSIRGAAVTSIQIDGVLHEFTSIKGVREDVTDIVLNVKSLALKCAAEGTKKLVLDAKGPGEIKASDIESVPDVEILNPDLVICNLDENTHFHMEMNVNTGKGYVPADLNKPEEPPLGLIAIDSLYSPVKKVSYSVSTAREGKALDYDKLTMEVETNGSISAEDAVCYFC

SEQ ID NO: 134487 - protein, 247 aa, Unknown
  Bacterial polypetide isolated from the Sargasso Sea
PQTNSETKLKKFSKRLKLLEAFNNSGNKPEWMIMNVLPVLPPDLRPLVPLEGGRFATSDLNDLYRRVINRNNRLKRLLELNAPEIIVRNEKRMLQESVDALLDNGRRGRVITGTNKRPLKSLADMIKGKGGRFRQNLLGKRVDYSGRSVIVAGPNLKLHQCGLPKKMALELFKPFVYGKLENRELATTIKAAKKLVERETPEVWEVLEEVIREHPVLLNRAPTLHRLGLQAFEPKLIEGKAIQLHPL

SEQ ID NO: 134488 - protein, 216 aa, Unknown
  Bacterial polypetide isolated from the Sargasso Sea
KYKRMKFRGIICEKCGVEVTKSNVRRERMGHIDLACPVAHIWFLKSLPSRISLAIDMKLKEVEKVLYFESFIVVEPGLTTLKKGQLISEEALLKAQEEFGEDAFTAGIGAEAVREILVNLDLKKEQQKLRESLKEIKSKVTEERTIKRLKLIESFINSGNKPEWMILTSVPVIPPELRPLVPLDGGRFATSDLNDLYRRVINRNNRLKRLLDLKAP

SEQ ID NO: 134489 - protein, 271 aa, Unknown
  Bacterial polypetide isolated from the Sargasso Sea
GNAIELHPLVCAAFNADFDGDQMAVHVPLSLEAQIEARVLMMSTNNILSPSNGKPIIVPSQDIVLGIYYLSQHKEDSNTKPVGIFSDVDEIENAIERKDISVHSKIVSVFNTVDEDGNKISEKYTSTAGRFLLSKTLPKNHRIKFELVNKLLTKKAVSEVIDTVYRYCGQKETVIFCDRIKDLGFKHAFKAGISFGKNDLIIPKTKEKLVNQTKKQIEDYEKQYQDGLITRGEKYNKVVDIWSKCTDSVANEMMKEISSAEKIYPDGRIET

SEQ ID NO: 134490 - protein, 175 aa, Unknown
  Bacterial polypetide isolated from the Sargasso Sea
METENVNIKNWKSLIKPSKLDVKLSEDLTHAKIIAEPLEKGYGLTLGNSLRRILLSSIRGAAVTSIQIDGVLHEFTSIKGVREDVTDIVLNVKSLALKCNSEGTKKLILDAKGPGEIKASDISPVADVEILNPDLVICNLDENTNFHMEMNVNTGKGYVPAELNKPEEPPLGLIA

SEQ ID NO: 134491 - protein, 266 aa, Unknown
  Bacterial polypetide isolated from the Sargasso Sea
MGNIKLACPVSHVWFLKGVPSRIATILDMMLRDLERVLYFDSYIVLDPGDSDLEPLELVEEDQYRELEENHPDLKLGMGAEAIQTLLKRIELEELENTLQIEMREVNSETRRKRIAKRLNIISQLLKSGNAVDSMIIDNLPVLPPELRPLVPLEGGRFATSDLNDLYRRVIHRNNRLKRLIELRAPGIIVKNEKRMLQESVDALFDNGRRGRPMVGSNKRPLKSISDMLKGKQGRFRQNLLGKRVDYSGRTVIVVGPELKLHQCGL

SEQ ID NO: 134492 - protein, 270 aa, Unknown
  Bacterial polypetide isolated from the Sargasso Sea
DVNIKNWKSLIKPGKLDVQLSDDKAYAKITAEPLEKGYGLTLGNSLRRILLSSIRGTAVTAIQIDGVLHEFTSIKGVREDVTDIVLNVKSLALKCSSEGSKKLILDAKGPGEIKASDITPVADISILNPELVICHLDENTHFHMEMNVGNGKGYVSADMNKPEEPPLGLIPIDSLFSPVKKVSYSISTAREGKALDYDKLTMEVETNGSISAEDAVAYSARIFQDQLGMFVNFDEPQETIVREKSTEPEFNRNLLRKVDELELSVRSMNC

SEQ ID NO: 134493 - protein, 270 aa, Unknown
  Bacterial polypetide isolated from the Sargasso Sea
SIDLKLEREKLSKFIKETKSKVTEERNVKRLKLIDSFIATGNKPEWMILTTVPVIPPELRPLVPLDGGRFATSDLNDLYRRVINRNNRLKRLIDLKAPDIIIRNEKRMLQESVDALFDNGRRGRVITGTGKRPLKSLAEMLKGKQGRFRQNLLGKRVDYSGRSVIVVGPDLKLHECGLPKKMALELFKPFLYARLNKLGLASTIKQAKKLVEKERDEVWDALEIIVREHPVLLNRAPTLHRLGVQAFEPKLIEGDAIQLHPLTCAAFNAD

SEQ ID NO: 134494 - protein, 143 aa, Unknown
  Bacterial polypetide isolated from the Sargasso Sea
MENQVVDKNWKNLIKPSKIDVQSGEDKSVAKIVAEPLEKGYALTLGNSLRRILLSSIQGSAVTAVQIDGVLHEFSSIKGVREDVTDIVLNVKSLALKLETDGAKKLILDATGPGEIKAKNINEVAGKKILNPDLTICNLDEKT

SEQ ID NO: 134495 - protein, 282 aa, Unknown
  Bacterial polypetide isolated from the Sargasso Sea
VPLDGGRFATSDLNDLYRRVINRNNRLKRLLDLKAPDIIVRNEKRMLQESVDALFDNGRRGRVITGTGKRPLKSLAEMLKGKQGRFRQNLLGKRVDYSGRSVIVVGPELKLHQCGLPKKMALELFKPFLYARLDKLGLATTIKQAKRLVEKEKSEVWDSLEHIIREHPILLNRAPTLHRLGVQAFEAKLIEGNAIELHPLVCAAFNADFDGDQMAVHIPLSLEAQLEARVLMMSTNNILSPSNGKPIIVPSQDIVLGIYYLSQSSKNDKKPKGVFSSVKKLS

SEQ ID NO: 134496 - protein, 322 aa, Unknown
  Bacterial polypetide isolated from the Sargasso Sea
MKDLLKLLKQQGQTEEFDAITIGLASPEKIRSWSYGEVKKPETINYRTFKPERDGLFCAKIFGPIKDYECLCGKYKRLKHRGVVCEKCGVEVTLSKVRRERMGHIELATPIAHIWYLKSLPSRMGLMLDMTLREIERILYFEAYVVVEPGMTELERGQMLTEENYLEALENYGDEFEAKMGAEAIRELLLSIDIESEVQTLRDEIPNTNSETKLRKLTKRLKLLEAFMNSGNKPEWMVMQVLPVLPPELRPLVPLDGGRFATSDLNDLYRRVINRNNRLKRLLDLNAPDIIVRNEKRMLQESVDALLDNGRRGRAITGTNKL

SEQ ID NO: 134497 - protein, 124 aa, Unknown
  Bacterial polypetide isolated from the Sargasso Sea
MSENENEILDEIVETEEVEKEEIVLDLLNPMVIKLESQNELHSRVSIEPFERGFGYTLGNAIRRVLLSSLPGYAITEAQIDGVLHEYTTIEGVQEDVVEILLNLKGVAINIHDRDSADFGSARK

SEQ ID NO: 134498 - protein, 242 aa, Unknown
  Bacterial polypetide isolated from the Sargasso Sea
MLSSIRGTAVTAIQIDGVLHEFTSIKGVREDVTDIVLNVKSLALKSNSENNNKLILDAKGPGEIKASNISTTADIEILNPDLVICNLDENTNFHMEMTVNNGKGYVSAEMNKPTEPPLGLIPIDSLFSPVKKVSYSISTAREGKALDYDKLTMEVETNGSISAEDAVAYSARIFQDQLGMFVNFDEPQEVIVKEQPSEPEFNKNLLRKVDELELSVRSMNCLKNDNIIYIGDLVQKSEGEML

SEQ ID NO: 134499 - protein, 123 aa, Unknown
  Bacterial polypetide isolated from the Sargasso Sea
METANVNLKNWKSLIKPGKLDINLNDDKSYAKIVAEPLEKGYGLTLGNSLRRILLSSIRGTAVTAIQIDGVLHEFTSIKGVREDVTDIVLNVKSLALKSTSEGSKKLVLDAKGPGVIKASDIT

SEQ ID NO: 134500 - protein, 269 aa, Unknown
  Bacterial polypetide isolated from the Sargasso Sea
MMDMKLKDLEKVLYFEKFMVTEPGLTPLIQNQLLDEEELEQAKEEHGEDSFSADIGAEAVRKVLERIELEPELELLRSKLAETKAVALSEKLVKRIKIFEAFISSGNRPEWMILTSVPVIPPELRPLVPLDGGRFASSDLNDLYRRVINRNNRLSRLIELRAPDIIIRNEKRMLQESVDALFDNGRRGRVITGTNKRPLKSLAEMLKGKQGRFRQNLLGKRVDYSGRSVIVVGPELKLHQCGLPKKMAIELFKPFIYARLESLGLATTL

SEQ ID NO: 134501 - protein, 207 aa, Unknown
  Bacterial polypetide isolated from the Sargasso Sea
CGVEVTESRVRRHRMGYIKLAAPVSHVWYLKGIPSYVAILLDIPLRDVEQIVYFNCYVVLDPGDHKELKYKQLLTEDEWLEIEDEIYAEDSTIENEPFVGIGAEALKQLLEDLDLNQVAEELREEITNSKGQKRAKLIKRIRVIDNFIATNAKPEWMVLDAIPVIPPDLRPMVQLDGGRFATSDLNDLYRRVINRNNRLARLQEILA

SEQ ID NO: 134502 - protein, 312 aa, Unknown
  Bacterial polypetide isolated from the Sargasso Sea
RTFRPEKDGLFCARIFGPIKDYECLCGKYKRMKFRGIICEKCGVEVTKSNVRRERMGHINLATPVAHIWFLKSLPSRIALAVDMKLKEVERVLYFENFIVIEPGLTGLKPNQLLNEDELLKYQNEFGEESFTAGIGAEAILEILKSINLEEEKNKLIKNINETKSKVAEERSIKRLKLIDSFIETGNKPEWMILTVVPVIPPELRPLVPLDGGRFATSDLNDLYRRVINRNNRLKRLIDLKAPDIIIRNEKRMLQESVDALFDNGRRGRVITGTGKRPLKSLAEMLKGKQGRFRQNLLGKRVDYSGRSVIVV

SEQ ID NO: 134503 - protein, 189 aa, Unknown
  Bacterial polypetide isolated from the Sargasso Sea
SFIVVEPGLTTLKKGQLISEEALLKAQEEFGEDAFTAGIGAEAVREILVNLDLKKEQQKLRESLKDIKSKVTEERTIKRLKLIESFINSGNKPEWMILTSVPVIPPELRPLVPLDGGRFATSDLNDLYRRVINRNNRLKRLLDLKAPDIIVRNEKRMLQESVDALFDNGRRGRVITGTGKRPLKSLAEM

SEQ ID NO: 134504 - protein, 180 aa, Unknown
  Bacterial polypetide isolated from the Sargasso Sea
MNQGALLTEDEYHERIVLESGLEAAMGAEAIRSLLKSLDLKSERDTLRAELSETKSETKFKKLTKRLKVVEGFINSGNKPEWMVMEVLPVLPPDLRPLVPLDGGRFATSDLNDLYRRVINRNNRLRRLLDLNAPAIIVRNEKRMLQESVDSLLDNGRRGKPVTGSNKRQLKSLADMIKGK

SEQ ID NO: 134505 - protein, 216 aa, Unknown
  Bacterial polypetide isolated from the Sargasso Sea
FIVIEPGLTGLQKNQLLNEEELAKYQDEYGEEAFTAGIGAEAVLEMLKNLDLDLERKNLVDYIKETKSKVNEERAIKRLKLIESFIETGQKPEWMIMTVVPVIPPELRPLVPLDGGRFATSDLNDLYRRVINRNNRLKRLMDLKAPDIIIRNEKRMLQESVDALFDNGRRGRVITGTGKRPLKSLAEMLKGKQGRFRQNLLGKRVDYSGRSVIVVG

SEQ ID NO: 134506 - protein, 271 aa, Unknown
  Bacterial polypetide isolated from the Sargasso Sea
NEKRMLQESVDALFDNGRRGRVITGTGKRPLKSLAEMLKGKQGRFRQNLLGKRVDYSGRSVIVVGPDLKLHECGLPKKMALELFKPFLYARLNKLGLASTIKQAKKLVERERNEVWDALELIVREHPVILNRAPTLHRLGVQAFEPKLIEGNAIELHPLTCAAFNADFDGDQMAVHVPLSLEAQLEARVLMMSTNNILSPSNGKPIIVPSQDMILGIYYLSQPPYQTERVEGYFVNTSEIEHALETGEIKVHSRIVSRFETVDEKGKSIFE

SEQ ID NO: 134507 - protein, 120 aa, Unknown
  Bacterial polypetide isolated from the Sargasso Sea
METENVNAKNWKSLIKPAKLDVKISEDLSHAKIVAEPLEKGYGLTLGNSLRRILLSSIRGSAVTSIQIDGVLHEFTSIKGVREDVTDIVLNVKSLALKCSAEGSKKLVLDAKGPGEIKAS

SEQ ID NO: 134508 - protein, 294 aa, Unknown
  Bacterial polypetide isolated from the Sargasso Sea
VIPPELRPLVPLDGGRFATSDLNDLYRRVINRNNRLKRLIDLRAPDIIIRNEKRMLQESVDALFDNGRRGRVITSTNKRPLKSLSDMLKGKQGRFRQNLLGKRVDYSGRSVIVVGPTLKLHQCGIPKKMALELFKPFIFHKLDIYGWANTIKAAKKLVEKEDPRVWDILEEVIREHPVLLNRAPTLHRLGIQAFEPILIEGKSIQLHPLVCTAFNADFDGDQMAVHVPLSLESQLEARVLMMSTNNILSPSSGKPIIVPSQDIVLGIYYLSVMRDGQKGEGRSFIDLNEILKAL

SEQ ID NO: 134509 - protein, 139 aa, Unknown
  Bacterial polypetide isolated from the Sargasso Sea
MEASNVNLKNWKSLIKPSKIDIDQNNDKTFAKVIAEPLEKGYGLTIGNSLRRILLSSIRGTAVTAIQIDGVQHEYSSIKGVREDVTDIVLNIKSLALKSNIEGNKKLILDAKGPGEIKASQITPVADIEILNPDLVICN

SEQ ID NO: 134510 - protein, 246 aa, Unknown
  Bacterial polypetide isolated from the Sargasso Sea
MTNSNLRTENHFDYVKISIASPQRIMDWGQRTLPNGQVVGEVTKPETINYRTLKPEMDGLFCEKIFGPSKDWECHCGKYKRVRHRGIVCERCGVEVTESRVRRHRMGYIKLAAPVSHVWYLKGIPSYVAILLDIPLRDVEQIVYFNCYVVLDPGDHKDLKYKQLLTEDEWLEIEDEIYAEDSTIENEPFVGIGAEALKQLLEDLDLNQVAEELREEITNSKGQKRAKLIKRIRVIDNFIATNAKPE

SEQ ID NO: 134511 - protein, 170 aa, Unknown
  Bacterial polypetide isolated from the Sargasso Sea
RAPTLHRLGIQAFEPVLIEGKAIQLHPLVCAAFNADFDGDQMAVHVPLSLEAQLEARVLMMSTNNILHPANGDPIIVPSQDIILGLYYLSQMKQNEPGEGRHFDDLNEIEFALDNKNITLHSKLSFRFNTEDGYKKFDTTPGRVLISKELPNNENISFEIVNKLLTKKEI

SEQ ID NO: 134512 - protein, 266 aa, Unknown
  Bacterial polypetide isolated from the Sargasso Sea
MKNNIFEYQDEYGEDSFSAAIGAEAIEQMLLSIDLENDYKQLKIELTETKSELKKTKITKRLKLVESFISSKNKPEWMILKVLPVIPPELRPLVPLDGGRFATSDLNDLYRRVINRNNRLKRLIDLRAPDIIIRNEKRMLQESVDALFDNGRRGRVITSTNKRPLKSLSDMLKGKQGRFRQNLLGKRVDYSGRSVIVVGPNLKLHQCGIPKKMALELFKPFIFHKLDIYGWANTIKAAKKLVEKEDPRVWDILEEVIREHPVLLNR

SEQ ID NO: 134513 - protein, 323 aa, Unknown
  Bacterial polypetide isolated from the Sargasso Sea
RILSWSFGEIKKPETINYRTFKPERDGLFCSRIFGPVKDYECLCGKYKRMKYRGVTCEKCGVEVTLQKVRRERMGHIELASPVAHIWFLKSLPSRIGLMLDMTLRDLERILYFEQYVVVEPGLTDLKAGQLLSEEEYLDAQDQYGLDAFQAGIGAEAIREMLMAIDVDAEAEKLREELKEATGELKPKKIIKRLKLVENFRESSNKPEWMIMTVIPVIPPELRPLVPLDGGRFATSDLNDLYRRVINRNNRLKRLMELKAPDIIIRNEKRMLQESVDALFDNGRRGRVITGGNKRPLKSLSDMLKGKQGRFRQNLLGKRVDFS

SEQ ID NO: 134514 - protein, 323 aa, Unknown
  Bacterial polypetide isolated from the Sargasso Sea
AYRTSIPRFPTFWFLKSLPSRISLAIDLKLKEVEKVLYFESFIVTEPGLTKLKYKQLLTEEQYLKAQEEYGEDSFEAGIGAESIRELLLKLDLNAEKSKLRDVLKEVKSKVSEERTIKRLKLIESFIESGNKPEWMILTSIPVIPPELRPLVPLDGGRFATSDLNDLYRRVINRNNRLKRLIDLKAPDIIVRNEKRMLQESVDALFDNGRRGRVITGTGKRPLKSLAEMLKGKQGRFRQNLLGKRVDYSGRSVIVAGPELKLHQCGLPKKMAVELFKPFLYARLDKLGLATTIKQAKRLVEKEKSEVWDALEAIIREHPVILN

SEQ ID NO: 134515 - protein, 237 aa, Unknown
  Bacterial polypetide isolated from the Sargasso Sea
MEGTTIIDKNWKSLTKPNKLEIESNEDKSIAKVVAQPLEKGFGQTIGNSLRRILLSSIQGAAVTAIQIDGVLHEFSSIKGVREDVTDIVLNVKNLAIKLDSDGPKKLILDANGPKEIKAKDITLVAGVRILNPEQTICNLDEKTKFHMEMVVNNGRGYVLSQKNKSEDTPLGMIAIDSLFSPVKRVSFKVDSTREGAALDYDKLLMEVETNGTVAAEDAVAFAARIFQDQLSMFVNF

SEQ ID NO: 134516 - protein, 280 aa, Unknown
  Bacterial polypetide isolated from the Sargasso Sea
LIESFIETGQKPEWMILTVVPVIPPELRPLVPLDGGRFATSDLNDLYRRVINRNNRLKRLMDLKAPDIIVRNEKRMLQESVDALFDNGRRGRVITGTGKRPLKSLAEMLKGKQGRFRQNLLGKRVDYSGRSVIVVGPDLKLHECGLPKKMALELFKPFLYARLNKLGLASTIKQAKKLVEKETNAVWDALELIVREHPVLLNRAPTLHRLGVQAFEPKLIEGDAIELHPLTCAAFNADFDGDQMAVHVPLSLEAQLEARILMLSTNNILSPSNGKPIIVP

SEQ ID NO: 134517 - protein, 274 aa, Unknown
  Bacterial polypetide isolated from the Sargasso Sea
SQNLGVQDFNSLKISIASPDDIRSWSFGEIKKPETINYRTFKPEKDGLFCSRIFGPVKDYECLCGKYKRMKFRGIICEKCGVEVTLSKVRRDRMGHIELAAPVSHIWFMKSLPSRIATLLDMTIKNLEKVLYFEQFIVVEPGLTDLKKGDIISEDQYIDYQDEYGEDSFSAAIGAEAIEQMLLNIDLEADFNQTKNDLLETKSELKKTKLTKRLKLLESFIFSKNKPEWMILRVLPVIPPELRPLVPLDGGRFATSDLNDLYRRVINRNNRLKR

SEQ ID NO: 134518 - protein, 297 aa, Unknown
  Bacterial polypetide isolated from the Sargasso Sea
PETINYRTFKPERDGLFCARIFGPIKDYECLCGKYKRMKFRGIICEKCGVEVTLSKVRRERMGHIELASPVAHIWFLKSLPSRIGLLLDMTLKELERILYFESFVVLDEGFTSLNRRQLMSEDEYFDAMDEFGEDTFKASIGAEALKEMLSELDLEQEVVEIREGLRTTGSEMKRKKYVKRLKLIEAFIESGCRPEWMILDVVPVIPPELRPLVPLDGGRFATSDLNDLYRRVINRNNRLKRLIELRAPDIIVRNEKRMLQESVDALFDNGRRGRVITGANKRPLKSLSDMLKGKQG

SEQ ID NO: 134519 - protein, 131 aa, Unknown
  Bacterial polypetide isolated from the Sargasso Sea
METTEVNVKNWKSMIKPGKLDVQLSDDKSYAKIIAEPLEKGYGLTLGNSLRRILLSSIRGTAVTAIQIDGVLHEFTSIKGVREDVTDIVLNVKSLALKSSSEGNKKLILDAKGPGEIKASNITPLADIEIL

SEQ ID NO: 134520 - protein, 275 aa, Unknown
  Bacterial polypetide isolated from the Sargasso Sea
EEAFTAGIGAEAILEILKSINLEEERDLLIKNIKETKSKVNEERSIKRLKLIESFIETGNKPEWMILTTVPVIPPELRPLVPLDGGRFATSDLNDLYRRVINRNNRLKRLIDLKAPDIIVRNEKRMLQESVDALFDNGRRGRVITGTGKRPLKSLAEMLKGKQGRFRQNLLGKRVDYSGRSVIVVGPDLKLHECGLPKKMALELFKPFLYARLNKLGLASTIKQAKKLVEKERNEVWDALELIVREHPVILNRAPTLHRLGVQAFEPKLIEGNAI

SEQ ID NO: 134521 - protein, 276 aa, Unknown
  Bacterial polypetide isolated from the Sargasso Sea
TGTGKRPLKSLAEMLKGKQGRFRQNLLGKRVDYSGRSVIVVGPELKLHQCGLPKKMALELFKPFLYARLDKLGLATTIKQAKRMVEKQKSEVWDALEHIIREHPVILNRAPTLHRLGVQAFEAKLIEGNAIELHPLVCAAFNADFDGDQMAVHIPLSIEAQLEARVLMMSTNNILSPSNGKPIIVPSQDIVLGIYYLSQHKEDRDSKPVGIFSDVNEIENALERHNISVHSKIVSIFNTVDKDGNKVSEKYTSTAGRFLLSKTLPKNHRIKFSLVN

SEQ ID NO: 134522 - protein, 280 aa, Unknown
  Bacterial polypetide isolated from the Sargasso Sea
GGEIKKPETINYRTFRPEKDGLFCARIFGPVKDYECLCGKYKRMKFRGIVCEKCGVEVTKSKVRRERMGHIDLASPVAHIWFLKSLPSRISLSIDMKLKDVEKVLYFESFIVIEPGLTELKKGQLLTEEEYLKSQEKYGEDGFTAGIGAEAVREILLGIDLKQERERLRNSLKEIKSKVTEERTLKRLKLLESFIDSGNKPEDMILTTVPVIPPELRPLVPLDGGRFATSDLNDLYRRVINRNNRLKRLMDLKAPDIIVRNEKRMLQESVDALFDNGRRG

SEQ ID NO: 134523 - protein, 307 aa, Unknown
  Bacterial polypetide isolated from the Sargasso Sea
MEATDINIKNWKSLIKPGKLDIKLSDDKSYAKIIAEPLEKGYGLTLGNSLRRILLSSIRGTAVTAIQIDGVLHEFSSIKGVREDVTDIVLNVKSLALKSNIEGTKKLILDAKGPGEIKASNIIPVADIEILNPDLVICNLDENTNFHMEMTVGNGKGYVSADMNKPEEPPLGLIPIDSLFSPVKKVSYSISTAREGKALDYDKLIMEVETNGSISAEDAVAYSARIFQDQLGMFVNFDEPQEVIVREAPSEPEFNKNLLRKVDELELSVRSMNCLKNDNIIYIGDLVQKSEGEMLRTPNFGRKSLNE

SEQ ID NO: 134524 - protein, 263 aa, Unknown
  Bacterial polypetide isolated from the Sargasso Sea
SFIKETKSKVNEERAIKRLKLIESFIETGQKPEWMIMTVVPVIPPELRPLVPLDGGRFATSDLNDLYRRVINRNNRLKRLMDLKAPDIIVRNEKRMLQESVDALFDNGRRGRVITGTGKRPLKSLAEMLKGKQGRFRQNLLGKRVDYSGRSVIVVGPDLKLHECGLPKKMALELFKPFLYARLNKLGLASTIKQAKKLVEKETNAVWDALELIVREHPVLLNRAPTLHRLGVQAFEPKLIEGDAIELHPLTCAAFNADFDGDQ

SEQ ID NO: 134525 - protein, 263 aa, Unknown
  Bacterial polypetide isolated from the Sargasso Sea
KSARKMVESERPEVWDILDEVIREHPILLNRAPTLHRLGIQAFEPILIEGKAIQLHPLVCTAFNADFDGDQMAVHIPLSLEAQLEARVLMMSTNNILSPSSGKPIIVPSQDIVLGIYYLSLINENEEPKKYYSHVGEVEFALENKTIELHTPILYRTKIYNSETDSFEYKKFTTSAGRVMLFKTVPDNKNLPFDVINKVLTKKDISNLLDNVYRFTGQKATCIFVDQIMNVGFKHAAKAGISFGKDDLVIPEEKNVLIQDTQK

SEQ ID NO: 134526 - protein, 294 aa, Unknown
  Bacterial polypetide isolated from the Sargasso Sea
VLIAEPLERGFGLTLGNSLRRILLSSLQGAAITSVKLKGVVHEFSTIPGVKEDLTDILLNLKSVCLKVHSPGLKKMYIRTKGPGEIRAGNFETDSETEIMNPDQIIMTLDSNADIELEANIDTGKGYLSAEVAEDDEKIIGEIKLDAMFSPVKRASYKVENSRVGQVTDYDKLILEVETNGALSPDDAIALAARILQDQLQPFINFDEPEVQMETSSHEKLSFNPNLLKKVEELELSVRSANCLKNDNIIYIGDLVQKTESEMLRTPNFGRKSLNEIKEVLQQMELGLGISVPD

SEQ ID NO: 134527 - protein, 232 aa, Unknown
  Bacterial polypetide isolated from the Sargasso Sea
REDALKRLKVVKDFARDRNNKPEWMIVSILPVIPPELRPLVPLEGGRFAASDLNDLYRRIIIRNNRLKQLMDIQAPEVILRNEKRMLQESVDALFDNTKRKTAIRSGSKRPLKSISDMLRGKQGRFRQNLLGKRVDYSGRSVIVVGPELRMTECGIPKNMALELFKPHLIRELIRRDLAATPRSAKLMIENKESFVYEILESVVKDHPVLLNRAPTLHRLGIIAFQPILIDG

SEQ ID NO: 134528 - protein, 297 aa, Unknown
  Bacterial polypetide isolated from the Sargasso Sea
CGKYREMKFRGIICEKCGVEVTKSNVRRERMGHINLATPVAHIWFLKSLPSRISLAIDMKLKEVERVLYFENFIVIEPGLTGLKKNQLLGEEELIKYQDEYGEESFTAGIGAEAILEILKSIDLEQEKESLIKSIKETKSKVSEERSIKRLKLIESFIETGNKPEWMILTTIPVIPPELRPLVPLDGGRFATSDLNDLYRRVINRNNRLKRLMDLKAPDIIVRNEKRMLQESVDALFDNGRRGRVITGTGKRPLKSLAEMLKGKQGRFRQNLLGKRVDYSGRSVIVVGPDLKLHECG

SEQ ID NO: 134529 - protein, 291 aa, Unknown
  Bacterial polypetide isolated from the Sargasso Sea
RILLSSIRGTAVTSIQIDGVLHEFSSIKGVREDVTDIVLNVKSLALKSNMEGTKKLILDAKGPGEIKASNISPVTDIEILNPDLVICNLDENTNFHMEMTVGNGKGYVSADMNKPEEPPLGLIPIDSLFSPVKKVSYSISTAREGKALDYDKLIMEVETNGSISAEDAVAYSARIFQDQLGMFVNFDEPQEVIVRETPSEPEFNKNLLRKVDELELSVRSMNCLKNDNIIYIGDLVQKSEGEMLRTPNFGRKSLNEIKEVLNTMSLYLGMEIPNWPPDNIAELSKKLEEAI

SEQ ID NO: 134530 - protein, 250 aa, Unknown
  Bacterial polypetide isolated from the Sargasso Sea
LLGKRVDYSGRSVIVVGPDLKLHECGLPKKMALELFKPFLYARLNKLGLASTIKQAKKLVEKETNAVWDALELIVREHPILLNRAPTLHRLGVQAFEPKLIEGDAIELHPLTCAAFNADFDGDQMAVHIPLSLEAQLEARVLMMSTNNILSPSNGKPIIVPSQDMILGIYYLSQPPYQNEKVEGYFVNNSEIEQGLESGSINVHSRIISRFETMDDKGNTVQQKYTSTAGRFLLANLLPKHKDINFSLID

SEQ ID NO: 134531 - protein, 272 aa, Unknown
  Bacterial polypetide isolated from the Sargasso Sea
DDRDNDNYFYATMGGEAMKEMLSRISISELKKELVDIVKTSKSKQKRNDALKRLKVVQSFVPDPLKKRLNKPEWMIVSILPVIPPELRPLVPLEGGRFAASDLNDLYRRIIIRNNRLKQLMEIKAPDVILRNEKRMLQEAVDALFDNNRRKTAIRSGSRRPLKSLSDMLRGKTGRFRQNLLGKRVDYSGRSVIVVGPQLNLHECGMPKNMALELFKPHMIHELMARGYAQTPRSAKLMVENGDSVVYKVLEYVVQDHPVLLNRAPTLHRLGI

SEQ ID NO: 134532 - protein, 278 aa, Unknown
  Bacterial polypetide isolated from the Sargasso Sea
MFCARIFGPIKDYECLCGKYKRMKFRGIICEKCGVEVTKSNVRRERMGHINLATPVAHIWFLKSLPSRIALAVDMKLKEIERVLYFENFIVIEPGLTGLQKNQLLNEEELTKYQDEFGEESFTAGIGAEAVLEMLKNLDLEFERKNLVSFIKETKSKVNEERAIKRLKLIESFIETGQKPEWMIMTVVPVIPPELRPLVPLDGGRFATSDLNDLYRRVINRNNRLKRLMDLKAPDIIVRNEKRMLQESVDALFDNGRRGRVITGTGKRPLKSLAEMLK

SEQ ID NO: 134533 - protein, 320 aa, Unknown
  Bacterial polypetide isolated from the Sargasso Sea
ENFIVIEPGLTGLQKNQLLNEEELAKYQDEFVEESFTAGIGAEAVLEMLKNLDLDLERKNLVSFIKETKSKVNEERAIKRLKLIESFIETGQKPEWMIMTVVPVIPPELRPLVPLDGGRFATSDLNDLYRRVINRNNRLKRLMDLKAPDIIVRNEKRMLQESVDALFDNGRRGRVITGTGKRPLKSLAEMLKGKQGRFRQNLLGKRVDYSGRSVIVVGPDLKLHECGLPKKMALELFKPFLYARLNKLGLASTIKQAKKLVEKETNAVWDALELIVREHPVLLNRAPTLHRLGVQAFEPKLIEGDAIELHPLTCAAFNAR

SEQ ID NO: 134534 - protein, 261 aa, Unknown
  Bacterial polypetide isolated from the Sargasso Sea
EIKKPETINYRTFKPERSGLFCARIFGPIKDYECVCGKYKRMKFKGIICEKCGVEVTLTKVRRERMGHIPLAAPVAHIWFLKSLPSRIGLLLDLALKDLEKILYFESFIVTEPGMVKSLKKFQILTDEENSSLKEEYGDSFQSMIGAEAIQKLLSEIDLKDQQKKVREELSSTSSETKKKKLVKRLKLVEAFLNSKLKPEWMILNVIPVIPPELRPLVPLDGGRFATSDLNDLYRRVINRNNRLQRLLNLKAPDIIVRNEK

SEQ ID NO: 134535 - protein, 277 aa, Unknown
  Bacterial polypetide isolated from the Sargasso Sea
MILTVIPVIPPELRPLVPLDGGRFATSDLNDLYRRVINRNNRLKRLIDLKAPDIIVRNEKRMLQESVDALFDNGRRGRVITGTGKRPLKSLAEMLKGKQGRFRQNLLGKRVDYSGRSVIVVGPDLKLHECGLPKKMALELFKPFLYARLNKLGLASTIKQAKKLVEKERNEVWDSLEIIVREHPVILNRAPTLHRLGVQAFEPKLIEGDAIELHPLTCAAFNADFDGDQMAVHIPLSLEAQLEARVLMMSTNNILSPSNGKPIIVPSQDMILGIYYL

SEQ ID NO: 134536 - protein, 266 aa, Unknown
  Bacterial polypetide isolated from the Sargasso Sea
RGAAVTSLQIDGVLHEFTSIKGVREDVTDIVLNVKSLALKCNSEGNKKLILDAKGPGEIKASHISPVADVEILNPDLVICNLDENTNFHMEMNVNTGKGYVPAELNKPEEPPLGLIAVDSLYSPVKKVSYSISTAREGKALDYDKLIMEVETNGSISAEDAVAYSARIFQDQLKMFINFDEPVEAPVKEVSTEPEFNKNLLRKVDELELSVRSMNCLKNDNIIYIGDLVQKSEGEMLRTPNFGRKSLNEIKEVLTGMSLYLGMEIP

SEQ ID NO: 134537 - protein, 307 aa, Unknown
  Bacterial polypetide isolated from the Sargasso Sea
KSNVRRERMGHINLATPVAHIWFLKSLPSRIALAVDMKLKEVERVLYFENFIVIEPGLTGLKPNQLLNEDELLKYQNEFGEESFTAGIGAEAILEILKSINLEEEKNKLIKNINETKSKVAEERSIKRLKLIDSFIETGNKPEWMILTVVPVIPPELRPLVPLDGGRFATSDLNDLYRRVINRNNRLKRLIDLKAPDIIIRNEKRMLQESVDALFDNGRRGRVITGTGKRPLKSLAEMLKGKQGRFRQNLLGKRVDYSGRSVIVVGPDLKLHECGLPKKMALELFKPFLYARLNKLGLASTIKQAKK

SEQ ID NO: 134538 - protein, 285 aa, Unknown
  Bacterial polypetide isolated from the Sargasso Sea
DYSGRSVIVVGPDLKLHECGLPKKMALELFKPFLYARLNKLGLASTIKQAKKLVEKETNAVWDALELIVREHPVLLNRAPTLHRLGVQAFEPKLIEGDAIELHPLTCAAFNADFDGDQMAVHVPLSLEAQLEARILMLSTNNILSPSNGKPIIVPSQDMILGIYYLSQEPISDKPAGYFTNSDQIEFALSSGQINVHSTIISRFETVDDQGNKKMEKYTSTAGRFLLANLLPKNSNIKFSLVDRLLPKKVVSEIIDVVFRFCGQKTTVIFCDKLKDLGFKHAFKA

SEQ ID NO: 134539 - protein, 312 aa, Unknown
  Bacterial polypetide isolated from the Sargasso Sea
DGGRFATSDLNDLYRRVINRNNRLKRLMDLKAPDIIVRNEKRMLQESVDALFDNGRRGRVITGTGKRPLKSLAEMLKGKQGRFRQNLLGKRVDYSGRSVIVVGPDLKLHECGLPKKMALELFKPFLYARLNKLGLASTIKQAKKLVEKETNAVWDALELIVREHPVLLNRAPTLHRLGVQAFEPKLIEGDAIELHPLTCAAFNADFDGDQMAVHVPLSLEAQLEARILMLSTNNILSPSNGKPIIVPSQDMILGIYYLSQEPISDKPAGYFINSDQIEFALSSGQINVHSTIISRYETVDEQGNKKIEKYTS

SEQ ID NO: 134540 - protein, 83 aa, Unknown
  Bacterial polypetide isolated from the Sargasso Sea
MENTDVNIKNWKSLIKPTKLDVESNSEKTYAKIVAEPLEKGYGLTLGNALRRILLSSIRGAAVTAIQIDGVLHEFTSIKGVRE

SEQ ID NO: 134541 - protein, 104 aa, Unknown
  Bacterial polypetide isolated from the Sargasso Sea
MQISVIDLLVPTEIQVENVSDTVSKVTLEPLERGFGHTLGNALRRILLSSMPGAAVTDVVIDGISHEYSTIEGVREDVIDILLNLKDMPVKLIEGNEAELKLSV

SEQ ID NO: 134542 - protein, 260 aa, Unknown
  Bacterial polypetide isolated from the Sargasso Sea
HRLGVQAFEAKLIEGNAIELHPLVCAAFNADFDGDQMAVHVPLSLEAQIEARVLMMSTNNILSPSNGKPIIVPSQDIVLGIYYLSQHKEDSNAKPVGIFSDVDEIENAIERKDISVHSKIVSVFNTVDKDGNKISEKYTSTAGRFLLSKTLPKNHRIKFDLVNKLLTKKAVSEVIDTVYRYCGQKETVIFCDRIKDLGFKHAFKAGISFGKNDLIIPKTKEKLVSQTKKQIEDYEKQYQDGLITRGEKYNKVVDIWSKCT

SEQ ID NO: 134543 - protein, 273 aa, Unknown
  Bacterial polypetide isolated from the Sargasso Sea
RSIKRLKLIESFIETGNKPEWMILTTIPVIPPELRPLVPLDGGRFATSDLNDLYRRVINRNNRLKRLIDLKAPDIIIRNEKRMLQESVDALFDNGRRGRVITGTGKRPLKSLAEMLKGKQGRFRQNLLGKRVDYSGRSVIVVGPDLKLHECGLPKKMALELFKPFLYARLNKLGLASTIKQAKKLVEKERNEVWDALELIVREHPVILNRAPTLHRLGVQAFEPKLIEGNAIELHPLTCAAFNADFDGDQMAVHVPLSLEAQLEARVLMMSTK

SEQ ID NO: 134544 - protein, 279 aa, Unknown
  Bacterial polypetide isolated from the Sargasso Sea
LKNLDLELERKNLVNYIKETKSKVNEERAIKRLKLIESFIETGQKPEWMIMTVVPVIPPELRPLVPLDGGRFATSDLNDLYRRVINRNNRLKRLMDLKAPDIIVRNEKRMLQESVDALFDNGRRGRVITGTGKRPLKSLAEMLKGKQGRFRQNLLGKRVDYSGRSVIVVGPDLKLHECGLPKKMALELFKPFLYARLNKLGLASTIKQAKKLVEKETNAVWDALELIVREHPVLLNRAPTLHRLGVQAFEPKLIEGDAIELHPLTCAAFNADFDGDQMA

SEQ ID NO: 134545 - protein, 256 aa, Unknown
  Bacterial polypetide isolated from the Sargasso Sea
LEKGYGLTLGNSLRRILLSSIRGAAVTSIQIDGVLHEFTSIKGVREDVTDIVLNVKSLALKSSSEGTKKLILDAKGPGEIKASDITSVADVEILNPELVICNLDENTSFHMEMNVNTGKGYVPAELNKPEEPPLGLIAIDSLYSPVKKVSYSVSTAREGKALDYDKLTMEVETDGSISAEDAVAYSARIFQDQLKMFINFDEPVEAPVKEVSTEPEFNKNLLRKVDELELSVRSMNCLKNDNIIYIGDLVQKSEGE

SEQ ID NO: 134546 - protein, 278 aa, Unknown
  Bacterial polypetide isolated from the Sargasso Sea
MKPESLKQEKISDRSYSITLEPFEPGLGHTIGNALRRILLSSMPGAAVVEVQIEDVEHEYSTVKKVQEDVVNILLNVKGLAIELEGRDEAILHVEKSEPGVLTAADITAEPGVRIANPDHVLAHVTAMGQPFKMSMRVMTGRGYLASSEVKKQLGQGGTIGSLYLDASFGPVQRVSFVVESARVENRTDLDKLILTIETNGAIDPDVAIRRAATILQYQLSTFAEIHAGAGQHDARDEQEVDPLLLKSVDDLELTVRAANCLKAENIYYIGDLVQRLE

SEQ ID NO: 134547 - protein, 285 aa, Unknown
  Bacterial polypetide isolated from the Sargasso Sea
MSKELTDLFKTSEILETQNFNSIKITLASPEKIKSWTYGEIKKPETINYRTFRPEKDGLFCARIFGPIKDYECLCGKYKRMKFRGIICEKCGVEVTKSNVRRERMGHINLATPVAHIWFLKSLPSRISLTVDMKLKEVERVLYFENFIVIEPGLTNLKKNQLLGEEELIKYQEEYGEESFTAGIGAEAILEILKSINLEEEKKSLIKIIKETKSKVSEERSIKRLKLIESFIETGNKPEWMILTTIPVIPPELRPLVPLDGGRFATSDLNDLYRRVINRNNRLKR

SEQ ID NO: 134548 - protein, 260 aa, Unknown
  Bacterial polypetide isolated from the Sargasso Sea
MTNSNLRTENHFDYVKISIASPQRIMDWGQRTLPNGQVVGEVTKPETINYRTLKPEMDGLFCEKIFGPSKDWECHCGKYKRVRHRGIVCERCGVEVTESRVRRHRMGYIKLAAPVSHVWYLKGIPSYVAILLDIPLRDVEQIVYFNCYVVLDPGDHKELKYKQLLTEDEWLEIEDEIYAEDSTIENEPFVGIGAEALKQLLEDLDLNQVAEDLREEITSSKGQKRAKLIKRIRVIDNFIATNAKPEWMVLDAIPVIPPDL

SEQ ID NO: 134549 - protein, 205 aa, Unknown
  Bacterial polypetide isolated from the Sargasso Sea
METENVNIKNWKSLIKPTKLDVQISDDLTHAKIIAEPLEKGFGLTLGNSLRRILLSSIRGAAVTSIQIDGVLHEFTSIKGVREDVTDIVLNVKSLALKCSAEGTKKLVLDAKGPGEIKASDITAVTDVEILNPDLVICNLDENTNFHMEMNVNTGKGYVPADLNKPEEPPLGLIAIDSLYSPVKKVSYSVSTAREGKALDYDKLT

SEQ ID NO: 134550 - protein, 285 aa, Unknown
  Bacterial polypetide isolated from the Sargasso Sea
QGAAVTAIQIDGVLHEFSSIKGVREDVTDIVLNVKNLAIKSTSTSTKKIILDIKGPKEVKAKDIKTIPEIEILNPEQTICNLDEKTQFHMELMIDNGKGYVPAPKNRSEESPLGLISIDSLFSPVKKVSFSVENTRAGSALDYDKLIMTVETNGTIAAEDAIAYSARIFQDQLSMFVNFEDPKEVIKEVKSSEPEFNRNLLKRVEELELSVRSMNCLKNDNIIYIGDLVQKTEPEMLRTPNFGRKSLNEIKEVLNTMSLYLGMEIPNWPPDNIAELSKKLEENNY

SEQ ID NO: 134551 - protein, 153 aa, Unknown
  Bacterial polypetide isolated from the Sargasso Sea
MTNSNLRTENHFDYVKISIASPQRIMDWGQRTLPNGQVVGEVTKPETINYRTLKPEMDGLFCEKIFGPSKDWECHCGKYKRVRHRGIVCERCGVEVTESRVRRHRMGYIKLAAPVSHVWYLKGIPSYVAILLDIPLRDVEQIVYFILLCCSRS

SEQ ID NO: 134552 - protein, 95 aa, Unknown
  Bacterial polypetide isolated from the Sargasso Sea
MQISVIDLLVPTEIQVENVSDTVSKVTLEPLERGFGHTLGNALRRILLSSMPGAAVTDVVIDGISHEYSTIEGVREDVKNILLNLKDMPVKLMKE

SEQ ID NO: 134553 - protein, 256 aa, Unknown
  Bacterial polypetide isolated from the Sargasso Sea
MQYQIDRIEHQMEEDRSQCGVFLIGPLERGQATTLGNALRRVLMGGLEGSAVTAIRIAGVNHEYATIPGVREDVLDILLNCKELSVDSRSPELEIGRLVVAGPAEVTANDLQFSSQVEVVDCNRPIATVADGYSLELEVHVERGVGYRPVDRHSEDTSAIDLLQIDAVFMPVIRVNFTIDETAVAEGGSARERLRMEIVTDGSITPDDALAQSANHLIELFQPLATVTLVEEPGIEPEPSAEALIPLEELNLSVRA

SEQ ID NO: 134554 - protein, 247 aa, Unknown
  Bacterial polypetide isolated from the Sargasso Sea
IRGTAVTSIQIDGVLHEFTSIKGVREDVTDIVLNIKELALKSNSDVEKKLILDVKGPGEIKASDITPVTEIEILNPDLVICNLDENTNFHMEMTVGTGKGYVSADMNKPDEPPLGLIPIDSLFSPVKKVSYSVSTAREGKALDYDKLTMEVQTNGSISAEDAVAYSARIFQDQLGMFVNFDEPQEVIVREKPSEPEFNKNLLRKVDELELSVRSMNCLKNDNIIYIGDLVQKSEGEMLRTPNLEENL

SEQ ID NO: 134555 - protein, 120 aa, Unknown
  Bacterial polypetide isolated from the Sargasso Sea
MIKGKGGRFRQNLLGKRVDYSGRSVIVVGPTLRLHQCGIPKKMALELFKPHIFGKLQTRGITTTIKSAKKVVEKEGEEVWDILEEIIKEYPVLLNRAPTLHRLGIQAFEPVLIEGKAIQL

SEQ ID NO: 134556 - protein, 240 aa, Unknown
  Bacterial polypetide isolated from the Sargasso Sea
MESIDVNAKNWKSLIKPTKLEIQQTDDKSNAKIIAEPLEKGYGLTLGNSLRRILLSSIRGTAVTAIQIDGVLHEFTSIKGVREDVTDIVLNVKSLALKSQSEGVKKLILDAKGPGEIKASDITSIPDVEILNPDLVICNLDEKTNFHMEMTVGSGKGYVSADMNKPEEPPLGLIPIDSLFSPVKKVSYSISTAREGKALDYDKLIMEVETNGSISAEDAVAYSARIFQDQLGMFINFNEP

SEQ ID NO: 134557 - protein, 282 aa, Unknown
  Bacterial polypetide isolated from the Sargasso Sea
KLDIYGWANTIKAAKKLVEKEDPRVWDILEEVIREHPVLLNRAPTLHRLGIQAFEPILIEGKSIQLHPLVCTAFNADFDGDQMAVHVPLSLEAQLEARVLMMSTNNILSPSSGKPIIVPSQDIVLGIYYLSIVRDKQIGEGRSFVDLNEILKALENGDVSLHSKITARIETIDGNLTKVETTPGRMILGNILPKNENIDYAMINKVLTKKEVSNIIDSVYRFCGQKETVLFADHIMQIGFKYAAIAGISFGKDDLIIPSDKNDLLNETQLKVQEYENQYQDG

SEQ ID NO: 134558 - protein, 288 aa, Unknown
  Bacterial polypetide isolated from the Sargasso Sea
SEAQNFNSIKITLASPEKIKSWTYGEIKKPETINYRTFRPEKDGLFCARIFGPIKDYECLCGKYKRMKFRGIICEKCGVEVTKSNVRRERMGHINLATPVAHIWFLKSLPSRISLAIDMKLKEVERVLYFENFIVIEPGLTGLKKNQLLGEEELIKYQDEYGEESFTAGIGAEAILEILKSINLEEQRNSLIKTIKETKSKVSEERSIKRLKLIESFIETGNKPEWMILTTIPVIPPELRPLVPLDGGRFATSDLNDLYRRVINRNNRLKRLMDLKAPDIIVRNEKRM

SEQ ID NO: 134559 - protein, 180 aa, Unknown
  Bacterial polypetide isolated from the Sargasso Sea
MQNTTINDNWKALIKPSKLNIQSSDDKSLTTVIAEPLEKGYALTIGNSLRRILLSSIQGSAITALQIDGVLHEFSSIKGVREDVTDIVLNVKMLSIQVMSEESKKLILDVKGPGEIKAKDIQPNPDVKILNPDLVLCHLDENTKFHMELVASRGKGYRPAEKNKKEDAPLGLIAKDSLFS

SEQ ID NO: 134560 - protein, 295 aa, Unknown
  Bacterial polypetide isolated from the Sargasso Sea
MGLTSLKKNQLLNEDELNKYQEEFGDEAFTAGIGAEAILEILKSIDLNKEREILLKNINETKSKVAEERSIKRLKLIDSFIETGNKPEWMILTTIPVIPPELRPLVPLDGGRFATSDLNDLYRRVINRNNRLKRLMDLKAPDIIVRNEKRMLQESVDALFDNGRRGRVITGTGKRPLKSLAEMLKGKQGRFRQNLLGKRVDYSGRSVIVVGPDLKLHECGLPKKMALELFKPFLYARLNKLGLASTIKQAKKLVEKETNAVWDALELIVREHPILLNRAPTLHRLGVQAFEPKLI

SEQ ID NO: 134561 - protein, 208 aa, Unknown
  Bacterial polypetide isolated from the Sargasso Sea
MEVKANDIQFSSQVEIVDGEKPIATIQEGHNLELEIHVERGVGYRPVDRKSEETTAIDLLQIDAVFMPVKRVNFTIDETAVAEGGTGRERLKMEVVTDGSTSPDDAISEAANQLIELFQPLATVTMVEEIPEEPEPSPEAQIPLEELNLSVRAYNCLKRAQVNSVSDLMGFSYEDLLEIKNFGSKSADEVIEALERIGISIPQSRTSV

SEQ ID NO: 134562 - protein, 306 aa, Unknown
  Bacterial polypetide isolated from the Sargasso Sea
RGKLENILVLLNRAPTLHRLGIQAFEPVLIEGKSIQLHPLVCTAFNADFDGDQMAVHVPLSLEAQLEARVLMMSTNNILSPSSGKPIIVPSQDIVLGIYYLSIMRNNQKGEGRNFLDTNEILKAVELKDINLHSKINVRIKNFDGSFSKVETTAGRMLLADSLPKNQKINFGLINKILTKKEVSNLIDTVYRFCGQKETVLFADSIMQIGFKYAAIAGISFGKDDLIIPEEKQILLDETQSKVQEYENQYQDGLITQGEKYNKVVDAWSECTNRVADKMLDVISNPEDDRPINSVYMMAHSGARGS

SEQ ID NO: 134563 - protein, 285 aa, Unknown
  Bacterial polypetide isolated from the Sargasso Sea
LAEMLKGKQGRFRQNLLGKRVDYSGRSVIVVGPDLKLHECGLPKKMALELFKPFLYARLNKLGLASTIKQAKKLVEKESNAVWDALELIVREHPVLLNRAPTLHRLGVQAFEPKLIEGDAIELHPLTCAAFNADFDGDQMAVHVPLSLEAQLEARILMLSTNNILSPSNGKPIIVPSQDMILGIYYLSQEPVTDKPAGYFVDSDQIEFALSSGQIKVHSTIISRFETIDDKGNKKFEKYTSTAGRFLLANLLPKNSNIKFSLIDRLLPKKVVSEIIDIVFRFCGQ

SEQ ID NO: 134564 - protein, 101 aa, Unknown
  Bacterial polypetide isolated from the Sargasso Sea
MEVENVNVKNWKSLIKPSKLDVQISDDLTHAKIVAEPLEKGYGLTLGNSLRRILLSSIRGAAVTSIQIDGVLHEFTSIKGVREDVTDIVLNVKSLALKSNS

SEQ ID NO: 134565 - protein, 284 aa, Unknown
  Bacterial polypetide isolated from the Sargasso Sea
NTIKAAKKLVEKEDPRVWDILEEVIREHPVLLNRAPTLHRLGIQAFEPILIEGKSIQLHPLVCTAFNADFDGDQMAVHVPLSLEAQLEARVLMMSTNNILSPSSGKPIIVPSQDIVLGIYYLSIIRSNQAGEGRSFIDLNEILKAIENKDISLHSKITARITDFDGNFQKVETTPGRMILGSALPKNKHINYEMVNKILTKKEVSNIIDTVYRFCGQKETVLFADKIMQTGFKYAAIAGISFGKDDLIIPDDKQKLLDNTQSKVKEYESQYQDGFITQGENIIK

SEQ ID NO: 134566 - protein, 302 aa, Unknown
  Bacterial polypetide isolated from the Sargasso Sea
DPFKKTNLVDEQNFASIKITLASPEKIKSWTYGEIKKPETINYRTFRPEKDGLFCARIFGPIKDYECLCGKYKRMKFRGIICEKCGVEVTKSNVRRERMGHINLATPVAHIWFLKSLPSRIALAIDMKLKEVERVLYFESFIVIEPGLTGLKQNQLLNEDELLKYQNEFGEDSFTSGIGAEAILEILKSINLEEEKNKLIKNINETKSKVAEERSIKRLKLIDSFIETGNKPEWMILTVIPVIPPELRPLVPLDGGRFATSDLNDLYRRVINRNNRLKRLIDLKAPDIIIRNEKRMLQESVD

SEQ ID NO: 134567 - protein, 300 aa, Unknown
  Bacterial polypetide isolated from the Sargasso Sea
DLNDLYRRVINRNNRLQRLLDLNAPDIIVRNEKRMLQKSVDALLDNGRMGRAVTGSNKRPLKSLADMIKGKQGRFRQNLLGKRVDYSGRSVIVVGPTLKLHQCGIPKKMALELFKPFVFSKLIYQGEASTIKSAKRLVELEGAEIWDILDGVIRQHPILLNRAPTLHRLGIQAFEPVLVEGKAIQLHPLVCKAFNADFDGDQMAVHVPLSIEAQLESRALMMSSNNILSPANGEPIIVPSQDVVLGLYYMTREKVKDKGEGGIFANIDEVERAFHNRFLGLHAKIKLKIATQNEEKPTEI

SEQ ID NO: 134568 - protein, 261 aa, Unknown
  Bacterial polypetide isolated from the Sargasso Sea
MQSTNTNVIDKNWKALIKPNKLNITSNDDRSIAKVIAEPLEKGFGQTIGNSLRRILLSSIQGAAVTAIQIDGVLHEFSSIKGVREDVTDIVLNVKNLAIKSNSSSQKKIILDIKGPKEVKAKDITLVQDIEILNPEQTICNLDEKTHFHMELMVSTGKGYVQAPKNKSEDSPLGLISIDSLFSPVKKVSFSVENTRAGSALDYDKLIMTVETNGTVDAEDAIAYSARIFQDQLSMFINFDDPQEVVKEVKSSEPEFNRNLL

SEQ ID NO: 134569 - protein, 279 aa, Unknown
  Bacterial polypetide isolated from the Sargasso Sea
TTLGNSLRRVLMGGLEGSAVTAVRIAGINHEYATIPGVREDVLDILLNCKQLSINSSNPELEIGRLVASGPMEVKANDIQFSSQVEIVDGEKPIATIQEGHNLELEIHVERGVGYRPVDRKSEETTAIDLLQIDAVFMPVKRVNFTIDETAVAEGGTGRERLKMEVVTDGSTSPDDAIAEAANQLIELFQPLATVTMVEEIPEEPEPSPEAQIPLEELNLSVRAYNCLKRAQVNSVSDLMGFSYEDLLEIKNFGSKSADEVIEALERIGISIPQSRTSV

SEQ ID NO: 134570 - protein, 293 aa, Unknown
  Bacterial polypetide isolated from the Sargasso Sea
KNQLLSEDELIKYQNEYGDESFTAGIGAEAILEILKNINLEQEREILVKNINETKSKVSEERSIKRLKLIDSFIKTGNKPEWMILTVIPVIPPELRPLVPLDGGRFATSDLNDLYRRVINRNNRLKRLMDLKAPDIIVRNEKRMLQESVDALFDNGRRGRVITGTGKRPLKSLAEMLKGKQGRFRQNLLGKRVDYSGRSVIVVGPDLKLHECGLPKKMALELFKPFLYARLNKLGLASTIKQAKKLVEKETNAVWDALEVIVREHPVILNRAPTLHRLGVQAFEPKLIEGDAM

SEQ ID NO: 134571 - protein, 308 aa, Unknown
  Bacterial polypetide isolated from the Sargasso Sea
PDDIRSWSFGEIKKPETINYRTFKPEKDGLFCSRIFGPVKDYECLCGKYKRMKFRGIICEKCGVEVTLSKVRRDRMGHIELAAPVSHIWFMKSLPSRIATLLDMTIKNLEKVLYFEQFIVVEPGLTDLKKGEIISEEQYIDYQDEYGEDSFSAAIGAEAIEQMLLSIDLQSDYNQLKIDLTETKSELKKTKITKRLKLLESFIVSKNKPEWMIMRVLPVIPPELRPLVPLDGGRFATSDLNDLYRRVINRNNRLKRLIDLRAPDIIIRNEKRMLSESVDALFDNGRRGRVITSTNKRPSKSLSDMLKG

SEQ ID NO: 134572 - protein, 264 aa, Unknown
  Bacterial polypetide isolated from the Sargasso Sea
PELRPLVPLDGGRFASSDLNDLYRRVINRNNRLSRLIELRAPDIIIRNEKRMLQESVDALFDNGRRGRVITGTNKRPLKSLAEMLKGKQGRFRQNLLGKRVDYSGRSVIVVGPELKLHQCGLPKKMAIELFKPFIYARLESLGLATTLKQAKKMVEKERPEVWDVLDRVIREHPVILNRAPTLHRLGVQAFEPVLIEGKAIQLHPLVCTAFNADFDGDQMAVHVPLSLEAQLEARVLMMSTNNILNPANGKPSYCSKSGYCIRH

SEQ ID NO: 134573 - protein, 266 aa, Unknown
  Bacterial polypetide isolated from the Sargasso Sea
SDLNDLYRRVINRNNRLKRLIDLRAPDIIIRNEKRMLQESVDALFDNGRRGRVITSTNKRPLKSLSDMLKGKQGRFRQNLLGKRVDYSGRSVIVVGPNLKLHQCGIPKKMALELFKPFIFHKLDIYGWANTIKAAKKLVEKEDPRVWDILEDVIREHPILLNRAPTLHRLGIQAFEPILIEGKSIQLHPLVCTAFNADFDGDQMAVHVPLSLEAQLEARVLMMSTNNILHPASGKPIIVPSQDIILGIYYLSIMREKQIGEGRSFI

SEQ ID NO: 134574 - protein, 315 aa, Unknown
  Bacterial polypetide isolated from the Sargasso Sea
PSRISLVVDMKLKEVERVLYFENFIVIEPGLTDLKKNQLLGEEELIKYQDEYGEEAFTAGIGAEAILEILKSINLEEERDLLIKNIKETKSKVNEERSIKRLKLIESFIETGNKPEWMILTTVPVIPPELRPLVPLDGGRFATSDLNDLYRRVINRNNRLKRLIDLKAPDIIVRNEKRMLQESVDALFDNGRRGRVITGTGKRPLKSLAEMLKGKQGRFRQNLLGKRVDYSGRSVIVVGPDLKLHECGLPKKMALELFKPFLYARLNKLGLASTIKQAKKLVERERTEVWDALELIVREHPVILNRAPTLHRLGV

SEQ ID NO: 134575 - protein, 262 aa, Unknown
  Bacterial polypetide isolated from the Sargasso Sea
EIISEEQYIEYQDEYGEDSFSAAIGAEAIEQMLLSIDLEADFNQLKIELNETKSELKKTKITKRLKLIESFIISKNKPEWMILKVLPVIPPELRPLVPLDGGRFATSDLNDLYRRVINRNNRLKRLIDLRAPDIIVRNEKRMLQESVDALFDNGRRGRVITSTNKRPLKSLSDMLKGKQGRFRQNLLGKRVDYSGRSVIVVGPTLKLHQCGIPKKMALELFKPFIFHKLDIYGWANTIKAAKKLVEKEDPRVWDILEEVIRE

SEQ ID NO: 134576 - protein, 112 aa, Unknown
  Bacterial polypetide isolated from the Sargasso Sea
METENVNIKNWKSLIKPAKLDVKISDDLTHATIIAEPLEKGYGLTLGNSLRRILLSSIRGAAVTSIQIDGVLHEFTSIKGVREDVTDIVLNIKSLALKCSSEGTKKLVLDAK

SEQ ID NO: 134577 - protein, 280 aa, Unknown
  Bacterial polypetide isolated from the Sargasso Sea
KSLADMIKGKQGRFRQNLLGKRVDYSGRSVIVVGPTLKLHQCGIPKKMALELFKPFVFSKLIYQGEASTIKSAKRLVELEGPEIWDILDGVIRQHPVLLNRAPTLHRLGIQAFEPVLVEGKAIQLHPLVCKAFNADFDGDQMAVHVPLSIEAQLESRALMMSSNNILSPANGEPIIVPSQDVVLGLYYMTREKVKDIGEGSIFANIEEVERSFHNGFLGLHAKIKLKISIQNEEKPTEIVETTTGRALFSKIVPDEIPFDVINKTMDSKEISRLINRCYR

SEQ ID NO: 134578 - protein, 80 aa, Unknown
  Bacterial polypetide isolated from the Sargasso Sea
MQTTSNVIDKNWKSLIKPNKLDIKSNEDKTIAKVVAEPLEKGFGQTIGNSLRRILLSSIQGAAVTAIQIDGVLHEFSSIK

SEQ ID NO: 134579 - protein, 295 aa, Unknown
  Bacterial polypetide isolated from the Sargasso Sea
YKRMKFKGIICEKCGVEVTKKDVRRERMGHIQLAAPVAHIWFLKSLPSRIALMMDMKLKDLEKVLYFEKFMVTNPGLTGLFQNQLLDEDELEKAREEYGEDFEASIGAEAVRSVLEKIELQPELDNLRTKLSETKAVALSEKLVKRIKLFESFLSSGNRPEWMILTSVPVIPPELRPLVPLDGGRFASSDLNDLYRRVINRNNRLSRLIELRAPDIIIRNEKRMLQESVDALFDNGRRGRVITGTNKRPLKSLAEMLKGKQGRFRQNLLGKRVDYSGRSVIVVGPELKLHQCGPS

SEQ ID NO: 134580 - protein, 252 aa, Unknown
  Bacterial polypetide isolated from the Sargasso Sea
NVKALALKSSSEGTKKLVLDAKGPGEIKASDITQVTDVEILNPDLVICNLDENTNFHMEMNVNTGKGYVPAELNKPEEPPLGLIAIDSLYSPVKKVSYSVSTAREGKALDYDKLTMEVETNGSISAEDAVAYSARIFQDQLKMFINFDEPVEVPVKEVSTEPEFNKNLLRKVDELELSVRSMNCLKNDNIIYIGDLVQKSEGEMLRTPNFGRKSLNEIKEVLTGMSLYLGMEIPNWPPDNIAEMSKKLEEAI

SEQ ID NO: 134581 - protein, 309 aa, Unknown
  Bacterial polypetide isolated from the Sargasso Sea
KKLKSDAEIKVIEEAFQTLKTLKPKTLIENDTLWREMIDKYDEYFTGGMGAEAVRELVGLVDLKSEMEKLKSDLDSKSAQRRQRAIQRMKVIKPFSDGKNPPEAMILEVIPVIPPELRPMVQLDGGRFATSDLNDLYRRLINRNNRLKKLLELGAPEIIISNEKRMLQESVDALFDNGRRGRAVAGAGGRGLKSLSDMLKGKQGRFRQNLLGKRVDYSARSVIVVGPHLDLQQCGLPKMMALELFKPFVMKRLVELGLSQNIKSAKRMVERSRAQVWDVLAEVIEEHPVLLNRAPTLHRLGIQAFEPIL

SEQ ID NO: 134582 - protein, 305 aa, Unknown
  Bacterial polypetide isolated from the Sargasso Sea
MGHITLAVPIVHIWYLRSIPSKLAYLTGLKTKELERIIYYETFVVIEPGKSGRESMELLDEEEYFELEKEFGFYAVSEEERDNDDYFYATMGGEAIKEMLARINLFELKKNLEEIIDTSKSKQKRTEALNRLKIAKTFLPSLSKKRINQPEWMVISVLPVIPPELRPLVPLEGGRFAASDLNDLYRRIIIRNNRLKQLIEIGAPDVILRNEKRMLQEAVDALFDNSRRKTAIRSGTRRPLKSISDMLRGKTGRFRQNLLGKRVDYSGRSVIVVGPKLRMSECGLPKNMALELFKPHMIYELMARG

SEQ ID NO: 134583 - protein, 308 aa, Unknown
  Bacterial polypetide isolated from the Sargasso Sea
FRDLRDKFGEVFKASMGAEAILEILKSTDLDSIRNELKSEINTTSGQRRKKAIKRLRVIEAFRKSGNKPEWMIMENLPVLPPELHPMVQLDGGRFATSDLNDLYRRVINRNNRLRHLIELLAPEIIVRNEKRMLQEAVDALIDNGRRGRAIQGSHNHQLKSLTHLLRGKQGRFRQNLLGKRVDYSGRSVIISGPQLRMNECGLPRKMALELFKPFVMNALVVKGYAHNIKSAKRMTERARPEIWDILEEVIQNHPVMLNRAPTLHRLGIQAFQPVLVDGFAIQIHPLVCTAFNADFDGDLNGCACTSV

SEQ ID NO: 134584 - protein, 104 aa, Unknown
  Bacterial polypetide isolated from the Sargasso Sea
MIENNWITLVKPNKVDYKISDNKKFGTVVIEPLEKGFGTTLGNALRRVLLSSLQGTAISSIKINGVLHEFSTIEGVREDVTDIIMNLKNVTFNSKSNHSQKLSL

SEQ ID NO: 134585 - protein, 250 aa, Unknown
  Bacterial polypetide isolated from the Sargasso Sea
SSIQGAAVTAIQIDGVLHEFSSIKGVREDVTDIVLNVKNLAIKSSSSGSKKIILDIKGPKEVKAKDITLVPEVEILNPDQTICNLDEKTHFHMELMVSTGKGYVQAKKNKSEDSPLGLISIDSLFSPVKKVSFSVENTRAGSALDYDKLIMIVETNGTVDAEDAIAYSARIFQDQLSMFVNFEDPQEIVKEAKPSEPEFNRNLLKRVEELELSVRSMNCLKNDNIIYIGDLVQKTEPEMLRTPNSEENRL

SEQ ID NO: 134586 - protein, 296 aa, Unknown
  Bacterial polypetide isolated from the Sargasso Sea
IELAAPVSHIWFMKSLPSRIATLLDMTIKNLEKVLYFEQFIVVEPGLTDLKKGEIISEEQYIDYQDEYGEDSFSAAIGAEAIEQMLLSIDLEADYNQLKIDLTETKSELKKTKITKRLKLIESFIFSKNKPEWMIMRVLPVIPPELRPLVPLDGGRFATSDLNDLYRRVINRNNRLKRLIDLRAPDIIIRNEKRMLQESVDALFDNGRRGRVITSTNKRPLKSLSDMLKGKQGRFRQNLLGKRVDYSGRSVIVVGPNLKLHQCGIPKKMALELFKPFIFHKLDIYGWANTIKAAKK

SEQ ID NO: 134587 - protein, 304 aa, Unknown
  Bacterial polypetide isolated from the Sargasso Sea
WERGFGHTLRNALRRILLSSMPGCAILSAEIEGVLHEYSTIEGVQEDVIEILLNLKGVAVNLNSIDETEISLNKSGPGLVTAADFELTHDVEIANPDHVIANLNENGKLVLRAAVGRGRGYEPADQRAADDEENPKPIGALMLDASYSPVRKVAYKVDSARVEQRTDLDKLIIDLETNGTIDPEEAIRRAATILQQQVAVFVDLQSEAEPEEIEEEDEIDPILLRPVDDLELTVRSANCLKAENIYYIGDLIRRTEVELLKTPNLGKKSLTEIKDVLASRGLSLGMRLENWPPSALRGDERVLG

SEQ ID NO: 134588 - protein, 176 aa, Unknown
  Bacterial polypetide isolated from the Sargasso Sea
KTGRGYEPADSRGEEETAVGALKVDASFSPVRRVAYTVENARFEKRTDLDKLIVELETDGTLDPKKAIEHAATIMQQQLAAFVDLDAIAEQEAKKDQNDFDPFLMRSIEELELTVRSTNCLKAESIFLIGDLLQRTEFDLLKTPNLGKKSLNEIKDVLASKGFSLGTTLENWPPMG

SEQ ID NO: 134589 - protein, 221 aa, Unknown
  Bacterial polypetide isolated from the Sargasso Sea
KFRGIICEKCGVEVTLSKVRRDRMGHIELAAPVSHIWFMKSLPSRIATLLDMTIKNLEKVLYFEQFIVVEPGLTDLKKGEIISEEQYIDYQDEYGEDSFSASIGAEAIEQMLLSIDLESDYNQLKIDLSETKSELKKTKITKRLKLIESFIISKNKPEWMIMRVLPVIPPELRPLVPLDGGRFATSDLNDLYRRVINRNNRLKRLIDLRAPDIIIRNEKRM

SEQ ID NO: 134590 - protein, 312 aa, Unknown
  Bacterial polypetide isolated from the Sargasso Sea
IPPELRPLVPLDGGRFATSDLNDLYRRVINRNNRLKRLMDLKAPDIIVRNEKRMLQESVDALFDNGRRGRVITGTGKRPLKSLAEMLKGKQGRFRQNLLGKRVDYSGRSVIVVGPDLKLHECGLPKKMALELFKPFLYARLNKLGLASTIKQAKKLVERERTEVWDALELIVREHPVILNRAPTLHRLGVQAFEPKLIEGNAIELHPLTCAAFNADFDGDQMAVHVPLSLEAQLEARVLMMSTNNILSPSNGKPIIVPSQDMILGIYYLSQPPVQTEKIDGYFVNTSEIEHALETGQIKVHSRIVSRFETLD

SEQ ID NO: 134591 - protein, 127 aa, Unknown
  Bacterial polypetide isolated from the Sargasso Sea
MTNSNLRTENHFDYVKISIASPKRIMDWGQRTLPNGQVVGEVTKPETINYRTLKPEMDGLFCEKIFGPSKDWECHCGKYKRVRHRGIVCERCGVEVTESRVRRHRMGYIKLAAPVSHVWYLKGIPSY

SEQ ID NO: 134592 - protein, 286 aa, Unknown
  Bacterial polypetide isolated from the Sargasso Sea
FDNGRRGRVITGTGKRPLKSLAEMLKGKQGRFRQNLLGKRVDYSGRSVIVVGPDLKLHECGLPKKMALELFKPFLYARLNKLGLASTIKQAKKLVEKERDEVWDALEIIVREHPVLLNRAPTLHRLGVQAFEPKLIEGDAIQLHPLTCAAFNADFDGDQMAVHVPLSLEAQLEARVLMMSTNNILSPSNGKPIIVPSQDMILGIYYLSQPPYQTEKTEGYFVNTDEILQALENGSIKIHSRIISRFETVDEKGNKKLEKYTSTAGRFLLANIIPKNINNKFSLIDR

SEQ ID NO: 134593 - protein, 216 aa, Unknown
  Bacterial polypetide isolated from the Sargasso Sea
LKGVSLRMEVEGPKRLTVSSKGPGVVTAGDIEETAGIEILNKDHVICHLDDGADLNMELTVNTGNGYVAAEKNKPEDAPIGLIPIDAIYSPVKKVSYDVQPTREGQVLDYDKLTMNIETDGSVSPDDALAFAARILQDQLSIFVNFDEPEAANQSDEDDGLEFNPLLLKKVDELELSVRSANCLKNDNIVYIGDLIQKTEAEMLRTPNFGRKSLNE

SEQ ID NO: 134594 - protein, 319 aa, Unknown
  Bacterial polypetide isolated from the Sargasso Sea
EIPQTRSEAKIKKITKRLKLLRSFKDSGNKPEWMVLEVLPVLPPDLRPLVPLEGGRFATSDLNDLYRRVINRNNRLKRLLDLNAPDIITRNEKRMLQESVDALLDNGRRGRAVTGTNKRPLKSLADMIKGKQGRFRQNLLGKRVDYSGRSVIVVGPTLKLHQCGLPKKMALELFKPFVFGRLQDLEMASTIKLAKKMVEREEPEVWDILAEVIREHPVLLNRAPTLHRLGIQAFEPVLVEGKAIQLHPLVCKAYNADFDGDQMAVHVPLTIEAQLECRALMMATNNILSPANGKPIIDPSQDVVLGIYYMTREKINVKA

SEQ ID NO: 134595 - protein, 302 aa, Unknown
  Bacterial polypetide isolated from the Sargasso Sea
KETKSKVAEERSTKRLKLIESFIDTGNKPEWMILTVIPVIPPELRPLVPLDGGRFATSDLNDLYRRVINRNNRLKRLIDLKAPDIIVRNEKRMLQESVDALFDNGRRGRVITGTGKRPLKSLAEMLKGKQGRFRQNLLGKRVDYSGRSVIVVGPDLKLHECGLPKKMALELFKPFLYARLNKLGLASTIKQAKKLVEKERDEVWDALEIIVREHPVILNRAPTLHRLGVQAFEPKLIEGDAIELHPLTCAAFNADFDGDQMAVHIPLSLEAQLEARVLMMSTNNILSPSNGKPIIVPSQDMI

SEQ ID NO: 134596 - protein, 276 aa, Unknown
  Bacterial polypetide isolated from the Sargasso Sea
TIDGVLHEFTSIKGVREDVTDIVLNVKSLALKSDSEGTKKLILDAKGPGEIKASDITPVADVEILNPDLVICNLDEKTSFHMEMNVNTGKGYVPAELNKPEEPPLGLIAIDSLYSPVKKVSYSVSTAREGKALDYDKLTMEVETDGSISAEDAVAYSARIFQDQLKMFINFDEPVEAPVKEVSNEPEFNKNLLRKVDELELSVRSMNCLKNDNIIYIGDLVQKSEGEMLRTPNFGRKSLNEIKEVLTGMSLYLGMEIPNWPPDNIAEMSKKLEEAI

SEQ ID NO: 134597 - protein, 227 aa, Unknown
  Bacterial polypetide isolated from the Sargasso Sea
AKKLIQKADDEVMQVLQEVIEGHPILLNRAPTLHRLGIQAFEPKLVGGRAIQLHPLVCPAFNADFDGDQMAVHVPLALEAQTEARMLMLASNNILSPATGEPIVTPSQDMVLGSYYLTALQPNYQKPDFGDNKTTFASLEDVIFAFEDKRISLHQWVWVRFNGEVEDEEEMRNPKKIEELEDGSRLEIWNLRRDRFDSQNNLISRFVLTTVGRVVMNYTIIDSVSTT

SEQ ID NO: 134598 - protein, 290 aa, Unknown
  Bacterial polypetide isolated from the Sargasso Sea
RLKRLLDLNAPDIITRNEKRMLQESVDALLDNGRRGRAVTGSNKRPLKSLADMIKGKQGRFRQNLLGKRVDYSGRSVIVVGPTLKLHQCGLPKKMALELFKPFVFGKLQQLELANTIKLAKRMVDREEPEVWDILDEVIREHPVMLNRAPTLHRLGIQAFEPVLVEGKAIQLHPLVCKAYNADFDGDQMAVHVPLTLEAQLECRALMMATNNILSPSNGKPIIDPSQDVVLGLYYMSREKINDLGEGRVMSSPDEVNRAYYSGTVGLQAKIKVRLKPNKLDDEPSQIVET

SEQ ID NO: 134599 - protein, 235 aa, Unknown
  Bacterial polypetide isolated from the Sargasso Sea
QIVYFNCYVVLDPGDHKELKYKQLLTEDEWLEIEDEIYAEESTIENEPFVGIGAEALKQLLEDLDLNQVAEELREEITNSKGQKRAKLIKRIRVIDNFIATNAKPEWMVLDAIPVIPPDLRPMVQLDGGRFATSDLNDLYRRVINRNNRLARLQEILAPEIIVRNEKRMLQEAVDALIDNGRRGRTVVGANNRALKSLSDIIEGKQGRFRQNLLGKRVDYSGRSVIVVGPKLKMH

SEQ ID NO: 134600 - protein, 104 aa, Unknown
  Bacterial polypetide isolated from the Sargasso Sea
MLKTERSFDYVKINLASPERIRSWGERTLPNGEIVGEVTKPETINYRTLKPEMGGLFCERIFGPVNDWECHCGKYKRVRYKGIICEKCGVEVIESNVRRHRIGL

SEQ ID NO: 134601 - protein, 291 aa, Unknown
  Bacterial polypetide isolated from the Sargasso Sea
SDLNDLYRRVINRNNRLARLQEILAPEIIVRNEKRMLQEAVDALIDNGRRGRTVVGANNRALKSLSDIIEGKQGRFRQNLLGKRVDYSGRSVIVVGPKLKMHQCGLPKEMAIELFQPFVIHRLIRQNIVNNIKAAKKLIQKADDEVMQVLQEVIEGHPILLNRAPTLHRLGIQAFEPKLVGGRAIQLHPLVCPAFNADFDGDQMAVHVPLALEAQTEARMLMLASNNILSPATGEPIVTPSQDMVLGSYYLTALQPNYQQPEFGDNKTTFASLEKVIFAFEDKRLSLHEWV

SEQ ID NO: 134602 - protein, 306 aa, Unknown
  Bacterial polypetide isolated from the Sargasso Sea
VSESQNFSSIKITLASPEKIKSWTYGEIKKPETINYRTFRPEKDGLFCARIFGPIKDYECLCGKYKRMKFRGIICEKCGVEVTKSNVRRERMGHINLATPVAHIWFLKSLPSRISLVIDMKLKDVEKVLYFENFIVIEPGLTGLKKNQLLSEEELIKFQDQYGEESFSAGIGAEAILEILKSIDLKDEREKLSKSIKETKSKVTEERNVKRLKLIDSFLETGNKPEWMILTTIPVIPPELRPLVPLDGGRFATSDLNDLYRRVINRNNRLKRLMDLKAPDIIIRNEKRMLQESVDALFDNGRRGRV

SEQ ID NO: 134603 - protein, 207 aa, Unknown
  Bacterial polypetide isolated from the Sargasso Sea
METSVIDLLVPTDIQVDDAENNTSKITLEPLERGFGHTLGNALRRILLSSMPGSAITDVTIDGISHEYSTIEGVREDVIDILLNLKDMPINLIEGNNAVIKLDVSGPCEVTSNSFEVPGNVELPDAEHHVASIVDKVSLSLTATVKTGRGYEPADSRGEEETAVGALKVDASFSPVRRVAYSVENARFEKRTDLDKLIVELETNGDS

SEQ ID NO: 134604 - protein, 254 aa, Unknown
  Bacterial polypetide isolated from the Sargasso Sea
MTNSNLRTENHFDYVKISIASPQRIMEWGQRTLPNGQVVGEVTKPETINYRTLKPEMDGLFCEKIFGPSKDWECHCGKYKRVRHRGIVCERCGVEVTESRVRRHRMGYIKLAAPVSHVWYLKGIPSYVAILLDIPLRDVEQIVYFNCYVVLDPGDHKELKYKQLLTEDEWLEIEDEIYAEDSTIENEPFVGIGAEALKQLLEDLDLSQVAEELREEITQSKGQKRAKLIKRIRVIDNFIATNAKPEWMVLDAIP

SEQ ID NO: 134605 - protein, 191 aa, Unknown
  Bacterial polypetide isolated from the Sargasso Sea
MENINIIDKNWKSLTKPKKLEIESSEDKSIATVTAEPLEKGFGQTIGNSLRRILLSSIQGAAVTAIQIDGVLHEFSSIKGVREDVTDIVLNVKNLALKLNSDGPKKLILDSVGPKEVKAKDITQIADVEILNPEQTICNLDEKTKFHMELIVNNGRGYVLAQKNKSEDTPLGMIAIDSLFSPVKKVSFKIR

SEQ ID NO: 134606 - protein, 137 aa, Unknown
  Bacterial polypetide isolated from the Sargasso Sea
METENVNVKNWKSLIKPTKLDVKISDDLTHATIVAEPLEKGYGLTLGNSLRRILLSSIRGAAVTSIQIDGVLHEFTSIKGVREDVTDIVLNVKSLALKCSSEGTKKLVLDAKGPGEIKASNITSVADVEILNPDLVI

SEQ ID NO: 134607 - protein, 304 aa, Unknown
  Bacterial polypetide isolated from the Sargasso Sea
MGKLDINLNDDKSYAKIVAEPLEKGYGLTLGNSLRRILLSSIRGTAVTAIQIDGVLHEFTSIKGVREDVTDIVLNVKSLALKSTSEGSKKLVLDAKGPGVIKASDITKINEIEILNPDLVICNLDENTNFHMEMTVGSGKGYVPAELNKPDEPPLGLIPIDSLFSPVKKVSYSVSTAREGKALDYDKLTMEIETNGSISAEDALAYSARIFQDQLGMFVNFDEPQEVVITEKPSEPEFNKNLLRKVDELELSVRSMNCLKNDNIIYIGDLVQKSEGEMLRTPNFGRKSLNEIKEVLNGMSLYLG

SEQ ID NO: 134608 - protein, 99 aa, Unknown
  Bacterial polypetide isolated from the Sargasso Sea
MTNSNLRTENHFDYVKISIASPQRIMDWGQRTLPNGQVVGEVTKPETINYRTLKPEMDGLFCEKIFGPSKDWECHCGKYKRVRHRGIVCERCGVEVTES

SEQ ID NO: 134609 - protein, 247 aa, Unknown
  Bacterial polypetide isolated from the Sargasso Sea
LVPLDGGRFATSDLNDLYRRVINRNNRLKRLLDLKAPEIIVRNEKRMLQESVDALFDNGRRGRVITGTGKRPLKSLAEMLKGKQGRFRQNLLGKRVDYSGRSVIVVGPELKLHQCGLPKKMALELFKPFLYARLAKLGLATTIKQAKRMVEKQRSEVWDSLEYIIREHPILLNRAPTLHRLGVQAFEAKLIEGNAIELHPLVCAAFNADFDGDQMAVHIPLSLEAQLEARVLMMSTNNILSPSNGKP

SEQ ID NO: 134610 - protein, 281 aa, Unknown
  Bacterial polypetide isolated from the Sargasso Sea
IPPELRPLVPLEGGRFAASDLNDLYRRIIIRNNRLKQLMEIKAPDVILRNEKRMLQEAVDALFDNNRRKTAIRSGSRRPLKSLSDMLRGKTGRFRQNLLGKRVDYSGRSVIVVGPQLQLHECGMPKNMALELFKPHMIHELMARGYTQTPRSAKLMVENREPVVYKVLEYVVQDHPVLLNRAPTLHRLGIQAFQPVLVDGKAIQLHPLVCAAFNADFDGDQMAVHVPLALEAQMEARMLMLSSHNILHPANGQPIAVPSQDMVLGCYYLTRPKIGDKGEGK

SEQ ID NO: 134611 - protein, 327 aa, Unknown
  Bacterial polypetide isolated from the Sargasso Sea
MNKEITNPFNPNPQIRSFDQIKISLASPEKIVSWSFGEIRKPETINYRTFKPERDGLFCARIFGPIKDYECLCGKYKRMKYRGVTCEKCGVEVTLQKVRRERMGHIDLASPVAHIWFLKSLPSRIGLMLDMTLRDLERVLYFEQYIVIEPGLTDLKHGQMLTEEEFVDFQDQFGSDSFTAGIGAEAIREMLSSINLETEAEKLRAELVEATGELKPKKIIKRLKLVENFIEGGNRPEWMILTVIPVIPPELRPLVPLDGGRFATSDLNDLYRRVINRNNRLKRLIELRAPDIIIRNEKRMLQESVDALFDNGRRGRVITGGNKRPLK

SEQ ID NO: 134612 - protein, 293 aa, Unknown
  Bacterial polypetide isolated from the Sargasso Sea
WGDEFEAGMGAESIQTLLKELDLEAAIRDIQEEMPLTKSEAKLKKYAKRLKLLKSFNESGNRPEWMVLEVLPILPPDLRPLVPLEGGRFATSDLNDLYRRVINRNNRLKRLLDLNAPDIITRNEKRMLQESVDALLDNGRRGRAVTGSNKRPLKSLADMIKGKQGRFRQNLLGKRVDYSGRSVIVVGPTLKLHQCGLPKKMALELFKPFVFGRLQQLELANTIKLAKRMVDREEPEVWDILDEVIREHPVMLNRAPTLHRLGIQAFEPVLVEGKAIQLHPLVCKAYNADFDEI

SEQ ID NO: 134613 - protein, 257 aa, Unknown
  Bacterial polypetide isolated from the Sargasso Sea
NNRLKRLIDLRAPDIIIRNEKRMLQESVDALFDNGRRGRVITSTNKRPLKSLSDMLKGKQGRFRQNLLGKRVDYSGRSVIVVGPNLKLHQCGIPKKMALELFKPFIFHKLDIYGWANTIKAAKKLVEKEDPRVWDILEEVIREHPVLLNRAPTLHRLGIQAFEPILIEGKSIQLHPLVCTAFNADFDGDQMAVHVPLSLESQLEARVLMMSTNNILSPSSGKPIIVPSQDIVLGIYYLSIIRTNQKGQGRYFVDLNE

SEQ ID NO: 134614 - protein, 266 aa, Unknown
  Bacterial polypetide isolated from the Sargasso Sea
KLVDSFIATGNKPEWMILTVVPVIPPELRPLVPLDGGRFATSDLNDLYRRVINRNNRLKRLMDLKAPDIIIRNEKRMLQESVDALFDNGRRGRVITGTGKRPLKSLAEMLKGKQGRFRQNLLGKRVDYSGRSVIVVGPDLKLHECGLPKKMALELFKPFLYARLNKLGLASTIKQAKKIVEKERNEVWDALEVIVREHPILLNRAPTLHRLGVQAFEPKLIEGDAIELHPLVCAAFNADFDGDQMAVHIPLSLEAQLEARVLMMST

SEQ ID NO: 134615 - protein, 308 aa, Unknown
  Bacterial polypetide isolated from the Sargasso Sea
KIIAEPLEKGYGLTLGNSLRRILLSSIRGTAVKSIQIDGVLHEFTSIKGVREDVTDIVLNVKELALKSSSEGDKKLILDAKGPGEIKASNILPVADIEILNPDLVICNLDENTNFHMEMNVGSGKGYISADMNKPEEPPLGLIPIDSLFSPVKKVSYSVSTAREGKALDYDKLTMEVQTNGSISAEDAVAYSARIFQDQLGMFVNFDEPQEVIIRDKPTEPEFNKNLLRKVDELELSVRSMNCLKNDNIIYIGDLVQKSEGEMLRTPNFGRKSLNEIKEVLTGMSLYLGMEIPNWPPENIAELSKKLE

SEQ ID NO: 134616 - protein, 302 aa, Unknown
  Bacterial polypetide isolated from the Sargasso Sea
IELLSRIDLEELSYELRHKANNETSKQRKTEALKRLQVVESFREANQRKENLPEWMIVKVIPVIPPELRPLVPLDGGRFATSDLNDLYRRVIIRNNRLKRLVEIKAPEVILRNEKRMLQESVDSLFDNTRKSSAVKTESNRPLKSLSDSLKGKQGRFRQNLLGKRVDYSARSVIVVGPELKLYECGLPKDMAAELYKPFIIRKLIERGIVKTVKSAKKIIDRREPIVWDILENVLKGHPVLLNRAPTLHRLGIQAFQPKLIEGKAIQLHPLTCTAFNADFDGDQMAVHLPLGPEAILESQLL

SEQ ID NO: 134617 - protein, 130 aa, Unknown
  Bacterial polypetide isolated from the Sargasso Sea
MEVENVNVKNWKSLIKPSKLDVQISDDLTHAKIIAEPLEKGYGLTLGNSLRRILLSSIRGAAVTSIQIDGVLHEFTSIKGVREDVTDIVLNVKSLALKSDSEGTKKLILDAKGPGEIKASDITPVQTSKY

SEQ ID NO: 134618 - protein, 289 aa, Unknown
  Bacterial polypetide isolated from the Sargasso Sea
MQTTNNVIDKNWKALIKPNKLDITSNDDKTIAKVIAEPLEKGFGQTIGNSLRRILLSSIQGAAVTAIQIDGVLHEFSSIKGVREDVTDIVLNVKNLAIKSSSSSPKKIVLDIKGPKEVKAKDITLVPEIEILNPNQIICNLDDNTHFHMELMVSTGKGYVQAPKNKSEDSPLGLISIDSLFSPVKKVSFSVENTRAGSALDYDKLIMNVETNGTVDAEDAIAYSARIFQDQLSMFVNFDDPQEIIKEVKSTEPEFNRNLLKRVEELELSVRSMNCLKNDNIIYIGDLVQ

SEQ ID NO: 134619 - protein, 293 aa, Unknown
  Bacterial polypetide isolated from the Sargasso Sea
ITLASPDKIKSWSFGEIKKPETINYRTFRPEKDGLFCSRIFGPVKDYECLCGKYKRMKFRGIICEKCGVEVTKSNVRRERMGHIDLACPVAHIWFLKSLPSRISLAIDMKLKEVEKVLYFESFIVVEPGLTKLKKGQLLTEEELTKAQDEFGEDAFTAGIGAEAVREILLSLDLKKEQEKLRESLKEIKSKVTEERTIKRLKLIESFINSGNKPEWMILTSIPVIPPELRPLVPLDGGRFATSDLNDLYRRVINRNNRLKRLLDLKAPDIIVRNEKRMLQESVDALFDNGRRR

SEQ ID NO: 134620 - protein, 310 aa, Unknown
  Bacterial polypetide isolated from the Sargasso Sea
MDDITSVPVIPPELRPLVPLDGGRFATSDLNDLYRRVINRNNRLKRLLDLKAPDIIVRNEKRMLQESVDALFDNGRRGRVITGTGKRPLKSLAEMLKGKQGRFRQNLLGKRVDYSGRSVIVVGPELKLHQCGLPKKMALELFKPFLYARLDKLGLATTIKQAKRLVEKEKSEVWDSLEQIIREHPILLNRAPTLHRLGVQAFEAKLIEGNAIELHPLVCAAFNADFDGDQMAVHIPLSLEAQLEARVLMMSTNNILSPSNGKPIIVPSQDIVLGIYYLSQEEEDEKKKPKGIFSGVEEIEQALENKSISY

SEQ ID NO: 134621 - protein, 298 aa, Unknown
  Bacterial polypetide isolated from the Sargasso Sea
TSVIDLLVPTEIQVDDVSPTLSKVTLEPLERGFGHTLGNALRRILLSSMPGAAVTDVAIDGISHEYSTIEGIREDVIDILLNIKDMPINLIEGDTAEVTLDVTGPCDVLASSFDAPGNVELVDQDFHVATIVDKISLKMTLTVKTGRGYEPADLRDDEDRVVGALKVDASYSPVRRVSYTVDNARFGKRTDLDKLVVELETDGTLDPKMAIEHSATILQQQLSAFVDLDAIAEQEAKKDQNDFDPILLRSIEELELTVRSTNCLKAESIFLIGDLIHRSEFDLLKTPNLGKKSLNEIK

SEQ ID NO: 134622 - protein, 285 aa, Unknown
  Bacterial polypetide isolated from the Sargasso Sea
SKFKTTSMWIPKKMALELFKPFIFHKLDIYGWANTIKAAKKLVEKEDPRVWDILEEVIREHPVLLNRAPTLHRLGIQAFEPMLIEGKSIQLHPLVCTAFNADFDGDQMAVHVPLSLEAQLEARVLMMSTNNILSPSSGKPIIVPSQDIVLGIYYLSIERDNQKGQGRYFIDLNEILKALENKDITLHTKIISRVKNFDGSFSKVETTPGRMILGDKLPISNQIKFDMVNKILTKKEVSNIIDTVYRFCGQKETVIFADNFMQIGFKYAAVAGISFGKDDLIIPPR

SEQ ID NO: 134623 - protein, 276 aa, Unknown
  Bacterial polypetide isolated from the Sargasso Sea
MIHKNWAEFLKPAQLEVKQANDPTRQGTVIAEPLERGFGLTIGNALRRVLMSSLQGAAITSVQIDNVLHEFSSVAGVREDVTDIVLNLKGVSLSMEVEGPKRLTVSSKGPGVVTAGNIEETAGIEILNKDHVICHLDDGADLNMELTVNTGNGYVAAEKNKPEDAPIGLIPIDAIYSPVKKVSYDVQPTREGQVLDYDKLTMNIETDGSVSPDDALAFAARILQDQLSIFVNFDEPEAANQNDEDDGLEFNPLLLKKVDELELSVRSANCLKNDNI

SEQ ID NO: 134624 - protein, 199 aa, Unknown
  Bacterial polypetide isolated from the Sargasso Sea
MNFKHDFDYIKINLASPKRIKEWGERTLPNGQIVGEVTKSETINYRTFKPEMDGLFCEKIFGPVKNWECYCGKYKRVEPNEVLICERCGVEVTESRVRRHRMGYIDLVSPVTHVWYLKGIPSYLSLLLKRRLRILEEIIYFNQYLVFNNEPFQNVENNIDNNLNFEDYLYSSDDDNYIFEDTRAKIGAEAIKYLLEKLD

SEQ ID NO: 134625 - protein, 249 aa, Unknown
  Bacterial polypetide isolated from the Sargasso Sea
EPLEKGYGLTLGNSIRRILLSSIRGAAVTSIQIDGVLHEFTSIKGVREDVTDIVLNVKSLALKSSSDENKKLILDAKGPGEIKASNITPVQDIEILNPDLVICNLDENTNFHMEMMVGNGKGYVSAEMNKPEEPPLGLIPIDSLFSPVKKVSYSVSTAREGKALDYDKLTMEVETNGSISAEDAVAYSARIFQDQLSMFVNFDEPQEVLVREKPTEPEFNRNLLRKVDELELSVRSMNCLKNDNIIYIG

SEQ ID NO: 134626 - protein, 228 aa, Unknown
  Bacterial polypetide isolated from the Sargasso Sea
LFCAKIFGPVKDYECMCGKYKRMKHRGVVCEKCGVEVTLAKVRRERMGHIELAAPVAHIWFLKSLPSRIGLLLNVTLREIERVLYFESYIVTDPGLTELEKGQILTEEEWVEKYEEFGDEFTAGMGAEAVQILLQELDIEDEIRIIREEIPQTNFETKLKKLSKRLKLLEAFNKSGNKPEWMVMNVLPVLPPDLRPLVPIEGGRFATSDLNDLYRRVINRNNRLKRLL

SEQ ID NO: 134627 - protein, 184 aa, Unknown
  Bacterial polypetide isolated from the Sargasso Sea
MEVENVNVKNWKSLIKPSKLDVQISDDLTHAKIIAEPLEKGYGLTLGNSLRRILLSSIRGAAVTSIQIDGVLHEFTSIKGVREDVTDIVLNVKSLALKCNSEGTKKLVLDAKGPGEIKASDIASVTDVEILNPDLVICNLDENTTFHMEMNVNTGKGYVPAELNKPEEPPLGLIAIDSLYSPVK

SEQ ID NO: 134628 - protein, 118 aa, Unknown
  Bacterial polypetide isolated from the Sargasso Sea
METENVNIKNWKSLIKPSKIDVQMSDDLSRAKIVAEPLEKGYGLTLGNSLRRILLSSIRGAAVTSIQIDGVLHEFTSIKGVREDVTDIVLNVKSLALKSSSEGTKKLILDAKGPGEIK

SEQ ID NO: 134629 - protein, 324 aa, Unknown
  Bacterial polypetide isolated from the Sargasso Sea
MSKELSDLFKSSEISEAQNFNSIKITLASPEKIKSWTFGEIKKPETINYRTFRPEKDGLFCARIFGPIKDYECLCGKYKRMKFRGIICEKCGVEVTKSNVRRERMGHINLATPVAHIWFLKSLPSRISLAIDMKLKEVERVLYFENFIVIEPGLTGLKKNQLLGEEELIKYQDDYGEEAFTAGIGAEAILEILKSINLKEEREALIKSIKETKSKVSEERSIKRLKLIESFIETGNKPEWMILTTVPVIPPELRPLVPLDGGRFATSDLNDLYRRVINRNNRLKRLIDLKAPDIIVRNEKRMLQESVDALFDNGRRGRVITGTG

SEQ ID NO: 134630 - protein, 149 aa, Unknown
  Bacterial polypetide isolated from the Sargasso Sea
MQSTTNIIDKNWKALIKPNKLEINSNEDRTIAKVVAEPLEKGFGQTIGNSLRRILLSSIQGAAVTAIQIDGVLHEFSSIKGVREDVTDIVLNVKNLAIKSSSSNPKKIILDIKGPKEVKAKDITLVPEIEILNPEQTICNLDEKTNFHM

SEQ ID NO: 134631 - protein, 302 aa, Unknown
  Bacterial polypetide isolated from the Sargasso Sea
EVIREHPVLLNRAPTLHRLGIQAFEPILIEGKSIQLHPLVCTAFNADFDGDQMAVHVPLSLESQLEARVLMMSTNNILSPSSGKPIIVPSQDIVLGIYYLSILRKNQIGEGRSFLDLNEIMKALENKDITLHSQIIARVKNFEGNLSTIETTAGRMILGDILPNNENIKFDMLNKVLTKKEVSNIIDTVYRFCGQKETVLFADRIMGIGFRYAAMAGISFGKDDLIIPEDKNSLLEKTQSKVQEYENQYQDGLITQGEKYNKVVDAWSDCTNQVAAKMLETISNPEDDKPVNSVYMMAHSGA

SEQ ID NO: 134632 - protein, 294 aa, Unknown
  Bacterial polypetide isolated from the Sargasso Sea
RQNLLGKRVDYSGRSVIVVGPELKLHQCGLPKKLALELFKPFIYSRLESLGISSTVKQAKRMVEKQTTEVWDILEEVIREHPVLLNRAPTLHRLGIQAFEPVLIEGKAIQLHPLVCAAFNADFDGDQMAVHVPLSLEAQLEARVLMMSTNNILHPANGDPIIVPSQDIILGLYYLSQMKQNEPGEGRHFDDVNEIDFALENKDITLHSKISFRFNTDDGYEKFDTTPGRILISKELPKNENISFEIVNKLLTKKEISRMIDDVYRHCGQKETVIFCDHIMKLGFKHACNAGISF

SEQ ID NO: 134633 - protein, 292 aa, Unknown
  Bacterial polypetide isolated from the Sargasso Sea
LCGKYKRMKFRGIICEKCGVEVTKSNVRRDRMGHIELACPVAHIWFLKSLPSRISSAIDMKLKDVEKVLYFESFMVVEPGLTKLKKNQLLSEEELIKAQEEYGEDSFEAGIGAETIRKILLNLDLKAERDKLRSILKEVKSKVAEERTIKRLKLIESFISSGNKPEWMILTSIPVIPPELRPLVPLDGGRFATSDLNDLYRRVINRNNRLKRLIDLKAPDIIVRNEKRMLQESVDALFDNGRRGRVITGTGKRPLKSLAEMLKGKQGRFRQNLLGKRVDYSGRSVIVAGPEL

SEQ ID NO: 134634 - protein, 258 aa, Unknown
  Bacterial polypetide isolated from the Sargasso Sea
PTLHRLGIQAFEPILIEGKSIQLHPLVCTAFNADFDGDQMAVHVPLSLEAQLEARVLMMSTNNILHPASGKPIIVPSQDIILGIYYLSIMRDKQIGEGRSFVDLNEILKALENNDITLHSKIVARIETYEGNLSKVETTPGRMILGNILPKNKNINFEIINKVLTKKEVSNIIDAVYRFCGQKETVLFADHIMQIGFKYAAIAGISFGKDDLIIPSDKNELLNTTQLKVQEYEDQYQDGLITQGEKYNKVVDAWSECT

SEQ ID NO: 134635 - protein, 162 aa, Unknown
  Bacterial polypetide isolated from the Sargasso Sea
VVKASIKIENSRVGQVTDYDKLVFEVETNGVISPDDAIALAARILQDQLQPFINFDEPEIMPDQSQVEKLSFNSNLLKKVEELELSVRSANCLKNDNIIYIGDLVQKSESEMLRTPNFGRKSLNEIKEVLQQMELNLGMSVPDWPPENIDELAKKYEDPFNK

SEQ ID NO: 134636 - protein, 282 aa, Unknown
  Bacterial polypetide isolated from the Sargasso Sea
MKKELTDLFKGSEISEAQNFNSIKISLASPEKIKSWTFGEIKKPETINYRTFRPEKDGLFCARIFGPIKDYECLCGKYKRMKFRGIICEKCGVEVTKSNVRRERMGHINLATPVAHIWFLKSLPSRIALAVDMKLKEIERVLYFENFIVIEPGLTGLQKNQLLNEEELAKYQDEFGEESFTAGIGAEAVLEMLKNLDLELERKNLVSFIKETKSKVNEERAIKRLKLIESFIETGQKPEWMIMTVVPVIPPELRPLVPLDGGRFATSDLNDLYRRVINRNNR

SEQ ID NO: 134637 - protein, 228 aa, Unknown
  Bacterial polypetide isolated from the Sargasso Sea
EGNTAEISLDITGPCDVTASSFEVPGNVELVNQDFHIATIVDKVNLKMTLTVKTGRGYEPADLRDDEDRVVGGLKVDASFSPVRRVSYTVDNARFEKRTDLDKLLIELETDGTLDPKMAIEHAATIIQQQLGAFVDLDAIAEQEAKKDQNDFDPLLLRSIEELELTVRSTNCLKAESIFLIGDLIHRSEFDLLKTPNLGKKSLNEIKDVLASKNLSLGMNVENWPPVV

SEQ ID NO: 134638 - protein, 147 aa, Unknown
  Bacterial polypetide isolated from the Sargasso Sea
MQTTTNVIDKNWKALIKPDKLEITSNEDKTIAKVIAEPLEKGFGQTIGNSLRRILLSSIQGAAVTAIQIDGVLHEFSSIKGVREDVTDIVLNVKNLAIKSSSSSSKKIILDIKGPKEVKAKDITLVPEVQILNPEQTICNLDEKTNF

SEQ ID NO: 134639 - protein, 141 aa, Unknown
  Bacterial polypetide isolated from the Sargasso Sea
MQTSIIDLLVPTEIQVETVSDQVAKITLEPLERGFGHTLGNALRRILLSSMPGAAITNVSIEGISHEYSTIDGVREDVIDILLNLKDMPINIIEGSTAEIKLDVSGPSEVKAGMFEVPGNVELVNEDHHIASLVDKVKLSL

SEQ ID NO: 134640 - protein, 309 aa, Unknown
  Bacterial polypetide isolated from the Sargasso Sea
ALKESGQKPEWMIMNVLPVLPPDLRPLVPLDGGRFATSDLNDLYRRVINRNNRLKRLLELGAPEIIVRNEKRMLQESVDALLDNGRRGRAILGTNKRPLKSLADMIKGKQGRFRQNLLGKRVDYSGRSVVVSGPTLKLHQCGLPKKMALELFKPFIFNKLEQKGITITIKAAKQLVEEETPEVWDCLDEVIREHPVLLNRAPTLHRLGIQAFEPVLIEGKAIQLHPLVCVAFNADFDGDQMAVHVPLSLEAQLEARALMMSTNNILSPASGEPIIQPNQDVVLGIYYLTKEDFNLPGEGRSFVDVHEVK

SEQ ID NO: 134641 - protein, 302 aa, Unknown
  Bacterial polypetide isolated from the Sargasso Sea
TGTGKRPLKSLAEMLKGKQGRFRQNLLGKRVDYSGRSVIVVGPDLKLHECGLPKKMALELFKPFLYARLNKLGLASTIKQAKKLVEKETNAVWDALELIVREHPVLLNRAPTLHRLGVQAFEPKLIEGDAIELHPLTCAAFNADFDGDQMAVHVPLSLEAQLEARILMLSTNNILSPSNGKPIIVPSQDMILGIYYLSQEPISDKPAGYFTNSDQIEFALSSGQINVHSTIISRFETVDDQGNKKMEKYTSTAGRFLLANLLPKNSNIKFSLIDRLLPKKVVSEIIDVVFRFCGQKTTVIFC

SEQ ID NO: 134642 - protein, 157 aa, Unknown
  Bacterial polypetide isolated from the Sargasso Sea
MENADVNIKNWKSLIKPSKLDVKLSDDKSYAKIIAEPLEKGYGLTLGNSLRRILLSSIRGTAVTAIQIDGVLHEFTSIKGVREDVTDIVLNVKSLALKCGTDTSKKLILDAKGPGEIKASDITPVTDIEILNPDLVICNLDENTNFHMEMVIGSGKG

SEQ ID NO: 134643 - protein, 305 aa, Unknown
  Bacterial polypetide isolated from the Sargasso Sea
LRPLVPLDGGRFATSDLNDLYRRVINRNNRLKRLIDLRAPDIIIRNEKRMLQESVDALFDNGRRGRVITSTNKRPLKSLSDMLKGKQGRFRQNLLGKRVDYSGRSVIVVGPTLKLHQCGIPKKMALELFKPFIFHKLDVYGWANTIKAAKKLVEKEDPRVWDILEEVIREHPVLLNRAPTLHRLGIQAFEPILIEGKSIQLHPLVCTAFNADFDGDQMAVHVPLSLEAQLEARVLMMSTNNILSPSSGKPIIVPSQDIVLGIYYLSIMRENQKGENRYFLDINEILKALENKDVSLHTKILARVK

SEQ ID NO: 134644 - protein, 233 aa, Unknown
  Bacterial polypetide isolated from the Sargasso Sea
MALELFKPFLYARLDKLGLATTIKQAKRLVEKEKSEVWDSLEHIIREHPILLNRAPTLHRLGVQAFEAKLIEGNAIELHPLVCAAFNADFDGDQMAVHIPLSLEAQLEARVLMMSTNNILSPSNGKPIIVPSQDIVLGIYYLSQAAEKSDSKPKGIFSSVEEIEQALENKSISLHTKIISTFKTLDKNGEKVFEKHTSTAGRFLLANLLPINHNIKFNLVNKLLTKKNVSEVI

SEQ ID NO: 134645 - protein, 220 aa, Unknown
  Bacterial polypetide isolated from the Sargasso Sea
IWFLKSLPSRISLAIDMKLKEVEKVLYFESFIVVEPGLTTLKKGQLLSEEALIKAQDEFGEDAFTAGIGAEAVREILLNLDLKKEQKKLRDSLNEIKSKVTEERTIKRLKLIESFISSGNKPEWMILTSVPVIPPELRPLVPLDGGRFATSDLNDLYRRVINRNNRLKRLLDLKAPDIIVRNEKRMLQESVDALFDNGRRGRVITGTGKRPLKSLAEMLK

SEQ ID NO: 134646 - protein, 322 aa, Unknown
  Bacterial polypetide isolated from the Sargasso Sea
RLVEKEKSEVWMPLEHIIREHPVILNRAPTLHRLGVQAFEAKLIEGNAIELHPLVCAAFNADFDGDQMAVHIPLSLEAQLESRVLMMSTNNILSPSNGRPIIVPSQDIVLGIYYLSQSSNKDEKIKGIFSSIEEIEQALENKSISLHSKIISLFKTVDSNGKKVNHKYQSTAGRFLLANVLPKNEKIKFTLVDRLLTKKNVSEVIDTIFRYCGQKETVIFCDKIKSLGFKHAFKAGISFGKNDLIIPKTKIDLINTTKKKIEEYEKQYSDGLITRGEKYNKVVDIWSKCTDTVANEMMKEISSAEKIYPDDRIETNSVFMMA

SEQ ID NO: 134647 - protein, 306 aa, Unknown
  Bacterial polypetide isolated from the Sargasso Sea
KKTEALKRLQVVESFREANQRKENLPEWMIVKVIPVIPPELRPLVPLDGGRFATSDLNDLYRRVIIRNNRLKRLVEIKAPEVILRNEKRMLQESVDSLFDNTRKSSAVKTESNRPLKSLSDSLKGKQGRFRQNLLGKRVDYSARSVIVVGPELKLYECGLPKDMAAELYKPFIIRKLIERGIVKTVKSAKKIIDRREPIVWDILENVLKGHPVLLNRAPTLHRLGIQAFQPKLIEGKAIQLHPLTCTAFNADFDGDQMAVHLPLGPEAILEAQLLMLGSHNILNPANGSPITVPSQDMVLGLYYMT

SEQ ID NO: 134648 - protein, 290 aa, Unknown
  Bacterial polypetide isolated from the Sargasso Sea
MVIKLESQNELHSRVSIEPFERGFGYTLGNAIRRVLLSSLPGYAITEAQIDGVLHEYTTIEGVQEDVVEILLNLKGVAINIHDRDSADFVVSKKGPCKVTAGDIQVDGDTEIVNPDHHIATISSKKELKMQIKIEKGTGYRPVPTQSKDADVTIGLLKLDASFSPIKTVTYSVEAARVENRTDLDKLIVDLETDGTIDPERAIKYAGAILQNQLSIFTNLTRVQEQKKEEEEVLIDPIMLRPVDELELTVRSANCLKAENANYIGDLVQKTEVELLRTPNLGKKSLNEIK

SEQ ID NO: 134649 - protein, 302 aa, Unknown
  Bacterial polypetide isolated from the Sargasso Sea
FKSLPSRIALAVDMKLKEIERVLYFENFIVIEPGLTGLKKNQLLNEEELAKYQDEFGEEAFTAGIGAEAVLEMLKNLDLELEKKNLASYIKETKSKVNEERAIKRLKLIESFLDTGQKPEWMIMTVVPVIPPELRPLVPLDGGRFATSDLNDLYRRVINRNNRLKRLMDLKAPDIIVRNEKRMLQESVDALFDNGRRGRVITGTGKRPLKSLAEMLKGKQGRFRQNLLGKRVDYSGRSVIVVGPDLKLHECGLPKKMALELFKPFLYARLNKLGLASTIKQAKKLVEKETNAVWDALELIVR

SEQ ID NO: 134650 - protein, 233 aa, Unknown
  Bacterial polypetide isolated from the Sargasso Sea
AEMLKGKQGRFRQNLLGKRVDYSGRSVIVVGPDLKLHECGLPKKMALELFKPFLYARLNKLGLASTIKQAKKLVEKETNAVWDALELIVREHPVLLNRAPTLHKMGVQAFEPKLIEGDAIELHPLTCAAFNADFDGDQMAVHVPLSLEAQLEARILMLSTNNILSPSNGKPIIVPSQDMILGIYYLSQEPVTDKPAGYFLNADQIEFALSSGQIKVHSTIIYRFETIDEKGNQ

SEQ ID NO: 134651 - protein, 272 aa, Unknown
  Bacterial polypetide isolated from the Sargasso Sea
FLTEEEYLDILDELPKENQFLEDSDPNKFIAKMGADAIHDLLKNLDLDQLSYDLRHKANTETSVQRKNEALKRLQVVEAMRGSQKRIDNQPEWMIVKVVPVIPPELRPLVPLDGGRFATSDLNDLYRRVIIRNNRLKRLIEIKAPEVILRNEKRMLQESVDSLFDNSRKSSAVKTEANRPLKSLSDSLKGKQGRFRQNLLGKRVDYSARSVIVVGPNLKFHECGLPKNMAAELYKPFIIRKMIERGIVKTVKSAKKIVDRKEPVVWDILENV

SEQ ID NO: 134652 - protein, 191 aa, Unknown
  Bacterial polypetide isolated from the Sargasso Sea
ELIKPNKIEIKEDNSGKNVSRLTVEPLEKGFGLTIGNSLRRILLSSLQGSAITSVKIDGVLHEFSAISGVREDVTDIILNIKDVALKMHIDTEIKMILNKTGPCTVVAGDIESSTDVEILNPETVICTLDDKVNVRMEFIARTGRGYVPAEKNRSEDEPVGLIPIDSLFSPVKRVSYEIENTREGQILDYD

SEQ ID NO: 134653 - protein, 293 aa, Unknown
  Bacterial polypetide isolated from the Sargasso Sea
MNKVMKSLENMNNDFDLIKISIASPEKIRSWSFGEVKKPETINYRTFKPEREGLFCAKIFGPVKDYECLCGKYKRMKHRGIVCEKCGVEVIQSKVRRERMGHIELAAPVAHIWFLKSLPSRISLLLDMAMKDVERVLYFENHIVIEPGLTSLKFKQILSDEEFNKALDENPADSFSAGIGAEAIRKIFESMNMEEERENIKEELSTSKSDIKKKKLLRRLKLVEQFIFSGNKPEWMILTSLPVIPPDLRPLVPLDGGRFATSDLNDLYRRVINRNNRLRRLKDLKAPDIIVRN

SEQ ID NO: 134654 - protein, 309 aa, Unknown
  Bacterial polypetide isolated from the Sargasso Sea
VTLAKVRRERMGHIELAAPVAHIWFLKSLPSRIGLLLNVTLREIERVLYFESYIVTDPGLTELEKGDILTEEEWVEKYEEFGDEFTAGMGAEAVQILLEELDIDDEIRIIREEIPETNSETKLKKLSKRLKLLEAFNNSGNKPEWMIMNVLPVLPPDLRPLVPLEGGRFATSDLNDLYRRVINRNNRLKRLLELNAPEIIVRNEKRMLQESVDALLDNGRRGRVITGTNKRPLKSLADMIKGKGGRFRQNLLGKRVDYSGRSVIVAGPNLRLHQCGLPKKMALELFKPFVYGKLEQRELATTIKGAKKL

SEQ ID NO: 134655 - protein, 312 aa, Unknown
  Bacterial polypetide isolated from the Sargasso Sea
QKPEWMIMTVVPVIPPELRPLVPLDGGRFATSDLNDLYRRVINRNNRLKRLMDLKAPDIIVRNEKRMLQESVDALFDNGRRGRVITGTGKRPLKSLAEMLKGKQGRFRQNLLGKRVDYSGRSVIVVGPDLKLHECGLPKKMALELFKPFLYARLNKLGLASTIKQAKKLVEKETNAVWDALELIVREHPVLLNRAPTLHRLGVQAFEPKLIEGDAIELHPLTCAAFNADFDGDQMAVHVPLSLEAQLEARILMLSTNNILSPSNGKPIIVPSQDMILGIYYLSQEPLTDKPAGYFLNADQIEFALSSGQLKV

SEQ ID NO: 134656 - protein, 273 aa, Unknown
  Bacterial polypetide isolated from the Sargasso Sea
YAKRLKVLEAFQRSGIKPEWMILEVLPVLPPELRPLVPLDGGRFATSDLNDLYRRVINRNNRLKRLLELKAPEIIVRNEKRMLQEAVDSLLDNGRRGKAMTGANKRPLKSLADMIKGKGGRFRQNLLGKRVDYSGRSVIVVGPTLKLHQCGLPKLMALELFKPFIFNKLEVMGVATTIKAAKKEVENQTPVVWDILEEVIREHPVMLNRAPTLHRLGIQAFEPVLIEGKAIQLHPLVCAAFNADFDGDQMAVHVPLSLEAQMEARTLMLASNN

SEQ ID NO: 134657 - protein, 159 aa, Unknown
  Bacterial polypetide isolated from the Sargasso Sea
MQTTSNIVDKNWKALIKPNKLDIKSNDDKTVAKVIAEPLEKGFGQTIGNSLRRILLSSIQGAAVTAIQIDGVLHEFSSIKGVREDVTDIVLNVKNLAIKSSSTSSKKIILDIKGPKEVKAKDITLAPEIEILNPEQTICNLDEKTHFHMELMISTGKGY

SEQ ID NO: 134658 - protein, 188 aa, Unknown
  Bacterial polypetide isolated from the Sargasso Sea
MENTNIFDKNWKSLTKPSKLEIESNEDKSLAKVIAEPLEKGFGQTIGNSLRRILLSSIQGAAVTAIQIDGVLHEFSSIKGVREDVTDIVLNVKNLAIKLDSDGPKKLVLDAEGPKEVKAKDISLVSDIKILNPDQTICNLDEKTKFHMELIVNNGRGYVLAQKNKSEDTPLGMIAIDSLFSPVKKVSF

SEQ ID NO: 134659 - protein, 312 aa, Unknown
  Bacterial polypetide isolated from the Sargasso Sea
GIRVIDNFIATNAKPEWMFLDAIPCYPTQILGPMVQLDGGRFATSDLNDLYRRVINRNNRLARLQEILAPEIIVRNEKRMLQEAVDALIDNGRRGRTVVGANNRALKSLSDIIEGKQGRFRQNLLGKRVDYSGRSVIVVGPKLKMHECGLPKEMAIELFQPFVIHRLIRQNIVNNIKAAKKLIQKADDEVMQVLQEVIDGHPILLNRAPTLHRLGIQAFEPKLVGGRAIQLHPLVCPAFNADFDGDQMAVHVPLALEAQTEARMLMLASNNILSPATGEPIVTPSQDMVLGSYYLTALQPNYQKPNFGDNKT

SEQ ID NO: 134660 - protein, 220 aa, Unknown
  Bacterial polypetide isolated from the Sargasso Sea
RVITGVNKRPLKSLSDMLKGKQGRFRQNLLGKRVDYSGRSVIVVGPNLKLHQCGLPKKMALELFKPFIYAKLELYGMATTIKAAKRMVEKDRPEVWDILEEVIREHPVLLNRAPTLHRLGVQAFEPILVEGKAIRLHPLVCTAFNADFDGDQMAVHVPLSIESQLEARVLMMSTNNILSPANGKPIIVPSQDIILGLYFMTMERDNEKGEGMKFADKTEV

SEQ ID NO: 134661 - protein, 308 aa, Unknown
  Bacterial polypetide isolated from the Sargasso Sea
MQATSDVIDKNWKALIKPNKLEITSNEDKTIAKVVAEPLEKGFGQTIGNSLRRILLSSIQGSAVTAIQIDGVLHEFSSIKGVREDVTDIVLNVKNLAIKSSSTSAKKIILDIKGPKEVKAKDISLVSEIEILNPEQTICNLDEKTHFHMELMINTGKGYVPAPKNKSEDSPLGLISIDSLFSPVKKVSFSVENTRAGSALDYDKLVMTVETNGTIAAEDAIAYSARIFQDQLSMFVNFEDPKEVVKEVKSSEPEFNRNLLKRVEELELSVRSMNCLKNDNIIYIGDLVQKTEPEMLRTPNFGRKSFNE

SEQ ID NO: 134662 - protein, 284 aa, Unknown
  Bacterial polypetide isolated from the Sargasso Sea
MGHINLATPVAHIWFLKSLPSRISLAIDMKLKEVERVLYFENFIVIEPGLTGLKKNQLLGEEELIKYQDEFGEESFTAGIGAEAILEILKSIDLESEKALLIKTIKETKSKVSEERSIKRLKLIESFIETGNKPEWMILTTIPVIPPELRPLVPLDGGRFATSDLNDLYRRVINRNNRLKRLMDLKAPDIIVRNEKRMLQESVDALFDNGRRGRVITGTGKRPLKSLAEMLKGKQGRFRQNLLGKRVDYSGRSVIVVGPDLKLHECGLPKKMALELFNHFYMHD

SEQ ID NO: 134663 - protein, 306 aa, Unknown
  Bacterial polypetide isolated from the Sargasso Sea
RYQKRLKLIESLISSGNRPEWMILKVLPILPPDLRPLVPLDGGRFATSDLNDLYRRVINRNNRLQRLLDLNAPDIIVRNEKRMLQKSVDALLDNGRMGRAVTGSNKRPLKSLADMIKGKQGRFRQNLLGKRVDYSGRSVIVVGPTLKLHQCGIPKKMALELFKPFVFSKLIYKGEASTIKSAKRLVELEGPEIWDILDGVIRQHPILLNRAPTLHRLGIQAFEPVLVEGKAIQLHPLVCKAFNADFDGDQMAVHVPLSIEAQLESRALMMSSNNILSPANGEPIIVPSQDVVLGLYYMTREKVKDK

SEQ ID NO: 134664 - protein, 266 aa, Unknown
  Bacterial polypetide isolated from the Sargasso Sea
SSIKGVREDVTDIVLNVKALSLKITSDGPKKLILDVKGPGVIKAKDIQPNSEVTILNPDLVICHLDDNTKFHMELIANTGKGYLPADKNKKDDAPLGLIAIDSFFSPVKKVSYTVENAREGKSLDYDKLVMVVETDGSISGEDAVAYAARIFQDQLSMFINFEEPKEVEQKPKSIEPEFNKNLLKKVDELELSVRSMNCLKNDNIVYIGDLVQKTEPEMLRTPNFGRKSLNEIKEVLNSMSLYLGMEIPNWPPDNIAELSKKFEEN

SEQ ID NO: 134665 - protein, 287 aa, Unknown
  Bacterial polypetide isolated from the Sargasso Sea
FWSTLGNALRRILLSSMPGAAVTDVVIDGISHEYSTIEGVREDVIDILLNLKDMPVKLIEGNEAELKLSVDGPCEVTSSSFEAPGNVELTDADHHVVSLVDKIKLNMSVFVRTGRGYEPADIRDDENNTVGGLKVDASFSPVKRVSYSVENARFEKRTDLDKLILELETDGTIDAKMAIEHSATIMQQQLAAFVDLEAIAEQEAKKEQNDFDPLLLRSIEELELTVRSTNCLKAESIFLIGDLIQRSEFDLLKTPNLGKKSLNEIKDVLASKGLSLGMVLDNWPPMG

SEQ ID NO: 134666 - protein, 186 aa, Unknown
  Bacterial polypetide isolated from the Sargasso Sea
MGAEAIQTLLRRIELEDLENQLQIEMREVNSETRRKRIAKRLNVIGSLLKSGNAVDSMIIDNLPVLPPELRPLVPLEGGRFATSDLNDLYRRVIHRNNRLKRLIELRAPGIIVKNEKRMLQESVDALFDNGRRGRPMVGSNKRPLKSISDMLKGKQGRFRQNLLGKRVDYSGRTVIVVGPELKLHQ

SEQ ID NO: 134667 - protein, 299 aa, Unknown
  Bacterial polypetide isolated from the Sargasso Sea
LKSLDLELERKNLVNYIKETKSKVNEERAIKRLKLIESFIETGQKPEWMIMTVVPVIPPELRPLVPLDGGRFATSDLNDLYRRVINRNNRLKRLMDLKAPDIIVRNEKRMLQESVDALFDNGRRGRVITGTGKRPLKSLAEMLKGKQGRFRQNLLGKRVDYSGRSVIVVGPDLKLHECGLPKKMALELFKPFLYARLNKLGLASTIKQAKKLVEKETNAVWDALELIVREHPVLLNRAPTLHRLGVQAFEPKLIEGDAIELHPLTCAAFNADFDGDQMAVHVPLSLEAQLEARILMLST

SEQ ID NO: 134668 - protein, 304 aa, Unknown
  Bacterial polypetide isolated from the Sargasso Sea
VRRDRMGHIELAAPVSHIWFMKSLPSRIATLLDMTIKNLEKVLYFEQFIVVEPGLTDLKKGEIISEEQYIDYQDEYGEDAFTAAIGAEAIEQMLLNIDLDADFKQMKIDLTETKSELKKTKITKRLKLIESFIVSKNKPEWMILKVLPVIPPELRPLVPLDGGRFATSDLNDLYRRVINRNNRLKRLIDLRAPDIIIRNEKRMLQESVDALFDNGRRGRIITSTNKRPLKSLSDMLKGKQGRFRQNLLGKRVDYSGRSVIVVGPNLKLHQCGIPKKMALELFKPFIFHKLDIYGWANTIKAAKK

SEQ ID NO: 134669 - protein, 204 aa, Unknown
  Bacterial polypetide isolated from the Sargasso Sea
MEQTEVNTKNWKSLIKPAKLDVQLSDDNSFAKIIAEPLEKGYGLTLGNALRRILLSSIRGTAVTSIQIDGVLHEFTSIKGVREDVTDIVLNVKSLALKSSSDEPKKLILDAKGPGEIKASDITSVADIEILNPDLVICNLDENTKFHMEMSVGTGKGYVSADMNKPEEPPLGLIPIDSLFSPVKKVSYTVSTAREGKALDYDKL

SEQ ID NO: 134670 - protein, 262 aa, Unknown
  Bacterial polypetide isolated from the Sargasso Sea
VREDVTDIVLNIKSLALKSNAEGNKKLILDAKGPGEIKASQITPNPDIEILNPDLVICNLDENTNFHMELYVGNGKGYVSAELNKPEEPPLGLIPIDSLFSPVKKVSYSVSTAREGKALDYDKLTIEIETNGSITAEDALAYSARIFQDQLGMFVNFDEPKEIKIQDQPKEPEFNQNLLRKVDELELSVRSMNCLKNDNIIYIGDLVQKSEGEMLRTPNFGRKSLNEIKEVLSGMSLYLGMEIPNWPPDNIAELSKKLEDAI

SEQ ID NO: 134671 - protein, 274 aa, Unknown
  Bacterial polypetide isolated from the Sargasso Sea
YFNAYVITNPRNANNLVYKQLLTENDWIALDYENDESAPVEIAMGAEAIKKLLQQIDLEYESKNIRNQLPYVKRPERDKLIKKLRIVDQLLASNCDPAWMVLEIIPVLPPDLRPMVQLDGGRFATSDLNDLYRRVINRNNRLSRFQEIMAPELIIRNEKRMLQEAVDALIDNGRRGKAVVGLNNRPLKSLSDIIEGKQGRFRQNLLGKRVDYSGRSVIIVGPELKLNQCGLPREMAIELFQPFVIHRLIYDGLVNNIKAAKNIIQSNETLAWDI

SEQ ID NO: 134672 - protein, 317 aa, Unknown
  Bacterial polypetide isolated from the Sargasso Sea
RMKFRGIICEKCGVEVTKSNVRRERMGHINLATPVAHIWFLKSLPSRISLVIDMKLKEVEKVLYFENFIVIEPGLTSLRKNQLLSEEELIKYQDQYGEESFTAGIGAEAILEILKSIDLSQEKEKLSKSIKETKSKVTEERNVKRLKLIDSFIETGNKPEWMILTTIPVIPPELRPLVPLDGGRFATSDLNDLYRRVINRNNRLKRLMDLKAPDIIIRNEKRMLQESVDALFDNGRRGRVITGTGKRPLKSLAEMLKGKQGRFRQNLLGKRVDYSGRSVIVVGPDLKLHECGLPKKMALELFKPFLYARLNKLGLAS

SEQ ID NO: 134673 - protein, 226 aa, Unknown
  Bacterial polypetide isolated from the Sargasso Sea
PEWMILKVLFVLPPDLRPLVPLDGGRFATSDLNDLYRRVINRNNRLKRLLDLAAPDIIVRNEKRMLQESVDALLDNGRRGRAITGSNKRPLKSLADMIKGKQGRFRQNLLGKRVDYSGRSVITVGPTLRLHQCGLPKKMALELFKPFIYGKLEGRGLATTIKAAKKMVEREVAEVWDVLDEVIREHPVMLNRAPTLHRLGIQAFEPVLIEGKAIQLHPLVCAAYNA

SEQ ID NO: 134674 - protein, 86 aa, Unknown
  Bacterial polypetide isolated from the Sargasso Sea
MEQTEVNSKNWKSLIKPAKLDVQLSDDKAFAKITAEPLEKGYGLTLGNSLRRILLSSIRGTAVTSIQIDGVLHEFTSIKGVREDVT

SEQ ID NO: 134675 - protein, 287 aa, Unknown
  Bacterial polypetide isolated from the Sargasso Sea
SEDKSYAKIVAEPLEKGYGLTLGNSLRRILLSSIRGTAVTAIQIDGVLHEFTSIKGVREDVTDIVLNVKSLALKSTSEGQKKLVLDAKGPGVIKASDITKVNEIEILNPDLVICNLDENTNFHMEMTIGNGKGYVPAELNKPDEPPLGLIPIDSLFSPVKKVSYSVSTAREGKALDYDKLTMEIETNGSISAEDALAYSARIFQDQLGMFVNFDEPQEVTITEKPSEPEFNKNLLRKVDELELSVRSMNCLKNDNIIYIGDLVQKSEGEMLRTPNFGRKSLNEIKEV

SEQ ID NO: 134676 - protein, 205 aa, Unknown
  Bacterial polypetide isolated from the Sargasso Sea
DLYRRVINRNNRLKRLLDLAAPDIIVRNEKRMLQESVDALLDNGRRGRAITGSNKRPLKSLADMIKGKQGRFRQNLLGKRVDYSGRSVITVGPTLRLHQCGLPKKMALELFKPFIYGKLEGRGLATTIKAAKKMVEREVAEVWDVLDEVIREHPVMLNRAPTLHRLGIQAFEPVLIEGKAIQLHPLVCAAYNADFDGDQMAVHVP

SEQ ID NO: 134677 - protein, 125 aa, Unknown
  Bacterial polypetide isolated from the Sargasso Sea
METENVNVKNWKSLIKPAKLDVKISDDFTQATIVAEPLEKGYGLTLGNSLRRILLSSIRGAAVTSIQIDGVLHEFTSIKGVREDVTDIVLNVKSLALKCASEGTKKLVLDAKGPGEIKASDITHS

SEQ ID NO: 134678 - protein, 318 aa, Unknown
  Bacterial polypetide isolated from the Sargasso Sea
LHRLGIQAFEPILIEGKAIQLHPLVCTAFNADFDGDQMAVHIPLSLEAQLEARVLMMSTNNILSPSSGKPIIVPSQDIVLGIYYLSLIDEKKEANKYYSHVGEVEFALENKTIELHTPILYRTKKYNSKTDSFDYHKYTTSAGRVILFKTVPENKYLPFDVINKVLTKKDISNLLDNVYRFTGQKATCIFVDQIMNVGFKYAAKAGISFGKDDLVIPEEKNVLIQDTQKLVNSLENQYQEGLITEREKYNKVVGLWSTCTDKVAKAMMKTVSSNKDSQINSVYIMADSGARGSEAQLKQLAGMRGLMARPSGEIIENP

SEQ ID NO: 134679 - protein, 215 aa, Unknown
  Bacterial polypetide isolated from the Sargasso Sea
MLSSIRGTAVTAIQIDGVLHEFTSIKGVREDVTDIVLNVKSLALKSTSEGSKKLVLDAKGPGVIKASDITKINEIEILNPDLVICNLDENTNFHMEMTIGNGKGYVPAELNKPDEPPLGLIPIDSLFSPVKKVSYSVSTAREGKALDYDKLTMEIETNGSISAEDALAYSARIFQDQLGMFVNFDEPQEVTITEKPSEPEFNKNLLRKVDELELS

SEQ ID NO: 134680 - protein, 107 aa, Unknown
  Bacterial polypetide isolated from the Sargasso Sea
ILVKNINETESKVSEERSIKRLKLIDSFIKTGNNPEWMILTVIPVIPPELRPLVPLDGGRFATSDLNDLYRRVINRNNRLKRLMGLKAPDIIVRNEKRMLQASVDAL

SEQ ID NO: 134681 - protein, 239 aa, Unknown
  Bacterial polypetide isolated from the Sargasso Sea
METVDVNVKNWKSLIKPAKLDVNLSNDKSYAKIIAEPLEKGYGLTLGNSLRRVLLSSIRGTAVTAIQIDGVLHEFTSIKGVREDVTDIVLNVKSLALKCASESNKKLILDAKGPGEIKASDITPVADVEILNPDLVICNLDEKTNFHMEMTVGSGKGYVSADMNKPEEPPLGLISIDSLFSPVKKVSYSVSTAREGKALDYDKLIMEIETNGSISAEDAVAYSARIFQDQLNMFVNFDE

SEQ ID NO: 134682 - protein, 284 aa, Unknown
  Bacterial polypetide isolated from the Sargasso Sea
MGAETVKELLLEIDLPSLNEQLRKEMREVTSETRRKRIHKRLNLVSALVDSGNTSSSMIIENLPVLPPELRPLVPLEGGRFATSDLNDLYRRVIHRNNRLKRLIELRAPGIIVKNEKRMLQESVDALFDNGRRGRPMVGSNKRPLKSLSDMLKGKQGRFRQNLLGKRVDYSGRTVIVVGPDLKLHQCGLPKKMALELFKPFIFHRLIDYQEVHTIKNAKRKLEENDPRVWAILEEVVKEHPILLNRAPTLHRLGIQAFEPVLIEGKAIQLHPLVCTAFNADFDG

SEQ ID NO: 134683 - protein, 294 aa, Unknown
  Bacterial polypetide isolated from the Sargasso Sea
IPPELRPLVPLEGGRFATSDLNDLYRRVINRNNRLKRLLDLRAPDIIVRNEKRMLQESVDALFDNGRRGRVITSTNKRPLKSLSEMLKGKQGRFRQNLLGKRVDYSGRSVIVVGPELKLHQCGLPKKMALELFKPFIYNKLESYGFASTLKSARKMVESERPEVWDILDEVIREHPILLNRAPTLHRLGIQAFEPILIEGKAIQLHPLVCTAFNADFDGDQMAVHIPLSLEAQLEARVLMMSTNNILSPSSGKPIIVPSQDIVLGIYYLSLINDNEETKKYFSHIGEVEFALEN

SEQ ID NO: 134684 - protein, 292 aa, Unknown
  Bacterial polypetide isolated from the Sargasso Sea
MVLDVVPVIPPDLRPLVLLESGNFATSDLNDLYRRIINRNNRLKKLMDLNAPEVIIRNEKRMLQQAVDALFDNGRCRRPVLGSSNRPLKSLTDMIKGKQGRFRENLLGKRVDYSARSVIVVGPELKLHQCGLPKKIALELFQPFIIRKLKEHGLADTIKSAKRMLERRDPEVWDILEQVIDQHPVLLNRAPTLHRMGIQAFEPVLVEGNAITLHPLVCTGYNADFDGDQMAVHLPLSIEAQVESHVLMLSTHNIFSPANGNPIVSPSQDILMGVFFLTYMAEDDSRAPEQLR

SEQ ID NO: 134685 - protein, 278 aa, Unknown
  Bacterial polypetide isolated from the Sargasso Sea
DKTIAKVIAEPLEKGFGQTIGNSLRRILLSSIQGAAVTAIQIDGVLHEFSSIKGVREDVTDIVLNVKNLAIKSSSSSSKKIILDIKGPKEVKAKDITLVPDVEILNPEQTICNLDEKTHFHMELMVSTGKGYVQAKKNKSEDSPLGLISIDSLFSPVKKVAFSVENTRAGSALDYDKLIMTVETNGTVDAEDAIAYSARIFQDQLAMFVNFEDPQEVVKEVKSSEPEFNRNLLKRVEELELSVRSMNCLKNDNIIYIGDLVQKTEPEMLRTPNLEENL

SEQ ID NO: 134686 - protein, 243 aa, Unknown
  Bacterial polypetide isolated from the Sargasso Sea
METENVNIKNWKSLIKPSKIDVQMSDDLSKAKIVAEPLEKGYGLTLGNSLRRILLSSIRGAAVTSIQIDGVLHEFTSIKGVREDVTDIVLNVKSLALKSSSEGTKKLILDAKGPGEIKASDITPVADVEILNPELVICNLDENTSFHMEMNVNTGKGYVPAELNKPEEPPLGLIAIDSLYSPVKKVSYSVSTAREGKALDYDKLTMEVETDGSISAEDAVAYSARIFQDQLKMFINFDEPVEA

SEQ ID NO: 134687 - protein, 184 aa, Unknown
  Bacterial polypetide isolated from the Sargasso Sea
MEGTNIFDKNWKSLTKPSKLEVESNEDKSIAKVVAQPLEKGFGQTIGNSLRRILLSSIQGAAVTAIQIDGVLHEFSSIKGVREDVTDIVLNVKNLAIKLNSDGPKKLILDAEGPKEVKAKDITLISDVKILNPDQTICNLDEKTKFHMELVVNNGRGYVLAQQNKSEDTPLGMIPIDSLFSPVK

SEQ ID NO: 134688 - protein, 277 aa, Unknown
  Bacterial polypetide isolated from the Sargasso Sea
MFGTYFEEIIKGQPVLLNRAPTLHRLGIQAFDPILVEGSAIQVHPLVCTAFNADFDGDQMAVHVPLSLEAQAECRLLVMSTNNLISPSNGRPIVTPTQDMILGIYFLTVENPEEERGKGKYFLDIDEGLRAFEARLIFIHTPIQIRINGETYKTTIGRVIFNNVLESTLKKHGVESVDFINYAIGKKQLSELILNCFYAYGSDICSDLLNELKNVGFKYATLSGISISIDDMRVPSEKHKLLEKADKEISKLEKSFEKGAMSREEMVLRSNEVWRGV

SEQ ID NO: 134689 - protein, 290 aa, Unknown
  Bacterial polypetide isolated from the Sargasso Sea
YFENFIVIEPGLTGLAKNQLLNEEELAKYQDEFGEEAFTAGIGAEAVLEMLKSLDLELERKNLANYIKETKSKVNEERAIKRLKLIESFIETGQKPEWMIMTVVPVIPPELRPLVPLDGGRFATSDLNDLYRRVINRNNRLKRLMDLKAPDIIVRNEKRMLQESVDALFDNGRRGRVITGTGKRPLKSLAEMLKGKQGRFRQNLLGKRVDYSGRSVIVVGPDLKLHECGLPKKMALELFKPFLYARLNKLGLASTIKQAKKLVEKETNAVWDALELIVREHPVLLNRAPT

SEQ ID NO: 134690 - protein, 223 aa, Unknown
  Bacterial polypetide isolated from the Sargasso Sea
MTNSNLRTENHFDYVKISIASPQRIMDWGQRTLPNGQVVGEVTKPETINYRTLKPEMDGLFCEKIFGPSKDWECHCGKYKRVRHRGIVCERCGVEVTESRVRRHRMGYIKLAAPVSHVWYLKGIPSYVAILLDIPLRDVEQIVYFNCYVVLDPGDHKELKYKQLLTEDEWLEIEDEIYAEDSTIENEPFVGIGAEALKQLLEDLDLNQVAEELREEITNSKGQ

SEQ ID NO: 134691 - protein, 281 aa, Unknown
  Bacterial polypetide isolated from the Sargasso Sea
EAKRKKLVKRLKLIEAFQESGARPEWMILEVIPVIPPELRPLVPLDGGRFATSDLNDLYRRVINRNNRLKRLIELRAPDIIVRNEKRMLQESVDALFDNGRRGRPITGANKRPLKSMSDMLKGKQGRFRQNLLGKRVDYSGRSVITVGPNLKLHQCGLPKKMALELFKPFVYAKLELYGMATTIKAAKRMVEKERAEVWDILEQVIREHPVMLNRAPTLHRLGIQAFEPTLIEGKAIQLHPLVCTAFNADFDGDQMAVHVPLSLEAQLEARTLMMSTNNIL

SEQ ID NO: 134692 - protein, 258 aa, Unknown
  Bacterial polypetide isolated from the Sargasso Sea
IKGVREDVTDIVLNVKSLALKSNSEGTKKLILDAKGPGEIKASDIAPVTDVEILNPDLVICNLDENTTFHMEMNVNTGKGYVPAELNKPEEPPLGLIAIDSLYSPVKKVSYSVSTAREGKALDYDKLIMEVETNGSISAEDAVAYSARIFQDQLKMFINFDEPVEAPVKEVSTEPEFNKNLLRKVDELELSVRSMNCLKNDNIIYIGDLVQKSEGEMLRTPNFGRKSLNEIKEVLTGMSLYLGMEIPNWPPRQYCRNV

SEQ ID NO: 134693 - protein, 268 aa, Unknown
  Bacterial polypetide isolated from the Sargasso Sea
FSIDGVREDVTDIVLNIKSLSLNMHSEGVRKMNLNVTGPGEITAGMINTPSEIDIINPELVICNLDDNTEFNMELTVAKGKGYVAAEHNKPEDSAIGLIPIDSIFSPVKQVSYSIENTREGKVLDYDKLTMSIETNGSVSPEDAIAFAARIIQDQLQSFINFEEPEVVQEEPDALEPQFNKNLLRKVEELELSVRSMNCLRNDNIIYIGDLVQKSEIEMLRTPNFGRKSLNEIKEVLGTMSLYLGMEVPNWPPENIEEMARKIEDPYN

SEQ ID NO: 134694 - protein, 246 aa, Unknown
  Bacterial polypetide isolated from the Sargasso Sea
METANVNLKNWKSLIKPGKLDINLNDDKSYAKIVAEPLEKGYGLTLGNSLRRILLSSIRGTAVTAIQIDGVLHEFTSIKGVREDVTDIVLNVKSLALKSTSEGSKKLVLDAKGPGVIKASDITKINEIEILNPDLVICNLDENTNFHMEMTIGNGKGYVPAELNKPDEPPLGLIPIDSLFSPVKKVSYSVSTAREGKALDYDKLTMEIETNGSISAEDALAYSARIFQDQLGMFVNFDEPQESYYY

SEQ ID NO: 134695 - protein, 283 aa, Unknown
  Bacterial polypetide isolated from the Sargasso Sea
RAWLWPTLGNALRRILLSSMPGCAVTEVEIDGVLHEYSAKEGVQEDIIEILLNLKGLAVTLEGKDEVFLTLTKSGVGPVTAADIQHDGDVTIANPDHVICHLTTDSSEISMRIRVERGRGYVPASSRLSSDDDERPIGRLLLDASFSPVERIAYSVESARVEQRTDLDKLIIDMETNGTLDPEEAIRRASTILAEQLDAFVDLRDVTEPEEKEEKPEFDPILLRPVDDLELTVRSANCLKAEQIQYIGDLVQRTEVELLKTPNLSKKSLTEIKDVLASRGLSL

SEQ ID NO: 134696 - protein, 275 aa, Unknown
  Bacterial polypetide isolated from the Sargasso Sea
ADVNIKNWKSLIKPPKLDIKLSDDKSHARITAEPLEKGYGLTLGNSLRRILLSSIRGAAVTSVQIDGVLHEFSSIKGVREDVTDIVLNIKSLALKSHSEGTKKLILDAKGPGEIKASNITPVTDIEILNPDLVICNLDENTNFHMEMNVSTGKGYVSADLNKPEDPPLGLIPIDSLYSPVKRVSYSVSTAREGKALDYDKLIMEVETNGSISAEDAVAYAARIFQDQLGMFVNFDEPQEIIVRDKPTEPEFNKNLLRKVDELELSVRSMNCLKNE

SEQ ID NO: 134697 - protein, 308 aa, Unknown
  Bacterial polypetide isolated from the Sargasso Sea
SLEKVLYFEQFIVVEPGLTDLKKGEIISEEQYIDYQDEYGEDSFSAAIGAEAIEQMLLNIDLESDYKQLKVDLSETKSELKKTKITKRLKLIESFINSKNKPEWMILRVLPVIPPELRPLVPLDGGRFATSDLNDLYRRVINRNNRLKRLIDLRAPDIIIRNEKRMLQESVDALFDNGRRGRVITSTNKRPLKSLSDMLKGKQGRFRQNLLGKRVDYSGRSVIVVGPNLKLHQCGIPKKMALELFKPFIFHKLDIYGWANTIKAAKKLVEKEDPRVWDILEDVIREHPVLLNRAPTLHRLGIQALNQY

SEQ ID NO: 134698 - protein, 312 aa, Unknown
  Bacterial polypetide isolated from the Sargasso Sea
KLDIQLSDDKTYAKVIAEPLEKGYGLTLGNSLRRILLSSIRGSAVTAVQIDGVLHEFTSIKGVREDVTDIILNVKSLALKSSSEGVKKLILDAKGPGIIKASDITLVSDIEILNPDLVICNLDENTNFHMEMNVGSGKGYVPSVMNKPEEPPLGLIPVDSLFSPVKKVSYSVSTAREGKALDYDKLTMEVQTNGSISAEDAVAYAAKIFQDQLNMFVNFDEPEEIPTREQPSEPEFNKNLLRKVDELELSVRSMNCLKNDNIIYIGDLVQKSEGEMLRTPNFGRKSLNEIKEVLTSMSLYLGMEIPNWPPDN

SEQ ID NO: 134699 - protein, 297 aa, Unknown
  Bacterial polypetide isolated from the Sargasso Sea
MIKPSKLDVQISDDLTHAKIVAEPLEKGYGLTLGNSLRRILLSSIRGAAVTSIQIDGVLHEFTSIKGVREDVTDIVLNVKSLALKCNSEGTKKLVLDAKGPGEIKASDIAPVTDVEILNPELVICNLDENTTFHMEMNVNTGKGYVPAELNKPEEPPLGLIAIDSLYSPVKKVSYSVSTAREGKALDYDKLTMEVETNGSISAEDAVAYSARIFQDQLKMFVNFDEPVEVPVKEVSSEPEFNKNLLRKVDELELSVRSMNCLKNDNIIYIGDLVQKSEGEMLRTPNFGRKSLNEIKE

SEQ ID NO: 134700 - protein, 300 aa, Unknown
  Bacterial polypetide isolated from the Sargasso Sea
LLGKRVDYSGRSVIVAGPNLRLHQCGLPKKMALELFKPFVYGKLEQRELATTIKGAKKLVERETPEVWEVLEEVIREHPVLLNRAPTLHRLGLQAFEPKLIEGKAIQLHPLVCVAFNADFDGDQMAVHVPLTLEAQLEARALMMSTNNILSPADGSPIINPTQDIVLGLYYMTRDNANASGAGRVFSNSDEVLRAYETESLEIHSPIKVRIDHGNGESSLEETTVGRILIWRITPTEVGFKNINDVLNKKLISKLVDISYRKAGLKKTVIFADQLMYLGFDFSTRSGSSIGVNDFVIPKE

SEQ ID NO: 134701 - protein, 296 aa, Unknown
  Bacterial polypetide isolated from the Sargasso Sea
MHPDIIVRNEKRMLQEAVDALLDNGRRGRAITGSNKRPLKSLADMIKGKQGRFRQNLLGKRVDYSGRSVIVVGPALKLHQCGLPKKMALELFKPFIFGKLERRGLATTIKAAKKMVERETAEVWDILAEVIREHPVLLNRAPTLHRLGIQAFEPVLIEGKAIQLHPLVCAAYNADFDGDQMAVHVPLTLEAQLEARTLMMSTNNILAPANGEPIIVPSQDVVLGLYYMTRERINAKGEGMIFADAKEVQRAYDTGQVHLQAKIKVRVVEKLENESGTLKEASEIFDTTVGRVLLYN

SEQ ID NO: 134702 - protein, 321 aa, Unknown
  Bacterial polypetide isolated from the Sargasso Sea
ESVDALFDNGRRGRVITGTEKRPLKSLAEMLKGKQGRFRQNLLGKRVDYSGRSVIVVGPDLKLHECGLPKKMALELFKPFLYARLNKLGLASTIKQAKKLVEKERDEVWDALEIIVREHPVLLNRAPTLHRLGVQAFEPKLIEGDAIQLHPLTCAAFNADFDGDQMAVHVPLSLEAQLEARVLMMSTNNILSPSNGKPIIVPSQDMILGIYYLSQPPYQNKKVEGYFVNTNEILQALENRSIKIHSRVISRFETIDENGNKKYEKYTSTAGRFLLADIIPKNINNKFSLIDRLLPKRTVSEVIDHIFRFSGQKNTVIFCDK

SEQ ID NO: 134703 - protein, 209 aa, Unknown
  Bacterial polypetide isolated from the Sargasso Sea
LLSSIRGAAVTSIQIDGVLHEFTSIKGVREDVTDIVLNVKSLALKSNSEGTKKLVLDAKGPGEIKASDIAPVADVEILNPDLVICNLDENTNFHMEMNVNTGKGYVPADLNKPEEPPLGLIAIDSLYSPVKKVSYSISTAREGKALDYDKLTMEVETNGAISAEDAVAYSARIFQDQLKMFVNFDEPVEAPVKEVSTEPEFNKNLLRKV

SEQ ID NO: 134704 - protein, 244 aa, Unknown
  Bacterial polypetide isolated from the Sargasso Sea
MEVDGPKRLRLNAKGPLSVTADMIELTSDIEIMNPEHHICTLDKGSSLNVEFIVETGKGYVPANSSSQVEMPIGLIPVDALFSPIKQVAYRVENTRVGQQTDYDKLLFDIETDGTVTPEDAIAFGARILTEQLKPFINFDEPEPEIEEDLESVLPFSRNLLKKVDELELSVRSANCLKNDNIVYIGDLVQKTEPEMLRTPNFGRKSLNEIKEVLKMMSLELGMDVEGWPPENIEELAKKHEDPY

SEQ ID NO: 134705 - protein, 419 aa, Unknown
  Bacterial polypetide isolated from the Sargasso Sea
MASPQQIRSWSYGEVKKPETINYRTFKPERDGLFCSKIFGPIKDYECICGKYKRMKHRGVVCEKCGVEVTLSKVRRERMGHIELAAPVAHIWFLKSLPSRLALALDLTLKDLERVLYFESFIVIEPGMTDLEVGQLLTDEEYYEALETWGDEFEAGMGAESIQTLLKELDLESAIKDIQDEMPLTKSEAKLKKFAKRLKLLKSFNESGNRPEWMVLEVLPILPPDLRPLVPLEGGRFATSDLNDLYRRVINRNNRLKRLLDLNAPEIITRNEKRMLQESVDALLDNGRRGRAVTGSNKRPLKSLADMIKGKQGRFRQNLLGKRVDYSGRSVIVVGPTLKLHQCGLPKKMALELFKPFVFGRLQQLELANTIKLAKRMVDREEPEVWDILDEVIREHPVMLNRAPTLHRLGISAFRTCLV

SEQ ID NO: 134706 - protein, 343 aa, Unknown
  Bacterial polypetide isolated from the Sargasso Sea
MENINIIDKNWKTLIKPSKLAITSNDDKSMAKVIAEPLEKGFGQTIGNALRRILLSSIQGAAVTAIQIDGVLHEFSSIKGVREDVTDIVLNVKNLAVKLNTSGSKKLILDATGPKEVKAKDITPVNGVEILNLDQTICNLDEKTKFHMELVVNNGRGYVLAQKNKTEDTPLGLIAIDSLFSPVKKVSYSIDTTREGDALDYDKLTMQVETNGTIPAEDAVAFAARIFQDQLSMFVNFEDPKEIPTQTKSSEPEFNKNLLKRVEELELSVRSMNCLKNDNIIYIGDLVQKSESEMLRTPNFGRKSLNEIKEVLSSMSLYLGMEIPNWPPDNIVELSKKLEESTY

SEQ ID NO: 134707 - protein, 244 aa, Unknown
  Bacterial polypetide isolated from the Sargasso Sea
MQYQIDRIEHQVDEDRAQTGVFLIGPLERGQATTLGNALRRVLMGGLEGSAVTAIRIAGVNHEYATVPGVREDVLDILLNCKQLSINNRSGELEIGRLVIAGPADVKAGDLQFSSQVQVVDVNRPIATVADGHSLELEVHVERGVGYRPVDRHNEDTSAIDLLQIDAVFMPVIRVNFSIDETAVAEGGSARERLKISIVTDGSITPDDALAQAANQLIELFQPLATVTLVEEPRCRTRSPPQKP

SEQ ID NO: 134708 - protein, 513 aa, Unknown
  Bacterial polypetide isolated from the Sargasso Sea
EEYYEALETWGDEFEAGMGAESIQTLLKELDLEAAIKDIQEEMPLTKSEAKLKKYAKRLKLLKSFNESGNRPEWMILEVLPILPPDLRPLVPLEGGRFATSDLNDLYRRVINRNNRLKRLLDLNAPDIITRNEKRMLQESVDALLDNGRRGRAVTGSNKRPLKSLADMIKGKQGRFRQNLLGKRVDYSGRSVIVVGPTLKLHQCGLPKKMALELFKPFVFGKLQQLELANTIKLAKRMVDREEPEVWDILDEVIREHPVMLNRAPTLHRLGIQAFEPVLVEGKAIQLHPLVCKAYNADFDGDQMAVHVPLTLEAQLECRALMMATNNILSPSNGKPIIDPSQDVVLGLYYMSREKINDLGEGRIMSSPDEVNRAYYSGTVGLQAKIKVRLKPNKLDDEPSQIVETTTGRTLLYELLPEGMSFDLVNKTLDSKQISTLIDFVYRKAGLKSTVIFADRLMYMGYEFSTKSGSSIGIDDFVIPDDKQKIVSEAEQEVKDIESQFASGLVTKGEKYN

SEQ ID NO: 134709 - protein, 277 aa, Unknown
  Bacterial polypetide isolated from the Sargasso Sea
HSIDGVLHEFTSIKGVREDVTDIVLNVKSLALKCAAEGTKKLVLDAKGPGEIKASDIASVPDVEILNPDLVICNLDENTHFHMEMNVNTGKGYVPADLNKPEEPPLGLIAIDSLYSPVKKVSYSVSTAREGKALDYDKLTMEVETNGSISAEDAVAYSARIFQDQLKMFINFDEPVEAPVKEVSTEPEFNKNLLRKVDELELSVRSMNCLKNDNIIYIGDLVQKSEGEMLRTPNFGRKSLNEIKEVLTGMSLYLGMEIPNWPPDNIAEMSKKLEESI

SEQ ID NO: 134710 - protein, 339 aa, Unknown
  Bacterial polypetide isolated from the Sargasso Sea
MKKDIKDFFKETAISDSQNFNSIKITLASPEKIKSWTYGEIKKPETINYRTFRPEKDGLFCARIFGPIKDYECLCGKYKRMKFRGIICEKCGVEVTKSNVRRERMGHINLSTPVAHIWFLKSLPSRISLAIDMKLKEVERVLYFESFIVIEPGLTSLKKNQLLNEDELNKYQEEFGEESFTAGIGAEAILEILKSIDLNKEREILLKNINETKSKVAEERSIKRLKLIDSFIETGNKPEWMILTTIPVIPPELRPLVPLDGGRFATSDLNDLYRRVINRNNRLKRLMDLKAPDIIIRNEKRMLQESVDALFDNGRRGRVITGTGKRPLKSLAEMLKGKQ

SEQ ID NO: 134711 - protein, 325 aa, Unknown
  Bacterial polypetide isolated from the Sargasso Sea
MQTSLLKPKIIAVESLGESHAKVVMEPFERGYGHTLGNALRRVLLSSMVGYAPTEVTIAGVVHEYSTLDGVQEDVVNLLLNLKGVVFKLHNRDEVTVTLRKEGEGVVTAGDIELAHDCEVINPDHVIAHLSKGGKLDVQIKVEKGRGYVPGNVRRYGEESAKIIGRIVLDASFSPVRRVSYAVESARVEQRTDLDKLVMNIETNGVISPEEAIRQSARILVDQLSVFAALEGTEATAEAPSRAPQIDPILLRPVDDLELTVRSANCLKAENIYYIGDLIQRTENELLKTPNLGRKSLNEIKEVLASRGLTLGMKLENWPPAGLDK

SEQ ID NO: 134712 - protein, 346 aa, Unknown
  Bacterial polypetide isolated from the Sargasso Sea
MNKELSNIFNQNLGVQNFNSLKISIASPEDVRSWSFGEIKKPETINYRTFKPEKDGLFCSRIFGPVKDYECLCGKYKRMKFRGIICEKCGVEVTLSKVRRDRMGHIELAAPVSHIWFMKSLPSRIATLLDMTIKNLEKVLYFEQFIVVEPGLTDLKKGEIISEEQFIDYQDEYGEDSFSAAIGAEAIEQMLLNIDLEADFKQMKIDLSETKSELKKTKITKRLKLIESFIVSKNKPEWMILRVLPVIPPELRPLVPLDGGRFATSDLNDLYRRVINRNNRLKRLIDLRAPDIIIRNEKRMLQESVDALFDNGRRGRVITFTNKRPLKSLSDMLKGKQGRFRQKLLG

SEQ ID NO: 134713 - protein, 993 aa, Unknown
  Bacterial polypetide isolated from the Sargasso Sea
MKDLTNLFKTNTQTLNFDQIKISVSSPEQIRSWSFGEIKKPETINYRTFKPEREGLFCARIFGPTKDYECLCGKYKRMKFKGITCEKCGVEVTLSKVRRERMAHIELAAPVAHIWFLKSLPSRIGLALDITLKNLEKVLYFESHIVIDPLMSGLNPNQLLNDEELEEAIDQFGEDSFKHGIGAEAVQEILSKIDLVAEIEKLVEESEATSSETKKKKILKRMKVMEGFKNSNIKPEWMVLKVLPVIPPELRPLVPLEGGRFATSDLNDLYRRVINRNNRLKRLLDLRAPDIIVRNEKRMLQESVDALFDNGRRGRVITSTNKRPLKSLSEMLKGKQGRFRQNLLGKRVDYSGRSVIVVGPELKLHQCGLPKKMALELFKPFIYNKLESYGFASTLKSARKMVESERPEVWDILDEVIREHPILLNRAPTLHRLGIQAFEPILIEGKAIQLHPLVCTAFNADFDGDQMAVHIPLSLEAQLEARVLMMSTNNILSPSSGKPIIVPSQDIVLGIYYLSLINEKEEPKKYYSHVGEVEFALENKTIELHTPILYRTKVYNSEKDSFEYKKYTTSAGRVILFKTVPESKNLPFDVINKVLTKKDISNLLDNVYRFTGQKATCIFVDQIMTVGFKYAAKAGISFGKDDLVIPEEKNILIQDTQKLVNSLENQYQEGLITEREKYNKVVGLWSTCTDKVAKAMMKTVSSSKDSQINSVYIMADSGARGSEAQLKQLAGMRGLMARPSGEIIENPITSNFKDGLTVLEYFNSTHGARKGLADTALKTASSGYLTRRLVDVAQDLTITCKDCTCKNGLTVDTIYESGEVSIPLTERVFGRYLADDVKNKKGEVILKNDDYISHEEIELLEKENITSVRIKSPITCGTTHGICAKSYGRDLAKGVPVNTGEAVGIIAAQSIGEPGTQLTMRTFHVGGVASSSAEKSNFESPSDGKVKIKNLRSVTNGSGSEIIINRTTELEIFDNNKTLVSSFRAPYGSTLLV

SEQ ID NO: 134714 - protein, 287 aa, Unknown
  Bacterial polypetide isolated from the Sargasso Sea
MSIINNWQTLIKPSKLKLTNDENSQYKATLVAEPLERGFGLTLGNALRRVLLSSLQGTAVTAIKIDNVLHEFSSIDGVREDVTDIVLNIKSLSLNMHSEGVRKMNLNVTGPGEITAGMINTPSEIDIINPELVICNLDDNTEFNMELTVTKGKGYVAAEHNKPEDSAIGLIPIDSIFSPVKQVSYSIENTREGKVLDYDKLILTIETNGSVTPDDSIAFAARIIQDQLQSFINFEEPEEIQEEPDTLEPQFNKNLLRKVEELELSVRSMNCLRNDNIIYIGDLVQKK

SEQ ID NO: 134715 - protein, 520 aa, Unknown
  Bacterial polypetide isolated from the Sargasso Sea
GAEAILEILKSIDLNSEREKLSKSIKETKSKVTEERNVKRLKLIDSFIETGNKPEWMILTTIPVIPPELRPLVPLDGGRFATSDLNDLYRRVINRNNRLKRLMDLKAPDIIIRNEKRMLQESVDALFDNGRRGRVITGTGKRPLKSLAEMLKGKQGRFRQNLLGKRVDYSGRSVIVVGPDLKLHECGLPKKMALELFKPFLYARLNKLGLASTIKQAKKLVEKERDEVWDALEIIVREHPVLLNRAPTLHRLGVQAFEPKLIEGDAIQLHPLTCAAFNADFDGDQMAVHVPLSLEAQLEARVLMMSTNNILSPSNGKPIIVPSQDMILGIYYLSQPPYQTDKVEGYFVNTDEILQALENKSIKIHSRIISRYETIDEKGNKKLEKYTSTVGRFLLADIIPKNVNNKFSLIDRLLPKRIVSEVIDHIFRFSGQKSTVIFCDKLKDLGFKYAFKAGISFGKDDLVIPENKEILIEETKKLISEYENQYSEGLITRGEKYNKVVDAWSKCTDKVASEMMKRIS

SEQ ID NO: 134716 - protein, 391 aa, Unknown
  Bacterial polypetide isolated from the Sargasso Sea
MKKELTDLFKNSEISEAQNFNSIKITLASPEKIKSWTYGEIKKPETINYRTFRPEKDGLFCARIFGPIKDYECLCGKYKRMKFRGIICEKCGVEVTKSNVRRERMGHINLATPVAHIWFLKSLPSRISLTIDMKLKDVERVLYFENFIVIEPGLTSLKKHQLLNEEELIKYQDQYGEEAFTAGIGAEAILEILKSINLEDEKALLIKTIKETKSKVAEERSIKRLKLIDSFIETGNKPEWMILTVVPVIPPELRPLVPLDGGRFATSDLNDLYRRVINRNNRLKRLIDLKAPDIIVRNEKRMLQESVDALFDNGRRGRVITGTGKRPLKSLAEMLKGKQGRFRQNLLGKRVDYSGRSVIVVGPDLKLHECGLPKKMALELFKPFLYARLNK

SEQ ID NO: 134717 - protein, 343 aa, Unknown
  Bacterial polypetide isolated from the Sargasso Sea
FCARIFGPIKDYECLCGKYKRMKFRGIICEKCGVEVTKSNVRRERMGHINLATPVAHIWFLKSLPSRIALAVDMKLKEIERVLYFENFIVIEPGLTGLQKNQLLNEEELAKYQDEFGDEAFTAGIGAEAVLEMLKNLDLDLERKNLINYIKETKSKVNEERAIKRLKLIESFIETGQKPEWMIMTVVPVIPPELRPLVPLDGGRFATSDLNDLYRRVINRNNRLKRLMDLKAPDIIVRNEKRMLQESVDALFDNGRRGRVITGTGKRPLKSLAEMLKGKQGRFRQNLLGKRVDYSGRSVIVVGPDLKLHECGLPKKMALGLFKPFLYARLNKLGLASTIKQAK

SEQ ID NO: 134718 - protein, 267 aa, Unknown
  Bacterial polypetide isolated from the Sargasso Sea
MEQTEVNSKNWKSLIKPAKLDVQLSDDKAFAKITAEPLEKGYGLTLGNSLRRILLSSIRGTAVTSIQIDGVLHEFTSIKGVREDVTDIVLNVKSLALKSTSDDPKKLILDAKGPGEIKASDITPVADIEILNPDLVICNLDENTKFHMEMSVGTGKGYVSADMNKPEEPPLGLIPIDSLFSPVKKVSYSVSTAREGKALDYDKLTMEVETNGSISAEDAVAYSARIFQDQLGMFVNFDEPQEVIVKEQPSEPEFNKNLLRKVDELEL

SEQ ID NO: 134719 - protein, 311 aa, Unknown
  Bacterial polypetide isolated from the Sargasso Sea
MQYQIDRIDHQTSDDRSQTGTFLIGPLERGQATTLGNSLRRVLMGGLEGSAVTAVRIAGINHEYATIPGVREDVLDILLNCKQLSINSSNPELEIGRLVVSGPMEVKANDIQFSSQVEIVDGEKPIATIQAGHNLELEIHVERGVGYRPVDRRNQETTAIDLLQIDAVFMPVKRVNFTIDETAVAEGGTGRERLKMEVVTDGSTSPDDAIAEAANQLIELFQPLATVTMVEEIPEEPEPSPEAQIPLEELNLSVRAYNCLKRAQVNSVSDLMGFSYEDLLEIKNFGSKSADEVIEALERIGISIPQSRTSV

SEQ ID NO: 134720 - protein, 503 aa, Unknown
  Bacterial polypetide isolated from the Sargasso Sea
NRGSVYDYQDEYGEDSFNAAIGAEAIEQMLLNIDLEADFNQTKNDLLETKSELKKTKLTKRLKLLESFIFSKNKPEWMILRVLPVIPPELRPLVPLDGGRFATSDLNDLYRRVINRNNRLKRLIDLRAPDIIIRNEKRMLQESVDALFDNGRRGRVITSTNKRPLKSLSDMLKGKQGRFRQNLLGKRVDYSGRSVIVVGPNLKLHQCGIPKKMALELFKPFIFHKLDIYGWANTIKAAKKLVEKEDPRVWDILEEVIREHPVLLNRAPTLHRLGIQAFEPVLIEGKSIQLHPLVCTAFNADFDGDQMAVHVPLSLEAQLEARVLMMSTNNILSPSSGKPIIVPSQDIVLGIYYLSIMRNNQKGEGRNFIDTNEILKAVELKDINLHSKINVRIKNFDGSSSKVETTAGRMLLADSLPINSKINFSLINKTLTKKEVSNLIDTVYRFCGQKETVLFADSIMQIGFKYAAIAGISFGKDDLIIPEEKQKLLDETQSKVQEYENQY

SEQ ID NO: 134721 - protein, 343 aa, Unknown
  Bacterial polypetide isolated from the Sargasso Sea
MEVENVNVKNWKSLIKPSKLDVKISDDLTHAKIVAEPLEKGYGLTLGNSLRRILLSSIRGAAVTSIQIDGVLHEFTSIKGVREDVTDIVLNVKSLALKSNSEGTKKLVLDAKGPGEIKASDIAPVADVEILNPDLVICNLDEKTTFHMEMNVNTGKGYVPAELNKPEEPPLGLIAIDSLYSPVKKVSYSVSTAREGKALDYDKLIMEVETNGSISAEDAVAYSARIFQDQLKMFINFDEPVEAPVKEVSTEPEFNKNLLRKVDELELSVRSMNCLKNDNIIYIGDLVQKSEGEMLRTPNFGRKSLNEIKEVLTGMSLYLGMEIPNWPPDNIAEMSKKLEEAIL

SEQ ID NO: 134722 - protein, 324 aa, Unknown
  Bacterial polypetide isolated from the Sargasso Sea
KLEIQQTDDKSHAKIVAEPLEKGYGLTLGNSLRRILLSSIRGTAVTAIQIDGVLHEFTSIKGVREDVTDIVLNVKSLALKSESEGVKKLILDAKGPGEIKASNITSIPDVEILNPDLVICNLDEKTNFHMEMTVGSGKGYVSADMNKPEEPPLGLIPIDSLFSPVKKVSYSISTAREGKALDYDKLIMEVETNGSISAEDAVAYSARIFQDQLGMFINFNEPQEIPVKETSTEPEFNKNLLRKVDELELSVRSMNCLKNDNIIYIGDLVQKSEGEMLRTPNFGRKSLNEIKEVLTGMSLYLGMEIPNWPPENIAELSKKLEESI

SEQ ID NO: 134723 - protein, 234 aa, Unknown
  Bacterial polypetide isolated from the Sargasso Sea
MESTGIFDKNWKALIKPSKLQITSNEDKSVAKVIAEPLEKGFAQTLGNSLRRILLSSIQGAAVTAIQIDGVLHEFSSIKGVREDVTDIVLNVKNLAIKLSSEGPKKIILDAVGPKEVKAKDISLVSDVEIINPEQTICNLDEKTKFHMELIVNTGRGYVLAQKNKSEETPLGMIAIDSLFSPVKRVSYKIDTTREGAALDYDKLVMEVETNGTVPAEDSVAFAARIFQDQLSMF

SEQ ID NO: 134724 - protein, 448 aa, Unknown
  Bacterial polypetide isolated from the Sargasso Sea
MSKELSNLFKNTEITDSQNFNSIKISLASPEKIKSWTYGEIKKPETINYRTFRPEKDGLFCARIFGPIKDYECLCGKYKRMKFRGIICEKCGVEVTKSNVRRERMGHINLATPVAHIWFLKSLPSRIALAVDMKLKEIERVLYFENFIVIEPGLTGLKKNQLLNEEELAKYQDEFGEEAFTAGIGAEAVLEMLKNLDLELEKKNLVNYIKETKSKVNEERAIKRLKLIESFIETGQKPEWMIMTVVPVIPPELRPLVPLDGGRFATSDLNDLYRRVINRNNRLKRLMDLKAPDIIVRNEKRMLQESVDALFDNGRRGRVITGTGKRPLKSLAEMLKGKQGRFRQNLLGKRVDYSGRSVIVVGPDLKLHECGLPKKMALELFKPFLYARLNKLGLASTIKQAKKLVEKETNAVWDALELIVREHPVLLNRAPTLHRLGVQAFEPKLIEG

SEQ ID NO: 134725 - protein, 414 aa, Unknown
  Bacterial polypetide isolated from the Sargasso Sea
MKKEITDIFKNSEISDSQNFNSIKITLASPEKIKSWTYGEIKKPETINYRTFRPEKDGLFCARIFGPIKDYECLCGKYKRMKFRGIICEKCGVEITKSNVRRERMGHINLATPVAHIWFLKSLPSRISLAIDMKLKEVERVLYFEHFIVIEPGLTNLKKNQLLTEEELIKYQDEYGEEAFTAGIGAEAILEILKSINLSEEREKLVKTIKETKSKVAEERSIKRLKLIESFIETGNKPEWMILTVIPVIPPELRPLVPLDGGRFATSDLNDLYRRVINRNNRLKRLIDLKAPDIIVRNEKRMLQESVDALFDNGRRGRVITGTGKRPLKSLAEMLKGKQGRFRQNLLGKRVDYSGRSVIVVGPDLKLHECGLPKKMALELFKPFLYARLNKLGLASTIKQAKKIVEKEREEVWD

SEQ ID NO: 134726 - protein, 582 aa, Unknown
  Bacterial polypetide isolated from the Sargasso Sea
VGHINLVVPVAHIWFFRSLPNKIGYLLGLPTKKLDMIIYYERYVVVQAGLAVDEEGNPLNKMDFLTEEEYLNILEKLPPENQFLEDADPNKFIAKMGAECLIELLSRIDLNELSYELRHKANTETSKQRKTESLKRLQVVESFREANTNRENKPEWMILKAIPVIPPELRPLVPLDGGRFATSDLNDLYRRVIIRNNRLKRLVEIKAPEVILRNEKRMLQESVDSLFDNTRKSSAVKTEANRPLKSLSDSLKGKQGRFRQNLLGKRVDYSARSVIVGGPTLKLYECGIPKDMAAELYKPFIVKKLIERGVVKTVKSAKKIIDKREPLVWDILENVLKGHPVLLNRAPTLHRLGIQAFQPILIEGKAIQVHPLVCTAFNADFDGDQMAVHLPLGPEAILESQLLMLASHNILNPANGSPITVPSQDMVLGLYYMTKKKLSTKDELVKGEGLIFYSHEEVKIAYNENKVDLNASIKLRTKDLDQNGELINKIIETTVGRVMFNEVVPEKAGYINEVLTKKSLRDIIGRILNLTSVPETAEFLDKIKDMGFGYAFRGGLSFSLGDIIIPGEKIDMIGDANKEVTL

SEQ ID NO: 134727 - protein, 686 aa, Unknown
  Bacterial polypetide isolated from the Sargasso Sea
EELENAKEEYGVDSFSAGIGAEAVRKVLERVELEAELELLKSKLAETKAVALSEKLVKRIKIFEAFISSGNRPEWMILTSVPVIPPELRPLVPLDGGRFASSDLNDLYRRVINRNNRLSRLIELRAPDIIIRNEKRMLQESVDALFDNGRRGRVITGTNKRPLKSLAEMLKGKQGRFRQNLLGKRVDYSGRSVIVVGPELKLHQCGLPKKMAIELFKPFIYARLESLGLATTLKQAKKMVEKERPEVWDVLDRVIREHPIILNRAPTLHRLGVQAFEPTLIEGKAIQLHPLVCTAFNADFDGDQMAVHVPLSLEAQLEARVLMMSTNNILNPANGKPVIVPSQDIVLGIYFLSQEKDNEPGQGAIYKDIFEVQQAIENGVTTVHAKIEARINFTNSEGKVDTKRISTTPGRMLLWNLIPQHKDLDPKLVNRLLGKKEVSSLIDTVYRYCGQKDTVIFADQLMALGFHYAYKAGISFGKDDMIIPETKEKMVFETSVQIEKYEKQYNDGLITNREKYNKVIDAWAKCTDRVAQEMMNEISSVKVDETTKRELPINSIYMMANSGARGSAAQMKQLSGMRGLMAKPSGDIIETPIISNFKEGLNVLEYFNSTHGARKGLADTALKTANSGYLTRRLCDVAQDCTISDHDCGTDSGVWISDVVEGGEVIISIADRLLGRFLQKEYCSSQ

SEQ ID NO: 134728 - protein, 296 aa, Unknown
  Bacterial polypetide isolated from the Sargasso Sea
GNSLRRILLSSIRGTAVTAIQIDGVQHEYSSIKGVREDVTDIVLNIKSLALKSNLEGNKKLILDATGPGEIKASQITPVSDIEILNPDLVICNLDENTKFHMELFVSNGKGYVSAEQNKPEEPPLGLIPIDSLFSPVKKVSYSVSTAREGKALDYDKLTMEIETNGSITAEDALAYSARIFQDQLKMFVNFDEPQEVKIQDQPKEPEFNQNLLRKVDELELSVRSMNCLKNDNIIYIGDLVQKSEGEMLRTPNFGRKSLNEIKEVLNGMSLYLGMEIPNWPPDNIAELSKKLEDAI

SEQ ID NO: 134729 - protein, 443 aa, Unknown
  Bacterial polypetide isolated from the Sargasso Sea
KKLVKRLKLVESFIQSGSKPEWMILEVVPVIPPELRPLVPLDGGRFATSDLNDLYRRVINRNNRLKRLLELRAPDIIIRNEKRMLQESVDALFDNGRRGRVITGVNKRPLKSLSDMLKGKQGRFRQNLLGKRVDYSGRSVIVVGPELKLHQCGLPKKMALELFKPFIYAKLELYGMANTIKAAKRMVEKERPEVWDILEEVIREHPVLLNRAPTLHRLGIQAFEPVLIEGKAINLHPLVCTAFNADFDGDQMAVHVPLSLEAQLEARVLMMSTNNILSPSSGKPIIVPSQDIILGLYYLSMITNKAEGEGMIFSSPDEALVALDHQKVDLQAKVKIRVSKYDDQGNKKSELIETTPGRAKISKVLPNHPSVKYEIINKLMTKKEVTNVIDYVYRHCGQKETVIFCDRMMAMGFNHACIAGISFGISDLETPKAKLELVSEAEK

SEQ ID NO: 134730 - protein, 329 aa, Unknown
  Bacterial polypetide isolated from the Sargasso Sea
MQGSVTEFLKPRLVDIEQVNSTRAKVTLEPLERGFGHTLGNALRRILLSSMPGCAVTEVEIDGVLHEYSSKEGVQEDILEILLNLKGLAVTIEGKDEAMLTLSKSGAGPVIAADITHDGDVTIVNPDHVICHLTGNNDISMRIRVERGRGYVPASARAQTEDDDRPIGRLLVDASFSPVARIAYNVEAARVEQRTDLDKLVIDMTTNGTIDPEEAIRRSATILAEQLDAFVELRDVTEPEMKEEKPEFDPILLRPVDDLELTVRSANCLKAEAIHYIGDLVQRTEVELLKTPNLGKKSLTEIKDVLASRGLSLGMRLENWPPASLADDL

SEQ ID NO: 134731 - protein, 321 aa, Unknown
  Bacterial polypetide isolated from the Sargasso Sea
METSVIDLLVPTDIQVDDAENNTSKITLEPLERGFGHTLGNALRRILLSSMPGSAITDVTIDGISHEYSTIEGVREDVIDILLNLKDLPITLIEGNSAVIKLDVSGPCEVTASSFEVPGNVELPDAEHHVASLVDKVSLSLTATVKTGRGYEPADSRGEEETAVGALKVDASFSPVRRVAYSVENARFEKRTDLDKLIVELETNGTLDPKKAIEHAATIMQQQLAAFVNLDAIAEQEAKKDQNDFDPFLMRSIEELELTVRSTNCLKAESIFLIGDLLQRTEFDLLKTPNLGKKSLNEIKDVLASKGFSLGTTLENWPPMG

SEQ ID NO: 134732 - protein, 388 aa, Unknown
  Bacterial polypetide isolated from the Sargasso Sea
QIKIKRYQKRLKLIESLISSGNRPEWMILKVLPILPPDLRPLVPLDGGRFATSDLNDLYRRVINRNNRLQRLLDLNAPDIIVRNEKRMLQKSVDSLLDNGRMGRAVTGSNKRPLKSLADMIKGKQGRFRQNLLGKRVDYSGRSVIVVGPTLKLHQCGIPKKMALELFKPFVFSKLIYQGEASTIKSAKRLVELEGAEIWDILDGVIRQHPVLLNRAPTLHRLGIQAFEPVLVEGKAIQLHPLVCKAFNADFDGDQMAVHVPLSIEAQLESRALMMSSNNILSPANGEPIIVPSQDVVLGLYYMTREKVKDTGEGGIFANIEEVERAFHNDFLGLHAKIKLKISTQNEEKPTEIVETTTGRALFSKIVPDEIPFAVINKTMDSKEISRL

SEQ ID NO: 134733 - protein, 436 aa, Unknown
  Bacterial polypetide isolated from the Sargasso Sea
MKKELSDLFKGSEISEAQNFNSIKISLASPEKIKSWTFGEIKKPETINYRTFRPEKDGLFCARIFGPIKDYECLCGKYKRMKFRGIICEKCGVEVTKSNVRRERMGHINLATPVAHIWFLKSLPSRIALAVDMKLKEIERVLYFENFIVIEPGLTGLQRNQLLNEEELAKYQDEFGEESFTAGIGAEAVLEMLKNLDLELERKNLVSFIKETKSKVNEERAIKRLKLIESFIETGQKPEWMIMTVVPVIPPELRPLVPLDGGRFATSDLNDLYRRVINRNNRLKRLMDLKAPDIIVRNEKRMLQESVDALFDNGRRGRVITGTGKRPLKSLAEMLKGKQGRFRQNLLGKRVDYSGRSVIVVGPDLKLHECGLPKKMALELFKPFLYARLNKLGLASTIKQAKKLVEKETNAVWDALELIVREHPVLLNRAPTLHRL

SEQ ID NO: 134734 - protein, 356 aa, Unknown
  Bacterial polypetide isolated from the Sargasso Sea
VQATSNIQKRRKLIKRLKVIDAFRNSGNRPEWMILEVIPVLPPELRPLVPLDGGRFATSDLNDLYRRVINRNNRLLRLQELKAPDIIIRNERRMLQEAVDALFDNGRRGRLLRGANRRPLKSLSDMLKGKQGRFRQNLLGKRVDYSGRSVIVVGPELQFNQCGIPKKMALELFKPFIYNNLQEKGIVSTIKTAKKMVEEQEPEVWDALEEIVKNHPVILNRAPTLHRLGMQAFMPILVEGKAIRVHPLVCSAFNADFDGDQMAVHVPLSVEAIEEARVLMLSTNNILSPSNGMPIAVPSQDIILGCYYLTKPRGGTKGQGQIFGSSKEVVIAYEHGEVAMQTPITLRVDDALVETT

SEQ ID NO: 134735 - protein, 257 aa, Unknown
  Bacterial polypetide isolated from the Sargasso Sea
MENTNIFDKNWKSLTKPNNLDIQSNDDKSIAKVIAEPLEKGFGQTIGNSLRRILLSSIQGAAVTAIQIDGVLHEFSSIKGVREDVTDIVLNVKNLAIKLNSDGPKKLILDSEGPKEIKAKDITLVSGVEILNPEQTICNLDEKTKFHMELVVKNGRGYVLAQKNKSEDTPLGMIAIDSLFSPVKKVSFKVDSTRAGSALDYDKLVMEVETNGTVAAEDAIAFAARIFQDQLSMFVNFEDPKEVPKPTTSSEPEFNKN

SEQ ID NO: 134736 - protein, 549 aa, Unknown
  Bacterial polypetide isolated from the Sargasso Sea
MSRELSDLFKEKSISESQNFNSIKITLASPEKIKSWTYGEIKKPETINYRTFRPEKDGLFCARIFGPIKDYECLCGKYKRMKFRGIICEKCGVEVTKSNVRRERMGHINLATPVAHIWFLKSLPSRISLVIDMKLKEVEKVLYFENFIVIEPGLTNLRKNQLLSEEELIKYQDQYGEESFSAGIGAEAILEILKSIDLKEEREKLSKSIKETKSKVTEERNVKRLKLIDSFIDTGNKPEWMILTTIPVIPPELRPLVPLDGGRFATSDLNDLYRRVINRNNRLKRLIDLKAPDIIIRNEKRMLQESVDALFDNGRRGRVITGTGKRPLKSLAEMLKGKQGRFRQNLLGKRVDYSGRSVIVVGPDLKLHECGLPKKMALELFKPFLYARLNKLGLASTIKQAKKLVEKERDEVWDALEIIVREHPVLLNRAPTLHRLGVQAFEPKLIEGDAIQLHPLTCAAFNADFDGDQMAVHVPLSLEAQLEARVLMMSTNNILSPSNGKPIIVPSQDMILGIYYLSQPSYQKDKVEGYFVNTDEILQALENGNIKIH

SEQ ID NO: 134737 - protein, 342 aa, Unknown
  Bacterial polypetide isolated from the Sargasso Sea
MEVENVNVKNWKSLIKPSKLDVQISDDLTHAKIVAEPLEKGYGLTLGNSLRRILLSSIRGAAVTSIQIDGVLHEFTSIKGVREDVTDIVLNVKSLALKSNSEGTKKLVLDAKGPGEIKASDITQVADVEILNPDLVICNLDENTSFHMEMNVNTGKGYVPAELNKPEEPPLGLIAIDSLYSPVKKVSYSVSTAREGKALDYDKLIMEVETDGSISAEDAVAYSARIFQDQLKMFINFDEPVEAPVKEVSKEPEFNKNLLRKVDELELSVRSMNCLKNDNIIYIGDLVQKSEGEMLRTPNFGRKSLNEIKEVLTGMSLYLGMEIPNWPPDNIAEMSKKLEEAI

SEQ ID NO: 134738 - protein, 527 aa, Unknown
  Bacterial polypetide isolated from the Sargasso Sea
VIREHPVLLNRAPTLHRLGIQAFEPTLIEGKSIQLHPLVCTAFNADFDGDQMAVHVPLSLEAQLEARVLMMSTNNILSPSSGKPIIVPSQDIVLGIYYLSIQRDNQKGQDRQFVDLNEILKALEYNDISLHTRIKARVKNSEGVYKVFETTPGRMILGNILPIDNRITFDMVNKVLTKKEVSNIIDTVYRYCGQKKTVIFADQIMQIGFKYAALAGISFGKDDLIIPSDKEKLLDETQLKVHQYESQYQDGLITQGEKYNKVVDAWSECTNKVADKMLEVISNPTDSQPINSVYMMAHSGARGSAAQLKQLSGMRGLMAKPSGEIIENPIKSNFKEGLSVLEYFTSTHGARKGLADTALKTASSGYLTRRLVDVAQDAVIREEDCGTSNGVLVEEIVESGNITSPLSERVLGRTPVEKIIDASGDVIVEAGEIISEKHLEEISKIGLRSLKIRSVLTCETEDGICAKCYGRDLARGTEVNIGEAVGIIAAQSIGEPGTQLTMRTFHIGGAASSSVEQSNSISPIGGK

SEQ ID NO: 134739 - protein, 465 aa, Unknown
  Bacterial polypetide isolated from the Sargasso Sea
MKDILNFFKQQNASDDFDSIRVSLASPEMIRSWSFGEVKKPETINYRTFKPERDGLFCAKIFGPIKDYECLCGKYKRLKHRGVVCEKCGVEVTLTKVRRERMGHIELACPVAHIWFLKSLPSRIGLLLDMTLRDIERILYFEAFVVIDPGMTELEKSQLLTDESYYDAIEQYGDEFDAKMGAEAVLQMLKELDLESEITKLKQDLSETKSEAKIKRLTKRLKLIESFIQSGNKPEWMILHTLPVLPPDLRPLVPLDGGRFATSDLNDLYRRVINRNNRLKRLLELNAPDIIVRNEKRMLQEAVDALLDNGRRGRAITGSNKRPLKSLAELIKGKQGRFRQNLLGKRVDYSGRSVIVVGPTLRLHQCGIPKKMALELFKPYIFSKLHTRGLVTTIKAAKKLVEKEGPEVWDILDEVIREHPVLLNRAPTLHRLGIQAFEPILIEGKAIQLHPLVCAAFNADFDGDQ

SEQ ID NO: 134740 - protein, 625 aa, Unknown
  Bacterial polypetide isolated from the Sargasso Sea
KPYGTYTLAVPVVHIWFFKSIPSKLSYILGKSAKQLESVIYYENYLVINPGKSGYKRFELIDEEAFLELDQEFGYDAASQEEREEESYFQASMGGEAIKDALAEMDLLELKHELETISSTTKSKQKREDALKRLKVVKDFAQDRNNKPEWMIVSILPVMPPELRPLVPLEGGRFAASDLNDLYRRIIIRNNRLKQLMDIQAPEVILRNEKRMLQESVDALFDNTKRKTAIRSGSKRPLKSISDMLRGKQGRFRQNLLGKRVDYSGRSVIVVGPELRMTECGIPKNMALELFKPHLIRELIRRDLAATPRSAKLMIENKESFVYEILESVVKDHPVLLNRAPTLHRLGIIAFQPILIDGKAIRVHPLVCSAFNADFDGDQMAVHVPLSIPSQLEARVLMMASQNVLHPASGKPITLPSQDMILGCYYLTRDKKGQIGEGMSFGSIDEVKIAYDNGKVAMHAIINVRHNGIWHKNTTAGRAIFNSIIPDELGYYDEIVSKKKLSFIIGESFVKAGNQRTVQLLDDLKDIGFKTATMSGVSISISDVIIPDAKHDIIDRAEQEVDKIQQRFDRHVLTEGERYNKVIDVWTKATSDVADVMMDGLRSDDQGFNALYISSDSGARGSGDQ

SEQ ID NO: 134741 - protein, 389 aa, Unknown
  Bacterial polypetide isolated from the Sargasso Sea
FKGSEISEAQNFNSIKISLASPEKIKSWTFGEIKKPETINYRTFRPEKDGLFCARIFGPIKDYECLCGKYKRMKFRGIICEKCGVEVTKSNVRRERMGHINLATPVAHIWFLKSLPSRIALAVDMKLKEIERVLYFENFIVIEPGLTGLQKNQLLNEEELAKYQDEFGEESFTAGIGAEAVLEMLKNLDLELERKNLVSFIKETKSKVNEERAIKRLKLIESFIETGQKPEWMIMTVVPVIPPELRPLVPLDGGRFATSDLNDLYRRVINRNNRLKRLMDLKAPDIIVRNEKRMLQESVDALFDNGRRGRVITGTGKRPLKSLAEMLKGKQGRFRQNLLGKRVDYSGRSVIVVGPDLKLHECGLPKKMALELFKPFLYERLNKLGLAST

SEQ ID NO: 134742 - protein, 638 aa, Unknown
  Bacterial polypetide isolated from the Sargasso Sea
KIKSWTYGEIKKPETINYRTFRPEKDGLFCARIFGPTKDYECLCGKYKRMKFRGIICEKCGVEVTKSNVRRERMGHINLATPVAHIWFLKSLPSRIALAVDMKLKEIERVLYFENFIVIEPGLTGLQKNQLLNEEELAKYQDEFGEESFTAGIGAEAVLEMLKNLDLEQERKNLVNFIKETKSKVNEERAIKRLKLVESFIETGQKPEWMIMTVVPVIPPELRPLVPLDGGRFATSDLNDLYRRVINRNNRLKRLMDLKAPDIIVRNEKRMLQESVDALFDNGRRGRVITGTGKRPLKSLAEMLKGKQGRFRQNLLGKRVDYSGRSVIVVGPDLKLHECGLPKKMALELFKPFLYARLNKLGLASTIKQAKKLVEKETNAVWDALELIVREHPVLLNRAPTLHRLGVQAFEPKLIEGDAIELHPLTCAAFNADFDGDQMAVHVPLSLEAQLEARILMLSTNNILSPSNGKPIIVPSQDMILGIYYLSQEPVTDKPAGYFVDSDQIEFALSSGQIKVHSTIISRFETVDDKGNKKFEKYTSTAGRFLLANLLPKNSNIKFSLIDRLLPKKVVSEIIDIVFRFCGQKTTVIFCDKLKDLGFKHAFKAGISFGKDDLVIPESKTQLIDDTKKLIADYETQY

SEQ ID NO: 134743 - protein, 648 aa, Unknown
  Bacterial polypetide isolated from the Sargasso Sea
MRKELSKERRANISEKNFNHIKITLASPEKIKSWSFGEIKKPETINYRTFKPEKDGLFCARIFGPIKDYECLCGKYKRMKFRGIICEKCGVEVTKSNVRRERMGHIDLACPVAHIWFLKSLPSRISLAIDMKLKEVEKILYFESFIVIEPGLTELKKGQLLTEDEYIKAQEKYGEDGFTAGIGAEAVREILLSIDLEAERKKLRESLKSIKSKVTEERTLKRLKLIESFIDSGNKPEWMILTTVPVIPPELRPLVPLDGGRFATSDLNDLYRRVINRNNRLKRLLDLKAPDIIVRNEKRMLQESVDALFDNGRRGRVITGTGKRPLKSLAEMLKGKQGRFRQNLLGKRVDYSGRSVIVVGPELKLHQCGLPKKMALELFKPFLYARLDKLGFATTIKQAKRMVEKQKSEVWDALEHIIREHPVILNRAPTLHRLGVQAFEAKLIEGNAIELHPLVCAAFNADFDGDQMAVHVPLSLEAQIEARVLMMSTNNILSPSNGKPIIVPSQDIVLGIYYLSQHKEDTKTKPVGIFSDVNEIENAIERKDISVHSKIVSVFDTLDKDGNKISEKYTSTAGRFLLSKTLPKNHKIKFELVNKILTKKAVSEVIDTVYRYCGQKETVIFCDRIKDLGFKHAFKAGISFGKNDLIIP

SEQ ID NO: 134744 - protein, 634 aa, Unknown
  Bacterial polypetide isolated from the Sargasso Sea
MTNSNLRTENHFDYVKISIASPQRIMDWGQRTLPNGQVVGEVTKPETINYRTLKPEMDGLFCEKIFGPSKDWECHCGKYKRVRHRGIVCERCGVEVTESRVRRHRMGYIKLAAPVSHVWYLKGIPSYVAILLDIPLRDVEQIVYFNCYVVLDPGDHKELKYKQLLTEDEWLEIEDEIYAEDSTIENEPFVGIGAEALKQLLEDLDLNQVAEELREEITNSKGQKRAKLIKRIRVIDNFIATNAKPEWMVLDAIPVIPPDLRPMVQLDGGRFATSDLNDLYRRVINRNNRLARLQEILAPEIIVRNEKRMLQEAVDALIDNGRRGRTVVGANNRALKSLSDIIEGKQGRFRQNLLGKRVDYSGRSVIVVGPKLKMHQCGLPKEMALELFQPFVIHRLIRQNIVNNIKAAKKLIQKADDEVMQVLQEVIEGHPILLNRAPTLHRLGIQAFEPKLVGGRAIQLHPLVCPAFNADFDGDQMAVHVPLALEAQTEARMLMLASNNILSPATGEPIVTPSQDMVLGSYYLTALQPNYQKPEFGDNKTTFASLEDVIFAFEDKRLCLHEWVWVRFNGEVEDEDEMRSPQKTQELEDGSKLEIWNLRRDRFDSNNNLISRFVLTTVGRVVMNYTIIDSVSKT

SEQ ID NO: 134745 - protein, 397 aa, Unknown
  Bacterial polypetide isolated from the Sargasso Sea
MTDLSKGQMLSEEQYIEALEMYGDDFSAAMGAEAIHDILKDLDLQDNLNQIQEDMEATASQIKIKRYQKRLKLIESLISSGNRPEWMILKVLPILPPDLRPLVPLDGGRFATSDLNDLYRRVINRNNRLQRLLDLNAPDIIVRNEKRMLQKSVDALLDNGRMGRAVTGSNKRPLKSLADMIKGKQGRFRQNLLGKRVDYSGRSVIVVGPTLKLHQCGIPKKMALELFKPFVFSKLIYQGEASTIKSAKRLVELEGPEIWDILDGVIRQHPVLLNRAPTLHRLGIQAFEPVLVEGKAIQLHPLVCKAFNADFDGDQMAVHVPLSIEAQLESRALMMSSNNILSPANGEPIIVPSQDVVLGLYYMTREKVKDTGEGGIFANIEEVERAFHNGFLGLHAK

SEQ ID NO: 134746 - protein, 325 aa, Unknown
  Bacterial polypetide isolated from the Sargasso Sea
MSDFLTPDKIDVQSASPFKARVVLEPLERGFGHTLGNTLRRILLSSMNGSAITEVQIDGVEHEYTTIEGVQEDVIDILLNLKNVSVLMHNQEDAYITLSKQGPCTVKAGDFALGHDIEVANPDHILCTLNEKGAINIEARVTKGRGYVPADALADEEETREIGVLRLDASYSPLKNVAYSVESTRVEQRTDLDKLILELETNGTIDPEEAIRRAATILQQQLAVFVDLDSEVIEEEEEEEEQVDPILLRPVDDLELTVRSANCLKAESIYYIGDLIQRTEVELLKTPNLGKKSLTEIKDVLASRGLALGMRIENWPPSSITSTIG

SEQ ID NO: 134747 - protein, 705 aa, Unknown
  Bacterial polypetide isolated from the Sargasso Sea
MNKEVLDIFNQNKATQQFDHIRIGIASPEKILSWSYGEIKKPETINYRTFKPERDGLFCARIFGPVKDYECLCGKYKRMKFKGIVCEKCGVEVTLSKVRRERMGHIELASPVAHIWFLKSLPSRIGLILDMMLKDLEKVLYFESFIVLDPGLTPLDKLQLLTEDEFIDAQNEFGADNFKAGIGAEAIRLLLEELDLEELSESIRKEIKETTSELKPKKLAKRLKVVEAFKVSGNKPEWMILKVIPVIPPELRPLVPLDGGRFATSDLNDLYRRVINRNNRLRRLMDLRAPDIIIRNEKRMLQESVDALFDNGRRGRVITGSNKRPLKSLSDMLKGKQGRFRQNLLGKRVDYSGRSVIVVGPELKLHQCGLPKKLALELFKPFIYSRLESMGISSTVKQAKRMVEKQTPEVWDILEEVIREHPVLLNRAPTLHRLGIQAFEPVLIEGKAIQLHPLVCAAFNADFDGDQMAVHVPLSLEAQLEARVLMMSTNNILHPANGDPIIVPSQDIILGLYYLSQMKQNEPGEGRHFDDINEIEFALDNRNITLHTKISFRFNTEDGYKKFDTTPGRVLISKELPSNENISFEIVNKLLTKKEISRMIDDVYRHCGQKETVIFCDHIMKLGFKHACNAGISFGKDDMIIPEEKVSLINDTNELVKEFEQQYIDGFITRGEKYNKVVDAWAKCTDRVEDKMMNIISSSQINEDT

SEQ ID NO: 134748 - protein, 894 aa, Unknown
  Bacterial polypetide isolated from the Sargasso Sea
VLPILPPDLRPLVPLDGGRFATSDLNDLYRRVINRNNRLQRLLDLNAPDIIVRNEKRMLQKSVDALLDNGRMGRAVTGSNKRPLKSLADMIKGKQGRFRQNLLGKRVDYSGRSVIVVGPTLKLHQCGIPKKMALELFKPFVFSKLIYQGEASTIKSAKRLVELEGAEIWDILDGVIRQHPILLNRAPTLHRLGIQAFEPVLVEGKAIQLHPLVCKAFNADFDGDQMAVHVPLSIEAQLESRALMMSSNNILSPANGEPIIVPSQDVVLGLYYMTREKVKDKGESGIFANIEEVERAFHNGFLGLHAKIKLKIATQNEEKPTEIVDTTCGRALFSKIVPDDIPFSVTNKTMDSKEISRLINRCYREVGLKATVIFADKLMYLGFEYATKSGVSIALDDMVVPENKEEILTDAESQVKSIQNQFTSGLLTQGERYNKVVDIWSRTNDQVANAMMDKLGNEKVIDSEGKKQDQESFNSIFMMADSGARGSAAQIRQLAGMRGLMAKPDGSIIETPITANFREGLNILQYFISTHGARKGLADTALKTANSGYLTRRLVDVAQDLVVTEEDCGTKNGMTISAVIEGGEVVQNLSDRVLGRVLIEPVKDLENKKNILKAGTLIDESNVHLLEEHGTDSVVVRSPVTCETKYGICIKCYGRDLARGTLVNIGEAVGIIAAQSIGEPGTQLTMRTFHIGGAASSAAAQNSVEVNNDGVATLSNLKTIKNADKNLVATSRSGEIVISDKFGKEKERYKIPYGATIKIKDGKKVSAGDVISTWDPHTHPIITEASGTIRFEDFIDGVTVTEQVDDMTGLTNIIIMDSKKTGTTATVKPRASLVNGRGQPIMFSGTETPIVYTFPPGAIINIQDESKISAGDVIARIPLESSKTSDITGGLPRV

SEQ ID NO: 134749 - protein, 340 aa, Unknown
  Bacterial polypetide isolated from the Sargasso Sea
MKKELTDLFKNSEISEAQNFNSIKISLASPEKIKSWTYGEIKKPETINYRTFRPEKDGLFCARIFGPIKDYECLCGKYKRMKFRGIICEKCGVEVTKSNVRRERMGHINLATPVAHIWFLKSLPSRIALAVDMKLKEVERVLYFENFIVIEPGLTGLQKNQILSEEELAKYQDEYGEEAFTAGIGAEAVLEMLKNLDLELERKNLATYIKETKSKVNEERAIKRLKLIESFIETGQKPEWMIMTVVPVIPPELRPLVPLDGGRFATSDLNDLYRRVINRNNRLKRLMDLKAPDIIVRNEKRMLQESVDALFDNGRRGRVITGTGKRPLKSLAEMLKGKQG

SEQ ID NO: 134750 - protein, 569 aa, Unknown
  Bacterial polypetide isolated from the Sargasso Sea
VLYFDAYIVLDPGDSDLEPLELVEEDQARELEENHPDLILGMGAEAIQTLLRRIELDELENQLQIEMREVNSETRRKRIAKRLNVIGSLLKSGNAVDSMIIDNLPVLPPELRPLVPLEGGRFATSDLNDLYRRVIHRNNRLKRLIELRAPGIIVKNEKRMLQESVDALFDNGRRGRPMVGSNKRPLKSISDMLKGKQGRFRQNLLGKRVDYSGRTVIVVGPELKLHQCGLPKKMALELFKPFIFHKLIDYQEIHTIKNAKKVLEDNPPEVWAILEEVVREHPVLLNRAPTLHRLGIQAFEPILIEGKAIQLHPLVCTAFNADFDGDQMAVHVPLSVEAQLESKILMMSTNNVLSPANGKPVMTPTQDMVLGLYWITRERAGVKGEGKIFSNPGEVQTAFDHGQVDLHAKIKVRLETNNMIPTDLQNETADSSRNLVESTVGRVLLSMVVPDEVPFDSVNIHLKKKHMTDLVDESFRKAGSIKTVKMLDDLKNLGYTYATKAGFSIGMDDMVIPEEKETQLNKAQSEVNLINMQHQDGLITDGERYNQVIDIWARTTEKIAEKMSAGLSD

SEQ ID NO: 134751 - protein, 307 aa, Unknown
  Bacterial polypetide isolated from the Sargasso Sea
MNKEVLDIFNQNKATQQFDHIRIGIASPEKILSWSYGEIKKPETINYRTFKPERDGLFCARIFGPVKDYECLCGKYKRMKFKGIVCEKCGVEVTLSKVRRERMGHIELASPVAHIWFLKSLPSRIGLILDMMLKDLEKVLYFESFIVLDPGLTPLDKLQLLTEDEFIDAQNEFGADNFKAGIGAEAIRLLLEELDLEELSESIRKEIKETTSELKPKKLAKRLKVVEAFKVSGNKPEWMILKVIPVIPPELRPLVPLDGGRFATSDLNDLYRRVINRNNRLRRLMDLRAPDIIIRNEKRMLQESVDA

SEQ ID NO: 134752 - protein, 525 aa, Unknown
  Bacterial polypetide isolated from the Sargasso Sea
AKSKNSETINYRTFIPEKDGLFCARIFGPIKDYECLCGKYKRMKFRGIICEKCGVEVTKSNVRRERMGHINLATPVAHIWFLKSLPSRISLTIDMKLKEVERVLYFENFIVIEPGLTALKKYQLLNEEELVKYQDEYGEEAFSAGIGAEAILEILKSINLEEEKALLIKTINETKSKVAEERSIKRLKLIESFIETGNKPEWMILTVIPVIPPELRPLVPLDGGRFATSDLNDLYRRVINRNNRLKRLIDLKAPDIIIRNEKRMLQESVDALFDNGRRGRVITGTGKRPLKSLAEMLKGKQGRFRQNLLGKRVDYSGRSVIVVGPDLKLHECGLPKKMALELFKPFLYARLNKLGLASTIKQAKKLVEKERDEVWDALEIIVREHPVILNRAPTLHRLGVQAFEPKLIEGDAIELHPLTCAAFNADFDGDQMAVHIPLSLEAQLEARVLMMSTNNILSPSNGKPIIVPSQDMILGIYYLSQPPYQNERVEGYFVDNHEIEHALETGQIKVHSRIVSRFVTIGDDG

SEQ ID NO: 134753 - protein, 709 aa, Unknown
  Bacterial polypetide isolated from the Sargasso Sea
MVGLSDVRESTAGGPAFNAIKISIASPEQILNWSHGEVTKPETINYRTLRPEKDGLFCERLFGPTKDWECFCGKYKRIRYRGVICDRCGVEVTRAKVRRERMAHIQLAAPVAHIWFSKTTPSRLGLLLDLSPRNLERVLYFAQHIVISVDEEYKQQLTEESEAEHERNQRLLTESFEEQISVLEAALGDTEEGSDDHKTVAGQIESVRNQYDEQMGIYDDTHQKLIDDFADLQPLRLLTESKYRELKDSYGDVFEAGMGAEAIQEILRHIDLNVLKEELALEMKSTSGQKRKKAIKRLRVVEAFRGSGNSVADMIMSVLPVLPPELRPMVQLDGGRFATSDLNDLYRRVINRNNRLKRLIELGAPDIIIRNEKRMLQESVDALIDNGRRGRPIQGSHNHKLKSLSDLLRGKQGRFRQNLLGKRVDYSGRSVIVVGPELRMDQCGLPKKMALELFKPFVMHKLVLLGVSPNIKSAKRMVERARPEVWDILEDVIKDRPVMLNRAPTLHRLGIQAFMPILIEGNAIQLHPLVCTAFNADFDGDQMAAHVPLSRLAVQEAKASMLSTNNMLSPASGDPQVAPTLDMVMGCYYLTQMEDAAHGEGTTFFDSDEARIAHASDIIDLRAKIKLSSSPKLGLETDEETTLGRILFNEILPDSIPFRNIVMDRGAIRDLTADLYLNLTNDETSQALDAVKDIGFRYATVSGTTIANK

SEQ ID NO: 134754 - protein, 229 aa, Unknown
  Bacterial polypetide isolated from the Sargasso Sea
MGEIKASDIAPVADVEILNPDLVICNLDENTNFHMEMNVNTGKGYVPADLNKPEEPPLGLIAIDSLYSPVKKVSYSISTAREGKALDYDKLTMEVETNGAISAEDAVAYSARIFQDQLKMFVNFDEPVEAPVKEVSTEPEFNKNLLRKVDELELSVRSMNCLKNDNIIYIGDLVQKSEGEMLRTPNFGRKSLNEIKEVLTGMSLYLGMEIPNWPPDNIAEMSKKLEEAI

SEQ ID NO: 134755 - protein, 292 aa, Unknown
  Bacterial polypetide isolated from the Sargasso Sea
MKNLLNIFNQKPFAEEFDHIRIGLSSPEMIRSWSYGEVKKPETINYRTFRPERDGLFCAKIFGPVKDYECLCGKYKRLKHRGVVCEKCGVEVTQSKVRRERMGHLELASPVAHIWFLKSLPSRIGLLLDMTLREIERVLYFEAYLVTDPGMTDLTKGQMLSEEQYIEALEMYGDDFSAAMGAESIHDILKDLDLQDSLNQIQEDMEATASQIKIKRYQKRLKLIESLISSGNRPEWMILKVLPILPPDLRPLVPLDGGRFATSDLNDLYRRVINRNNRLQKITRSKCSRISC

SEQ ID NO: 134756 - protein, 1031 aa, Unknown
  Bacterial polypetide isolated from the Sargasso Sea
MSARDAAKIPKRIDSIRFTLMDPNEIRKMSSVEVKTADTYKDDGHAFKQGLMDPKMGVIDPGIRCETCGNKHEECPSHFGHIALELPVMHIGFTGLIKTCLKTTCNSCSKALLHDAPQTHPTDPEKSEQDYYRDRVNDIILKHGVGGREFKKIIKDIENICAGPKRAICMHCGAEQGKIILDKPTTFKEKKADKGEHKLNARDIREWLEKIPDEHLIFLGMEKDVSRPEWTIMKVLPVPPITVRPSITLESGDRSEDDLTHKLVDVLRINQRLRENRDSGAPQLIVEDLWELLQYHCTTYFDNQTSGIPPARHRSGRPLKTLSQRLKGKEGRFRSNLSGKRVNFCARTVISPDPNLGINEVGVPVKTAKELTVPIRATSRNREQLRQMILRGPDVHPGVNYIIRGDRFRVRITDRTKYIWAGFRCLNPDCHCGSEEEPYMGYRPDLNEVLPAPNFLPGLVLKEQMRRDPMTDELLPEWSVDLDRTLSNLRGEGEDGNPLAEDDPDAAIHHRWKWEVENPDEYLPDHLEVKCPHCGSPDIEDEHGNLYPTEVEDRLSTYDRDGNPRPGVVVERHLIDGDVTIFNRQPSLHRMSMLVHEIRVMEGKTFRFNLADCTPYNADFDGDEMNLHVIQSEEARAEARILMRVQEHIISPRYGGSVIGGIHDHITGAYLLTHGEAFLPMPVAMDVLSSIGWEGEIPPSVERNGQTGLLGNDVFSLLVKGGFTLNFKNRAGEEVKVSQGDVSGSIDKRGIGAEDGRLLDAVVQTHGTDRGADFINKMTKMTIAICTAMGFTTGIDDEDLPPEAKEEIVRINSEASASVDSELEKFGKDGRKYEARPGRTPHETLEENILTILDAAKAETGNVAKAQLGDDNSAVLMATSGARGSMDNLAMMAGSIGQPKVRGKRLERGYQDRVLSHFPRKVKGSKEKGFVSSSFKRGLEPTEFFMLSVSGRESLVDTAVRTSKSGYMQRRLINAMDDLKVSNDTKASVRNTANRIIQFEYGEDGTDPARSRKGSPFDVDQVLNDALGGAN

SEQ ID NO: 134757 - protein, 1065 aa, Unknown
  Bacterial polypetide isolated from the Sargasso Sea
KRPLKSLAEMLKGKQGRFRQNLLGKRVDYSGRSVIVVGPDLKLHECGLPKKMALELFKPFLYARLNKLGLASTIKQAKKLVERERNEVWDALEIIVREHPVILNRAPTLHRLGVQAFEPKLIEGDAIELHPLTCAAFNADFDGDQMAVHIPLSLEAQLEARVLMMSTNNILSPSNGKPIIVPSQDMILGIYYLSQPPYQTEKVEGYFVNNSEIEHALENGQIKVHSRIVSRFSTIDENGTEKFEKHISTAGRFLLANLLPKNVNNKFSLVDRLLPKKVVSEIIDHVFRFCGQKSTVIFCDKLKDLGFKHAFKAGISFGKDDLVIPENKQQLIEETKKLITDYENQYSEGLITRGEKYNKVVDAWSKCTDRVAAEMMKRISATEITKDGLKINSVFMMADSGARGSAAQMKQLAGMRGLIAKPSGEIIESPITSNFKEGLTALEYFNSTHGARKGLADTALKTANSGYLTRRLCDVAQDLTITKKDCDCGKAGSINLTEIIEGGNVIVGLSERALGRVAANDIKNPVSGEKIIKKGEMIDESGCEKIDAAGVKSIDVYSVITCGSREGVCAMSYGRDLSRGKIVHVGEAIGMISAQSIGEPGTQLTMRTFHVGGTASIKQESQIVTKTDGVLKVINTNLLEDSKKNMVVMGRNTQLSIEDENGLQTAVYKVPYGSKLFLQNGDKVKKNTKICEWDPYTTPVIAEKNGTANYVDLIDGVSLSETLDDATGISTKTVIDWKNQSKNTDLKPRITLRDDKGNVIKKADDNEARYYLVPDSILSVKDGQKIFAGDVIARLPKETSKTKDITGGLPRVAELFEARKAKDSAIIAENNGKVIFGKEVRGKQRVSIVSDDGVSSNYLIPKGKHINFNQGEKISKGEYLLDGQPLPHDILRILGIEELTEYFVNQVQEVYRLQGVIINDKHIETILRQMLKKIEVKESGDSNLLPGEIIDRIKFDDMNTNLKNEGKKPAKGERVLMGITKASLQTESFISAASFQETTRVLTDAAIKGKIDKLSGLKENVIVGRLVPAGTGSVKNLWNKKALEDDKKFVSEQEKLETPESQPNQ

SEQ ID NO: 134758 - protein, 342 aa, Unknown
  Bacterial polypetide isolated from the Sargasso Sea
MEVENVNIKNWKSLIKPSKLDVQISDDLTHAKIVAEPLEKGYGLTLGNSLRRILLSSIRGAAVTSIQIDGVLHEFTSIKGVREDVTDIVLNVKSLALKCNSEGTKKLILDAKGPGEIKASDIAPVADVEILNPELVICNLDEKTSFHMEMNVSTGKGYVPADLNKPEEPPLGLIAIDSLYSPVKKVSFSVSTAREGKALDYDKLIMEVETNGSISAEDAVAYSARIFQDQLKMFINFDEPVEAPVKEVSTEPEFNKNLLRKVDELELSVRSMNCLKNDNIIYIGDLVQKSEGEMLRTPNFGRKSLNEIKEVLTGMSLYLGMEIPNWPPDNIAEMSKKLEEAI

SEQ ID NO: 134759 - protein, 339 aa, Unknown
  Bacterial polypetide isolated from the Sargasso Sea
MTDCYGRLSFGPVNPGQGLTIGNALRRILLNDLPGIAVIGAEIDGVQSEFSSLPGIRESVIEIFLNLRELILSPIDSSTKGAKSTKPFTFAKLKSNLNIGSFPYVITAGDLDIGDYCLVDPNQPIATVLSKAAADNFKLTVFIGQGRSYQSWKKLPGVPQLMDQRFFESFESNQTNQRSVTFPIDAIFMPIKQVNFSIQEHSIDGEYIYFEIWTNGSIHPFDAMKSAAKVCMKLMTSCLTRLTDERIYAEELKLPETPNFVEVNYKKIESDTDLNEVLIEQLELSLRAYNCLKRANILTLADLSKQSFRDLMKLRNFGQKSADEVRGALSTYGIELKED

SEQ ID NO: 134760 - protein, 223 aa, Unknown
  Bacterial polypetide isolated from the Sargasso Sea
MQISVIDLLVPTEIQVENVSDTVSKVTLEPLERGFGHTLGNALRRILLSSMPGAAVTDVVIDGISHEYSTIEGVREDVIDILLNLKDMPVKLIEGNEAELKLSVDGPCEVTSSSFEAPGNVELTDADHHVVSLVDKIKLNMSVFVRTGRGYEPADIRDDENNTVGGLKVDASFSPVKRVSYSVENARFEKRTDLDKLILELETDGTIDAKMAIEHSATIMQQQ

SEQ ID NO: 134761 - protein, 1069 aa, Unknown
  Bacterial polypetide isolated from the Sargasso Sea
MGKNNEIITQKKFNTISIGLASPEVILGNSRGEVLKPETINYRTHKPERDGLFCERIFGPVKDFECACGKYKRIRYKGIVCDRCGVEVTEKKVRRDRVGHISLVVPVAHIWYFRSLPNKIGYLLGLASKKLDMIIYYERYVVIQPGEAKNSEGEPINKMDFLTEEEYLSIMETLPADNQFLDDSDEKKFIAKMGAECLIELLSRIDLEELSYELRHKANNETSKQRKTEALKRLQVVESFREANQRKENLPEWMIVKVIPVIPPELRPLVPLDGGRFATSDLNDLYRRVIIRNNRLKRLVEIKAPEVILRNEKRMLQESVDSLFDNTRKSSAVKTESNRPLKSLSDSLKGKQGRFRQNLLGKRVDYSARSVIVVGPELKLYECGLPKDMAAELYKPFIIRKLIERGIVKTVKSAKKIIDRREPIVWDILENVLKGHPVLLNRAPTLHRLGIQAFQPKLIEGKAIQLHPLTCTAFNADFDGDQMAVHLPLGPEAILEAQLLMLGSHNILNPANGSPITVPSQDMVLGLYYMTKSRKSDDKKKLVGEGLTFYSSEEVKMAYNEEKVELNAIIKCKIPSYDNELDKTTYKIIETTPGRVFFNEVVPEKAGYFNEVLTKKNLREIIGKILLSTSVPETSEFLDEIKDLGYSFAFKGGLSFSLGDIIIPEKKQTLIDNANTQVDGIMNNYNMGLITNNERYNQVIDVWTSANATLTELAMKQISEDQQGFNSVYMMLDSGARGSKEQIRQLTGMRGLMAKPKKSNIGGGEIIENPILSNFKEGLSILEYFISTHGARKGLADTALKTADAGYLTRRLVDVSQDVIVNEFDCGTLRGIEVSALKKNEEIVETLGERILGRVSLNQIIDPLTNEVILEAGMQIDEEIVKKIESTSIDSVEVRSPLTCETKKGICVNCYGRNLSTGKLVQIGEAVGVVAAQSIGEPGTQLTLRTFHVGGVAGNISEENSLISKFDGIAEIDDLKTVKVKDGDGNNNNIVISRTSEIRIVDKTTKNVLTTANIPYGSYISIRNGQNLKKGDLICNWDPFNGVIVSEFSGKIVYENIEIGKTFQVEIDE

SEQ ID NO: 134762 - protein, 681 aa, Unknown
  Bacterial polypetide isolated from the Sargasso Sea
YECLCGKYKRMKFRGIICEKCGVEVTKSNVRRERMGHINLATPVAHIWFLKSLPSRIALAVDMKLKEVERVLYFENFIVIEPGLTGLKKNQLLNEEELAKYQDEFGEEAFSAGIGAEAVLEMLKSLDLELERKNLVSYIKETKSKVNEERAIKRLKLIESFIETGQKPEWMIMTVVPVIPPELRPLVPLDGGRFATSDLNDLYRRVINRNNRLKRLMDLKAPDIIVRNEKRMLQESVDALFDNGRRGRVITGTGKRPLKSLAEMLKGKQGRFRQNLLGKRVDYSGRSVIVVGPDLKLHECGLPKKMALELFKPFLYARLNKLGLASTIKQAKKLVEKETNAVWDALELIVREHPVLLNRAPTLHRLGVQAFEPKLIEGDAIELHPLTCAAFNADFDGDQMAVHVPLSLEAQLEARILMLSTNNILSPSNGKPIIVPSQDMILGIYYLSQEPLTDKPAGYFVDADQIEFALSSGEIKVHSTIISRFETVDNNGNKKFEKYTSTAGRFLLANLLPKNFNIKFSLIDRLLPKKTVSEIIDIVFRFCGQKTTVIFCDKLKDLGFKHAFKAGISFGKDDLVIPESKNKLIDDTKKLIADYETQYSEGLITRGEKYNKVVDAWSKCTDQVASEMMKGISATEKTSDGLKINSVFMMADSGARGSAAQMKQLAGMRGLIAKPSGEIMK

SEQ ID NO: 134763 - protein, 420 aa, Unknown
  Bacterial polypetide isolated from the Sargasso Sea
NKIMGLFGEIKKPETINYRTFRPEKDGLFCARIFGPVKDYECLCGKYKRMKFRGIICEKCGVEITKSNVRRERMGHIDLACPVAHIWFLKSLPSRIALAIDMKLKDVEKVLYFENFIVVEPGLTSLKKGQLLTEEALIKAQEEFGEDAFTAGIGAESVRDILISLDLEKEQKKLRDSLKEIKSKVTEERTIKRLKLIESFINSGNKPEWMILTTIPVIPPELRPLVPLDGGRFATSDLNDLYRRVINRNNRLKRLLDLKAPDIIIRNEKRMLQESVDALFDNGRRGRVITGTGKRPLKSLAEMLKGKQGRFRQNLLGKRVDYSGRSVIVVGPELKLHECGLPKKMALELFKPFLYARLDKLGLATTIKQAKRLVEKEKSEVWDALEYIIREHPVILNRAPTIHRLGVQAFEAKLIEGNAI

SEQ ID NO: 134764 - protein, 416 aa, Unknown
  Bacterial polypetide isolated from the Sargasso Sea
FIETGNKPEWMILTTIPVIPPELRPLVPLDGGRFATSDLNDLYRRVINRNNRLKRLIDLKAPDIIIRNEKRMLQESVDALFDNGRRGRVITGTGKRPLKSLAEMLKGKQGRFRQNLLGKRVDYSGRSVIVVGPDLKLHECGLPKKMALELFKPFLYARLNKLGLASTIKQAKKLVEKERDEVWDALEIIVREHPVLLNRAPTLHRLGVQAFEPKLIEGDAIQLHPLTCAAFNADFDGDQMAVHVPLSLEAQLEARVLMMSTNNILSPSNGKPIIVPSQDMILGIYYLSQPPHQSEKIEGYFVNTDEILQALENGSIKIHSRIISRFETVDEKGSKKLETHTSTAGRFLLANIIPKNINNKFSLVDRLLPKRVVSEVIDHIFRFSGQKNTVIFCDKLKDLGFKYAFKAGISLEKTIW

SEQ ID NO: 134765 - protein, 1136 aa, Unknown
  Bacterial polypetide isolated from the Sargasso Sea
MEKVFDELSISLATTDQIRSWSFGEVKKPETINYRTLKPEKEGLFDERIFGPTKDWECSCGRYKRIRYRGIICERCGVEVTRREVRRERMGHIELAAPVTHIWYFKGVPSRLGYFLDMSPKELEKVIYFAAYLVVSIDDKKRTKDLKELEEAVVAEKEIVEEDFEDWEKKRIKQMKVELKAMEDGKVPEAEIKERNKEIEKEIKQKKLKSDAEIKVIEEAFQTLKTLKPKTLIENDTLWREMIDKYDEYFTGGMGAEAVRELVGLVDLKSEMEKLKSDLDSKSAQRRQRAIQRMKVIKPFSDGKNPPEAMILEVIPVIPPELRPMVQLDGGRFATSDLNDLYRRLINRNNRLKKLLELGAPEIIISNEKRMLQESVDALFDNGRRGRAVAGAGGRGLKSLSDMLKGKQGRFRQNLLGKRVDYSARSVIVVGPHLDLQQCGLPKMMALELFKPFVMKRLVELGLSQNIKSAKRMVERSRAQVWDVLAEVIEEHPVLLNRAPTLHRLGIQAFEPILVEGKAIQVHPLVCEAFNADFDGDQMAVHVPLSAEAQAEAKVLMLSTNNVLSPASGNPIVSPSQDMVIGLYYITECHEDLNKATSSYVDVNEALLAYEAGHIKLHTPIKVRVGNLAGDPEIHENIKNRFSELIGDSPVNGDELINTTLGITIFNSIMPEDFPYIQSTVRKPEMKKIISEVIERYNKAELRKFLDLMKEIGFKYGSKAGLSVAMTDVKTPPTKNEILEKYEKEAEKVQKQYKDDVITEAERKQKIIEIWNEATDQVQYAMSAELESEQFNPVDMMVKSGARGNMMQVRQLAGMRGLVANPKGDIIERPIKSNFREGMSVLEYFISTHGARKGLADTALRTADSGYLTRRLVDVAAGIVIKEVGDKNIDWKGTTKKIKDENGNVSKYLHSSIFGRVLSEDIKKNKKILEYGEKKKLNKGTFIDAEALDAIAKSGVDSINVLSPFNSLDPESMEPLCYGFSLATGVPVEEGEAVGIISAQSIGEPGTQLTMRTFHTGGVVGLDITSGLPRIVELFEARTPKGKAVLSLINGKIKSIDTTEEGNRIVTIQNEKETIEELVLRRQTLLVNQGDKVEAGQSLTTGPKDPKEVLQINGVRTCQEYLVDEVQKTYRDQGVK

SEQ ID NO: 134766 - protein, 292 aa, Unknown
  Bacterial polypetide isolated from the Sargasso Sea
GVFLIGPLERGQATTLGNSLRRVLMGGLEGSAVTAIRIAGVNHEYATIPGVREDVLDILLNCKQLSVNSRSSEMEIGRLVIAGPAEVKAKDLQFSSQVQVVDGDRPIATVADGHSIELEVHVERGIGYRPVDRNNEDLSAIDLLQIDAVFMPVQRVNFTIDETAVAEGGSARERLRMEIVTDGSITPDDALAQSANQLIELFQPLATVTLVEEPGIEPEPSTEAQIPLEELNLSVRAYNCLKRAQVNSVSDLMGFSYEDLLEIKNFGSKSADEVIEALERIGISIPQSRTTA

SEQ ID NO: 134767 - protein, 1013 aa, Unknown
  Bacterial polypetide isolated from the Sargasso Sea
PEDPKNYSAVRIKLATAEDVISWSYGEVRSSETINYRTFKPERDGLFCGKIFGPVHDYECICGKYKRMKHRGITCEKCGVEVIESKVRRERMGNIKLASPVSHVWFLKGVPSRIATILEMTLRDLERVLYFDAYIVVDPGSSELEKNSLVEEEDYREMLDKFPDLVLGMGAETVKELLMDIDLPSLNEHLRKEMREVTSETRRKRIHKRLNLVSALVDSGNTASSMIIENLPVLPPELRPLVPLEGGRFATSDLNDLYRRVIHRNNRLKRLIELRAPGIIVKNEKRMLQESVDALFDNGRRGRPMVGSNKRPLKSLSDMLKGKQGRFRQNLLGKRVDYSGRTVIVVGPDLKLHQCGLPKKMALELFKPFIFHRLIDYQEVHTIKNAKRKLEENDPRVWAILEEVVKEHPIMLNRAPTLHRLGIQAFEPVLIEGKAIQLHPLVCTAFNADFDGDQMAVHVPLSVEAQLEAKILMLSTNNVLSPANGKPLMSPTQDMVLGLYWITREREGMKGEGKIFSNKSDVSSAYEHGQVDLHAKIKVRIGRDVAETTVGRTLLSLVIPEEVPFKSINRHLKKKQMIELIDASYRNAGSVKTVTMLDELKRIGYQYATEAGFSISMDDMVIPEEKSALLLQAQNKVNEINTQHQDGLITDGERYNQVIDIWARTTERIAEKMSDGLTNEIEDESGNRKVNSIFMMADSGARGSKQQMKQLAGMRGLMAKPSGEIIETPIHANFREGLNVLEYFISTHGARKGLADTALKTANSGYLTRRLVDVAQDAVVLEHDCGTLDGIEMTALIESGEIIEQLGDRVLGRVLLEDLMDPDDDNNVLVEAGEEITESVKEIIDNSRIEKIRIRSVFTCSTERGVCQLCYGRDLARGKLVSLGETVGVIAAQSIGEPGTQLTMRTFHIGGTASRLAEQNTWEAKFSGKLRFDDLKEVQDARGNWVVLGRRGEAIIVDDNGRDLERRPSTYRDSYSSCFWGRSETGRIDCGMGPFLDSNFNGRFGLRSVSGYF

SEQ ID NO: 134768 - protein, 342 aa, Unknown
  Bacterial polypetide isolated from the Sargasso Sea
MEIENVNVKNWKSLIKPSKLDVQISDDLTHAKIVAEPLEKGYGLTLGNSLRRILLSSIRGAAVTSIQIDGVLHEFTSIKGVREDVTDIVLNVKSLALKSNSEGTKKLILDAKGPGEIKASDIAPVADVEILNPDLVICNLDENTTFHMEMNVNTGKGYVPAELNKPEEPPLGLIAIDSLYSPVKKVSYSVSTAREGKALDYDKLIMEVETNGSISAEDAVAYSARIFQDQLKMFINFDEPVEAPVKEVSTEPEFNKNLLRKVDELELSVRSMNCLKNDNIIYIGDLVQKSEGEMLRTPNFGRKSLNEIKEVLTGMSLYLGMEIPNWPPDNIAEMSKKLEEAI

SEQ ID NO: 134769 - protein, 324 aa, Unknown
  Bacterial polypetide isolated from the Sargasso Sea
MIKDFLTPKEILVEEVDSNNSKIVLEPLERGFGHTLGNALRRIILSSIPGAAVSEAKINGVLHEFGSIDGVKEDVINILLNLKGLSVRLSDQEEVEISVNKSGSGDIKGSDFELPAGVEIVNPDHVVATLADKGSLEMTAKVTKGRGYVPVDIIALAESEDTEVGSLKIDASYSPIKKVSYSVENARVENRTDLDKLILEVETNGTIDPEEIVRLAATILQRQLMAFAELGFETDEPEEDETPPVDPIMLRPVDELELTVRSANCLKVEKIHYIGDLVTRKESDLLRTPNLGRKSLNEIKEVLAARGLSLGLELENWPPSNVEG

SEQ ID NO: 134770 - protein, 554 aa, Unknown
  Bacterial polypetide isolated from the Sargasso Sea
DYECICGKYKRMKHRGVVCEKCGVEVTLAKVRRERMGHIELAAPVAHIWFLKSLPSRIALLLDMTLRELERILYFESFVVTDPGMTDLESCQILDEEEYYEALENYGEEFRAGMGAEAVKTLLMEMDLEEEIALIEQQMTETKSEAKIKKLSKRMKIIKSFSNSSNKPEWMILDVLPVLPPDLRPLVPLEGGRFATSDLNDLYRRVINRNNRLKRLMELNAPEIIVRNEKRMLQESVDALLDNGRRGRAITGSNKRPLKSLADMIKGKQGRFRQNLLGKRVDYSGRSVIVVGPTLKLHQCGLPKKMALELFKPFVFGKLQNLELATTIKGAKRMVEREEPVVWDILADVIKEHPILLNRAPTLHRLGIQAFEPLLIEGKAIQLHPLVCKAYNADFDGDQMAVHVPLTLESQLECRALLMASNNILSPSNGRPIIDPSQDVVLGIYYMTREKINAKGEGSIFADIKEVSRAFESDAVELQAKVKVRIKNNDGQSEIKDTTVGRALLYQISPDGLNFEQFNKTLTSKGISDLINTCYRDCGLKDTVIFADQLMYQG

SEQ ID NO: 134771 - protein, 423 aa, Unknown
  Bacterial polypetide isolated from the Sargasso Sea
MSKNKELITQKKFNTISIGLASPEVILGNSRGEVLKPETINYRTHKPERDGLFCERIFGPVKDYECACGKYKRIRYKGIVCDRCGVEVTEKKVRRDRVGHINLVVPVAHIWYFKSLPNKIGYLLGLPSKKLDMIIYYERYVVIQPGEAKSEEGEVLNKMDFLTEEEYLSIMESLPADNQFLEDSDERKFIAKMGAECLIELLSRIDLESLSYELRHKANNETSKQRKTEALKRLQVVESFREGNERKENLPEWMVVKVIPVIPPELRPLVPLDGGRFATSDLNDLYRRVIIRNNRLKRLVEIKAPEVILRNEKRMLQESVDSLFDNTRKASAVKTESNRPLKSLSDSLKGKQGRFRQNLLGKRVDYSARSVIVVGPELKLYECGLPKDMAAELYKPFIIRKLIERGIVKTVKSAKKIIDRREP

SEQ ID NO: 134772 - protein, 389 aa, Unknown
  Bacterial polypetide isolated from the Sargasso Sea
RRGRVITGTNKRPLKSLADMIKGKGGRFRQNLLGKRVDYSGRSVIVAGPNLKLHQCGLPKKMALELFKPFVYGKLENRELATTIKGAKKLVERETPEVWEVLEEVIREHPVLLNRAPTLHRLGLQAFEPKLIEGKAIQLHPLVCVAFNADFDGDQMAVHVPLTIEAQLEARALMMSTNNILSPADGSPIINPTQDVVLGLYYMTRDNANASGEGRVFSNPDEVLRAYETETLEIHSPIKVRITHEDGETTIEETTVGRTLIWRITPHEVGFHNINNVLNKKSVSKLVDTSYRKAGLKKTVIFADQLMYLGFDFSTRSGSSIGVNDFVIPEEKANIIDSSEKEVKAIEKQFDSGLVTRGERYNKVIDIWSRANEQVAKAMMEKISSETVT

SEQ ID NO: 134773 - protein, 1234 aa, Unknown
  Bacterial polypetide isolated from the Sargasso Sea
IERVLYFEAYLVTDPGMTDLTKGQMLSEEQYIEALEMYGDDFSAAMGAESIHDILKDLDLQDSLNQIQEDMEATASQIKIKRYQKRLKLIESLISSGNRPEWMILKVLPILPPDLRPLVPLDGGRFATSDLNDLYRRVINRNNRLQRLLDLNAPDIIVRNEKRMLQKSVDSLLDNGRMGRAVTGSNKRPLKSLADMIKGKQGRFRQNLLGKRVDYSGRSVIVVGPTLKLHQCGIPKKMALELFKPFVFSKLIYQGEASTIKSAKRLVELEGAEIWDILDGVIRQHPVLLNRAPTLHRLGIQAFEPVLVEGKAIQLHPLVCKAFNADFDGDQMAVHVPLSIEAQLESRALMMSSNNILSPANGEPIIVPSQDVVLGLYYMTREKVKDTGEGGIFANIEEVERAFHNGFLGLHAKIKLKISTQNEEKPTEIVETTTGRALFSKIVPDEIPFVVINKTMDSKEISRLINRCYREVGLKATVIFADKLMYLGFEYATKSGVSIALDDMVVPENKEEILSDAESQVKSIQNQFTSGLLTQGERYNKVVDIWSRTNDQVANAMMDKLGKEQVTDSKGKKQDQESFNSIFMMADSGARGSAAQIRQLAGMRGLMAKPDGSIIETPITANFREGLNILQYFISTHGARKGLADTALKTANSGYLTRRLVDVAQDLVVTEEDCGTKNGMTISAVIEGGEVVQNLSDRVLGRVLVEPVKDLENKKNVLKAGTLIDESNVHLLEENGTDSVVVRSPVTCETKYGICIKCYGRDLARGTLVNIGEAVGIIAAQSIGEPGTQLTMRTFHIGGAASSAAAQNSVEVNNDGVASLFNLKTIKNADKNLVATSRSGEIIISDKFGKEKERYKIPYGATINIKDGQKVTAGDVISTWDPHTHPIITEASGTIKFEDFIDGVTVTEQVDEMTGLSNIIIMDSKKTGSTTTVKPKASLFNGRGQPIMFSGTDTPIVYTFPPGAIVNIQDGSKINAGDVIARIPLESSKTSDITGGLPRVADLFEARKPKDAAILAKHSGITSFGKETKGKVRLVITDEDGESHEELIPKTRTLNIFEGETIQKGEIISDGELSLHDILEVKGIETLAEYLVKEVQDVYRLQGVPINDKHIEIIVKQMMRTVEIIESGDTKFLPKEQANRIDVIETNERMIKEDLQPATFRPLIMGITKASLATTSFISAASFQETTRVLTEAAVKGSVDKLRGLKENVVVGRLVPAGTGFKTELDAASLAEEE

SEQ ID NO: 134774 - protein, 1033 aa, Unknown
  Bacterial polypetide isolated from the Sargasso Sea
MKKELTDLFKGSEISEAQNFNSIKISLASPEKIKSWTFGEIKKPETINYRTFRPEKDGLFCARIFGPIKDYECLCGKYKRMKFRGIICEKCGVEVTKSNVRRERMGHINLATPVAHIWFLKSLPSRIALAVDMKLKEIERVLYFENFIVIEPGLTGLQKNQLLNEEELAKYQDEFGEESFTAGIGAEAVLEMLKNLDLELERKNLVSFIKETKSKVNEERAIKRLKLIESFIETGQKPEWMIMTVVPVIPPELRPLVPLDGGRFATSDLNDLYRRVINRNNRLKRLMDLKAPDIIVRNEKRMLQESVDALFDNGRRGRVITGTGKRPLKSLAEMLKGKQGRFRQNLLGKRVDYSGRSVIVVGPDLKLHECGLPKKMALELFKPFLYARLNKLGLASTIKQAKKLVEKETNAVWDALELIVREHPVLLNRAPTLHRLGVQAFEPKLIEGDAIELHPLTCAAFNADFDGDQMAVHVPLSLEAQLEARILMLSTNNILSPSNGKPIIVPSQDMILGIYYLSQEPVSDKPSGYFTNSDQIEFALSSGEINVHSTIISRYETVDEQGNKKIEKYTSTAGRFLLANLLPKNSNIKFSLIDRLLPKKVVSEIIDVVFRFCGQKTTVIFCDKLKDLGFKHAFKAGISFGKDDLIIPENKTQLIDDTKKLIADYETQYAEGLITRGEKYNKVVDAWSKCTDKVAGEMMKRISATEKTEEGLKINSVFMMADSGARGSAAQMKQLAGMRGLIAKPSGEIIESPIISNFKEGLTALEYFNSTHGARKGLADTALKTASSGYLTRRLCDVAQDLTVTKIKCEEPGFIELSEILEGGNVVVSLAERALGRVTAAEVKNPLSGEVIIKKSEMIDEAGCDKIDAAGVKSIKVYSVMTCSSKEGVCATCYGRDLSRGKMVHVGEAIGMISAQSIGEPGTQLTMRTFHVGGTASVKQDNQIISKSDGTLKIINSNILEDSKKNLIVMGRNTQLSIEDDKGVQIAVYKVAYGSRLFFNNGDKVKANTKICEWDPYTTPVIAEKSGIASYVD

SEQ ID NO: 134775 - protein, 929 aa, Unknown
  Bacterial polypetide isolated from the Sargasso Sea
DLDIDDEIRIIREEIPQTNSETKLKKLSKRLKLLEAFKDSGNKPEWMVMNVLPVLPPDLRPLVPLEGGRFATSDLNDLYRRVINRNNRLKRLLELNAPEIIVRNEKRMLQESVDALLDNGRRGRVITGTNKRPLKSLADMIKGKGGRFRQNLLGKRVDYSGRSVIVAGPNLRLHQCGLPKKMALELFKPFVYGKLENRELATTIKAAKKLVERETPEVWEVLEEVIREHPVLLNRAPTLHRLGLQAFEPKLIEGKAIQLHPLVCVAFNADFDGDQMAVHVPLTIEAQLEARALMMSTNNILSPADGSPIINPTQDVVLGLYYMTRDNANASGGGRSYSNPDEVLRAYETENLEIHSPVKVRITDENGETSIEDSTVGRILIWRITPAEVGFENINIVLNKKSVSKLIDISYRKAGLKKTVIFADQLMYLGFDFSTRSGSSIGVNDFVIPEEKAKIIDISEKEVKAIEKQFDSGLVTRGERYNKVIDIWSRANEQVAKAMMEKISSENVKTPDGENVDQSSFNSVYIYADSGARGSPAQIRQLSGMRGLMSKPDGSIIETPITANFREGLSVLQYFISTHGARKGLADTALKTANSGYLTRRLCDVSMDSVINIDDCGTKESIVVTSIIDGGEIIQTLTDRILGRVIAEPIFDSEGKELFPVNTMLDEDALEVIEELNLSSLKVRSPMTCDAPIGVCAKCYGRDLARGHLVHRGEAVGVVAAQSIGEPGTQLTMRTFHIGGAASSSSEDNAIYNKNSGTVSFSDDMKTVTNKDKLEVVVSRNAMCSISDSNGKIIEQYKVPYGATLEVASSTSLEDEVRIASWDPYTRPIISETSGKIKFSDIEDGVTVREQLDELTGLSSVEIIEVADRTSAGRDMTPTIEIVDSKGKPVLIGEFNQPAVYPLPAGGLVNLVNGQKITAGEVIARMPLV

SEQ ID NO: 134776 - protein, 544 aa, Unknown
  Bacterial polypetide isolated from the Sargasso Sea
KIKSWTYGEIKKPETINYRTFRPEKDGLFCARIFGPIKDYECLCGKYKRMKFRGIICEKCGVEVTKSNVRRERMGHINLATPVAHIWFLKSLPSRISLAIDMKLKEVERVLYFESFIVVEPGLTALKKNQLLTEDELSKYQEEYGEESFSAGIGAEAILEILKSIDLKNEREILLKNINETKSKVAEERSIKRLKLIDSFIETGNKPEWMILTTIPVIPPELRPLVPLDGGRFATSDLNDLYRRVINRNNRLKRLMDLKAPDIIIRNEKRMLQESVDALFDNGRRGRVITGTGKRPLKSLAEMLKGKQGRFRQNLLGKRVDYSGRSVIVVGPDLKLHECGLPKKMALELFKPFLYARLNKLGLASTIKQAKKLVDKETNAVWDALELIVREHPVILNRAPTLHRLGVQAFEPKLIEGDAIELHPLTCAAFNADFDGDQMAVHIPLSLEAQLEARVLMMSTNNILSPSNGKPIIVPSQDMILGIYYLSQPPYQTEKIEGYFVNNSEIEQGLESGSINVHSRIISRFQTADKNGKLITEKHTSTAG

SEQ ID NO: 134777 - protein, 540 aa, Unknown
  Bacterial polypetide isolated from the Sargasso Sea
PDIIVRNEKRMLQKSVDALLDNGRMGRAVTGSNKRPLKSLADMIKGKQGRFRQNLLGKRVDYSGRSVIVVGPTLKLHQCGIPKKMALELFKPFVFSKLIYQGEASTIKSAKRLVELEGAEIWDILDGVIRQHPILLNRAPTLHRLGIQAFEPVLVEGKAIQLHPLVCKAFNADFDGDQMAVHVPLSIEAQLESRALMMSSNNILSPANGEPIIVPSQDVVLGLYYMTREKIKDKGEGGIYANIEEVERAFHNGFLGLHAKIKLKIATQNEEKPTEIVDTTSGRALFSKIVPDEIPFSVTNKTMDSKEISRLINRCYREVGLKATVIFADKLMYLGFEYATKSGVSIALDDMVVPENKEEILTDAESQVKSIQNQFTSGLLTQGERYNKVVDIWSRTNDQVANAMMDKLGKEKVTDSEGKKQDQESFNSIFMMADSGARGSAAQIRQLAGMRGLMAKPDGSIIETPITANFREGLNILQYFISTHGARKGLADTALKTANSGYLTRRLVDVAQDLVVTEEDCGTKNGMTISAVIEGGEIVK

SEQ ID NO: 134778 - protein, 111 aa, Unknown
  Bacterial polypetide isolated from the Sargasso Sea
MTNSNLRTENHFDYVKITLASPERVMEWGQRTLPNGQVVGEVTKPETINYRTLKPEMDGLFCEKIFGPSKDWECHCGKYKRVRHRGIVCERCGVEVTESRVRRHRMGFIKL

SEQ ID NO: 134779 - protein, 311 aa, Unknown
  Bacterial polypetide isolated from the Sargasso Sea
MQYQIDRIDHQIADDRSQTGTFLIGPLERGQATTLGNSLRRVLMGGLEGSAVTAVRIAGINHEYATIPGVREDVLDILLNCKQLSINSSNPELEIGRLVASGPMQVKANDIQFSSQVEIVDGEKPIATIQEGHSLELEIHVERGVGYRPVDRKSEETTAIDLLQIDAVFMPVKRVNFTIDETAVAEGGIGRERLKMEVVTDGSTSPDDAIAEAANQLIELFQPLATVTMVEEIPEEPEPSPEAQIPLEELNLSVRAYNCLKRAQVNSVSDLMGFSYEDLLEIKNFGSKSADEVIEALERIGISIPQSRTSV

SEQ ID NO: 134780 - protein, 501 aa, Unknown
  Bacterial polypetide isolated from the Sargasso Sea
MNVLPILPPDLRPLVPLDGGRFATSDLNDLYRRVINRNNRLKRLLELGAPEIIVKNEKRMLQESVDALLDNGRRGRAILGTNKRPLKSLADMIKGKQGRFRQNLLGKRVDYSGRSVIVSGPTLKLHQCGLPKKMALELFKPFILNKLEQKGITVTIKASKQLVEEEAPEVWDCLDEVIREHPVLLNRAPTLHRLGIQAFEPILIEGKAIQLHPLVCVAFNADFDGDQMAVHVPLSLEAQLEARALMMSTNNILSPASGEPIIQPNQDVVLGVYYLTKQDKDVEGKTRTFIDVHEVKRAYLEKQVSLHSKVNVRIKKAEGSKIVSTTVGRCLFFEIMPQELDFEEVNKTFKKKDILKLIYKVYRDFGLKESVLFADNLMYLGFEYSTTSGASIGVNDFEIPDDKNEIISRAEAEVKNIEQQFESGLLTKGEKYNKIIDIWSRTNEKVASSMMKALGDKVEVDKNGNEEVIPSFNSVFMYADSGARGSAAQIRQLAGMRGLMS

SEQ ID NO: 134781 - protein, 191 aa, Unknown
  Bacterial polypetide isolated from the Sargasso Sea
MLLATLVEPKKLVMTLKVCTGVGYEPAENNQSKGVDSLHLDAIYSPVKRVNYKVENTRVENRTDLDKLILELETDGTIDAKQAIKFAATILQHQLAVFVDEELVSRKEKRKDKYDFDPLLLRSIEELELTVRSTNCLKAESIFLIGDLIQRSEMDLLKTPNLGKKSLNEIKDELGSRGLSLGTVLKNWPPM

SEQ ID NO: 134782 - protein, 473 aa, Unknown
  Bacterial polypetide isolated from the Sargasso Sea
MRDLLKSLKTSQADFTSISAGLASPQVIKSWSFGEVKKPETINYRTFKPERDGLFCAKIFGPVKDYECICGKYKRMKHRGVVCEKCGVEVTLAKVRRERMGHIDLAAPVAHIWFLKSLPSRIGLLLNVTLREIERVLYFESYIVTDPGMTPLEKGDILTEEEWVETYEQYGDDFDSGMGAEAVQKLLQEIDIDDEIRIIREEIPQTNSETKLKKLSKRLKLLEAFKDSGNKPEWMIMDVLPVLPPDLRPLVPLEGGRFATSDLNDLYRRVINRNNRLKRLLELNAPEIIVRNEKRMLQESVDALLDNGRRGRVITGTNKRPLKSLADMIKGKGGRFRQNLLGKRVDYSGRSVIVAGPNLKLHQCGLPKKMALELFKPFVYGKLENRELATTIKAAKKLVERETPEVWEVLEEVIREHPVLLNRAPTLHRLGLQAFEPKLIEGKAIQLHPLVCVCFYADFDGDQMAVHVPLTLE

SEQ ID NO: 134783 - protein, 321 aa, Unknown
  Bacterial polypetide isolated from the Sargasso Sea
MQTSVIDLLVPTEIQVDDVSPTLSKVTLEPLERGFGHTLGNALRRILLSSMPGAAVTDVAIDGISHEYSTIEGVREDVIDILLNIKDMPINLIEGDSAEVTLDVKGPCDVLASSFDVPGNVELVNQDFHIATIVDKVNLKMTLTVRNGRGYEPADLREDEDRVVGALKVDASYSPVRRVSYTVDNARSGKRTDLDKLVLELETDGTLDPKMAIEHSATILQQQLGAFVDLDAIAEQEAKKDQNDFDPILLRSIEELELTVRSTNCLKAESIFLIGDLIHRSEFDLLKTPNLGKKSLNEIKDVLASKDLSLGMNVENWPPVG

SEQ ID NO: 134784 - protein, 465 aa, Unknown
  Bacterial polypetide isolated from the Sargasso Sea
MTNSNLRTENHFDYVKISIASPQRIMDWGQRTLPNGQVVGEVTKPETINYRTLKPEMDGLFCEKIFGPSKDWECHCGKYKRVRHRGIVCERCGVEVTESRVRRHRMGYIKLAAPVSHVWYLKGIPSYVAILLDIPLRDVEQIVYFNCYVVLDVGDQKDLKYKQLLTEDEWLEIEDEVYAEDSTIENEPVVGIGAEALKQLLEDLDLNQIAEELREEITNSKGQKRAKLIKRIRVIDNFLATNAKPEWMVLDAIPVIPPDLRPMVQLDGGRFATSDLNDLYRRVINRNNRLARLQEILAPEIIVRNEKRMLQEAVDALIDNGRRGRTVVGANNRALKSLSDIIEGKQGRFRQNLLGKRVDYSGRSVIVVGPKLKMHQCGLPKEMAIELFQPFVIHRLIRQNIVNNIKAAKKLIQKGDDEVMQVLQEVIEGHPILLNRAPTLHRLGIQAFEPKLVGGRAIQLHPLVC

SEQ ID NO: 134785 - protein, 404 aa, Unknown
  Bacterial polypetide isolated from the Sargasso Sea
FDYVKISIASPQRILDWGQRTLPNGQVVGEVTKPETINYRTLKPEMDGLFCEKIFGPSKDWECHCGKYKRVRHRGIVCERCGVEVTESRVRRHRMGYIKLAAPVSHVWYLKGIPSYVAILLDIPLRDVEQIVYFNCYVVLDPGDHKELKYKQLLTEDEWLEIEDEIYAEDSTIENEPFVGIGAEALKQLLEDLDLNQVAEELREEITNSKGQKRAKLIKRIRVIDNFIATNAQPEWMVLDAIPVIPPDLRPMVQLDGGRFATSDLNDLYRRVINRNNRLARLQEILAPEIIVRNEKRMLQEAVDALIDNGRRGRTVVGANNRALKSLSDIIEGKQGRFRQNLLGKRVDYSGRSVIVVGPKLKMHQCGLPKEMALELFQPFVIHRLIRQNIVNNIKAAKKLIQKA

SEQ ID NO: 134786 - protein, 416 aa, Unknown
  Bacterial polypetide isolated from the Sargasso Sea
MKKELTDLFKGSEISEAQNFNSIKISLASPEKIKSWTFGEIKKPETINYRTFRPEKDGLFCARIFGPIKDYECLCGKYKRMKFRGIICEKCGVEVTKSNVRRERMGHINLATPVAHIWFLKSLPSRIALAVDMKLKEIERVLYFENFIVIEPGLTGLQKNQLLNEEELAKYQDEFGEESFTAGIGAEAVLEMLKNLDLELERKNLVSFIKETKSKVNEERAIKRLKLIESFIETGQKPEWMIMTVVPVIPPELRPLVPLDGGRFATSDLNDLYRRVINRNNRLKRLMDLKAPDIIVRNEKRMLQESVDALFDNGRRGRVITGTGKRPLKSLAEMLKGKQGRFRQNLLGKRVDYSGRSVIVVGPDLKLHECGLPKKMALELFKPFLYARLNKLGLASTIKQAKKLVEKETNAVWDAL

SEQ ID NO: 134787 - protein, 606 aa, Unknown
  Bacterial polypetide isolated from the Sargasso Sea
STLDGGRFATSDLNDLYRRVINRNNRLKRLIDLKAPDIIVRNEKRMLQESVDALFDNGRRGRVITGTNKRPLKSLAEMLKGKQGRFRQNLLGKRVDYSGRSVIVVGPDLKLHECGLPKKMALELFKPFLYARLNKLGLASTIKQAKKLVEKERTEVWDALELIVREHPVILNRAPTLHRLGVQAFEPKLIEGNAIELHPLTCAAFNADFDGDQMAVHVPLSLEAQLEARVLMMSTNNILSPSNGKPIIVPSQDMILGIYYLSQPPVQTERVEGYFINTSEIEHALETGQIKVHSRIVSRFETIDEKGNAKFEKHISTAGRFLLSSIIPKNVNNKFSLIDRLLPKKIVSEVIDHVFRFSGQKSTVIFCDKLKDIGFKHAFKAGISFGKDDLLIPDNKEQLIDETKKLIADYESQYAEGLITRGEKYNKVIDAWSKCTDRVASEMMKRISATEVTDEGLKINSVFMMADSGARGSAAQMKQLAGMRGLIAKPSGEIIETPITSNFKEGLTALEYFNSTHGARKGLADTALKTASSGYLTRRLCDVAQDLTITKPKCDMNCGSIKLTEVLEGGNIMVSLSERALGRVAAKEIKNPLTGDILIKKDQMID

SEQ ID NO: 134788 - protein, 326 aa, Unknown
  Bacterial polypetide isolated from the Sargasso Sea
MHESVNEFLKPRNVKVVSSNEWQAKVVIEPFERGYGHTLGNAMRRILLSSMPGTAIVEAEIDGVLHEYTSIEGVQEDVVEILLNLKKVAVCLHGRNSAELSISKEGPGVITGADIILDHDVEIMNPDIVIANLSSSGSISMKLLVEKGRGYRPAIRGPVFEEEAGPIGRLQLDASFSPIHRVSYDVEATRVEQRTDLDKLIFDIETNGTIDPEEAIRHAGSILKDQLSVFVDLETEEEAVEDEEDQIDPALLRPVDELELTVRSANCLKAEEVMYIGDLVQKTEVELLRTPNLGKKSLTEIKEILESNGLSLGMKLENWPPSNLAQ

SEQ ID NO: 134789 - protein, 169 aa, Unknown
  Bacterial polypetide isolated from the Sargasso Sea
MEVENVNVKNWKSLIKPSKLDVQISDDLTHAKIIAEPLEKGYGLTLGNSLRRILLSSIRGAAVTSIQIDGVLHEFTSIKGVREDVTDIVLNVKSLALKCNSEGTKKLVLDAKGPGEIKASDIAPVTDVEILNPELVICNLDENTTFHMEMNVNTGKGYVPADLNKPEEP

SEQ ID NO: 134790 - protein, 300 aa, Unknown
  Bacterial polypetide isolated from the Sargasso Sea
MKSLSDIIEGKQGRFRQNLLGKRVDYSGRSVIVVGPKLKMHQCGLPKEMAIELFQPFVIHRLIRQNIVNNIKAAKKLIQRADDEVMQVLQEVIDGHPIMLNRAPTLHRLGIQAFEPKLVDGRAIQLHPLVCPAFNADFDGDQMAVHVPLAIEAQTEARMLMLASNNILSPATGEPIVTPSQDMVLGSYYLTALQPGAEQPEFGDRSRTYSSLEDVIHAFEDTRVGLHDWIWVRFNGEVEDNDELDEPIKSETLSDGTRIEQWTYRRDRFDEDGALISRYILTTTGRVVMNHTIIGAVAAA

SEQ ID NO: 134791 - protein, 129 aa, Unknown
  Bacterial polypetide isolated from the Sargasso Sea
MDTTEVNIKNWKSLIKPAKLDVQLSDDKSYAKIVAEPLEKGYGLTLGNSLRRILLSSIRGAAVTAIQIDGVLHEFTSIKGIREDVTDIVLNVKSLALKSSSETSKKLILDVKGPGEIKASDITPVTDIE

SEQ ID NO: 134792 - protein, 220 aa, Unknown
  Bacterial polypetide isolated from the Sargasso Sea
DLEIGRLVASGPMEVKANDIQFSSQVEIVDGEKPIATIQEGHNLELEIHVERGIGYRPVDRKSEETTAIDLLQIDAVFMPVKRVNFTIDETAVAEGGAGRERLKMEVVTDGSTSPDDAIAEAANQLIELFQPLATVTMVEEIPEEPEPSPEAQIPLEELNLSVRAYNCLKRAQVNSVSDLMGFSYEDLLEIKNFGSKSADEVIEALERIGISIPQSRTSV

SEQ ID NO: 134793 - protein, 173 aa, Unknown
  Bacterial polypetide isolated from the Sargasso Sea
METENINVKNWKSLIKPAKLDVKISDDLTHAKIVAEPLEKGYGLTLGNSLRRILLSSIRGAAVTSIQIDGVLHEFTSIKGVREDVTDIVLNVKSLALKSSSETTKKLILDAKGPGEIKASDITPVADVEILNPDLVICNLDENTNFHMEMNVNAGKGYVPADLNKPEEPPLGL

SEQ ID NO: 134794 - protein, 661 aa, Unknown
  Bacterial polypetide isolated from the Sargasso Sea
RQNLLGKRVDYFGRSVIVVGPELKMSECGLPKNMALELFKPHMIYELMARGYTETPRSAKLMIEKQEQVVYKVLEYVVQDHPVLLNRAPTLHRLGIQAFQPILVDGKAIKLHPLVCAAFNADFDGDQMAVHVPLSVQSQMEARVLMLSSHNVLHPANGKPISVPSQDMVLGCYYLTRPMKDALGEGKSFSSIDEVLLAYENKSVSMHAIVNVRHNGVWHKDTTVGRIIFNSILPQELGFIDSTIGKGDLAKIINQSYLVAGNHKTVEFLDNLKDLGFVSATKGGCSISIGDVMIPDQKDNIIADAQTKVDAISDKYRRHILTEGERYNKVIDIWTHATNQVAATMMEGLKNDGQGFNPVYMMADSGARGSQDQIKQLAGMRGLMAKPKKSMTGSKGEIIESPIISNFKEGLSVLEYFISTHGARKGLADTALKTADAGYLTRRLVDVAQDVVIYENDCNTINGLLISDLKEGEEIIEPLADRILGRTILDDFILDGKKLIKNGQIIGDKEAEVIADSNVESLRIRSVLTCDSPRGVCAKCYGWNLSTHDIVDLGTAVGIQAAQSIGEPGTQLTLRTFHIGGTATRIIEQSEMKTNRAGVVEFSEDIEIAETKDESGLVVNRCMVRNGRLFIKDKDKILVQYNIPYGSNILVKSGQKIKSGT

SEQ ID NO: 134795 - protein, 334 aa, Unknown
  Bacterial polypetide isolated from the Sargasso Sea
KNWESLIKPGKLDIQLSDDKSYAKIIAEPLEKGYGLTLGNSLRRILLSSIRGTAVTAIQIDGVLHEFSSIKGVREDVTDIVLNVKSLALKSNIEGSKKLILDAKGPGEIKASDITQVADIEILNPDLVICNLDEKTNFHMEMTVGNGKGYVSADMNKPEEPPLGLIPIDSLFSPVKKVSYSISTAREGKALDYDKLTMEVETNRSISAEDAVAYSARIFQDQLGMFVNFDEPQDVIVREKPSEPEFNKNLLRKVDELELSVRSMNCLKNDNIIYIGDLVQKSEGEMLRTPNFGRKSLNEIKEVLNTMSLYLGMEIPNWPPDNIAELSKKLEEAI

SEQ ID NO: 134796 - protein, 652 aa, Unknown
  Bacterial polypetide isolated from the Sargasso Sea
MKKELTDLFKNTEITESQNFNSIKISLASPEKIKSWTFGEIKKPETINYRTFRPEKDGLFCARIFGPIKDYECLCGKYKRMKFRGIICEKCGVEVTKSNVRRERMGHINLATPVAHIWFLKSLPSRIALAVDMKLKEIERVLYFENFIVIEPGLTGLKKNQLLNEEELAKYQDEFGEDQFTTGIGAEAVLEMLKNLDLELERKNLVSFIKETKSKVNEERAIKRLKLLESFIETGQKPEWMILTVVPVIPPELRPLVPLDGGRFATSDLNDLYRRVINRNNRLKRLMDLKAPDIIVRNEKRMLQESVDALFDNGRRGRVITGTGKRPLKSLAEMLKGKQGRFRQNLLGKRVDYSGRSVIVVGPDLKLHECGLPKKMALELFKPFLYARLNKLGLASTIKQAKKLVEKETNVVWDSLELIVREHPVILNRAPTLHRLGVQAFEPKLIEGDAIELHPLTCAAFNADFDGDQMAVHVPLSLEAQLEARILMLSTNNILSPSNGKPIIVPSQDMILGIYYLSQDLLSDKPVGYFTNSDQIEFALSSGQINVHSTIISRFETVDDKGNKKYEKYTSTAGRFLLANLLPKNKNIKFSLVDRLLPKKVVSEIIDIVFRFCGQKTTVIFCDKIKDLGFKHAFKAGISFGKDDLVIPEIKL

SEQ ID NO: 134797 - protein, 321 aa, Unknown; identical to SEQ ID NO: 134783
  Bacterial polypetide isolated from the Sargasso Sea

SEQ ID NO: 134798 - protein, 1175 aa, Unknown
  Bacterial polypetide isolated from the Sargasso Sea
VIPPELRPLVPLDGGRFATSDLNDLYRRVIIRNNRLKRLVEIKAPEVILRNEKRMLQESVDSLFDNTRKSSAVKTEANRPLKSLSDSLKGKQGRFRQNLLGKRVDYSARSVIVGGPTLKLYECGLPKDMAAELFKPFIVKKLIERGIVKTVKSAKKIIDKREPLVWDILENVLKGHPVLLNRAPTLHRLGIQAFQPILIEGKAIQVHPLVCTAFNADFDGDQMAVHLPLGPEAILESQLLMLASHNILNPANGSPITVPSQDMVLGLYYMTKEKKSTKDEVVKGEGLTFYSFEEVKIAHNEGKADLNAMIKVRANDLNENDELESKIIETTVGRVLFNEVVPESAGYINQVLTKKSLRDIIGRILKMTSVPETADFLDKIKEMGFTFAFKGGLSFSLGDIIIPDEKHKMIDSANQEVDSIMSNYNMGLITNNERYNQVIDVWTSSNASLTELAMKRISEDQQGFNSVYMMLDSGARGSKEQIRQLTGMRGLMAKPKKASAGGGEIIENPILSNFKEGLSILEYFISTHGARKGLADTALKTADAGYLTRRLVDVAQDVIINEEDCGTLRGITVEALKKNEEVVETLGERILGRVSLHDVYNPLNNEIIINAGEEINEELVEMVEKLPIEKIDVRSPLTCEAKRGLCVKCYGRNLATGKMVQIGEAVGVVAAQSIGEPGTQLTLRTFHVGGIAGNISEENELSAKFDGIAEIEDLKIVKSKDSDGKAIDLVISRTCEIKILDEKSGIVLSSNIIPYGSSIFIKNGKKIKKDDVVCKWDPYNGVIISEFGGVVQYENIEQGITYQVEIDEQTGFKEKVISESRNKKMIPTLLINDKKGKNLRTYNLPVGAHLMVDDGEKVDTGKILVKIPRKSAKSGDITGGLPRVTELFEARNPSNPAVVSEIDGVISFGKIKRGNREIIVESKTGEIKKYLVKLSNQILVQENDFVKAGMPLSDGSITPNDILNIKGPSAVQQYLVNEVQEVYRLQGVKINDKHFEVLIRQMMQKVQIQDSGDTIFLENQIVHKNEFISENDNLFGKKVVESEGNSENLKVGQIITARELRDENSLLKREDKELVVARDAVNATGFPILQGITRASLQTKSFISAASFQETTKVLNEAAVNGRVDHLEGLKENVIVGHKIPAGTGNREYDDIIVGYVDEYEELLESKRIRFNEEG

SEQ ID NO: 134799 - protein, 159 aa, Unknown
  Bacterial polypetide isolated from the Sargasso Sea
MENITIIDKNWKSLIKPSKLAITSNDDKSIAKVIAEPLEKGFGQTIGNALRRILLSSIQGAAVTAIQIDGVLHEFSSIKGVREDVTDIVLNVKNLAVKLNSSGSKKLILDATGPKEVKAKDITPVNGVEILNMDQTICNLDEKTKFHMELVVIAEEVTY

SEQ ID NO: 134800 - protein, 318 aa, Unknown
  Bacterial polypetide isolated from the Sargasso Sea
MVDISTISSTHAKISIEPLERGFGHTLGNALRRVLLSSLPGSAVTEVTIENILHEYSTIEGVQEDVLEILLNIKKLALVLPSKDTLDITLRKKGLGPVLASDISDNPDLEIKNPNFCLANITNDKTELVINMTVTKGRGYQQAQKRKFNELDDLGIGKMQLDASFSPVVLVTYNVETARVKQRTDLDKLVIDLKTNATIEPEDAIRKAGQLLRNQLDVFTYLEVHEETEEESDTPQIDPVLLRPVDDLELTVRSANCLKAENIYYIGDLVQRSENELLKTPNLGKKSLTEIKDVLATHSLQLGQKLEDWPPKNIDKRI

SEQ ID NO: 134801 - protein, 77 aa, Unknown
  Bacterial polypetide isolated from the Sargasso Sea
LLRPVDDLELTVRSANCLKAENIHYIGDLVQRSENELLKTPNLGKKSLTEIKDVLSTHSLSLGQIIEDWPPKSIEKR

SEQ ID NO: 134802 - protein, 325 aa, Unknown
  Bacterial polypetide isolated from the Sargasso Sea
MDTTEVNIKNWKSLIKPPKLDINLSDDKSYAKIIAEPLEKGYGLTLGNSLRRILLSSIRGTAVTAIQIDGVLHEFTSIKGVREDVTDIVLNVKSLALKSNSETTNKLILDAKGPGEIKASNITTSADIEILNPDLVICNLDENTNFHMEMTVSNGKGYVSADMNKPEEPPLGLIPIDSLFSPVKKVSYSISTAREGKALDYDKLTMEVETNGSISAEDAVAYSARIFQDQLGMFVNFDEPQEVIVREQSTEPEFNKNLLRKVDELELSVRSMNCLKNDNIIYIGDLVQKSEGEMLRTPNFGRKSLNEIKEVLTGMSLYLGMEIPN

SEQ ID NO: 134803 - protein, 245 aa, Unknown
  Bacterial polypetide isolated from the Sargasso Sea
MDNLEVNVKNWKSLIKPAKLDVKLSDDKTIAKITAEPLEKGYGLTLGNSLRRVLLSSIRGAAVTSIQIDGVLHEFTSIKGVREDVTDIVLNVKSLALKSSSEGTKKLILDAKGPGEIKASDITPVTDIEILNPNLVICNLDENTNFHMEMNVGTGKGYVSADLNKPEEPPLGLIPIDSLFSPVKKVSYSVSTAREGKALDYDKLTMEVETNGSISAEDAVAYAARIFQDQLGMFVNFDEPKEVVM

SEQ ID NO: 134804 - protein, 319 aa, Unknown
  Bacterial polypetide isolated from the Sargasso Sea
MKKDLKDLLKETDITESQNFNSIKITLASPEKIKSWTYGEIKKPETINYRTFRPEKDGLFCARIFGPIKDYECLCGKYKRMKFRGIICEKCGVEVTKSNVRRERMGHINLATPVAHIWFLKSLPSRISLAIDMKLKEVERVLYFESFIVIEPGLTSLKKNQLLNEDELNKYQEEFGEESFSAGIGAEAILEILKSIDLNKEKEILLKNINETKSKVAEERSIKRLKLIDSFIETGNKPEWMILTTIPVIPPELRPLVPLDGGRFATSDLNDLYRRVINRNNRLKRLMDLKAPDIIIRNEKRMLQESVNALFDNGRRGRV

SEQ ID NO: 134805 - protein, 244 aa, Unknown
  Bacterial polypetide isolated from the Sargasso Sea
MEQAEVNSKNWKSLIKPAKLDVQLSEDKAFAKITAEPLEKGYGLTLGNSLRRILLSSIRGTAVTSIQIDGVLHEFTSIKGVREDVTDIVLNVKSLALKSSSDDSKKLILDAKGPGEIKASDITPVADVEILNPDLVICNLDENTKFHMEMSVGTGKGYVSADMNKPEEPPLGLIPIDSLFSPVKKVSYSVSTAREGKALDYDKLTMEVETNGSISAEDAVAYSARIFQDQLGMFVNFDEPQEVI

SEQ ID NO: 134806 - protein, 513 aa, Unknown
  Bacterial polypetide isolated from the Sargasso Sea
KLHQCGLPKLMALELFKPFVMKRLDDLNLAPNIKSAKRMVERRRSEVWDVLEEVIKEHPVLLNRAPTLHRLGIQAFEPILVEGKAIQIHPLVCAAFNADFDGDQMAVHLPLSSEAQAEARVLMLSANNILSPADGRPMTVPSQDMIIGGYYLTEMRGNPEDADLPVYKHFHEIERAVALNQVQLHQPIIWRHTKLTGEDGEFIPTTPGRVLFNEALPEDFPFVNTAVKKGDMGDVVGDLSDGWPTNEVAAALDRIKDLSYEYATKSGLTISIDDVRTPPDKAEILERYEGEAERVENQFRRGIITDGERRQKEVEIWTSATEEVRASLERELKSVMFNPIDMMVGSGARGNMMQVRQIAAIRGLVANPRGDIIPRPIKSSYREGLAMLEYFISTPGARKGLVDTALRTADSGYLTRRLVDVAQELIVNEEDPFERSGPVLGLWLEDIGPDTPEKRTYLETRLFSRCLAQDVELTEGVMEAGTLIGDEEMAILRDDPKVTRVQVLSPLTDNSEF

SEQ ID NO: 134807 - protein, 391 aa, Unknown
  Bacterial polypetide isolated from the Sargasso Sea
MILTSVPVIPPELRPLVPLDGGRFASSDLNDLYRRVINRNNRLSRLIELRAPDIIIRNEKRMLQESVDALFDNGRRGRVITGTNKRPLKSLAEMLKGKQGRFRQNLLGKRVDYSGRSVIVVGPELKLHQCGLPKKMAIELFKPFIYARLESLGLATTLKQAKKMVEKERPEVWDVLDRVIREHPVILNRAPTLHRLGVQAFEPVLIEGKAIQLHPLVCTAFNADFDGDQMAVHVPLSLEAQLEARVLMMSTNNILNPANGKPVIVPSQDIVLGIYYLSQEKENEPGQGSVFKDIYEIQQALENNATTVHAKVHARINFIDPEGNKKLKRIETTPGRMLLWNLVPQHKDLDPKLVNRLLGKKEISGLIDTVYRYCGQKDTVIFADQLMALGF

SEQ ID NO: 134808 - protein, 357 aa, Unknown
  Bacterial polypetide isolated from the Sargasso Sea
RGIICEKCGVEVTLSKVRRDRMGHIELAAPVSHIWFMKSLPSRIATLLDMTIKNLEKVLYFEQFIVVEPGLTDLKKGEIISEEQFIDYQDEYGEDSFSAAIGAEAIEQMLLNIDLETDYNQLKIDLTETKSELKKTKITKRLKLIESFIISKNKPEWMILRVLPVIPPELRPLVPLDGGRFATSDLNDLYRRVINRNNRLKRLIDLRAPDIIIRNEKRMLQESVDALFDNGRRGRVITSTNKRPLKSLSDMLKGKQGRFRQNLLGKRVDYSGRSVIVVGPNLKLHQCGIPKKMALELFKPFIFHKLDIYGWANTIKAAKKLVEKEDPRVWDILEEVIREHPVLLNRAPTLHRLGIQA

SEQ ID NO: 134809 - protein, 456 aa, Unknown
  Bacterial polypetide isolated from the Sargasso Sea
MGHMSLASPTAHIWFLKSLPSRIGLLLDMTLRDIERVLYFESFIVIDPGLTDLETCQLLSDEEYYQKLEEYGDEFDARMGAEAVRELLLNLDLDSEIAKLREEIPATNSETKIKKFSKRLKLMEAFRKSGNKPEWMILEVLPVLPPDLRPLVPLDGGRFATSDLNDLYRRVINRNNRLKRLLDLVAPDIIVRNEKRMLQESVDALLDNGRRGRAITGSNKRPLKSLADMIKGKQGRFRQNLLGKRVDYSGRSVIVVGPTLKLHQCGLPKKMALELFKPFIFGRLEDQQLATTIKAAKKMVERETTEVWDILADVIREHPILLNRAPTLHRLGIQAFEPVLIEGKAIQLHPLVCTAYNADFDGDQMAVHVPITLEAQLESRTLMMSTNNVLSPASGEPIIVPSQDVVLGIYYMTREKVNARGEGLVFADVEEVQRAYHSKNVELQARVKVRIKDSEL

SEQ ID NO: 134810 - protein, 390 aa, Unknown
  Bacterial polypetide isolated from the Sargasso Sea
MDYFVKRFLGHLKIGNAICGKYKRVRHRGIVCERCGVEVTESRVRRHRMGYIKLAAPVSHVWYLKGIPSYVAILLDIPLRDVEQIVYFNCYVVLDPGDHKELKYKQLLTEDEWLEIEDEIYAEDSTIENEPFVGIGAEALKQLLEDLDLNQVAEELREEITNSKGQKRAKLIKRIRVIDNFIATNAKPEWMVLDAIPVIPPDLRPMVQLDGGRFATSDLNDLYRRVINRNNRLARLQEILAPEIIVRNEKRMLQEAVDALIDNGRRGRTVVGANNRALKSLSDIIEGKQGRFRQNLLGKRVDYSGRSVIVVGPKLKMHQCGLPKEMAIELFQPFVIHRLIRQNIVNNIKAAKKLIQKADDEVMQVLQEVIEGHPILLNRAPTLHRLGIQA

SEQ ID NO: 134811 - protein, 342 aa, Unknown
  Bacterial polypetide isolated from the Sargasso Sea
MIENNWITLVKPNKVDYKISDNKKFGTVVIEPLEKGFGTTLGNALRRVLLSSLQGTAISSIKINGVLHEFSTIEGVREDVTDIIMNLKNVTFNSKSNHSQKLSLNVKGPKEVLSSDFEENPEVEIVDKDAVIMNVDSNREVNLEIFLDINKGYISAEKNKDNENKSVGQIMLDATYSPVKRVSFNVENSRIGQDTEFDKLILDIETNGTVSPDDAAALAARILQDQLKPFINFEEPTEDERKKLQSSNEPQFNKNLLKKVDELELSVRSANCLKNDNIFYIGDLVQKTEGEMLRTPNFGRKSLDEIKEVLSSMSLSMGMDLPGWPPENIEELSKKYEDPFKV

SEQ ID NO: 134812 - protein, 964 aa, Unknown
  Bacterial polypetide isolated from the Sargasso Sea
PVLLNRAPTLHRLGIQAFEPVLIEGKAIQLHPLVCAAFNADFDGDQMAVHVPLSLEAQLEARVLMMSTNNILHPANGDPIIVPSQDIILGLYYLSQMKQNEPGEGRHFDNINEIEFALDNGSITLHTKISFRFTTDEGYEKHETTPGRVLISKELPNNENISFEIVNKLLTKKEISRMIDDVYRHCGQKETVIFCDHIMKLGFKHACNAGISFGKDDMIIPEEKENLIQDTNELVKEFEQQYIDGFITRGEKYNKVVDAWAKCTDKVEDKMMDKISSSQIDEDSEREEPINSIYMMAHSGARGSAAQMKQLSGMRGLMAKPSGEIIETPIISNFKEGLNVLEYFNSTHGARKGLADTALKTANSGYLTRRLVDVAQDCIVVEEDCKTSEGLILKPVIESGEEMVSLSDRVLGRVPCEDVVDPATNEVIVKKGEIIEEKHLPLIDNANLLEIKIRSVLTCQTKNGVCAKCYGRDLARGTPVNIGEAVGVIAAQSIGEPGTQLTMRTFHIGGTAQVMDQSYVEASVDGKIKIDDLNMLEDSEKRKIIIGRTTNVSVVDEFGNERSKHKLTYGSELLVEDGQDIKKGDRLAQWDPYTIPIITESSGVIEFEDLAEGISLSEVSDESTGIKQKVVVDWKNSSKSASLKPSILVKDEKGEIISNDSGREARYLMSVDAIISANDGEKVNAGDVIARIPTEGAKTRDITGGLPRVAELFEARKPKDHAVIAEVTGKVEFARDYKNKRRIVIHPSNEGETEASYLIPKGKHISVQDGDTIEKGDYLIDGNPAPHDILSILGLEALANYLVDEVQNVYRLQGVTINDKHIEVITRQMLQKVEVMESGDSAYLEGEQLDKMEIEEINQKLIEEKKDPVKFKPLLLGITKASLHTRSFISAASFQETTRVLTDAAVNRKSDHLIGLKENVIVGRLIPAGTGSSIRRLENEAGTRDQELIDQKQDGSELIEEEAS

SEQ ID NO: 134813 - protein, 1050 aa, Unknown
  Bacterial polypetide isolated from the Sargasso Sea
MEKIFDELSISLATSDQMRSWSFGEVKKPETINYRTLKPEKEGLFDERIFGPTKDWECSCGRYKRIRYRGIVCERCGVEVTRREVRRERMGHIELAAPVTHIWYFKGVPSRLGYFLDMSPKELEKVIYFAAYLVVSIDDKKRTKDLSEIEEAVEAEVEIVEEEFTEWEVKRLKQMKVELKAMENAKVPEAEIQLRTKEIEKEIKQKKSKSDAEIKVIQEAFSTLKTLKPKTLIENDTLWREMIDKYDEYFTGGMGAEAVRELVQLVDLKSEMQKLKGDLDSKSAQRRQRAIQRMKVIKPFADGKNPPEAMILEVIPVIPPELRPMVQLDGGRFATSDLNDLYRRLINRNNRLKKLIELGAPDIIISNEKRMLQESVDALFDNGRRGRAVAGAGGRGLKSLSDMLKGKQGRFRQNLLGKRVDYSARSVIVVGPHLDLQQCGLPKMMALELFKPFVMKRLVELGLAQNIKSAKRMVERSRAQVWDVLAEVIEEHPVLLNRAPTLHRLGIQAFEPILVEGKAIQVHPLVCEAFNADFDGDQMAVHVPLSAEAQAEARVLMLATNNVLSPASGNPIVSPSQDMVIGLYYITECHDDLETAEHAFVDANEAQLAYEAGHITLQTPIKIRVGDLAGSEEIYNKIKNRFSELLTPEYTSGDVLTNTTLGRLHFNAILPSDFPYIEASVRKPQMKKIISEVIETYNKAELREFLDSMKRVGFNFGAKAGLSVAMTDVKTPPSKTQILEKYENEAEKVEKLYKDDIITETERKQKIIEIWNEATDQVQYAMSAELESERFNPVDMMVKSGARGNMMQVRQLAGMRGLVANPKGDIIERPIKSNFREGMSVLEYFISTHGARKGLADTALRTADSGYLTRRLVDVAAGIVVKDSGDENIDWKGTNKKTVDKNGKPSKYLHSTLFGRVLSEDIKKDKKTIEFADGRKLSKGTYIDAEALDVISKSGVESVNVLTPFNSLDPESMDALCYGFSLATGKPVEDGEAVGIISAQSIGEPGTQLTMRTFHTGGVVGLDITSGLPRIVELFEARTPKGKSVLSLID

SEQ ID NO: 134814 - protein, 888 aa, Unknown
  Bacterial polypetide isolated from the Sargasso Sea
DLDKTFLGKRVDYSGRSVIVVGPKLKMHECGLPKDMASELFKPFIIRKLIERGIVKTVKSAKKLVDSKDSVIWDILENVLKGHPVLLNRAPTLHRLGIQAFQPKLIEGKAIELHPLSCTAFNADFDGDQMAVHVPLGHEAIVEASILMLGSNNIINPANGAPITVPSQDMVLGLYYVTKGRKNTKEYPLKGEGLRFSSISEVKIALNQEKLSINSFINLRVNLRSDDGKFVTKNIETVAGRVLFNEFIPEEVGYVDELLTKKKLQQIISKVYKICGVSRTSEFLDNIKELGFRMAYEGGLSMGLGDIQIPKEKSTLVDGAKKEVAEVWNNYYMGLITDNERYNQVIDIWTRANTKLTSGLMNELEDNSQGFNPIYMMMHSGARGSREQIRQLGGMRGLMAKPQKNLAGSVGEIIENPILSNFKEGLDVIEYFISTHGARKGLADTALKTADAGYLTRRLVDVAQDVIINEEDCGTLRGVYISSLKDNEDIVEPLSERILGRVSVHDVYDPLSKKLLVGSGEEITESIARDIENTNIDGIEIRSVLTCETGRGVCAKCYGRNLSTGNLVNKGEAVGVIAAQSIGEPGTQLTLRTFHVGGTASNIAVNANIKAKFDGIIELENVRTIKTKDNDNNQVNIVMARTGEIKILDKKKNILMSNNVPYGSHLSIKDGQKVKKGDFLCKWDPYNAVIISEFDGKIEFESIDEGITYKQEFDEQTGHKEKIIIECKDKTKNPTVKVIGKEGEKSYNVPVGAHLSINDKDKVKAGQILVKIPRMIGQSRDITGGLPRVTELFEARNPSNPATVSEIDGVVSYGGIKRGNREIFIEAKDGTKKKYLVSLSKHILVQDNDFVKAGTPLSDGAITPADILSIKGPTEVQDYLVNEIQEVY

SEQ ID NO: 134815 - protein, 749 aa, Unknown
  Bacterial polypetide isolated from the Sargasso Sea
MKKELTDLFKGSEISEAQNFNSIKISLASPEKIKSWTFGEIKKPETINYRTFRPEKDGLFCARIFGPIKDYECLCGKYKRMKFRGIICEKCGVEVTKSNVRRERMGHINLATPVAHIWFLKSLPSRIALAVDMKLKEIERVLYFENFIVIEPGLTGLQKNQLLNEEELAKYQDEFGEESFTSGIGAEAVLEMLKNLDLELERKNLVSFIKETKSKVNEERAIKRLKLIESFIETGQKPEWMIMTVVPVIPPELRPLVPLDGGRFATSDLNDLYRRVINRNNRLKRLMDLKAPDIIVRNEKRMLQESVDALFDNGRRGRVITGTGKRPLKSLAEMLKGKQGRFRQNLLGKRVDYSGRSVIVVGPDLKLHECGLPKKMALELFKPFLYARLNKLGLASTIKQAKKLVEKETNAVWDALELIVREHPVLLNRAPTLHRLGVQAFEPKLIEGDAIELHPLTCAAFNADFDGDQMAVHVPLSLEAQLEARILMLSTNNILSPSNGKPIIVPSQDMILGIYYLSQDPISDKPAGYFINSDQIEFALASGQINVHSTIISRYETIDEQGNKKIEKYTSTAGRFLLANLLPKNSNIKFSLVDRLLPKKVVSEIIDVVFRFCGQKTTVIFCDKLKDLGFKHAFKAGISFGKDDLVIPANKTQLIDDTKKLIADYETQYAEGLITRGEKYNKVVDAWSKCTDKVAGEMMKGISATEKTDEGLKINSVFMMADSGARGSAAQMKQLAGMRGLIAKPSGEI

SEQ ID NO: 134816 - protein, 550 aa, Unknown
  Bacterial polypetide isolated from the Sargasso Sea
MKELLNLLQSNQDDFSSISAGLASPQMVRSWSFGEVKKPETINYRTFKPERDGLFCAKIFGPIKDYECVCGKYKRMKHRGVVCEKCGVEVTLAKVRRDRMGHIELAAPVAHIWFLKSLPSRIGLLLDVTLREIERVLYFESFIVTDPGMTDLETGDILTEEEYIEAYDQYGDEFKAGMGAEAVKLLLEELDIEEEIRILREEIPQTNSETKLKKISKRLKLLEAFKASGNKPEWMIMDVLPVLPPDLRPLVPLEGGRFATSDLNDLYRRVINRNNRLKRLLELNAPDIIVRNEKRMLQESVDALLDNGRRGRVITGTNKRPLKSLADMIKGKGGRFRQNLLGKRVDYSGRSVIVSGPNLKLHQCGLPKKMALELFKPFVYGRLEHKELATTIKAAKRLVERETPEVWEALEEVIREHPVLLNRAPTLHRLGIQAFEPLLIEGKAIQLHPLVCVAYNADFDGDQMAVHVPLTVEAQLEARALMMSTNNILSPADGAPIINPTQDVVLGLYYMTREKVNSHGEGRVFSNPDEVQRAFESEQIDLHAKIKVRI

SEQ ID NO: 134817 - protein, 203 aa, Unknown
  Bacterial polypetide isolated from the Sargasso Sea
ENVELTDADHHVVSLVDKIKLNMSVFVRTGRGYEPADIRDDENNTVGGLKVDASFSPVKRVSYSVENARFEKRTDLDKLILELETDGTIDAKMAIEHSATIMQQQLAAFVDLEAIAEQEAKKEQNDFDPLLLRSIEELELTVRSTNCLKAESIFLIGDLIQRSEFDLLKTPNLGKKSLNEIKDVLASKGLSLGMVLDNWPPMG

SEQ ID NO: 134818 - protein, 340 aa, Unknown
  Bacterial polypetide isolated from the Sargasso Sea
MSIINNWQTLIKPSKLKLTNDENSQYKATLVAEPLERGFGLTLGNALRRVLLSSLQGTAVTAIKIDNVLHEFSSIDGVREDVTDIVLNIKSLSLNMHSEGVRKMNLNVTGPGEITAGMINTPSEIDIINPELVICNLDDNTEFNMELTVAKGKGYVAAEHNKPEDSAIGLIPIDSIFSPVKQVSYSIENTREGKVLDYDKLILTIETNGSVTPDDSIAFAARIIQDQLQSFINFEEPEEIQEEPDTLEPQFNKNLLRKVEELELSVRSMNCLRNDNIIYIGDLVQKSEIEMLRTPNFGRKSLNEIKEVLGTMSLYLGMEVPNWPPENIEELARKIEDPYN

SEQ ID NO: 134819 - protein, 722 aa, Unknown
  Bacterial polypetide isolated from the Sargasso Sea
KIKSWTYGEIKKPETINYRTFRPEKDGLFCARIFGPIKDYECLCGKYKRMKFRGIICEKCGVEVTKSNVRRERMGHINLATPVAHIWFLKSLPSRISLAIDMKLKEVERVLYFENFIVIEPGLTGLKKNQLLGEEELIKYQDEYGEESFTAGIGAEAILEILKSINLEEEKNSLIKTIKETKSKVSEERSIKRLKLIESFIETGNKPEWMILTTIPVIPPELRPLVPLDGGRFATSDLNDLYRRVINRNNRLKRLMDLKAPDIIVRNEKRMLQESVDALFDNGRRGRVITGTGKRPLKSLAEMLKGKQGRFRQNLLGKRVDYSGRSVIVVGPDLKLHECGLPKKMALELFKPFLYARLNKLGLASTIKQAKKLVERERNEVWDALELIVREHPVILNRAPTLHRLGVQAFEPKLIEGNAIELHPLTCAAFNADFDGDQMAVHVPLSLEAQLEARVLMMSTNNILSPSNGKPIIVPSQDMILGIYYLSQPPYQKDRVEGYFVNTSEIEHALEIGQIKVHSRIVSRFETVDEKGNTKFEKHISTAGRFLLSNLIPKNVKNKFSLVDRLLPKKVVSEVIDHVFRFSGQKSTVIFCDKLKDLGFKHAFKAGISFGKDDLVIPDNKQQLIEETKKLISDYENQYAEGLITRGEKYNKVIDAWSKCTDRVAAEMMKRISATEVTEDGLKINSVFMMADSGARGSAAQMKQLAEMRGLIAKPSGEIIES

SEQ ID NO: 134820 - protein, 1152 aa, Unknown
  Bacterial polypetide isolated from the Sargasso Sea
SGNKPEWMVMNVLPVLPPDLRPLVPLEGGRFATSDLNDLYRRVINRNNRLKRLLELNAPEIIVRNEKRMLQESVDALLDNGRRGRVITGTNKRPLKSLADMIKGKGGRFRQNLLGKRVDYSGRSVIVAGPNLKLHQCGLPKKMALELFKPFVYGKLENRELATTIKAAKKLVERETPEVWEVLEEVIREHPVLLNRAPTLHRLGLQAFEPKLIEGKAIQLHPLVCVAFNADFDGDQMAVHVPLTLEAQLEARALMMSTNNILSPADGAPIINPTQDVVLGLYYMTRDNANSSGGGRVFSNADEVLRAYETENLEIHSPIKVRIEHADGETTLEDSTVGRTLIWRITPVEVGFENINDVLNKKSVSKLIDISYRKAGLKKTVIFADQLMYLGFDFSTRSGSSIGVNDFVIPEEKAKIIDSSEREVKAIEKQFDSGLVTRGERYNKVIDIWSRANEQVAKAMMEKISTESAKTPEGENIEQSSFNSVYIYADSGARGSPAQIRQLSGMRGLMSKPDGSIIETPITANFREGLSVLQYFISTHGARKGLADTALKTANSGYLTRRLCDVSMDSVINIDDCGTEDSIVVTSIIDGGEIIQALTDRILGRVIAEPIFDAEGKELFPVNTMLDEDALDVIDELNLSSLKIRSPMTCNAPVGVCSMCYGRDLARGHLVHRGEAVGVVAAQSIGEPGTQLTMRTFHIGGAASSSSEDNAIFNKSAGAVSFSEDIKTVTNKDKLEVVVSRNAMCSISDINGKIVEQYKVPYGAVLEVANASDLEDGVKIASWDPYTRPIISETSGKIKFSDIEDGVTVREQLDPLTGLSSIEIIEVADRTSAGRDMTPTIEIVDSKGKPVLVGEFKQPAVYPLPAGGLVNLVNGQKITAGEVIARMPLVASKTKDITGGLPRVADLFEARKPKDAAVLAEESGVISFGKETKGKVRLVITPEGASKKSDNREMLIPKHRTLNVFEGERVNKGDIISEGPLSPHDILRLKGIPELTNFIVNEIQDVYRLQGVSINDKHIETILRQMLRKALILDGGDTRFIQGDQVSYAELVDENNKAEAEGKTPAEYERVLLGITKASLATDSFISAASFQETTRVLTEAAVTGKKDHLRGLKENVVVGRLIPAGTGMEFHDRLRSKKWVNLMNKFYLMTI

SEQ ID NO: 134821 - protein, 209 aa, Unknown
  Bacterial polypetide isolated from the Sargasso Sea
MEVENVNVKNWKSLIKPSKLDVQISDDLTHAKIVAEPLEKGYGLTLGNSLRRILLSSIRGAAVTSIQIDGVLHEFTSIKGVREDVTDIVLNVKSLALKSNSEGTKKLILDAKGPGEIKASDIAPVTDVEILNPDLVICNLDENTTFHMEMNVNTGKGYVPAELNKPEEPPLGLIAIDSLYSPVKKVSYSVSTAREGKALDYDKLTMEVK

SEQ ID NO: 134822 - protein, 247 aa, Unknown
  Bacterial polypetide isolated from the Sargasso Sea
MSSTKELLKPRKCQVEEINSTSAKIIIEPLERGFGHTLGNALRRVLLSSMPGCAVTELEIIEPEVLHEYTTMEGVQEDVTDIILNLKGLAIIMHSKDEATLTLKKSGPGEVCARDITVDHDVEIANPDHPIANLTKAGQLSMVMKVAHGRGYKPVIAGGKDSVEQTIGKIKLDASFSPVTRVSYDVGNSRVEQRTDLDKLILELETDGTIDPNEAIKEAATILRSQLVIFVDLEAEEAIEANKSSEP

SEQ ID NO: 134823 - protein, 134 aa, Unknown
  Bacterial polypetide isolated from the Sargasso Sea
MQTSVIDLLVPTEIQVDDVSPTLSKVTLEPLERGFGHTLGNALRRILLSSMPGAAVTDVAIDGISHEYSTIEGVREDVIDILLNIKDMPINLIEGDSAEVTLDVKGPCDVLASSFDVPGNVELVKSRFSYRNYC

SEQ ID NO: 134824 - protein, 330 aa, Unknown
  Bacterial polypetide isolated from the Sargasso Sea
MWITKKNGVRVIKPFVYGRLEHKELATTIKAAKRLVERETPEVWEALEEVIREHPVLLNRAPTLHRLGIQAFEPLLIEGKAIQLHPLVCVAYNADFDGDQMAVHVPLTIEAQLEARALMMSTNNILSPADGAPIINPTQDVVLGLYYMTREKVNSHGEGRVFSNPDEVQRAFESEQIDLHAKIKVRIENAEKGVFIEDTTVGRTLIWRITPIEVGFDNVNKTLDKKAVSSLIDLSYRKAGLKKTVIFADQLMYLGFDFSTRSGSSIGVDDFVIPEEKYEIVDKAEDEVKEIENQFSSGLVTRGERYNKVVDIWSRANERVAKAMMKKSAK

SEQ ID NO: 134825 - protein, 577 aa, Unknown
  Bacterial polypetide isolated from the Sargasso Sea
FGPIKDFECLCGKYKRRKHRGVICEKCGVEVTATKVRRERMGHIELASPVAHIWFLKSLPSRIGLFLDMTLREIERVLYYESFVVVEAGITDLTKGQLLTEDEYYEALDEYDDDFTALMGAEAIQILLNEVDLEKELQIIKEELNTSGSETKIKKLQKRLKLIEAFKESGQKPEWMIMNVLPVLPPDLRPLVPLDGGRFATSDLNDLYRRVINRNNRLKRLLLLGAPEIIVRNEKRMLQESVDALLDNGRRGRAILGTNKRPLKSLADMIKGKQGRFRQNLLGKRVDYSGRSVVVSGPTLKLHQCGLPKKMALELFKPFIFNKLEQKGITITIKAAKQLVEEETPEVWDCLDEVIREHPVLLNRAPTLHRLGIQAFEPVLIEGKAIQLHPLVCTAFNADFDGDQMAVHVPLSLEAQLEARALMMSTNNILSPASGEPIIQPNQDVVLGIYYLTKEDFGLPGEGRSFVDVHEVKRAFLEKQINLHTKIKVRVTEGDNKKVYDTTVGRCLLYEIMPTGLEFSKINKTLKKKDVLNLISHVYKDFGLKESVLFADQLMYLGFEYSTTSGASIGVNDFEIP

SEQ ID NO: 134826 - protein, 309 aa, Unknown
  Bacterial polypetide isolated from the Sargasso Sea
MKSLKTSQADFTSISAGLASPQVIKSWSFGEVKKPETINYRTFKPERDGLFCAKIFGPVKDYECICGKYKRMKHRGVVCEKCGVEVTLAKVRRERMGHIDLAAPVAHIWFLKSLPSRIGLLLNVTLREIERVLYFESYIVTDPGMTPLEKGDILTEEERIETYEQYGDDFESGMGAEAVQKLLQEIDIDDEIRIIREEIPQTNSETKLKKLSKRLKLLEAFKDSGNKPEWMIMNVLPVLPPDLRPLVPLEGGRFATSDLNDLYRRVINRNNRLKRLLELNAPEIIVRNEKRMLQESVDALLDNGRRGRV

SEQ ID NO: 134827 - protein, 406 aa, Unknown
  Bacterial polypetide isolated from the Sargasso Sea
DALFDNGRRGRVITGTGKRPLKSLAEMLKGKQGRFRQNLLGKRVDYSGRSVIVVGPDLKLHECGLPKKMALELFKPFLYARLNKLGLASTIKQAKRLVEKETNAVWDALELIVREHPVILNRAPTLHRLGVQAFEPKLIEGDAIELHPLTCAAFNADFDGDQMAVHVPLSLEAQLEARILMLSTNNILSPSNGKPIIVPSQDMILGIYYLSQEPLSDKPVGYFTDIDAIQFALSTEQLKVHSTIISRIETVDENGNKKFEKYTSTAGRFLLANLLPKNYNIKFSLVDRLLPKKVVSEIIDIVFRFCGQKSTVIFCDKLKDLGFKHAFKAGISFGKDDLVIPQNKTQLIEDTKGLIANYETQYSEGLITRGEKYNKVVDAWSKCTDKVAGEMMKGISATEKTPDGLK

SEQ ID NO: 134828 - protein, 347 aa, Unknown
  Bacterial polypetide isolated from the Sargasso Sea
GKYKRMKFRGIICEKCGVEITKSNVRRERMGHINLATPVAHIWFLKSLPSRISLAIDMKLKEVERVLYFENFIVIEPGLTGLKKNQLLNEEELAKYQDEYGEEAFTAGIGAEAILEILKSLDLEVEKATLVKAINETKSKVAEERSIKRLKLIESFMETGQKPEWMILTVIPVIPPELRPLVPLDGGRFATSDLNDLYRRVINRNNRLKRLMDLKAPDIIIRNEKRMLQESVDALFDNGRRGRVITGTGKRPLKSLAEMLKGKQGRFRQNLLGKRVDYSGRSVIVVGPDLKLHECGLPKKMALELFKPFLYARLNKLGLASTIKQAKKLVEKETNAVWDALELIVRE

SEQ ID NO: 134829 - protein, 137 aa, Unknown
  Bacterial polypetide isolated from the Sargasso Sea
MQTSVIDLLVPTEIQVDDVSPTLSKVTLEPLERGFGHTLGNALRRILLSSMPGAAVTDVAIDGISHEYSTIEGVREDVIDILLNIKDMPINLIEGDSAEVTLDVKGPCDVLASSFDVPGNLELVNQDFHIATIVDKV

SEQ ID NO: 134830 - protein, 1049 aa, Unknown
  Bacterial polypetide isolated from the Sargasso Sea
MYKAKNSISIKLASPEKILEGSFGEVLKPETINYRSYKPEKDGLFCEKIFGPVKDFECHCGKYKGIRYRGIICDRCGVEVTTKKVRRNRMGHITLAVPVVHIWFLKSIPSKLSYILGKSAKQLESVIYYENYLVINPGKSGYKRFELIDEEAYLELEQEFGYEAVSQEEREEESYFYAAMGGEAIKDALAEMDLLELKQELELISSTTKSKQKREDALKRLKVVKDFAQDRNNKPEWMIVSILPVMPPELRPLVPLEGGRFAASDLNDLYRRIIIRNNRLKQLMDIQAPEVILRNEKRMLQESVDALFDNTKRKTAIRSGSKRPLKSISDMLRGKQGRFRQNLLGKRVDYSGRSVIVVGPELRMTECGIPKNMALELFKPHLIRELIRRDLAATPRSAKLMIENKESFVYEILENVVKDHPVLLNRAPTLHRLGIIAFQPVLIDGKAIRVHPLVCSAFNADFDGDQMAVHVPLSIPSQLEARVLMMASQNVLHPASGKPITLPSQDMILGCYYLTRDKKGQVGEGMSFGSIDEVKIAHDNGRVAMHAVINVRHKGEWHKNTTAGRAIFNSIIPDELGYYDEIISKKKLSFIIGESFVKAGNQRTVQLLDDLKDIGFKTATMSGVSISISDVIIPDAKHEIIDRAEKEVDKIQQRFDRHVLTEGERYNKVIDVWTKATSDVADVMMDGLRTDDQGFNALYISSDSGARGSGDQIKQLAGMRGLMAKPRKSMIGGGEIIESPIQSNFKEGLSVMEYFISTHGARKGLADTALKTADAGYLTRRLVDVAQDVTIYEDDCKTINGITVSDLKEGEEIVESLGERILGRTSSEKIVIDGEVIVKPGDIFDEKLADLIVENNFNSVKIRSILTCESRRGVCAKCYGWDLTRRKLVTKGTAVGIIAAQSIGEPGTQLTLRTFHIGGTATRIAEESDKKSRFNGTAKFSSDYEPAETLDEDGFNVVRCLSRSSKLSIVDTKNNVLDELNVPYGANVNVKEGAKVKKGMTLFSWDPYTDLILARQSGVIKMKDFIEGDTYQEEAVDGGKKQKVVTESK

SEQ ID NO: 134831 - protein, 190 aa, Unknown
  Bacterial polypetide isolated from the Sargasso Sea
MQTSVIDLLVPTEIQVDDVSPTLSKITLEPLERGFGHTLGNALRRILLSSMPGAAVTDVSIDGISHEYSTIEGIREDVINILLNIKDMPINLIEGDTAEVTLNVTGPCDVLASSFDVPGNVELVNQDFHIATIVDKVNLKMTLTVNTGRGYEPADLREDEDRVVGALKVDASFSPVRRVSYTVDNAEVRK

SEQ ID NO: 134832 - protein, 326 aa, Unknown
  Bacterial polypetide isolated from the Sargasso Sea
MTDNYDIIKDFLTPTEIVVEESGPNRSKIVLEPLEQGFGHTLGNALRRIILSSMPGTAISEVKIDGVLHEYSTIEGVQEDVIDILLNLKDLSIRLTEVEDAELTINKSGTGVVKAGDIELPNGVEVINPDHHIATLNEEGSLSMTMRVTRGRGFVPVKALAEEEGQEAGLLRLDATYSPINRVTYQVDNARVEQRTNLDRLTVDIDTDGTLDAEEILRISATILQHQLSAFAELGRLEEVIEEKEEAKIDPIMLRPVDELELTVRSANCLKAENIHYIGDLVTRMESDLLRTPNLGKKSLNEIKEVLLSRGLSLGLILDNWPPETN

SEQ ID NO: 134833 - protein, 496 aa, Unknown
  Bacterial polypetide isolated from the Sargasso Sea
MKNLLNIFNQKPFAEEFDHIRIGLSSPEMIRSWSYGEVKKPETINYRTFRPERDGLFCAKIFGPVKDYECLCGKYKRLKHRGVVCEKCGVEVTQSKVRRERMGHLELASPVAHIWFLKSLPSRIGLLLDMTLREIERVLYFEAYLVTDPGMTDLTQGQMLSEEQYIEALEMFGDDFSASMGAEAIHDILKDLDLNENLNQIQEDMEATASQIKIKRYQKRLKLIESLISSGNRPEWMILKVLPILPPDLRPLVPLDGGRFATSDLNDLYRRVINRNNRLQRLLDLNAPDIIVRNEKRMLQKSVDALLDNGRMGRAVTGSNKRPLKSLADMIKGKQGRFRQNLLGKRVDYSGRSVIVVGPTLKLHQCGIPKKMALELFKPFVFSKLIYQGEASTIKSAKRLVELEGAEIWDILDGVIRQHPILLNRAPTLHRLGIQAFEPVLVEGKAIQLHPLVCKAFNADFDGDQMAVHVPLSIEAQLESRALMMSSNKYTFTCKR

SEQ ID NO: 134834 - protein, 294 aa, Unknown
  Bacterial polypetide isolated from the Sargasso Sea
LRRILLSSIQGAPFTAIQIDGVLHEFSSIKGVREDVTDIVLNVKNLAIKLSSEGPKKIILDAVGPKEVKAKDISLVSDVEIINPDQTICNLDEKTKFHMELIVSTGRGYVLAQKNKSEETPLGMIAIDSLFSPVKRVSYKIDTTREGAALDYDKLVMEVETNGTVPAEDSVAFAARIFQDQLSMFVNFEDPKEVPKQKTPIEPEFNKNLLKKVEELELSVRSMNCLKNDNIIYIGDLVQKTEPEMLRTPNFGRKSLNEIKEVLSSMSLYLGMEIPNWPPDNIAELSKKLEESTY

SEQ ID NO: 134835 - protein, 318 aa, Unknown
  Bacterial polypetide isolated from the Sargasso Sea
MKKELTDLFKNSEIAEAQNFNSIKISLASPEKIKSWTYGEIKKPETINYRTFRPEKDGLFCARIFGPIKDYECLCGKYKRMKFRGIICEKCGVEVTKSNVRRERMGHINLATPVAHIWFLKSLPSRISLAIDMKLKEVERVLYFENFIVIEPGLTGLKKNQLLNEDELIKYQDEHGEEAFTAGIGAEAILEILKSINLEEERQSLIKAINETKSKVSEERSIKRLKLIESFIDTGNKPEWMILTTIPVIPPELRPLVPLDGGRFATSDLNDLYRRVINRNNRLKRLMDLKAPDIIVRNEKRMCKSQSMLYLITVEEVE

SEQ ID NO: 134836 - protein, 418 aa, Unknown
  Bacterial polypetide isolated from the Sargasso Sea
EAVREILLNLDLLKEQKKLRDSLKEIKSKVTEERTIKRLKLIESFISSGNKPEWMILTTVPVIPPELRPLVPLDGGRFATSDLNDLYRRVINRNNRLKRLLDLKAPDIIVRNEKRMLQESVDALFDNGRRGRVITGTGKRPLKSLAEMLKGKQGRFRQNLLGKRVDYSGRSVIVVGPELKLHQCGLPKKMALELFKPFLYARLDKLGLATTIKQAKRLVEKEKSEVWDALEHIIREHPVILNRAPTLHRLGVQAFEAKLIEGNAIELHPLVCAAFNADFDGDQMAVHIPLSLEAQLESRVLMMSTNNILSPSNGKPIIVPSQDIVLGIYYLSQSSKEKDAKPKGIFSNINEIEQALENKDISLHTKIISTFDSIDENGKKASVKYTSTAGRFLLANLLPKNKNIKFTLVDRLLTKKNV

SEQ ID NO: 134837 - protein, 108 aa, Unknown
  Bacterial polypetide isolated from the Sargasso Sea
MQTPNSNIDKNWKSLIKPNKLEIISSDDKSTAKVIAQPLEKGFGQTIGNSLRRILLSSIQGAAVTAIQIDGVLHEFSSIKGVREDVTDIVLNVKNLAIKSSVNAVKKI

SEQ ID NO: 134838 - protein, 342 aa, Unknown
  Bacterial polypetide isolated from the Sargasso Sea
METSSVNIKNWKSLIKPGKLDIQLSDDKSFAKIIAEPLEKGYGLTLGNSLRRILLSSIRGTAVTAIQIDGVLHEFSSIKGVREDVTDIVLNIKSLALKSNIESSKKLILDAKGPGEIKAADITSVADIEILNPELVICNLDEKTHFHMEMTVGNGKGYVPADMNKPEEPPLGLIPIDSLFSPVKKVSYSISTAREGKALDYDKLTMEVETNGSISAEDAVAYSARIFQDQLGMFVNFDEPQEVAIREKPSEPEFNKNLLRKVDELELSVRSMNCLKNDNIIYIGDLVQKSEGEMLRTPNFGRKSLNEIKEVLNTMSLYLGMEIPNWPPDNIAELSKKLEESI

SEQ ID NO: 134839 - protein, 105 aa, Unknown
  Bacterial polypetide isolated from the Sargasso Sea
MESTEVNPKNWKTLIKPAKLDVQLSDDKSHAKITAEPLEKGYGLTLGNSLRRILLSSIRGTAVTAIQIDGVLHEFTSIKGVREDVNDIVLNVKSLALKSSSDAQK

SEQ ID NO: 134840 - protein, 624 aa, Unknown
  Bacterial polypetide isolated from the Sargasso Sea
IISGPQLKLSECGLPKKMALELFKPFVMNSLVVKGYAHNIKSAKRLAEKSQPEIWDILEEVIKDHPVLLNRAPTLHRLGIQAFQPVLVEGSAIQLHPLVCTAFNADFDGDQMAVHVPLSRESVLEAKKIMLSTNNMLAPRSGEPIVAPNLDMVLGIYYLTGVEDEAKDKKMSFNSKESAIFAYETETLGLRELITVKLDGEFIETTIGRILWNDIIPEELGFRNMQFTKSSIEDLVSECYGSFGKDITTVVLDDIKDIGFKFATQSGTTIAIKDIVTPPQKQSLLSSADQKIRKLDEQYMEGMITEVERYQSSISVWEDVSKKMETAVSDSLPNYAGIYSMADSGAKGNLAQIKQMAGMRGLMSDPKGRIIELPIRSSFAEGLSVMEYFISTHGARKGLADTALRTADSGYLTRRLADVAQDLIINKEEDEGAVGIKIVKDTDGMGSTLADRIVSRFPSMPVTHPDTGEVMCDTDTIISPKIAKEIEEAGIEEVWCYSPLSSNAKKGISQKSYGASLATGKTAMMGEAVGIIAAQSIGEPGTQLTMRTFHTGGIAGSDITSGLPRVIELFEARIPKGVSILSEISGIVKLGNVGELRIVRISNTEKNSITTEIPETHRAIVKSG

SEQ ID NO: 134841 - protein, 326 aa, Unknown
  Bacterial polypetide isolated from the Sargasso Sea
MTDNYDIIKDFLTPTEIVVEESGPTRSKIVLEPLEQGFGHTLGNALRRIILSSMPGTAVSEVKIDGVLHEYSTIEGVQEDVIDILLNLKDLSVRLTEVEDAELTVSKSGSGTVTAADIELPTGVEIINPDHHIATLNDEGSINMTMRVTRGRGFVPVRPLDEDEGQETGLLRLDATYSPIKRVTYQVDNARVEQRTNLDRLTVDIDTDGTLEAEEILRISATILQHQLSAFAELGRLEEVIEEKEEAKIDPIMLRPVDELELTVRSANCLKAENIHYIGDLVTRMESDLLRTPNLGKKSLNEIKEVLLSRGLSLGLILDNWPPENN

SEQ ID NO: 134842 - protein, 454 aa, Unknown
  Bacterial polypetide isolated from the Sargasso Sea
MQDIIKNINKTSRRNFDLISCGLASPQMIRSWSWGEVKKPETINYRTFKPERDGLFCSRIFGPIKDFECLCGKYKRRKHRGVICEKCGVEVTATKVRRERMGHIELASPVAHIWFLKSLPSRIGLFLDMTLREIERVLYYESFVVVEAGITDLTKGQLLTEDEYYEALDEYDDDFTALMGAEAIQILLNEVDLEKELQIIKEELNTSGSETKIKKLQKRLKLIEAFKESGQKPEWMIMNVLPVLPPDLRPLVPLDGGRFATSDLNDLYRRVINRNNRLKRLLLLGAPEIIVRNEKRMLQESVDALLDNGRRGRAILGTNKRPLKSLADMIKGKQGRFRQNLLGKRVDYSGRSVVVSGPTLKLHQCGLPKKMALELFKPFIFNKLEQKGITITIKAAKQLVEEETPEVWDCLDEVIREHPVLLNRAPTLHRLGIQAFEPVLIEGKAIQLHPLVCT

SEQ ID NO: 134843 - protein, 535 aa, Unknown
  Bacterial polypetide isolated from the Sargasso Sea
MNIFSQNLGVQNFNSLKISIASPDDIRSWSFGEIKKPETINYRTFKPEKDGLFCSRIFGPVKDYECLCGKYKRMKFRGIICEKCGVEVTLSKVRRDRMGHIELAAPVSHIWFMKSLPSRIATLLDMTIKNLEKVLYFEQFIVVEPGLTDLKKGDIISEDQYIDYQDEYGEDSFSAAIGAEAIEQMLLNIDLDADFNQTKNDLLETKSELKKTKLTKRLKLLEAFILSKNKPEWMILRVLPVIPPELRPLVPLDGGRFATSDLNDLYRRVINRNNRLKRLIDLRAPDIIIRNEKRMLQESVDALFDNGRRGRVITSTNKRPLKSLSDMLKGKQGRFRQNLLGKRVDYSGRSVIVVGPNLKLHQCGLPKKMALELFKPFIFNKLDIYGWANTIKAAKKLVEKEDPRVWDILEEVIREHPVLLNRAPTLHRLGIQAFEPVLIEGKSIQLHPLVCTAFNADFDGDQMAVHVPLSLEAQLEARVLMMSTNNILSPSSGKPIIVPSQDIVLGIYYLSVMRNNQKGEGRNFLDTNEILKAVD

SEQ ID NO: 134844 - protein, 1372 aa, Unknown
  Bacterial polypetide isolated from the Sargasso Sea
MQDIIKNINKSSRRNFDLISCGLASPQMIRSWSWGEVKKPETINYRTFKPERDGLFCARIFGPIKDFECLCGKYKRRKHRGVICEKCGVEVTATKVRRERMGHIELASPVAHIWFLKSLPSRIGLFLDMTLREIERVLYYESFVVVEAGITDLTKGQLLTEDEYYEALDEYDDDFKALMGAEAIQILLNEVDLEKELQVIKEELNTSGSETKIKKLQKRLKLIEAFKESGQKPEWMIMNVLPVLPPDLRPLVPLDGGRFATSDLNDLYRRVINRNNRLKRLLLLGAPEIIVRNEKRMLQESVDALLDNGRRGRAILGTNKRPLKSLADMIKGKQGRFRQNLLGKRVDYSGRSVVVSGPTLKLHQCGLPKKMALELFKPFIFNKLEQKGITITIKAAKQLVEEETPEVWDCLDEVIREHPVLLNRAPTLHRLGIQAFEPVLIEGKAIQLHPLVCTAFNADFDGDQMAVHVPLSLEAQLEARALMMSTNNILSPASGEPIIQPNQDVVLGIYYLTKEDFGLPGEGRSFVDVHEVKRAFIEKQINLHTKIKVRVAEGDNKKIHDTTVGRCLLYEIMPKGLEFSKVNKTLKKKDVLNLISHVYKDFGLKDSVLFADQLMYLGFEYSTISGASIGVNDFEIPDDKESIITNAENEVQNIEQQFESGLLTKGEKYNKIIDIWSRTNEKVASSMMDALGDQIDTDKDGNETVTPSFNSVFMYADSGARGSPAQIRQLAGMRGLMSKPDGSIIESAITSNFREGLSMLEYFTSTHGARKGLADTALKTANSGYLTRRLVDVSQDVVITTEDCGTEEGITVEAIIDGASVIQTISERILGRVLQEDIKKGNKVLFKKGHLFDEESAMELQNSGIKKVKIRSPITCEASHGLCSKCYGRDLARGHLVHIGEAVGVVAAQSIGEPGTQLTMRTFHIGGAASGSAEDDSITTLRGGVIVFGSSLKTVEKKNGEFIVVSRNANLTIQDEDENLLEKYSVPYGAEILYSDKSKVEPGTLISKWDPLTLPIISEAEGTISFNDLTEDITMKVEVDDLTGSTTKEVIDVNERPVKGKTMTPMLTVLDAKKKVVGSYSMPSKSILMKNNGNKVTKGEFLARVPVEGTKTKDITGGLPRVADLFEARKPKDGAIYAETSGTLSYGKETKGRKRLVITPKKGDPVEMMIQKYRAVSFLEGDHVERGDILCHGPVDTHSLLALHGVEELAKHLIAEVQDVYRLQGVVINDKHIETICRQMMKKVTITDSGDSNYIEGDIADLGQVRAANKNLESSGKKPAVFDRMLLGITKAALSTDSFISAASFQETTRVLTEAAVTSRKDILKGLKENVVVGRLIPAGTGFAANQRASVSSEEIQDIEEALKKELLESFQ

SEQ ID NO: 134845 - protein, 343 aa, Unknown
  Bacterial polypetide isolated from the Sargasso Sea
MENINIIDKNWKSLIKPSKLAVTSNDDKSIATVIAEPLEKGFGQTIGNALRRILLSSIQGAAVTAIQIDGVLHEFSSIKGVREDVTDIVLNVKNLAVKLNASGSKKLVLDATGPKEVKAKDITSVNGVEILNLDQTICNLDENTKFHMEFIVNSGRGYVLAQKNKTDDTPLGLIAIDSLFSPVKKVSYTIDSTREGDALDYDKLTMQVETNGTIPAEDAVAFAARIFQDQLSMFVNFEDPKEIPTQIKSTEPEFNKNLLKRVEELELSVRSMNCLKNDNIIYIGDLVQKSESEMLRTPNFGRKSLNEIKEVLSSMSLYLGMEIPNWPPDNIVELSKKLEESTY

SEQ ID NO: 134846 - protein, 306 aa, Unknown
  Bacterial polypetide isolated from the Sargasso Sea
PLEKGYGLTLGNSLRRILLSSIRGAAVTSIQIDGVLHEFTSIKGVREDVTDIVLNVKSLALKSNSEGTKKLILDAKGPGEIKASDIAPVADVEILNPDLVICNLDENTTFHMEMNVNTGKGYVPAELNKPEEPPLGLIAIDSLYSPVKKVSYSVSTAREGKALDYDKLIMEVETNGSISAEDAVAYSARIFQDQLKMFVNFDEPVEAPVKEVSTEPEFNKNLLRKVDELELSVRSMNCLKNDNIIYIGDLVQKSEGEMLRTPNFGRKSLNEIKEVLTGMSLYLGMEIPNWPPDNIAEMSKKLEEAI

SEQ ID NO: 134847 - protein, 501 aa, Unknown
  Bacterial polypetide isolated from the Sargasso Sea
MEKIFDELSISLATSDQMRSWSFGEVKKPETINYRTLKPEKEGLFDERIFGPTKDWECSCGRYKRIRYRGIVCERCGVEVTRREVRRERMGHIELAAPVTHIWYFKGVPSRLGYFLDMSPKELEKVIYFAAYLVVSVDDKKRTKDLSEIEEAVEAEVEIVEEEFTEWEVKRLKQMKVEIKAMENAKVPEAEIQLRTKEIEKEIKQKQAKSDAEIKVIQEAFSTLKTLKPKTLIENDTLWREMIDKYDEYFTGGMGAEAVRELVQLVDLKAEMEKLKSDLDSKSAQRRQRAIQRMKVIKPFADGKNPPEAMILEVIPVIPPELRPMVQLDGGRFATSDLNDLYRRLINRNNRLKKLIELGAPDIIISNEKRMLQESVDALFDNGRRGRAVAGAGGRGLKSLSDMLKGKQGRFRQNLLGKRVDYSARSVIVVGPHLDLQQCGLPKMMALELFKPFVMKRLVELGLAQNIKSAKRMVERSRAQVWDVLAEVIEEHPVLLNRAPT

SEQ ID NO: 134848 - protein, 211 aa, Unknown
  Bacterial polypetide isolated from the Sargasso Sea
LASSFEVPGTVELVNPDFHIATIVDKVNLKMTLTVKTGRGYEPADLRDDEDRVIGALKVDASFSPVRRVSYTVDSARFEKRTDLDKLVIELETDGTLDPKLAIEHSATILQQQLSAFVDLDAIAEQEAKKDQNDFDPILLRSIEELELTVRSTNCLKAESIFLIGDLIHRSEFDLLKTPNLGKKSLNEIKDVLASKDLSLGMNVENWPPVG

SEQ ID NO: 134849 - protein, 1416 aa, Unknown
  Bacterial polypetide isolated from the Sargasso Sea
MSKELADLFKNSEISEAQNFNSIKISLASPEKIKSWTYGEIKKPETINYRTFRPEKDGLFCARIFGPIKDYECLCGKYKRMKFRGIICEKCGVEVTKSNVRRERMGHINLATPVAHIWFLKSLPSRIALAVDMKLKEIERVLYFENFIVIEPGLTGLKRNQLLNEEELARYQDEFGEEAFTAGIGAEAVLEMLKNLDLELERKNLINYIKETKSKVNEERAIKRLKLIESFIETGQKPEWMIMTVVPVIPPELRPLVPLDGGRFATSDLNDLYRRVINRNNRLKRLLELNAPDIIVRNEKRMLQESVDALLDNGRRGRVITGTNKRPLKSLADMIKGKGGRFRQNLLGKRVDYSGRSVIVSGPNLKLHQCGLPKKMALELFKPFVYGRLEHKELATTIKAAKRLVERETPEVWEALEEVIREHPVLLNRAPTLHRLGIQAFEPLLIEGKAIQLHPLVCVAYNADFDGDQMAVHVPLTVEAQLEARALMMSTNNILSPADGAPIINPTQDVVLGLYYMTREKVNSHGEGRVFSNPDEVQRAFESEQIDLHAKIKVRIENAEKGVFIEDTTVGRTLIWRITPIEVGFDNVNKTLDKKAVSSLIDLSYRKAGLKKTVIFADQLMYLGFDFSTRSGSSIGVDDFVIPDEKYEIVDKAEDEVKEIENQFSSGLVTRGERYNKVVDIWSRANERVAKAMMEKISKDSVEDSEGNEVEQASFNSVYIYADSGARGSPAQIRQLSGMRGLMSKPDGSIIETPITANFREGLSVLQYFISTHGARKGLADTALKTANSGYLTRRLCDVSMDSVITEDDCGTEDSIEMCAIIDGGEIIQDLTDRILGRVIAEPIFDNEGNELFPRDTLIDEDALLKIEPLNLSTLRVRSPMTCESSFGVCAKCYGRDLARGHLVHRGEAVGVVAAQSIGEPGTQLTMRTFHIGGAASSSSEDDSIISRNDGSVIFSDDIKSVKNKDKLEVVISRNSTLSISDNQGKIVEQYKIPYGSTLLVANKAKVELGQKIATWDPYTRPIISEASGKVKFADIEEGVSVRASTDELTGLSSIEVIDGSERPSAGKDLVPSVSLTDGRGKQLTHPENNQPFTYALPASALLNLEDGQKITAGEVIARIPLEGSKTKDITGGLPRVADLFEARTPKDAAVLAEESGMVSFGKETKGKVRLVITPDGASKKSQNVEMLIPKHRTLSVFEGERVEKGDIVSDGPYSPHDILRLKGIPSLTNFIVNEIQQVYRLQGVSINDKHIETILRQMLRKALIVDGGDTKFIQGDQVEYADLVEANKMTESNDQNPATYERVLLGITKASLATNSFISAASFQETTRVLTEAAVTGKKDGLRGLKENVVVGRLIPAGTGMDFHDKLKTKTPDSDEYTLSSEDLEAALRQEIQDTNTKAEEQSEPESEKPVDDNE

SEQ ID NO: 134850 - protein, 343 aa, Unknown
  Bacterial polypetide isolated from the Sargasso Sea
MSENEILDETVEVEEVEKEEIVLDLLNPMVIKLESQNELHSRVSIEPFERGFGYTLGNAIRRVLLSSLPGYAITEAQIDGVLHEYTTIEGVQEDVVEILLNLKGVAINIHDRDSADFVISKKGPCTVTAGDIQVDGDTEIVNPDHHIATISSKKELKMQIKIEKGTGYRPVPTQSKDADVTIGLLKLDASFSPIKTVTYSVEAARVENRTDLDKLIVDLETDGTIDPERAIKYAGAILQNQLSIFTNLTRVQEQTKEEEEVLIDPIMLRPVDELELTVRSANCLKAENANYIGDLVQKTEVELLRTPNLGKKSLNEIKEVLASHGLSLGMELDNWPPKEAVVD

SEQ ID NO: 134851 - protein, 270 aa, Unknown
  Bacterial polypetide isolated from the Sargasso Sea
MDATEVNIKNWKSLIKPPKLDINLSDDKSYAKIIAEPLEKGYGLTLGNSLRRILLSSIRGTAVTAIQIDGVLHEFTSIKGVREDVTDIVLNVKSLALKSNSETTNKLILDAKGPGEIKASNITTSADIEILNPDLVICNLDENTNFHMEMTVSNGKGYVSADMNKPEEPPLGLIAIDSLFSPVKKVSYSISTAREGKALDYDKLTMEVETNGSISAEDAVAYSARIFQDQLGMFVNFDEPQEVIVREQPTEPEFNKNLLRKVDELELSVR

SEQ ID NO: 134852 - protein, 486 aa, Unknown
  Bacterial polypetide isolated from the Sargasso Sea
MSIEYVQLQLASPTEIKRWSQRMLPTGELVGEISKADTINYRTFKPERGGLFCERIFGSTVNRECSCGKTKRRKLIAPLNYNRLKLQPTNSQATNVQDVIEVCPACGVEPTNSKVRRYRMGCISLKKPVAHMWYFRNNPNVLASILNMRSQEIDETVHFQTYTASKPGTQNYCLHGGVQWFVNHWEPMHPYFAGELDPLTDTAAPWNGSKAVMPSQIKTIENCGAEALQELLTRIDLAFLQRMLARKLKNAIERKKLASKSLRKQHKRRKKAKLLGRSDQKNYGITVKVKTYARRLEFVRSLARKGLRPEWMVLSVFPVLPPDLRPMIQMSSGRFATSDLNDLYRRLIYRKIRFEKFLSLFDEEFLPDLLIRHDLCLLQEAADSIIDNGRLEKPAQRPNRKPFKSLTSIIEGKHGRFRQNLLGKRVDYSGRSVIVVGPKLRLHQCGLPREMALELFQPFVIRALLEESGVKNIRAAKNLLQRRPQM

SEQ ID NO: 134853 - protein, 329 aa, Unknown
  Bacterial polypetide isolated from the Sargasso Sea
MNTTDVNIKNWKSLIKPPKLDVNLSDDKSYAKIVAEPLEKGYGLTLGNSLRRILLSSIRGTAVTAIQIDGVLHEFTSIKGVREDVTDIVLNVKSLALKSNSETTNKLILDAQGPGEIKASNIKTSADIEILNPDLVICNLDENTNFHMEMTVSNGKGYVSADMNKPEEPPLGLIAIDSLFSPVKKVSYSISTAREGKALDYDKLTMEVETNGSISAEDALAYSARIFQDQLGMFVNFDEPQEVIVREQPTEPEFNKNLLRKVDELELSVRSMNCLKNDNIIYIGDLVQKSEGEMLRTPNFGRKSLNEIKEVLTGMSLYLGMEIPNWPPR

SEQ ID NO: 134854 - protein, 342 aa, Unknown
  Bacterial polypetide isolated from the Sargasso Sea
MSENENEILEEIIEEEEVEKEEIVLDLLNPMVIKLESQNELHSRVSIEPFERGFGYTLGNAIRRVLLSSLPGYAITEAQIDGVLHEYTTIEGVQEDVVEILLNLKGVAINIHDRDSADFVISKKGPCKVTAGDIQVDGDTEIVNPDHHIATISSKKELKMQIKIEKGTGYRPVPTQSKDADVTIGLLKLDASFSPIKTVTYSVEAARVENRTDLDKLIVDLETDGTIDPERAIKYAGAILQNQLSIFTNLTRVQEQKKEEEEVLIDPIMLRPVDELELTVRSANCLKAENANYIGDLVQKTEVELLRTPNLGKKSLNEIKEVLASHGLSLGMELENWPPKEA

SEQ ID NO: 134855 - protein, 104 aa, Unknown
  Bacterial polypetide isolated from the Sargasso Sea
MQTSVIDLLVPTEIQVDDISPNLSKVTLEPLERGFGHTLGNALRRILLSSMPGAAVTDVVIDGISHEYSTIEGIREDVIDILLNIKDMPVNLIEGNTAEISLDI

SEQ ID NO: 134856 - protein, 558 aa, Unknown
  Bacterial polypetide isolated from the Sargasso Sea
PELRPLVPLDGGRFATSDLNDLYRRVINRNNRLKRLMDLKAPDIIVRNEKRMLQESVDALFDNGRRGRVITGTGKRPLKSLAEMLKGKQGRFRQNLLGKRVDYSGRSVIVVGPDLKLHECGLPKKMALELFKPFLYARLNKLGLASTIKQAKKLVEKETNAVWDALEVIVREHPVILNRAPTLHRLGVQAFEPKLIEGDAIELHPLTCAAFNADFDGDQMAVHIPLSLEAQLEARVLMMSTNNILSPSNGKPIIVPSQDMILGIYYLSLPPYQEKKIEGYFVNNSEIEQGLESGKIKIHSRIISRFETIDEKGSQIFEKHTSTAGRFLLANLLPKNKDIKFSLIDRVLPKKVVSEIIDFVFRYTGQKSTVIFCDKLKDLGFKHAFKAGISFGKDDLIIPQNKEQLIDETKQLIKDYENQYSEGLITRGEKYNKVVDAWSKCTDKVASEMMKGISATNKSDKGLDINSVFMMADSGARGSAAQMKQLAGMRGLIAKPSGEIIESPITSNFKEGLTALEYFNSTHGARKGLADTALKTANSGYLTRRLCDVAQDLTVTKK

SEQ ID NO: 134857 - protein, 579 aa, Unknown
  Bacterial polypetide isolated from the Sargasso Sea
IEGKAIQLHPLVCVAFNADFDGDQMAVHVPLTLEAQLEARALMMSTNNILSPADGSPIINPTQDVVLGLYYMTRDNANASGGGRVYSNPDEVLRAYETGNLEIHSPVKVRILHENGETSLEDTTVGRVIIWRVTPLEVGFNNINDVLNKKSVSKLVDISYRKAGLKKTVIFADQLMYLGFDFSTRSGSSIGVNDFVIPEEKAKIIESSEKEVKAIEKQFDSGLVTRGERYNKVIDIWSRANEQVAKAMMEKISTETATSPNGEKVDQSSFNSVYIYADSGARGSPAQIRQLSGMRGLMSKPDGSIIETPITANFREGLSVLQYFISTHGARKGLADTALKTANSGYLTRRLCDVSMDSVINIDDCGTSESITVTSIIDGGEIIQALTDRILGRVIAEPIFDAEGNELFAVNTMLDEDAVKKIDELNLSSLKIRSPMTCDAPIGVCANCYGRDLARGHLVHRGEAVGVVAAQSIGEPGTQLTMRTFHIGGAASSSSEDNAIYNKNAGAVSFSDDMKTVTNKDKLEVVVSRNAMCSISDVNGKIIEQYRVPYGAVLEVDSTDDLEDGVKVASWDPYTRPII

SEQ ID NO: 134858 - protein, 342 aa, Unknown
  Bacterial polypetide isolated from the Sargasso Sea
METANVNLKNWKSLIKPGKLDINLNDDKSYAKIVAEPLEKGYGLTLGNSLRRILLSSIRGTAVTAIQIDGVLHEFTSIKGVREDVTDIVLNVKSLALKSTSEGSKKLVLDAKGPGVIKASDITKINEIEILNPDLVICNLDENTNFHMEMTIGSGKGYVPAELNKPDEPPLGLIPIDSLFSPVKKVSYSVSTAREGKALDYDKLTIEIETNGSISAEDALAYSARIFQDQLGMFVNFDEPQEVTITEKPSEPEFNKNLLRKVDELELSVRSMNCLKNDNIIYIGDLVQKSEGEMLRTPNFGRKSLNEIKEVLNGMSLYLGMEIPNWPPDNIAELSKKLEESI

SEQ ID NO: 134859 - protein, 491 aa, Unknown
  Bacterial polypetide isolated from the Sargasso Sea
MVEEDQSRELEENHPDLMLGMGAEAIQTLLRRIELDELENQLQIEMREVNSETRRKRIAKRLNVIGSLLKSGNAVDSMIIDNLPVLPPELRPLVPLEGGRFATSDLNDLYRRVIHRNNRLKRLIELRAPGIIVKNEKRMLQESVDALFDNGRRGRPMVGSNKRPLKSISDMLKGKQGRFRQNLLGKRVDYSGRTVIVVGPELKLHQCGLPKKMALELFKPFIFHKLIDYQEIHTIKNAKKVLEDNPPEVWAILEEVVREHPVLLNRAPTLHRLGIQAFEPILIEGKAIQLHPLVCTAFNADFDGDQMAVHVPLSVEAQLESKILMMSTNNVLSPANGKPVMTPTQDMVLGLYWITRERAGVMGEGKIFSNPGEVQTAFDHGQVDLHAKIKVRLETNNMPPTDLQNETADSSRNLVESTVGRVLLSMVVPKEVPFDSVNIHLKKKHMADLVDESFRKAGSIKTVKMLDDLKNMGYTYATKAGFSIGMDDMVI

SEQ ID NO: 134860 - protein, 334 aa, Unknown
  Bacterial polypetide isolated from the Sargasso Sea
MSTTMKELLKPSKCTVNEKDNNTSEIIIEPLERGFGHTLGNALRRVLLSSMPGCAVTELEILEPEVLHEYTTMEGVQEDVTDIILNLKGLAIIMHSKDEATLTLKKSGPGEVCARDITVDHDVEIANPEHVIANLTKAGQLSMVMKVVRSRGYKPVIAGGKDDEQTIGKIKLDASYSPVTRVSYDVGNARVEQRTDLDKLILQLETDGTIDPNDAIREAATILRNQLVIFVDLEAEEAIEASKSSEPEIDPILLRPVDDLELTVRSANCLKAESIYYIGDLIQRTEVELLKTPNLGKKSLTEIKDILASRGLSLGMHLDNWPPSGFNNQEALSV

SEQ ID NO: 134861 - protein, 282 aa, Unknown
  Bacterial polypetide isolated from the Sargasso Sea
MKNLLNIFNQKPFAEEFDHIRIGLSSPEMIRSWSYGEVKKPETINYRTFRPERDGLFCAKIFGPVKDYECLCGKYKRLKHRGVVCEKCGVEVTQSKVRRERMGHLELASPVAHIWFLKSLPSRIGLLLDMTLREIERVLYFEAYLVTDPGMTDLTQGQMLSEEQYIEALEMYGDDFSAAMGAEAIHDILKDLDLQENLNQIQEDMEATASQIKIKRYQKRLKLIESLISSGNRPEWMILKVLPILPPDLRPLVPLDGGRFATSDLNDLYRRVINRNNRLQRL

SEQ ID NO: 134862 - protein, 215 aa, Unknown
  Bacterial polypetide isolated from the Sargasso Sea
MQYQIDRIDHQIADDRSQIGTFLIGPLERGQATTLGNSLRRVLMGGLEGSAVTAVRIAGINHEYATIPGVREDVLDILLNCKQLSINSSNPDLEIGRLVASGPMEVKANDIQFSSQVEIVDGEKPIATIQDGHNLELEIHVERGVGYRPVDRKNEETSAIDLLQIDAVFMPVKRVNFTIDETVVAEGGAGRERLTMEVVTDGSTSPDDAIAEAAK

SEQ ID NO: 134863 - protein, 274 aa, Unknown
  Bacterial polypetide isolated from the Sargasso Sea
MSENENENIDEIIEKEEVEKEEIVLDLLNPMVIKLESQNELHSRVSIEPFERGFGYTLGNAIRRVLLSSLPGYAITEAQIDGVLHEYTTIEGVQEDVVEILLNLKGVAINIHDRDFADFVISKKGPCTVTAGDIQVDGDTEIVNPDHHIATISSKKELKMQIKIEKGTGYRPVPTQSKDADVTIGLLKLDASFSPIKTVTYSVEAARVENRTDLDKLIVDLETDGTIDPERAIKYAGAILQNQLSIFTNLTRVQEQKKEEEEVLIDPIMLRPVD

SEQ ID NO: 134864 - protein, 386 aa, Unknown
  Bacterial polypetide isolated from the Sargasso Sea
MNKEVLDIFNQNKATQQFDHIRIGIASPEKILSWSYGEIKKPETINYRTFKPERDGLFCARIFGPVKDYECLCGKYKRMKFKGIVCEKCGVEVTLSKVRRERMGHIELASPVAHIWFLKSLPSRIGLILDMMLKDLEKVLYFESFIVLDPGLTPLDKLQLLTEDEFIDAQNEYGADNFKAGIGAEAIRLLLEELDLEELSESIRKEIKETTSELKPKKLAKRLKVVEAFKVSGNKPEWMILKVIPVIPPELRPLVPLDGGRFATSDLNDLYRRVINRNNRLRRLMDLRAPDIIIRNEKRMLQESVDALFDNGRRGRVITGSNKRPLKSLSDMLKGKQGRFRQNLLGKRVDYSGRSVIVVGPELKLHQCGLPKKLALELFKPFIYSR

SEQ ID NO: 134865 - protein, 1088 aa, Unknown
  Bacterial polypetide isolated from the Sargasso Sea
SYGEIIKPETINYRSYKPEKDGLFCEKIFGPVKDYECHCGKYKGIRYRGIICDRCGVEVTRKKVRRDRMGHITLAVPVVHIWYLRSIPSKLSYLAGISTKDLEKIVYYEQFLVIEPGKSDAAQFSIIDEDEYMEYERSYGFDAVSEEDRDNEDYFYAAMGGEALREMLSRMNLVELRRDMEDVLKNSKSKQKREEALKRLKVVKSFLVDISTVKKINKPEWMVISILPVIPPELRPLVPLDGGRFAASDLNDLYRRIIIRNNRLKQLMEIKAPDVILRNEKRMLQESVDALFDNSRRKTAIRSGTRRPLKSISDMIRGKTGRFRQNLLGKRVDYSGRSVIVVGPELNLHECGLPKNMGLELFKPHMISELMSRGYAQTPRSAKLMIEDKDPIVYKVLEYVVKDHPVLLNRAPTLHRLGIQSFQPVLVDGKAIRIHPLVCSAFNADFDGDQMAVHVPLSLAAQMEARVLMLSSHNILHPANGKPLALPSQDMVLGTYYLSLKKEGCKGEGKTFGSFNEVLLAYEGKAVEVNTIINVRHNGNWYKNTTVGRVVINSIIPSEIDYVDDIIDKKRLSKLVNEIYLLSGNKKTVTFLDNLKTLGFNAATQAGLSIAVSDIQIPELKDSIIDEAQNEIDLIKDKYQRHILTEGERYNKVIDVWTHATNNVASTMMEGMKTSDQGFNPVFMMADSGARGSQDQIKQLAGMRGLMAKPQKSMTGSKGEIIESPITSNFKEGLSVQEYFISTHGARKGLADTALKTADAGYLTRRLVDVAQDVVISEVDCGTINGIVADDLKEGEDIIEPLSERILGRTLLDDFIENGKVLIKAGTMIRDDEAKLVSDSNVESLRIRSVLTCESLRGVCAKCYGWNPSNHKLVDLGTSVGIQAAQSIGEPGTQLTLRTFHIGGTATRIIEQSEMQTKRAGIVKFSDNLEIAEAKDSSGISVVRCMVRHAKLTIAAKDGKTFDYNVPYGANLNVADGEKVNAETILFQWDPYTDVILARQTGIVELKDFIENETYQVEAVEGGKKQMVIVESKDRNLSPHIEIIDSKGSILAGGTILPVTANLTVRQGDKVKRGQTLVKIPRAMEKHV

SEQ ID NO: 134866 - protein, 235 aa, Unknown
  Bacterial polypetide isolated from the Sargasso Sea
MQYQIDRIEHQIADDRSQTGTFLIGPLERGQATTLGNSLRRVLMGGLEGSAVTAVRIAGINHEYATIPGVREDVLDILLNCKQLSINSSNPELEIGRLVASGPMEVKANDIQFSSQVEIVDGEKPIATIQGGHNLELEIHVERGIGYRPVDRKNEETTAIDLLQIDAVFMPVKRVNFSIDETAVAEGGSGRERLKMEVVTDGSMSPDDAIAEAANQLIELFQPLATVTMVEEIPE

SEQ ID NO: 134867 - protein, 597 aa, Unknown
  Bacterial polypetide isolated from the Sargasso Sea
SVIVVGPELKLHQCGIPKKMAIELFKPFIYSKLEKYNLAATIKAAKKMVERERPEVWDILAEVIREHPVLLNRAPTLHRLGIQAFEPILIEGKAIQLHPLVCTAFNADFDGDQMAVHVPLSLESQLEARVLMMSTNNILSPANGKPIIVPSQDMILGLYYLSLVSHKGTGDKMLFSSIEELTIALDQGVVSLHSRIKSRYQTLDENFQPKILTVDTTPGRMILSEILPKHPKVSFDLINRILTKKEISNAIDVVYRHCGQKKTVIFADKLMEIGFREACKAGISFGKDDLMIPSNKSDLLAETEKKVKLYEKQYSEGLITRGEKYNKVVDAWAKCSDQVAEEMTKIMVPRTTDNVEQFNSVFMMADSGARGSAAQLKQLSGMRGLMAKPSGEIIETPIVSNFKEGLTVLEYFNSSHGARKGLADTALKTANSGYLTRRLVDVAQDSIITIDDCFTNKFITLEELVEDGEVIESLSEKCLGRTLAEDITDKETNNVIAKTGDIVSEEHLSLIDSSGLTSVKVRSVLTCEAEFGVCGKCYGRDLARGTPVNVGEAVGVIAAQSIGEPGTQLTMRTFHIGGAAQKGTEVSSIESKYDGTV

SEQ ID NO: 134868 - protein, 608 aa, Unknown
  Bacterial polypetide isolated from the Sargasso Sea
MTNSNLRTENHFDYVKISIASPQRIMDWGQRTLPNGQVVGEVTKPETINYRTLKPEMDGLFCEKIFGPSKDWECHCGKYKRVRHRGIVCERCGVEVTESRVRRHRMGYIKLAAPVSHVWYLKGIPSYVAILLDIPLRDVEQIVYFNCYVVLDPGDHKELKYKQLLTEDEWLEIEDEIYAEDSTIENEPFVGIGAEALKQLLEDLDLSQIAEELREEITHSKGQKRAKLIKRIRVIDNFIATNAKPEWMVLDAIPVIPPDLRPMVQLDGGRFATSDLNDLYRRVINRNNRLARLQEILAPEIIVRNEKRMLQEAVDALIDNGRRGRTVVGANNRPLKSLSDIIEGKQGRFRQNLLGKRVDYSGRSVIVVGPKLKMHQCGLPKEMAIELFQPFVIHRLIRQNIVNNIKAAKKLIQKADDEVMQVLQEVIEGHPILLNRAPTLHRLGIQAFEPKLVGGRAIQLHPLVCPAFNADFDGDQMAVHVPLALEAQTEARMLMLASNNILSPATGEPIVTPSQDMVLGSYYLTALQPNYQKPAFGNNKKTYASLEDVISAFEDKRLSLHEWVWVRFNGEVEDEDEMSNPQKTEELDDGSRIELWNLRRDRFDSQNN

SEQ ID NO: 134869 - protein, 356 aa, Unknown
  Bacterial polypetide isolated from the Sargasso Sea
MYKAKNSISIKLASPEKILEGSFGEVLKPETINYRSYKPEKDGLFCEKIFGPVKDFECHCGKYKGIRYRGIICDRCGVEVTTKKVRRNRMGHITLAVPVVHIWFLKSIPSKLSYILGKSAKQLESVIYYENYLVINPGKSGYKRFELIDEEAFLELEQEFGYEAVSQEEKEEESYFYAAMGGEAIKDALAEMDLLELKQELELISSTTKSKQKREDALKRLKVVKDFAQDRNNKPEWMIVSILPVMPPELRPLVPLEGGRFAASDLNDLYRRIIIRNNRLKQLMDIQAPEVILRNEKRMLQESVDALFDNTKRKTAIRSGSKRPLKSISDMLRGKQGRFRQNLLGKRVDYSGRSVI

SEQ ID NO: 134870 - protein, 492 aa, Unknown
  Bacterial polypetide isolated from the Sargasso Sea
MKKELTDLFKGSEISEAQNFNSIKISLASPEKIKSWTFGEIKKPETINYRTFRPEKDGLFCARIFGPIKDYECLCGKYKRMKFRGIICEKCGVEVTKSNVRRERMGHINLATPVAHIWFLKSLPSRIALAVDMKLKEIERVLYFENFIVIEPGLTGLQKNQLLNEEELAKYQDEFGEESFTAGIGAEAVLEMLKNLDLELERKNLVSFIKETKSKVNEERAIKRLKLIESFIETGQKPEWMIMTVVPVIPPELRPLVPLDGGRFATSDLNDLYRRVINRNNRLKRLMDLKAPDIIVRNEKRMLQESVDALFDNGRRGRVITGTGKRPLKSLAEMLKGKQGRFRQNLLGKRVDYSGRSVIVVGPDLKLHECGLPKKMALELFKPFLYARLNKLGLASTIKQAKKLVEKETNAVWDALELIVREHPVLLNRAPTLHRLGVQAFEPKLIEGDAIELHPLTCAAFNADFDGDQMAVHVPLSLEAQLEARILMLSTK

SEQ ID NO: 134871 - protein, 539 aa, Unknown
  Bacterial polypetide isolated from the Sargasso Sea
DLNDLYRRLINRNNRLKKLIELGAPDIIISNEKRMLQESVDALFDNGRRGRAVAGAGGRGLKSLSDMLKGKQGRFRQNLLGKRVDYSARSVIVVGPHLDLQQCGLPKMMALELFKPFVMKRLVELGLAQNIKSAKRMVERSRAQVWDVLAEVIEEHPVLLNRAPTLHRLGIQAFEPILVEGKAIQVHPLVCEAFNADFDGDQMAVHVPLSAEAQAEARVLMLATNNVLSPASGNPIVSPSQDMVIGLYYITECHDELDTAEYAFADLNEAQLAYEAGHISLQTPIKVRVGNLAGSEDIYNKIKNRFSELLTPEYVSGDTLTNTTLGRMHFNSILPDDFPYIEASVRKPEMKKIISEVIETYNKAELRQFLDSMKKVGFNFGAKAGLSVAMTDVKTPPTKNQILEKYENEAEKVEKLYLDDIITETERKQKIIEIWNEATDQVQYAMSAELESERFNPVDMMVKSGARGNMMQVRQLAGMRGLVANPKGDIIERPIKSNFREGMSVLEYFISTHGARKGLADTALRTADSGYLTRRLVEL

SEQ ID NO: 134872 - protein, 474 aa, Unknown
  Bacterial polypetide isolated from the Sargasso Sea
GDEFTAGMGAEAVQILLQELDIEDEIRIIREEIPQTNSETKLKKLSKRLKLLEAFNNSGNKPEWMVMNVLPVLPPDLRPLVPLEGGRFATSDLNDLYRRVINRNNRLKRLLELNAPEIIVRNEKRMLQESVDALLDNGRRGRVITGTNKRPLKSLADMIKGKGGRFRQNLLGKRVDYSGRSVIVAGPNLRLHQCGLPKKMALELFKPFVYGKLEQRELATTIKGAKKLVERETPEVWEVLEEVIREHPVLLNRAPTLHRLGLQAFEPKLIEGKAIQLHPLVCVAFNADFDGDQMAVHVPLTLEAQLEARALMMSTNNILSPADGAPIINPTQDVVLGLYYMTRDNANALGAGRVFSNSDEVLRAYETENLEIHSPIKVRIDHGNDKKTLEETTVGRILIWRITPKEVGFENINNVLNKKLVSKLVDISYRKAGLKKTVIFADQLMYLGFDFSTRSGSSIGVNDFVIPKEKAEII

SEQ ID NO: 134873 - protein, 80 aa, Unknown
  Bacterial polypetide isolated from the Sargasso Sea
MQISVIDLLVPTEIQVENVSDTVSKVTLEPLERGFGHTLGNALRRILLSSMPGAAVTDVVIDGISHEYSTIEGVREDVID

SEQ ID NO: 134874 - protein, 340 aa, Unknown
  Bacterial polypetide isolated from the Sargasso Sea
MSIINNWQALIKPSKLKLISDEDTQYKATLIAEPLERGFGLTLGNALRRVLLSSLQGTAVTAIKIDNVLHEFSSIDGVREDVTDIVLNIKSLSLNMHSEGVRKMNLNVTGPGEITAGMINTPSEIDIINPELVICNLDDNTEFNMELTVAKGKGYVAAEHNKPEDSAIGLIPIDSIFSPVKQVSYSIENTREGKVLDYDKLTMSIETNGSVSPEDAIAFAARIIQDQLQSFINFEEPEEIQEEPDALEPQFNKNLLRKVEELELSVRSMNCLRNDNIIYIGDLVQKSEIEMLRTPNFGRKSLNEIKEVLGTMSLYLGMEVPNWPPENIEEMARKIEDPYN

SEQ ID NO: 134875 - protein, 328 aa, Unknown
  Bacterial polypetide isolated from the Sargasso Sea
MKKNDFLKPKLVDISTISSTHAKISIEPLERGFGHTLGNALRRVLLSSLPGSAVTEVTIENILHEYSTIEGVQEDVLEILLNIKKLALVLPSKDTLDITLRKKGVGPVLASDISDNPDLEIKNPNFCLANITNDKTELVINMTVTKGRGYQQAQKRKFNELDDLGIGKMQLDASFSPVVLVTYNVETARVKQRTDLDKLVIDLKTNATIEPEDAIRKAGQLLRNQLDVFTYLEVHEETEEESDTPQIDPVLLRPVDDLELTVRSANCLKAENIYYIGDLVQRSENELLKTPNLGKKSLTEIKDVLATHSLQLGQKLEDWPPKNIDKRI

SEQ ID NO: 134876 - protein, 321 aa, Unknown
  Bacterial polypetide isolated from the Sargasso Sea
MQISVIDLLVPTEIQVENVSDTVSKVTLEPLERGFGHTLGNALRRILLSSMPGAAVTDVVIDGISHEYSTIEGVREDVIDILLNLKDMPVKLIEGNEAELKLSVDGPCEVTSSSFEAPGNVELTDADHHVVSLVDKIKLNMSVFVRTGRGYEPADIRDDENNTVGGLKVDASFSPVKRVSYSVENARFEKRTDLDKLILELETDGTIDAKMAIEHSATIMQQQLAAFVDLEAIAEQEAKKEQNDFDPLLLRSIEELELTVRSTNCLKAESIFLIGDLIQRSEFDLLKTPNLGKKSLNEIKDVLASKGLSLGMVLDNWPPMG

SEQ ID NO: 134877 - protein, 93 aa, Unknown
  Bacterial polypetide isolated from the Sargasso Sea
VDWEEVIEEKEEVNIDPVMLRPVDELELTVRSANCLKAENIHYIGDLVTRMESDLLRTPNLGKKSLNEIKDVLASRGLSLGLVLEHWPPENVS

SEQ ID NO: 134878 - protein, 699 aa, Unknown
  Bacterial polypetide isolated from the Sargasso Sea
LTNLKKNQLLGEEELIKYQDEYGEEAFTAGIGAEAILEILKSINLEDERNLLIKNINETKSKVSEERSIKRLKLIESFIETGNKPEWMILTTVPVIPPELRPLVPLDGGRFATSDLNDLYRRVINRNNRLKRLIDLKAPDIIVRNEKRMLQESVDALFDNGRRGRVITGTGKRPLKSLAEMLKGKQGRFRQNLLGKRVDYSGRSVIVVGPDLKLHECGLPKKMALELFKPFLYARLNKLGLASTIKQAKKLVEKERNEVWDALELIVREHPVILNRAPTLHRLGVQAFEPKLIEGNAIELHPLTCAAFNADFDGDQMAVHVPLSLEAQLEARVLMMSTNNILSPSNGKPIIVPSQDMILGIYYLSQPPYQSEKVEGYFVNTSEIEHALEIGQIKVHSRIVSRFETIDENGNIKYEKHISTVGRFLLANLLPKNINNKFSLVDRLLPKKIVSEVIDHVFRFSGQKSTVIFCDKLKDLGFKHAFKAGISFGKDDLVIPDNKQQLIDETKKLISDYENQYAEGLITRGEKYNKVIDAWSKCTDRVASEMMKRISATEITDDGLKINSVFMMADSGARGSAAQMKQLAGMRGLIAKPSGEIIESPITSNFKEGLTALEYFNSTHGARKGLADTALKTASSGYLTRRLCDVAQDLTITKPKCDMKNCGSIKLSEVLEGGNIMVSLSERALGRVAAKDVKNPLHR

SEQ ID NO: 134879 - protein, 345 aa, Unknown
  Bacterial polypetide isolated from the Sargasso Sea
MSENENEILEEIVEEEEVEKEEIVLDLLNPMVIKLESQNELHSRVSIEPFERGFGYTLGNAIRRVLLSSLPGYAITEAQIDGVLHEYTTIEGVQEDVVEILLNLKGVAINIHDRDSADFVISKKGPCTVTAGDIQVDGDTEIVNPDHHIATISSKKELKMQIKIEKGTGYRPVPTQSKDADVTIGLLKLDASFSPIKTVTYSVEAARVENRTDLDKLIVDLETDGTIDPERAIKYAGAILQNQLSIFTNLTRVQEQKKEEEEVLIDPIMLRPVDELELTVRSANCLKAENANYIGDLVQKTEVELLRTPNLGKKSLNEIKEVLASHGLTLGMELENWPPKEAVVD

SEQ ID NO: 134880 - protein, 232 aa, Unknown
  Bacterial polypetide isolated from the Sargasso Sea
MNKYDFLKPKLVDIEMLNASHAKITIEPLERGFGHTLGNALRRVLLSSLPGSAVTEVTIENILHEYSTIEGVQEDVLEILLNIKKLALVLHEKESVEITLRKKGSGPVLASDISDNPDLEIKNPDFCIANITNEKTELVINMIVSTGRGYQPAQKRKFNEQEDLGIGKMQLDASFSPVLQVTYNVDTARVKQRTDLDKLIIDLKTNATIEPEDAIRKAGQVLRDQLEVFTYL

SEQ ID NO: 134881 - protein, 278 aa, Unknown
  Bacterial polypetide isolated from the Sargasso Sea
GVLHEFSTIEGVREDVTDIIMNLKNVTFNSRSNHTQKLSLNIKGPKEVISADFEENPEVEIIDKDAVIMNVDSNREVNIEIFLDVNKGYISSEKNKDNENKSVGQIMLDATYSPVKRVSFNVENSRIGQDTEFDKLILDIETNGTVSPDDAAALAARILQDQLKPFINFEEPTEDERKKLQSSNEPQFNKNLLKKVDELELSVRSANCLKNDNIFYIGDLVQKTEGEMLRTPNFGRKSLDEIKEVLSSMSLSMGMDLPGWPPENIEELSKKYEDPFKV

SEQ ID NO: 134882 - protein, 368 aa, Unknown
  Bacterial polypetide isolated from the Sargasso Sea
MEKNLSRNFNNQNIQPENNFDSIKITLASPEKIKSWSYGEIKKPETINYRTFRPEKDGLFCSRIFGPVKDYECLCGKYKRMKFRGIICEKCGVEVTKSNVRRERMGHIDLACPVAHIWFLKSLPSRIALAIDMKLKEVEKVLYFESFIIVEPGLTTLKKGQLISEEALLKAQEEFGEDAFSAGIGAEAVREILVNLDLKKEQKKLRESLAEIKSKVTEERTIKRLKLIESFISSGNKPEWMILTSVPVIPPELRPLVPLDGGRFATSDLNDLYRRVINRNNRLKRLLDLKAPDIIVRNEKRMLQESVDALFDNGRRGRVITGTGKRPLKSLAEMLKGKQGRFRQNLLGKRVDYSGRSVIVVGPELKLI

SEQ ID NO: 134883 - protein, 434 aa, Unknown
  Bacterial polypetide isolated from the Sargasso Sea
NRLKRLMDLKAPDIIVRNEKRMLQESVDALFDNGRRGRVITGTGKRPLKSLAEMLKGKQGRFRQNLLGKRVDYSGRSVIVVGPDLKLHECGLPKKMALELFKPFLYARLNKLGLASTIKQAKKLVEKETNAVWDALELIVREHPVLLNRAPTLHRLGVQAFEPKLIEGDAIELHPLTCAAFNADFDGDQMAVHVPLSLEAQLEARILMLSTNNILSPSNGKPIIVPSQDMILGIYYLSQEPLTDKPKGYFLDADQIEFALSSDQIKVHSTIISRFETLDEKGNKKYEKYTSTAGRFLLANLLPKNNNIKFSLIDRLLPKKTVSEIIDIVFRFCGQKTTVIFCDKLKDLGFKHAFKAGISFGKDDLIIPQSKTQLIEDTKKLISDYETQYSEGLITRGEKYNKVVDAWSKCTDKVAGEMMKGISATEKTSDGLKI

SEQ ID NO: 134884 - protein, 395 aa, Unknown
  Bacterial polypetide isolated from the Sargasso Sea
MTYIQTNNIDTSKSYSSITIGLASPESILARSYGEILKPETINYRSYKPEKDGLFCEKIFGPVKDYECHCGKYKGIRYRGIICDRCGVEVTRKKVRRERMGHITLAVPIVHIWYLRSIPSKLSYLAGRSTKELERVIYYEMYMVLEPADSGLKAFDLIEEDEYLDYEEKYGYAAVSEEKRDNDDYFYGAMGGEAIKEMLSRINIMELKKELEDIVKTSKSKQKRADALKRLKVAYSFVPDPTKKRLNKPEWMIVSILPVIPPELRPLVPLEGGRFAASDLNDLYRRIIIRNNRLKQLMEIKAPDVILRNEKRMLQESVDALFDNSRRKTAIRSGSRRPLKSLSDMLRGKTGRFRQNLLGKRVDYSGRSVIVVGPQLKLQECGLPKNMALELFKPH

SEQ ID NO: 134885 - protein, 357 aa, Unknown
  Bacterial polypetide isolated from the Sargasso Sea
MKDLVDLLKTQGHGVEYNSIRAGLASPQQIRSWSYGEVKKPETINYRTFKPERDGLFCAKIFGPIKDYECICGKYKRMKHRGVVCEKCGVEVTLSKVRRERMGHIELAAPVAHIWFLKSLPSRLALALDLTLKDLERVLYFESFIVIEPGMADLEVGQLLTDEEYYEALETWGDEFEAGMGAESIQTLLKELDLETAIKDIQDEMPLTKSEAKLKKFSKRLKLLKSFKESGNRPEWMILEVLPILPPDLRPLVPLEGGRFATSDLNDLYRRVINRNNRLKRLLDLNAPDIITRNEKRMLQESVDALLDNGRRGRAVTGSNKRPLKSLADMIKGKQGRFRQNLLGKRVDYSGRSVIVV

SEQ ID NO: 134886 - protein, 345 aa, Unknown
  Bacterial polypetide isolated from the Sargasso Sea
MSENENEILDETVEAEEVEKEEIVLDLLNPMVIKLESQNELHSRVSIEPFERGFGYTLGNAIRRVLLSSLPGYAITEAQIDGVLHEYTTIEGVQEDVVEILLNLKGVAINIHDRDSADFVISKKGPCTVTAGDIQVDGDTEIVNPDHHIATISSKKELKMQIKIEKGTGYRPVPTQSKDADVTIGLLKLDASFSPIKTVTYSVEAARVENRTDLDKLIVDLETDGTIDPERAIKYAGAILQNQLSIFTNLTRVQEQTKEEEEVLIDPIMLRPVDELELTVRSANCLKAENANYIGDLVQKTEVELLRTPNLGKKSLNEIKEVLASHGLSLGMELDNWPPKEAVVD

SEQ ID NO: 134887 - protein, 342 aa, Unknown
  Bacterial polypetide isolated from the Sargasso Sea
MQTENVNVKNWKSLLKPAKLDLQLSDDKSYAKIVAEPLEKGYGLTLGNSLRRILLSSIRGAAVTAIQIDGVLHEFTSIKGVREDVTDIVLNVKSLALKGSFEGSKKLILDAKGPGEIKASDITSVADVEILNPDLVICNLDENTSFHMEMTVGNGKGYVPAVMNKPEEPPLGLIPIDSLFSPVKKVSYSISTAREGKALDYDKLTMEVQTNGSISAEDAVAYSAKIFQDQLSMFINFDEPQEVTIREKPAEPEFNKNLLRKVDELELSVRSMNCLKNDNIIYIGDLVQKSEGEMLRTPNFGRKSLNEIKEVLNGMSLYLGMEIPNWPPDNIAELSKKLEEAI

SEQ ID NO: 134888 - protein, 426 aa, Unknown
  Bacterial polypetide isolated from the Sargasso Sea
MSKELSDLFKSSEISEAQNFNSIKITLASPEKIKSWTFGEIKKPETINYRTFRPEKDGLFCARIFGPIKDYECLCGKYKRMKFRGIICEKCGVEVTKSNVRRERMGHINLATPVAHIWFLKSLPSRISLVIDMKLKEVERVLYFESFIVIEPGLTGLKKNQLLGEEELIKYQDDYGEEAFTAGIGAEAILEILKSINLEEERDLLIKNIKETKSKVNEERSIKRLKLIESFIETGNKPEWMILTTVPVIPPELRPLVPLDGGRFATSDLNDLYRRVINRNNRLKRLIDLKAPDIIVRNEKRMLQESVDALFDNGRRGRVITGTGKRPLKSLAEMLKGKQGRFRQNLLGKRVDYSGRSVIVVGPDLKLHECGLPKKMALELFKPFLYARLNKLGLATTIKQAKKLVEKERNEVWDALELIVREHPVI

SEQ ID NO: 134889 - protein, 217 aa, Unknown
  Bacterial polypetide isolated from the Sargasso Sea
MSIEKNWRELLKPNVVNMEAGSDPLKKSTLVVEPLERGYGITLGNALRRVLLSSLQGSAVYGFKIDGVLHEFSSISGVREDVIDIALNIKKIIFGADFNGSKILTIEKTGPGVVVAGDISTTDDIEVMNSDLVLCTLDENISFRMELYIRNGNGYVSAEENRNEDDPIGMIPVDSIYSPVTNVSYEVDNAREGEFLDYDRLSLSIETDGSVKPEDAL

SEQ ID NO: 134890 - protein, 1340 aa, Unknown
  Bacterial polypetide isolated from the Sargasso Sea
IKKLETINYRTFKPEKDGLFCARIFGPVKDYECLCGKYKRMKFRGIICEKCGVEVTLSKVRRDRMGHIELAAPVSHIWFMKSLPSRIATLLDMTIKNLEKVLYFEQFIVVEPGLTDLTKGQIISEDQYIEYQDQHGEDSFSASIGAEAIEQMLQNIDLQSDYDQLKQDLLETKSELKKAKITKRLKLIEHFISSKNKPEWMILRVLPVIPPELRPLVPLDGGRFATSDLNDLYRRVINRNNRLKRLIDLRAPDIIIRNEKRMLQESVDALFDNGRRGRVITSTNKRPLKSLSDMLKGKQGRFRQNLLGKRVDYSGRSVIVVGPNLKLHQCGLPKKMALELFKPFIFHKLDIYGWANTIKAAKKLVEKEDPRVWDILEEVIREHPVLLNRAPTLHRLGIQAFEPILIEGKSIQLHPLVCTAFNADFDGDQMAVHVPLSLESQLEARVLMMSTNNILSPSSGKPIIVPSQDIVLGIYYLSILRKNQIGEGRSFLDLNEIMKALENKDITLHSQIIARVKDFKGNVSTKETTAGRMILGDILPNNENIKFDMLNKVLTKKEVSNIIDTVYRFCGQKETVLFADKIMGIGFRYAAMAGISFGKDDLIIPEDKNSLLEKTQNKVQEYENQYQDGLITQGEKYNKVVDAWSDCTNQVAAKMLETISNPEDDKPVNSVYMMAHSGARGSAAQLKQLAGMRGLMAKPSGEIIENPIKSNFKEGLSVLEYFTSTHGARKGLADTALKTASSGYLTRRLVDVAQDAVIRENDCGTTKGVIVEEIIDSGNVTSPLSDRILGRCPVNDIVDSNKNVIVKSGEIIEETHIEDINKLSLRSLKIRSVLTCETNNGICAKCYGRDLARGTAVNIGEAVGIIAAQSIGEPGTQLTMRTFHIGGAASASVEQSSASSPIDGMIKSDNFKFITDESGNKILLTRNAKIKICLDDEEKFSLSIPFGSRIFFEDGKNVKANQLLADWDPYTLPIIAEKDGIIKYVDLKQGVSFRDAVDDTTGISSKIVIDWSQNPKSKNFKPSINIVKTFEDEIDTENKNVISYPMSIDTILSAEDGSEVKAGQVVARIPKESSKTKDITGGLPRVAELFEARKPKDPAIMSEIDGKISFGKDFKNKRRLIINSIDDDESFEILIPRSKYLSVQEGDFVKRGDILVEGTPVPHDILRILGIEELARYLVREVQSVYKLQGVYINDKHIETIARQMLQKALIKDPGDSNLLAGEQVQKKDLLETNLKLEEEGKQPATYDNILLGITKASLQTSSFISSASFQETTKVLTDAATQGKTDQLYGLKENVIVGRLIPAGTGSMTKSYTEVAKERDLAKLAERRKNQENIENLEQ

SEQ ID NO: 134891 - protein, 89 aa, Unknown
  Bacterial polypetide isolated from the Sargasso Sea
MESTEVNPKNWKTLIKPTKLDVQLSDDKSHAKITAEPLEKGYGLTLGNSLRRILLSSIRGTAVTAIQIDGVLHEFTSIKGVREDVTDIV

SEQ ID NO: 134892 - protein, 342 aa, Unknown
  Bacterial polypetide isolated from the Sargasso Sea
MENAEVNIKNWKSLIKPAKLDVQLSEDKSFAKIVAEPLEKGYGLTLGNSLRRILLSSIRGTAVTSIQIDGVLHEFTSIKGIREDVTDIVLNVKSLALKSSSEASKKLILDAKGPGEIKASNITPVADIEILNPDLVICNLDEKTNFHMEMSVNSGKGYVPASMNKPEDPPLGLIAIDSLFSPVKKVSYSVSTAREGKALDYDKLTMEIETNGSISAEDAVAYSARIFQDQLNMFVNFEEPKEVVVRDKPSEPDFNKNLLRKVDELELSVRSMNCLKNDNIIYIGDLVQKSEGEMLRTPNFGRKSLNEIKEVLTGMSLYLGMEIPNWPPDNIAEMSKKLEETI

SEQ ID NO: 134893 - protein, 313 aa, Unknown
  Bacterial polypetide isolated from the Sargasso Sea
AKVTAEPLEKGFGQTIGNSLRRILLSSIQGAAVTAIQIDGVLHEFSSIKGVREDVTDIVLNVKNLAIKSTGIGAKKIILDIKGPKEVKAKDITLVSDVEILNPELTICNLDENTNFHMELFVNNGKGYVSAPKNKSEDSPLGLISIDSLFSPVKKVSFSVENTRAGSALDYDKLVMTVETNGTVAAEDAVAYSARIFQDQLAMFINFEDPKEVVKEVKSSEPEFNKNLLKRVEELELSVRSMNCLKNDNIIYIGDLVQKTEPEMLRTPNFGRKSLNEIKEVLNTMSLYLGMEIPNWPPDNIAEMSKKLEDNNY

SEQ ID NO: 134894 - protein, 492 aa, Unknown
  Bacterial polypetide isolated from the Sargasso Sea
VIVVGPTLKLHQCGLPKKMALELFKPFVFGRLQNMELATTIKGAKRMVEREEPVVWDILAEVIREHPILLNRAPTLHRLGIQAFEPTLIEGKAIQLHPLVCKAYNADFDGDQMAVHVPLTLESQLECRALMMASNNILSPSNGRPIIDPSQDVVLGIYYMTKSKLNSLGEGSIFADVDEVKRAYDSKQVDLQAIIKCRIDNSDGTTDLVETTVGRTILWGVVPKEIPFEKVNKPLNSKAISDLINTSYRYSGLKATVIFSDKIKNLGYDYSTISGSSICVEDCVIPDNKETIISQAQNEVKEIEAQYSSGLVTQGEKYNKVIDIWSRANEAVASSLMETISKDKVTNSEGDEVDEDSFNSVFMYLDSGARSSPAQVRQLAGMRGLMAKPDGSIIETPITANFREGLTVLQYFTSTHGARKGLADTALKTANSGYLTRRLVDVAQDLVIREYDCGTKEGLELRTIIDGGEVVQSLSERILGRVLAQDIKSKDG

SEQ ID NO: 134895 - protein, 580 aa, Unknown
  Bacterial polypetide isolated from the Sargasso Sea
MKKEITDIFKTSEISESQNFNSIKITLASPEKIKSWTYGEIKKPETINYRTFRPEKDGLFCARIFGPIKDYECLCGKYKRMKFRGIICEKCGVEITKSNVRRERMGHINLATPVAHIWFLKSLPSRISLAIDMKLKEVERVLYFENFIVIEPGLTNLKKNQLLTEEELIKYQDEYGEEAFSAGIGAEAILEILKSINLNEEREILIKTIKETKSKVAEERSIKRLKLIESFIETGNKPEWMILTVIPVIPPELRPLVPLDGGRFATSDLNDLYRRVINRNNRLKRLMDLKAPDIIVRNEKRMLQESVDALFDNGRRGRVITGTGKRPLKSLAEMLKGKQGRFRQNLLGKRVDYSGRSVIVVGPDLKLHECGLPKKMALELFKPFLYARLNKLGLASTIKQAKKLVEKERDEVWDALELIVREHPVILNRAPTLHRLGVQAFEPKLIEGDAIELHPLTCAAFNADFDGDQMAVHIPLSLEAQLEARVLMMSTNNILSPSNGKPIIVPSQDMILGIYYLSQPPHQDKRVEGYFVNNSEIEHALEVGQIKVHSRIVSRFETQDEKGNKKIEKHISTAGRFLLS

SEQ ID NO: 134896 - protein, 461 aa, Unknown
  Bacterial polypetide isolated from the Sargasso Sea
SGNKPEWMILTTVPVIPPELRPLVPLDGGRFATSDLNDLYRRVINRNNRLKRLLDLKAPDIIVRNEKRMLQESVDALFDNGRRGRVITGTGKRPLKSLAEMLKGKQGRFRQNLLGKRVDYSGRSVIVVGPELKLHQCGLPKKMALELFKPFLYARLDKLGLATTIKQAKRLVEKEKSEVWDALEHIIREHPILLNRAPTLHRLGVQAFEAKLIEGNAIELHPLVCAAFNADFDGDQMAVHIPLSLEAQLEARVLMMSTNNILSPSNGKPIIVPSQDIVLGIYYLSQDTNKEKEDKKFKGIFSDIEEIEQAIENKSISLHSKIISTFTTLDETGKEIKEKYKSTAGRFLLASLLPKNFNIKFSLIDRTLTKKNISEVIDTIFRFCGQKETVIFCDRIKTLGFKHAFKAGISFGKDDLIIPKTKENLINETKKQIEEYEKQYSDGLITRGEKYNKVVDIWSKC

SEQ ID NO: 134897 - protein, 357 aa, Unknown
  Bacterial polypetide isolated from the Sargasso Sea
TYYSCSAWLLIYWFLKSLPSRISLLLDMAMKDVEKILYFENFVVMEPGTTDLKLNQLLSESEYQDALDEFGSEFQASIGAEAIKEMLKEINLIEERDSMREELKTTTSEIKRKKYVKRLKLVEAFINSGNLPEWMILDVVPILPPELRPLVPLDGGRFATSDLNDLYRRVINRNNRLKRLLDLKAPDIIIRNEKRMLQESVDALFDNSRRSRPITGSNKRPLKSLADMLKGKQGRFRQNLLGKRCDYSGRSVIVVGPELKLHECGIPKKMALELFKPFIYSKLELYGLATSIKAAKKMVEKEQPEVWDILEQVIREHPVLLNRAPTLHRLGIQAFEPVLIEGKAIQLHPLVCTAFNA

SEQ ID NO: 134898 - protein, 326 aa, Unknown
  Bacterial polypetide isolated from the Sargasso Sea
MTDNYDIIKDFLTPTEIVVEESGPTRSKIVLEPLEQGFGHTLGNALRRIILSSMPGTAVSEVKIDGVLHEYSTIEGVQEDVIDILLNLKDLSVRLTEVEDAELTVSKSGSGTVTAADIDLPNGVEIINPDHHIATLNDEGSINMTMKVTRGRGFVPVKPLGEDEGQETGLLRLDATYSPIRRVTYQVDNARVEQRTNLDRLTVDIDTDGTLEAEEILRISATILQHQLSAFAELGRLEEVIEEKEEAKIDPIMLRPVDELELTVRSANCLKAENIHYIGDLVTRMESDLLRTPNLGKKSLNEIKEVLLSRGLSLGLILDNWPPENN

SEQ ID NO: 134899 - protein, 410 aa, Unknown
  Bacterial polypetide isolated from the Sargasso Sea
MPKKMALELFKPFLYARLDKLGLATTIKQAKRLVEKEKSEVWDSLEHIIREHPILLNRAPTLHRLGVQAFEAKLIEGNAIELHPLVCAAFNADFDGDQMAVHIPLSLEAQLEARVLMMSTNNILSPSNGKPIIVPSQDIVLGIYYLSQSDDKEKKPKGIFAGIEEIEQALESKSISLHSKIISTFKTLDEKGNIKIEKYTSTAGRFLLANILPTNNNIKFSLVNRLLTKKNVSEVIDTIFRFCGQKETVIFCDRIKTLGFKHAFKAGISFGKDDLLIPKTKENLINNTKKQIEEYEKQYSDGLITRGEKYNKVVDIWSKCTDTVANEMMKEISSAEKIYDDDRIETNSVYMMADSGARGSQAQMKQLAGMRGLIAKPSGEIIETPIISNFKEGLSVLEYFNSTHGARKGL

SEQ ID NO: 134900 - protein, 305 aa, Unknown
  Bacterial polypetide isolated from the Sargasso Sea
KYKRMKFRGIICEKCGVEVTKSNVRRERMGHINLATPVAHIWFLKSLPSRIALAVDMKLKEVERVLYFENFIVIEPGLTGLQKNQLLNEEELAKYQDEFGEEAFTAGIGAEAVLEMLKNLDLELEKKNLVNYIKETKSKVNEERAIKRLKLIESFIETGQKPEWMIMTVIPVIPPELRPLVPLDGGRFATSDLNDLYRRVINRNNRLKRLMDLKAPDIIVRNEKRMLQESVDALFDNGRRGRVITGTGKRPLKSLAEMLKGKQGRFRQNLLGKRVDYSGRSVIVVGPDLKLHQCGFAKKNGFRII

SEQ ID NO: 134901 - protein, 409 aa, Unknown
  Bacterial polypetide isolated from the Sargasso Sea
MTYIQSNPVDTSKQYSSITIGLSSPEKILQRSFGEVLKPETINYRSYKPEKDGLFCEKIFGPVKDYECHCGKYKGIRYRGIICDRCGVEVTRKKVRRERMGHITLAVPIVHIWYLRSIPSKLSYLAGKSTKELERVIYYEMFMVIEPGDSGLEKFELIEEDEYLDLEEQFGYMAVSDEDRDNENYFYATMGGEAMKEMLSRLNIIDLKNELVDIVKTSKSKQKRGEALKRLKVVQSFVPNPVKNRINKPEWMVVSILPVIPPELRPLVPLEGGRFAASDLNDLYRRIIIRNNRLKQLMEIKAPDVILRNEKRMLQEAVDALFDNNRRKTAIRSGSRRPLKSLSDMLRGKTGRFRQNLLGKRVDYSGRSVIVVGPQLQLHECGMPKNMALELFKPHMIHELMARGYTQTP

SEQ ID NO: 134902 - protein, 1011 aa, Unknown
  Bacterial polypetide isolated from the Sargasso Sea
YINGGLPKKMALELFKPFIFNKLEQKGITITIKAAKQLVEEETPEVWDCLDEVIREHPVLLNRAPTLHRLGIQAFEPVLIEGKAIQLHPLVCTAFNADFDGDQMAVHVPLSLEAQLEARALMMSTNNILSPASGEPIIQPNQDVVLGIYYLTKEDFGLPGEGRSFVDVHEVKRAFLEKQINLHTKIKVRVTEGDNKKVYDTTVGRCLLYEIMPTGLEFSKINKTLKKKDVLNLISHVYKDFGLKESVLFADQLMYLGFEYSTTSGASIGVNDFEIPDNKEAIISNAENEVQNIEQQFESGLLTKGEKYNKIIDIWSRTNEKVASSMMDALGDQIDTDKDGKEIISPSFNSVFMYADSGARGSPAQIRQLAGMRGLMSKPDGSIIESAITSNFREGLSMLEYFTSTHGARKGLADTALKTANSGYLTRRLVDVSQDVVITTEDCGTEEGITVEAIIDGASVIQTISERILGRVLQEDIKKGSKVLFKKGHLFDEESAMEVQNSGVKKVKIRSPITCEASHGLCAKCYGRDLARGHLVHIGEAVGVVAAQSIGEPGTQLTMRTFHIGGAASGSAEDDSITTLRGGIVVFGSSLKTVEKKNGEFIVVSRNAHLTIQDEDENLLEKYSVPYGAEILYSDKSKVEPGTLISKWDPLTLPIISEVEGTISFNDLTEDITMKVEVDDLTGSTTREVIDVNERPVKGKTMTPILTVVDSKKKVVGSYTLPSKSILMKNNGNKVTKGEFLARVPVEGTKTKDITGGLPRVADLFEARKPKDGAIYAETSGTLSYGKETKGRKRLVITPKKGDPVEMMIQKYRAVSFLEGDYVERGDILCHGPVDTHSLLALHGVEELAKHLIAEVQDVYRLQGVVINDKHIETICRQMMKKVTITESGDSDYIEGDIVDLGQVRAANKNLEASGKKPAIFDRMLLGITKAALSTDSFISAASFQETTRVLTEAAVTSRKDILKGLKENVVVGRLIPAGTGFAANQRASVSSEEIQDIEEALKKELLESFQ

SEQ ID NO: 134903 - protein, 270 aa, Unknown
  Bacterial polypetide isolated from the Sargasso Sea
HEFTSIKGVREDVTDIVLNVKSLALKSSSEGTKKLILDAKGPGEIKASNITPVADVEILNPDLVICNLDENTSFHMEMNVNTGKGYVPAELNKPEEPPLGLIAIDSLYSPVKKVSYSVSTAREGKALDYDKLTMEVETDGSISAEDAVAYSARIFQDQLKMFINFDEPVEAPVKEVSTEPEFNKNLLRKVDELELSVRSMNCLKNDNIIYIGDLVQKSEGEMLRTPNFGRKSLNEIKEVLTGMSLYLGMEIPNWPPDNIAEMSKKLEEAI

SEQ ID NO: 134904 - protein, 1255 aa, Unknown
  Bacterial polypetide isolated from the Sargasso Sea
MSVTSTKSIEGITFAVWSPQEIRKYSVVEITQPETYDEDGMAVQGGLMDGRLGVLEPGQKCLTDGNTAARSPGHFGHIELAEPVLHIAFVDNIYKLLQSTCRTCGRIKMSPEDIKEFSKIKERQASYTVLSQKRIPDQIQEKAKKQKDCPHCGKSQYELIFTKPTTFVEKTEIGENRLLPITIRERLSIIPDEDLALLGYDPKTARPEWFVLQALPVPPVTVRPSIILETGIRSEDDLTHKLVDIIRVNQRLKESKEAGTPPLIVQDLVDLLQYHVTTYFDNEVSGIPQAHHRSGRPLKTLTQRLKGKEGRFRGSLSGKRVDFSSRTVISPDPNLDLSEVGVPETVAKKLTIPEIVTDWNIEKLKKLVINGPSTFPGVNYITRPDGVKIRLDFVEDRSLIADSLEIGFLVERHLMDGDIVLFNRQPSLHQMSIMAHYVRVLPGKTFRLHPSVCPPYNADFDGDEMNLHVPQSEEARSEAILLMRVQDQLISPRFGGPIIGGLRDFITGAYLMTKDGTTLSSQEFANLAMLGGFTGQLPEPENKKENLYTGKQLFSIFLPEDFNYVMTSKWSKGTKGKEKDVVIKNGQLISGVIDKSSIGAEEPESVLHRIAKDYGNEKAKIFLNSELIVIKQFITHYGFSYGYGDLEVPEKDREGISSDINQTYDEVLDLISQEKKGTLKATRGMTTQETLEAYIVNNLGKLRDRAATAANLSLDDDNAGKIMATTGARGSSLNVGQMAGALGQQARRGNRLNKGYNNRVLTHFEEHENDPDAHGFVKSNYRDGLSTLEFFFHAMGGREGLVDTAVRTQQSGYMQRRLINALEHIKLEYDGTVRDPHGHIIQFLYGEDGIDVAKSDHGEAFNIDRLIESESIVDSGKAATKDVVAPIIKKYTSTFNPRLSNAVSTSLENSKLSKEGVEKVAKKGLSLYNSAKAEPGQAVGIVTAQSIGEPGTQMTLRTFHFAGIAERNVTLGLPRLIELVDARKKPVTPTMDIYLSGDAKTDQAKTVQVARNILQTTVNDLILEADTDYKTKITLNLNERKLTDRGCTVDDVKAALESNKKFKMEDNGINSIVLNLVDEEADAPAVIVVRNKVLKTTVKGVPDIARVTIVKKNDEYVIQTTGSNLSKVLEVEGIDKNNVRTNNVSEIAETLGIEAARNALINELSNTLEDQGLEVDQRYLMLVSDLMCHRGYMQQIGRHGIAGTKDSVLARAAFEITVPTIAGAARTGETEQLRGITENVIVGSQIPIGSGTVDL

SEQ ID NO: 134905 - protein, 370 aa, Unknown
  Bacterial polypetide isolated from the Sargasso Sea
FLYARLNKLGLASTIKQAKKIVEKERNEVWDALEVIVREHPILLNRAPTLHRLGVQAFEPKLIEGDAIELHPLVCAAFNADFDGDQMAVHIPLSLEAQLEARVLMMSTNNILSPSNGKPIIVPSQDMILGIYYLSQPPYQTSKVEGYFVNNSEIEHALETGQVKVHSRIISRFETIDENGNTKYEKYTSTVGRFLLANVLPKNKDIKFSLTDRLLPKKMVSEIIDIVFRFTGQKSTVIFCDKLKDLGFKHAFKAGISFGKDDLIIPDNKEQLINETKKLIKDYENQYSEGLITRGEKYNKVVDAWSKCTDRVAAEMMKGISATESTEDGLKINSVFMMADSGARGSAAQMKQLAGMRGLIAKPSGEIIES

SEQ ID NO: 134906 - protein, 106 aa, Unknown
  Bacterial polypetide isolated from the Sargasso Sea
MQTTSSIIDKNWKALIKPDKLEITSNEDKTIAKVVAEPLEKGFGQTIGNSLRRILLSSIQGAAVSAIQIDGVLHEFSSIKGVREDVTDIVLNVKNLAIKSSSTSPK

SEQ ID NO: 134907 - protein, 234 aa, Unknown
  Bacterial polypetide isolated from the Sargasso Sea
MQTSGNVIDKNWKALIKPNKLDITSNEDKTIAKVVAEPLEKGFGQTIGNSLRRILLSSIQGAAVTAIQIDGVLHEFSSIKGVREDVTDIVLNVKNLAIKSSSSASKKIILDIKGPKEVKAKDITLVPEVEILNPEQTICNLDEKTHFHMELMVSIGKGYVQAPKNKTDDSPLGLISIDSLFSPVKKVSFSVENTRAGSALDYDKLIMTVETNGTVDAEDAIAYSARIFQDQLSM

SEQ ID NO: 134908 - protein, 859 aa, Unknown
  Bacterial polypetide isolated from the Sargasso Sea
TFGSLDGGRFATSDLNDLYRRVINRNNRLKRLIDLKAPDIIIRNEKRMLQESVDALFDNGRRGRVITGTGKRPLKSLAEMLKGKQGRFRQNLLGKRVDYSGRSVIVVGPDLKLHECGLPKKMALELFKPFLYARLNKLGLASTIKQAKKIVEKEKNEVWDALELIVREHPVILNRAPTLHRLGVQAFEPKLIEGNAIELHPLVCAAFNADFDGDQMAVHVPLSLEAQLEARVLMMSTNNILSPSNGKPIIVPSQDMILGIYYLSQPPYQTEKVDGYFVNTSEIEHALETGQIKVHSRIVSKFETVDENGNTKFEKHITTAGRFLLANLLPKNKDIKFSLIDRLLPKKVVSEIIDMVFRFTGQKSTVIFCDKLKDLGFKHAFKAGISFGKDDLIIPENKEQLIDETKKLISDYENQYSEGLITRGEKYNKVVDAWSKCTDRVAGEMMKRISATEKTNEGLKINSIFMMADSGARGSAAQMKQLAGMRGLIAKPSGEIIETPITSNFKEGLTALEYFNSTHGARKGLADTALKTANSGYLTRRLCDVAQDLTITKKECDCGKATGINLSEIIEGGNVIVSLSERALGRIAANDIKNPISGEKIISKGEMIDEAGCEKIDAAGVKSIMVYSVITCGSKKGVCAMSYGRDLSRGKMVHEGEAIGMISAQSIGEPGTQLTMRTFHVGGTAQIKQESQIITKSEGTLRIINTNLLEDSKKNLVVMGRNTQLSLEDDKGNQIALYKIPYGSKLFFQNGDKIKKNSKICEWDPYTTPVIAEKSGTAGFVDLIDGVSIAETTDDATGISTKTVVDWKTQSKNTDLKPRITLRDDKGNVIKKADDNEARYYLVPDSILSVKDGQKILLV

SEQ ID NO: 134909 - protein, 245 aa, Unknown
  Bacterial polypetide isolated from the Sargasso Sea
METSEVNIKNWKSLIKPPKLDVNLSDDKSYAKIVAEPLEKGYGLTLGNSLRRILLSSIRGTAVTAIQIDGVLHEFTSIKGVREDVTDIVLNVKSLALKSNSETTNKLVLDAKGPGEIKASNITTSADIEILNPDLVICNLDENTNFHMEMTVSNGKGYVSADMNKPDEPPLGLISIDSLFSPVKKVSYSVSTAREGKALDYDKLTMEVETNGSISAEDAVAYSARIFQDQLGMFVNFDEPQEGNC

SEQ ID NO: 134910 - protein, 357 aa, Unknown
  Bacterial polypetide isolated from the Sargasso Sea
MKFRGIICEKCGVEVTKSNVRRERMGHIDLACPVAHIWFLKSLPSRISLAIDMKLKEVEKVLYFESFIVIEPGLTKLKKGQLLNEEELIKAQDEFGEDAFSAGIGAEAVREILINLDLQLEQKKLRESLKEVKSKVTEERTIKRLKLIESFINSGNKPEWMILTTVPVIPPELRPLVPLDGGRFATSDLNDLYRRVINRNNRLKRLLDLKAPDIIVRNEKRMLQESVDALFDNGRRGRVITGTGKRPLKSLAEMLKGKQGRFRQNLLGKRVDYSGRSVIVVGPELKLHQCGLPKKMALELFKPFLYARLDKLGLATTIKQAKRLVEKEKSEVWDALEYIIREHPVLLNRAPTLHRLG

SEQ ID NO: 134911 - protein, 256 aa, Unknown
  Bacterial polypetide isolated from the Sargasso Sea
MLNLKAVCLKVHSPGLKKMYIRTKGPGEIRAGNFETDSETEIMNPDQIIMTLDSNADIELEANIDTGKGYLSAEVAEDEEKIIGEIKLDAMFSPVKRASYKVENSRVGQVTDYDKLILDIETNGAVSPDDAIALAARILQDQLQPFINFDEPEVQMETSSHEKLSFNPNLLKKVEELELSVRSANCLKNDNIIYIGDLVQKTESEMLRTPNFGRKSLNEIKEVLQQMELGLGISVPDWPPENIEELAKKFEDPFNK

SEQ ID NO: 134912 - protein, 440 aa, Unknown
  Bacterial polypetide isolated from the Sargasso Sea
CGKYKRMKFKGIICEKCGVEVTKKDVRRERMGHIQLAAPVAHIWFLKSLPSRIALMMDMKLKDLEKVLYFEKFMVTEPGLTPLEQNQLLDEEELEAAKEEYGEDGFSAGIGAEAVRRVLERIVLVDELEALKKKLEETKAIALSEKLVKRIKIFEAFISSGNRPEWMILTSIPVIPPELRPLVPLDGGRFASSDLNDLYRRVINRNNRLSRLMELRAPDIIIRNEKRMLQESVDALFDNGRRGRVITGTNKRPLKSLAEMLKGKQGRFRQNLLGKRVDYSGRSVIVVGPELKLHQCGLPKKMAIELFKPFIYARLEALGLATTLKQAKKMVEKERPEVWDVLDRVIREHPVILNRAPTLHRLGVQAFEPILIEGKAIQLHPLVCTAFNADFDGDQMAVHVPLSLEAQLEARVLMMSTNNILNPANGKPVIVPSQDIVLGI

SEQ ID NO: 134913 - protein, 712 aa, Unknown
  Bacterial polypetide isolated from the Sargasso Sea
MKALLDLFKQVQQPEVFDAIKIGLASPDKIRSWSFGEVKKPETINYRTFKPERDGLFCAKIFGPIKDYECLCGKYKRLKHRGVICEKCGVEVTLAKVRRERMGHIELASPVAHIWFLKSLPSRLGMVLDMTLRDIERVLYFEAYVVIDPGMTPLKARQIMTEEDYYNKVEEYGDEFRAEMGAEGVRELLRAINIDEQVEMLRTELKNTGSEAKIKKYAKRLKVLEAFQRSGIKPDWMVLEVLPVLPPELRPLVPLDGGRFATSDLNDLYRRVINRNNRLKRLLELKAPEIIVRNEKRMLQEAVDSLLDNGRRGKAMTGANKRPLKSLADMIKGKGGRFRQNLLGKRVDYSGRSVIVVGPTLKLHQCGLPKLMALELFKPFIFNKLEVMGVATTIKAAKKEVENQTPVVWDILEEVIREHPVMLNRAPTLHRLGIQAFEPVLIEGKAIQLHPLVCAAFNADFDGDQMAVHVPLSLEAQMEARTLMLASNNILFPANGDPSIVPSQDIVLGLYYATREAVNAKGEGLTFTGVSEALRAYENKEVELASRVNVRITEMVHNEDKSEGAPAFVPKVTLYATTVGRAILSEILPPGLPFSVLNKPLKKKEISRLINTAFRKCGLRETVIFADQLMQSGFRLATRAGISICVDDMLVPPQKETIVGDAAKKVKEYDRQYMSGLVTSQERYNNVVDIWSATSEAVGKAMMEQLSTEPGG

SEQ ID NO: 134914 - protein, 340 aa, Unknown
  Bacterial polypetide isolated from the Sargasso Sea
MSIEKNWRELLKPNVVNMEAGSDPLKKSTLVVEPLERGYGITLGNALRRVLLSSLQGSAVYGFKIDGVLHEFSSISGVREDVIDIALNIKKIIFGADFNGSKILTIEKTGPGVVVAGDITLSDDIEVMNSDLVLCTLDENISFRMELYIKNGNGYVSAEENRDEDDPIGMIPVDSIYSPVTNVSYEVDNAREGEFLDYDRLSLSIETDGSVKPEDALAFSARILIDQLNPFINFDEPEEEVIEESEDELEFNASLLKKVDELELSVRSANCLKNDNIVYIGDLILKSENEMLRTPNFGRKSLNEIKEVLSEMNLSLGMDIPNWPPENIEELARKHAADKF

SEQ ID NO: 134915 - protein, 342 aa, Unknown
  Bacterial polypetide isolated from the Sargasso Sea
METVDVNIKNWKSLIKPAKLDVNLSDDKSYAKIIAEPLEKGYGLTLGNALRRVLLSSIRGTAVTAIQIDGVLHEFTSIKGVREDVTDIVLNVKSLALKSSSEGYKKLILDAKGPGEIKASNITEVADVEILNPDLVICNLDEKTNFHMEMTVGSGKGYVSADMNKPEEPPLGLIPIDSLFSPVKKVSYSVSTAREGKALDYDKLIMEIETNGSISAEDAVAYSARIFQDQLNMFVNFDEPQEVIVREKPTEPEFNRNLLRKVDELELSVRSMNCLKNDNIIYIGDLVQKSEGEMLRTPNFGRKSLNEIKEVLNGMSLYLGMEIPNWPPDNIAELSKKLEESI

SEQ ID NO: 134916 - protein, 179 aa, Unknown
  Bacterial polypetide isolated from the Sargasso Sea
MKTSVIDLLVPTEIQVDDISPTLSKVTLEPLERGFGHTLGNALRRILLSSMPGAAVTDVAIDGISHEYSTIEGIREDVIDILLNIKDMPINIIEGDSAEVSLDVKGPCDVLASSFEAPGNVELVNQDFHIATIVDKVSLKMTLTVKNGRGYEPADLRKMKIGLSEHLKLMLLLVLSEEF

SEQ ID NO: 134917 - protein, 420 aa, Unknown
  Bacterial polypetide isolated from the Sargasso Sea
MQDIIKNINKSSRRNFDLISCGLASPQMIRSWSWGEVKKPETINYRTFKPERDGLFCARIFGPIKDFECLCGKYKRRKHRGVICEKCGVEVTATKVRRERMGHIELASPVAHIWFLKSLPSRIGLFLDMTLREIERVLYYESFVVVEAGITDLKKGQLLTEEEYYEALDEYDDDFTALMGAEAIQILLNEVDLEKELQVIKEELSTSGSETKIKKLQKRLKLIEAFKESGQKPEWMIMNVLPVLPPDLRPLVPLDGGRFATSDLNDLYRRVINRNNRLKRLLLLGAPEIIVRNEKRMLQESVDALLDNGRRGRAILGTNKRPLKSLADMIKGKQGRFRQNLLGKRVDYSGRSVVVSGPTLKLHQCGLPKKMALELFKPFIFNKLEQKGITITIKAAKQLVEEESPEVWDCLDEVIREHPV

SEQ ID NO: 134918 - protein, 480 aa, Unknown
  Bacterial polypetide isolated from the Sargasso Sea
DYECLCGKYKRMKFRGIICEKCGVEVTKSNVRRERMGHINLATPVAHIWFLKSLPSRIALAVDMKLKEIERVLYFENFIVIEPGLTGLQKNQLLNEEELAKYQDEFGEEAFSAGIGAEAVLEMLKNLDLELERKNLVSFINETKSKVNEERAIKRLKLLESFIETGQKPEWMILTVVPVIPPELRPLVPLDGGRFATSDLNDLYRRVINRNNRLKRLMDLKAPDIIVRNEKRMLQESVDALFDNGRRGRVITGTGKRPLKSLAEMLKGKQGRFRQNLLGKRVDYSGRSVIVVGPDLKLHECGLPKKMALELFKPFLYARLNKLGLASTIKQAKKLVEKETNAVWDALELIVREHPVILNRAPTLHRLGVQAFEPKLIEGDAIELHPLTCAAFNADFDGDQMAVHVPLSLEAQLEARILMLSTNNILSPSNGKPIIVPSQDMILGIYYLSQEPISDKPVGYFTNADQIDYALSSGEIKVHS

SEQ ID NO: 134919 - protein, 519 aa, Unknown
  Bacterial polypetide isolated from the Sargasso Sea
MRKELSDLFKNTEISESQNFNSIKITLASPEKIKSWTYGEIKKPETINYRTFRPEKDGLFCARIFGPIKDYECLCGKYKRMKFRGIICEKCGVEVTKSNVRRERMGHINLATPVAHIWFLKSLPSRISLVVDMKLKDVERVLYFENFIVIEPGLTGLKKNQLLGEEELIKYQDEYGEESFTAGIGAEAVLEILKSINLEEERSLLIKNIKETKSKVSEERSIKRLKLIESFIETGNKPEWMILTTIPVIPPELRPLVPLDGGRFATSDLNDLYRRVINRNNRLKRLIDLKAPDIIIRNEKRMLQESVDALFDNGRRGRVITGTGKRPLKSLAEMLKGKQGRFRQNLLGKRVDYSGRSVIVVGPDLKLHECGLPKKMALELFKPFLYARLNKLGLASTIKQAKKLVEKERNEVWDALELIVREHPVILNRAPTLHRLGVQAFEPKLIEGNAIELHPLTCAAFNADFDGDQMAVHVPLSLEAQLEARVLMMSTNNILSPSNGKPIIVPSQDMILGIYYLSQ

SEQ ID NO: 134920 - protein, 431 aa, Unknown
  Bacterial polypetide isolated from the Sargasso Sea
TLHRLGIQAFEPLLVEGKAIQLHPLVCVAFNADFDGDQMAAHVPLSIEAQLEARALMMSTNNILSPANGEPIINPTQDIVLGLYYMTRDKVNVKGDGRVFSNPDEVLRAYESETLDIHANIKVRITNADKGTFLEETTVGRVLVWRIAPIEVGFDNVNKTLDKKSVSNLIDISYRKAGLKDTVIFADKLMYLGFEHSTRSGSSIGVDDFVIPEEKPSIIDAAEKEVKSIESQYESGLVTQGERYNKVIDIWSRANEKVAKAMMAKISTDQVEDTEGKEIDQASFNSVFIYADSGARGSPAQIRQLSGMRGLMSKPDGSIIETPITANFREGLSVLQYFISTHGARKGLADTALKTANSGYLTRRLCDVAMDSVVVEDDCGTDQSIVVSSIVEGGDIIQPLTERILGRVIAEPISNADGEEVYPIGHLIDED

SEQ ID NO: 134921 - protein, 409 aa, Unknown
  Bacterial polypetide isolated from the Sargasso Sea
TTIPVIPPELRPLVPLDGGRFATSDLNDLYRRVINRNNRLKRLMDLKAPDIIVRNEKRMLQESVDALFDNGRRGRVITGTGKRPLKSLAEMLKGKQGRFRQNLLGKRVDYSGRSVIVVGPDLKLHECGLPKKMALELFKPFLYARLNKLGLASTIKQAKKLVEKEKDEVWDALELIVREHPVILNRAPTLHRLGVQAFEPKLIEGDAIELHPLTCAAFNADFDGDQMAVHIPLSLEAQLEARVLMMSTNNILSPSNGKPIIVPSQDMILGIYYLSQPPYQNEKVEGYFVNNSEIEHALETGEIKVHSRIVSRFKTIDENGKDKFEKHISTAGRFLLANLLPKNINNKFSLIDRLLPKKVVSEIIDHVFRFSGQKATVIFCDKLKDLGFKHAFKAGISFGKDDLVIPENK

SEQ ID NO: 134922 - protein, 313 aa, Unknown
  Bacterial polypetide isolated from the Sargasso Sea
MNVLAPEVAKVDELDKNNLRVVLEPFERGFGYTIGHSLRRIMLSYMPGAAITEVKIDGVSHEYGTIEGIKEDILDVLLNLKDLAIKLDGPAEAELKLDIKTPKTITASDLELPAGVEVMDPDHVIATLVEPKKLVMTLKVETGTGYVPSENNKNKNVDSLHLDAIFSPVKRVNYKVENTRVENRTDLDKLILDLETDGTIDPKQAVKYAATIMQHQLAVFVDEELVSRKEKRKDKYDFDPLLLRSIEELELTVRSTNCLKAENIFLIGDLIQRSEMDLLKTPNLGKKSLNEIKDELASRGLSMGTVLKNWPPM

SEQ ID NO: 134923 - protein, 489 aa, Unknown
  Bacterial polypetide isolated from the Sargasso Sea
RDPRVWDILEEVIREHPVLLNRAPTLHRLGIQAFEPVLIEGKSIQLHPLVCTAFNADFDGDQMAVHVPLSLEAQLEARVLMMSTNNILSPSSGKPIIVPSQDIVLGIYYLSIMRNNQKGEGRKFLDTNEILKAIEVKDITLHSKIYVRIKNFDGSYSKVETTAGRMLLADSLPKNEKINFNLINKVLTKKEVSNLIDTVYRFCGQKETVLFADSIMQIGFKYAAIAGISFGKDDLIIPDEKQKLLDETQSKVQEYENQYQDGLITQGEKYNKVVDAWSECTNKVADKMLDVISNPEDDKPINSVYMMAHSGARGSAAQLKQLAGMRGLMAKPSGEIIENPIKSNFKEGLSVLEYFTSTHGARKGLADTALKTASSGYLTRRLVDVAQDAVIREVDCGTQKGVIVEEIVESGNITSPLFERVLGRTPTNDIMDSNNNLLIKGGEIIEEKHLDEIKNLGLRSMKIRSVLTCETEDGICAKCYGRDLARGTE

SEQ ID NO: 134924 - protein, 164 aa, Unknown
  Bacterial polypetide isolated from the Sargasso Sea
MTDNYDIIKDFLTPTEIVVEESGPTRSKIVLEPLEQGFGHTLGNALRRIILSSMPGTAVSEVKIDGVLHEYSTIEGVQEDVIDILLNLKDLSVRLTEVEDAELTLSKSGSGVVTAADIELSTGVEVINPDHHIATLNKEGSINMTMKVTRGRGFVPVRPLTKTK

SEQ ID NO: 134925 - protein, 342 aa, Unknown
  Bacterial polypetide isolated from the Sargasso Sea
MEVENVNVKNWKSLIKPSKLDVQISDDLTHAKIVAEPLEKGYGLTLGNSLRRILLSSIRGAAVTSIQIDGVLHEFTSIKGVREDVTDIVLNVKSLALKSNSEGTKKLILDAKGPGEIKASDIAPVADVEILNPDLVICNLDENTTFHMEMNVNTGKGYVPAELNKPEEPPLGLIAIDSLYSPVKKVSYSVSTAREGKALDYDKLIMEVETNGSISAEDAVAYSARIFQDQLKMFVNFDEPVEAPVKEVSTEPEFNKNLLRKVDELELSVRSMNCLKNDNIIYIGDLVQKSEGEMLRTPNFGRKSLNEIKEVLTGMSLYLGMEIPNWPPDNIAEMSKKLEEAI

SEQ ID NO: 134926 - protein, 461 aa, Unknown
  Bacterial polypetide isolated from the Sargasso Sea
QDEYGEESFTAGIGAEAILEILKSIDLAQEKETLIKSIKETKSKVSEERSIKRLKLIESFIETGNKPEWMILTTIPVIPPELRPLVPLDGGRFATSDLNDLYRRVINRNNRLKRLMDLKAPDIIVRNEKRMLQESVDALFDNGRRGRVITGTGKRPLKSLAEMLKGKQGRFRQNLLGKRVDYSGRSVIVVGPDLKLHECGLPKKMALELFKPFLYARLNKLGLASTIKQAKKLVERERNEVWDALELIVREHPVILNRAPTLHRLGVQAFEPKLIEGNAIELHPLTCAAFNADFDGDQMAVHVPLSLEAQLEARVLMMSTNNILSPSNGKPIIVPSQDMILGIYYLSQPPYQSDRVEGYFVNTSEIEHALEIGQIKVHSRIVSRFATVDEKGNSKYEKHISTAGRFLLANLIPKNINNKFALVDRLLPKKIVSEVIDHVFRFSGQKSTVIFCDKLKDLGFK

SEQ ID NO: 134927 - protein, 340 aa, Unknown
  Bacterial polypetide isolated from the Sargasso Sea
MSIEKNWRELLKPNVVNMEAGSDPMKKSTLVVEPLERGYGITLGNALRRVLLSSLQGSAVYGFKIDGVLHEFSSISGVREDVIDIALNIKKIIFGADFNGSKILTIEKTGPGVVVAGDINLTDDIEVMNPDLVLCTLDENISFRMELYIKNGNGYVSAEENRNEDDPIGMIPVDSIYSPVTNVSYEVDNAREGEFLDYDRLSLSIETDGSVKPEDALAFSARILIDQLNPFINFDEPEEEIEEESEDELEFNASLLKKVDELELSVRSANCLKNDNIVYIGDLILKSENEMLRTPNFGRKSLNEIKEVLSEMNLSLGMDIPNWPPENIEELARKHAADKF

SEQ ID NO: 134928 - protein, 292 aa, Unknown
  Bacterial polypetide isolated from the Sargasso Sea
MDTTEVNIKNWKSLIKPPKLDINLSDDKSYAKIIAEPLEKGYGLTLGNSLRRILLSSIRGTAVTAIQIDGVLHEFTSIKGVREDVTDIVLNVKSLALKSNSETTNKLILDAKGPGEIKASNITTSADIEILNPDLVICNLDENTNFHMEMTVSNGKGYVSADMNKPEEPPLGLIAIDSLFSPVKKVSYSISTAREGKALDYDKLTMEVETNGSISAEDAVAYSARIFQDQLGMFVNFDEPQEVIVREQPTEPEFNKNLLRKVDELELSVRSMNCLKNDNIIYIGDLVQKSEG

SEQ ID NO: 134929 - protein, 137 aa, Unknown
  Bacterial polypetide isolated from the Sargasso Sea
MTDNYDIIKDFLTPTEIVVEESSPTRSKIVLEPLEQGFGHTLGNALRRIILSSMPGTAVSEVKIDGVLHEYSTIEGVQEDVIDILLNLKDLSVRLTEVEDAELTLSKSGSGVVTAGRYRAFNRSRSYQSRSSYCYFK

SEQ ID NO: 134930 - protein, 331 aa, Unknown
  Bacterial polypetide isolated from the Sargasso Sea
MAILNFQKPDKVIMIDSTESHGKFEFRPLEPGYGLTIGNALRRVLLSSLEGYAFTSVKIEGVDHEFSTIEGVVEDVTEMILNIKQIRLKRQIDDFDEEKINIVIGNQKELKASDFQKFISGFQILNPELHICSLEKKSKLNIELTIEKGRGYVPAEENKKSGDSSLGVIAIDSIYTPVKNVKYEIEDYRVEQKTDYEKLIFEIETDGSIHPKDALTEAAKTLIHHFMLFSDELITLESDEIAQSEAYDEESLHMRQLLKTKLIDMDLSVRALNCLKAAEVDTLGDLVSFNKNDLMKFRNFGRKSLTELEELVILKGLSFGMDLSKYKLDKE

SEQ ID NO: 134931 - protein, 419 aa, Unknown
  Bacterial polypetide isolated from the Sargasso Sea
MKCGLPKKMALELFKPFLYARLNKLGLASTIKQAKKIVEKERNEVWDALEVIVREHPVLLNRAPTLHRLGIQAFEPKLIEGDAIELHPLVCAAFNADFDGDQMAVHIPLSLEAQLEARVLMMSTNNILSPSNGKPIIVPSQDMILGIYYLSQQPYQTKKVEGYFVNNSEIEHALEIGQIKVHSRIISRFETADENGNIKYEKYTSTAGRFLLANVLPKNKDIKFALIDRLLPKKIVSEIIDIVFRFTGQKSTVIFCDRLKDLGFKHAFKAGISFGKDDLIIPKNKEQLINETKKLITDYENQYSEGLITRGEKYNKVVDAWSKCTDRVAAEMMKGISATEVSDDGLKINSVFMMADSGARGSAAQMKQLAGMRGLIAKPSGEIIESPITSNFKEGLTALEYFNSTHGARKGLADTALKT

SEQ ID NO: 134932 - protein, 265 aa, Unknown
  Bacterial polypetide isolated from the Sargasso Sea
YLVFKSLPSRISLAIDMKLKEVERVLYFENFIVIEPGLTGLKKNQLLNEEELTKYQDEYGEESFTAGIGAEAILEILKSIDLEQERNLLIKSIKETKSKVAEERAIKRLKLVESFIETGNKPEWMILTVVPVIPPELRPLVPLDGGRFATSDLNDLYRRVINRNNRLKRLIDLKAPDIIVRNEKRMLQESVDALFDNGRRGRVITGTGKRPLKSLAEMLKGKQGRFRQNLLGKRVDYSGRSVIVVGPDLKLHEMWFAKKNGFRII

SEQ ID NO: 134933 - protein, 93 aa, Unknown
  Bacterial polypetide isolated from the Sargasso Sea
MDVENVNVKNWKSLIKPAKLDVKISDDLTHATIIAEPLEKGYGLTLGNSLRRILLSSIRGAAVTSIQIDGVLHEFTSIKGVREDVTDIVLNVK

SEQ ID NO: 134934 - protein, 499 aa, Unknown
  Bacterial polypetide isolated from the Sargasso Sea
PVLPPDLRPLVPLEGGRFATSDLNDLYRRVINRNNRLKRLLELKAPEIIVRNEKRMLQESVDALLDNGRRGRAITGTNKRPLKSLADMIKGKGGRFRQNLLGKRVDYSGRSVIVVGPTLRLHQCGIPKKMALELFKPHIFGKLHLRGITTTIKAAKKVVEKEGEEVWDILDEIIKEYPVMLNRAPTLHRLGIQAFEPILIEGKAIQLHPLVCAAFNADFDGDQMAVHVPLSLEAQVETRVLMLSSNNILSPSNGSPIIVPSQDIVLGIYYMSREKPNALGEGMVFSDVEEVHRAYQQKIIDLQAKIKVRIKVKENEEDDLPAKPLIVSTTVGRAVLAEILPKSIPFSYINKDLNKKAISELFDASYRYAGLKATVLLADQIMYTGFKYSTIAGVSIGVNDMVIPQQKGKMVTSAEKEVKDIEKQYNSGLLTAGERYNKVVDIWSHTNDQVSQAMMKELGTEKSKISSGKSIEHKSFNSIYKMADSGARGSAAQIRQLSG

SEQ ID NO: 134935 - protein, 311 aa, Unknown
  Bacterial polypetide isolated from the Sargasso Sea
MQYQIDRIDHQIADDRSQTGTFLIGPLERGQATTLGNSLRRVLMGGLEGSAVTAVRIAGINHEYATIPGVREDVLDILLNCKQLSINSSNPELEIGRLVASGPMEVKANDIQFSSQVEIVDGEKPIATIQEGHNLELEIHVERGVGYRPVDRKSEETTAIDLLQIDAVFMPVKRVNFTIDETAVAEGGTGRERLKMEVVTDGSKSPDDAIAEAANQLIELFQPLATVTMVEEIPEEPEPSPEAQIPLEELNLSVRAYNCLKRAQVNSVSDLMGFSYEDLLEIKNFGSKSADEVIEALERIGISIPQSRTSV

SEQ ID NO: 134936 - protein, 342 aa, Unknown
  Bacterial polypetide isolated from the Sargasso Sea
METTEVNTKNWKTLIKPGKLDVQLSDDKSHAKIIAEPLEKGYGLTLGNSLRRILLSSIRGTAVKSIQIDGVLHEFTSIKGVREDVTDIVLNVKELALKSSSEGEKKLILDAKGPGEIKASNILPVADIEILNPDLVICNLDENTNFHMEMNVGSGKGYISADMNKPEEPPLGLIPIDSLFSPVKKVSYSVSTAREGKALDYDKLTMEVQTNGSISAEDAVAYSARIFQDQLGMFVNFDEPQEVIIRDKPTEPEFNKNLLRKVDELELSVRSMNCLKNDNIIYIGDLVQKSEGEMLRTPNFGRKSLNEIKEVLTGMSLYLGMEIPNWPPENIAELSKKLEEAI

SEQ ID NO: 134937 - protein, 1178 aa, Unknown
  Bacterial polypetide isolated from the Sargasso Sea
LEAKLKKFSKRLKLLKSFKESGNRPEWMILEVLPILPPDLRPLVPLEGGRFATSDLNDLYRRVINRNNRLKRLLDLNAPDIITRNEKRMLQESVDALLDNGRRGRAVTGSNKRPLKSLADMIKGKQGRFRQNLLGKRVDYSGRSVIVVGPTLKLHQCGLPKKMALELFKPFVFGRLQKLELANTIKLAKRMVDREEPEVWDILDEVIREHPVMLNRAPTLHRLGIQAFEPVLVEGKAIQLHPLVCKAYNADFDGDQMAVHVPLTLEAQLECRALMMATNNILSPSNGKPIIDPSQDVVLGLYYMTREKTNDLGEGRIMSSPDEVNRAYYSGDVGLQAKIKVRLKPNKLDDEASQIVDTTTGRALLYDLLPEGMPFSLINTTLDSKQISSLIDVCYRKAGLKRTVIFADRLMYMGYEFSTKSGSSIGIDDFVIPEDKERIVSEAEKEVKEIESQFASGLVTKGEKYNKAIDIWTRANEMIAKSMMDNISKEEVKEADGTLALSDSFNSVFMYADSGSRGSPAQIRQLAGMRGLLAKPDGSIIETPVTSNFREGLTAQEYFISTHGARKGLADTALKTANSGYLTRRLVDVAQDMVVSEEDCGTSAGIVMKSIIDGGQVLVPLGDRVLGRTVAEDVKSVDGKEVLLKAGTLIDEDIVDTLDEKNIYEIKVRSAIHCETIHGICSKCYGRDLGRGHKVDIGEAVGIVAAQSIGEPGTQLTMRTFHIGGAASGTSAEDNIETNFSGKVLYNTRTVKKKDGTFISLSQTSDISVTDENGRIVESYKVPYGTVLNFATGSKVNPGDILAQWDPLTRPVIAEVAGKAKFVDLEDGITARVKQDDLTGLSNIEIIDVTERPKGEAQEKRPAIHIVDGRGKDKNLPDSEAPAIYSLPGNAFVQLNDGQDVEVGGVIARISQESAKTKDITGGLPRVADLFEARKPKEPAILAQASGIVSWGKPTKGKERLIITDEEGNDHATLILRTRHINVFEGERVEKGDIVSDGAMSPHDILALRGLEELTDYIVNGIQEVYRLQGVSINDKHIEVILNQMLRKVVVTEPGDSEFIIGEQTEFSRVREVNLALREAKKAEIKYDRILLGITKASLATESFISAASFQETTRVLTEAATTGRVDHLRGLKENVVVGRLIPAGSGLAKIQTEMDNVEEDFEIDLEKALSEALNEEE

SEQ ID NO: 134938 - protein, 963 aa, Unknown
  Bacterial polypetide isolated from the Sargasso Sea
MKELLNLLQSNQDEFSSISAGLASPQMVRSWSFGEVKKPETINYRTFKPERDGLFCAKIFGPIKDYECICGKYKRMKHRGVVCEKCGVEVTLAKVRRERMGHIELAAPVAHIWFLKSLPSRIGLLLDVTLREIERVLYFESFIVTDPGMTDLETGDILTEEEYIEAYDQYGDEFKAGMGAEAVKLLLEELDIEEEIRILREEIPQTNSETKLKKISKRLKLLEAFKASGNKPEWMIMDVLPVLPPDLRPLVPLEGGRFATSDLNDLYRRVINRNNRLKRLLELNAPDIIVRNEKRMLQESVDALLDNGRRGRVITGTNKRPLKSLADMIKGKGGRFRQNLLGKRVDYSGRSVIVSGPNLKLHQCGLPKKMALELFKPFVYGRLEHKELATTIKAAKRLVERETPEVWEALEEVIREHPVLLNRAPTLHRLGIQAFEPLLIEGKAIQLHPLVCVAYNADFDGDQMAVHVPLTVEAQLEARALMMSTNNILSPADGAPIINPTQDVVLGLYYMTREKVNSYGEGRVFSNPDEVQRAFESEQIDLHAKIKVRIENADKGVFIEDTTVGRTLIWRITPIEVGFDNVNKTLDKKAVSSLIDLSYRKAGLKKTVIFADQLMYLGFDFSTRSGSSIGVDDFVIPEEKYEIVDKAEDEVKEIENQFSSGLVTRGERYNKVVDIWSRANERVAKAMMEKISKDSVEDSEGNEVEQASFNSVYIYADSGARGSPAQIRQLSGMRGLMSKPDGSIIETPITANFREGLSVLQYFISTHGARKGLADTALKTANSGYLTRRLCDVSMDSVITEDDCGTEDSIEMSAIIDGGEIIQDLTDRILGRVIAEPIFDNEGNELFPRDTLIDEDALLKIEPLNLSTLRVRSPMTCESSFGVCAKCYGRDLARGHLVHRGEAVGVVAAQSIGEPGTQLTMRTFHIGGAASSSSEDDSIISRNDGSVIFSDDIKSVKNKDKLE

SEQ ID NO: 134939 - protein, 383 aa, Unknown
  Bacterial polypetide isolated from the Sargasso Sea
MTTRSSSDFNSIRISLASPDQIKAWSYGEVTKPETINYRTLRPEKDGLFCEKIFGPTKDWECYCGKYKKIRYKGVICDRCGVEVTRAKVRRERMGHIKLAAPVAHIWFSKSTPSRLGLLLDVSPKNLERVLYFAQYIVTEINNNEKLDAINFFKQDAEQKIEEIKTRLEAVLESKEYLEELERLEIKVKKTDAKKPEKLEEIVKTIYAEFIDEEQTNTEETIQDLESLEVMDLLTEAKYREFRDKFGPVFVAEMGAEAILKILQEFDLEKATDELIDEIRQTSGQRRKKAIKRLRVIESFKQSGNKPEWMVLTILPVLPPELHPMVQLDGGRFATSDLNDLYRRVINRNNRLKHLLDLQAPEIIIRNEKRMLQEAVDALVDNG

SEQ ID NO: 134940 - protein, 841 aa, Unknown
  Bacterial polypetide isolated from the Sargasso Sea
MLCSIGHPTLHRLAFQAFEPVLIEGKAIQLHPLVCSAFNADFDGDQMAVHVPLSLEAQLEARVLMMSTNNVLSPANGAPIIVPSQDMILGLYYTTIMREGMKGEGMIFGSIEEVQYALDNNDVHLHAKITARIPQIDEHGEEIEKRFETTPGRVRIGALLPKNAKAPFELVNSLLRKKDVQNVIDTVYRYCGQKESVIFCDQIMSMGFREAFKAGISFGKDDMVIPETKWSIVNETRGQVTDFEQQYMDGLITQGEKYNKVVDAWSKCNDKVTDAMMDTISASQKDDVGAEAEPNSVYMMAHSGARGSVTQMKQLGGMRGLMAKPNGDIIETPIISNFKEGLSVLEYFNSTHGARKGLSDTALKTANSGYLTRRLVDVAQDCIVRMHDCGTDNSITAEPAVNDGEVITSLAERVLGRVAAEDIKVPGSEEIIVREGQLIDELMADAIDEVGLVSARIKSPLTCEAEEGVCAMCYGRDLARGTMVNTGEAVGIIAAQSIGEPGTQLTMRTFHIGGVAQGGQQSFLESSQDGKIEFENATTLKNASGDTLVMGRNMKLRIMDEHGVERANHKLDYGTKLFVKKGSKVSRGDKLFEWDPYTLPIIAEKGGTAKYVDLVNGVAVREDTDDATGMTQKIVVDWRTAPKGNDLKPEIILLDKNGEPVRNDAGNPITYPMSVDAILSIEDGSEVKAGDVVARIPREGAKTKDITGGLPRVAELFEARRPKDHAIIAEIDGYVRFGRDYKNKRRISIEPADESLETVEYMVPKGKHIPVVEGDFVQKGDYIMDGNPAPHDILSIMGVEALANYMIDEVQDVYRLQGVKINDKHVEVIVRQMLQKWEISD

SEQ ID NO: 134941 - protein, 578 aa, Unknown
  Bacterial polypetide isolated from the Sargasso Sea
MTNSNLRTENHFDYVKISIASPQRIMDWGQRTLPNGQVVGEVTKPETINYRTLKPEMDGLFCEKIFGPSKDWECHCGKYKRVRHRGIVCERCGVEVTESRVRRHRMGYIKLAAPVSHVWYLKGIPSYVAILLDIPLRDVEQIVYFNCYVVLDPGDHKELKYKQLLTEDEWLEIEDEIYAEDSTIENEPFVGIGAEALKQLLEDLDLNQVAEELREEITNSKGQKRAKLIKRIRVIDNFIATNAKPEWMVLDAIPVIPPDLRPMVQLDGGRFATSDLNDLYRRVINRNNRLARLQEILAPEIIVRNEKRMLQEAVDALIDNGRRGRTVVGANNRALKSLSDIIEGKQGRFRQNLLGKRVDYSGRSVIVVGPKLKMHQCGLPKEMAIELFQPFVIHRLIRQNIVNNIKAAKKLIQKADDEVMQVLQEVIEGHPILLNRAPTLHRLGIQAFEPKLVGGRAIQLHPLVCPAFNADFDGDQMAVHVPLALEAQTEARMLMLASNNILSPATGEPIVTPSQDMVLGSYYLTALQPNYRKPEFGDNKTTFASLEDVIFAFEDKRLSLHEWIWVRFNGEVEDEDEM

SEQ ID NO: 134942 - protein, 325 aa, Unknown
  Bacterial polypetide isolated from the Sargasso Sea
MQTSLLKPKIIAVESLGENHARVVMEPFERGYGHTLGNALRRVLLSSMVGYAPTEVTIAGVVHEYSTLDGVQEDVVNLLLNLKGVVFKLHNRDEVTVTLRKEGEGVVTAGDIELAHDCEVINPNHVIAHLSKGGKLDVQIKIEKGRGYVPGNVRRYGEDTAKIIGRIVLDASFSPVRRVSYAVESARVEQRTDLDKLVMNIETSGVITPEEAIRQSARILVDQLSVFAALEGTETAAEAPSRAPQIDPILLRPVDDLELTVRSANCLKAENIYYIGDLIQRTENELLKTPNLGRKSLNEIKEVLASRGLTLGMKLENWPPAGLDK

SEQ ID NO: 134943 - protein, 412 aa, Unknown
  Bacterial polypetide isolated from the Sargasso Sea
SPEKIKSWSYGEIKKPETINYRTFRPEKDGLFCSRIFGPVKDYECLCGKYKRMKFRGIICEKCGVEVTKSNVRRERMGHIDLACPVAHIWFLKSLPSRISLAIDMKLKEVEKVLYFESFIVVEPGLTTLKKGQLISEEALLKAQEEFGEDAFTAGIGAEAVREILVNLDLKKEQQKLRESLKDIKSKVTEERTIKRLKLIESFINSGNKPEWMILTSVPVIPPELRPLVPLDGGRFATSDLNDLYRRVINRNNRLKRLLDLKAPDIIVRNEKRMLQESVDALFDNGRRGRVITGTGKRPLKSLAEMLKGKQGRFRQNLLGKRVDYSGRSVIVVGPELKLHQCGLPKKMALELFKPFLYARLDKLGLATTIKQAKRLVEKEKSEVWDSLEHIIREHPILLNRAPTLHRLGVQA

SEQ ID NO: 134944 - protein, 144 aa, Unknown; identical to SEQ ID NO: 134234
  Bacterial polypetide isolated from the Sargasso Sea

SEQ ID NO: 134945 - protein, 845 aa, Unknown
  Bacterial polypetide isolated from the Sargasso Sea
LYRRVINRNNRLKRLLELSAPDIIVRNEKRMLQESVDALLDNGRRGRVITGTNKRPLKSLADMIKGKGGRFRQNLLGKRVDYSGRSVIVAGPNLKLHQCGLPKKMALELFKPYVYGKLEQNELATTIKAAKKLVERETPEVWEILEEVIREHPILLNRAPTLHRLGIQAFEPLLVEGKAIQLHPLVCVAFNADFDGDQMAVHVPLSIEAQLEARALMMSTNNILSPANGEPIINPTQDIVLGLYYMTRDKVNVQGDGRVFSNPNEVLRAYESETIDIHANIKVRITNADKGTFLEDTTVGRVLVWRITPIEVGFDNVNKTLDKKSVSNLIDISYRKAGLKDTVIFADQLMYLGFEHSTRSGSSIGVDDFVIPEEKPSIIDAAEKEVKSIESQYESGLVTQGERYNKVIDIWSRANEKVAKAMMAKISIDQVSDTEGKEVDQASFNSVYIYADSGARGSPAQIRQLSGMRGLMSKPDGSIIETPITANFREGLSVLQYFISTHGARKGLADTALKTANSGYLTRRLCDVAMDSVVVMDDCGTDQSILVSSIVEGGDIIQPLTERILGRVIAEPISNLDGEEVYPVGHLIDEDSVKKIDELNISSLMVRSPMTCEASYGVCSKCYGRDLARGHLVHRGEAVGVVAAQSIGEPGTQLTMRTFHIGGAASSSSEDNAIVVNNPGVINFSSDMKTVTNKDKQEVVVSRNSQVTLTDEKGKLIEQHKLIYGATLFVKDQTNVEPGLKIAGWDPYTRPIISEVEGIVQFTDIDDGVTVRSKTDELTGLSSIEVIDVAERPSAGKDKVPSIALVDAKGKPVPLGEHKTPANYSLPAKALVNLKDGKKLHAGEV

SEQ ID NO: 134946 - protein, 374 aa, Unknown
  Bacterial polypetide isolated from the Sargasso Sea
SDLNDLYRRVINRNNRLKRLIDLRAPDIIIRNEKRMLQESVDALFDNGRRGRVITSTNKRPLKSLSDMLKGKQGRFRQNLLGKRVDYSGRSVIVVGPNLKLHQCGLPKKMALELFKPFIFHKLDIYGWANTIKAAKKLVEKEDPRVWDILEEVIREHPVLLNRAPTLHRLGIQAFEPILIEGKSIQLHPLVCTAFNADFDGDQMAVHVPLSLESQLEARVLMMSTNNILSPSSGKPIIVPSQDIVLGIYYLSILRKNQIGEGRSFLDLNEIIKALENKDINLHSKIIARVKDFNGNFNTTETTAGRMILGDILPKNENINFDMLNKVLTKKEVSNIIDTVYRFCGQKETVLFADKIMGIGFRYAAMAGISFEKM

SEQ ID NO: 134947 - protein, 702 aa, Unknown
  Bacterial polypetide isolated from the Sargasso Sea
EFGDEFSAGMGAEAVQILLEELDIDDEIRIIREEIPQTNSETKLKKFSKRLKLLEAFNNSGNKPEWMIMNVLPVLPPDLRPLVPLEGGRFATSDLNDLYRRVINRNNRLKRLLELNAPEIIVRNEKRMLQESVDALLDNGRRGRVITGTNKRPLKSLADMIKGKGGRFRQNLLGKRVDYSGRSVIVAGPNLKLHQCGLPKKMALELFKPFVYGKLENRELATTIKAAKKLVERETPEVWEVLEEVIREHPVLLNRAPTLHRLGLQAFEPKLIEGKAIQLHPLVCVAFNADFDGDQMAVHVPLTLEAQLEARALMMSTNNILSPADGSPIINPTQDVVLGLYYMTRDNANASGGGRTFSNADEVLRAYETENLEIHSPVKVRITHESGETSIEETTVGRILIWRITPAEVGFKNINTVLNKKTVSKLVDTSYRKAGLKKTVIFADQLMYLGFDFSTRSGSSIGVNDFVIPEEKASIIDSSEKEVKAIEKQFDSGLVTRGERYNKVIDIWSRANEQVAKAMMEKISSETVKNPDGENVDQSSFNSVYIYADSGARGSPAQIRQLSGMRGLMSKPDGSIIETPITANFREGLSVLQYFISTHGARKGLADTALKTANSGYLTRRLCDVSMDSVINIEDCGTTESITVTSIIDGGEIIQPLTDRILGRVIAEPIVDANGKEIFPINTMLDEECANHHRRIELIQLK

SEQ ID NO: 134948 - protein, 352 aa, Unknown
  Bacterial polypetide isolated from the Sargasso Sea
EIEAEPEVGIGAEALKRLLEDLELAEIAEQLREDIAGSKGQKRAKLIKRLRVIDNFIATDARPEWMVLDAIPVIPPDLRPMVQLDGGRFATSDLNDLYRRVINRNNRLARLQEILAPEIIVRNEKRMLQEAVDALIDNGRRGRTVVGANNRPLKSLSDIIEGKQGRFRQNLLGKRVDYSGRSVIVVGPKLKMHQCGLPKEMAIELFQPFVIHRLIRQNIVNNIKAAKKLIQRADDEVMQVLQEVIDGHPILLNRAPTLHRLGIQAFEPKLVDGRAIQLHPLVCPAFNADFDGDQMAVHVPLALEAQTEARMLMLASNNILSPATGQPIITPSQDMVLGAYYLTATRQERSKP

SEQ ID NO: 134949 - protein, 455 aa, Unknown
  Bacterial polypetide isolated from the Sargasso Sea
YIVTDPGLTDLEKCQILTEEEFVEAFDEYGDEFTASMGAEAVQMLLQELDLEEEIRIIREEVPQTNSETKLKKLSKRLKLLEAFNESGNKPEWMIMNVLPVLPPDLRPLVPLEGGRFATSDLNDLYRRVINRNNRLKRLLELSAPDIIVRNEKRMLQESVDALLDNGRRGRVITGTNKRPLKSLADMIKGKGGRFRQNLLGKRVDYSGRSVIVAGPDLKLHQCGLPKKMALELFKPYVYGKLEQNELATTIKAAKKLVERETPEVWEILEEVIREHPILLNRAPTLHRLGIQAFEPLLVEGKAIQLHPLVCVAFNADFDGDQMAVHVPLSIEAQLEARALMMSTNNILSPANGEPIINPTQDIVLGLYYMTRDKVNVKGDGRVFSNPDEVLRAYESETIDIHANIRVRITNADKGTFLEDTTVGRVLVWRITPIEVGFDKVNKTLDKKSVSNLID

SEQ ID NO: 134950 - protein, 312 aa, Unknown
  Bacterial polypetide isolated from the Sargasso Sea
EFGDEFTAGMGAEAVQVLLEELDIDDEIRVIREEIPETNSETKLKKLSKRLKLLEAFKDSGNKPEWMVMNVLPVLPPDLRPLVPLEGGRFATSDLNDLYRRVINRNNRLKRLLELNAPEIIVRNEKRMLQESVDALLDNGRRGRVITGTNKRPLKSLADMIKGKGGRFRQNLLGKRVDYSGRSVIVAGPNLKLHQCGLPKKMALELFKPFVYGKLENRELATTIKSAKKLVERETPEVWEVLEEVIREHPVLLNRAPTLHRLGLQAFEPKLIEGKAIQLHPLVCVAFNADFDGDQMAVHVPLTLEAQWKQEL

SEQ ID NO: 134951 - protein, 675 aa, Unknown
  Bacterial polypetide isolated from the Sargasso Sea
SLPSRIGLMLDMTLREIERVLYFEAFVVIEPGMTPLEKGQLMTDEMYLDAVEQYGDEFDAAMGAEAVAALLSSFDLQTEMLQVREDMAATKSEIKIKRLTKRLKLLESFLNSGNKPEWMILNVLPVLPPDLRPLVPLDGGRFATSDLNDLYRRVINRNNRLRRLLELNAPDIICRNEKRMLQESVDALLDNGRRGRAITGTNKRPLKSLADMIKGKQGRFRQNLLGKRVDYSGRSVIVVGPTLKLHQCGLPKKMALELFKPFIYSKLQLRGEASTIKAAKRIVEREGTEVWDILAEVIREHPVMLNRAPTLHRLGIQAFEPVLIEGKAIQLHPLVCTAFNADFDGDQMAVHVPLSIEAQLETRALMMASNNILSPANGEPIIVPSQDVVLGLYYMTRSKVNGKGEGMVFSDIDEARRAYENHVVELQTKAKVRVLINQKNEEGELELKNKLVETTIGRALLSTLLPKGLSFDLVNRDMTKKAISDLVNSSYRILGLKETVIFADKLMYTGFRFATSAGISIGVDDMVIPSSKNEILSSADNDVREIQEQFSDGLVTDGERYNKVVDIWTRTNEQIAKAMMDKLGSEVVEDSDGNEVKQDSFNSIFMMADSGARGSAAQIRQLAGMRGLMAKPDGSIIETPITANFREGLDVLQYFISTHGARKGLADTALKTANS

SEQ ID NO: 134952 - protein, 863 aa, Unknown
  Bacterial polypetide isolated from the Sargasso Sea
CSEEHGDEFEAKMGAEAILDILRGIELATEIKQMREELPTINSETKRKKISKRLKLMEAFHTSGNKPEWMIMTVLPVLPPDLRPLVPLDGGRFATSDLNDLYRRVINRNNRLKRLLDLSAPDIIVRNEKRMLQEAVDALLDNGRRGRAITGSNKRPLKSLADMIKGKQGRFRQNLLGKRVDYSGRSVITVGPTLRLHQCGLPKKMALELFKPFIYGKLEARGLATTIKAAKKMVEREEGAVWDVLDEVIREHPVLLNRAPTLHRLGIQAFEPVLIEGKAIQLHPLVCAAYNADFDGDQMAVHVPLTIEAQLEARALMMSTNNVLSPANGEPIIVPSQDVVLGLYYMTREAINAKGEGMIFKHAKEAEKAFRAGVASLHARVKVRITEVTIAEDGSRSSVTAVRDTTVGRAILYSIMPEGLAFDSINQAMGKKQISRLLNGSYRRIGLKNTVILADQIMYTGFHYAMLSGVSVGIDDMVIPAAKVDIISAAEAEVAEIQDQFQQGLVTAGEKYNKVIDIWSTANEALSKAMMDNLSKESVVDREGNTVTQPSFNSVYMMADSGARGSPAQIRQLAGMRGLMAKPDGSIIETPITANFREGLSVLQYFISTHGARKGLADTALKTANSGYLTRRLVDVAQDLVVTESDCGSTEGIMMKPLIEGGDVVEGLRERVLGRVVIGDVVVPATGEVLVEDGTMLDEKLCDAIEKHSIDEVYVRSVITCQTNFGVCAKCYGRDLARGHIINAGEAVGVIAAQSIGEPGTQLTMRTFHIGGAASRSSAENSVQVKNSGILKLHNAKFVRNSDNKIVITSRSAEVTVFDDMGREKERYKLPYGSILATDDNAKIVSGQIVASWDPHSHPIIVE

SEQ ID NO: 134953 - protein, 188 aa, Unknown
  Bacterial polypetide isolated from the Sargasso Sea
GKGYVPANSGSQVEMPIGLIPVDALFSPIKQVAYRVENTRVGQQTDYDKLLFDIETDGTVTPEDAIAFGARILTEQLKPFINFDEPEPEIEEDLESVLPFSRNLLKKVDELELSVRSANCLKNDNIVYIGDLVQKTEPEMLRTPNFGRKSLNEIKEVLKMMSLELGMDVEGWPPENIEELAKKHEDPY

SEQ ID NO: 134954 - protein, 325 aa, Unknown
  Bacterial polypetide isolated from the Sargasso Sea
AKLDIALSEDKTYAKITAEPLEKGYGLTLGNSLRRILLSSIRGTAVTAVQIDGVLHEFSSIKGVREDVTDIVLNIKSLALKSSSEGSKKLVLDAKGPGEIKASNITSIPDVEILNPDLIICNLDENTNFHMEMNVGSGKGYVSAEINKPDEPPLGLIPIDSLFSPVKKVSYSISTAREGKALDYDKLIMEVETNGSIFADDAVAYAARIFQDQLSMFVNFDEPQEVIVREKPTEPEFNKNLLRKVDELELSVRSMNCLKNDNIIYIGDLVQKSEGEMLRTPNFGRKSLNEIKEVLQGMSLYLGMEIPNWPPDNIAELSKKLEEQI

SEQ ID NO: 134955 - protein, 463 aa, Unknown
  Bacterial polypetide isolated from the Sargasso Sea
KQGRFRQNLLGKRVDYSGRSVIISGPQLKLYECGLPKKMALELFKPFVMNSLVVKGYAHNIKSAKRLAERSQPEIWDILEEVIKDHPVLLNRAPTLHRLGIQAFQPVLVEGSAIQLHPLVCTAFNADFDGDQMAVHVPLSKESVLEAKKIMLSTNNMLAPRSGEPIVAPNLDMVLGIYYLTGMDEKEEKDKISTFDSRESAIFAHEVESLALREPIKLKINDEYVETTVGRLLWHEIIPEELGFRNQQFTKSLIEDLVADCYGLLGKDVTTVVLDDIKDIGFKYATVSGTTIAIKDIVTPPQKQSLLSSADQKIRKLDEQYMEGMITQAERYQSSINVWEDVSKKMESAVSDSLPNYAGIYSMADSGAKGNLAQIKQMAGMRGLMSDPKGRIIELPIRSSFAEGLSVMEYFISTHGARKGLADTALRTADSGYLTRRLADVAQDLIINTVDDENAVGIRIKAD

SEQ ID NO: 134956 - protein, 427 aa, Unknown
  Bacterial polypetide isolated from the Sargasso Sea
NKPEWMIVSILPVIPPELRPLVPLEGGRFAASDLNDLYRRIIIRNNRLKQLMDIQAPEVILRNEKRMLQESVDALFDNTKRKTAIRSGSKRPLKSISDMLRGKQGRFRQNLLGKRVDYSGRSVIVVGPELRMTECGIPKNMALELFKPHLIRELIRRDLAATPRSAKLMIENKESYVYEILESVVKDHPVLLNRAPTLHRLGIIAFQPILIDGKAIRVHPLVCSAFNADFDGDQMAVHVPLSIPSQLEARVLMMASQNVLHPASGKPITLPSQDMILGCYYLTRDKKGEIGEGMSFGSIDEVKIAHDNGKVAMHAIINVRHNGVWHKNTTAGRAIFNSIIPDELGYYDEIVSKKKLSFIIGESFVKAGNQRTVQLLDDLKDIGFKTATMSGVSISISDVIIPDAKHDIIDRAEQEVDKIQQRLTGMS

SEQ ID NO: 134957 - protein, 501 aa, Unknown
  Bacterial polypetide isolated from the Sargasso Sea
IPLRDVEQIVYFNCYVVLDPGDHKELKYKQLLTEDEWLEIEDEIYAEDSTIENEPFVGIGAEALKQLLEDLDLNHVAEELREEITNSKGQKRAKLIKRIRVIDNFIATNAKPEWMVLDAIPVIPPDLRPMVQLDGGRFATSDLNDLYRRVINRNNRLARLQEILAPEIIVRNEKRMLQEAVDALIDNGRRGRTVVGANNRALKSLSDIIEGKQGRFRQNLLGKRVDYSGRSVIVVGPKLKMHQCGLPKEMAIELFQPFVIHRLIRQNIVNNIKAAKKLIQKADDEVMQVLQEVIEGHPILLNRAPTLHRLGIQAFEPKLVGGRAIQLHPLVCPAFNADFDGDQMAVHVPLALEAQTEARMLMLASNNILSPATGEPIVTPSQDMVLGSYYLTALQPNYQKPAFGDNKITFASLEDVIFAFEDKRLSLHEWVWVRFNGEVEDEDEMRSPQKTQELEDGSRLEIWNLRRDRFDSDDNLISRFVLTTVGRVVMNYTIIDSVSKT

SEQ ID NO: 134958 - protein, 781 aa, Unknown
  Bacterial polypetide isolated from the Sargasso Sea
EIIVRNEKRMLQESVDALLDNGRRGRVITGTNKRPLKSLADMIKGKGGRFRQNLLGKRVDYSGRSVIVAGPNLKLHQCGLPKKMALELFKPFVYGKLENRELATTIKAAKKLVERETPEVWEVLEEVIREHPVLLNRAPTLHRLGLQAFEPKLIEGKAIQLHPLVCVAFNADFDGDQMAVHVPLTLEAQLEARALMMSTNNILSPADGSPIINPTQDVVLGLYYMTRDNANASGAGRTFSNPDEVLRAYETENLEIHSPIKVRVTHENGETSIENTTVGRILIWRITPTEVGFKNINNVLNKKSVSKLVDTSYRKAGLKKTVIFADQLMYLGFDFSTRSGSSIGVNDFVIPEEKAKIIDSSEKEVKAIEKQFDSGLVTRGERYNKVIDIWSRANEQVAKAMMEKISTETAKTPDGEDIDQSSFNSVYIYADSGARGSPAQIRQLSGMRGLMSKPDGSIIETPITANFREGLSVLQYFISTHGARKGLADTALKTANSGYLTRRLCDVSMDSVINIEDCGTSESITVTSIIDGGEIIQPLTDRILGRVIAEPIFDSDGKELFPVNTMLDEEALDIIDELNLSSLKIRSPMTCDAPIGVCAKCYGRDLARGHLVHRGEAVGVVAAQSIGEPGTQLTMRTFHIGGAASSASEDNAIFNKNAGIVSFSNDMKTVTNKNKLEVVVSRNAMCSISDTNGKIIEQYKVPYGAVLEVADSNDLEDGVKIASWDPYTRPIVSETSGKVKFTDIQDGITVREQLDELTGLSSVEIIEVADRTSAGRDMTPT

SEQ ID NO: 134959 - protein, 194 aa, Unknown
  Bacterial polypetide isolated from the Sargasso Sea
MEPSKKILAIILAAGNSERFNDNKLFFEIDGKPVLQRTIENILSVEHIDSILIVNSKKDELKIEKLLIQINSDKKIYSVYGGKNRADSLLCALDFITDQKLNIDYLVVHDGARPFTKKDMFYEGIKNIEIYDSVIFGLTPTDTVKIITDDNFVKKTLIRDKLINVQTPQFFKKEILIENINNNKNLNEITDDSS

SEQ ID NO: 134960 - protein, 94 aa, Unknown
  Bacterial polypetide isolated from the Sargasso Sea
KVWRTHWGKDDLNCELLNRNELFAVQTPQGFRFEDLWEASLKSREENWDVTDDASMLEKMGKSVHPVPGEMGNLKITTADDLDYARHQFQSSKL

SEQ ID NO: 134961 - protein, 88 aa, Unknown
  Bacterial polypetide isolated from the Sargasso Sea
MEKDDLNCELLDRNELFAVQTPQGFRFEDLWEASLKSREENLDVTDDASMLEKMGKSVHPVPGEMGNLKITTAEDLEYARHQFQSLKL

SEQ ID NO: 134962 - protein, 218 aa, Unknown
  Bacterial polypetide isolated from the Sargasso Sea
MSLFLVLLAAGDGKRLKTKVPKPYYKVKHASLLEHALNAFKSFPQIKKTLIVFNKKHSRYLNQINLKNTLKITGGKTRQESTFRALKKIGKLNCNKILIHDAARPNPSRNLIKEIINKLKKNDAVIPTIKVNDATKRVAKNIIFKNIQRESLRFSQTPQGFTFKKIYEKHKKNIDTNFDDDSALFTEDDEKVININGSQSNLKITDKEDLKIFKSLKK

SEQ ID NO: 134963 - protein, 196 aa, Unknown
  Bacterial polypetide isolated from the Sargasso Sea
MSNCFIILAAGKSNRFISKIPKPYIKYKGDILINHSINKAILSKKFSKIVVAINKGHKKYIKKLSKNKVHFIEGGKSRADSSRLSLKYLSKFKPKNVLIHDAARPNFSIKLVNKLFKNLKKFDGVVPVLKTTSSIKLIKNKKILNLDRNKIFLSQTPQAFNFKKIFDLQKKGNSKITDDASLFINNLNKIKMVKGE

SEQ ID NO: 134964 - protein, 129 aa, Unknown
  Bacterial polypetide isolated from the Sargasso Sea
QMERPDYVLIHDAARPVTPPDLINTVIENLKTTDAVAPALPVSDTLWEVIDEKVFKTKSRNNIWRAQTPQGFSFNKILEAHNASSPDATDDVEVAIAAGIQVKVVSGSEENIKITTAEDFERVMTVLGR

SEQ ID NO: 134965 - protein, 150 aa, Unknown
  Bacterial polypetide isolated from the Sargasso Sea
MTFEDVVAVIVAAGKGSRMRENRNKLLLPLGASTILENSLEPFLKHSRISKIYLAASVQDHNFIKKLIPEEVILIKGGKRRQDSVHNALVEIMKDGNIPDAVLIHDGARPFCSSNLIDRVLEATQRYDAAIPVLPINETVRRITVEKTKC

SEQ ID NO: 134966 - protein, 91 aa, Unknown
  Bacterial polypetide isolated from the Sargasso Sea
RNSLEKDDLNCELLDRNELFAVQTPQGFRFEDLWEASLKSRKENWDVTDDASMLEKMGKSVQPVPGEMGNLKITTAEDLDYARHQFQSSKL

SEQ ID NO: 134967 - protein, 162 aa, Unknown
  Bacterial polypetide isolated from the Sargasso Sea
NELTNIKTTKKIIVTAGGKKRQESVKKGILCTSNITELVCIHDGARPFVSEDLIKNSIDPCFNNDGAIIALPNYDTLKVCAEGYIKKTIDRKNTWRAQTPQTFWKMKLLDAFAYVEKNELCITDEASIMEAFGFQISVVHGHYNNFKITSPIDWQRAEEITL

SEQ ID NO: 134968 - protein, 176 aa, Unknown
  Bacterial polypetide isolated from the Sargasso Sea
IILVVPQDRVNKTKNELTNIKTTKKIIVTAGGKKRQESVKKGILCTSNITELVCIHDGARPFVSEDLIKNSIDPCFNNDGAIIALPNYDTLKVSVEGYIKKTIDRKNTWRAQTPQTFWKIKLLDAFAYVEKNELCTTDEASIMEAFGFQISVVHGHYNNFKITSPIDWQRAEKITL

SEQ ID NO: 134969 - protein, 291 aa, Unknown
  Bacterial polypetide isolated from the Sargasso Sea
LNALKKLNTFKPDNVLIHDAARPFSSNKLVTKIIRALNKNQSAIPYISSPDKKIISKKEFNKPIKLIQTPQGFKFNLIYKAHVNTKIVNAKDDSVLIPIENLNFIKGEKLNIKITYPEDFNYFKLFVRPVYKSGIGYDIHQIDTKTKKGLKLCGVKINFNKLVGHSDADVGLHAICDSIFGALSMKDIGYYFSNKDPKWKNKNSEFFLKFARDKLKENNFYISNLDINFIAEKPNISKYRKEMILKLSLLLKIPKNIISIKATTNEKIGFIGDGLGIAAESIVQITDEKLY

SEQ ID NO: 134970 - protein, 285 aa, Unknown
  Bacterial polypetide isolated from the Sargasso Sea
SFKLKLFKHIILVTNNISYVQSKYFSKIKIIKGGKERSDSSLKALKYIKRFKVKNVLIHDAARPDFSTKLVKKILLKLKKYKAVVPFTLSTDAIKYKHKKLTFNLDKNNTFLTQTPQGFKYKDLYKISITNKTKVADEASLFIKNNSQIKFIKGELNNKKITFEKDIKNAKIFFGIGFDVHRLVQGRKLYLGGLKIKSSLGTLGHSDGDPVLHAITDALLGACRKGDIGQKFSDKNKKFKNIRSTILLKKVIKEIKENNYFINNLDINIITQTPKISNLKVKLIK

SEQ ID NO: 134971 - protein, 216 aa, Unknown
  Bacterial polypetide isolated from the Sargasso Sea
MKISAVILAAGRGTRAGGANPKQWQNLGNKRIIDHSIDLFKNIARINNIMVVLHPDDLHLLDRSDVLVTKGGHTRSASVKFGLEALKQNDMPDYVLIHDAARPSTPLTVINDVIDNLETADAVSPGLPVTDTLWEVIDENVVRTQSRRNIWRAQTPQGFNFKKILEAHTVSSSTATDDVEVATSAGLKVKVIYGSEKNIKITTAEDFDRVTAVLGY

SEQ ID NO: 134972 - protein, 245 aa, Unknown
  Bacterial polypetide isolated from the Sargasso Sea
ALVILAGGKGRRFGKKTPKQFYKIGNSTIINTFFDNLEIKHFDIFVVSIEKKYRDIITNYYKKINHKKKFIFSEPGKSRQESSFNSLKKINKFKLKNVLIHDAARPFCSNKLVKKILYQLKKNNNAIPYIEYNDRQITKLKKEDKKVLNIQTPQGFHYDMIYNAHKKFINKQYNDDATLIQELNFKINLIKGEKTNIKITYPEDLVYFNLFKKPIFKSGIGYDIHQIDKKTKKGLKLCGVSLPFS

SEQ ID NO: 134973 - protein, 84 aa, Unknown
  Bacterial polypetide isolated from the Sargasso Sea
MAAVEDAVLVAGGIGSRMLPASAAIAKEALPLVDIPAISHLAREAVEAGAKRLHIITSPTKDFTSLLKDNSWALDKRPDISKEL

SEQ ID NO: 134974 - protein, 124 aa, Unknown
  Bacterial polypetide isolated from the Sargasso Sea
MKNCQVLILSAGIGSRMGKQSRLPKCLNDIKQKKVIEMLFEKLYFLGFKDIYLTVGYKSKKIISFLKKKKYTFKTIYIKNFKNCGSVYSWYSFYKIWKKKKKNLIIIHSDLLFDISIFKFSEKK

SEQ ID NO: 134975 - protein, 275 aa, Unknown
  Bacterial polypetide isolated from the Sargasso Sea
MKNALVILAGGKGKRFNKKIPKQFYKIGEHNLINYLLNSIDLYVFDKIVISLDKKYKKNLISTDIPKILRNSFLYSEPGKTRQQSSYKALKKIERFKVNNVLIHDAARPFCSKKLFKKILFNLTKKNNVIPFIKYSDRQISKTTKKDIKGINIQTPQGFNYKLILEAHKKFKNETFSDDSSLIQKLNMKINLVKGEKTNIKITYPEDLVYLKLIKKPIIRSGIGFDIHQINTKTKDGLKLCGVKIPFSKLIGHSDADVGLHAICDSIFGALSMRD

SEQ ID NO: 134976 - protein, 270 aa, Unknown
  Bacterial polypetide isolated from the Sargasso Sea
TPKPYIRYKGDILINHSINKAILSKKFSKIVVAINKGHKKYIKKLNKNKVHFIEGGKSRADSSRLSLKYLSKFKPKNVLIHDAARPNFSIKLINELLKNLKKFDGVVPVLKTTSSIKLIENKKILNLDRNKIFLSQTPQAFNFKKIFNLQKKRNSKITDDASLFINNSRKIKMVKGEEKNIKITTKNDIKENLKYYFGIGFDVHRLVKNKRMYLGGLKIDSKLGTLGHSDGDPVLHAITDSILGACRKGDIGQKFSDKDKRFKNIRSTIL

SEQ ID NO: 134977 - protein, 179 aa, Unknown
  Bacterial polypetide isolated from the Sargasso Sea
MIGKKLVLIVAGGSGNRMNTSTPKQYLRIGEKPVLLMTIEAFLKCKEVNFLRVVISKSHIEMYREIVSRVKDRRLLPFALGGNNRSESVSNGLKSFKNMLFNKTDKILIHDAARPFITQDLIERLFSELETAEAVFPKIPISDALWYKSNNSFHKGPTRDFLFRAQTPQGFYFEQIKKL

SEQ ID NO: 134978 - protein, 200 aa, Unknown
  Bacterial polypetide isolated from the Sargasso Sea
MSFSLILLAAGDSKRFDSKISKPFTKIGGKTLIELSLIKFHKIKQIKRIIVVIKKGDLKHIKHISSKKVKIVYGGKTRQESTWKALKYIKNQKIFSKNIMIHDAARPNFSINLINKIIFFSKKNTVIPKLNINDAIKEIFDNNLFINVPRDNLVITQTPQSFKFNDIYKLHSESKVLYQDDDLSLMRSLKNVKLINGEKS

SEQ ID NO: 134979 - protein, 202 aa, Unknown
  Bacterial polypetide isolated from the Sargasso Sea
MSNCFIILAAGNSNRFNSKIPKPYIKYKGDILINHSINKAILSKKFSKIVVAINKGHKKYIKKLKKNNVHFIEGGKSRADSSRLSLKYLSKFKPKNVMIHDAARPNFSITLINKLLKNLKKFDGVVPVLKTTSSIKTIKNKKIINLDRDKVFLSQTPQAFNFKKIFNLQKKINSKITDDASLFINNPNKIKMVKGEEENIKI

SEQ ID NO: 134980 - protein, 268 aa, Unknown
  Bacterial polypetide isolated from the Sargasso Sea
NRQLSSYNALKELNKYKPRNVLIHDAARPFCSNKLIAKIINSLKKKYSSIPYTTSLDKKVILKNEFDQSIKLIQTPQGFDFETIFNAHKNSKINNAKDDSVLIPHEKLNFIRGEKFNIKITHHEDLNYFKIFLNPVFKSGIGYDIHRFDKQTKRGLKLCGIKINYSKLIGHSDADVGIHAVCDSIFGALSMKDIGYYFSNNNEKWKNKNSTFFLKFAKDKLIENKYYIVNLDINFICEKPNINKYRKKMISKLSSILNIPEKIISIKA

SEQ ID NO: 134981 - protein, 239 aa, Unknown
  Bacterial polypetide isolated from the Sargasso Sea
MNRKKSSYNALIKLKKFKIKNVLIHDAARPFCSNNLIKRIINKLKKNNNVIPFVEYNDRQISKVNKKDIKVLNIQTPQGFHYNVILDAHRKLRNEIFSDDSGLLQKLNIKINFIKGEKTNLKITYPEDLKFIPLIKKTIFKSGIGYDIHQFDKKNKKGLKLCGVKIPFTKLKGHSDADVGLHAICDSIFGALSMRDIGYHFPNNDKKFKNIDSSKFIYYCRQKLNEKGFYIINIDINIM

SEQ ID NO: 134982 - protein, 76 aa, Unknown
  Bacterial polypetide isolated from the Sargasso Sea
MAKLKTLKSAIETALADNVLITDEASALEYVNEPVQVVQGRSDNIKITYSDDLELARLILQSQNPYLKRKYRSYQP

SEQ ID NO: 134983 - protein, 345 aa, Unknown
  Bacterial polypetide isolated from the Sargasso Sea
MSNCFIILAAGKSNRFISKIPKPYIKYKGDILINHSINKAILSKKFSKIVVAINKGHKKYIKKLNKKKVHFIEGGKSRADSSRLSLKYLSKFKPKNVLIHDAARPNFSIKLVNKLFKNLKKFDGVVPVLKTTSSIKLIKNKKILNLDRNKIFLSQTPQAFNFKKIFDLQKKGNSKITDDASLFINNLNKIKMVKGEEENIKITTKNDIKEKLKYYFGIGFDVHRLVKNKRMYLGGLKINSKLGTLGHSDGDPVLHAITDSILGACRKGDIGQKFSDKDAKFKNIRSTILLRKVIKEIEKSGFFINNLDINIITQTPKISKYKKRMTSMISKLCKIKKDQINIKGK

SEQ ID NO: 134984 - protein, 361 aa, Unknown
  Bacterial polypetide isolated from the Sargasso Sea
LAAGQSKRFKSHKPKQYILYKNKPVYEHSLDKALESGLFKHIILVVKNKFSVNKKYSKNVKIIIGGKERSDSSLSGLKYVKKFKIKKVLIHDAARPNFSLNLLKKILNSLKKNDAVIPYVNATDSIKYNFKNNTYNLIRKNALLTQTPQGFKYNTLFNIAQKNKKKVQDEASLFIDRNLKVKFIKGESINSKITYKKDIEQGKIFYGIGFDVHRLVPGRKLFLGGLKIKSNLGTLGHSDGDPVLHAITDSILGACRMGDIGQKFSNKNKKYKNIRSTILLRKIINEIKLKNYHINNLDINIITQRPKISKFKNKMKNLISNICKLRNNQINIKGKTTEKLGLIGKEKAIACEVVTSVTKYD

SEQ ID NO: 134985 - protein, 375 aa, Unknown
  Bacterial polypetide isolated from the Sargasso Sea
MKNALVILAGGKGKRFGQKIPKQFLKIGNTNFLNYFISNLDLSNFDIINISIDKKYQNTYFNHKAVSEKIKITYSKPGLTRQISSFNALKNLKKFKIKNVLIHDAARPLCSNKLIKKIISKLGKNTNAIPYVEYNDRQLIKKSKLEIKAINVQTPQGFNYNLILKEHIKYKNFEFNDDSGLLQKSKIKINFIKGEKNNIKITYPEDVQLFNLYRKPITKYGIGYDIHQIDKKTKSGLKLGGVKIPFSKLIGHSDADVVLHAICDSIFGALSMRDIGYHFPNTDKKWKNADSSKFIIYCRSKLKEKGYSLINLDINIIAEKPKINKYVSKMIKNISTLLQIKINSVSIKATTNEKIGFIGNGEGIAAESIVHVTNE

SEQ ID NO: 134986 - protein, 330 aa, Unknown
  Bacterial polypetide isolated from the Sargasso Sea
LSINKNYRNIIKNNKKYNSFKNKVIFSTPGRTRQKSSFNALKKLEKINIQNVLIHDGARPLCSNKLINNILLNLNKKNNCIPYVNSNDRQIINSKNKDVKVSNLQTPQGFKFKLIFNAHKKFKSKKFSDDSSLIQELNSKLNLIKGEITNVKITYPEDLIYLKLLLKPTFKTGIGYDIHRIDKKTKTGLRLCGIKIPFSRLVGHSDADVGLHAICDSIFGALSMRDIGYHFPNNNKKWKNANSSKFIYFCKELLKKENFIITNLDINIIAEKPNISRYVNKMKKNVSKLLSINSNIISIKATTNEKIGFIGNGEGIAAEAIVQISNENFY

SEQ ID NO: 134987 - protein, 303 aa, Unknown
  Bacterial polypetide isolated from the Sargasso Sea
VWEDYSHQKVQRWTFGVILNPLIRALLYGTCFVVTGTLLFAFHFKKYQTPQSFTYCLSLAKNGSVFGLVISATFFLSISGNMGGDFSSIFSPLFLNLALQTKAAIAAALLLLGFSSFYFSGKMRWPQIEKAIAIGGAVLLLTSFVSTGHALKTGTFTQILLFFHLVGISFWIGSLLPLLHLSLSSNNANLHLIAHRFGILAVYYVLGLLVAGAGFTYALLGSDLSLLLSTSYGNVLLAKMATVSTLLLFGALNKFWCVPKIIKDGPRGARLLRISLKFELLLAVIILCLTSLLSTSLTLPMGG

SEQ ID NO: 134988 - protein, 368 aa, Unknown
  Bacterial polypetide isolated from the Sargasso Sea
MNNYFVILAAGKGSRFSNKKPKQYHLYKNKELYEHSINKSISSKLFKKIILVVDNPKKIKKKFSEKIIIIKGGKERSESSLISLKFLKKFKPNNILIHDAARPNFSISLIKKIIKELEEHSSVIPVVNPNDSIKYKLKNHLYNLNRNKTFLTQTPQGFKFKKLYNLALKEKNKINDEATLFINKDKKVKLIKGEFNNNKITYIEDIKIPKTYFGIGFDIHKLIKKKKLYLGGIKVPFHSGLKGHSDGDVILHAIIDALLGAMKKKDIGTFFPSNKKKFKNIRSPKMLKPILTNLNKENFSINNLDINLICERPKVSKYRNKIIDSISKLMDLRKDKINLKGKTVEKIGLIGKENAIACETIVSISKYE

SEQ ID NO: 134989 - protein, 88 aa, Unknown
  Bacterial polypetide isolated from the Sargasso Sea
MEKDDLNCELLDRNELFAVQTPQGFRFKDLWEASLKSREENWDVTDDASMLEKMGKSVHPVPGEMGNLKITTAEDLDYARHQFQSSKL

SEQ ID NO: 134990 - protein, 215 aa, Unknown
  Bacterial polypetide isolated from the Sargasso Sea
MQNALVILAGGKGRRFGQKTPKQFFQINNISILDILISRLDLSDFTHIVLCMDKKYRKNFKKKLSSKLENKKIIFSDPGNSRQKSSYNSLLKLNNFKIQNVLIHDAARPFCSNKLIKRILNSLKKTNCCIPFINYSDRKKIKTKKNNFDKDTLIYNIQTPQGFNYKSILKAHQTFKNFDLADDASLLEKSGLKIKMIKGEKSNIKITYKEDLIFM

SEQ ID NO: 134991 - protein, 228 aa, Unknown
  Bacterial polypetide isolated from the Sargasso Sea
MKTHAILLAGGSSNRFSNEENKVYFPIGRRPALCWPLETLEKSSIIDSIVLVIREEDWDKTNNVIELVDPKKLIGVTVGGNSRHESEYEGLNYLKESNKVEDQDLILIHDGARPFLPEPLINELINVAIKYGGSAPGFSSINLSQKENSDEAEEDETIIEVQTPQVFPAKELWESYELAKLDNWQAVDTTECVSKYLGMEAMIIPGDPRNMKVTYIEDIFELEKLIEE

SEQ ID NO: 134992 - protein, 201 aa, Unknown
  Bacterial polypetide isolated from the Sargasso Sea
VTALNENYKHPALPKHVDKKDILKGMYLYKEFHNKGKATVQLLGSGAILNEIIKAADILSKEFSIDCDVWSVTSFSELQRDGIEVERNNMLNPDKDRKLTYLEKCLKGRSGPIIAATDYVRVHADQIRPYIKSNFYSLGTDGYGRSDTRKKLREFFEVNKESIVVNTLSALSSEQKISSKVVKQAMSKYKIKVDKPIPTKV

SEQ ID NO: 134993 - protein, 180 aa, Unknown
  Bacterial polypetide isolated from the Sargasso Sea
MSFCLILLAAGDSKRFNSKTPKPYVKIGGKTLLEYSLIKFSKIRQIKNMIVVINKKHGRYFKKIKNRNLIKITGGKTRQVSTYNALKYIKKNNIKCSNVLIHDAARPNFSIRLIKKIINNSKNNSVIPKINIHDALKQNIGNKIIVNIPRENFFLTQTPQSFKFVTIFNLHAKNKFFYKE

SEQ ID NO: 134994 - protein, 230 aa, Unknown
  Bacterial polypetide isolated from the Sargasso Sea
MVYTTDVVVAAAGRGKRVGAAQNKLLLNLNQNSDRNEKAGEDKLFGKNVTTLLEYGLKTFKEHPGIRNIFLVVSKEDFQILQPWAEGEGFILVEGGERRQDSVHKALEHIHQHDELPDMVLIHDGARIFCTTDLIDRILHVCREYGSAIPVIPIHDTVRRIRTKQEPSRNWIEKLENSLEKDDLNCELLDRNELFAVQTPQGFRFEDLWEASLKSREENWDVTDDASMLE

SEQ ID NO: 134995 - protein, 53 aa, Unknown
  Bacterial polypetide isolated from the Sargasso Sea
MTDLRPGLTAIVPAAGIGSRMGAECPKQYLQLAGRNILEHTPDRLLSIQPSLR

SEQ ID NO: 134996 - protein, 169 aa, Unknown
  Bacterial polypetide isolated from the Sargasso Sea
MNNSKVFVVVPAAGIGSRMGTSSPKQYLELTESGQTVLAKSLEVIFQSVRVEKAIIAIAPGDERYHSSIASIENFCQIVEGGDQRMESVSNCLDTLVGEANKKDWVMIHDAARPCVRKEDIEKLLDSRNSSSAGGILALPVTDTLKLCDSGVIRGTVDRQKIWRALTPQ

SEQ ID NO: 134997 - protein, 209 aa, Unknown
  Bacterial polypetide isolated from the Sargasso Sea
AQAFLASPEIDSVLVVTTPGAQPLVQRFPDAGFNAARLVEVDCGGDSRHASVTQGLAALRRLGARDDDWVLVHDAARPGLTPALIARLVAAVEAEGTQAAGGILALPVADTLKRADAAQHIVATLPRDGLWQAQTPQMFPLGLLERALREALLQHRIVTDEASAIEAAGYPPLLVPGALRNFKVTYPDDFALAEAILAQSAPPDEASQA

SEQ ID NO: 134998 - protein, 210 aa, Unknown
  Bacterial polypetide isolated from the Sargasso Sea
MDCDPVGLHLLIVAAGSGRRMGSERNKLLLPLEGRPLLAWTLEAALASRSIAWIALVGQERDRQDIEAIVSSFKASKPVQWVQGGDSRQASVANGLTALPEQAEHVLIHDGARCLAEPALFDRCSRSLLSTGEALIAATPVVDTIKQVDDQQRIVHTPPRAALWAAQTPQGFPVEQLRQAHQRAQDEGWEVTDDAALFERLGWPVRVLEA

SEQ ID NO: 134999 - protein, 258 aa, Unknown
  Bacterial polypetide isolated from the Sargasso Sea
MHSIDKALISKKFKKIVVAINKSHKRYFTKIKRKNIKFLQGGKSRAESSLKCLKYIKKFKPSKVLIHDAARPDFSVKLIYNILKNLKSSKGVIPVIKSTSSVKKRDKNKIKNVDRDKIFLTQTPQGFDFNTLYRSQRLINNKTTDDASLLIKDNQNVKLIKGEENNTKITSKNDLRKKFQTFYGIGFDVHRLVPKRKLYLGGLLIKSKVGTLGHSDGDPVLHSITDAILGACKMGDIGEMFSDKSKRFKNIRSTILLK

SEQ ID NO: 135000 - protein, 159 aa, Unknown
  Bacterial polypetide isolated from the Sargasso Sea
VLTCTGGDTRAASVLAGLQALPESVRADDFVLVHDAARPNLPAADLGRLLEVGRADPVGAILAAPVRDTLKRAGDDGGIDRTEPRERLWRALTPQLFRRHQLTRALLEATGAGVEVTDEAMAMERQGARPLLVEGDECNFKVTTPADLARFEFELSRRV

SEQ ID NO: 135001 - protein, 259 aa, Unknown
  Bacterial polypetide isolated from the Sargasso Sea
SKVYTTDVVVAAAGRGKRVGAAQNKLLLNLNQNSDRNEMAGEDKLFGKNVTTLLEYGLKTFQKHPGIRKIFLVVSKKDLQILQPWAEGEGFILVEGGERRQDSVHKALEHIHQHDELPDLVLIHDGARIFCTRDLIDRILHVSREYGSAIPVIPIHDTVRRIRTKQEPSRDWIEKLENSLEKDDLNCELLNRNELFAVQTPQGFRFEDLWKASLKSREENWDVTDDASMLEKMGKSVHPVPGEMGNLKITTAEDLDYAR

SEQ ID NO: 135002 - protein, 232 aa, Unknown
  Bacterial polypetide isolated from the Sargasso Sea
MTTKFWLVIPAAGVGARMAADRPKQYLQIAGRCILEHTLHCFLDHPGLLGAVVCVAVDDPFWPQLPLARDLRIRRAPGGRERADSVLAGLDSLLAGGADSDDWVLVHDAARPNLTPADLDRLLDSLTDDPVGGLLAVPVRDTLKRVGSDGRVLETVDRSVIWQAYTPQMFRLGALREALAQALEEGVAVTDEASAMEWAGQSPRLIEGRADNLKVTRPEDLHYLQSIWPQGR

SEQ ID NO: 135003 - protein, 217 aa, Unknown
  Bacterial polypetide isolated from the Sargasso Sea
MRVSKVYTTDVVIAAAGRGKRVGAAQNKLLLNLNQNSDRDEKASEDKLFGKNVTTLLEYGLKTFQEHPGIRKIFLVVSKEDFQILQPWAEGEGLILVEGGERRQDSVHKALEHIHQHDELPDMVLIHDGARIFCSRDLIDRILHFCRENGSAIPVIPIHDTVRRIQTKQESSRNLIEKLENSLEKDDLNCELLDRNELFAVQTPQGFCFEDLWEASL

SEQ ID NO: 135004 - protein, 250 aa, Unknown
  Bacterial polypetide isolated from the Sargasso Sea
MKVSKVYTTDVVIAAAGRGKRVGATQNKLLLNLNQNSDRNEKACEDKLFGKNVTTLLEYGLKTFQEHPGIRKIFLVVSKEDFQILQPWAEKEGLILVEGGERRQDSVHKALEHILQHDELPDMVLIHDGARIFCSRDLIDRILDVCRENGSAIPVIPIHDTVRRIRTKQEPSRNWIEKLEKSLEKGDLNCELLDRNELFAVQTPQGFRFEELWEASLKSREENWDVTDDASMLEKMGKSVHPVPGEMGNL

SEQ ID NO: 135005 - protein, 123 aa, Unknown
  Bacterial polypetide isolated from the Sargasso Sea
PFCSLNLIDSVLDATEKHDAAIPVVPINDTVRRITGGETKIVDRSGLFFVQTPQGFRPELIYAASIEAKAKDIEVTDDASLLEKIPQRVASVEGEVHNIKITTPADLEQARLIINSKNHVRNK

SEQ ID NO: 135006 - protein, 125 aa, Unknown
  Bacterial polypetide isolated from the Sargasso Sea
GARCLAEPALFDRCAMALASGQALIAATPVTDTIKRVDADGVITDTPDRSELWAAQTPQGFQVDQLRQGHAEAEAKGWTVTDDASLYERLGWPVQVLDGGPSNIKVTTPFDLTVAEAVLALRQQD

SEQ ID NO: 135007 - protein, 287 aa, Unknown
  Bacterial polypetide isolated from the Sargasso Sea
MNNCFIILAAGESKRFNSKTPKPYHLYNGKPLIQHSIDKAKLCKKIKKIIIVVNKKHKKFIKNLEIKNIKIILGGKTRAKSAFNSLQAIKKLNISKVLVHDAARPNFSIKLIDKIFKELRFNNCVVPAIKVVDSIKLKSKKKIINLNRNNVYLTQTPQGFDFKALYKLQNHKSSKITDDANLFIAAGKKIKLINGEINNKKITINSDIKVNKSINYGIGFDVHRLVPKRKLFLGGIKIPSNLGTLGHSDGDPVLHAVSDSILGACKMGDIGEKFSDKNKKYKNIRST

SEQ ID NO: 135008 - protein, 229 aa, Unknown
  Bacterial polypetide isolated from the Sargasso Sea
MTAIPAIATVIPAAGVGKRMQADKPKQYLQLCGLTVLEQTLHRLKQVPALQQFYLALSPDDSYFPALPLANDPKIQRLNGGAERANSVLNALLQIDAQQYPWVLVHDAARPAVRVSDIELLIQSCIQQGQGGILATPVRDTMKRGSDTVQHTVDRAGLWHAYTPQLFPTAQLKDALQQALAQGVAITDEASAMEWAGLPVLLVQGHVDNIKITQAEDLALAAFYLEHSV

SEQ ID NO: 135009 - protein, 282 aa, Unknown
  Bacterial polypetide isolated from the Sargasso Sea
MIKKGIVLAGGIGSRMSPITKAVNKQLLPIYDKPLIFYPISILMLAGIRDILIVVNRGQIGQFKKILPNGNNLGIKISYVEQNKPRGLPDAFIVGEKFIGKDNVALILGDNFFYGQSLTKKLKECVKLNKGAKVFLHPVKKPQMYGVATVNKKKVIKLVEKPKKTNSNLAITGLYFFDNKVINYSKSLRPSKRKEVEIVDLLNKYKKNNNLKAEFIGRGGAWLDAGSINNFYEATSFVSALENRQGLKIACLEEIAKNNNWINNKIIKKAIKFYGKCEYSKY

SEQ ID NO: 135010 - protein, 198 aa, Unknown
  Bacterial polypetide isolated from the Sargasso Sea
MIAAAGSGRRMGADRNKLLLPLAGRPVIAWTLEAALRSERIEWIGIVGQEVDREAILAVLDAPSKPVHWIQGGSTRQESVLCGLAGLPEQARHVLIHDGARCLAEPELFDRCAAVVEAGTALIAATPVSDTIKRVGSDGVIRDTPDRSELWAAQTPQGFAVDQLRRGHAEAVAQGWTVTDDASLYERLGWPVQVLDAG

SEQ ID NO: 135011 - protein, 62 aa, Unknown
  Bacterial polypetide isolated from the Sargasso Sea
MTDLRPGLTAIVPAAGIGSRMGAECPKQYLQLAGRTILEHTLTRLLSHPAIAQVIVALAPHD

SEQ ID NO: 135012 - protein, 207 aa, Unknown
  Bacterial polypetide isolated from the Sargasso Sea
MLLPLGTSTILGTSLEPFLKHSRIRKIYLAASLQDHQLIKKLIPEEVVLVKGGKRRQDSVHNALVEVMKEKNIPDAVLIHDGARPFCSSNLIDRILYATLRHDAAIPVLPINDTVRRITDEKTNVVDRRGLYSVQTPQGFRPELIYAASSRAKAKNIDVTDDASLLENTPQNVASVEGEVHNIKITTSADLEQARWIINSLNHVRIK

SEQ ID NO: 135013 - protein, 229 aa, Unknown
  Bacterial polypetide isolated from the Sargasso Sea
MTAIPAIATVIPAAGVGKRMKADKPKQYLPLCGVTVLEQTLRRLKQVAALQQFYLALSPDDPYFPTLPLATDSGIQRVDGGAERANSVLNALVQIDAKVYPWVLVHDAARPVVRVSDIELLIDSCIESNQGGILATPVRDTMKRGSDRVEHTVDRAGLWHAYTPQLFPTALLRDALQQALAQGVAITDEASAMEWAGLPVLLVQGHADNIKITQAEDLALAAFYLEHSI

SEQ ID NO: 135014 - protein, 162 aa, Unknown
  Bacterial polypetide isolated from the Sargasso Sea
GAERAFSVLNALHVAAGEWVLVHDAARPCLTHGDLDALIATAMACDGAILGSRVRDTMKRSDGAGNILATVDREQLWHALTPQMFPTRPLLRALEEGLALGATITDEASAMERAGFTVRMVEGRADNIKVTRPEDLSLAGLYLQQQNARQPAQPDSPTEELA

SEQ ID NO: 135015 - protein, 159 aa, Unknown
  Bacterial polypetide isolated from the Sargasso Sea
VRSSGGKERADSVLNSLLFLAPNPPDWVLVHDAARPLVDLADIERLISECLSVNEGGILATKVKDTIKRGDTHSKQTVPRDDLWQALTPQFFKYSDLKNALQNALQSGVPITDEASAIEWVNKPVKLIAGRSDNIKITTPEDLALAGFILNKQQNESAV

SEQ ID NO: 135016 - protein, 194 aa, Unknown
  Bacterial polypetide isolated from the Sargasso Sea
WTLDAAMEAEQISWIGLVGQEVDRDEIVSLLDNVQKPVVWIQGGSTRQESVLRGLDALPAQANHVLIHDGARCLAEPDLFDRCAVALEQGGALIAATPVTDTIKKVNGDGQILETPLRAELWAAQTPQGFAVDQLRQGHAEALKKGWTVTDDASLYERLGWPVRVLDAGPSNIKVTTPFDLTVAEAVLALRRSG

SEQ ID NO: 135017 - protein, 145 aa, Unknown
  Bacterial polypetide isolated from the Sargasso Sea
SVLRGLAGLPADATQVLIHDGARCLAEPALFDRCADALAGGQALIAATPVTDTIKRVDGQGVITATPDRSELWAAQTPQGFQVDQLRQGHAEAQAKGWSVTDDASLYERLGWPVQVLDAGPANIKVTTPFDLTVAEAVLALRAPG

SEQ ID NO: 135018 - protein, 224 aa, Unknown
  Bacterial polypetide isolated from the Sargasso Sea
AVIVAAGKGSRMGEDRNKLLLPLGTSTIIETSLKPFLKHSRIRKIYLVASLHDHQLIKKLIPEEIILIKGGKRRQDSVHNALVEVMKGKNTPEAVLIHDGARPFCSLNLIDSILDATKRHDAAIPVLPINDTVRRITEEKTNVVDRSGLYIVQTPQGFRPELIYAASKEANAKNTKVTDDASLLEKISQRVASVEGEVHNIKITTPADLEQARWIINSMNHVRI

SEQ ID NO: 135019 - protein, 212 aa, Unknown
  Bacterial polypetide isolated from the Sargasso Sea
KRMQSAVPKQYLKLHGKTVLEHSVAKLRAVSAVNQIWLALAADDPYFDATELTHSDINRVKGGAERMHSVLNALQFIDEHQFPWVLVHDAARPLVRKADIELLITRCLQQGEGGILASPVRDTMKRGACYVAETVSREHLWHALTPQFFPTAMLKAALHDAIQAGVNVTDEASAMEWAGHRVMLVEGHSDNIKITQPADLALAAFYLEQVTE

SEQ ID NO: 135020 - protein, 118 aa, Unknown
  Bacterial polypetide isolated from the Sargasso Sea
RLLALRETSRVGGILAAPVRDTMKRAEPGKVAIAHTVDRNDLWHALTPQFFPRELLLDCLTRALNESAIITDEASALEYCGFHPELVAGRADNIKVTRPEDLALAEFYLTRSRHQEKA

SEQ ID NO: 135021 - protein, 249 aa, Unknown
  Bacterial polypetide isolated from the Sargasso Sea
MDTVLEAAPQVETQVAVQIDPFSHHVVAIVPAAGIGSRMGAGKPKQYLTLLGQSILAHTLDKLLSHPQINQVIVALHPEDTEFAALPQAKHPKLVTVIGGSERADSVLAALDKAPDNGWALVHDAARPCLTAQDIDKLLASRVHFPQGAILAMPVRDTMKRANSLGEISSTVCRDNLWHALTPQLFPTSLLRLHLKAALAAGAVVTDEASAMEWAGISPGLVAGRADNIKVTHPDDLELAELFLLRANA

SEQ ID NO: 135022 - protein, 232 aa, Unknown
  Bacterial polypetide isolated from the Sargasso Sea
MNFEHAVAVIVAAGKGSRMRKNRNKLLLPLGASTILEKSLEPFLKHSRIRKIFLAASVQDHHLIKKLIPEEVILVKGGKRRQDSVHNALVEVMKGKNIPDVVLIHDGARPFCSSNLINRVLDATQRYDAAIPVLPINETVRRITVEKTNVVDREGLYSVQTPQGFRPELIYKASSKAQEKNIEVTDDASLLEKISQRIASVEGEVHNIKITTPADLEQARWIITSMNHVRIK

SEQ ID NO: 135023 - protein, 232 aa, Unknown
  Bacterial polypetide isolated from the Sargasso Sea
MTFDHAVAVIVAAGKGSRMRENRNKLLLPLGASTILEKSLEPFLKHSRIRKIYLAASVQDHYLIKKLIPEEIILVKGGKRRQDSVHNALVEVMKGKNIPNVVLIHDGARPFCSSNLIDRVLDATKMYDAAIPVLPINETVRRITVEKTNVVDRRGLYSVQTPQGFRPELIYNASTKAQAKNTEVTDDASLLEKISQRVASVEGEVHNIKITTPADLEQARWIINSMNHDRIK

SEQ ID NO: 135024 - protein, 213 aa, Unknown
  Bacterial polypetide isolated from the Sargasso Sea
MGADRNKLLLPLAGKPVIAWTLKAALAAEQIHWIGVVGQEIDREPILDLVGDADKPVTWIQGGSTRQESVLRGLAGLPAAAEQVLIHDGARCLAEPALFDRCAQALATGQALIAATPVTDTIKRVDGDGVITETPDRSELWAAQTPQGFQVDQLRQGHAQAEAMGWAVTDDASLYERLGWPVQVLDAGPSNIKVTTPFDLTVAEAVLALRQQG

SEQ ID NO: 135025 - protein, 224 aa, Unknown
  Bacterial polypetide isolated from the Sargasso Sea
MTSPRVVAVIPAAGVGSRMQADRPKQYLTLNGKTILEHTIDALLQHPLIDDVIVAISPGDAYFDQYRLREKPIRVVDGGKERADSVLNGLMSLGENDWALVHDAARPCIEESDISALLELMSSDDVSGGILATPVRDTMKRVRPSTNVISHTEDRDGLWHALTPQLFPATLLKRALQNGLSQGANITDEASAMELEGYKVAMVSGSPANIKITHPADLPLAEFY

SEQ ID NO: 135026 - protein, 249 aa, Unknown
  Bacterial polypetide isolated from the Sargasso Sea
MDIVLEATPQTETEVAIQLDPFSPNVVAIVPAAGIGSRMGAGKPKQYLTLLGQSILAHTLDKLLSHPQINQVIVALHPEDTEFAALPQAKHPKLVTVIGGSERADSVLAALDKAPDNGWALVHDAARPCLTAQDIDKLLASRVHFPQGAILAMPVRDTMKRANSLGEISSTVCRDNLWHALTPQLFPTSLLRLHLKAALAAGAVVTDEASAMEWAGISPGLVAGRADNIKVTHPDDLELAELFLLRAKA

SEQ ID NO: 135027 - protein, 318 aa, Unknown
  Bacterial polypetide isolated from the Sargasso Sea
RFIDYLTLSGDTSDNIPGVEKVGPKTAIKWINEYGSLDGVIQNADQIKGKIGENLNTALDRLDLFKTLVTIKCDVEMDSNISDLTIGESNEGLLYEQLSDLGLHGLIKQFEIEPSEKESAADKNYQTIRTEKELDELMGLINQADYVSFDTETTSLDYMLAELVGISIALKPNEAFYIPINHNYEGAEKQLEQDFVLEALKPFLESDEIPKIGHNLKYDRHILQNAGIDLKGTLLDTMLFSYVNNSTITRHNLDAVSKRYLNINPTSYEDVAGKGAKQIPFSEVSIDVASDYASEDADISLKLYEHIEPLVQKESKLA

SEQ ID NO: 135028 - protein, 241 aa, Unknown
  Bacterial polypetide isolated from the Sargasso Sea
MKFIAKKEQIVDILQMGAAIAERRQTIPILANLRIKAENSLVEITATDLEIQIKSASKVSKVEEEGETTVSARKMSELCRMLPANEDLEFSVNQGKLTVKSRNFHADFATLSAADFPELEVGEHEKTLKISSSSLKRLFNKTQFCMATQDVRYYLNGLLLEINDGNLVAVATDGHRLASASNQIELKEDEIIRNILPRKAVTELAKILKDEDESIELSIGSSSLRIKDKGLDFSSKLIDGK

SEQ ID NO: 135029 - protein, 303 aa, Unknown
  Bacterial polypetide isolated from the Sargasso Sea
DITYRLYKIFSKNLKLEKLTNIYETFEKPLIEILAFMEINGIKVDNKSLEKLSKKFEIKIKNLEKEIFKFSKKEFNIASPKQLGEIIYNELKIAVLKKTRKGSFATSASVLEDLSFRGHKFPQLILDWRQVSKLKNTYSDSLREHINSRTKRVHTSFLLAATSTGRLASSNPNLQNIPIKSEDGKEIRKAFIAEKGFTLISADYNQIEMRILADLADVKGLKKAFKNNEDIHSLTASEVFNIDIKKVDQDMRRKAKAINFGIIYGISQYGLAKQIMVSNNEAEEFLNSYFLKFPEIKAYMEAT

SEQ ID NO: 135030 - protein, 292 aa, Unknown
  Bacterial polypetide isolated from the Sargasso Sea
PYQRMDEIQRRFDEDKPALARYNLKDCELVTRIFAKTELLSFLLERATVTGLPADRSGGSVAAFTHLYMPRMHRQGYVAPNLGDVAGAASPGGFVMDSRPGLYDSVLVLDYKSLYPSIIRTFLIDPLGLVEGMLNPADDQSVPGFLGARFSRTRHCLPSIVGQVWQAREAAKRAHNGPLSQALKIIMNAFYGVLGSTGCRFFDPRLASSITMRGHEIMHATRELIEAQGYEVIYGDTDSTFVWLKHAHSEEDASRIGRALVEHINAQWRQDLQARFGLESALELQFERHYKR

SEQ ID NO: 135031 - protein, 95 aa, Unknown
  Bacterial polypetide isolated from the Sargasso Sea
MLRSGAERNAINAPIQGSAADIIKIAMIRIHEKFKEQSLKSKMLLQVHDELVFDVHKSEKDIVKNIVQDTMESAVQLDVPLKIDLEFGKNWLEAH

SEQ ID NO: 135032 - protein, 247 aa, Unknown
  Bacterial polypetide isolated from the Sargasso Sea
SSNFTAKASLLRRLFDKSKFAISTEETRYYLNGVYMHIASSDGGEVLRCVATDGHRLARIDSDLPEGASDMPGVIVPRKTVGELRKLLDDDELKIAVSVSETKIRFATPEITLTSKVIDGTFPDYTRVIPNENVRRLEVDASDFAKAVDRVATVSSERSRAVKLSLDEDRLVLSVNAPDSGAAEEELAVAYGDEPLEIGFNAKYLLEIASQVDRENAVFLFNSSGDPTLMREGNDTSAVYVVMPMRV

SEQ ID NO: 135033 - protein, 292 aa, Unknown
  Bacterial polypetide isolated from the Sargasso Sea
MKASIEQTELLKAMAKVQSIVERRTTIPILSNVLIEAKDSSLYLRTTDLDIEVLDRVEAIIETPGSLTVGANTLYEIVRKLPDGSRVEFLNEIGSSQLEIIASRSRFFLSTLPKEDFPVMASEEYDFDFTIKAKVVKRLFDKSKFAMSSEETRYYLNGVYLHPCVENEKNILRAVATDGHRLAQIDIENPGLKENFSGIIVPKKTVSELRMVLENENDDISISISNNKIRFSNNFLTLTSKIVDGTFPDYKRVIPLDNDKKLQVNANEFSEAVDRVCTVSSERSRAVKLSLS

SEQ ID NO: 135034 - protein, 284 aa, Unknown
  Bacterial polypetide isolated from the Sargasso Sea
GEFNVAVGSYSLDENTFGDKNVALGYVALGKNTEAGNNTGIGAEALKLNTTGTYNTGLGSSAGDALGTGSQNVLIGASTDPSAADATNQTVIGYNSTGQADNSVTLGNADVTAVYMAQDAGATVHAAGITSASNGNITIDPNGSGTLALGSADNTATTVDAIAFSIDATGGASNISLAADGAADDLTVAVTGSQDASLVLSSAGTGADAVQLTASAGGMDISASSGVDFKASTIANFSASTVSITSAATLDATHNGKVLICNNSSDFNLTVPEDTLPAGFNCLI

SEQ ID NO: 135035 - protein, 107 aa, Unknown
  Bacterial polypetide isolated from the Sargasso Sea
LYLPEIRDRNAMRRQAAERAAINAPMQGTAADIIKKAMISIADWIKTDTQGEIAMIMQVHDELVFEVDADKAEALKLKVCELMAKAANLDVELLAEAGIGDNWDQAH

SEQ ID NO: 135036 - protein, 229 aa, Unknown
  Bacterial polypetide isolated from the Sargasso Sea
MKFAIVKSDLIKPLSHINSVVERKNAIAILSNLVIEAVSKEINFIATDMEIDIKEKIIANIISDGKVTVPAQTLHDIVKKFPDGSEILMQANDNNLTIECGKSKFTLPTLPFDDFPVMTDILDGKEFSISSADIKNLIDNTKFAISLEETRYYLNGIYIHQDEENKKFLKGVATDGHRLAQVKLKLPEGADGIPPIIIPRKTVNELRKLLEETDVDILVKVSNNKIKFM

SEQ ID NO: 135037 - protein, 301 aa, Unknown
  Bacterial polypetide isolated from the Sargasso Sea
YFKIGHNIKYDLRILEKYGLKLTSIADTMLLSYAIDNGVTKHNMDDLAYLHLNHTNIKFKELVGSGKKEITFDYVEINQALEYAAEDALVTLKLYNLLNNRIKNEKSNFVYNEIDLPLINVLSSIEKNGIKVDTKYLNKLSKEFEKESSILEKKIFKLAGKDFNIGSPKQLGEILFIDLSIQGGKKTKTGTFSTDSSTLSNLSDQGYEIASLILEWRELTKLKSTYTDALQNQATKDNSRVHTSYGIANTLTGRLSSNDPNLQNIPIRTNNGRKIRKAFVCETKKNLMSFDYSQNRIKTCS

SEQ ID NO: 135038 - protein, 205 aa, Unknown
  Bacterial polypetide isolated from the Sargasso Sea
MEFKINSSDLLKALSHIHGIVEVRHTLPILSNIILKAKDNELTLSSTNLDIFCADKIKSEVSIAGEISVSAVTFFEIVKRLPPGSEVVMTMEEGENEIKLRCGRSKFNLSTLKTDDFPIISDNDLSTNFVLSADELIRIIDKTKFAVSNEETRYYLNGIFLHKADRNSIQFLRAVATDGHRLAQYDIPLPQGAEDITGVIIPKKN

SEQ ID NO: 135039 - protein, 208 aa, Unknown
  Bacterial polypetide isolated from the Sargasso Sea
LQKLIKSERPDYLSVVFDTPVKTFRHDIFPEYKANRQKTPEDLIAQIEPLHQAIINLGLPLIAVDGVEADDVIGTLAVEAEKKNIKTLIATGDKDMAQLVTDNIHLIDTMKDIKMGPTEVLEKFGILPERFIDYLTLAGDTSDNIPGVEKVGPKTAIKWINEYGSLEGVIQNADQIKGKIGDNLNAALDELDLFKTLVTIKCDVQTEF

SEQ ID NO: 135040 - protein, 162 aa, Unknown
  Bacterial polypetide isolated from the Sargasso Sea
KEFLTKYKQRYPRVFAFLELQERLALSRGYVETILGRRRPFHFDRNGLGRLLGKDPLEIDLDVARRGGMEAQQLRAAANAPIQGSSADIIKVAMVQLQAALQSQALPARLLLQVHDELVLEVEPDALEATRNLVVTTMENAVQLSVPLVAETGVGANWMEAK

SEQ ID NO: 135041 - protein, 186 aa, Unknown
  Bacterial polypetide isolated from the Sargasso Sea
NFGVIYGMGIKKFARSTGVSTPEAKEFLIKYKERYSKIFKFLELQERLALSKGYVKTIFGRKREFKFDKNGLGRLIGKDPYEIDLQSARRAGMEAQSLRAAANAPIQGSSADIIKIAMVQLNKKFIEMNVPAKMLLQVHDELLFEVEPDSLEITTKLVKKTMEDCVKLNVPLLVDIGIGDNWMETK

SEQ ID NO: 135042 - protein, 176 aa, Unknown
  Bacterial polypetide isolated from the Sargasso Sea
QRTNAKTVNFGIIYGVSAFGLSQQTTLNRTESKDLIESYYKTYPKLRDFISNQISFARENGYVETILGRRRYLNNINSQNSIIRSADERNAVNSPIQGSAADIIKLAMIGIQTKINDAKLRSKMLLQVHDELIFEVPKNEIPKMKEIIKFEMENAFPLSVPLSVEIGEGENWLNAH

SEQ ID NO: 135043 - protein, 211 aa, Unknown
  Bacterial polypetide isolated from the Sargasso Sea
NKINNLEKEIFKISKKTFNIGSTKQLGEIMYNELKIANTKKTKKGSFATSAQVLEDLSFKGHKLPKLVLDWRQVTKLKNTYSDSLQEHINKKSRRVHTSFLLAATSTGRLASSDPNLQNIPIKSDDGKDIRKSFIAENKSLLISADYNQIEMRILADLADVKELKKAFKNNEDIHSLTASQVFNVKVKDVNSEMRRKAKAINFGIIYGISQ

SEQ ID NO: 135044 - protein, 50 aa, Unknown
  Bacterial polypetide isolated from the Sargasso Sea
MTVSNDTDRIIMHADMDAFYASVEQRDHPELRNRPLAVGGSGPRGVVAAA

SEQ ID NO: 135045 - protein, 223 aa, Unknown
  Bacterial polypetide isolated from the Sargasso Sea
ELRLIAHIADEIKMLDAFNNDLDIHSDTASKVFGVPINEMSSDLRRKAKAINFGIIYGISAYGLAKQLKCSANEAKEFIDSYFKRFPRIRDYMEEIKSNLEENGYVETLFNRRIYINDSNAKNQRLKGFAERQAINAPIQGSAADIIKLAMVKIHKSLLNHKNDVSMLMQVHDELVFEIRENSINKYSKIIQEIMEYANLPKVSLNVNLKVDTGFGDNWAEAH

SEQ ID NO: 135046 - protein, 55 aa, Unknown
  Bacterial polypetide isolated from the Sargasso Sea
TLNKLKNTYIDQLPEYVHFKSGNIHSTFHQTVTATGRLSSENPNLQNIPVRSTEG

SEQ ID NO: 135047 - protein, 291 aa, Unknown
  Bacterial polypetide isolated from the Sargasso Sea
VRGKYVINHINKICKNESILKIGQNIKYDIRILNKYGVTFNSIADTMLISYSIDNGIYKHNLDDLSFNHLNHTTTKYKEVVGTGKNEITFDKVTIDNAINYAAEDSLLTFRLFQNLYPRLIKEKANFVYHNIDLPLVEVLSSIEANGIEVNKKFLTSLSNEFENESKKIEKNIYKLSKEEFNIGSPKQLGEILFVNLKIPGGKKTKSGTYSTDSSTLNNLASDGFEIAKLVLDWRELTKLKSTYTDALFRLTDSKSRVHTSFGLASTLTGRLSSTDPNLQNIPIRTENGKK

SEQ ID NO: 135048 - protein, 316 aa, Unknown
  Bacterial polypetide isolated from the Sargasso Sea
HLNIENSKKTAGQLEENYVLKHIKSLCENPSILKIGQNIKYDMRLLNKYKINFKSIADTMLLSYSLDNGLTKHNMDDLAYYHFQHTCIKFKDVVGTGKNEITFDYVPIDKALEYAAEDALITFKLFHCLFPRCIKEKNLFIYKEIDLYLIDALSSMEENGIKVDNKYLQKLSNEFEKDSKNLEKEIFNISKKEFNIGSPKQLGEILFTDLNIPGGKKTKSGIFSTNSSTLNDLSFKGYEIAKLILEWREITKLKSTYTDALNEQTNNVTKRVHTSFGIANTLTGRLSSNDPNLQNIPIRTEKGKKIRNAFIADKQN

SEQ ID NO: 135049 - protein, 182 aa, Unknown
  Bacterial polypetide isolated from the Sargasso Sea
IYGMGAQRFARETGVSQSEAKEFLAKYKQRYPKVFAFLELQERLALSRGYVETILGRRRPFHFDRNGLGRLLGKDPLEIDLDVARRGGMEAQQLRAAANAPIQGSSADIIKVAMVQLQDALQRQGLPAQLLLQVHDELVLEVAPDALDAIRELVVQTMEQAVALSVPLVVETGVGANWMEAK

SEQ ID NO: 135050 - protein, 271 aa, Unknown
  Bacterial polypetide isolated from the Sargasso Sea
AGRSHFSLPTLPREDSPVMASSEYDTNFSTKAAILRRLFDKAKFAISTEETRYYLNGIYLHSATASAGQMLRAVATDGHRLACIDAELPDGADAIPGVIVPRKTVTEVLKLLADDDADIAVSVSETKIRFATPEITLTSKVIDGSFPDYTRVIPQQNQKRMEVDASDFAKAVDRVSTVSSERSRAVKLALDEDRLILSVNAPDSGAADEELAVAYADERLEIGFNAKYLLEIASQVDRENAVFLFNSSGDPTLMREGNDDSAIYVVMPMRV

SEQ ID NO: 135051 - protein, 184 aa, Unknown
  Bacterial polypetide isolated from the Sargasso Sea
MIALVQIPPKTRPRLFLVDAYALIYRSYFAFIKRPLMNAAGENTSAPFGFTRFLLDIREQFEPDYLAVVFDAGDSFRDQEYPEYKATREKMPDDLRDSLGRIRQIVEAFNDPVVELDGYEADDVIGTLARQAAEQGLEAVIVSGDKDFYQLVQPHIHLMNPGRGGSSGVAADWVTEENADVRFG

SEQ ID NO: 135052 - protein, 306 aa, Unknown
  Bacterial polypetide isolated from the Sargasso Sea
HDYEGCPEQLSMDEVITGLGPIIEENQDKIVGQNLKFDIPILSRHGINITKFLADTMLMSYVLNSTATRHGMDRLADYYLNYTTTKYTDVTGTASKQIPFSEVKLDVATDYAAEDADITLRLFNVLQQHFKERPIQEKLLHNLEYPLVHVLSKVEQNGAKIDKKKLANHSMELSEKIDELSSSAFKIAGEEFNLDSPKQLLEILYEKLGLPVLKKTPKGQPSTNEDTLQRLSEEYELPKIILQYRTLAKLKSTYTDSLINIENPKTNRIHTSYQQAVTSTGRLSSTEPNLQNIPIKTAEGRRIREA

SEQ ID NO: 135053 - protein, 303 aa, Unknown
  Bacterial polypetide isolated from the Sargasso Sea
PAHLLYEIVRKLPDGAQIELSTDNDNSQITINSGRSKFSLPCLSKEEFPVVSNDDLPHNFQISSKVLKKLLDKTKFAISTEETRYYLNGVYFHKPENVDVPVLRSVATDGHRLAYTESQLPEGVSDIPSIIVPRKAVSEVRRLLDQSDEDINISLSDSQMRFNIGTTTINTKLIDGTFPDYQRVIPEQNNKFMKVDRSDFIAAVDRVSTISTEKSRAIKLSIESNMMKISANSADTATAYEELSIEYDSELIEIGFNSKYLLDITNHVEGSVINFSLSDSVSPAIITDDSDTQSLFVLMPMRV

SEQ ID NO: 135054 - protein, 293 aa, Unknown
  Bacterial polypetide isolated from the Sargasso Sea
LQSISCEVLQEGAVTTPAHILYDIVRKLPDEAMIELESKEGKKLGIKSDKISFSLMCLPPNDFPDIHSGEYPEGFDIEASSLSRLIDKTLFSVSTEETRYYLNGIYLHSIKDDEQEVLRAVATDGHRLSRLSASLPKNVKNLEGVIIPRKTVTEIKKIIDNLEGKVKIQIAKNKIKFTIDNVIITSKLLDGAFPDYERVIPENNTKELIVDKLEFIAAVDRVSTLSSDRTRAIKFSLVKKNLEITAENPDQGSAKENINVHYDGDDLEIGFNSKYLIDIARQITGANIKFMLS

SEQ ID NO: 135055 - protein, 312 aa, Unknown
  Bacterial polypetide isolated from the Sargasso Sea
TCKEIEQGNYVDLLEIDAASRTKVEDTRELLDNVQYKPTRGRYKVYLIDEVHMLSKHSFNALLKTLEEPPPHVKFLLATTDPQKLPITILSRCLQFNLKAMSREQIVGQLQHILEHEQLPFEPQALALLARAAQGSMRDALSLTDQAIAQGGNQVLASVVTDMLGLMDKNQLLKVVHAVVSKSPADVLQLVNDIAEQAPDYDNVHSELASLLHQIALTQWVPEACKLETTSAKAIFQLAKTIPAEQVQLLYQIALQGRKDLPFAADGKSAFEMTLMRMMSFAPNTPIDDTASEIENGRSEHSLPVDHASSSG

SEQ ID NO: 135056 - protein, 262 aa, Unknown
  Bacterial polypetide isolated from the Sargasso Sea
MSKEKLLLVDGSSYLYRAFHALPDLRSSDGRPTGAIYGVLNMLQKLIKSERPDYLSVVFDTPVKTFRHDIFPEYKANRQKTPEDLIAQIEPLHQSIINLGLPLIAVDGVEADDVIGTLAVEAEKKDIKTLIATGDKDMAQLVTDNIHLIDTMKDIKMGPAEVLEKFGILPERFIDYLTLAGDTSDNIPGVEKVGPKTAIKWINEYGSLEGVIQNADQIKGKIGDNLNAALDQLDLFKTLVTIKCDVQTNSNFSDFIIGESNE

SEQ ID NO: 135057 - protein, 260 aa, Unknown
  Bacterial polypetide isolated from the Sargasso Sea
FLKSLSIKFEKKIKILEEKIFRLAKKEFKIGSTKQLGEVMYNELKISSLKKTKKGSFATSANVLEDLAFKGHELPKFVLDWRQVTKLKNTYTDSLVEHLNPNSKRVHTSFLLAATSTGRLASSDPNLQNIPIKSEDGKDIRKGFIAEKNYSLISADYNQIEMRILADLADVKELKKAFINNEDIHSLTASQVFNVGLKKVDYDMRRKAKAINFGIIYGISQYGLAKQINVSNTEAEDFLNSYFIKFPEIKEYMNSTIKYC

SEQ ID NO: 135058 - protein, 241 aa, Unknown
  Bacterial polypetide isolated from the Sargasso Sea
IMYNELKISALKKTKKGSFATSASVMEDLAYKGHELPKLILEWRQISKLKNTYSESLPTFVNNKTKRVHTSFLLAATTTGRLASSDPNLQNIPIKTDDGKNIRKSFIAEKNNLLVSADYNQIEMRILADLADVKELKKAFKNNEDIHTLTASQVFNIDIKKVDSNTRRKAKAINFGIIYGISQYGLAKQIMVSNSEAQEFLNSYFKKFPEIKEYMDSTIKFCRKSGYVNNIFGRRTYITGI

SEQ ID NO: 135059 - protein, 317 aa, Unknown
  Bacterial polypetide isolated from the Sargasso Sea
NEAYYIPLGHKTFKCLNKESVLKKIKPCFEDPSIKKVGQNIKYDFIVLINNGIEIDPVEDTMLLSYVLDAGNNRHNMDTLSEIHLGHKTISYKDVVGTGKKQLNFSDINLEEATKYAAEDADVTLRLYNLLLERVNNEKLKKIYEVFEKPMIKLLSKLEINGVKVDDVYLKQLSKKFEARLKKIEKEIYVVSGKEFNIGSPKQLGEIIYNDLKIAKLKKTKKGSLATSAKILEDLALTGHKFPNLVLEWRQVSKLKSTYTDALQEHINNKTKRVHTSFLLAATNTGRLASSDPNLQNIPIKTLDGKEIRKAFITEKN

SEQ ID NO: 135060 - protein, 313 aa, Unknown
  Bacterial polypetide isolated from the Sargasso Sea
VTSDKDYMQLIGEKIVMLNHRNERIGISGVQEKFGCVPEQVVEMLGLMGDSSDNIPGVRGVGEKTAVKLISEFGSIESVYENLERISSKSLKEKLETDHENAFLSRELATIECHVPLSSTLEDVHLGETDLYNNDKLYALLEELEFRTLMNRLIKKRGTVSVGQESGPTDVAQRESSQDENQELFSSEEETDHGYLEVECSLIETAEQLRTLISEFSNTIILAIDLDIKGEHQLDLWLKGLAICADGEKAVYIDLDRTGAEWTEIIGQLKTVLESAEYPKILYDLKKALQLFPKLGIEIEGVESDILLAAHMT

SEQ ID NO: 135061 - protein, 317 aa, Unknown
  Bacterial polypetide isolated from the Sargasso Sea
YCFKNYCLWKLYKLLSPKIISNRFAASYYSYEKPLLEVLARIEHNGVNVDVKKLTQLSKEFEENIAKLTKEIYEISGSEFNIASTKQLGEVLFEKMGLTSKKKSKKTGNLSTKSSVLEELSEQGHEIADKILAFRKFSKLKNTYTDALPKEINAQSDRIHTTLSSISTITGRLSSSNPNLQNIPIRSDEGKKIRQCFVAQKGNVLICADYSQVELRVLAHIANIKELVKAFKEDKDIHSITAAQVFGMAEDEVTSEARSQAKAINFGIVYGISAFGLAKQLGISRTDAAEYIKNYLETYPGIDDFMKNYQDFAKENG

SEQ ID NO: 135062 - protein, 253 aa, Unknown
  Bacterial polypetide isolated from the Sargasso Sea
SLSKLFNDIKKDVLIVTGDRDIFQLISKKTKILYTKKGISETDTMDEKSFKEKYEITPSQYIEYLALKGDPSDNIPGLPGVGEKTAITLLKKYKNLDNILQNLDELTPKLKNTFITNKDTLFISKALATIKTDLELDLPDLKLSDSAYFSDDVLENAQEKVKNLELNKYTLKNNNEIDKEIKNPEDKNIDEYESIEGENFILSFENETYFFNSKKFGKYTGNFSNINNYVLITSQTTISLTEDKLDFDKFDAY

SEQ ID NO: 135063 - protein, 210 aa, Unknown
  Bacterial polypetide isolated from the Sargasso Sea
KAFLNQEDIHSLTASQVFGVDKKKVNPEMRRKAKAINFGIIYGISQYGLAKQIGVSNVEAEEFLKSYFVKFPEIKEYMKRTINFCRKSGYVQNIFGRKTHIVGINDKNFNVRNFNERAAINAPIQGSASEIMRLAMIRINNEINLINKENLKMLLQIHDELIFETKNDDLKKSSKLIRNIMMSVKNSELHSFSIPLLVDVNSGNNWGELH

SEQ ID NO: 135064 - protein, 340 aa, Unknown
  Bacterial polypetide isolated from the Sargasso Sea
KKLKLVGISICFSENISYYIPINHTTSDGSKKIDNQLEENYVINHINKICKNESILKIGQNIKYDIRILNKYGVIFNSIADTMLISYSIDNGIYKHNLDDLSFNHLNHTTIKYKEVVGTGKNEITFDKVTIDNAINYAAEDSLLTFRLFQNLYPRLIKEKANFVYQNIDLPLVEVLSSIEANGIEVNKKFLTNLSNEFENESKKLEKKIYKLSKEEFNIGSPKQLGEILFVNLKIPGGKKTKSGTYSTDSSTLNNLASDGFEIAQLVLDWRELTKLKSTYTDALFRLTDGKSRVHTSFGLANTLTGRLSSTDPNLQNIPIRTENGKKIRTAFVSGKGEKI

SEQ ID NO: 135065 - protein, 241 aa, Unknown
  Bacterial polypetide isolated from the Sargasso Sea
KAKKDYLLISADYNQIEMRILADLADVKELKKAFKNKEDIHSLTASQIFNIDIKKVNQDHRRKAKAINFGIIYGISQYGLAKQINVSNYEAEEFLDSYFAKFPEIKVYMDNTIKFCRKSGYVNNIFGRRSHFNGINDKNFNVRNFQERAAINAPIQGSASEVMRLAMIRLDKKLSEQKNSNSKMLLQIHDELIFEIPKKDEKVMIKLIEKEMTSVAQSDYHSFSTPLTVDINVGDNWGVVH

SEQ ID NO: 135066 - protein, 177 aa, Unknown
  Bacterial polypetide isolated from the Sargasso Sea
MSYQVLARKWRPRSFREMVGQTHVLKALINALDNQRLHHAYLFTGTRGVGKTTIARIIAKCLNCETGITSTPCGTCSVCREIDEGRFVDLIEIDAASRTKVEDTRELLDNVQYAPSRGRFKVYLIDEVHMLSTHSFNALLKTLEEPPPYVKFILATTDPQKLPATILSRCLQFSLKT

SEQ ID NO: 135067 - protein, 299 aa, Unknown
  Bacterial polypetide isolated from the Sargasso Sea
LVGSGKKQLNLKEVEIKLAKDYAAEDADITLRLYKLFLQNLKSEKLLEIYENFEKPMIEILALMEINGVKIDKDFLAKLSNKFNKKIEQLEKDIFKITKSKFNIGSTKQLGEILYNQLKIASLKRTKKGSFATSASVLEDLAFKGHKLPKLILDWRQLTKLKNTYSDSLPEHQNPKTKRIHTSFLLAATTTGRLASSDPNLQNIPIKTEDGKEIRKSFIAEKGCFLVSADYNQVEMRILAEIADVKELKKAFINNEDIHSITASQVFNKKINEVDKDMRRKAKAINFGIIYGISQYGFS

SEQ ID NO: 135068 - protein, 270 aa, Unknown
  Bacterial polypetide isolated from the Sargasso Sea
MLPITELIGKGKNQTTIDKVPIEKVAFYAMEDSDIAFQLTQVLKDKLKKNRLLDYFTKIEMPLLNVLIQMEFTGTFVDSKLLKTMSNDIGEKIKSITSSIFALSGKDFNINSTQQLATILFDNLDLPQIKSRSTAENILKELRKYHELPQLILDYRKYFKLKNTYLDSLQNLVSTDTGRIHSTFNQTIAATGRLSSTNPNFQNIPIRKEEGKEIRKAFRAEKKGWQIFSFDYSQIELRIMAHYSKDSNLINAFNDKKDIHSETASSVFNV

SEQ ID NO: 135069 - protein, 306 aa, Unknown
  Bacterial polypetide isolated from the Sargasso Sea
MKIDVERNDLLRVMSRAQSIVERRTTIPILSNVLIEAHDKKVSCRTTDLDIEIIDTLEATIEGSGAVTVNANTLYEIVRKLKEGARLNLQYDQQKGRLELRSGRSSFSLATLSKDDFPMMASSEYECNFSIPSNDVRRLLEKSKFAMSSEETRYYLNGVYLHCSEEDGKKVLRAVATDGHRLARIDCDLPDAADQIPGVIIPRKTVGEVRSILDGIEERIAVSVSPNKIRFSNSGTTITSKVIDGTFPDYSRVIPKENKNRMEVDADEFSRAVDRVSTVSLDKARAVKLILSEDKLLLSVNSPESG

SEQ ID NO: 135070 - protein, 243 aa, Unknown
  Bacterial polypetide isolated from the Sargasso Sea
MGSTTKPLLLLVDGHSLAFRSFYAFSKGGEGGLSTQDGIPTSVTYGFLKALLDNCKSLKPNGVVIAFDTAEPTFRHKADEAYKANRDVAPDHFFQDVDNLQEILKGCLDIPLCLAPGYEADDVLGTLANRSANEGWRVRILSGDRDLFQLVDDQRDIAVLYMGGGPYAKSSGPSEIREDGVVNKLGVLPNKVVDLKALTGDSSDNIPGVRGVGPKTAINLLKENGDLDGVYQALEALTDPKAT

SEQ ID NO: 135071 - protein, 251 aa, Unknown
  Bacterial polypetide isolated from the Sargasso Sea
EDGRDIRKAFVAEKEHVLVSADYNQIEMRILADLADVKELKKAFKNKEDIHNLTASQVFNVDINKIDQEKRRKAKAINFGIIYGISQYGLAKQIMVSNNEAEEFLNSYFIKFPEIKEYMNHTIKFCRKNGYVNNIFGRRTHIIGINDKNHNVRNFQERAAINAPIQGSASEIMRLAMIRLEKKFKILNKVKSKMLLQIHDELIFEVPNFEKEEICNIIKEEMMSVRESDLHAFSIPLTVDINVGDNWGILH

SEQ ID NO: 135072 - protein, 158 aa, Unknown
  Bacterial polypetide isolated from the Sargasso Sea
VKMSPCCGGSATLMAREIRAAIKAELGLTASAGVAPNKFLAKLASEQRKPDGLFVIRPQEVDEFVRQLPLGKLPGIGRKTADRLESLGLYSCEDARQLGNEELIARFGKLGEMLAGRIWGHDEQPVQAQRVRKTIGVETTLASDVLDEAACCQVLSQL

SEQ ID NO: 135073 - protein, 296 aa, Unknown
  Bacterial polypetide isolated from the Sargasso Sea
MEDPSIKKVGQNIKYDFIIFKKCGIELNPIDDTMLLSYTLDAGNNRHNMDILSELHLSHKTISYKDLVGTGKKQLNFSEVDIKSATEYAAEDADITLRLYEILYKRVLDEKLEKIYELFEKPMIKILSKLETSGIKVDETYLKNLSKKFEERLIRIEKEIYKLSGKKFNIGSTKQLGEIIYNDLKIAKLKKTKKGSLATSAKILEDLALTGHKFPNLVLEWRQVSKLKSTYTDALQDHISKQTKRVHTSFLLAATNTGRLASSDPNLQNIPIKSLDGKEIRKAFVEDKNNILVSAD

SEQ ID NO: 135074 - protein, 290 aa, Unknown
  Bacterial polypetide isolated from the Sargasso Sea
KFLKKIEVLEKEIFKLSKKTFNIASTKQLGEIMYNELKIASLKKTKKGSFATSATVLEDLAYKGNKFPRLVLDWRQVTKLKNTYSDALQEHINPTTKRVHTSFLLAATTTGRLASSDPNLQNIPIKSEDGKDIRKAFVSDKNHKLISADYNQIEMRILSDLADVKELKKAFYNNEDIHSLTASQVFNVDIKKVNQDMRRKAKAINFGIIYGISQYGLAKQINVSNSEAEEFLNSYFLKFPEIKDYMNSTIKFCRKSGYVQNIFGRRTYLTGINDKNFNVRNFQERAAINA

SEQ ID NO: 135075 - protein, 69 aa, Unknown
  Bacterial polypetide isolated from the Sargasso Sea
MNKIIRKIIHIDMDAYYASVEQLDNPELRGKPVAVGGGKKRGVVAAASYEAREFGVRSAMPSVIALKRC

SEQ ID NO: 135076 - protein, 259 aa, Unknown
  Bacterial polypetide isolated from the Sargasso Sea
MNTPAKKIFLIDGSSYLYRAFHAMPPLTTSTGLPTGAVKGVTNMLRNLRNENPDSYYLSVFDAKGKNFRHDIYKDYKANRPPMPEDLREQLSPLKEICNAMGMPVIEVPGVEADDVLATLALMGSQQGMPMIISSLDKDLMQLVEDPLVKMMNTMNNQIYDVAGVKKKFGVHPNQIIDYLALVGDASDNIPGVPKVGPKTAVKWLTEFKTLKGIIEISDSLTGVVGQNFRDSIPDLDRNVELVTLKKDVDLKVSFEDLL

SEQ ID NO: 135077 - protein, 195 aa, Unknown
  Bacterial polypetide isolated from the Sargasso Sea
QIFNIDIKKVNQDHRRKAKAINFGIIYGISQYGLAKQINVSNYEAEEFLNSYFAKFPEIKVYMDNTIKFCRKSGYVNNIFGRRSHFNGINDKNFNVRNFQERAAINAPIQGSASEVMRLAMIRLDKKLSEQKNLNSKMLLQIHDELIFEIPKKDEKVMIKLINKEMTSVAQSDYHSFSTPLTVDINVGDNWGMLH

SEQ ID NO: 135078 - protein, 200 aa, Unknown
  Bacterial polypetide isolated from the Sargasso Sea
LITAFENGEDIHSATAKEVFGSADDQARRSAKAINFGLIYGMSAFGLGKALGVTRPEAADYIASYFGKYPGVKIYMDEMKAKAKDQGYVETAFGRRLYLPGIHSGRTRMAAERAAINAPMQGTAADIMKLAMINMHDYIKGTGKDIHLILQVHDEVIVECPEKDTKTTLNALEQIMTDVTKLSVPLVVESGVANNWGKAH

SEQ ID NO: 135079 - protein, 245 aa, Unknown
  Bacterial polypetide isolated from the Sargasso Sea
MKISIDRGILLKALNHVQSVVERRNTIPILSNVKIDANEKNLSLVATDLDLEIIESIDANVAGSGSTTVSAHTLYDIVRKIPEGSMIEMELNSNDQMEIKSGQSNFDLPCLPDEDFPEMSSGEMPCGFSIDSGNLARLIDKAKFAISTEETRYYLNGIFLHSVENELRSVATDGHRLACIKSDLPAGAEDIPSIIIPRKTVGEVRKLIEDSSGTLDIKVSDTKIQFTFNDIQLTSKLIDGTFPDY

SEQ ID NO: 135080 - protein, 203 aa, Unknown
  Bacterial polypetide isolated from the Sargasso Sea
DVHSLTASQVFNVDTKKVNQDMRRKAKAINFGIIYGISQYGLAKQINVSNNEAEEFLNAYFLKFPEIKEYMNSTIKFCRKSGYVQNIFGRRTYLSGINDKNFNIRNFQERAAINAPIQGSASEIMRIAMIRIQNKFDEIKNNKSRMLLQIHDELIFESSEEDLKSIVKLIEKEMTSVKDSEFHSFSIPLSIDINFGENWGMLH

SEQ ID NO: 135081 - protein, 291 aa, Unknown
  Bacterial polypetide isolated from the Sargasso Sea
GALHLRTTDLDIEVVDKVIANVEQEGTTTVGAHTLYEIVRKLPDGCSIQLMSDNVSSRLEVLAGRSRFSLATLPRDDFPVMASSEYECNFSIDSQILRRLFDKAKFAMSTEETRYYLNGVYFHIAEIDSKKFLRTVATDGHRLAQIDGMPPENSETMPGIIIPRKTVSELRIILESNDNEIAVSVSETKVRFATSEMTLTSKVIDGTFPDYTRVIPVGNHKRLEVDAASFSQSVDRVSTISSERARAVKLTLTNNKLILSVNSPESGAANEELPVNYDDDSLEIGFNAKYL

SEQ ID NO: 135082 - protein, 271 aa, Unknown
  Bacterial polypetide isolated from the Sargasso Sea
LLYSRLREENLFNIYEIFEKPLIKILAKMEIFGIKIDHKFLSILSKKFDNKIKILEKEIFKISKKEFKIGSTKQLGEIMYNQLKIASLKKTKKGSFATSASVLEDLAFKGNKFPQLILDWRQISKLKNTYSDTLPEFINPKTDRVHTSFLLAATTTGRLASSDPNLQNIPIKTEDGKEIRKSFIAEKGNILISADYNQIEMRILADIANVKQLKKAFKNNEDIHSLTASQVFNIDLKKITSEMRRKAKAINFGIIYGISQYGLAKQIMISN

SEQ ID NO: 135083 - protein, 271 aa, Unknown
  Bacterial polypetide isolated from the Sargasso Sea
KDYAAEDADITFRLYKKFFKSLKEEKMINIYEVFEKPMIKILAFMEIEGIKIDSKFLKILSSKFEKKIEKIQNEVFKISNKEFNIASPKQLGEILYNDLKIADLKKTKKGGFATSASVLEDLAFKGHKFPQLILDWRQVSKLKNTYSDSLPEHINPKTKRVHTSFLLAATTTGRLASSDPNLQNIPIKSDDGKDIRKSFIAEKDHILISADYNQIEMRILADLADVKELKKAFKRNEDIHSLTASQIFNTDIKKVNQDQRRKAKAINFGII

SEQ ID NO: 135084 - protein, 214 aa, Unknown
  Bacterial polypetide isolated from the Sargasso Sea
KELKKAFKNKEDIHSLTASQVFNTSINKVDSDMRRKAKAINFGIIYGISQYGLAKQIGVSNIEAEEFLNSYFLKFPEIKEYMESTIKFCRKSGYVSNIFGRRTHITGINDKNFNIRNFQERAAINAPIQGSASEIMRMAMIRVSEKLDEIKEAKCKILLQIHDELIFEVQKDDIKKYSQIIQEEMSSVKNSNLHSFSIPLLVDINVGNNWGDLH

SEQ ID NO: 135085 - protein, 289 aa, Unknown
  Bacterial polypetide isolated from the Sargasso Sea
RRIIKALKIICNDPSILKIGHNIKYDLRILEKYNVKMFSIADTMLLSYALDNGVTKHNMDDLAYLHFQHSNIKYKEIVGSGKKEITFDLVEIDKALDYAAEDALITLKLFNFLNGRVKKEKNNFVYNEIDLPLITVLASIEKNGIKVDTKYLAKLGNDFEKESLLLEKKIYKLAGKDFNIGSPKQLGEILFIDLKIEGAKKTKSGTYSTDVSTLSSLSEQGYEIASLILEWRELTKLKSTYTDSLQSQATKNNSRVHTSYGLANTLTGRLSSNDPNLQNIPIRTEKGKK

SEQ ID NO: 135086 - protein, 210 aa, Unknown
  Bacterial polypetide isolated from the Sargasso Sea
KAFLNNDDVHSLTASQVFGVSINKVDKDMRRKAKAINFGIIYGISQYGLAKQIGVTNTEADEFLNSYFLKFPEIKDYMSNTIKYCRKSGYVKNIFGRKTHVIGINDKNFNIRNFQERAAINAPIQGSASELMRLAMIRISDEISKKKKKNLKMLLQIHDELIFETNEDDINTATKLIKDAMTSVKDSDFHSFSIPLLVDINSGDNWGELH

SEQ ID NO: 135087 - protein, 258 aa, Unknown
  Bacterial polypetide isolated from the Sargasso Sea
MSEFIVSARKYRPQTFETVVGQASITETLKNAIKNNHLPQALLFCGPRGVGKTTCARILAKNINEYEGITDEEDFAYNIFELDAASNNSVDGIRSLIDQVRIPPQIGNYKVYIIDEVHMLSQNAFNAFLKTLEEPPKHAIFILATTEKHKIIPTILSRCQIFDFQRIKVKDIANHLAEVATKEAITANPEALYLIAQKADGALRDALSIFDQMVTFSGNNITYESVVKNLNILDYEWYFKIVDHSIKEDIPSVLVLFH

SEQ ID NO: 135088 - protein, 263 aa, Unknown
  Bacterial polypetide isolated from the Sargasso Sea
NEKINQLEKEIYKIAGKTFNIGSPKQLGEILYNDLKISNLKKTKKGSLATSAKVLEDLALNGHKFPSLVLEWRGLTKLKNTYSDALQDHINSRTGRVHTSFLLAATNTGRLASSDPNLQNIPIKTENGREIRKAFIAEKNNNLISADYNQIEMRILADMADVKELKKAFVNKDDIHSLTASQVFNKSIKDIDSDLRRKAKAINFGIIYGITQYGLAKQISVSNQEAQEFIDSYFKKFPEIKDYMSDTVKTCRKKGYVSNIFGR

SEQ ID NO: 135089 - protein, 242 aa, Unknown
  Bacterial polypetide isolated from the Sargasso Sea
MSQAPLVLVDGSSYLYRAFHALPPLTTSKGMPTGAVKGVLNMLKSLRKQYPNSPFAVVFDAKGGTFRDELFAEYKANRPSMPDELRVQVEPLHASVRALGLPLLCVEGVEADDVIGTLARQAAGEKRDVVISTGDKDMAQLVCPHVTLVNTMTGSVYDADGVKEKFGVGPELIIDYLALMGDKVDNIPGVPGVGEKTALGLLVGVGGGLDVIYANLDKVPELPIRGAKGLPARLEEHREMAY

SEQ ID NO: 135090 - protein, 222 aa, Unknown
  Bacterial polypetide isolated from the Sargasso Sea
KYKEVVGTGKNEITFDKVTIDNAINYAAEDSLLTFRLFQNLYPRLIKEKANFVYQNIDLPLVEVLSSIEANGIEVNKKFLTSLSNEFENESKKIEQNIYKLSNEEFNIGSPKQLGEILFVNLKIPGGKKTKSGTYSTDSSTLNNLASDGFEIAQLVLDWRELTKLKSTYTDALFRLTDGKSRVHTSFGLANTLTGRLSSTDPNLQNIPIRTENGKKIRTAFV

SEQ ID NO: 135091 - protein, 228 aa, Unknown
  Bacterial polypetide isolated from the Sargasso Sea
NQIEMRILADLADVKELKKAFNNNQDIHSLTASQVFNIDIKKVNSDMRRKAKAINFGIIYGISQYGLAKQIMVSNQEAKEFLKSYFLKFPEIKSYMDSTIKFCRKSGYVSNIFGRRSHITGINDKNFNVRNFQERAAINAPIQGSASEIMRLAMIRLNKKLEDIKHDQCKMLLQIHDELIFEVSRSEEKKVAKIIKDEMTSVKDSDLHSFSTPLTVDLNIGDNWGLLH

SEQ ID NO: 135092 - protein, 271 aa, Unknown
  Bacterial polypetide isolated from the Sargasso Sea
MDFQPNVILIDGTSYIYRAFHALPPLTTSTGKPTGATRGFAAMLNKLIKTYPEIPMVMVFDAKGKNFRNDYYEKYKANRPPMPNELKHQIEDIKKLCGLFNFTVQEVEDVEADDVIATLVSNFSEDKILISSPDKDLTQLVNKNVIQHNSMSDIFFDENGVKEKFGVFPNKVAELLALVGDKSDNIPGITKVGEKTAAKWLNEYGSLDEVIKNAENITGKVGENLREEKNVLQRNFFLVSLKNDINLGLQKSDISTPKPNSNGLQEFYRGL

SEQ ID NO: 135093 - protein, 283 aa, Unknown
  Bacterial polypetide isolated from the Sargasso Sea
KNSVLKKLKPILEDASIKKVGQNIKYDFIIFKNEGIELSPVDDTMLLSYTLDAGNNRHNMNTLSELHLGHKSISYKEIVGTGKKQLNFAEVDLKSATEYAAEDADVTYRLYELLSDRVAKENLEKIYEIFEKPMIKILSKLETNGIKVDDIYLKKLSKKFEERLIKIEKQIYKITGKEFNIGSPKQLGEIIYNELKIAKLKKTKKGSLATSAKILEDLAMTGHKFPNLVLEWRQVSKLKSTYTDALQDHISKKTKRVHTSFLLAATNTGRLASSDPNLQNIPI

SEQ ID NO: 135094 - protein, 290 aa, Unknown
  Bacterial polypetide isolated from the Sargasso Sea
TIPILSNVLLSAGRDRLAFAATDLDMEMVDEAEAQVQVEGQITAPAHTLYEIVRKLPEGAEVSLLYSGDDPRLVVSAGRSRFNLPVLPAGDFPVMSTDSAGASYVLPKEDLARLIDKTRFAVSTEETRYYLNGLYLHTVAEQGIPLLRAVATDGHRLALAETPAPEGAAGGPGVIVPRKTVDQVRRLLDDAGGAVEVTVSAQKIRFQMGEASLTSKVIDGAFPDYLRVIPRGNDKQADIDNALFAKAVDRVATISAEKSRSVKLAFDNDRVKLTVRNMEAGQAEEEVEIG

SEQ ID NO: 135095 - protein, 106 aa, Unknown
  Bacterial polypetide isolated from the Sargasso Sea
MEIDLDVARRGGMEAQQLRAAANAPIQGSSADIIKVAMVQLQAALHNQGLPAQLLLQVHDELVLEVAPDALETTRKLVVQTMENAVKLSVPLVAETGAGANWMEAK

SEQ ID NO: 135096 - protein, 257 aa, Unknown
  Bacterial polypetide isolated from the Sargasso Sea
ALINALDNNRLHHAYLFTGTRGVGKTTIARILAKCLNCETGVSSEPCGNCSSCLEIDQGRFVDLIEVDAASRTKVEDTRELLENVQYAPTRGRFKVYLIDEVHMLSSHSFNALLKTLEEPPEHVKFLLATTDPQKLPVTILSRCLQFSLKNMPPEKVVEHLQHVLTDEQIGFDQESLWLLGRAADGSMRDALSLTDQAIAFGNGQLQVAEVRNMLGTIDHGQVFSVLEALIAGDARALMAAVAELAEQGADFSGVLA

SEQ ID NO: 135097 - protein, 255 aa, Unknown
  Bacterial polypetide isolated from the Sargasso Sea
SADDFPELEVHEDQELVKVSSSNLKRILAKTSFSMASQDVRYYLNGLLLELSGNEIKGVATDGHRLALSSYEGPDNNPDMRNIIPRKAVLELTKLLPADDLDIDLLVGPTYLGIKAENLTFSSKLIDGKYPDYEKVFPSGESRPLLVGKETLQSALSRASVLSNEKYRGVRFELSKDTLRLTANNPEQESAEEVLEVDYQGADLEVGFNIGYLIDVLGSLEDETVKFEFYGEDSSCVIKEPSSEQEVYVIMPMRL

SEQ ID NO: 135098 - protein, 307 aa, Unknown
  Bacterial polypetide isolated from the Sargasso Sea
VLRAEDGQLSLTATDMDMDIATEVGCAVVTSGTVTTSAHMLYDIARKLPDGAEVELTVADGHVNIIAGRSSFRLPTLPVEDFPAISSNNLPVNFNLTAADLRDLVDTTRFAISNEETRYYLNGIYLHKAEDGNLCAVATDGHRLALTRQSLPPGASQMPSIILPRKAVSELRKLLDDYDGDVSIGLSETRVKFGFGAVRLTSKLIDGTFPDYTRVIPGSNDRIMQVDASSFSAAVDRVSTISSEKSRSVKMGLKAGLLTLSASNTDASSAMEELEVSYNGPEMDIGFNARYLLDIAGQVNNDIVEFA

SEQ ID NO: 135099 - protein, 199 aa, Unknown
  Bacterial polypetide isolated from the Sargasso Sea
MSTLYAFDSMSVLYRGYFAMIRNPLINSKGINTSGIRTVLMQLVKIIEEVLPQYLAVASDGPEDTFRHIRYPEYKATREKMPEDLVEQLPYLPRAMQALKLPYLLIPGYEADDIIGTLMSLCLNNNIRGVMVTSDKDYLQLVSETTEMLNHKNEIVGLSGVQERFGCRPDQVIEVLGLMGDSSDNIPGVRGVGERPRSS

SEQ ID NO: 135100 - protein, 196 aa, Unknown
  Bacterial polypetide isolated from the Sargasso Sea
VHSATASETFNISLEEVTPEHRRSAKAINFGLIYGMSAFGLTRQLGIPRHEAQAYLDTYFERYTGVRKYMDTTKELAKKNLFVETILGRKLHVAAINDSNGLRRQAAERAAINAPLQGSAADIIKKAMIDVDQWIGKNNSDIKMIMQVHDELIFEVKKGFADEALKNIISLMEGSVKLDIPLIVDANTGANWNEAH

SEQ ID NO: 135101 - protein, 310 aa, Unknown
  Bacterial polypetide isolated from the Sargasso Sea
DQGANPCGQCNTCKEIEQGNYVDCLEIDAASRTKVEDTRELLDNVQYKPTRGRYKVYLIDEVHMLSKHSFNALLKTLEEPPPHVKFLLATTDPQKLPITILSRCLQFNLKAMSREQIVGQLRHILEHEQLPFEPQALALLARAAQGSMRDALSLTDQAIAQGGNQVLASVVTDMLGLMDKNQLLKVVHAVVSKSPADVLQLVNDIAEQAPDYDNVHSELASLLHQIALTQWVPEACKLETTSAKAIFQLAKTIPAEQVQLLYQIALQGRKDLPFAADGKSAFEMTLMRMMSFAPNTLIDDTASEMKTGGV

SEQ ID NO: 135102 - protein, 100 aa, Unknown
  Bacterial polypetide isolated from the Sargasso Sea
NSQNNMLRSSSERNAINAPIQGSAADIIKIAMININSEFKKQSLKSKMLLQVHDELVFDVHNSEKDQIQDIVKTTMESAVKLKVPLKIDLEFGKNWLEAH

SEQ ID NO: 135103 - protein, 208 aa, Unknown
  Bacterial polypetide isolated from the Sargasso Sea
KNLTNAFNNNIDVHSSTAAEVFSIAIEEVNKDQRRSAKAINFGLMYGMSAFGLTRQLGITRAEAQAYLDTYFARYTGVRDYMDNIKAKAKEDMFVETIMGRRLYLNEINAANGLRRQAAERAAINAPLQGSAADIIKKAMLDIDKLILNEMPDVKMIMQVHDELVFECPKENADLVMEKMKETMEQTVELKIPLIAEAAVGSNWNEAH

SEQ ID NO: 135104 - protein, 308 aa, Unknown
  Bacterial polypetide isolated from the Sargasso Sea
MKQGKITLAAHTLYDIVRKLPDGAEIKIELVDLNVQVSAGKSKFILPTLSVDDFPVMTEIEKGNEFSIESVDLANLIDNTKFAISSEETRYYLNGIFFHVPELNKDKLRAVATDGHRLAQAEIPLPEGAETMPGIILPKKAVGEIRKLTDGTDGKIKIIISSTKAKFIFPNSVLTTKLIDGSFPDYQRVIPKENLNKLVVFNSDFSKAIDRVSTVSMEKSRAVKLSLNKNLLSLNVNSHDLGNASEDLEIDYNYDNLDIGFNAKYLLDIASQIQGKEIEILLSDSASPALITDPDQDGVIFVLMPMRV

SEQ ID NO: 135105 - protein, 81 aa, Unknown
  Bacterial polypetide isolated from the Sargasso Sea
MKQFSKEKINIRGITDKNFALRGFAERQAINAPIQGSAADIIKLAMIEIHNEIKMKNIDAKMLLQVHDELIFEVEIKSKMI

SEQ ID NO: 135106 - protein, 182 aa, Unknown
  Bacterial polypetide isolated from the Sargasso Sea
MRRKAKAINFGIIYGISQYGLAKQIGVSNTEAEEFLNSYFLKFPEIKAYMNSTISFCRKTGFVNNIFGRRTHLKGINDKNFNIRNFQERAAINAPIQGSASEIMRLAMIRLNNRLQNENTSNCKMLLQIHDELIFEVLKDNAHKMSKIIRDEMTSVKDSETHSFSIPLLVDVNIGDNWGLLH

SEQ ID NO: 135107 - protein, 275 aa, Unknown
  Bacterial polypetide isolated from the Sargasso Sea
KCEKGVSSKPCNECNACIAVDEGRFVDLIEVDAASRTGVDDTRDLLENVAFSPTIGRYKVYLIDEVHMFSKSSFAALLKTLEEPPEHVKFVFATTENKKIPVTILSRCLQFNLNHLTADQISKQIEMILNSENITYDKPSVELIAHSAYGSMRDALSLLDQAIAYGNGELTESEVRMLMGTIDNQDLYSLVQSLVNSDSETLLNTVEKISMQNPDYDFLLSELLSLLQKIATVQLLPDNSENILKKDKAVVEFAGSMTKEEVQLYYQIGMMGRKD

SEQ ID NO: 135108 - protein, 288 aa, Unknown
  Bacterial polypetide isolated from the Sargasso Sea
KTTFTFDQVEIQKAKEYAAEDADVTLRLYKILKKNLINEKLENIYELFEKPLIEILANMEIQGVKIDNKFLSVLSKKFEKKISLIEDKIYKISKKKFNIGSTKQLGEIMYEDLKIASLKKTKKGSYATSASVLEDLAFKGNQFPKLVLEWRQISKLKNTYSDSLQEHINPKTKRVHTSFLLAATTTGRLASSDPNLQNIPIKTEDGKDIRKSFVSEKGNILISADYNQIEMRILADLADVKELKKAFNDQQDIHSLTASQVFNVDISKINSDMRRKAKAINFGIIYGI

SEQ ID NO: 135109 - protein, 182 aa, Unknown
  Bacterial polypetide isolated from the Sargasso Sea
KRRKAKAINFGIIYGISQYGLAKQINVTNTEAEEFLNSYFLKFPEIKEYMNSTIKFCRKSGYVNNIFGRRTHITGINDKNFNVRNFQERAAINAPIQGSASEIMRLAMIRVNNKLKDMNNNDLRLLLQIHDELIFEVPNKNVDKISKVIKDEMTSVINSDLHTFSIPLLVDLNIGNNWGLLH

SEQ ID NO: 135110 - protein, 234 aa, Unknown
  Bacterial polypetide isolated from the Sargasso Sea
MDTVDSYILHADLDAFYASVEQILNPELRNKPVVVGGLPENRGVVATASYEARAFGIHSAMSMRHAIQLCPDAIIVPPNFPEYRSYSSRVMSILKQYSEILENVSLDEAYIDISDNVSQPSDALNIGLDIKNQVISETGLIISIGISSNKTTSKIASDLNKPDGLVFIPTGEELKFTHELSVNKIPGIGPKFTQKLNQLGINTIGQLSQQPTDFFKRIFGNQGQKIKSKSIGTY

SEQ ID NO: 135111 - protein, 142 aa, Unknown
  Bacterial polypetide isolated from the Sargasso Sea
LPDGSEIIVSANENNLILSCGKSEFMLPTLPFDDYPIMTEISGGKSFSISSVDLQNLIDNTKFAISLEETRYYLNGIFLHQNDNLLRAVATDGHRLAQAEINLPTGAEGMPSIIIPRKTVGELRKLKDDTEADIPITVSSNK

SEQ ID NO: 135112 - protein, 257 aa, Unknown
  Bacterial polypetide isolated from the Sargasso Sea
KKMKNLEKEVFKISKKEFNIASPKQLGEIIYNDLKIAGLKKTKKGSFATSASVLEDLAFKGHKFPQLILDWRQVSKLKNTYSDSLPEHINSKTKRVHTSFLLAATTTGRLASSDPNLQNIPIKTEDGKDIRKAFKAKKNHLLISADYNQIEMRILADLANVKELKKAFKNNDDIHSLTASQIFNIDIKKVDEDQRRKAKAINFGIIYGISQYGLAKQINVSNYEAEQFLDAYFAKFPEIKTYMDDTIKFCRKSGICK

SEQ ID NO: 135113 - protein, 220 aa, Unknown
  Bacterial polypetide isolated from the Sargasso Sea
MTKNTNRVLALKYRPKNFKELIGQNIMVETITNSIKLNKLPNAYLLTGIRGVGKTTTARLIAKALNCNKNFLKEEDCLCSHCEEIANSKHLDVLEMDAASKTGIDDVRELIDSSRYNPTSAKYKIFIIDEVHMLSKQAFNGLLKTLEEPPPHLKFIFATTEVKKIPVTIISRCQRFDLHRVPVQILLENLKKISKKENGKISEAALKLIAKASEGSVRDS

SEQ ID NO: 135114 - protein, 271 aa, Unknown
  Bacterial polypetide isolated from the Sargasso Sea
DTMLMSYVLNSTATRHGMDRLADYYLNYTTTKYTDVTGTASKQISFSEVRLEVATDYASEDADITLRLYNVLAPMLKDKPTQEKLLHDIEYPLVHVLARVEQNGAKIDKNKLSKHSKELSKKIDELSSQAFKIAGEEFNLDSPKQLLEILYEKQGLPVLKKTPKGQPSTNEDTLQRLSEEYELPKIILQYRTLAKLKSTYTDSLINIENPKTERIHTSYQQAVTSTGRLSSTEPNLQNIPIKTAEGRRIREAFVPEKGNVLISAELFSNWN

SEQ ID NO: 135115 - protein, 287 aa, Unknown
  Bacterial polypetide isolated from the Sargasso Sea
YVDDDEGDQRRGPNQTGRKKAAYAGGLVLEPKKGFYDRFVLLLDFNSLYPSIVQEYNICFTTVARPTPDEEGNYPLANVPPPSAETGVLPRMIGNLVARRRDVKSMLKSEKDAARKAQLDIRQKALKIMANSMYGCLGFSGSRFYCRALAELITARGRDALTHACEIANNNNAEVIYGDTDSVMIHSGTDNLAEARKMAEALKREVNKHYRCMEIDIDGVMQSMLLLKKKKYAALMVEEKPGGELVTTRETKGLDLVRRDWCTLSRQAGSQVLDFILSGKARDEVVS

SEQ ID NO: 135116 - protein, 247 aa, Unknown
  Bacterial polypetide isolated from the Sargasso Sea
SPKQLGEIIYNDLKIAGLKKTKKGSFATGASVLEDLAFKGHEFPKLILDWRQVSKLKNTYSDALPEHLNSTTKRVHTSFLLAATTTGRLASSDPNLQNIPIKSEDGKDIRKAFTAKKGHLLISADYNQIEMRILADLADVKELKKAFKNKEDIHSLTASQIFNIDIKKVNQDHRRKAKAINFGIIYGISQYGLAKQINVSNYEAEEFLNSYFAKFPEIKVYMENTIKFCRKSGYVNNIFGRRSHFNG

SEQ ID NO: 135117 - protein, 306 aa, Unknown
  Bacterial polypetide isolated from the Sargasso Sea
NEAYYIPIGHKNIKGLNKELVLKKIKPLLEDPSIKKVGQNIKYDLIILEKNGINIDPVEDTMLLSYVLDAGNNRHNMDTLSELHLGHKPISYKDVVGSGKKQLNFSDVSLEEATKYAAEDADVTLRLYNLLLERVNNEKLKKIYEVFEKPMIKLLSKLEINGVKVDDTYLKKLSKKFEERLKKIEKAIYEVSGKEFNIGSPKQLGEIIYNDLKIAKLKKTKKGSLATSAKVLEDLASTGHKFPNLVLEWRQVSKLKSTYTDALQEHISNKTKRVHTSFLLAATNTGRLASSDPNLQNIPIKTFDGK

SEQ ID NO: 135118 - protein, 244 aa, Unknown
  Bacterial polypetide isolated from the Sargasso Sea
KAFISEKGTSLLSVDYNQIEMRILSDLADVKELKKAFNNNEDIHSLTASQIFNIDINKVTKEMRRKAKAINFGIIYGISQYGLAKQISVSTADAEIFLKSYFKKFPEIKDYMSSTIKHCRRSGFVNNIFGRKTHIIGINDKNFNIRNFQERAAINAPIQGSASELMRIAMIRIFNKLKDDTKFKTKLLLQIHDELIFEIPNNELDRIKKLIKTEMTSVKSSEHHTFSIPILVDVNIGDNWGMLH

SEQ ID NO: 135119 - protein, 97 aa, Unknown
  Bacterial polypetide isolated from the Sargasso Sea
LRSFQERAAINAPIQGTAADIIKLAMIKINGKIKDSKDCKMLLQVHDELIFEIKKNKLNHFKEIIIKEMENALKPKFDFSIPLVVDYNHALNWSDAH

SEQ ID NO: 135120 - protein, 246 aa, Unknown
  Bacterial polypetide isolated from the Sargasso Sea
MPHNFELPAKALRTLIDRTKFAISTEETRYYLNGIYIHVSDVDGTTKLRAVATDGHRLAKVEVDCPQGAESMPGVIVPRKAVTELRKLAEEFGENIRVSVSDTRIRFSFDGVVFTTKLIDGTFPDYGRVIPTGNDKVLEVNTSDFSEAVSRVSAISSDKSRAIKLGLTAGNLLLSVISTENGSAVEELGVDYSADGVEIGFNSRYLLDITQQIEGDLARFTLADSASPTLVQNTSDDTTLYVLMPM

SEQ ID NO: 135121 - protein, 184 aa, Unknown
  Bacterial polypetide isolated from the Sargasso Sea
QDHRRKAKAINFGIIYGISQYGLAKQINVSNYEAEQFLNSYFAKFPEIKVYMDNTIKFCRKSGYVYNIFGRRSHFNGINDKNFNIRNFQERAAINAPIQGSAAEIMRLAMIRLEKKLTEQKNIKSKMLLQIHDELIFEVPKNDEKTMVKLIKEEMISVTKSDYHSFSTPLTVDINVGDNWGLLH

SEQ ID NO: 135122 - protein, 233 aa, Unknown
  Bacterial polypetide isolated from the Sargasso Sea
IRKSFIAENGYSLVSADYNQIEMRILAEIADVKELKKAFINNEDIHSITASQVFNKKIKDIDEDSRRKAKAINFGIIYGISQYGLAKQIGVSNLEAEDFLNAYFIKFPEIKDYMNETIKFCRKSGYVNNIFGRRTHLNGINDKNYNVRNFQERAAINAPIQGSASEIMRLAMIRLNSKLSEYESKYIKILLQIHDELIFEIKSSKVKEISKIITETMNGVESSAYHKFTVPLL

SEQ ID NO: 135123 - protein, 123 aa, Unknown
  Bacterial polypetide isolated from the Sargasso Sea
DKVNQDLRRKAKAINFGIIYGISQYGLAKQINVSNFEAEEFVNSYFSKFPEIKVYMDRTIKFCRKSGYVSNIFGRRSHFININDKNYNVRNFQERAAINAPIQGSAAEIMRLPMIRIDKKLKE

SEQ ID NO: 135124 - protein, 281 aa, Unknown
  Bacterial polypetide isolated from the Sargasso Sea
KSTYCEGLLSRESKKTSRIHTSFGMASTLTGRLSSNDPNLQNIPIKTVEGRKIRKAFVASSNNFIFSVDYSQVELRILAHVAKVDSLLKAFENNEDIHSVTAMDVFQVDKTSLNSDLRRKAKTINFGIIYGISPYGLATQLDISNSEAKQYIESYFEKYPGIKEYMEKTVNDCRSKGFVVTPFGRRIFIPFINDKVANRRNFAERSAINAPIQGGAADLIKLAMPKIYEFLINEKLLSKMLIQVHDELIFEVPQNEIKIMKENIPKIMTNSHKNFLDLSVP

SEQ ID NO: 135125 - protein, 245 aa, Unknown
  Bacterial polypetide isolated from the Sargasso Sea
RKSFIAEKNNLLVSADYNQIEMRILADLADVKELKKAFKNNEDIHTLTASQVFNIDIKKVDSNTRRKAKAINFGIIYGISQYGLAKQIMVSNIEAQEFLNSYFKKFPEIKEYMDSTIKFCRKSGYVNNIFGRRTYITGINDKNFNVRNFQERAAINAPIQGSASEIMRLAMIRIHKLLENSKNLKSKMLLQIHDELIFEVPENEVKKTCEMIKKEMSGVSKSDLHAFSIPLTVDINSGENWGILH

SEQ ID NO: 135126 - protein, 255 aa, Unknown
  Bacterial polypetide isolated from the Sargasso Sea
MALSPTLAEAADLKALLRGYEGAVVLEPEVGYYEHPVATLDFASLYPSIMQAHNLCYATLVLPSEAAWRVPQMRQMNVEYETHQVRDKLYHFATRETGVLPHILARLLAERRRVKKQMKGEEDPTLHALLDGKQLALKVSCNSVYGFTGVRAGYLPCLPIASTVTTVGRQMIENTRDAVLTKYPGSRVIYGDTDSVMVVFGGVTPDAAGVQAAFALGEEAAGWITANTFPSPFITLEMEKVSWPYILFKKKRYAG

SEQ ID NO: 135127 - protein, 131 aa, Unknown
  Bacterial polypetide isolated from the Sargasso Sea
MDHQMDFAKTNQYVETIFKRKINIKGIADKNFAVRGFAERQAINAPIQGSAADIIKLAMIEIHKEIKLKNIEAEMLLQVHDELIFEVESKKYDNLVSNVKTIMESVHLKYKDFSVPLTVDFGFGDHWGQAH

SEQ ID NO: 135128 - protein, 273 aa, Unknown
  Bacterial polypetide isolated from the Sargasso Sea
LAEMEINGIKVDSLFLESLSKKFDKKIRKLENDIYKIANKEFNIGSPKQLGEIIYNDLKIAVLKRTKKGSFATSASVLEDLSFKGHKFPKLILDWRQVSKLKNTYTDSLREHINDKTKRVHTSFLLAATTTGRLASSDPNLQNIPIKSEDGKEIRKAFIAEKGYTLISADYNQIEMRILADLADVKELKKAFKNDEDIHSLTASQVFNIDINKVDQDTRRKAKAINFGIIYGISQYGLAKQIMVSNNEAESFLKSYFLKFPEIKEYMNSTIKF

SEQ ID NO: 135129 - protein, 263 aa, Unknown
  Bacterial polypetide isolated from the Sargasso Sea
MNGKQKADYLVLIDGTAYLYRAYHALPPLKNSKGENTGAIHGFLKALNKIIEDFNPKHIGLVFDAKGKNFRHKIYSEYKANRSAMPPELIEQIPKLYEILDYMGYPPIIINDVEADDVIGTLSNKFKTVPEVKIFSGDKDFAQLVNDKVTIINPVTLEIMDIKGVKKKFGVEPENIIDYLALVGDKSDNIPGVPGVGGKTASKLINQYGNTEKIIKQKDLIPGKVGEAIKLNPDQLQLSKTLATIRQDVEISLSLNDLKKQES

SEQ ID NO: 135130 - protein, 188 aa, Unknown
  Bacterial polypetide isolated from the Sargasso Sea
MKLTIERGLLMKVLGHVQSVVERRNTIPVLSNVKFDAQSESLSLNSTDMDIDIVETVPAAVETSGSTTAPAHTLFDIVRQLPEGSQVELDNTEDSQNLVLNSGRSKFTLSCLPTEDFPVLSGDELPHNFELPAKALRTLIDRTKFAISTEETRYYLNGIYIHVSDVDGTPKLRAVATDGHRLGKVEVD

SEQ ID NO: 135131 - protein, 245 aa, Unknown
  Bacterial polypetide isolated from the Sargasso Sea
LGKEIRKAFKTRDNNFRLFSADYSQIELRIMAHFSKEPTLIEAFSNDEDVHTRTAALVYDLPIQLVTSDQRRQAKIVNYGIMYGAGPFRMAQELSISIKNAKKIIDNYFNTYKNIKNYIDQNIDKAAEIGYVETYFGRKRSTVNLNSSNANIVNAEKRAAVNMPIQGTAAELIKIAMIDIRDAMNSKNLKSKMVLQVHDELLFELHKSEEEIMTNIIVEKMENSIKLDVPLKVDFKIGDSWYDIH

SEQ ID NO: 135132 - protein, 230 aa, Unknown
  Bacterial polypetide isolated from the Sargasso Sea
TLSIKFDKKINILEKEIFKISKKNFKIGSTKQLGEIMYNELKIASLKKTKKGSFATNANVLEDLAFKGHKLPKLVLDWRQVTKLKNTYSDSLQEHINPKTKRVHTSFLLAATTTGRLASSEPNLQNIPIKSEDGKDIRKAFISEKNFSLISADYNQIEMRILADLADVKELKKAFNNNEDVHSLTASQVFNVDVNKIDTDKRRKAKAINFGIIYGISQYGLAKQINVTNT

SEQ ID NO: 135133 - protein, 167 aa, Unknown
  Bacterial polypetide isolated from the Sargasso Sea
MGSRILIHCDLDAFFAAVETLHHDLDPSIPLILGSDPKGGKGRGIVSTCNYAARKFGIRSAMPISEAWRRCPGQPIGQGIYLSSTRGLYSRASRKVMEILEKYADKFEKASIDEAYLDVTDYCQGDWDKALSLCRDLQNEVMEKLGLSSSFGIGPTRILAKMGSEEN

SEQ ID NO: 135134 - protein, 281 aa, Unknown
  Bacterial polypetide isolated from the Sargasso Sea
MPEATAKPLLLLVDGHSLAFRSFYAFSKGGEGGLATKDGRPTSVTYGFLKALLDNSKTLKPEGVAIAFDTAEPTFRHKADANYKAHRDVAPEVFFQDLEQLQQILKTHLQLPLCMAPGYEADDVLGTLANRAADSGWSVRILSGDRDLFQLVDDSRDIAVLYMGGGPYAKSSGPTLIREEGVLGKLGVMPDKVVDLKALTGDSSDNIPGVRGVGPKTAINLLKDNSDLDAVYATLEQVEAEGPKASRGAIKGALKGKLRADRDNAYLSRKLAEILVDVPLP

SEQ ID NO: 135135 - protein, 212 aa, Unknown
  Bacterial polypetide isolated from the Sargasso Sea
MNFKLNSTDLLTALSHIHGIVEVRHTLPILSNIILKAENNELIISSTNLDIYCSDKVDAEISKPGETSVSAVTFFEIAKRLPPGSEVQFDLNDTQNEIVLKCGRSKFNLSTLSTDDFPIISESDLFINFVISAEELIRMIDKTKFAISSEETRYYLNGIFFHKAERNSINFLRAVATDGHRLAQYDIPLPQGAEEMSGIIIPKKTILELRKF

SEQ ID NO: 135136 - protein, 179 aa, Unknown
  Bacterial polypetide isolated from the Sargasso Sea
MGAQRFARETGVSQAEAKDFLTKYKQRYPKVFAFLELQERLALSRGYVETILGRRRPFHFDRNGLGRLLGKDPLEIDLDVARRGGMEAQQLRAAANAPIQGSSADIIKVAMVQLQAALQSQALPARLLLQVHDELVLEVEPDALEATRNLVVTTMENAVKLSVPLVAETGVGANWMEAK

SEQ ID NO: 135137 - protein, 107 aa, Unknown
  Bacterial polypetide isolated from the Sargasso Sea
PYEIDLQSARRAGMEAQSLRAAANAPIQGSSADIIKIAMVQLNKKFIEMNVPAKMLLQVHDELLFEVEPDSLEITTKLVKKTMEDCVKLNVPLLVDIGIGDNWMETK

SEQ ID NO: 135138 - protein, 317 aa, Unknown
  Bacterial polypetide isolated from the Sargasso Sea
FFKEKDLLNLENESSFPQQIDFNIAISKIKKIFQDKSILKVGHNIKFDNLILKQPKNGSIDVNPVGDTMCMSYVLNLGKIQNHKLDTLSNVELGYQTITFEDICGKGVNQKSFDKINPNDALDYAAEDADVALALYKVLFPRLILEKKYFVYEKLERSLIPVLVDMENQGINVNPKSLKKISGELGTRILILEKEIFKKTECKFNIGSPKQLGEILFEKLKIEGGKKSKTGAWQTSVNILNELSQKGYEIANLLLDWRHFSKLKSTYSEALLTQINDQTDRIHTNYSMVGTSTGRLSSSEPNLQNIPIRTDEGRLIR

SEQ ID NO: 135139 - protein, 318 aa, Unknown
  Bacterial polypetide isolated from the Sargasso Sea
ANLVGVSIAINENSGYYIPINHKDLAYNKRLKEQIKETELIKLLKPICNDPSILKIGHNIKYDLRILEKYDLKLKSIADTMLLSYAIDNGITKHNMDDLAYLHFNHTNIKFKELVGSGKKEITFDFVEINKAVEYAAEDALITLKLYNFLNNRLKNEKCNFVYSEIDLPLINVLSSIEKNGIKVNTKYLNKLSVEFEKDSLVLEKKIYELAGKNFNIGSPKQLGEILFIDLNIKGGKKTKSGTFSTDSSTLSSLSDKGYEIASLILDWRELTKLKSTYTDALQNQATKNNSRVHTSYGVANTLTGRLSSNDPNLQNIP

SEQ ID NO: 135140 - protein, 163 aa, Unknown
  Bacterial polypetide isolated from the Sargasso Sea
GLAKQISVSNNEAEDFLNSYFVKFPEIKDYMNETIKFCRKSGYVNNIFGRRTHLSGINDKNYNVRNFQERAAINAPIQGSAAEIMRLAMIRLNSKFSEYKSDTIKILLQIHDELIFEVKSSKSKEISKTIREVMNSVGSSEYHKFTVPLLIDLNLGENWGLLH

SEQ ID NO: 135141 - protein, 259 aa, Unknown
  Bacterial polypetide isolated from the Sargasso Sea
MPFDDYPIMTHITGGKNFSISSADLQNLIDNTKFAISVEETRYYLNGIYLHQNKDEDNLRAVATDGHRLAQVEISLPDGADGMSSIIVPRKTVGEVRKLIDDTEGNINIIVSSNKIKFNINNCTLTSKLIDGSFPDYQRVIPKDNTNNMIVSTKEFKDAVDRVSTISIEKSRAVKLSLSKNNLILKVNTHDTGNASEELEVNFDGNPMEIGFNSKYLLDIALQMQGKEMQFSLSDSSSPALITDPEQEGIIFVLMPMRV

SEQ ID NO: 135142 - protein, 300 aa, Unknown
  Bacterial polypetide isolated from the Sargasso Sea
GHQEGEQIPMDEVLAAVRPIFESGEIKKCAHNANFDMTILSSYGIECQGVDFDTMVAAHLLSRGQLGLKNLALDVLGCEMTPISQLIGTGKKQITFDQVDILDAAPYAAADADMTGRLRQAFEEPVVREGMSSLMNDIEMPLVPILVTMQRNGIKLDTAGLREMSEDLREQMYQTEEELYKSIGHTVNINSPQQLSDLLFNEIGLPKTKRTKTGYSTDANSLEGLKGLHPVVDQILEYRQVSKLKSTYVDALPDMLNPATGRVHTSFNQTGSATGRMSSSDPNLQNIPIRTEMGRQVRKA

SEQ ID NO: 135143 - protein, 319 aa, Unknown
  Bacterial polypetide isolated from the Sargasso Sea
MQILPFRLYKKFIKNLKLEKMINIYEIFEKPLIKILAFMEMEGVEVDSKFLKSLSLKFEKKIKNLEIEVFKISKKEFNIASPKQLGEIIYNDLKIAGLKKTKKGSFATSASVLENLAFKGHKFPKLVLDWRQVSKLKNTYSDSLPEYINPQTKRVHTSFLLAATTTGRLASSDPNLQNIPIKSEDGKDIRKAFTAKKNHLLISADYNQIEMRILADLAEVKELKKAFKNNEDIHALTASQIFNIDIKKVDQDHRRKAKAINFGIIYGISQYGLAKQINVSNYEAEEFLDAYFAKFPEIKVYMDNTIKFCRKSGYVNNIF

SEQ ID NO: 135144 - protein, 255 aa, Unknown
  Bacterial polypetide isolated from the Sargasso Sea
MKKALYRKYRPTKLSELVGQEEAVSLIKNQIEKDNLGHAYLFSGPRGVGKTSLARIIATQLGCDPIFDVSEIDAASHNKVEDIREMNESVNFIASSPGKKRLFILDEVHMLSNAASNAFLKTLEEPPEHIIFILATTEPERVLETIKSRTTQIAFKKISEDEIIKTLKKIGKKEGINLDSEVVKMIANFSDGSLRDSINLYEQTENTFGSKASVDDLFSLLGKLSSKEFEIIINSVETQDTASVLSVIRDAYSKG

SEQ ID NO: 135145 - protein, 270 aa, Unknown
  Bacterial polypetide isolated from the Sargasso Sea
IAAHILNPSAKSYKLDALSLEYLNYSMVPIEDLIGKGKDQITMDYVPLDNVSYYASEDADISLQLAKLFIPRLEENNQMDFFQKIEMPLINVLMQMEKEGVYVEQNILSEMSRNIGDRLDNLVKNIYKISGSEFNINSTQQLAVILFDELKLNQIKKRSTAENILKELANDHELPELILEYRKLNKLKNTYVDSLPASVNKETNRIHSTFNQTIASTGRLSSTGPNFQNIPIRTEEGREIRKSFIAQKNNWKILSADYSQIELRIMAHLS

SEQ ID NO: 135146 - protein, 270 aa, Unknown
  Bacterial polypetide isolated from the Sargasso Sea
NRPSMPDELRVQVEPLHASVRALGLPLLCVEGVEADDVIGTLARQAAGEKRDVVISTGDKDMAQLVCPHVTLVNTMTGSVYDADGVKEKFGVGPELIIDYLALMGDKVDNIPGVPGVGEKTALGLLVGIGGGLDVLYANLDKVPELPIRGAKGLPAKLEEHREMAYLSYQLATIKTDVPLNIEIESLHPGEPDQAALVELYGELEFKNWLDDLLRQNKALAAKAAAPAGDLFAEPTGDTVEETAEPAPASNGDYQLVLEQAQFDAWLKKL

SEQ ID NO: 135147 - protein, 274 aa, Unknown
  Bacterial polypetide isolated from the Sargasso Sea
GIKISEFLADTMLMSYVLNSTATRHGMDRLADYYLNYTTTKYTDVTGTASKQISFAEVQIDVATDYAAEDADVTLRLFNTLSALIKEKPIQEKLLKEIEYPLVHVLSRVEQNGAKIDKKKLGNHSKELGDKIADLSAQAFKIAGEEFNLDSPKQLLEILYEKQGLPVLRKTPKGQPSTNEETLQRLSEEYELPKIILQYRTLAKLKSTYTDSLINIENPKTQRIHTSYQQAVTSTGRLSSTEPNLQNIPIKTAEGRRIREAFVPEKGNTLISAD

SEQ ID NO: 135148 - protein, 286 aa, Unknown
  Bacterial polypetide isolated from the Sargasso Sea
KIQKEVFKLSKKEFNIASPKQLGEILYNDLKIADLKKTKKGSFATSASVLEDLAFKGHKFPQLVLDWRQVSKLKNTYSDSLPEHINPATKKVHTSFLLAATTTGRLASSDPNLQNIPIKSEDGRDIRKAFIAEKDNILISADYNQIEMRILADLADVKELKKAFQNNEDIHSLTASQIFNIDINKVNQDQRRKAKAINFGIIYGISQYGLAKQINVSNFEAEEFLNSYFLKFPEIKVYMDRTIKFCRKSGYVSNIFGRRSHFININDKNYNVRNFQERAAINAPIQ

SEQ ID NO: 135149 - protein, 197 aa, Unknown
  Bacterial polypetide isolated from the Sargasso Sea
ASQVFNVGQSKVDTDMRRKAKAINFGIIYGISQYGLAKQINVSNNEAAEFLNSYFLKFPEIKDYMSSTIKFCRKSGYVSNIFGRRTHITGINDKNFNVRNFQERAAINAPIQGSASEIMRLAMVRLNDKLNNKKNKSVRMILQIHDELIFEVPKNDFKAISKIIKDEMTSVRNSDLHSFSIPLSVDINVGDNWGLLH

SEQ ID NO: 135150 - protein, 192 aa, Unknown
  Bacterial polypetide isolated from the Sargasso Sea
TAAEVFSVAIEEVNKDQRRSAKAINFGLMYGMSAFGLTRQLGITRAEAQAYLDTYFARYTGVRDYMDNIKAKAKEDMFVETIMGRRLYLNEINAANGLRRQAAERAAINAPLQGSAADIIKKAMLDIDKLILNEMPDVKMIMQVHDELVFECPKENADLVMEKMKETMEQTVELKIPLIAEAAVGSNWNEAH

SEQ ID NO: 135151 - protein, 313 aa, Unknown
  Bacterial polypetide isolated from the Sargasso Sea
SSIPALPPLTSSKGVPTGAVKGVIAMIRKLMADNPESPVAVVFDPRGGSFRNELYPEYKANRAKMPDDLRSQIEPIHTIIRLMGLPLLVVDGVEADDVIGTLATEARAKGVEVLISTGDKDMAQLVSPEVTLINTMNDSVMDEAGVEEKFGVRPDQIIDYLALVGDTSDNIPGVPKCGPKTAAKWLRQFETLDGVIEHAEDVKGKVGENLRASLDTLPLSYQLATIKLDVEMELGVGDLAHGEPDVDTLRDIFTDLEFKQWADELAAEAAADVPPAEYETVLDEPALAALAGRLNGSDRIALVVHTDVDDYMK

SEQ ID NO: 135152 - protein, 243 aa, Unknown
  Bacterial polypetide isolated from the Sargasso Sea
MSYQVLARKWRPATFEQMVGQSHVLHALTNALTQQRLHHAYLFTGTRGVGKTSLARLFAKGLNCEKGVTASPCGVCGSCVEIAQGRFVDLIEVDAASRTKVDDTRELLDNVQYRPTRGRFKVYLIDEVHMLSRSSFNALLKTLEEPPEHVKFLLATTDPQKLPVTVLSRCLQFNLKSLTQQEIGTQLQHILTQEQLPFEHEALTLLAKAANGSMRDALSLTDQAIAFGGGTVMLNPSAIYAGS

SEQ ID NO: 135153 - protein, 109 aa, Unknown
  Bacterial polypetide isolated from the Sargasso Sea
MNKIIRKIIHIDMDAYYASVEQLDNPELRGKPVAVGGGKKRGVVAAASYEAREFGVRSAMPSVIAIKRCENLIFVRPRFDRYKEISFQIRQIFADYTDLIEPLSLDEAF

SEQ ID NO: 135154 - protein, 254 aa, Unknown
  Bacterial polypetide isolated from the Sargasso Sea
IKSEDGKDIRKAFTAKKGHLLVSADYNQIEMRILADLADVKELKKAFQNNEDIHSLTASQIFNVDIKKIDQDQRRKAKAINFGIIYGISQYGLAKQINVSNYEAEEFLKAYFSKFPEIKIYMDNTIKFCRKSGYVNNIFGRRSYFNGINDKNFNVRNFQERAAINAPIQGSASEIMRLAMIRLDKKLNENKNIKSKMLLQIHDELIFEVPKNDEKATIKIIRNEMNSVVKSEYHSFSIPLTVDVNIGDNWGILH

SEQ ID NO: 135155 - protein, 278 aa, Unknown
  Bacterial polypetide isolated from the Sargasso Sea
LIFSKNIKLEKLHNIYEIFEKPLIKILALMEIYGVKVDQEFLQLLSSKFKKKIGNLEKEIYKVAKKEFNIGSTKQLGEVMYNEMKISSLKKTKKGSYATSAQVLEDLAFKGHKLPKLVLDWRQVTKLKNTYSDSLQEHINFKTKRVHTSFLLAATSTGRLASSDPNLQNIPIKSEDGKEIRRAFVAEKNNKLISADYNQIEMRILADLADVKELKKAFKNKEDVHSLTASQVFNTRITEVNSDMRRKAKAINFGIIYGISQYGLAKQIGVSNVEAEEF

SEQ ID NO: 135156 - protein, 265 aa, Unknown
  Bacterial polypetide isolated from the Sargasso Sea
ANRQKTPEDLIAQIEPLHQAIINLGLPLIAVDGVEADDVIGTLAMEAEKKNIKTLIATGDKDMAQLVTDNIHLIDTMKDIRMGPREVLEKFGILPERFIDYLTLAGDTSDNIPGVEKVGPKTAIKWINEYGSLEGVIQNADQIKGKIGDNLNEALDQLDLFKTLVTIKCDVQTDSNFSDLIIGESNEDLLHEQLSDLGLHGLIKQFDIQSPEKKPDVESNYQIIRTKNELDELIEVMKKAPYISFDTETTSLDYMNAELVGVSIA

SEQ ID NO: 135157 - protein, 218 aa, Unknown
  Bacterial polypetide isolated from the Sargasso Sea
MDIDILEKFKCTVLKSGSITVTAHILYDIIRKLTDGSEILIEFTGGTASLSCNKSKFQLPVLPVEDYPTLFQGDLPINFNLSVEELCRLIDTTKFAISMEETRYYLNGIYIHKEDKKLVSVATDGHRLARTSINLPSGADLINGVIVPRKAIYEIRKLIEDYSSDEEVSVSISDTKIRVSVSDTTITSKLIDGNFPDYEKVIPKENKNIISLDSAIFQ

SEQ ID NO: 135158 - protein, 215 aa, Unknown
  Bacterial polypetide isolated from the Sargasso Sea
MAHLSEDKNLTNAFNNNMMFHSSTAAEVFGVAIEEVNKDQRRSAKAINFGLMYGMSAFGLTRQLGITRAEAQAYLDTYFARYTGVRDYMDNIKAKAKEDMFVETIMGRRLYLNEINAANGLRRQAAERAAINAPLQGSAADIIKKAMLDIDKIISNEMPDVKMIMQVHDELVFECPKENADLVMKKMKETMEQTVELKIPLIAEAAVGSNWNEAH

SEQ ID NO: 135159 - protein, 158 aa, Unknown
  Bacterial polypetide isolated from the Sargasso Sea
MKFVISREALLRPLQLVAGVVEKRQTLPVLSNVLLEIEGQQLSLTGTDLEVELVGRVTLDEVGQEGSITVPAKKLMDICRSLPDGAQIEIEQDEARVNVRSGRSRFTLSTLPATEFPNVDAIADEQSFSLPQASLRHIIDRSSFAMAQQDVRYYLNGM

SEQ ID NO: 135160 - protein, 202 aa, Unknown
  Bacterial polypetide isolated from the Sargasso Sea
EKEDINSDERRVGKTINFGVIYGMGIKKFARSTGVSTTEAKEFLIKYKERYAKIFKFLELQERLALSKGYVETIFGRKREFKFDKNGLGRLIGKDPYEIDLQTARKAGMEAQSLRAAANAPIQGSSADIIKIAMVQLNKKLLEMNIPVKMLLQVHDELLFEVQPDFLEITKNLVKETMEDCVKLNVPLLVDIGVGNNWMETK

SEQ ID NO: 135161 - protein, 274 aa, Unknown
  Bacterial polypetide isolated from the Sargasso Sea
MEIRGIKLDKDFLLKLSKKFEKKVAELEKDIFKISKKKFKIGSTKQLGEIMYNDLKISALKKTKKGSFATSAIVLEDLAFKGHTLPKLVLEWRQISKLQNTYSDSLPEFINPVSKRVHTSFLLAATTTGRLASSDPNLQNIPIKSEDGKEIRKAFISEKGNSLLSADYNQIEMRILSDLADVKELKKAFNNNEDIHSLTASQIFNVEINKVTKEMRRKAKAINFGIIYGISQYGLAKQISVSTADAEIFLKAYFKKFPEIKDYMSSTIKHCRRN

SEQ ID NO: 135162 - protein, 97 aa, Unknown
  Bacterial polypetide isolated from the Sargasso Sea
DAASRGLVDDVREILENVQYRPTSGLFKVYLIDEVHMFGPSAFNALLKTLEEPPKHVIFILATTEPHKIPKTILSRCLQFNLKLVSDDLLSKILNKF

SEQ ID NO: 135163 - protein, 262 aa, Unknown
  Bacterial polypetide isolated from the Sargasso Sea
INGIRLDKNFLKKLSLKFNKKIQNLEQKIFKISKKKFNIGSTKQLGEIMYNDLKISALKRTKKGSFATSASVLEDLAFKGNEFPKLILDWRQTSKLKNTYSDTLPDHINTKTNRVHTSFLLAATTTGRLASSDPNLQNIPIKTEEGKDIRKAFIAEKNRKLISADYNQIEMRILADLADVKALKKAFINNEDIHSLTASQVFGKDIKKINSEMRRKAKAINFGIIYGISQYGLAKQIGVSNIEAEDFLNSYFLKFPEIKDYM

SEQ ID NO: 135164 - protein, 287 aa, Unknown
  Bacterial polypetide isolated from the Sargasso Sea
VPGFRGARFSRSQHCLPAIVERVWQGREAAKREHNAPLSQALKIIMNAFYGVLGSSGCRFFDTRLASSITLRGHEIMARTRALIEAEGYAVIYGDTDSTFVWLKRPHAEEDAAQIGRTLVAKVNAWWRDHLRDEYGLESALELQFETHYRRFLMPTIRGTEEGSKKRYAGLITQPDGGHKMVYKGLETVRSDWSPLAQQFQRELYERIFLGQPYQDYVRDYVERTLSGELDEQLVYRKRLRRLLTDYERNVPPHVRAARLADEFNAAHGRPLQYQRGGWISYVITTA

SEQ ID NO: 135165 - protein, 230 aa, Unknown
  Bacterial polypetide isolated from the Sargasso Sea
EVLGMVHFSMAQQDIRYYLNGMLLVVDGDQLMAVATDGHRLAFSSMKIEGSFARQEVIIPRKTILELQRLLEDIDDTLKIDIAPTQVKFTFGQVELVSKLVEGKFPDFQRVIPKSHKNQFVIGREELQRSLQRAAILTSDKFKGVRCIIEPGQLKIMSTNADQEEAQEELEIAYDGDSVDIGFNVTYLLDVLANLKVDMLQVSLGDASSSALITIPENDEFKYVVMPMRI

SEQ ID NO: 135166 - protein, 239 aa, Unknown
  Bacterial polypetide isolated from the Sargasso Sea
MRTSDSIRKKHKKYLFDAIKNFYKEPLVIEKGKGFYVSDSDGNSYLDFFGGILTVSVGHANDEVNTAVKAQVDRLSHISSLYPSIPVVELAEKLVGLAPDNLEKVFFNASGTEADETAVMMAQLYTGNTEVIALRHGYSGRSLLAQSLTGHAPWRALPSQVGSVKHALAPYCYRCPLKMTYPECGIACAGDVEELIKTTTTGKVAGILAEPIQGVGGFITPPDEYFSKVSDIIHDHGGI

SEQ ID NO: 135167 - protein, 133 aa, Unknown
  Bacterial polypetide isolated from the Sargasso Sea
MSTGISRIIRESCQKWVTKVVTANRQELKNAFSRVSILSNEKYRGVRVMLSPGELRVLANNPEQEEAEEVVVVDYDGDSLEIGFNVTYVIDVLNTLHSDDVKITLSDANSSALLEALSDNAPEALYVVMPMRL

SEQ ID NO: 135168 - protein, 223 aa, Unknown
  Bacterial polypetide isolated from the Sargasso Sea
MKLKVNSSDLSKALSHLQGVVELRHTLPILSNVIIKAEDTHLKLSSTNLDILCSEQISANIDINGEISVPAITLHEIVKKLPQGSDIDISMDETGNSINIKSGRSRFNLSTLPTDDFPDISQDDLSVRFVMSVDDLKTMIDKTKFAISNEESRYYLNGIFFHSAHKNGIDVLRSVATDGHRLAQYDMPLPHGAEKMSGIIIPKKTTLELRRILDDANGDVQIE

SEQ ID NO: 135169 - protein, 297 aa, Unknown
  Bacterial polypetide isolated from the Sargasso Sea
LGPAIEANQEKAIGQNLKFDIPILARHGIVITKFLADTMLMSYVLNSTATRHGMDRLADFYLNYTTTKYTDVTGTASKQIPFSEVKLDIATDYAAEDADITLRLFNVLQPLLKEKPTQEKLLHDLEYPLVHVLSRVEKNGAKIDKEKLASHSKELSKKISKLSSEAFKISGEEFNLDSPKQLLEILYEKLGLPVLKKTPKGQPSTNEDTLQRLAEEYEMPKIILQYRTLAKLKSTYTDSLINIENPKTERIHTSYQQAVTSTGRLSSTDPNLQNIPIKTAEGRRIREAFVPKKAMFY

SEQ ID NO: 135170 - protein, 244 aa, Unknown
  Bacterial polypetide isolated from the Sargasso Sea
IRKAFIAEKNNLLISADYNQIEMRILADMADVKELKKAFKNNQDIHALTASQVFDVPINKVTDDYRRKAKAINFGIIYGITQYGLARQISVSNQEALDFINAYFKKFPEIKEYMSSTIKTCRKQGYVTNIFGRRIHLRGINDKNFSVRSFQERAAINAPIQGSAADIIRLAMIKIDKILEEKQNAKMLLQIHDELIFECLKKNEATVKKIIKDAMVSVSSSDHHMFSIPLEVSINSGNNWGEAH

SEQ ID NO: 135171 - protein, 224 aa, Unknown
  Bacterial polypetide isolated from the Sargasso Sea
NIKTKKIHSTFSQTVTSTGRLSSRNPNFQNIPIRTELGREIRKAFKSENKDWKIFSADYSQIELRIMAHLSKDKALVDAFNKGEDIHSRTAADVFNVSIDEVIPDMRRTAKIVNYGLLYGAGPFRMSQELGMPQKEAKSIIEAYFERYSGIKKYIDSVIEFARDNKFVETILGRRRQVWDIDSKNHLHKEAAKRMAINMPIQGTNAEMIKIEMIDIQNELISKK

SEQ ID NO: 135172 - protein, 170 aa, Unknown
  Bacterial polypetide isolated from the Sargasso Sea
GILYGISPYGLAKQLDVTNSEAKIYIENYFEKYPKIKQYMDDQIAFAKTNLYVETIFGRRCNIKNINDKNFAVRGFAERQAINAPIQGTAADIIKLAMIELNKMIINEELEVKILLQVHDELIFEIMESKKDTSVEKIKYVMENTHLEFKDFQVPLIVDYGVGENWGDAH

SEQ ID NO: 135173 - protein, 302 aa, Unknown
  Bacterial polypetide isolated from the Sargasso Sea
FKSLKTEKLLNIYELFEKPLIKILAEMEIKGIKLDKSSLIKLSSKFSTKIEKLEKSIFKISKKIFNIGSTKQLGEIMYNDLKIAALKKTKKGSFATSASVLEDLAFKGYEFPKLILEWRQISKLKNTYSDALPEHINQNTKRVHTSFLLAATTTGRLASSDPNLQNIPIKSDDGKDIRKAFVSEKNNKLISADYNQVEMRILADLADVKQLKKAFLNNEDIHTLTASQVFGKEINKIDSETRRKAKAINFGIIYGISQYGLAKQINVSNNEAEEFLNSYFKKFPEIKDYMKNTVNFCRKSGY

SEQ ID NO: 135174 - protein, 174 aa, Unknown
  Bacterial polypetide isolated from the Sargasso Sea
IINFGIIYGISAYGLALQLEIPNSEAKMYMDQYFKKYPGIKDYMRNTIQECRSNGYVKTPFGRRIFIPFINDKVVTRKNFAERSAINAPIQGGAADMIKLTMPQVQKFLVDEKLQTKILLQVHDELLFESPQSEIDIIKNKIPEIMTSSHKKFISLKVPIKVDIGVGNSWDDAH

SEQ ID NO: 135175 - protein, 314 aa, Unknown
  Bacterial polypetide isolated from the Sargasso Sea
RIVGVSFCSGINDAYYIPIAHKGIKSLSRDFVIKKIKSILEDKSIKKIGQNIKYDLMIFKKYGVNIDPIEDTMLLSYTLDAGNNRHNMNTLSEIHLSHKTISYKDVVGSGKKQLNFSEVGLQAATKYAAEDADITLRLYNILKNRVDEEKLNKIYDVFEKPMVKLLSKIEMNGIKIDDNYLKKLSKKFEERLKRKEKEIFKITGKEFNIASPKQLGEIIYNDLKIAKLKKTKKGSLATSAKILEDLALTGHKFPKLVIEWRQDSKLKSTYTDALQDHINKKTKRVHTSFLLAATNTGRLAFSDPNLQNIPIKSA

SEQ ID NO: 135176 - protein, 304 aa, Unknown
  Bacterial polypetide isolated from the Sargasso Sea
NHLGHKTISFKDLVGSGKKKITFAEVDLKKATEYAGEDADVTFRLFKLLKKRLDNEKLTKIYEILEKPMVHVLSDIETNGVKINKEHLKKLSIKFTNKIFKIEKEIFSLVKREFNIGSPKQLGEIIYNELKIANLKKTKKGSLATSAKILEDLAFKGHKFPSLVLDWRQLSKLKNTYTDALQDHINSETNRVHTSFLLAATNTGRLASSDPNLQNIPIKTEDGREIRKAFIAEKNNILMSADYNQVEMRILADLADVKELKKAFINKDDIHSITASQVFDVPVKDVDKNLRRKAKAINFGIIYG

SEQ ID NO: 135177 - protein, 325 aa, Unknown
  Bacterial polypetide isolated from the Sargasso Sea
MAFRSFYAFSKGGEWGLATKDGIPTSVTYGFLKALLDNCKTLIPQGVAIAFDTPEPTFRHKADPNYKAHRDEAPEVFFQDLNQLQEILRHQLQLPLCLAPGYEADDVLGTLANRAADAGWRVRILSGDRDLFQLVDDDRDIAVMYMGGGPYARSSGPTLINEEGVVAKLGVAPISVVDLKALTGDSSDNIPGVKGVGPKTAINLLKENGDLDAVYRALREVEAEGPKASRGAIKGALKGKLSNDRDKAYLSRELAEILVDIPLPEEPVLELGPVDAEGLESRLGALELNSLVRQVPAFVATFSTGGSAANKHQLQSTTTTGSRNH

SEQ ID NO: 135178 - protein, 302 aa, Unknown
  Bacterial polypetide isolated from the Sargasso Sea
KYLWSYFEKPLIKILAEMEIKGIKLDKSSLNKLSSKFSTKIEKLEKSIFKISKKTFNIGSTKQLGEIMYNDLKIAALKKTKKGSFATSASVLEDLAFKGYEFPKLILEWRQISKLKNTYSDALPEHINQNTKRVHTSFLLAATTTGRLASSDPNLQNIPIKSDDGKDIRKAFVSEKNHKLISADYNQVEMRILADLADVKQLKKAFLNNEDIHTLTASQVFGKEINKIDTETRRKAKAINFGIIYGISQYGLAKQINVSNNEAEEFLNSYFKKFPEIKDYMKTTVNFCRKSGYVSNIFGRKT

SEQ ID NO: 135179 - protein, 299 aa, Unknown
  Bacterial polypetide isolated from the Sargasso Sea
IVMLNHRNERIGISEVGEKFGCAPEQVIEMLGLMGDSSDNIPGVRGVGEKTAVKLISDFGSIERVYENLETITSKSLKEKLGNDRENAFLSRDLATIDCHVPLSVSLKDVHLGETDLYNNDELYALLEELEFRTLMNRLVKKREAVSASQESGSTDAEASKLSSNENQELLSSEIEIDHAYLEVKCSLIQTGEELRSILSKFSNKNRIALALDVKGEHQLDFWLNGLAICGDGVNAVYIDLDNTETERKEIIGLLKTHLESAEHPKIFYDLKKAVQLFSKLGIKIEGVESGYINCCTHD

SEQ ID NO: 135180 - protein, 249 aa, Unknown
  Bacterial polypetide isolated from the Sargasso Sea
LDGKEIRKAFVAEKNNLLISADYNQIEMRILADMADVKELKKAFKNNQDIHSLTASEVFNVPISKVTDDYRRKAKAINFGIIYGITQYGLAKQISVSNEEALSFINAYFKKFPEIKDYMKLTVKTCRQQGFVTNIFGRRIHLRGINDKNFSVRAFQERAAINAPIQGSAADIIRLAMIKIDKILEEKKKAKMLLQIHDELIFECFKKDEIEVKKIVKAAMTSVSSSDHHMFSIPLEVSVNSGNNWGEAH

SEQ ID NO: 135181 - protein, 117 aa, Unknown
  Bacterial polypetide isolated from the Sargasso Sea
ETLLGRRIHLDQINAKNPMQRNYAERQAINAPIQGSAADIIKRAMIHVPKAITAAGLDARMLLQVHDELLLEAPEDQVEKTTDVVKETMQAATYPAIELKVPLVVDAGVGDDWATAH

SEQ ID NO: 135182 - protein, 284 aa, Unknown
  Bacterial polypetide isolated from the Sargasso Sea
INLIKPILEDPSILKIGHNIKFDMNVLRQNHNGNIEVSPVDDTMCMSYCTNLGKVQNHKLDTLAQTELNYTTIKYEDLCGKGVNQKTFDLINPLEALNYAAEDSDVALALYQNLKLRLMFDKKNFVYQKLERELISVLSDIENEGIIVNEKTLNSLSEALTKNIIELEKKIFSITKEEFNIGSPKQLGEILFDKLKLDKGKKSKTGAWQTSVSILEDLSNKGHEIADLLLDWRHFSKLKSTYSKALIEQINIKTKRIHTSYSMVGTSTGRLSSSDPNLQNIPIK

SEQ ID NO: 135183 - protein, 107 aa, Unknown
  Bacterial polypetide isolated from the Sargasso Sea
IRDKNPMVRNYAHRQAINAPIQGAAADIIKRAMIKFKKIAKEDVFKNTKLLLQVHDELIFEIKNDSSLPLAIKKISNLMANAHLPLVSFDTPIVVSVGQGENWDAAH

SEQ ID NO: 135184 - protein, 235 aa, Unknown
  Bacterial polypetide isolated from the Sargasso Sea
MIKRTKNTDTQFCRDCLHQTKKLSDLCDKCLSPRVIHHKELKNLSIAHIDCDAFYASVEKRDNSDLKNKPLIIGGGNRGVVSTACYIARTKGIHSAMPIFKARKLCPEAIILKPNMSKYKKVSYEIRDLMKELTPLVEPISLDEAFLDLSGTFKLHQKIPAILLAELVNKIKKHIGINVSVGLSYNKYLAKVCSDLDKPKGFSVIGQEESKDFLSNKPVSLLWGVGKKFTNKLNS

SEQ ID NO: 135185 - protein, 204 aa, Unknown
  Bacterial polypetide isolated from the Sargasso Sea
EDIHTLTASQVFNIDIKKVDSEKRRKAKAINFGIIYGISQYGLAKQIMVSNVEAQEFLNSYFKKFPEIKDYMDRTIKFCRKSGYVNNIFGRRTHISGINDKNFNVRNFQERAAINAPIQGSASEIMRLAMIKIHKYLENSSTLKSKMLLQIHDELIFEVPKNQLKQACEVIKNEMTGVSKSDLHAFSIPLTVDINSGDNWGIIH

SEQ ID NO: 135186 - protein, 293 aa, Unknown
  Bacterial polypetide isolated from the Sargasso Sea
IQIKTFSDLIEIEEEGETTVSARKMSELCRSLPEGENLNFSLSNGKLTVSSSNFHADFATISSDDFPEIEINEEQTPITVESSVLKRLLSKTSFSMASQDVRYYLNGMLLEIEGNKINGVATDGHRLAFSSATTNAADLEVRNILPRKAVLELSKLLSPKEGTVELLIGASYVDVRSENLNFSSKLIDGKYPDYNKVFPTGEPLPLEISKETLQSALSRASVLSNEKYRGVRFQLSQNKLKLTANNPEQESAEEEVDVIYKGSDLEVGFNIGYLLDVLNSIESETVSFEFYGE

SEQ ID NO: 135187 - protein, 200 aa, Unknown
  Bacterial polypetide isolated from the Sargasso Sea
SLTASQVFNKSINKIDEDMRRKAKAINFGIIYGISQYGLAKQINVSNIEAEDFLNSYFNKFPEIKNYMEQTIKSCRKNGYVKNIFGRKTHITGINDKNYNVRNFQERAAINAPIQGSASEIMRLAMIRISKKFKELKNENCNVLLQIHDELIFESHKDSVEKHTKIIKEEMISVKESELHSFSIPLLVDINIGKNWGDLH

SEQ ID NO: 135188 - protein, 307 aa, Unknown
  Bacterial polypetide isolated from the Sargasso Sea
MYGFTNQVLKLIELEKPDYVACAFDSKEKTFRHKMYNDYKAQRPEMPNELQLQLPHLWELLDSLRLPTLKKPGFEADDLIGTLAFEANKNRLDTYIVSGDKDFMQLINENIFLYSPGTRWKPKATIYDSKGVENKWGVKPNKIIDLLGLMGDASDNIPGASGIGEKTAVKLIKDYGSLENALKNAENIKNKRIQNGLKNNQDLTLLCKKLVTIKTDLDLKLSIKDLKLKKINKNNSLKKFRELEFFALEKLISNGEDDHVKLKPKSNFKTVTNKDQLKKLVTHCINSKKLTFIIEVTSKNPFLTSII

SEQ ID NO: 135189 - protein, 306 aa, Unknown
  Bacterial polypetide isolated from the Sargasso Sea
NVFSKLRTWIEDPKKEKALQNSKFDRQIFFNHGLDLKGVTFDTLIADYLLNNQEKHGLSEISFRLFEFKPPSFKETVGKNKDFSFVDINEASIYCGYDVFLTFKIVKIFKEKFSKEKDELIKLFEEIELPLEPVLSQMEMNGITIDIPYLDKLSKELKSTLEDIESKVYELAEENFNLSSPKQLGEILFEKLNLDKKKSRKTKTGWSTDAVVLERLVDEHEIIQHLIKHRTLSKLLSTYIDALPNLINEKTGRVHTNFNQAATATGRLSSSNPNLQNIPVRTEFSRRIRKAFLPERNGNFYPLISQ

SEQ ID NO: 135190 - protein, 280 aa, Unknown
  Bacterial polypetide isolated from the Sargasso Sea
SQVELNIAKDYAAEDADITYRLYKIFLKSLKSEKLLNIYEIFEKPLIKILASMEINGIKLDNNFLKKLSIKFEKKLQDLEKQIFKISKKKFNIASTKQLGEIMYNDLKIASLKKTKKGSFATGAAVLEDLAYKGNEFPKLVLEWRQSSKLKNTYSDSLPEHLNPNTKRVHTSFLLAATTTGRLASSDPNLQNIPIKTEEGKDIRKAFISEKNKKLISADYNQIEMRILADLADVKELKKAFKNNEDIHSLTASQVFGADIKKIDADMRRKAKAINFGIIY

SEQ ID NO: 135191 - protein, 258 aa, Unknown
  Bacterial polypetide isolated from the Sargasso Sea
KIITEKSKLLKPLSHIQGIVEKRNTIPILSNVVMRAVDNNLSLSATDMDIDILETFDCKVINSGTITVTASILYDIIRKLMDGSEVLIEFNGGTASLESNKSKFQLPVLPVEDYPNLSQGDFPINFNLYVEELCKIIDKTKFAISMEETRYYLNGIYLHKNNNKLVSVATDGHRLARTSVDLPDGANLTNGVIIPRKAIYEIRKLIDDYSNDEMVSISLSDNKIRVTIGNSVITSKLIDGNFPDYEKVIPTENSNIVS

SEQ ID NO: 135192 - protein, 275 aa, Unknown
  Bacterial polypetide isolated from the Sargasso Sea
GDSERGVVASASYEARSRGVRSAMSSIVAKSLCPEAVFVGANFARYREISRQVQQLLYAVTPQLEPIALDEAFLDVSGAHRLFGSSEQIAWQIRNDVYEGVGLDCSVGVASSKLLAKLASVAAKPKASLAGVTPGLGVFVVHPDVATDFLEAHPVEALWGVGRATLEKLKALGISSVGDLASVPNEILVEELGASHGNHLSKLSQGIDLREVDSERERKSISHEETFASDIYDRAALVSEIVRLSDAVSARAREQGLAARTIHLKVRRPRYVIRH

SEQ ID NO: 135193 - protein, 298 aa, Unknown
  Bacterial polypetide isolated from the Sargasso Sea
EVYYQRRISTSVTYGFLKSLLDNCKNISPEGVCITFDTEKPTFRHELDPNYKANRDVAPDVFFQDIEQLEIILEESLNLPIFKSPGYEADDLLGTIANDASSKGWCVNILSGDRDLFQLVDDQKDIYVLYMGGGPYAKSGNPTLMNENGVKEKLGVAPERVVDLKALTGDSSDNIPGIKGVGPKTAINLLKENDTLDGIYQALDKIQQNNDKKYKGFIKGSVIEKLRNDKHNAFLSRDLAKINTEVPLILSNGYELKNINQELLSESLKKLELSTLLRQIDIFNSTFSRGGFDKNNVA

SEQ ID NO: 135194 - protein, 257 aa, Unknown
  Bacterial polypetide isolated from the Sargasso Sea
MSYQVLARKWRPAKFEQMVGQSHVLMALTNALSQQRLHHAYLFTGTRGVGKTSLARLFAKGLNCETGVTANPCGECSSCIEIAQGRFVDLIEVDAASRTKVDDTRELLDNVQYRPSRGRFKVYLIDEVHMLSRSSFNALLKTLEEPPEHVKFLLATTDPHKLPVTVLSRCLQFNLKSLSQQEISKQLEYVITQEQLPFEPQALNVLAKAANGSMRDALSLTDQAIAFGSGQVMLEQVQTMLGSIDEQHVIALLKTLC

SEQ ID NO: 135195 - protein, 182 aa, Unknown
  Bacterial polypetide isolated from the Sargasso Sea
HRRKAKAINFGIIYGISQYGLAKQINVSNYEAEEFLNSYFAKFPEIKVYMDNTIKFCRKSGYVNNIFGRRSHFNGINDKNFNVRNFQERAAINAPIQGSASEVMRLAMIRLDKKLSEQKNTSSKMLLQIHDELIFEIPKKDEKVMIKLIEKEMTSVANSDYHSFSTPLTVDINVGDNWGMLH

SEQ ID NO: 135196 - protein, 270 aa, Unknown
  Bacterial polypetide isolated from the Sargasso Sea
NGKLTVSSSNFHADFATISSDDFPEIEISEEQIPVSLESNVLKRILSKTSFSMASQDVRYYLNGMLLEINGNKINGVATDGHRLAYSSAATSNSEADMRNILPRKAVLELAKLLSAGDDIISLLIGPSYVVIRTENLSFSSKLIDGKYPDYDKVFPTGEPLPLEISKEVLQSALSRASVLSNEKYRGVRFQLSENKLKLTANNPEQESAEEELDVVYQGSELEVGFNIGYLLDVLNSIETEKVKFEFYGEDSSCIIKESNSEDDVYVIMP

SEQ ID NO: 135197 - protein, 211 aa, Unknown
  Bacterial polypetide isolated from the Sargasso Sea
HSLTARLIFEKEEISSDERRVGKTINFGVIYGMGIKKFARSTGVSTPEAKEFLIKYKERYSKIFKFLELQERLALSKGYVKTIFGRKREFKFDKNGLGRLIGKDPYEIDLQSARRAGMEAQSLRAAANAPIQGSSADIIKIAMVQLNKKFIEMNVPAKMLLQVHDELLFEVEPDSLEITTKLVKKTMEDCVKLNVPLLVDIGIGDNWMQTK

SEQ ID NO: 135198 - protein, 284 aa, Unknown
  Bacterial polypetide isolated from the Sargasso Sea
LKFEKKIKNLEKEIFKISKKDFNIASPKQLGEIIYNDLKIAGLKKTKKGSFATSASVLEDLAFKGHKFPKLVLDWRQISKLKNTYSETLPEHVNPKTKRVHTSFLLAATTTGRLASSDPNLQNIPIKSEDGKDIRKAFTAKKGHLLISADYNQIEMRILADLADVKELKKAFQNNEDIHSLTASQIFNVDIKKIDQDQRRKAKAINFGIIYGISQYGLAKQINVSNYEAEEFLKAYFSKFPEIKIYMDNTIKFCRKSGYVNNIFGRRSYFNGINDKNFNVRNFK

SEQ ID NO: 135199 - protein, 218 aa, Unknown
  Bacterial polypetide isolated from the Sargasso Sea
LRIMAHLSDDIFLTYAFNNDIDVHSSTAAEVFGVSFEDVSQDQRRSAKAINFGLMYGMSAFGLTRQLGIPRGEAQEYLDKYFARYTGVRDYMDNIKIKAKEDKFVETIMGRRLYLNEINAANGLRRQAAERAAINAPLQGSAADIIKKAMLDIDELILNEMSEVKMIMQVHDELVFECPKDNADIVMQKMKTTMEQTIELNIPLIAEAAIGTNWNEAH

SEQ ID NO: 135200 - protein, 231 aa, Unknown
  Bacterial polypetide isolated from the Sargasso Sea
ADYNQIEMRILADLADVKELKKAFKNKEDIHSLTASQIFNIDIKKVNQDHRRKAKAINFGIIYGISQYGLAKQINVSNYEAEEFLNSYFAKFPEIKVYMDNTIKFCRKSGYVNNIFGRRSHFNGINDKNFNVRNFQERAAINAPIQGSASEVMRLAMIRLDKKLSEEKNSNSKMLLQIHDELIFEIPKNDENIMIKLIEKEMTSVAKSDYHSFSTPLTVDINVGDNWGMLH

SEQ ID NO: 135201 - protein, 568 aa, Unknown
  Bacterial polypetide isolated from the Sargasso Sea
HVAAIFDGENNKASRTALYPDYKANRPPPPEDLSKQISWAKELCELLGFKTLTIPGVEADDTIATITKFWAQNNGEVTICSSDKDLFQLVSDKVQILNVYKNNLIVTPEKVLDIHGIHPHQMLDYLALVGDSSDNIPGVSGFGPKTASSLLQQYETLDYLLENPSSVLGKKKQETLQKEADQARLSRELARLNEAVEVEKTVESYLVQDKDESSLKELMKELEFFSILKELNPQKKEKPSSYTLVNNSEDLDELVKELKKETSLTFDTETSHLHPLKGEIVGISFSKSEGEACYIPFNGKLAKNELVEKLKPLFESSIAWNGHNIKYDILVLQQIGITPKVIGFDTALASYVLNAHSHRHGLDELSLQYFGKSKIPIKDLIGSGKKQLTMDQVPIEQVSTYACEDADYTFRLKELLSKQIETRGLRELLFELEIPLVTVLTDLEERGIYVEKEMLSTFSTEIKGIIQALEEEVHQLAGEPFKVNSPKQLSDILFTKMGISPPKKIATGYSTNAEVLEMLKYHHPIAEKVLEYRKYEKLRSTYIDALPLEINPKTNRIHCSFNQITAST

SEQ ID NO: 135202 - protein, 584 aa, Unknown
  Bacterial polypetide isolated from the Sargasso Sea
NEQSVIAVDTETSSLNPLEANLVGISFSYAPNKACYIPLAHKNIKGLKKELVLKKIKPILEDPSIKKVGQNIKFDFLVLSQNNIEITSLEDTMLISYTLDAGTNRHNLDALSEIHLNHKTISYKELVGTGKNKLNFSDITLDEATQYAAEDADVTLRLYNHLRARLDEEKLNKIYEDFEKPMVKLLSKLEFNGIKVDDTYLKKLSKNFEEKLKKIEKEIYSIAGKEFNIASPKQLGEIIYNELKIAKLKKTKKGSLATSASILEDLALAGHKFHNLVLEWRQISKLKNTYSDALQGHISKKTKRVHTSFLLAATNTGRLASSDPNLQNIPIKSEEGKEIRKAFIADKKNILISADYNQIEMRILADMADVKELKKAFKNNEDIHSLTASQVFNVPIKEVNEDLRRKAKTINFGIIYGITQYGLAKQISVSNQEALDFINAYFKKFPQIKDYMNSTIRTCRNQGYVSNIFGRRIHLKGINDKNFSIRSFQERAAINAPIQGSAADIIRLAMIKINQQIEEDKKLQTKMLLQIHDELIFECLEKDEEYVKKIIKESMASISKSEHHMFSIPLEVNINSGYNWGEAH

SEQ ID NO: 135203 - protein, 1020 aa, Unknown
  Bacterial polypetide isolated from the Sargasso Sea
KPRVARAHECVNATTFTPCLSFTGTRGVGKTSLARLFAKGLNCEKGVTASPCGVCGSCVEIAQGRFVDLIEVDAASRTKVDDTRELLDNVQYRPTRGRFKVYLIDEVHMLSRSSFNALLKTLEEPPEHVKFLLATTDPQKLPVTVLSRCLQFNLKSLTQQEIGTQLQHILTQEQLPFEHEALTLLAKAANGSMRDALSLTDQAIAFGGGTVMLNQVQSMLGSIDEQHVLGLLKALTDADIGVLMQSCAQVLAYGADAQEVLRSLLELLHQITLTQFAPAAAQQSLYSAQIQAFAEQLAPEQVQLYYQILLTGRKDLPHAPDPKSGLEMALLRAVAFVPEKPVKRWQVEETAKVSLPAQQPTSTTPASNMPAAEPAVNQAVAEKKTPLTAERDSQTLPQAAMSEPMAKSENATASQQALSAEDMLAVDDAIDDEAELNAALIAEQQVILSQAQSQGFGASVASSTEAVSTPEAKADSSAESSSVSMPASNIDAEHNQAATVDTASVDQKPSPAAITAAVDLSLDDIEDDTQASVNQSADALAPDEYSAEDFGQYDYAAAPLDAYQDDYSQFMAEEQGGFSGLEESSFNRDSAQSIGHRDVVHESAVALQSQSIGESLASTTSQASTPPASTTVSLEDDDILSAVLAARDSLLSDLDALSTKEGDGKKSATEVKLKTPSQSAHTAPVSHVTSQNTSSVDASIEPQGVSHASDNDFELPFDDDFEAELHLDSQSNVTPTQPLGPNDRPPWEEAPVVGMDDANASAASSNLQLENAVVPQTTVDDLGAATVAAQISPTDSEVTRVVQALEQAAVQESEPVTQSLEPNTPQPQAQELTQPKTQPQTQQLTQQPASVQSQSSETVSSASSTALTLAQSITGHPLDLHWYKLMASLEIGGRVRQLAVNSICQVQANPLPLLLKPDQKHLAAPVAIEQLEQALTAALGNPRQVEVVIGTDPARETPLEMRKRFHQELLQQARQSLMMDDNVQWLINRFGAELDQDTLLYPQELLAQRSGLIPALPEPE

SEQ ID NO: 135204 - protein, 776 aa, Unknown
  Bacterial polypetide isolated from the Sargasso Sea
TRKSDGLPTGAVSGFCSMLFKLLEDSKSDQNLQKPTHFAVIFDSARKTFRNEIYSDYKANRSEAPDDLAPQFEYIRKSVLAFNLPSVDLPNYEADDLIATYVDQILKKGAKVTIVSSDKDLMQLYKKGVRIFDPMKNKFITDDDVLKKFGVDASKVIDVQSLAGDSSDNVPGVPGIGVKTAAELINKYGTLENLLKSAHEIKQNKRRETLIENKDKALISKKLVTLDHNSPVNRELSEFKLQNIDKDKLYKFLREMEFNRLLSSAISAYGEPELQSNKIETQIIQKQQTINNKNYYLINSLDEIDKWIEEAEEVGEVAVDTETTSLDPHQADLVGISLCSKVGKACYIPVGHKSPKCLKKDAVIKKLKKILEDPSIKKIGQNIKFDFIVFYKCGITLSSMEDTMLMSYVLDAGKNRHNMDTLSEIHLGHKTISFKEMVGTGKKEINFSEVELDKAKDYAAEDADVTFRLYKKFIKNLKSEKMINIYEIFEKPLIKILALMEIEGVEIDSKFLKSLSSKFEKKIQKLEKEVFKISKKEFNIASPKQLGEIIYNDLKIAGLKKTKKGSFATSATVLEDLAFKGHEFPKLILDWRQVSKLKNTYSDALPEHLNPNTKRVHTSFLLAATTTGRLASSDPNLQNIPIKSEDGKDIRKAFTAKKGHLLISADYNQIEMRILADLADVKELKKAFKNKEDIHSLTASQIFNIDIKKVNQDHRRKAKAINFGIIYGISQYGLAKQINVSNYEAEEFLNSYFAKFPEIKVYMDNTIKFCRKSGYV

SEQ ID NO: 135205 - protein, 482 aa, Unknown
  Bacterial polypetide isolated from the Sargasso Sea
MEFNRLLSQVISFYGEVKTTKTKFSENHNSKIEKEYFKNYKLIKTIDEIDYWIKKAEEKGEIAIDTETSSLDPQTADLIGISLCFEAGEACYIPIGHKKNVSLSLEKVIKKIKILLEDSSIKKIGQNIKFDYIVLHHHGINMTSMEDTMLMSYTLDAGKNRHNMDTLSEIHLNHKTISYKDIVGSGKKQIAFNEVEILKAKDYAAEDADVTYRLFKIFEKNLKTEKLKEIYEVFEKPFIKILASMEINGVKIDSNFLNDLSKKFELKIRNLEKKIFKISKKEFNIGSTKQLGEIMYNELKISALKKTKKGGFATSASVMEDLAYKGHELPKLILEWRQISKLKNTYSESLPTFVNNKTKRVHTSFLLAATTTGRLASSDPNLQNIPIKTDDGKNIRKSFIAEKNNLLVSADYNQIEMRILADLADVKELKKAFKNNEDIHTLTASQVFNIDIKKVDSNTRRKAKAINFGIIYGISQYGLAKQ

SEQ ID NO: 135206 - protein, 371 aa, Unknown
  Bacterial polypetide isolated from the Sargasso Sea
NMSSELGQKVDELKNSIEKEAGVEFNINSTQQLANILFDVIGLREVKKRSTAEDVLEQLKNDHKIPYLVLQYRKLNKLKNTYIDALPELIHVDTKRIHSTFNQTIASTGRLSSSNPNFQNIPIRTEEGRKIRKAFRSNDSKKIIFSADYSQIELRIMAHLSQDKALVDAFVKGEDVHSRTASLVFNVPIDDISTDMRRTAKIVNFGLLYGAGPFRMSNELGIPQKEAKQIIETYFNRYSGIKDYIEKTIEQAKKHQFVETVLGRRRPVWDIESKNHLHREAAKRMAINMPIQGTNAEMIKLAMIAIQKKLTKENMKSKMILQVHDELVFEVPKNELDSLKSIVINKMENALSLSVPIIVDCGHGKSWFEAH

SEQ ID NO: 135207 - protein, 464 aa, Unknown
  Bacterial polypetide isolated from the Sargasso Sea
MHQLRQHAQESSIVLYEADIRVADRYLMERFVYGAVEFLAPQDFDDTPQIVIENAQIRPCQFRTTFTSLSIDIECNEQEELFSIALAGEGLNVVLLLCPPRFVGQTLQGQEDSAYELITVESEKVLLEAFFSYLTSYDPDIILGWNVKQFDMAVLERRARANSLKYAIGRHGREASVRQWEDQTLVDVPGRCVIDGIEALKTMTYQFESFSLDHVSEELLGENKLIQAADKLEAIKRLYHSDPVALANYNFKDTELVNRIQDKTQFIDFLALRSILTGLDMSRPGGSVAAFLNVYLPKLHRKSYVAGVRPENGGLASPGGYVMRSQPGLYKDVLVLDFKSLYPSIIRTFKIDPLGLAEGLKSPHTAIEGFKGAVFSRESHFLPSIIENLWLQRDEAKKQNDAPRSQAIKILMNSFYGVLGSGGCPFYDPRLASSITLRGHEIMQTTASWIEELGYTVIYGDTDS

SEQ ID NO: 135208 - protein, 413 aa, Unknown
  Bacterial polypetide isolated from the Sargasso Sea
MKDKKLFLIDAYALIYRAYYAFIKNPRINSKGFDTSAIMGFLNSIFDIIKRENPDYFSVVFDKGGSTDRIEIFEDYKANRDSTPEPILDSVPIIHEILDALGIKTLQLSGYEADDIIGTVAKQAEKEGLKTYMVTPDKDFAQLVSENIFLYKPARFGSGIEIWGVDEVKNKFEINDPLQVIDFLGMMGDSVDNIPGLPGVGEKTAKKFLKEYGSIEELYKNLDDIKGKLKEKISENKELGLLSKKLATIIIDVPIDYKIEELKIVESNNEKLLSIFEDLEFKRLKENYFKIFKQQENKPPHNNELNFEIDKKNEENYLSQKLESEKGIRILIDKVLSSKSLSIDYLISESNSYISFCLSSTISYYVNFNLKDISYTLNLFKEIFESKILKIIYNHKHFLKILKANKINIDDNF

SEQ ID NO: 135209 - protein, 179 aa, Unknown
  Bacterial polypetide isolated from the Sargasso Sea
MRRKAKAINFGIIYGISQYGLAKQIMVSNNEAEEFLNSYFLKFPEIKDYMNSTIKFCRKSGYVNNIFGRRTHITGINDKNFNIRNFQERAAINAPIQGSASEIMRLAMIRLNKKLINSSTKILLQIHDELIFETPISEVKKITKVIENEMTGVSDSDFHSFSTALTVDINVGDNWGILH

SEQ ID NO: 135210 - protein, 352 aa, Unknown
  Bacterial polypetide isolated from the Sargasso Sea
AISQAQSVVERRNTIPILSNVLIEADGDVAKFRATDLDIEVIDKAPAQIEQPGSTTVSAITLHEIVRKLPDGALVTLTGDTDKGRLAVEAGRSNFSLATLPKEDFPIMASSEYSSNFTAKASLLRRLFDKSKFAISTEETRYYLNGVYMHIASSDGGEVLRCVATDGHRLARIDSDLPEGASDMPGVIVPRKTVGELRKLLDDDELKIAVSVSETKIRFATPEITLTSKVIDGTFPDYTRVIPNENVRRLEVDASDFAKAVDRVATVSSERSRAVKLSLDEDRLILSVNAPDSGAAEEELAVSYGDEALEIGFNAKYLLEIANQVDRENAVFLFNSSGDPTLMREGNDTSAV

SEQ ID NO: 135211 - protein, 190 aa, Unknown
  Bacterial polypetide isolated from the Sargasso Sea
ILKKLNSDMRRKAKAINFGIIYGISQYGLAKQIMVSNQEADEFLKSYFFKFPEIKSYMDSTIKFCRKSGYVANIFGRRSHITGINDKNFNVRNFQERAAINAPIQGSASEIMRLAMIRLNKKLEDTKNNKYKMLLQIHDELIFEVPRSEEKKIAKIIKDEMTSVKDSDLHSFSTPLTVDLNIGDNWGLLH

SEQ ID NO: 135212 - protein, 431 aa, Unknown
  Bacterial polypetide isolated from the Sargasso Sea
MIFRPDVILIDGSSYIYRAFHALPPLSTSKGKPTGATRGVASMLRKLISTYPGVPMVMVFDAKGPTFRSDYYQAYKANRPSMPNELRVQIDDIKKLSKLFNFSVQEVAGVEADDVIATLAERLGKKLKVLISSPDKDLTQLVKKNVIQHNSVSNEFFDEKYVEEKFGVLPNKIAELLALVGDKSDNIPGITKVGNKTASKWLNQYGDIDNLLAKSDEVTGVVGENLRNEKDILQRNLFLVSLKKDLELNLEIDSLNIPEAANDELKDFYKDLEFNSFIEDKAEKKISKNYISIKNIKQLEEIEKELDNCKYFSFDTETTSLIAHEAELVGFSFALKSNTGAYVPIRHNEQTDLDADETTKWLKAILERNQEKIVGQNLKYDLAVLKKYDIEINKFCADTMLMSYAINSTATRHNLDALAEHYLNVQTIKYA

SEQ ID NO: 135213 - protein, 368 aa, Unknown
  Bacterial polypetide isolated from the Sargasso Sea
MKIIIDRSNLLRPLSHVQSVVERRNTIPILSNVVIKADENHLFLSATDMDIDILEKFECKVITPGSITVTAHILYDIIRKLTDGSEIVIESNDGTASLSCNKSKFQLPILPVEDYPTLSQGELPINFKLYVKDLCKLIDTTKFAISMEETRYYLNGIYLHKDDKKLISVATDGHRLARTSINLPSGADIISGSIIPRKAIYEIRKLIEDYSDDEDVLVSLSETKIRVCVNDTTITSKLIDGNFPDYEKVIPKDNNNLISLDCIKFSESVDRVSTIFSDKSKSVRMSLSENKLTLEANSPDTGSAIEEIELAYSNEEISIGFNSKYLLDVTSQVGTRILNISLKDSGSPALISIPDDPESLFVLMPMRV

SEQ ID NO: 135214 - protein, 243 aa, Unknown
  Bacterial polypetide isolated from the Sargasso Sea
LSLQKKGHLLISADYNQIEMRILADLADVKELKKAFKNKEDIHSLTASQIFNIDIKKVNQDHRRKAKAINFGIIYGISQYGLAKQINVSNYEAEEFLNSYFAKFPEIKVYMDNTIKFCRKSGYVNNIFGRRSHFNGINDKNFNVRNFQERAAINAPIQGSASEVMRLAMIRLDKKLSEEKNSNSKMLLQIHDELIFEIPKKDEKVMIKLIEKEMTSVAQSDYHSFSTPLTVDINVGGNWGMLH

SEQ ID NO: 135215 - protein, 155 aa, Unknown
  Bacterial polypetide isolated from the Sargasso Sea
MVLEWRQSSKLKNTYSDSLPEHLNPNTKRVHTSFLLAATTTGRLASSDPNLQNIPIKTEEGKDIRKAFISEKNKKLISADYNQIEMRILADLADVKELKKAFKNNEDIHSLTASQVFGADIKKIDADMRRKAKAINFGIIYGISQYGLAKQMAYQ

SEQ ID NO: 135216 - protein, 246 aa, Unknown
  Bacterial polypetide isolated from the Sargasso Sea
IRKSFIAEKGFSLVSADYNQVEMRILAEIADVKELKKAFINSEDIHSITASQVFNKKIKDVDSDMRRKAKAINFGIIYGISQYGLAKQIGVSNVEAEDFLKSYFTKFPEIKDYMNETIKFCRKSGYVNNIFGRRTHLNGINDKNYNIRNFQERAAINAPIQGSASEIMRLAMIRLNEKFLQYDTDITKILLQIHDELIFEIKTSNINEITKLIREIMISVESSDHHKFTVPLLIDLNSGENWGMLH

SEQ ID NO: 135217 - protein, 883 aa, Unknown
  Bacterial polypetide isolated from the Sargasso Sea
MSAIKKTDHFYLVDGSGYIFRAYYALPPLSRKSDGLPTGAVSGFSSMLFKLLEEVRSDDSKNKPTHFAVIFDSARKNFRNEIYKDYKANRSEAPDDLAPQFEYIRKAVKAFNLPSIEQINYEADDLIATYAKQIISLGAKVTIISSDKDLMQLVSNKIRLFDPMKSKVIGEKEVIEKFGVKPNQVIDVQSLAGDSSDNIPGVPGIGIKTASELINKFKTLENLIKKAGEIPQKKRKETLINNKDLALISKKLVTLKDDVPIKTKIDTFDIKKVDKNKLYEFLREMEFNRLLSQAISFYGEPEGKVVQQNTKSISKKIDVAKYKTINKINDLDKLIKKLEDKSLISVDTETSSLNPLDADLVGISVCYSPNEAYYIPVKHKTENCLNKRVIIEKIKKILEDKSIKKIGQNIKFDNLILKKEGININPIEDTMLLSYTLDAGLNRHNLDTLSEIHLDHKTISYKDLVGSGKNKLIFEEVDLKKSTEYAGEDADVTFRLFDILKGRLDEEKLNIIYETFEKPLVQILSQIEMNGIKINTDYLEKLSKNFANKIKKIEKEIFKIAKKEFNIGSPKQLGEIIYNELKIANLKKTKKGSLATNANILEDLAFKGHKFPRLVLDWRQLSKLKNTYTDALQDHVNSKTNRVHTSFLLAATNTGRLASSDPNLQNIPIKTDDGREIRKAFIAEKNNILISADYNQIEMRILADLAEVKELRKAFLNNEDIHALTASQVFAVPIKKVDDNLRRKAKTINFGIIYGITQYGLAKQISVSNQEALDFINSYFKKFPEIKDYMEKTIKFCRKNGYVNNIFGRRIHLRGINDKNFSVRSFQERAAINAPIQSSAADIIRLAMIKIDDLINSNKMHKAKMLLQIHEELVFECQKSNQK

SEQ ID NO: 135218 - protein, 291 aa, Unknown
  Bacterial polypetide isolated from the Sargasso Sea
MSLKSENSKKPILLLVDGHSLAFRSFYAFSKGIDGGLTTKEGFPTSVTYGFLKSLLDNCKNISPEGVCITFDTEKPTFRHELDPNYKANRDVAPDVFFQDIEQLEIILEESLNLPIFKSPGYEADDLLGTIANDASSKGWCVNILSGDRDLFQLVDDQKDIYVLYMGGGPYAKSGNPTLMNENGVKEKLGVAPERVVDLKALTGDSSDNIPGIKGVGPKTAINLLKENDTLDGIYQALDKIQQNNDKKYKGFIKGSVVEKLRNDKHNAFLSRDLAKINTEVPLILSNGYEL

SEQ ID NO: 135219 - protein, 550 aa, Unknown
  Bacterial polypetide isolated from the Sargasso Sea
MYRKWRPQSFEEISGQDHISSTLKQAILQQRISHSYLFCGPRGTGKTTTARVLSKAINCLAIEEGNPCNNCIMCTSSNEGKFLDTIELDAASNRGIDEIRSIKEKINFLPTEGSKKVYIIDEAHMLTDQASNAFLKTLEEPPSHVTFILCTTEPQKILPTILSRCQRYDFRKITHPIVVQRLQSIIESEGIVAENSSLEVIAQSCDGSLRDAETILEQMIVSTNGNLTRADVESFIGISNPSQWVELVNLILNHDTAGSIRLVNESLSLGIESSSIHKNVMNLLRSVMLYQLDPSLLQTSIYNLESDIKPLANRANNSQIIQYLSLWNEVSFKNTESGILLLELLIVKLTTTNSPEVVHHNQTPEASPVPKNVTTTSAKEESKETRASQETKPYVTKEYVSQEQPNTNEGSGSNHTIPKPTEVNSESELLSTWNEIIRSLGRQKGEKFNLGALLRDCDKTSLEIVDGKMTLYFKNRANFERMEEEMSSPISYNKVSDTFKKHLNQDVEINLDIINNNGTQKTSSNALQNSPLVRVAMGMGAHVVQEKSDE

SEQ ID NO: 135220 - protein, 369 aa, Unknown
  Bacterial polypetide isolated from the Sargasso Sea
MDFRVSREAFLRVLTHVSSIVDSRSTIPILSNIYIKCDNNQIEIRSTDMDISIREFVSTDSSKNGEATVNSRILTDIIRKTKKNSIVKCKLEGNRLIINSDNSVFELNALTADEFPKFVPLDPTNSFELSIPQIKRLFNKTKFAISAEETRYYLNGIYFHTVTNGANSTLRCVATDGHRLAKTELDLANVINISGIILPRKFILQLDRMLGDFEGKVKIICTDTQVSLEADNFIIISKLIDGTFPDYEKVIPVSNDKLLQVEAEPFFNAIDRVSTVNQDKTPTVKLQFENNSIKIMATSTDSNKGDEEVAANYAAEGLEILFNSKYILDLQDVIEGDTMILELLNQSSPVIVKDPKDSTSLYILMPMRI

SEQ ID NO: 135221 - protein, 533 aa, Unknown
  Bacterial polypetide isolated from the Sargasso Sea
DKDKLYKFLREMEFNRLLSSVISVYGEPELSKNNLNIKPKSDFLEINKKNYFLIKNIEELDHWINEAEQEGELAIDTETSSLDANQADLVGISLSSKIGKACYIPVGHNSKNSLQKNLVIKKLKPILEDKSVKKIGQNIKFDFIVLYRQGINMNSMEDTMLMSYVLDAGKNRHNMDTLSEIHLNHKTISFKELVGSGKNQISFKEVELSKAMEYSAEDADVTYRLYKIFNESLKLEKLTNIYELFEKPMIKILANMEMSGVKIDSKFLKKLSIKFEEKLKNLEKKIFKISKKEFNIGSTKQLGEIIYNDLKITSLKKTKKGSFATSASVLEDLAFKGHEFPKLILDWRQISKLKNTYSDSLPEHINPNTNRVHTSFMLAATTTGRLASSDPNLQNIPIKTEDGKNIRKAFIAEKGFTLISADYNQIEMRILADLADVKELKKAFKNNEDIHSLTASQVFSTDIKKINHDLRRKAKAINFGIIYGISQYGLAKQIMVSNNQAEEFLSSYFLKFPEIKKYMNETINFCRKSGYVK

SEQ ID NO: 135222 - protein, 280 aa, Unknown
  Bacterial polypetide isolated from the Sargasso Sea
VHTSFLLAATNTGRLASSDPNLQNIPIKSDDGREIRKAFVPEKNNILISADYNQVEMRILADLANVKELKKAFTNNEDIHSLTASQVFDVSIKKVDSNLRRKAKAINFGIIYGITQYGLAKQISVSNNEALEFINSYFKKFPEIKEYMRSTVKFCQKNGYVNNIFGRRIHLRGINDKNFAVRSFQERAAINAPIQSSAADIIRLAMIKLNGLIKSKKLDKAKMLLQIHDELVFECQKNHQKEVEKILKKTMESVSSSEHHMFSIPLDVNINSGNNWDEAH

SEQ ID NO: 135223 - protein, 149 aa, Unknown
  Bacterial polypetide isolated from the Sargasso Sea
MIALVQIPPKTRPRLFLVDAYALIYRSYFAFIKRPLMNAAGENTSAPFGFTRFLLDIREQFEPDYLAVVFDAGDSFRDQEYPEYKATREKMPDDLRDSLGRIRQIVEAFNDPVVELEGYEADDVIGTLARQATEQGLEAVIVSGDKDFY

SEQ ID NO: 135224 - protein, 794 aa, Unknown
  Bacterial polypetide isolated from the Sargasso Sea
MTAFEQGFILTRHWRDTASGIEIEFWLATEHGPRRVRLRPQEAVAFIPAEQQALAERALAGEREAELRPLALRDFRQRPVVGLYCKRYRHLSGLQKRLAAAGVDVYEADVQPPDRYAMERFITACVQFRGQPDRDGTLTGAELKTATGYRPALRCVSLDIETSVHGELYSIALEGCGQRQVYMLGPPNGADSDEANAIDFRLDYCDSRPAMLARLNEWFDEHDPDAVIGWNLVQFDLRILHAHSEQYGIPLKLGRGGSVLDWRAHGQQPDHFFAGAAGRLILDGIDMLKSATWTFPSFSLEYVSQALLGEGKSIDNPYQRMDEIQRRFDHDKPALARYNLKDCELVTRIFDKADLLSFALERASVTGLAADRTGGSVAAFTHLYLPRMHRLGYVAPNLGDVTGQNSPGGFVMDSRPGLYDSVLVFDYKSLYPSIIRTFLIDPVGLIEGLANPGDDASVPGFLGARFSRTAHCLPDVVRRVWEGRDVAKRQRNAPLSQALKIIMNSFYGVLGSTGCRFFDPRLASSITMRGHEIMHRTRELIEAQGYEVIYGDTDSTFVWLGRAHDDDEAGAKGRALVEHVNRWWQTHLRETFGLESALELQYERHYRRFLMPTVRGAEEGSKKRYAGLAAAADGGEDLVFKGLETVRTDWTPLAQQFQRELYRRVFSREPYQDFIRDTVRRTLAGEFDDQLVYRKRVRRPLREYERNVPPHVRAARIADEFNQAQGRPLQYQRGGWISYVMTTAGPEPLETMRSPIDYAFYLSRQLQPVADAILPFLRDDFERVISGQGQLFQE

SEQ ID NO: 135225 - protein, 289 aa, Unknown
  Bacterial polypetide isolated from the Sargasso Sea
DHINKNTNRVHTSFLLAATNTGRLASSDPNLQNIPIKTDDGREIRKAFISEKNNVLISADYNQVEMRILADLADVKELKKAFINNDDIHSITASQVFDVSINKVDQNLRRKAKAINFGIIYGITQYGLAKQISVSNNEALEFINSYFKKFPEIKDYMQATVKSCRKNGYVSNIFGRRIHLRGINDKNFSVRSFQERAAINAPIQSSAADIIRLAMIKLHELSKSKKINGAKMLLQIHDELVFECLKSQQIEVEKVIKKSMESISSSDYHIFTIPLDVNINSGNNWDQAH

SEQ ID NO: 135226 - protein, 191 aa, Unknown
  Bacterial polypetide isolated from the Sargasso Sea
AAEVFGVSIDDVSQDQRRSAKAINFGLMYGMSAFGLTRQLGIPRAEAQEYLDTYFARYTGVRDYMDNIKAKAKEDKFVETIMGRRLYLNEINAANGLRRQAAERAAINAPLQGSAADIIKKAMLDIDQLLLNEMQEVKMIMQVHDELVFECPKENADKVMKMMKDTMEQTVELNIPLIAEAAIGNNWNEAH

SEQ ID NO: 135227 - protein, 308 aa, Unknown
  Bacterial polypetide isolated from the Sargasso Sea
MKISVEKDILLKSLNHIQSVVERRNTIPILSNVKIIANNEGISLTATDLDLEIIESLDKANTIEDGEITTSAHTLYDIVRKLPDGSSLDIKTKDNDKLALSCGQSNFELSTLPIEDFPEMSSGEMPCNFVIDSEEFANMIDKSKFAISTEETRYYLNGIFFHAINNTLRSVATDGHRLACIQANLPSGADDIPSIIIPRKTIGEVRKLIEDIEGNINLFISETKIRFEVTNISLTSKLIDGTFPDYERVIPKTNTKIMTVKTQDFASSIDRVATISSDKSKAVKFAIKDNSLTLTVINPDAGTAVEKS

SEQ ID NO: 135228 - protein, 178 aa, Unknown
  Bacterial polypetide isolated from the Sargasso Sea
MSGVQERFGCRPDQVIEVLGLMGDNSDNIPGVRGVGEKTAIKLIQQYGSIEKVYENLEEVPGKSLKSKLEEGRDQAMLSRELVTILREVPLEITLEDLQLDQSPLSENKEFLDLLQELELNTLLRRIKEGSVSSQNQDSSGNPQQSKNKPLSQAVQLELLDEPSARTQKAILSHTIET

SEQ ID NO: 135229 - protein, 454 aa, Unknown
  Bacterial polypetide isolated from the Sargasso Sea
MIPIEDLIGEGKNQITMAEVELDQSGYYACEDADIALQLTNIFLKELKNAGLDHFFNKIELPLIDVLLNMEYEGVYVDKKMLENMSIDLGKKIKNFTKEIIKQAGTEFNINSTQQLAAILFDKLKLTKIKQRSTAEPVLEALRKEHSLPNLILEYRKLSKLMNTYVDSLPLLINKNTGRIHTTFAQTIASTGRLSSSNPNFQNIPIRTEEGREIRKAFKAQRKDWLILSADYSQIELRIMAHLSKDPSLIKSFNNNEDIHTRTASDVYGVNLTEVLPDMRRTAKVVNFGIMYGAGPFRLSQELGIPRNEAQVIIDTYFERYIGIRNYMDNTIQNAEKHKYVETLLGRRRNIWNIDSENRMQREAAKRMAINMPIQGTAAEMIKLAMLDINKTLKNDNYQSRMILQIHDELLFESPKDEISELEKMVKDKMVNAMPLEVPLVVDCGQGISWFDAH

SEQ ID NO: 135230 - protein, 506 aa, Unknown
  Bacterial polypetide isolated from the Sargasso Sea
MKQALYRKYRPTKLSELVGQEEAVSLINNQIENENLGHAYLFLGPRGVGKTSLARIIALQLGCDPIFDISEIDAASHNKVDDIREMNESVNFIASSPGKKRVFILDEVHMLSNAASNAFLKTLEEPPEHIIFILATTEPERVLETIKSRTTQIVFKKITEDEIIKTLKKIGKKEKIDLDVEIIKMIANSSDGSLRDAINLFEQTHNTFGAKASIDDLFSLLGKLSSKDFEIIINAVETQDTGAVLTVIRGAYAKGLQPNDIVDSVSEFFRNLFYLKYLPDDKKLSSLTPNLKKLLEEANKKIPAKQLVRILDLIDEINTVISTTSSAHLKLELFMMKIIKPEFGSDVKSIGYRVDLLEGKLITDVKPKKEEKPEVKVEEEKIEVPKSKKNIKKKNKESLENFDVYWPKILEELREKLSSRKFSYLTAVSPEVESNGALNLFVDKDNEFLLKELEKSEEVIDLLISEVAEKMGIDVNIKILLSEKSKSGDSKGLDAAQEVFEVEDLN

SEQ ID NO: 135231 - protein, 387 aa, Unknown
  Bacterial polypetide isolated from the Sargasso Sea
MAYTVLARKYRPQKLSELIGQDTLVKVLTNSFKLNRIAHSFLLTGSRGIGKTSTARIIAKGLNCLASSANNLPTIDPCGECESCISITQSRHIDVIEMDAASRTGVADVREIIDNIDYKTVYARYKIYIIDEVHMLSNSAFNALLKTLEEPPAHVKFIFATTEILKIPTTIISRCQRFDLERIDNHLINKHLSDVCNKEKIIFSEGALKMISNVSEGSVRDALSILDQAIIYSDGRLEANHIIEMLGLLDQNRSFKLFELIFEQKNSEMLSELEKEIKDGIDPFSILNGLMDINWKLMVSKIKKEEFYTYDLSDENLELLQNFSNKISTSILSRCWQILLKIHDEMKYAPDILSTLQMGLLRLSFFSNSPDQDELLKILNNLKNPSE

SEQ ID NO: 135232 - protein, 601 aa, Unknown
  Bacterial polypetide isolated from the Sargasso Sea
MAGAKVTIISSDKDLMQLVSKEIRLFDPMKSKVIGSKEVHEKFGVKPSQVIDVQSLSGDSSDNIPGVPGIGIKTAAELINKYKNIETLLNRAEEIPQKKRKQTLIENKEAALMSKKLVTLKNDVPVKTKIESFIIKEIKKDKLYNFLREMEFNRLLSQVISFYGEPDKKKENQDLSLSKINTKKYETITDINELKKWVNILKKQKIISVDTETSSLNPIDADLVGISFSYVEGKACYIPVVNKKEKCLTVEQVIKEIKPILEDQSIKKIGQNIKYDNIILKKNKINVYPIEDTMLASYTLDAGLNRHNLDILSEIHLGHKTVSFKDLVGSGKKKVSFTDIDLKRATEYAGEDADVTFRLFKLFKQRLDKEKLTKIYEIFEKPMVKVLSEIETNGVKVDKEYLKKLSKNFNNKILKIEKEIYSLAKKEFNIGSPKQLGEIIYNDLKIANLKKTKKGSLATSATILEDLAFKGHKFPRLVLDWRQLSKLKNTYSDALQNHINLKTKRVHTSFLLAATNTGRLASSDPNLQNIPIKTEDGREIRKAFIPEKNNILISADYKQIEMRILADLADVKELKKAFVNKEDIHSITASQVFDVSIGKVT

SEQ ID NO: 135233 - protein, 762 aa, Unknown
  Bacterial polypetide isolated from the Sargasso Sea
MTRHGRDVRGRNGHGERTEIVMWLWSEQGPVRLVVPGQEPVFFLPQSHMEEAAELFKGAGVSGRFRRLPMHTFDGRAVVGCYFATLSAFHRAIELLLIRGLEHFEADIRLPERYLMERFITAGVRFEGRTLKKGGKHGYWEVNEARCAPQAVTPTLSWVSLDVECAMDGALFSVGLYSEDDARVIMIGTPEADADSWSTQVEWVADESALLSALERWFVRHDPDLVIGWNVVNFDFRLLLRRAELNKRRLRLGRGHELCFWRSSRNDPQSGSVIIPGRMVLDGIDTLKSATWQFPSYSLDAVASELLGRGKDIEDVANRGEKITELFHSDKEALARYNLEDCRLVWEIFDFCHLIPFAIERASLTGLELDRVGGSVAAFTNLYLPRLHRGGYVAPNLPADGGLASPGGYVMDSKPGLYRRVLVLDFKSLYPSIIRTFCIDPMGLIEGLQHPDHAIAGFRGAMFSRERHFLPDLIATLWAARDRAKAASNKALSQAIKIIMNSFYGVLGSGGCRFYDPRLASSITLRGHGIMQQTREWIEGEGFEVIYGDTDSTFVHLGRDASPEQADEIGRRLAKMINDNWAALITREFNLPSYLEIQYETHYRRFLMPTIRGLEKGSKKRYAGLVAGHQAGEEEQLVFKGLESVRTDWTPLAKAFQTRLYEMVFHDQDPSGYVRTMVDETRAGQHDELLVYRKRLRQKLEEYQKNVPPHVRAARLADEENLRRGLPQRYQHRGSIAYLMTLNGPEPLEYRRSAIDYEHYID

SEQ ID NO: 135234 - protein, 293 aa, Unknown
  Bacterial polypetide isolated from the Sargasso Sea
MDFQPNVILIDGTSYIYRAFHALPPLTTSAGKPTGATRGFAAMLNKLIKTYPETPMVMVFDAKGKNFRNDYYEKYKANRPPMPNELRHQIEDIKKLCGLFNFTVQEVEDVEADDVIATLVSNFSEDKILISSPDKDLTQLVNENVIQHNSMSDIFFDENGVKEKFGVFPNKVAELLALVGDKSDNIPGITKVGEKTAAKWLNEYGSLDEVIKNAENITGKVGENLREEKNVLQRNFFLVSLKNDINLGLQKSDISTPKANSSGLQEFYRSLEFNTFIEHEDNKSAGVEYKSVK

SEQ ID NO: 135235 - protein, 413 aa, Unknown
  Bacterial polypetide isolated from the Sargasso Sea
MSGVQERFGCRPDQVIEVLGLMGDSSDNIPGVRGVGEKTAIKLIQQFGSIEKVYENLDEVPGKSLKSKLEEGRDQAMLSRELVTIHREVPLEIALEDLQLDQSPLSENKEFLDLLQELELNTLLRRITEGSVSSQKQDSSGSPEQAKNKPLSQAVQLELLDEPSARTQKAILSHTIETEEEWNSLRKKINENPKVSLALYTREDHQLDFQIQGMALSVEPGEAYFISHHHFKNNSNIWSKDLQVVLEDSGIAKLVYDLKKTLHSLNAEGIGLKGVEGDVMIAAHLSDPLSRRYDLDFLIGRRLNRERSSADAEILPDRKVSCEDASNILELHDLFEKQLKQDEMINSYRYIEIPLAETLARIEWSGVRVDTEKLEEISQDFEERLDELRERIHEQAEETFNVNSVVELQNVLY

SEQ ID NO: 135236 - protein, 90 aa, Unknown
  Bacterial polypetide isolated from the Sargasso Sea
PERNAINAPIQGSAADIIKIAMIRVHEKFKEQSLKSKMLLQVHDELVFDVYKSEKNIVKTIVKDTMESAVKLLVPLKIDLEFGKNWLEAH

SEQ ID NO: 135237 - protein, 422 aa, Unknown
  Bacterial polypetide isolated from the Sargasso Sea
RHQIEDIKKLCGLFNFTVQEVEDVEADDVIATLVSNFSEDKILISSPDKDLTQLVDKNVIQHNSMSDIFFDENGVKEKFGVFPNKVAELLALVGDKSDNIPGITKVGEKTAAKWLNEYGSLDEVIKNAENITGKVGENLREEKNVLQRNFFLVSLKSDINLGLQKSDISTPKANSSGLQEFYKGLEFNTFIEHEDNKSASVEYKSVKSLEELEKLSSQFNNCDYFSFDTETTSLDVNIAQIVGFSFCFESGKAFYVPLEHNESTDLSKDTGIKWLKEILPKNSSKLIGQNLKYDLAVLSKEGIYLESFLADTMLMSYVLNSTASRHNLDALSEYYLNFKTIKYEDVVGKGAKKYKSFADVPIKEATNYAAEDADITLRLYEKLCDLLDAGAQDILKNMEYPLLIVLMQMEKDGARVNTGHLK

SEQ ID NO: 135238 - protein, 420 aa, Unknown
  Bacterial polypetide isolated from the Sargasso Sea
MKYIRKSVKAFNLPSIELLNFEADDLIATYAKQIIKLGAKVTIISSDKDLMQLVSKDIRLYDPMKSKIIGEKEVIEKFGVKPSQVIDVQSLAGDSSDNIPGVPGIGIKTAAELINKYKNLDTLLNKASEIKQNKRRETLLENKDKALLSRELVTLKSNVPVKDELSSFILKDVNKETLYNFLREMEFNRLLSQAISFYGEYGGSLEKRKDDINKKSEINTNNYKSILNETDLDKLIKKLNVKSTISVDCETSSLNPIDAQLVGISFSYEVNEAYYIPVAHKNFKSLSKDIVIKKLKKILEDPSIKKIGQNIKYDFMIFKKYGINLEPVEDTMLLSYTLDAGNNRHNMDTLSEIHLGHKTISYKEIVGTGKKQLNFSDINLKEATKYAAEDADVTLRLYNVLKDRVDKEKLNKIYEVLKNQ

SEQ ID NO: 135239 - protein, 382 aa, Unknown
  Bacterial polypetide isolated from the Sargasso Sea
MASQARRPSYQRRNSMQLVKTERDNLLRPLQTVSGIVERRHTLPILANLLITKNGPDVSFLSTDLELQITTRADFGVGGDSVATTVAARKLLDILRAMPDGQVTLTLNDKRLTVQSGKSRFALQTLAADEFPTVAQAKDYGANLVVPQKTFRQLLGMVHFSMAQQDIRYYLNGMLLVVDGDQLMAVATDGHRLAFSSMKIEGSFARQEVIIPRKTILELQRLLEDIDDTLKIDIAPTQVKFTFGQVELVSKLVEGKFPDFQRVIPKSHKNQFVIGREELQRSLQRAAILTSDKFKGVRCIIEPGQLKIMSTNADQEEAQEELEIAYDGDSVDIGFNVTYLLDVLANLKVDMLQVSLGDASSSALITIPENDEFKYVVMPMRI

SEQ ID NO: 135240 - protein, 502 aa, Unknown
  Bacterial polypetide isolated from the Sargasso Sea
MSNNSKVLALKYRPQVFKDLIGQNIIVETIEKSISQNKIPNAFLFTGIRGVGKTTIARILAKSLNCENSEKNNCLKNKCKNCDEISESRHIDVLEIDAASKTGVDDVRDLIEFSRYGPTSSKFKIFIIDEVHMLSKQAFNALLKTLEEPPVYLKFIFATTEVNKIPVTVLSRCQRFDLSRIKSEELSEFLAKIAEMEKIDINQDVINLISKISEGSVRDGLSLLDRISLTNDGNQKGTISLESAREIFGYFDKEFTINLIEKIFDGDEDKTLDLYRQIYQKGIEPKIFLNGFLEIIYYLKNFKNLERASFSTDLTENNFTKIKEMSEKLDAHTLLLFWQFTIETMDEVNIVNDPNLSIEMFLIRLLYLKGNQTKTDNLSPNQNNKIDNNFEKKKIAINQLKSSSQEKQKKILEENKSMNNLEIKSFNDLVNICNSKKELELKYELETNVNLINFKNGYIEISFNENLKKDFVKILSSKLYEWTNTRWIISLSQNKGQETIKK

SEQ ID NO: 135241 - protein, 208 aa, Unknown
  Bacterial polypetide isolated from the Sargasso Sea
MSKEKLLLVDGSSYLYRAFHALPDLRSSDGRPTGAIYGVLNMLQKLIKSERPDYLSVIFDTPVKTFRHDIFPDYKANRQKTPEDLIAQIEPLHQLIINLGLPLIAVDGVEADDVIGTLALEADKKGIKTLIATGDKDMAQLVTENIHLIDTMKDLRMGPAEVKEKFGIQPDRFIDYLTLAGDTSDNIPGVEKVGPKTAIKWINEYGSL

SEQ ID NO: 135242 - protein, 366 aa, Unknown
  Bacterial polypetide isolated from the Sargasso Sea
MKFTAEKSQIVDSLQNAAAVAERRQTIPILANLRLKTSSGKLEVTATDLEIQIKSYSELLKVEEEGETTVSARKMSELCRSLPDGENVEFKLNEGKLTVSSKNFNGDFATISADDFPELEVNEEQDTADIPSDALKRILTKTSFSMASQDVRYYLNGLLLELSGGTLKGVATDGHRLALSSTTTKEKGLEMSNILPRKAVLELAKLLPPDDSSVQILIGPTYIGVNTDNLCFSSKLIDGKYPDYEKVFPSGEPLPLLIGKETLQSALSRASVLSNEKYRGVRFELSKSSLRLTANNPEQESAEEVLDVDYDGADLEVGFNIGYLIDVLSVLEEESVKFEFYGEDSSCVIKEPSSEEEVYVIMPMRL

SEQ ID NO: 135243 - protein, 362 aa, Unknown
  Bacterial polypetide isolated from the Sargasso Sea
MPEASTKPLLLLVDGHSLAFRSFYAFSKGGEGGLATQDGRPTSVTYGFLKSLLDTGKSLKPEGVAIAFDTAEPTFRHKADANYKAHRDVAPEVFFQDLDQLQEILRQQLDLPLCMAPGYEADDVLGTLANRAADDGWGVRILSGDRDLFQLVDDNRDIAVLYMGGGPYAKNSGPTLIREEGVLGKLGVMPNKVVDLKALTGDSSDNIPGVRGVGPKTAINLLKDNNDLDAVYATLDEVEAEGPKASRGAIKGALKGKLRNDKDNAYLSRKLAEILVDIPLPQEPSLPLSTVNAEGLSSCLEDLELNSLLRQVGGFVAAFSAGGYGANVEAAAPAQPSSRQRPPRTIRDWRRRLGAFPALRPS

SEQ ID NO: 135244 - protein, 315 aa, Unknown
  Bacterial polypetide isolated from the Sargasso Sea
IVNSGEISVPAITFFEIVKRLPSGSDVILSMGDEDTELILKCGRSKFNLSTLRTEDFPILSDKDLSTNFVISAEELSRMIDKTKFAISNEETRYYLNGIFFHKAESNSIKFLRAVATDGHRLAQYDIPLPQGAEEITGIIIPKKTVFELRKVLDDADGDVSVSLNENKIKFSFNNLKIISKVIDGTFPDYTKVIPQNNDKKFKTNNSELKNAIDRVSAVAINEETKSKAIKLTIENNKLNLSVESQSKGSAKEEIDISYSNEKVDIGFNSRYLLDICNEIDGDEIDVNLIDSISPAIILDKTDENLFFVLMPMRI

SEQ ID NO: 135245 - protein, 234 aa, Unknown
  Bacterial polypetide isolated from the Sargasso Sea
MDFRVSREAFLRVLTHVSSIVDSRSTIPILSNIYIKCDNNQIEIRSTDMDISIREFVSTDSSKNGEATVNSRILTDIIRKTKKNSIVKCKLEGNRLIINSDNSVFELNALTADEFPKFVPLEQTNSFELTISQIKRLFNKTKFAISAEETRYYLNGIYFHTITNGPKSTLRCVATDGHRLAKTELDLTNVINISGIILPRKFILQLDRILGDFEGKVKIICTDTQVSLEADNSL

SEQ ID NO: 135246 - protein, 525 aa, Unknown
  Bacterial polypetide isolated from the Sargasso Sea
IAFPDYKAQRAETPEELKPQFERVRQMMETFAVPTFSLDGYEADDLIGTISAQAEEHGLETIILTGDRDTFQLISPYTKVDLGSNARDRKLYGESELIARYNGLTAEQQPDFKALLGDNSDNIPGVPRVGEKRAIALLNSYVNLEGIYGNLESIHPPSVKTSLTESKNIAFTNRELMTIDRQVPITVDFESALFGGYDMEQVITLLKELEFNSIISRIPGTKQVINSDMAISKPVANTDTVYTCVDNQEKFDSMMLSLQKAHKIAFDTETSDLNPMLASIVGLSFSTNAGSAWYIPLGHSEGLQLSLEYVIGQLKPIFENTDKQMCAHNANYDLMILSKYGIHVTNLTFDTMVGAHLLGNSSLGLKNLSQTLLGIEMQPITELIGTGKKQISFSDVSIEEAYPYAAADADCTLQLWNHFEPEIDSSFAKNIMSNIEMPLIPVIIEMQRNGITLEKDNLESMSEELQSDMEILHESIVSHVGHSLNINSPSQLSQVLFNELDLPKTKKTKTGYSTDANSLEFLKTA

SEQ ID NO: 135247 - protein, 361 aa, Unknown
  Bacterial polypetide isolated from the Sargasso Sea
MIFRPDVILIDGSSYIYRAFHALPPLSTSKGKPTGATRGVASMLRKLISTYPGVPMVMVFDAKGPTFRSDYYQAYKANRPSMPNELRVQIDDIKKLSKLFNFSVQEVAGVEADDVIATLAERLGKKLKVLISSPDKDLTQLVKKNVIQHNSVSNEFFNEKYVEEKFGVLPNKIAELLALVGDKSDNIPGITKVGNKTASKWLNQYGNIDNLLAKSNEVTGVVGENLRNEKDILQRNLFLVSLKKDLELNLEIDSLNIPEATNDELKDFYKDLEFNSFIEDKAEKKVSKNYISIKNIKQLEEIEKELDNCKYFSFDTETTSLIAHEAELVGFSFALKSNTGAYVPIRHNEQTDLDADETTKW

SEQ ID NO: 135248 - protein, 378 aa, Unknown
  Bacterial polypetide isolated from the Sargasso Sea
MQAVTQRRNSMQLVKTERDTLLRPLQTVSGIVERRHTLPILANLLITKNGSDVSFLSTDLELQITTRADFGVGGDQVATTVAARKLLDILRAMPDGQVTLSLADKRLTVQSGKSRFALQTLAADEFPTVAQAKDFGATLTVPQKSFRQLLGMVHFAMAQQDIRYYLNGMLLVVDGDQLMAVATDGHRLAFSSMKLEGGTFGRQEVIVPRKTILELQRLLEDIDDTVTIDIAQTQAKFTFGQVELVSKLVEGKFPDFQRVIPKAHKNTFEIGREELQRSLQRAAILTSDKFKGVRCIIAPGQLKIMSTNADQEEAQEELEIAYQGDTVDIGFNVTYLLDVLANLKVDTVQVSLGDASSSALITVPENDEFKYVVMPMRI

SEQ ID NO: 135249 - protein, 655 aa, Unknown
  Bacterial polypetide isolated from the Sargasso Sea
GDSSDNVPGVAGVGVKTAVKLLKKYGDLDKVFENVDKITNKRVHNGLINCKDDAYLSKELVTIIKDVELKHSLDDFMIKSFDNNVLRKKYEELEFYALLKQLVGTNDELQNDKIDKKYITVKSLKSLKQLIKDLEQCDILSIDLETTSVDPMTAEIVGISLSLQPDTGFYIPILYPEKKNNNFGDDDLNVALALLKEMLENSKVKKVGQNIKYDSLIFSRFGINITGIYFDTMIAAHILNPSARSYKLDTLSLEYLNYSMIPIEDLIGKGKDQITMDHVSLDKVSYYASEDADISLQLAKLFIPLLEENNQMDFFQKIEMPLINVLMQMEKEGVYVEQNILDEMSRNIGDRLDKLVKDIYKMSGSEFNINSTQQLAVILFDELKLNQIKKRSTAENILKELANDHELPELILEYRKLNKLKNTYVDSLPSSINKETNRIHSTFNQTIASTGRLSSTGPNFQNIPIRTEEGREIRKSFIAQKNNWKILSADYSQIELRIMAHLSKDTELLDAFNNNIDIHSRTASLIYNLSIDKIIPEMRRTAKVVNFGIMYGAGAFRISQELGISRSIAQNIIDEYFNKYSGIKFYIDQILDKARKDKYVETIFGRRRPIWDADSDNALKRKASERIAINMPIQGSAAELIKIAMIDIYKKLAKE

SEQ ID NO: 135250 - protein, 366 aa, Unknown
  Bacterial polypetide isolated from the Sargasso Sea
MKFTAEKSQIVDSLQNAAAVAERRQTIPILANLRLKVISGKLEVAATDLEIQVKAYCELLNVEEEGETTVSARKMSELCRSLPDSENVNFELKDGKLTVSSKNFHGDFATISADDFPELEVNEDQTNTTVMSSALKRILTKTSFSMASQDVRYYLNGLLLEHSSGELKGVATDGHRLALSVSETKGGGPEMRNILPRKAALELAKLLSPDETPIEMLVGPTYIGIKTDNLNFASKLIDGKYPDYEKVFPSGEPLPMVVGKETLQSALSRASVLSNEKYRGVRFELSKGALKLTANNPEQESAEEVLEVDYNGSDLEVGFNIGYLIDVLSSLEEESVKFEFYGEDSSCVIKEPSSENEVYVIMPMRL

SEQ ID NO: 135251 - protein, 409 aa, Unknown
  Bacterial polypetide isolated from the Sargasso Sea
MSNKSKVLALKYRPQVFKDLIGQKVITETLINSLKIKKISNAYLFTGIRGVGKTTIARILAKSLNCKNGFEKICEENLCDNCKSITDSNHLDVLEMDAASKTGVDDIRDLIEFSRYGPSIAKFKIFIIDEVHMLSKQAFNALLKTLEEPPEYLKFIFATTEIRKIPITIISRCQRFDLSRIKAEELFNYLKIVSNKENGNITDEALKLIVKMSEGSVRDSLSLLDRAIATKANDSEINLEYAQKIFGYFDRSKLIELIKLIFSGKEQETLKFYRNIYEQGVEPKTFLNDFLEILYYFKNIQFLNLENSNFTLNNAEFNEIKNVSNSLDKKDILLFWQFTIKTLKELDIVSDQNISIEMFLIRLLYLVDNSSVKEKNEMKGDIEVKTQTKILGSIENTEEDAIKFGGKQK

SEQ ID NO: 135252 - protein, 449 aa, Unknown
  Bacterial polypetide isolated from the Sargasso Sea
ATGPRIFAKTELLSFLLERATVTGLPADRSGGSVAAFTHLYMPRMHRQGYVAPNLGDVAGAASPGGFVMDSRPGLYDSVLVLDYKSLYPSIIRTFLIDPLGLVEGMLNPADDQSVPGFLGARFSRTRHCLPSIVGQVWQAREAAKRAHNGPLSQALKIIMNAFYGVLGSTGCRFFDPRLASSITMRGHEIMHATRELIEAQGYEVIYGDTDSTFVWLKHAHSEEDASRIGRALVEHINAQWRQDLQARFGLESALELQFERHYKRFFMPTIRGAEEGSKKRYAGLTVLPDGSENIVYKGLETVRTDWTPLAQQFQQELYGRIFRQQPYRDYVRDYVRDTLAGKLDDQLVYRKRLRRSLGEYERNVPPHVRAARVADEFNRQQGRPLQYQNGGWISYVMTTAGPEPLETLRSAIDYEHYLTRQLQPVADAILPLLRDDFTTLMSGQEQLF

SEQ ID NO: 135253 - protein, 177 aa, Unknown
  Bacterial polypetide isolated from the Sargasso Sea
KAKAINLGIIYGISPYGLAKQLSISNTEGKIYIEKYFSRFPKIKDYMNHQIEFAKVNSYVKTMFNRKCNIKGINDKNFAVRGFAERQSINAPIQGTAADIIKLAMIEIHKKIKSKEINAKMLLQVHDELVFEIEEQNLKDSILNIKKIMETAHLKYKDFNVPLIVECGYGQNWGESH

SEQ ID NO: 135254 - protein, 400 aa, Unknown
  Bacterial polypetide isolated from the Sargasso Sea
DEESGNEKKGPSYAGGLVLEPKKGLYDTHVLVLDFQSLYPSIIQEYNICYTTVKRHFTEEDESSSIELPPPISHDRDFAVLPAVIARIVQSRREVKGLMGRENDPGRKKQYDLRQLALKLTANSMYGCLGFAQSRFFAEPIAALITSQGRKILQHTVDIASGKCDLDVIYGDTDSIMVNTKSHNLVESKSLGGKLIRFVNKEYRKLVLEEDYVFRSMLLLKKKKYAAMKVVNGPNKTSTYKLEMKGIDIVRRDWAPIVKDLGKQTLEALLDVDGDLEERVGEIHDGLRRIRMDMIENDVPMSKYVITKQLTKAIEEYPDAKHQPHVMVAKRRAEAGKRDGTKAGETVPYIIALQSDATLEEIAAGKGGGSGGKGLAERAYHPEEIVEMGLKVDLHYYCLS

SEQ ID NO: 135255 - protein, 247 aa, Unknown
  Bacterial polypetide isolated from the Sargasso Sea
MKFITEKSQIVDSLQNAAAVAERRQTIPILANLRLKTVNGKLEVTATDLEIQIKTYSDLIGIQEEGETTVSARKMSELCRSLPEGENVNFSLSNGKLTVSSSNFHADFATISPDDFPEIEINEEQTPITVESSVLKRLLSKTSFSMASQDVRYYLNGMLLEIEGNKINGVATDGHRLAFSSAITNAADLDVRNILPRKAVLELSKLLSPNEGTVELLIGASYVDVRSENLSFSSKLIDGKYPDYNKV

SEQ ID NO: 135256 - protein, 425 aa, Unknown
  Bacterial polypetide isolated from the Sargasso Sea
KCLKKEAVIKKLKKILEDPSIKKIGQNIKFDFIVLYKNGITLSSMEDTMLMSYVLDAGKNRHNMDTLSEIHLGHRTISFKDMVGTGKKEVNFSEVELDKAKDYAAEDADVTFRLYKKFIKNLKSERMINIYEIFEKPLIKILAFMEIEGVEIDSKFLKSLSSKFEKKIQKLEKEVFKISKKKFNIASPKQLGEIIYNDLKIAGLKKTKKGSFATSASVLEDLAFKGHEFPKLILDWRQVSKLKNTYSDALPEHLNPNTKRVHTSFLLAATTTGRLASSDPNLQNIPIKSEDGKDIRKAFTAKKGHLLISADYNQIEMRILADLADVKELKKAFKNKEDIHSLTASQIFNIDIKKVNQDHRRKAKAINFGIIYGISQYGLAKQINVSNYEAEEFLNSYFAKFPEIKVYMDNTIKFCRRSGYVNNIF

SEQ ID NO: 135257 - protein, 366 aa, Unknown
  Bacterial polypetide isolated from the Sargasso Sea
MKFITEKAQIVDSLQNAAAVAERRQTIPILANLRLKTVKGKLEVTATDLEIQIKTYSDLIEIHEEGETTVSARKMSELCRSLPEGENVNFSLSNGKLTVSSSNFHADFATISSDDFPEIEINEEQTPITIESSVLKRLLSKTSFSMASQDVRYYLNGMLLEIEGNKINGVATDGHRLAFSSATTNDADLDLRNILPRKAVLELSKLLSPNEGTVELLVGASYVVIRSENLSFSSKLIDGKYPDYNKVFPTGEPLPLEISKEILQSALSRASVLSNEKYRGVRFQLSEDKLKLTANNPEQESAEEEVDVIYKGSELEVGFNIGYLLDVLNSIDSETVSFEFYGEDSSCIIKEQNSEDDVYVIMPMRL

SEQ ID NO: 135258 - protein, 788 aa, Unknown
  Bacterial polypetide isolated from the Sargasso Sea
MTRHAITRGSTLVLQYYLATVSGPVLVELPGSEYICFCHQSDMAALQLQTPGLALRFVPLMLKSFKRQSVAAIYAQSSSVFRHLQRIATDAGIPLFESDIRPEQRFLIERFVALDVAFLGYQVSNVSLQDRLPVFSAIRAKAVAPQPEIKLRSISLDFECSFDGLLYSVALYGRDAQSQLYEKVIMVGEPQPDAAIYIEWVNDEAALIHRLIAWFTEFDPDVIIGWSVVTFDLALLYRRALLHRIPLRIGRGGALLEWKVENKFRPETLSLPGRVVLDGIDWLKAAFYQFERFSLEFVAQALLGEGKAIHDVENRAQEIDALFAENKQGLAHYNLTDSRLVWDIFEHTQLWDFALARAELTGLELGRVGASVAAFNHLYLPHLHRTGFVAPAEPASQGIESPGGYVMDSVPGFYQHILVFDFKSLYPSIIRTFLIDPKGLIEGLDNEEHILGESEIVPGFLGARFSRHQPILPKLIQNLSEQREKAKREANAPLSQAIKIIMNSLYGVLGSQGCVFHDAKLASSITMRGHQIMKQTRAWIEEMGYQVIYGDTDSTFVYLGSDPDLGDINALGKQIAARINQQWQSKIVKEFQLESFLELQFERHYEQFFMPTLRGSEEGSKKRYVGAWRNRNGGLEITFKGMEQVRSDWSPLARKVQAELYERMFNQRDISGYLAGVISELQTGKRDAELVFSKRMRRNLEEYTAKSSPHVKVARQLCELTGKVSYGKRGAQIDYVITVNGPEPVSHRSSIIDYQYYVDKQICPIAEPIFSIMKLNYTDIVSKQLLLI

SEQ ID NO: 135259 - protein, 810 aa, Unknown
  Bacterial polypetide isolated from the Sargasso Sea
MNPPESLAYDTAAPVSVQGRVLTRHAITRGATLVLQYYLATVSGPVLVELPDSEYICFCHQSDMAALQLQTPGLALRVVPLTLKSFKRQSVAAIYAPSSSVFRHLQRIATDAGIHLFEADIRPEQRFLIERFVALDVAFLGHFVGKVGIDGQLPVFSAIRAKAVAPQPAIKLRSISLDFECSFDGLLYSVALYGRDAQSQPYEKVIMVGEAQPDAAIYIEWVNDEAALIHRLIAWFTEFDPDVIIGWSVVTFDLALLYRRALLHRIPLRIGRGGALLEWKVENKFRPETLSLPGRVVLDGIDWLKAAFYQFERFSLEFVAQALLGEGKAIHDVENRSQEIDALFTENKQGLAHYNLTDSRLVWDIFEHTQLWDFALARAELTGLELGRVGASVAAFNHLYLPHLHRAGFVAPAEPASQGIESPGGYVMDSVPGFYQHILVFDFKSLYPSIIRTFLIDPKGLIEGLDNEDGSALDEPETVPGFLGARFNRHQPILPKLIQNLSEQREKAKREANAPLSQAIKIIMNSLYGVLGSQGCVFHDAKLASSITMRGHQIMKQTRAWIEEMGYQVIYGDTDSTFVYLGPEPDLSDINALGKQIAARMNQQWQSKIAQEFQLESFLELQFERHYEQFFMPTLRGSEEGSKKRYVGAWRNHSGALEITFKGMEQVRSDWSPLARKVQAELYERMFNQRDISGYLADVIGELQAGKRDDELVFSKRIRRNLDEYTAKSSPHVKVARQLCELTGKASFGKRGAQIDYVITVNGPEPVSHRSSTIDYQYYIDKQIGPIAEPVFSIMKLNYTSITSNQLLLI

SEQ ID NO: 135260 - protein, 633 aa, Unknown
  Bacterial polypetide isolated from the Sargasso Sea
MSYQVLARKWRPQHFGQLVGQEHVKTALTNALNHNRLHHAYLFTGTRGVGKTTIARIFAKSLNCETGVTSTPCGVCSACVEIDQGFFVDLLEIDAASRTKVEDTRDLLDNVQYAPSRGRYKVYLIDEVHMLSRHSFNALLKTLEEPPPHVKFLLATTDPQKLPVTVLSRCLQFSLKALSPEQIKQHLSYVLAQEGIPAAEDALALLARAAKGSLRDSLSLTDQAIAQSNANITVPLVRDMLGYLEQQWAELLLAAVINRDLAALKQHLDQLVQQHSHFAHVLDDMLALLHLAALSQFNWQAADLVTEHSAFVQQLAEQQSPEQLQLFYQLLISGKKELAFAPEPRIGLEMALLRAVAFVPGAADTTPAMRASAPVSHAAELKAKFNLPETTAKEPEPELHMAASLPSEPEVVVETLPEQLVPAEVAVTQPSAPAGIAASILARRGIKVDAVSADRAVENQTEKKSEPVAAVAKAAEPAAIQRTQAAPAAVHQPLLQQQPVLQQQAPMNQPSQTATAGIQHSPVMTAVVSEQQEPVMSAYLDEPDTSDTSTEDADFAADWAWQEFQQQHQPEPVPEQQSVTAAPESKAQYRFDGVITAENFSVRLAAQVDEWAALVDSLNLGGLLRLYLLHSAI

SEQ ID NO: 135261 - protein, 107 aa, Unknown
  Bacterial polypetide isolated from the Sargasso Sea
KGINDKNFAVRGFAERQSINAPIQGTAADIIKLSMIEIYNCIVQKNIDAHMLLQVHDELVFEIKENTIEESIKLIKYIMENTHLKYKDFKVPLTVDYGIGNTWGESH

SEQ ID NO: 135262 - protein, 208 aa, Unknown
  Bacterial polypetide isolated from the Sargasso Sea
MKVIVERSDLLKAMNRAQSIVERRNTIPILSNVLIEALDTEISLRTTDLEIEIVEKVPAKIEIEGSITVGAHVLYDIIRKIPEGAPINFSSDQIASRLEVKAGRSRFSLATLPRDDFPIMATSKYQSNFSIPTVVLQKLFEKTKFAMSTEETRYYLNGVFFHVAKNSDSLSLRTVATDGHRLAQIDETLPDNCEEMPGVIVSRKTVGE

SEQ ID NO: 135263 - protein, 247 aa, Unknown
  Bacterial polypetide isolated from the Sargasso Sea
DIRKAFTAKKDHLLISADYNQIEMRILADLAEVKELKKAFKNNEDIHSLTASQIFNIDIKKVDQDQRRKAKAINFGIIYGISQYGLAKQINVSNYEAEEFLDAYFAKFPEIKVYMDNTIKFCRKSGYVNNIFGRRSHFKNINDKNFNVRNFQERAAINAPIQGSASEIMRLAMIRLEKKLIDEKSSKSKMLLQIHDELIFEVPKGDKKTMIKIIKEEMMSVAKSDYHSFSTPLTVDVNVGDNWGMLH

SEQ ID NO: 135264 - protein, 99 aa, Unknown
  Bacterial polypetide isolated from the Sargasso Sea
ARRAGMEAQSLRAAANAPIQGSSADIIKIAMVQLNKKFIEMNVPAKMLLQVHDELLFEVEPDSLEITTKLVKKTMEDCVKLNVPLLVDIGIGDNWMETK

SEQ ID NO: 135265 - protein, 332 aa, Unknown
  Bacterial polypetide isolated from the Sargasso Sea
MKISVERDILLKSLNHIQSVVERRNTIPILSNVKIIANNEGISFTATDLDLEIIEKLDKANTIEEGQITTSAHTLYDIVRKLPEGSSLDIATKDNEKLELSCGQSNFELSTLPIEDFPEMSSGEMPCNFIIDSEELANMIDKSKFAISTEETRYYLNGIFFHAINNSLRSVATDGHRLACIQSDLPAGADDIPSIIIPRKTIGEVRKLIEDIEGNINLFISETKIRFEVTNISLTSKLIDGTFPDYERVIPKTNTKIMTVQTNDFASSIDRVATISSDKSKAVKFVIKDNSLTLTVINPDAGTAVEKVDVTYEADDLEVGFYARYLLDIASQ

SEQ ID NO: 135266 - protein, 360 aa, Unknown
  Bacterial polypetide isolated from the Sargasso Sea
AGKFGCVPEQVVEMLGLMGDSSDNIPGVRGVGEKTAIKLISEFGSIESVYENLERISGKSLKEKLETDHENAFLSRELATIDCHVPLSVNLEDVHLGETDLYNNDELYALLEELEFRTLMNRLIKKRSTVSAGQKSGPADAEQRESSQDDNQELFSSEETDHGYLEVECSLIETAEKLRTLISEFPNKSRLALVLDIKGEHQLDLWLKGMSICADGEKAVYIDLDHTEAERIKIIGQLKTVLESAEHPKIFYDLKKALQIFSKLGIQIEGVESDILLAAHMTDPLGRRYDLDYLLGRKLNMKRKSRESVDASNQSQMNMFEEPEEEDYIRHCENVAIVFQLHGLLKAQLKQTGIKEHTAT

SEQ ID NO: 135267 - protein, 124 aa, Unknown
  Bacterial polypetide isolated from the Sargasso Sea
REFKFDKNGLGRLIGKDPYEIDLQSARRAGMEAQSLRAAANAPIQGSSADIIKIAMVQLNKKFIEMNVPAKMLLQVHDELLFEVEPDSLEITTKLVKKTMEDCVKLNVPLLVDIGIGDNWMETK

SEQ ID NO: 135268 - protein, 495 aa, Unknown
  Bacterial polypetide isolated from the Sargasso Sea
EEGYSCVISSLDKDLMQLVEDPSVSMINTMTNKKFNEKDVIEKFGVKPNQIRDMLALVGDSSDNIPGVPKVGQKTAAKWLNEFGDLESIKENASSIKGVVGENLRNSLDDLDRNINLVSLKQDVDIQVKFSDLLTLNPDDDELNKIFSELEFATAKNNDEKNKKQKKDSKYETVLSEKSLEKWAKKIDKSKAFAIDTETDSVSTVSANLIGISISVKENEGCYIPIGHSYENCPEQLSLECIQKKLGPAIEKNQKKAVGQNLKFDIPILSRHGINLSEFLADTMLMSYVLNSTATRHGMDRLAEYYLNYTTTKYTDVTGTASKQISFAEVQIDVATDYAAEDADITLRLFNTLSALLKEKPIQEKLLKEIEYPLVHVLSRVEQNGAKIDKNKLGNHSKELGEKIADLSAQAFKIAGEEFNLDSPKQLLEILYEKQGLPVLRKTPKGQPSTNEETLQRLSEEYELPKIILKYRTLAKLKSTYTDSLINIENPKTQR

SEQ ID NO: 135269 - protein, 216 aa, Unknown
  Bacterial polypetide isolated from the Sargasso Sea
DVKELKKAFKNNEDIHSLTASQIFNIDIKKVNQDHRRKAKAINFGIIYGISQYGLAKQINVSNYEAEEFLESYFAKFPEIKVYMDSTIKFCRKSGYVNNIFGRRSHFNGINDKNFNVRNFQERAAINAPIQGSASEVMRLAMIRLHKKLNEEKNLKSKILLQIHDELIFEVPKKEEKTMVKLIQNEMTSVTQSDYHSFSTPLTVDVNVGDNWGMLH

SEQ ID NO: 135270 - protein, 380 aa, Unknown
  Bacterial polypetide isolated from the Sargasso Sea
MKDKKLFLIDAYALIYRAYYAFIKNPIINSKGFDTSAIMGFFNSIFDILKREKPDYFAVAFDVGGSVDRYEIYGQYKANRDSTPEPILDSVPIIHEILDALGIKTLQLSGYEADDIIGTVAKQAEKEGLKTYMVTPDKDFAQLVSENIFLYKPARFGGGIEIWGIDEVKNKFEINHPLQVIDFLGMMGDSVDNIPGLPGVGEKTAKKFLKEYGSMEELYKNLEDIKGKLKEKISENKELGMLSKKLATIITDVPIDYKIEELKIGESNNKKILSIFDDLEFKRLKENYFKIFNQKENEPAYNNELNFEIDNKDEKNYLSQKLESEKGIRILIDKVLSSKSVSIDYLISESNSYFSFCLSSTISYYINFNIKDISYTINLF

SEQ ID NO: 135271 - protein, 391 aa, Unknown
  Bacterial polypetide isolated from the Sargasso Sea
MNDPNNLFLIDGSGYIFRAFYGLPSMSNNDGVPVNAVFGYTKMLLKLIDDFKPIYVAVIFDVARKTFRNDLYNLYKANRSDPPDELIPQFSIIRDATNAIGLHVVEMEGYEADDLIATYSDIASKMNKNVIIVSSDKDLMQLVDQNTTLFDPMKQFWINDDKVFEKFGVYPNKVIDVQSLAGDTSDNIPGVPGIGIKTAAELINEYGDLDQLLNRASEIKQNKRRENLLEFADQAILSRSLVTLKKDVPIKSQIEEFKISSELELSKLIPFLKTHGFKSILNKYENSRELQTNISKSEIKINPVNNINEYNSISRKYELIENKDQLMKFLENYFSKSVIAFDCETNSLNAKTADLVGISLSCEEGSACYIPLRHGEKLNDNQSDFNFDNVK

SEQ ID NO: 135272 - protein, 319 aa, Unknown
  Bacterial polypetide isolated from the Sargasso Sea
DLEIQIKSYSDLVEVQEEGETTVSARKMSELCRSLPEGENVIFSLSNGKLTVSSSNFHADFATISSDDFPEIEINEELSPLVVKSALLKRILSKTSFSMASQDVRYYLNGMLLEIQGDKLNGVATDGHRLAFSSANSGNSELDVRNILPRKAVLELAKLLSPGENEVNLLIGPSYVEVKTDNLSFSSKLIDGKYPDYDKVFPTGNPLPLEIDKETLQAALSRASVLSNEKYRGVRFQLSANKLKLTANNPEQESAEEELNVDYSGTDLEVGFNIGYLLDVLNSIEGNSVNFEFYGEDSSCIIKEKGSEDDVYVIMPMRL

SEQ ID NO: 135273 - protein, 150 aa, Unknown
  Bacterial polypetide isolated from the Sargasso Sea
MLGSNHIRVKFDDVCFTSKLIDGNFPEYQRVIPANPENKLKVSTEKLKGALSRAAILSNEKYRGIRLIVKKNDLVIQAHNPEQEQAEEQMDVDYDGAEIEIGFNVNYLIDALNAIDSEDVHVLLMDNNSSCLIQDTNNSSYKFVVMPMRL

SEQ ID NO: 135274 - protein, 1151 aa, Unknown
  Bacterial polypetide isolated from the Sargasso Sea
TASQTGSMVFTTYEGGAAKQVMDLSATNANTVTIGTGSNSANLKVFGTLTAASTAYENDLLPAVDGGGVNEAGLGASDYRWKDLYLYDAGVASFGGASIPVVTLTHDDGESDSNPGLILDTDSRLYFDDVNQHIGRKNGEAGVLEIVSATEVEINAGPLLDLDANSVTVDANSVAINAAQSDGVAITAALGNIELNTPSNKAVVLKSNQAVTVSHVSDGGAQDFTIAQTGAVDASLFINSAGTAADAIALTASAGGIDILASGAAAGEDIDITATGSSVNLSSNEAVADAIALTASAGGLDIDGVNSTIAITNTTDGDEDDITISTVNANNSSIILSSAGNGTDAIALTAAAGDIDIDAANVTMDATAGVSIQGATASDLTVAGSGETLTLEASGGGTNQVIISSAGTGTDALDINAPNGGIDIDAAVGSAVALNAGSFNITSNTSNTGTVKVIGADAESAKLFLSADEDDSNADKWLIAAADDGAVTISNTADGSNFSPKLTIASDGTVTAGSFSGNMNSNDLQTDQVMTIASSNVAGVAVDIDASAGGAAIDAVKASNFTVTGSGESLTLSAAGGGAQQVVVNSAGTAENAIQLNASAGGVDIDALAAKDVNVAGGQVALVSKDDAASAISLTTNVGTSETIVVTNTQGNTENALTLEATAGGVNVDAAAGKDVDLSGGQVAISSKDNAANAITLTANQGASETIVVTNTQGTGEGAITLTSTAGGVDVDAAATKDVSVAGGQVALVSKDDAASAISLTTNIGTSETIVVTNTQGTGSGALTFTATAGGVDIDGADVVNIGSSKDDPAAIVIDASAGGVDILASGAAAGEDIDISATGSSVNLSSNEAVADAITLNASAGGIDITSAGVMDITTSAGNSNITIDPNGSGTLALGSADNTAVTVDAIALTLTAAATGSITIDADNGNEATEDVIIRGNNFSVTDAGVMNVAGALTAASFSGDMTSNALTTDSQNLTVSTTTSGNIILDAVDDIDIDADGDQINMKFGGETGHLSFSNGNTGDIKIKQETDGKNIIFLDQADVTTFTIEDAATGIVVPGEVKTTKLSYTDGTDAITVAADGALTVALRATADAGIDVDNLVLDNNSLTSSSGALTLTSAAAATWSTGAGALTIDGAGGINIGTTADQAVDF

SEQ ID NO: 135275 - protein, 169 aa, Unknown
  Bacterial polypetide isolated from the Sargasso Sea
GVSQSDAKEFLAKYKQRYPKVFAFLELQERLALSRGYVETILGRRRPFHFDRNGLGRLLGKDPLEIDLDVARRGGMEAQQLRAAANAPIQGSSADIIKVAMVQLQAALKSQGLPARLLLQVHDELVLEVEPSALDAARDLVVQTMENAVQLSVPLVAETGVGADWMEAK

SEQ ID NO: 135276 - protein, 263 aa, Unknown
  Bacterial polypetide isolated from the Sargasso Sea
NFELSTLPVEDFPEMSSGEMPCNFIIDSEELANMIDKSKFAISTEETRYYLNGIFFHAINNSLRSVATDGHRLACIQSNLPEGADDIPSIIIPKKTIGEVRKLIEDIEGNINLFISETKIRFEVTNISLTSKLIDGTFPDYERVIPKTNTKIMTVKTHDFASSIDRVATISSDKSKAVKFAINNNSLTLTVINPDAGTAVEKVDVSYEADDLEVGFNARYLLDIASQISGDTMTFILEDPGAPALINDSAHEDATYVLMPMRV

SEQ ID NO: 135277 - protein, 353 aa, Unknown
  Bacterial polypetide isolated from the Sargasso Sea
IEKAQLVGISLSYNKEISYYIPINHTTSDGSERVNNQLDEKYVINLINNICENKSILKIGQNIKYDIRILNKYGVTFNSIADTMLISYSIDNGIYKHNLDDLSFNHLNHTTIKYKEVVGTGKNEITFDKVAIDKATNYAAEDSLLTFRLFQNLYPRLIKEKANFVYQNIDLPLVEVLSSIEANGIEVNKNFLTTLSNEFEKESKKLEKNIYKLSKEEFNIGSPKQLGEILFVNLKIPGGKKTKSGTYSTDSSTLNNLASDGFEIAQLVLDWRELTKLKSTYTDALFRLTDGKSRVHTSFGLANTLTGRLSSTDPNLQNIPIRTENGKKIRTAFVSGKGKRLVSFDYSQIELRL

SEQ ID NO: 135278 - protein, 185 aa, Unknown
  Bacterial polypetide isolated from the Sargasso Sea
FNYETALPSRQVIIPRKGVLEISRLISEDDKSLKVQIGANHLRIFSNDFIFTSKLVDGRFPDYRRVLPQNGDKEVIASKPVLKEAFSRAAILSNEKFRGVRLNLSSGELKITANNPEQEEAEEIVDVQYQGDDLEIGFNVAYLIDVLNSLGSESVKVSLSDSNASALIEDEADDAALYVIMPMRL

SEQ ID NO: 135279 - protein, 278 aa, Unknown
  Bacterial polypetide isolated from the Sargasso Sea
TSFLLAATSTGRLASSDPNLQNIPIKSDDGKDIRKAFVSEKNNKLISADYNQVEMRILADLADVKQLKKAFLNNEDIHTLTASQVFGKEINKIDAETRRKAKAINFGIIYGISQYGLAKQLNVSNNEAEEFLNSYFKKFPEIKDYMKTTINFCRKSGYVSNIFGRKTHLTGINDKNYNIRNFQERAAINAPIQGSASEIMRLAMIRINKEISNNKQKSLKMLLQIHDELIFEESSKETKKSTKLIKDLMLSVKDSELHSFSIPLLVDINTGENWGELH

SEQ ID NO: 135280 - protein, 295 aa, Unknown
  Bacterial polypetide isolated from the Sargasso Sea
NTYSDSLPEHLNPNTKRIHTSFLLAATTTGRLASSDPNLQNIPIKTEDGKDIRKSFVAEKGYSLISADYNQIEMRILAEIAEVKELKKAFINNDDIHSITASQVFNKKIKEVDTDMRRKAKAINFGIIYGISQYGLAKQIGVSNVEAEDFLNAYFLKFPEIKEYMNETIKFCRKSGYVNNIFGRRTHLNGINDKNYNIRNFQERAAINAPIQGSASEIMRLAMIRLNNKISEDENTKILLQIHDELIFEIKSTRVKEMSKIIREIMNGVESSEYHKFTVPLLIDLNSGENWGLLH

SEQ ID NO: 135281 - protein, 303 aa, Unknown
  Bacterial polypetide isolated from the Sargasso Sea
MNFFSNKLEKKISNLEKEIYKVSKREFKIGSTKQLGEVMYNEMKISSLKKTKKGSFATSAQVLEDLAFKGHKLPKLVLDWRQVTKLKNTYSDSLQEHINFKTKRVHTSFLLAATSTGRLASSDPNLQNIPIKSEDGKEIRRAFVAEKNNKLISADYNQIEMRILADLADVKELKKAFKNKEDIHSLTASQVFNTRITEVDSDMRRKAKAINFGIIYGISQYGLAKQIGVSNVEAEEFLNSYFLKFPEIKDYMESTIKFCRKSGYVSNIFGRRTHITGINDKNFNIRNFQERAAINAPIQGFCF

SEQ ID NO: 135282 - protein, 275 aa, Unknown
  Bacterial polypetide isolated from the Sargasso Sea
GSGGIRHKLDTLIEYYFGHKAISFKELVGSGKDKKTFQELSIVEAGKYAAEDADMTLRLWKRLKSSLVQDKQVKIYEIIEKPLAQVIMNMENHGISIDKNKLYELSKVFKKKLNILEKDCFKLIDEEINLGSPKQVGEVLFDKLELPGGKKTSTGSWSTSAEVLENLANEGHNFPKLLLEWRALSKLKTTYSDALPTYLNEKTNRIHSSFSMATTSTGRLASSDPNLQNIPIRSEDGRMIRKAFIPEKGNILISSDYSQIELRLIAHIADERNLI

SEQ ID NO: 135283 - protein, 283 aa, Unknown
  Bacterial polypetide isolated from the Sargasso Sea
LEPVLSQMEMNGITIDIPYLDKLSKELKSTLEDIENKVYDLAEENFNLSSPKQLGEILFEKLNLDKKKSRKTKTGWSTDAVVLERLVDEHEIIQHLIKHRTLSKLLSTYIDALPNLINEKTGRVHTNFNQAATATGRLSSSNPNLQNIPVRTEFSRRIRKAFLPEKNWKLLSADYSQIELRILAHLADEEILINAFHKNDDIHSLTARLIFEKEEISSDERRVGKTINFGVIYGMGIKKFARSTGVSTPEAKEFLIKYKERYSKIFKFLELQERLALSKRLCK

SEQ ID NO: 135284 - protein, 340 aa, Unknown
  Bacterial polypetide isolated from the Sargasso Sea
IYGLKNLLTRNQDKIIGHNLKFDIGVLQNYDIHITRFHSDTMLMSYIVNSTAARHNLDALSEHYLSRKTIKFEDVIGKGPKKLRNFSEVTIKDATNYACEDVDIAIHLYEVLSAKVDEILNKLLEEIEYPLVFVLLDMEKKGALIDASHLKKLSDKFGRELLDLVTSIHNDSGVVFNLDSPKQLSEVLFEKMNISTKGLKKTSSGYYSTSESILQKLSNENDVVKDILKYRSLAKLKSTYTDKIVEICDQNSKVHTSYHQAVTSTGRLSSSDPNLQNIPIRTEEGITIREAFVAPKGKKILAIDYSQIELRLMAHYSQDPLMLESFNNNEDIHKRTASEI

SEQ ID NO: 135285 - protein, 49 aa, Unknown
  Bacterial polypetide isolated from the Sargasso Sea
MRKIIHVDMDCFYAAVEMRDNPALRDIPIAIGGSADRRGVISTCNYPAP

SEQ ID NO: 135286 - protein, 319 aa, Unknown
  Bacterial polypetide isolated from the Sargasso Sea
MLMSYAINSTATRHNLDALAEHYLNVQTIKYADVMGKGANKYKSFSEVPIKEATSYAAEDADITFQLYEKFKETINKETEKLLQDIEYPLVHVLLEMENKGALIDTNHLKKLSNDFGSKLIGLTKKIHDISGSVFNIDSPKQLSEVLFEKMKIDSKGLKKTSTGYYSTSESVLQKLSAENEVVRDILEYRTLAKLKNTYTDKISDICDANSRVHTSYHQAVTSTGRLSSSDPNLQNIPIRTNEGITIREAFIAPKGKKLLAMDYSQIELRLMAHYSKDPIMLDSFRNDEDIHKRTAAEIFGVEITDVDDQMRRRAKTIN

SEQ ID NO: 135287 - protein, 327 aa, Unknown
  Bacterial polypetide isolated from the Sargasso Sea
HGLSEISFRLFGFKPPSFKETVGKNKDFSFVDIDEASIYCGYDVFLTFKIVKIFKESFSKEKDELIKLFEEIELPLEPVLSQMEMNGITIDIPYLDKLSKELKSTLEDIESKVYDLAEESFNLSSPKQLGEILFEKLNLDKKKSRKTKTGWSTDAVVLERLVDEHEIIQHLIKHRTLSKLLSTYIDALPNLINEKTGRVHTNFNQAATATGRLSSSNPNLQNIPVRTEFSRRIRKAFLPEKNWKLISADYSQIELRILAHLADEEILINAFHKNDDIHSLTARLIFEKEEISSDERRVGKTINFGVIYGMGIKKFARSTGVSTPEAK

SEQ ID NO: 135288 - protein, 61 aa, Unknown
  Bacterial polypetide isolated from the Sargasso Sea
MVVWKVHPSFLKRKIIHIDMDCFYAAVEMRDNPSLVGKPVIVGGDPHSRGVVATCSYEARR

SEQ ID NO: 135289 - protein, 268 aa, Unknown
  Bacterial polypetide isolated from the Sargasso Sea
ERVNQESLNKIYEIFEKPMVKLLSDMEMNGIKIDDSYLKRLSKKFDERLKKIEKEIYNLSGKEFNIGSPKQLGEIIYNDLKIAKLKKTKKGSLATNAKILEDLALTGHKFPNLVLEWRQVSKLKSTYSDALQDHINFKTKRVHTSFLLAATNTGRLASSDPNLQNIPIKTSDGKEIRKAFIAEKNNILISADYNQIEMRILADMADVKALKKAFKNNQDIHSLTASQVFGSPIDKVTEDLRRKAKAINFGIIYGITQYGLAKQISVSN

SEQ ID NO: 135290 - protein, 263 aa, Unknown
  Bacterial polypetide isolated from the Sargasso Sea
DNEYLKKLSREFSKEINILEEKIFTISKTNFNIGSPKQLGEVLFGKMQIKGGKKTKSGTFSTDSNTLEEIASHGEKIAKYILSWRELSKLRSTYSEALVDQISKTTKRVHTSYANATTITGRLSSNDPNLQNIPIRTENGRKIRKAFIAEKGYNLVSFDYSQIELRLAAEISKDQNLIKAFKDGEDIHSKTASEIFSIKIKDLNSEHRRKAKAINFGIIYGISPYGLAKQLSITNSEGKNYIENYFKRFPKIKEYMENQTKFC

SEQ ID NO: 135291 - protein, 288 aa, Unknown
  Bacterial polypetide isolated from the Sargasso Sea
MRDVPVEKLTDYAAEDADLTFQLKQIFDEEMKTNQVEEIFWDIEVPMIRVLADMEKEGISIDSTYLNNLDRVFESELDKLKSGIFEKSGEEFNLNSPKQLGDILFDKLKLVSKPKKTKTGQYSTSEEVLSSLANEHEIIRNILEWRSLDKLQNTYVRSLPNEVSSRTGRIHTKFNQTVTTTGRLSSNNPNLQNIPIRTENGQKIREAFIPKNQDFELLAADYSQIELRVIASISKDKSMIDAFVKNQDIHTITASKIYNADPENITREQRGNAKTVNFGIYMVFLHLG

SEQ ID NO: 135292 - protein, 305 aa, Unknown
  Bacterial polypetide isolated from the Sargasso Sea
KISNFKADTMLMSYVLNSTASRHNLDALAKFYLNRETITYETVVGSASRQIPFSKVFLEQATAYAAEDADITISLYETLLDKLTTQPELLKLLDNLEYPLLKVLSIIERNGAKIDVEMLEEYSAELSKKINSLSKEAYALAGQEFNLDSPKQLVEILFNKQKLPVLQKTPKGQPSTNEAILQRLAEEYPLPKIIIQYRTLAKLKSTYTDSLTKLENEATKRIHTSYHQAVTSTGRLSSANPNLQNIPIKTPEGRKIREAFIPEEGNSILSVDYSQIELRIMAHLSKDSSLCDAFLANLDVHSATA

SEQ ID NO: 135293 - protein, 234 aa, Unknown
  Bacterial polypetide isolated from the Sargasso Sea
REGNKFVASDYSQIELRIMAHLSGDKGLLDAFAHGKDIHKATAAEVFGVPLDEVTTEQRRSAKAINFGLIYGMSAFGLSKQLNIPRNEAQKYMDLYFERYPGVLEYMDSTRESAKEKGYVETVFGRRLYLPDIKASNGARRKGAERAAINAPMQGTAADIIKMAMIKVDDWIRKNASDDVTMMMQVHDELVFEIKEDKVETYVSTITALMESAATLNVPLVVEAGVGENWDEAH

SEQ ID NO: 135294 - protein, 237 aa, Unknown
  Bacterial polypetide isolated from the Sargasso Sea
LQNVLYEKFKLHERFKVKPRKIKLGNGMSTDEETLEKLCEDPLPRAILDYRSLNKLKNTYVDQLPDHVHPRSGHIHSRFQQTSTATGRLSSDNPNMQNIPIRSVEGRRIREAFVPSDSNRILISADYSQIELRIVAHYSKDPTFLEAYRNNEDIHALTASTIFKVQVDQITREMRSKAKEVNFGLIYKMGPERLSIVTQTNKNEAKAFIERFFEKYSTIHALQERYLAQARKEGFTT

SEQ ID NO: 135295 - protein, 284 aa, Unknown
  Bacterial polypetide isolated from the Sargasso Sea
ITKRIHTSFLLAATTTGRLASSDPNLQNIPIKSEDGKDIRKAFVSEKDHILISADYNQIEMRILADLADVKQLKKAFKNNEDIHSLTASQIFNIDIKKVNQDQRRKAKAINFGIIYGISQYGLAKQINVSNHEAEEFLNAYFAKFPEIKIYMDHTIKFCRKSGYVNNIFGRRSHFTNINDKNYNVRNFQERAAINAPIQGSAAEIMRLAMIRIDKRLNDKRDLKTKMLLQIHDELIFETHKEEAKRISQIIIEEMSSVANSDQHSFSIPLTVDLNIGDNWGALH

SEQ ID NO: 135296 - protein, 276 aa, Unknown
  Bacterial polypetide isolated from the Sargasso Sea
KEVVGSGKSQITFDKVDLKNALKYAAEDADITYKLYLFFKKRINHEKNNYIYSNIEKPLINCIQTMEFNGVKVDKEYLKKLSTDFSKRILKLESKIYKYTGTEFNIASPKQLSEVLFDKLKLKPPKKTRTGEKSTGIEVLEDLAYGGNKVAETIIEWRQLSKLKNTYTEALQTHIVKSTGRIHTSYAMASTSTGRLASSDPNLQNIPIRTEEGRSIRKAFIPDKGQTIFAADYSQIELRVLAHMADVSQLKDAFNNNEDIHQLTASEIFNIKHKDV

SEQ ID NO: 135297 - protein, 290 aa, Unknown
  Bacterial polypetide isolated from the Sargasso Sea
MKYGLKIASIKNDTMMMSYVLDASATRHNLDALASYYLGYKTSTYEDVAGKGAKQISFDDVPIDIATNYAAEDADITLRLYEELSPKLKNIESLNKLNEEIEIPLIEVLSDMERNGAILNAKVLNAQSKDLEERIIRLENKAYKLAGEEFNLGSTKQLREIFFDKLNYRVIKKTPGGQPSTDEKVLAELAEEYELPKVLLEHRTLSKLKSTYTDKLPNQISSLSGKVHTSFHQAVTTTGRLSSSDPNLQNIPIRTEDGRRIRQAFEPSNGNKFISADYSQIELRVMAHLS

SEQ ID NO: 135298 - protein, 89 aa, Unknown
  Bacterial polypetide isolated from the Sargasso Sea
MEEFNVRKIIHIDMDCYFAAVEMRDFPEYRGKPLAVGGSRERRGVISTCSYEARKFGVRSAMATSYAFKLCPNLILVPGRMQVYKEVSL

SEQ ID NO: 135299 - protein, 318 aa, Unknown
  Bacterial polypetide isolated from the Sargasso Sea
LKYDLAVLKKYDMRLNKFCADTMLMSYAINSTATRHNLDALAEHYLNVQTIKYADVMGKGANKYKSFSEVPIKEATSYAAEDADITFQLYEKFKETINKETEKLLQDIEYPLVHVLLEMENKGALIDTNHLKKLSNDFGSKLIGLTKKIHDTSGSVFNIDSPKQLSEVLFEKMKIDSKGLKKTSTGYYSTSESVLQKLSAENKVVRDILEYRTLAKLKNTYTDKISDICDANSRVHTSYHQAVTSTGRLSSSDPNLQNIPIRTNEGITIREAFIAPKGKKLLAMDYSQIELRLMAHYSKDPIMLDSFRNDEDIHKRTA

SEQ ID NO: 135300 - protein, 276 aa, Unknown
  Bacterial polypetide isolated from the Sargasso Sea
FLLAATSTGRLASSDPNLQNIPIKSEDGRDIRKAFIAEKNNKFISADYNQIEMRILADLADVKELKKAFLNQEDIHLLTASQVFGISIKKVDEDMRRKAKAINFGIIYGISQYGLAKQIGVSNIEAEEFLSSYFLKFPEIKDYMDTTIKSCRKNGYVNNIFGRRTHFININDKNYNIRNFQERAAINAPIQGSASEIMRMAMIRLSKRFAGQNDKNCKILLQIHDELIFETKNTDLKKYSKIIEEEMSSVKNSDLHSFSIPLVKDINIGNNWGELH

SEQ ID NO: 135301 - protein, 200 aa, Unknown
  Bacterial polypetide isolated from the Sargasso Sea
ALAARPDAHELPGIVLRHRATLRAIAMCASYLSLGSKSRDGRLRCEWNNTRTATGRLSSSNPNLQAVSRGELELGTVGGGTSLNLRGAFVAPRGKVLLAADYSQIELRMLAHLSGDGKLAALLQMGGDVFQYIWNSGRNAPLNAPVSADERDRAKATVYDILYGQGVSGLAEKLGVGRDVARSLIATFFSTFPGVGAFVR

SEQ ID NO: 135302 - protein, 243 aa, Unknown
  Bacterial polypetide isolated from the Sargasso Sea
SIEINSEKFRRSVEEVAFAMAQQDVRYFLNGMLIEIGQGKIKLVATDGHRLALTEMDVGASTHGGGVSQKAIIPRKGVLELLKILDGSEKFSLQLSDKLITVRSGNYQFTSKLVEGQFPDYNKVVPQGGGTELTIERQSLREALQRASILSNEKYRGIRLLVDKGSLKIQANNPEQEEAEEVLEISYDGGGLEIGFNVSYILDVLGAISGSEAKLTLSDGNSSALIEGLDDSNSLYVVMPMRL

SEQ ID NO: 135303 - protein, 277 aa, Unknown
  Bacterial polypetide isolated from the Sargasso Sea
CYKITEKEFNLNSPKQLSEIFFNELKYPVLKKTPKGAPSTDASVLDELAKNYDLPKHILKYRELEKIRSTYVDGLLPEVTYDSKIHTHYNLFGTTTGRLSSEKPNLQNIPNKTELGQQIRDFFISKPSMKFVLSDYSQIELRVLAHLSQDSEMIKILNEENSDIHSETAARIFDQPLNDVNSEMRRKAKEVNFGLIYGMEAFGLSKSLDISQKEAKKLIDAYFDQFPKVKGFLENVVSNAEQNTYTKTLFGRKRFIRELSSSNFQLKAMGKRIAMNA

SEQ ID NO: 135304 - protein, 288 aa, Unknown
  Bacterial polypetide isolated from the Sargasso Sea
PEYKATREKMPEDLVEQLPYLPRLVEALNLPYLILPGYEADDIVGTLMRLCHEAEIEGVMVTSDKDYMQLIGEKIVMLNHRNERIGISGVQEKFGCVPEQVIEMLGLMGDSSDNIPGVRGVGEKTAVKLISEFGSIEGVYENLEIISGKSLKEKLETDYENAFLSRELATIDCHVPLSYTLEDVHLGDTDLYNNDELYALLEELEFRTLLNRLIKKRGTVSAGPGAKTADADQRESSQDDNQELLSSKEETDHGHLEVECSVIKTATQLRTIINEFSKKSRLALALDI

SEQ ID NO: 135305 - protein, 264 aa, Unknown
  Bacterial polypetide isolated from the Sargasso Sea
TSFLLAATSTGRLASSEPNLQNIPIKSEDGKDIRKAFIAKKDHVLISADYNQIEMRILADLAEVKELKKAFKNNEDIHSLTASQIFNVDIKNVNNDQRRKAKAINFGIIYGISQYGLAKQINVSNYEAEDFLNSYFARFPEIKNYMDQTIKFCRKSGYVNNIFGRRSHFININDKNYNIRNFQERAAINAPIQGSAAELMRLAMVRLSKKLNEANYQKTKMLLQIHDELIFETPREEVKRISKIILDEMTSVSKSDKHSFSIPL

SEQ ID NO: 135306 - protein, 302 aa, Unknown
  Bacterial polypetide isolated from the Sargasso Sea
INNEISEFKKDKKLILLYKDLDFPMLEILSSMNKKGVKVSLKKIDKLSDEINVDLNIYKKNIKSITKKDFNLNSPKQLSEILYEDMKYPIIKKTPKGAPSTDASVLEELSKSHELPKLILKYREYEKLRSTYIEGLKTVIVNNRVHTSYNLFGTITGRLSSEKPNLQNIPNKTKMGQKIREFFVADSKHTFVIADYSQIELRVLAHLSDDKNMINMLKNRDADIHSETAAKIFNTNIDSVTKDMRRKAKEVNFGLIYGMESFGLSKSLDISKKEADELIKAYFGQFPKVKGFLEKIVVDATK

SEQ ID NO: 135307 - protein, 261 aa, Unknown
  Bacterial polypetide isolated from the Sargasso Sea
PNLQNIPIKTSDGNDIRKAFVAEKNKSLISADYNQIEMRILSDLADVKELKKAFKNDEDIHSLTASQVFNTDIKKVNSDMRRKAKAINFGIIYGISQYGLAKQIGVSTTEASEFLNSYFLKFPEIKEYMSSTIKFCRKSGYVNNIFGRRTHITGINDKNFNIRNFQERAAINAPIQGSASEIMRMAMIRISEKLKDNKNYDTKMILQIHDELIFEAPSKDTTKISKIIKKEMTSVQNSELHSFTIPLSVDINVGDNWGVLH

SEQ ID NO: 135308 - protein, 329 aa, Unknown
  Bacterial polypetide isolated from the Sargasso Sea
KSAPDEFKVQVKVLQKLIEKFNIPQVSVEGYEADDVLGTLSKSFNDNNEEVLIVTGDRDSFQLIGDKTNVLYTKRGISEVERFGKAEFEEKYQISTSQYIEYLGLKGDSSDNIPGLPGVGEKTAINLLSDYENIENIYKNLDDLTPKLRDTFQENKDLLMLSKDLATIKRDLDINLPETKIKDSIFFNEEVLDNAKDEIMKYELTRFLGERKDTTQINNSEELEIVLIKEKIADESIIFNFENKNYFVTNNSFGEFKSLEQFNNVISMSSQTFALNSEFELDIERFLAFDCCLFLIDPSIKPDNLLNIVFYIDKYSEINKKSNLSEYLL

SEQ ID NO: 135309 - protein, 253 aa, Unknown
  Bacterial polypetide isolated from the Sargasso Sea
TNIPNKTDLGQEIRDFFIAKPSMKFILSDYSQIELRVLAHLSQDSEMINILKKESADIHAETAARIFNEPIDNVNSEMRRKAKEVNFGLIYGMEAFGLSKSLNISQKEAKKLIDAYFDQFPKVKGFLENVVSNAEKNTFTTTLIGRKRYIKELSSSNFQLKAMGKRIAMNAPIQGTASDIMKIAMIKVRSNLPKFNNANLLLQIHDEIVVESNNKDIEKVSNMVSDNMKSAVKLDVPLYVNTKLNNSLANFNN

SEQ ID NO: 135310 - protein, 297 aa, Unknown
  Bacterial polypetide isolated from the Sargasso Sea
GDSSDNIPGVPGVGEKTAQALLQGLGGLDTLYAEPEKIAGLTFRGAKTMAAKLEQNKEVAYLSYQLATIKTDVELDLSCEELHVLPPAADDLLALFKKYEFKRWITDVESGKWMQSKGVKPAVKPTEAVAVAEEEAEVVATLSAENYVTILDEQTLIEWIDKLKQAPLFAFDTETDSLDNISANMVGLSFAIEPGVAAYVPVAHDYLDAPDQISRERVLTLLKPLLEDENLLKVGQNLKYDRGILANYDIELRGIAFDTMLESYILDSVAGRHDMDSLADRWLKHKAISFEEIAGKG

SEQ ID NO: 135311 - protein, 231 aa, Unknown
  Bacterial polypetide isolated from the Sargasso Sea
MSTLFAVDSMAVLYRGYFAMIRTPLINSKGLNTSGIRTFLMQLIKIIEEDKPDYLAVASDSMEPTFRHKRFPEYKATREKMPEDLVDQLPYLPRLVEALNLPYLILPGYEADDIVGTLMRLCREAEIEGVMVTSDKDYMQLISEKIVMLNHRNELIGISEVEDKFSCAPEQVIEMLGLMGDSSDNIPGVRGVGEKTAAKLISDFGSIEGVYENLDRVTSKSLKEKLNNDQE

SEQ ID NO: 135312 - protein, 306 aa, Unknown
  Bacterial polypetide isolated from the Sargasso Sea
DLKIAKLKKTKKGSLATSAKILEDLALTGHKFPNLVLEWRQVSKLKSTYTDALQDHINEKTKRVHTSFLLAATNTGRLASSDPNLQNIPIKTSDGKEIRKAFVAEKNNTLISADYNQIEMRILADVADVKELKKAFKDNQDIHSLTASQIFNLPINKISEDQRRKAKAINFGIIYGITQYGLAKQISVSNDEAQEFIDSYFKKFPEIKDYMQSTVKSCRSKGYVTNIFGRRIHLRGINDKNFSVRSFQERAAINAPIQGSAADIIRLAMINIDKILSKNQKAKMLLQIHDELIFECLKSDEQKVKK

SEQ ID NO: 135313 - protein, 243 aa, Unknown
  Bacterial polypetide isolated from the Sargasso Sea
MIILIDGFSVAFRAFYALPESLMTSDGTPTNLIHGFLSMINKVINEYKSEQMIVTWDLPGKTFRNDIYKEYKSNRSPAPDNFKVQIPLLHDLLDSFNIPQVSEVGYEADDVLGSLAKKYNDKGQEVMIVTGDRDTFQLISKNTKILYTKRGISEIDIVDEKFFLNKYGFKTDQYIEYLALKGDPSDNIPGLAGVGEKTATSLLKKYKTIEGIYKNLNDLTPKIKNSFQENKEMLKTSKDLATI

SEQ ID NO: 135314 - protein, 283 aa, Unknown
  Bacterial polypetide isolated from the Sargasso Sea
MEGAYLNIEIPLAGTLAVLEMTGIKLDVEELNKVALEFEGRLNDLRIKITELSGEEFNPNSVIELQNILYEKLRLHEKFNIKPKKIKLGNRMSTDEETLEKLAEDDLPRTILDYRTLNKLKNTYLDQLPGYVHSDSGNIHSTFHQTGTATGRLSSENPNLQNIPVRSSEGRRVRRAFIASGTEKILISADYSQIELRVVAHYSKDPTFLDAYRQNLDIHSLTASTIFGVEEKDVTREMRDRAKEVNFGLIYRMGADRLSIVTKTPKVEAKEFIERYFEKYSTI

SEQ ID NO: 135315 - protein, 256 aa, Unknown
  Bacterial polypetide isolated from the Sargasso Sea
GRFSSTDPNLQNIPIRTEEGRRIRQAFIAPPGKKIVAVDYSQIELRIMAHLSQDKALLEAFAHGRDIHRATAAEVFGVALDEVTSDQRRSAKAVNFGLIYGMSAFGLAKQLGVSRSEAQQYVDRYFERFPGVLDYMERTRKQAHESGYVETLFGRRLYLPEINAQNMARRKGAERAAINAPMQGTAADIIKKAMIVVDNWLRQQTEPAATMIMQVHDELVFEVDADKVSSVKPQLVELMAKAAQLDVPLLAEAGDG

SEQ ID NO: 135316 - protein, 243 aa, Unknown
  Bacterial polypetide isolated from the Sargasso Sea
DEETLEKLCEDPLPRAILDYRSLNKLKNTYVDQLPDHVHSRSGHIHSRFQQTATATGRLSSDNPNMQNIPIRSAEGRRIREAFVPSDSSRILISADYSQIELRIVAHYSKDPTFLEAYRNNEDIHALTASTIFKVPVDQINREMRSKAKEVNFGLIYKMGPERLSIVTQTNKSEAKAFIERFFEKYSTIHALQERFLAQARKEGFTTTLLGRRRYLPDINAKGMLKRMAEGAAVNTPIQGSAA

SEQ ID NO: 135317 - protein, 296 aa, Unknown
  Bacterial polypetide isolated from the Sargasso Sea
IKIIEEDNPDYLAVASDSMEPTFRHKTYPEYKATREKMPEDLVEQLPYLPKLVEALNLPYLILPGYEADDIVGTLMRLCRESEIDGVMVTSDKDYMQLITEKIVMLNHRNEHIGISEVEEKFGCVPEKVVEMLGLMGDSSDNIPGVRGVGEKTAVKLISEFGSIEGVYENLERVSSKSLKLKLEIDHENAFLSKELATIDCHVPLSVKLEDFHLGQTDLYNNDELYDLLEELEFRTLMNRLIKKRKNVSMSDELRHKDDENSKTYQENNHNLSAAEEETDSSFLEVEYILIQTAEQ

SEQ ID NO: 135318 - protein, 278 aa, Unknown
  Bacterial polypetide isolated from the Sargasso Sea
AEYYLNYTTTKYTDVTGTASKQISFAEVKIDVATDYAAEDADITLRLFNTLSTLLKKKPTQEKLLKEIEYPLVHVLSRVEQNGAKIDKNKLGNHSKELGEKISDLSAQAFKIAGEEFNLDSPKQLLEILYEKQGLPVLRKTPKGQPSTNEETLQRLSEEYELPKIILQYRTLAKLKSTYTDSLINIENPKTQRIHTSYQQAITSTGRLSSTEPNLQNIPIKTAEGRRIREAFVPEKGNTLISADYSQIELRIMAHLSEDKNLTNAFNNNIDVHSSTAA

SEQ ID NO: 135319 - protein, 268 aa, Unknown
  Bacterial polypetide isolated from the Sargasso Sea
SDVTGTASKHFSFSEVKLEVATDYASEDADITLRLYNVLAPMLKDKPTQEKLLHDIEYPLVNVLARVEQNGAKIDKNKLSKHSKELSKKIDELSSQAFKIAGEEFNLDSPKQLLEILYEKQGLPVLKKTPKGQPSTNEDTLQRLSEEYKLPKIILQYRTLAKLKSTYTDSLINIENPKTERIHTSYQQAVTSTGRLSSTEPNLQNIPIKTAEGRRIREAFVPEKGNVLISADYSQIELRIMAHLSKDENLTHAFNNDIDVHSSTAAEV

SEQ ID NO: 135320 - protein, 314 aa, Unknown
  Bacterial polypetide isolated from the Sargasso Sea
GIKIDIKSLKSLSSKFEKKIDKIQREVFKLSKKEFNIASPKQLGEILYNDLKIADLKKTKKGSFATSASVLEDLAFKGHKFPQLILDWRQLSKLKNTYSDSLPEHMNPETKRIHTSFLLAATTTGRLASSDPNLQNIPIKSEDGKDIRKAFIAKKDHLLISADYNQIEMRILADLADVKELKKAFKNNEDIHSLTASQIFNTDIKKVNIDQRRKAKAINFGIIYGISQYGLAKQINVSNYEAEKFLNSYFAKFPEIKYYMEQTIKFCRKSGYVNNIFGRRSHFLNINDKNYNVRNFQERAAINAPIQGSAAEIM

SEQ ID NO: 135321 - protein, 272 aa, Unknown
  Bacterial polypetide isolated from the Sargasso Sea
PLEPVLSQMEMNGITIDIPYLDKLSKELKSTLEDIQSKVYELAKENFNLSSPKQLGEILFEKLNLDKKKSRKTKTGWSTDAVVLERLIDEHEIIQHLIKHRTLSKLLSTYIDALPTLINEKTGRVHTNFNQAATATGRLSSSNPNLQNIPVRTEFSRRIRKAFLPEKNWKLLSADYSQIELRILAHLADEEILINAFHKNDDIHSLTARLIFEKEEISSDERRVGKTINFGVIYGMGIKKFARSTGVSTPEAKEFLIKYKERYSKIFKFLEL

SEQ ID NO: 135322 - protein, 285 aa, Unknown
  Bacterial polypetide isolated from the Sargasso Sea
EDADITFQLKEHFQPILEKVGTKKLFDEMKIPLVEVLADMEKEGINLDVDFLKTMSKQLAEESNTLEQKIYEIAGETFNLASPKQLGDILFDKLKIGGAKQKKTKTGQYATGEEILSYLAKDNEIVQNILEWRQLVKLQNTYVDALPNQVNASTGRVHTDYMQTVAATGRLSSNNPNLQNIPIRTERGRQIRKAFIARDENYILLAADYSQIELRIIAALSGEENMIKAFQNNEDIHRSTASKVFNVPLEDVTKEQRSNAKTVNFGIIYGVSAFGLSNQTNLSRK

SEQ ID NO: 135323 - protein, 109 aa, Unknown
  Bacterial polypetide isolated from the Sargasso Sea
MATTSTGRLASSDPNLQNIPIRSDDGRMIRKAFIPEKGNVLISSDYSQIELRLIAHIADEKNLINAFLDEIDIHSSTASEVFNIPLNDMTPDIRRNAKAINFGIIYGIS

SEQ ID NO: 135324 - protein, 303 aa, Unknown
  Bacterial polypetide isolated from the Sargasso Sea
NQDKIVGQNLKFDIPLLSRHGINITKFLADTMLMSYVLNSTATRHGMDRLADYYLNYTTTKYTDVTGTASKQISFAQVKLDVATDYAAEDADITLRLYNVLSPLLKEKPIQEKLLEDLEYPLVHVLSRVEQNGAKIDKKKLANHSKELSEKIDELSSAAFKIAGEEFNLDSPKQLLEILYEKLGLPVLKKTPKGQPSTNEDTLQRLSEEYELPKIILQYRTLAKLKSTYTDSLINIENPKTKRIHTSYQQAVTSTGRLSSTEPNLQNIPIKTAEGRRIREAFVPEKGNILISADYSQIELRIM

SEQ ID NO: 135325 - protein, 288 aa, Unknown
  Bacterial polypetide isolated from the Sargasso Sea
PWIVQMWQDQGEAKFCFTEVPLEAASEYLCSAVDLAGRLANHLAEKVEQVGLTKLLTDLEMRLVPMLSRMELSGIAIDDEFFQSMRGRLKRELDLIESEIFQLAGGEFNLNSTQQLRQVLFDKLEMPVLKKTKTGPSTDASVLEELASMGHDIPRLMMEYRELEKLRSTYVEALPQLVNPSSGRIHTCFNQTVAATGRLSSSAPNLQNIPIRTDLGREIRKGFVASPGNVFLAVDYSQIELRVMAHFSEDSAFVMAFKQGIDVHRQTASVIFDVPVDEVSGGMRHQAK

SEQ ID NO: 135326 - protein, 137 aa, Unknown
  Bacterial polypetide isolated from the Sargasso Sea
FPEIRDYMNTTVETAKKSGFVTTLFNRKIHLPNIGTKGPLGGFAERAAINAPIQGSASDIIKRAMIKIHEFLKSSELDADLLLQVHDELIFETNDDSIDEIQKKASEIMEQATLPYLDLDVPLKVEGGHGINWSLAH

SEQ ID NO: 135327 - protein, 300 aa, Unknown
  Bacterial polypetide isolated from the Sargasso Sea
IPIHVATSYAGEDADITLRIWEILKIKLVEQSVYSVYHNLDKPMISVLLKAELEGIKVDQPQLKRLSKYFEMKINELEKEIFKESNQEFNIGSPKQLGDILFKTLGLPDGKRNKSGAFQTSADILEQLSINGHAIATLVLEWRKISKLKSTYADSLRSHVNPQTGRIHTSYNLAGTSTGRLSSSDPNLQNIPIRDEEGRKIREAFISKRGSVLLSLDYNQIELRILAHIADVKELKNAFKKNIDIHSSTASQIFGVSLEKVDSSLRRKAKAINFGIIYGISAFGLANNLKIPRSEAKMFI

SEQ ID NO: 135328 - protein, 127 aa, Unknown
  Bacterial polypetide isolated from the Sargasso Sea
ERVIPKNADKSVIGERAELKQAFTRTAILSNEKYRGVRLKLANDSLDITANNPEQEQAEEVVAVEYSGAELEIGFNVSYLLDVLSVLHQPRVRLSLSDEASSALLEHAEPPAEQEPERLYVVMPMRL

SEQ ID NO: 135329 - protein, 230 aa, Unknown
  Bacterial polypetide isolated from the Sargasso Sea
MIKKTKNTDIQFCRDCLHQTKKLSDLCGKCLSPRVINHKELKNLSIAHIDCDAFYASVEKRDNADLKNKPLIIGGGDRGVVSTACYIARTKGIHSAMPIFKARKLCPEAIILRPNMSKYKKVSYEIRDLMKELTPLVEPISLDEAFLDLSGTFKLHQKIPAVLLAELVNKIKKHVGINVSVGLSYNKYLAKVCSDLDKPKGFSVIGQEESKDFLSNKPVSLLWGVGKKFK

SEQ ID NO: 135330 - protein, 283 aa, Unknown
  Bacterial polypetide isolated from the Sargasso Sea
GSTKQLGEIMYNDLKIAALKKTKKGSFATSASVLEDLAFKGYEFPKLILEWRQISKLKNTYSDSLPEHINQNTKRVHTSFLLAATTTGRLASSDPNLQNIPIKSDDGKDIRKAFVSEKNNKLISADYNQVEMRILADLADVKQLKKAFLNNEDIHTLTASQVFGKEINKIDSETRRKAKAINFGIIYGISQYGLAKQINVSNNEAEEFLNSYFKKFPEIKDYMRTTVNFCRKSGYVSNIFGRKTHLTGINDKNFNVRNFQERAAINAPIQGSASEVMRLAMIR

SEQ ID NO: 135331 - protein, 290 aa, Unknown
  Bacterial polypetide isolated from the Sargasso Sea
YKFPQLVLDWRQVSKLKNTYSDSLPEYINPDTKRVHTSFLLAATTTGRLASSDPNLQNIPIKSQDGKDIRKAFIAEKDHILISADYNQIEMRILADLADVKELKKAFKNNEDIHSLTASQIFNVDIKKINQDQRRKAKAINFGIIYGISQYGLAKQINVSNYEAEEFLNSYFSKFPEIKVYMDQTIKFCRKSGYVNNIFGRRSHFLNINDKNYNVRNFQERAAINAPIQGSASEIMRLAMIRLEKKLNDKKNKKTKMLLQIHDELIFETHKDEVKRISKIIIDEMSSVAK

SEQ ID NO: 135332 - protein, 285 aa, Unknown
  Bacterial polypetide isolated from the Sargasso Sea
PMIKLLSKLEMSGIKIDDLYLKKLSKKFEERLMKKEKEIYKTSGKEFNIGSPKQLGEIIYNDLKIAKLKKTKKGSLATSAKVLEDLALTGHKFPRLVIEWRQDSKLKSTYTDALQDHINKKTKRVHTSFLLAATNTGRLASSDPNLQNIPIKSADGKEIRKAFIADKGNILISADYNQIEMRILADMADVKELKKAFKNNEDIHSLTASQVFGVPINKVNEDLRRKAKAINFGIIYGITQYGLAKQISVSNQEAQDFINQYFKKFPEIKDYMSSTINFCRKNGYV

SEQ ID NO: 135333 - protein, 318 aa, Unknown
  Bacterial polypetide isolated from the Sargasso Sea
MSFFVNNGLTKHNLEDLYYYYFGEEKEKFKDVIKNESKRKYKDFSEVPLEAATNYAAHDAYATFKLYETLNEQIAESLDSWIYYDIDKKLSLVLQEVENTGCKIDLKFLNKLEKDLNKEIDKIEQKIFKIAGEEFNIGSPKQLTEIFKKLDIKVTKKTKAGDFQTNVKVLEQLESEDVEIASHILQWRQYSKLVSTYTSSLADHADKKDRVHSTFNIAATITGRLSSSEPNLQNIPIRTEIGKKIRTAFIAEKDHELYSFDYSQIELRVLCEACEDPNLLKAFQEDQDIHESTGQLVFNKKIINDNDRRMAKIIYFGI

SEQ ID NO: 135334 - protein, 274 aa, Unknown
  Bacterial polypetide isolated from the Sargasso Sea
SDGPEDTFRHIRYPEYKATREKMPEDLVEQLPYLPRAMQALKLPYLLIPGYEADDIIGTLMSLCLNNNIRGVMVTSDKDYLQLVTETTEMLNHKNEIVGLSGVQERFGCLPDQVIEVLGLMGDSSDNIPGVRGVGEKTAIKLIQQFGSIEKVYENLEEVPGKSLKSKLEEGHDQAMLSRELVTIHREVPLEIDLEDLRLDQTSLSENKEFLDLLQELELNTLLRRITEGSVSSQKQVSSGSPEQAKNKPLSQAVQLELLEEPSARTQKAILSHT

SEQ ID NO: 135335 - protein, 250 aa, Unknown
  Bacterial polypetide isolated from the Sargasso Sea
PEKDWKLLSADYSQIELRILAHLADEEILINAFHKNDDIHSLTARLIFEKEEISSSERRVGKTINFGVIYGMGIKKFARSTGVSTPEAKEFLIKYKERYSKIFKFLELQERLALSKGYVKTIFGRKREFKFDKNGLGRLIGKDPYEIDLQSARRAGMEAQSLRAAANAPIQGSSADIIKIAMIQLNKKFREMNVPAKMLLQVHDELLFEVEPDSLEITTKLVKNIMEDCVKLNVPLLVDIGVGDNWMETK

SEQ ID NO: 135336 - protein, 288 aa, Unknown
  Bacterial polypetide isolated from the Sargasso Sea
PNLVLEWRQVSKLKSTYTDALQDHISKKTKRVHTSFLLAATNTGRLASSDPNLQNIPIKTSDGKEIRKAFVADKNNLLISADYNQIEMRILADMADVKELKRAFKNNQDIHSLTASQVFDVPITKVTDDFRRKAKAINFGIIYGITQYGLAKQISVSNEEALNFINSYFRKFPEIKDYMNTTIKTCRKQGFVTNIFGRRIHLRGINDKNFSVRAFQERAAINAPIQGSAADIIRLAMIKIDKVLDEKKKAKMLLQIHDELIFECLKKDENEVKKIVKEAMTSISSSDH

SEQ ID NO: 135337 - protein, 278 aa, Unknown
  Bacterial polypetide isolated from the Sargasso Sea
SKRVHTNYHQTGTTTGRLSSSGPNLQNIPIRSLQGRLIRTAFVAPEGWVLVSADYSQVELRILAHLAEDENLISAFRSGLDIHRATAAQMFAKRPEEVSDDLRAQAKAINYGIIYGMGPQRLSQTTGCSFQEAKSFIEKYFDNFSNIRGFIESSVQKVEECSYSETLFGRRRNIDGLDGRLGNLALANAKNIAVNSPIQGTAADLMKLAMIKVDHKIKELKLEAKMLLQVHDELVFECPRSEQNQVINLLKDEMQNVAKLKISLDIEVGAGNNWLEAH

SEQ ID NO: 135338 - protein, 246 aa, Unknown
  Bacterial polypetide isolated from the Sargasso Sea
FSEIPINLATKYAAEDADITFRLWKIFRPMLSEKKVSAIYNNIEINLISVLAKIEMNGIRIDENILSNLSTQFLNKLNLLEEKIYQLSKERFNIGSPKQLGIMLFEKLGFEGGKKGKNGTYSTDVDVLESLASKGHNFPEYVLEWRQLSKLRSTYTESLQNHIKTKTRRVHTSFLSSGATTGRLSSSNPNLQNIPIRTEDGKKIRSAFITDKGKKLVSFDYSQIELRILAHIAKIKNLINAFKDGQ

SEQ ID NO: 135339 - protein, 276 aa, Unknown
  Bacterial polypetide isolated from the Sargasso Sea
EKFKDVIKNESKRKYKDFSEVPLEAATNYAAHDAYATFKLYETLNEQIAESLDSWIYYDIDKKLSLVLQEVESTGCKIDLKFLNKLEKDLNKEIEKIEQKIFKIVGEEFNIGSPKQLTEIFKKLDIKVTKKTKAGDFQTNVKVLEQLESKGVEIASHILQWRQYSKLVSTYTSSLADHADKKDRVHSTFNIAATITGRLSSSEPNLQNIPIRTEIGKKIRTAFIAEKDHELYSFDYSQIELRVLCEACEDPNLLKAFQEDQDIHESTGQLVFNKKS

SEQ ID NO: 135340 - protein, 285 aa, Unknown
  Bacterial polypetide isolated from the Sargasso Sea
PKLILDWRQVSKLKNTYSDSLREHINPKTNRVHSSFLLAATTTGRLASSDPNLQNIPIKSEDGKEIRKAFVAEKGFTLISADYNQIEMRILADLADVKELKKAFKKNEDIHSLTASQVFNVDINKVDQNTRRKAKAINFGIIYGISQYGLAKQIMVSNVEAESFLNSYFLKFPEIKDYMEKTIKFCRKTGYVNNIFGRRSYISGINDKNYNIRNFQERAAINAPIQGSAAEIMRLAMIRLNKKIKNIKIKMLLQIHDELIFEVPNNDVKNLCEIIKEEMISVKDQ

SEQ ID NO: 135341 - protein, 295 aa, Unknown
  Bacterial polypetide isolated from the Sargasso Sea
MADRVLQLKTITYEEVCGKGASQIGFDEVPLDRATEYAAEDADITLRLHRALFPKVAADDKLDYVYEQIEMPTSIVLQKMERNGVLIDGERLAKQSTEIGQRLLALETEAHALAGQPFNLSSPKQIGEIFFNQMKLPIVKKTASGAPSTDEEVLQKLAEDYPLPKLLLDYRGLAKLKSTYTDKLPKMVNPNTGRVHTTYGQATAVTGRLASTDPNLQNIPVRTEEGRRIREAFIAPEGSVIVSADYSQIELRIMAHLSQDEGLMRAFQEGQDVHRATAAEVFSVTPLEVTADQRR

SEQ ID NO: 135342 - protein, 293 aa, Unknown
  Bacterial polypetide isolated from the Sargasso Sea
VVDLQNVLYEKFKLHERFKVKPRKIKLGNGMSTDEETLEKLCEDPLPRAILDYRSLNKLKNTYVDQLPDHVHPRSGHIHSRFQQTATATGRLSSDNPNMQNIPIRSAEGRRIREAFVPSNSNRILISADYSQIELRIVAHYSKDPTFLEAYRNNEDIHSLTASTIFKVPVDQITREMRSKAKEVNFGLIYKMGPERLSIVTQTSKSEAKAFIERFFEKYSTIHALQERFLAQARKEGFTTTLLGRRRYLPDINAKGMLKRMAEGAAVNTPIQGSAAEEIKLAMIKIQQELQNQ

SEQ ID NO: 135343 - protein, 252 aa, Unknown
  Bacterial polypetide isolated from the Sargasso Sea
LQNIPIKTEEGRKIRQAFIAEKDSCIISADYSQIELRIMAHLSKDINLNSAFTDGKDVHSATAAEIFEVDINNVTGDQRRKAKAINFGLMYGMTAFGLTRQLGISRNDAQMYLDSYFSKYDGVLKYMNEIREQARKKHYVETIFGRRVHVPEINSGNGLRKKAAERAAINGPLQGSAADIIKKAMLDVNQWIQENSSIKMIMQVHDELVFEADENFKDSCCKSIKEIMEKAVTLDVPLVVDINHGNNWNEAH

SEQ ID NO: 135344 - protein, 224 aa, Unknown
  Bacterial polypetide isolated from the Sargasso Sea
TFKIVKIFKERFSKEKDELIKLFKEIELPLEPVLSQMEMNGITIDIPYLDKLSKELKSTLEDIESKVYELAEETFNLSSPKQLGEILFEKLNLDKKKSRKTKTGWSTDAVVLERLVDEHEIIQHLIKHRTLSKLLSTYIDALPNLINEKTGRVHTNFNQAATATGRLSSSNPNLQNIPVRTEFSRRIRKAFLPEKNWKLLSADYSQIELRILAHLADEEILINA

SEQ ID NO: 135345 - protein, 280 aa, Unknown
  Bacterial polypetide isolated from the Sargasso Sea
DTLLADYLLNNHEKHGLSEISFRLFGFKPPSFKETVGKNKDFSFVDIDEASIYCGYDVFLTFKIVKIFKERFSKEKDELIKLFEEIELPLEPVLSQMEMNGITIDIPYLDKLSKELKSTLEDIESKVYELAEETFNLSSPKQLGEILFEKLNLDKKKSRKTKTGWSTDAVVLERLVDEHEIIQHLIKHRTLSKLLSTYIDALPNLINEKTGRVHTNFNQAATATGRLSSSNPNLQNIPVRTEFSRRIRKAFLPEKNWKLLSADYSQIELRILAHLADEEY

SEQ ID NO: 135346 - protein, 264 aa, Unknown
  Bacterial polypetide isolated from the Sargasso Sea
DITFQLKQLFEPQIKEEHLKSLFYNMEMPLVFVLKEMEEQGINIDAESLQKYSSALEKDLLVLEKEIKSIAEEDFNIDSPKQLGEILFGKLKIDPKAKKTKTGQFATSEAVLIKLKKKHPIIESILDYRQLRKLKNTYVDPLPELRDSKDHRIHTHFMQTVTATGRLSSNHPNLQNIPIKTEKGREIRKAFVPRNENFLLMAADYSQIELRIIAALSEDKNMIQAFQDGLDIHSATAAKVFNTKIQDVTREERGAAKAVNFGII

SEQ ID NO: 135347 - protein, 307 aa, Unknown
  Bacterial polypetide isolated from the Sargasso Sea
AEDAEITFKLYLFLKKRVNQERGNYIYTNIERELINPIQSMEINGIKVDKKYLSDLSIKFSQRIEKLEKQIYKETGSEFNIGSPKQLSEILFDKLKLKPPKKTKTGEKSTGIEVLEDLAYEGNKVADNIIQWRQLSKLKNTYTDALQNHIVRETGRIHTSFAMASTNTGRLASSDPNLQNIPIRTEEGKSIRKAFVPDEGFVMLAADYSQIELRVLAHMADVKQLKEAFINNEDIHQITAAEIFNVKLKEVDNELRRKAKAVNFGIIYGISAYGLAKQLAISNYEAGDFIKRYFQKFSGIREFMDHT

SEQ ID NO: 135348 - protein, 261 aa, Unknown
  Bacterial polypetide isolated from the Sargasso Sea
PNLQNIPIKSDDGKNIRKAFIAENENVLISADYNQIEMRILADLADVKELKKAFINNEDIHTLTASQVFNIDIKKVDYDTRRKAKAINFGIIYGISQYGLAKQILVSNNEAEDFLNSYFLKFPEIKEYMKKTISFCRKSGYVNNIFGRRTHLKGINDKNYNVRNFQERAAINAPIQGSASEIMRIAMIRLNKRFNDIKNLKTRMLLQIHDELIFESSNDESKKISGIIKDEMTSVAKSDLHSFSIPLTVDINFGKNWGILH

SEQ ID NO: 135349 - protein, 195 aa, Unknown
  Bacterial polypetide isolated from the Sargasso Sea
ASKIFNKNKNEITSDLRRSAKAINFGIIYGISPFGLAKQLKCSNSEAKEFIDSYFLRFPNIRNYMDEIKRKLYSDGYVETLFGRRMHINVQKNSNQNLKLFSERQAINAPIQGTAADIIKLAMVKVQNKLKEINSDSKILLQVHDELVFEVKSKEINEIITIVKPIMENANLPVKPLNVKLSVDYGFAKNWANAH

SEQ ID NO: 135350 - protein, 267 aa, Unknown
  Bacterial polypetide isolated from the Sargasso Sea
RLASSDPNLQNIPIKTDEGKDIRKAFISEKGKKLISADYNQIEMRILADLADVKELKKAFINNEDIHSLTASQVFGIDIKKVNSDMRRKAKAINFGIIYGISQYGLAKQIGVSNNEAEEFLNSYFLKFPEIKDYMSNTIKFCRKSGYVTNIFGRKTHIVGINDKNFNVRNFQERAAINAPIQGSASEIMRMAMIRLNNLIKENKKKKFKMLLQIHDELIFETDLNEVKSATTIIKDTMTSVRNSNLHSFSIPLSVDVNIGDNWGQKH

SEQ ID NO: 135351 - protein, 314 aa, Unknown
  Bacterial polypetide isolated from the Sargasso Sea
IQIAGVESDILLAAHMTDPLARRYDLDYLLGSRLNMKRKYRNSVHTSKQTQMNIFEESDEEDYISHCENAAIIYKLHEVLLAQLKLTGMEGAYRNIEIPLASTLAVLEMNGIKLDVEGLKKVSLDFEERLTELRNKIIELSGEKFNPNSVIELQNILYEKLRLHEKFNIKPKKIKLGNRMSTDEETLEKLSKDRLPRTILGYRTINKLKNTYIDQLPGYVNSGSGKIHSTFHQTGTATGRLSSENPNLQNIPVRTNEGRRVRRAFIPSGSENILISADYSQIELRVVAHYSKDPTFIDAYRRNLDIHSLTASTI

SEQ ID NO: 135352 - protein, 279 aa, Unknown
  Bacterial polypetide isolated from the Sargasso Sea
DLKIAKLKKTKKGSLATNAKILEDLALTGHKFPKLVLEWRQDSKLKSTYTDALQDHINKKTKRVHTSFLLAATNTGRLASSDPNLQNIPIKSADGKEIRKAFVADKGNVLISADYNQIEMRILADMADVKELKKAFKNNQDIHSLTASQVFGISINEINEDLRRKAKAINFGIIYGITQYGLAKQISVSNQEALDFINEYFKKFPEIKDYMNSTIKFCRKNGYVNNIFGRRIHLRNINDKNFSVRSFQERAAINAPIQGSAADIIRLAMIEIDRMTEKE

SEQ ID NO: 135353 - protein, 264 aa, Unknown
  Bacterial polypetide isolated from the Sargasso Sea
PEYKANRQKTPEDLIAQIEPLHQAIINLGLPLIAVDGVEADDVIGTLAIEAEKKNIKTLIATGDKDMAQLVTDNIHLIDTMKDIRMGPAEVLEKFGILPERFIDYLTLAGDTSDNIPGVEKVGPKTAIKWINEYGSLDGVIQNADLIKGKIGENLNAALDQLDLFKTLVTIKCDVQTDSNFSDLIIGDSNEELLFEQLNDLGLHGLIKQFDIQTPEKKSAVESNYHTIGTKKQLDELIKVMKKASYISFDTETTSLDYMHAELV

SEQ ID NO: 135354 - protein, 242 aa, Unknown
  Bacterial polypetide isolated from the Sargasso Sea
TAFISGKGKKLVSFDYFQIELRLAAEISGDKNFIKAFKNNEDIHASTAKEIFNLKDGQINNDYRRKAKAINFGILYGISPYGLAKQLDISNTEAKDYINEYFNKYPKIKKYMEHQIDFAKTNQYVETIFKRKINIKGISDKNFAVRGFAERQAINAPIQGSAADIIKLAMIDIHKEIKLKNIEAEMLLQVHDELIFEVDNKKYDNLVSNVKTIMESVHLKYKDFSVPLTVDYGAGDNWGHAH

SEQ ID NO: 135355 - protein, 226 aa, Unknown
  Bacterial polypetide isolated from the Sargasso Sea
AADYSQIELRIIASLSEDPNLISAFNNGQDIHQSTASRVFNISLDKVSREQRTNAKVINFGIIYGVSAFGLSQQTNLDRSKSKELIDTYYKTYPKLKDYMQNQINFARDNGYVSTVLGRRRYLKDINSANSFVRGGAERNAINAPIQGSAADIIKIAMINIHKELVQGKWKSKMILQVHDELVFDVPKSESDELKKMVKNKMENAFKLKVPLIVDIGTGKHWLDAH

SEQ ID NO: 135356 - protein, 284 aa, Unknown
  Bacterial polypetide isolated from the Sargasso Sea
KQLNFSEVDLKAATEYAAEDADVTLRLYEILSNRVSAEKLEKIYDVFEKPMITILSKLETNGIKVDDAYLKKLSKKFENRLEKIEKNIYKLSGKKFNIGSPKQLGEIIYNDLKIAKLKKTKKGSLATSAKILEDLALTGHKFPNLVLEWRQVSKLKSTYTDALQEHISKKTKRVHTSFLLAATNTGRLASSDPNLQNIPIKTLDGKEIRKAFIAEKNNVLISADYNQIEMRILADMADVKELKKAFKNNQDIHAITASQVFDVPYYKVTDDYRRKAKAINFGII

SEQ ID NO: 135357 - protein, 251 aa, Unknown
  Bacterial polypetide isolated from the Sargasso Sea
MPEHINQNTKRVHTSFLLAATTTGRLASSDPNLQNIPIKSDDGKDIRKAFVSEKNNKLISADYNQVEMRILADLADVKQLKKAFLNNEDIHTLTASQVFGKEINKIDTETRRKAKAINFGIIYGISQYGLAKQINVSNNEAEEFLNSYFKKFPEIKDYMKTTVNFCRKSGYVSNIFGRKTHLTGINDKNFNVRNFQERAAINAPIQGSASEIMRLAMIRINEEISNNKNNNLKMLLQIHDELIFEESSKET

SEQ ID NO: 135358 - protein, 286 aa, Unknown
  Bacterial polypetide isolated from the Sargasso Sea
NPKTKRVHTSFLLAATSTGRLASSDPNLQNIPIKSEDGKEIRKSFVAEKNSKLISADYNQIEMRILADLADVKELKKAFKNKEDIHSLTASQVFNTSIKKVNSDMRRKAKAINFGIIYGISQYGLAKQIGVSNIEAEQFLNSYFLKFPEIKNYMESTIKFCRKSGYVSNIFGRRTHITGINDKNFNIRNFQERAAINAPIQGSASEIMRMAMIRVSKKLQEFNEPNCKILLQIHDELIFEVHKEDIKKYSKIIQEEMSSVKNSDLHSFSIPLLVDINVGNNWGDLH

SEQ ID NO: 135359 - protein, 250 aa, Unknown
  Bacterial polypetide isolated from the Sargasso Sea
SKLKGGIFEMSGEEFNLNSPKQLGDILFEKLKLVSKPKKTKTGQYSTSEEVLSGLASEHEIIKNILEWRSLDKLQNTYVRSLPNEVNKRTGRIHTKFNQTVTTTGRLSSNNPNLQNIPIRTLNGQKIREAFIPRSEEFELLAADYSQIELRVIASISKDKNMVDAFIKNQDIHTITAAKIYNVDPDDVSREQRGNAKTVNFGIIYGVSAFGLSQQTNLSRAESKIMIDSYFENYPGLKDYMSSQIDFARN

SEQ ID NO: 135360 - protein, 224 aa, Unknown
  Bacterial polypetide isolated from the Sargasso Sea
APNKFLAKIASDWNKPDGLFVIKPAEVDAFVKTLPVKKLHGVGKVTASKMHSIGVQTCGDLRDLPEEELRDKFGSSGKRLYLLAQGIDERPVKTERIRKSLSVETTFSQDVVGVESCLKKLPELMKQLDTRLEKIEKNYRITKQVVKIKFSDFIQTTAETISPSVNPHIFQELCEEGYARRERPVRLLGIGVRLEPKQSEESHNNDQNQLCLTLDGHQTKDDSI

SEQ ID NO: 135361 - protein, 314 aa, Unknown
  Bacterial polypetide isolated from the Sargasso Sea
QQLKQAEMINSYRYIEIPLAETLARIEWFGVRVDTEKLMEISQEFEERLDELREQIHEQAKETFNVNSVVDLQNVLYEKFKLHERFKVKPRKIKLGNGMSTDEETLEKLCEDPLPRAILDYRSLNKLKNTYVDQLPDHVHPRSEHIHSRFQQTATATGRLSSDNPNMQNIPIRSAEGRRIREAFVPSDSNRILISADYSQIELRIVAHYSKDPTFLEAFRNNEDIHAFTASTIFKVPVDQITREMRSKAKEVNFGLIYKMGPERLSIVTQTSKSEAKAFIERFFEKYSTIHALQERFLAQARKEGFTTTLLDEG

SEQ ID NO: 135362 - protein, 143 aa, Unknown
  Bacterial polypetide isolated from the Sargasso Sea
SYIFNDFIFTSKLVDGRFPDYRRVLPQNGDKEIIASKAVLKEAFSRAAILSNEKFRGVRLNLATGELKITANNPEQEEAEENVDVQYEGDDLEIGFNVAYLIDVLNSLNSDMVKVSLSDSNASALIEDNADDAALYVIMPMRL

SEQ ID NO: 135363 - protein, 206 aa, Unknown
  Bacterial polypetide isolated from the Sargasso Sea
MPKLFAVDSMAVLYRGYFAMIRTPLINSKGLNTSGIRTFLMQLIKIIEEDKPDYLAVASDSREPTFRHKRYPEYKATREKMPEDLVEQLPYLPRLVEALNLPYLILPGYEADDIVGTLMRLCREAEFEGVMVTSDKDYMQLIGEKIVMLNHRNEFIGINEVEQKFGCVPEQVIEMLGLMGDSSDNIPGVRGVGEKTAVKLISELEA

SEQ ID NO: 135364 - protein, 232 aa, Unknown
  Bacterial polypetide isolated from the Sargasso Sea
REGYKLFSADYSQIELRIMAHLAKDPAMMESFLTGEDIHSSTARKVFNIKDEPSSDQRRAAKAINFGLIYGISAYGLAKQLKIDNVEAKGIIDTYFAKYKRVKEFMEELKELASKQEYVETMHGRKVFLPNISHSNFQVRSSAERTAINAPIQGTAADIIKIAMINIKEWLNRENIHNVFMIMQVHDELVFEIEDSDIHRYGDKISDLMGSAEKLSVPLLVNTFSGSNWQET

SEQ ID NO: 135365 - protein, 273 aa, Unknown
  Bacterial polypetide isolated from the Sargasso Sea
AATSTGRLASSDPNLQNIPIKSEDGKNIRKSFIAEEKHVLISADYNQIEMRILADLADVKELKKAFKNNEDIHSLTASQVFNTKIQNVDSDMRRKAKAINFGIIYGISQYGLAKQIGVSNNEAADFLNSYFLRFPEIKDYMEKTVQFCRKSGYVKNIFGRRTHITGINDRNFNIRNFQERAAINAPIQGSASELMRMAMIRINDKFGEIKNLKCKTLLQIHDELIFEVKKEEMKEYSKIIKNEMASVKNSDLHSFSIPLLVDINVGDNWGDLH

SEQ ID NO: 135366 - protein, 290 aa, Unknown
  Bacterial polypetide isolated from the Sargasso Sea
DNELKSKGLSDVMNKIEVPLIPVIVEMQKTGVSINSQILNDFSSELKEEIINLEIEAKKIIKNDEINLRSSQQLSEVLINTLNIPEKWFRKTAKKTQLSTDVSNLQSLMTRDLNEETKKFIGLILRHREQSKLQNTYAEPLPKLINSKTERLHPSFNQVGTSTGRLSSNDPNLQNIPVRTENRNHIRKAFESNKGYVLMSADYSQIELRVLAHLSEEPSLLKAFNNNEDIHESTAKTIYQTNEISKEQRRVAKILNFGVIYGLGPDGVSRQTDLSRSQGKRVYRYLFWKI

SEQ ID NO: 135367 - protein, 76 aa, Unknown
  Bacterial polypetide isolated from the Sargasso Sea
MTVSNDTDRIIMHADMDAFYASVEQRDHPELRDRPVAVGGSGSRGVVAAASYEARQFGVRSAMPSVEARRRCPDLV

SEQ ID NO: 135368 - protein, 227 aa, Unknown
  Bacterial polypetide isolated from the Sargasso Sea
DETGLTASAGISINKFLAKVASDINKPNGQKTIHPSQVDSFIDQLPVEKFFGVGKVTAKKMNEMGIFNGADLRKYQKEELVDRFGKTGKHYYKIVRSIQDSPVNPNRIRKSVGAERTFSKDINSEGFMLDELKTIADELERRMIRSKNRGRTVTIKLKYSDFTTQTRSKTVEEYLSKKEEFFPIIEELIYQKKIEKSVRLLGIAISSLLIDEQEPKEEYSLQLKFDF

SEQ ID NO: 135369 - protein, 297 aa, Unknown
  Bacterial polypetide isolated from the Sargasso Sea
NTYTDSLQEHINPNTKRVHTSFLLAATNTGRLASSDPNLQNIPIKSEDGKDIRKAFIAEKGFELISADYNQIEMRILADLANVKELKKAFKNNEDIHSLTASQVFNIDIKKVNQDMRRKAKAINFGIIYGISQYGLAKQINVSNHEAAEFLNAYFNKFPEIKIYMEDTIKFCRRSGYVNNIFGRRSYFNSINDKNFNVRNFQERAAINAPIQGSASEIMRLAMIRLDKRLKELKNDKIKILLQIHDELIFEVPKNEVKKTVKIIKEEMASVVKSDLHSFSIPLTIDINTGDNWGILH

SEQ ID NO: 135370 - protein, 226 aa, Unknown
  Bacterial polypetide isolated from the Sargasso Sea
KKSRKTKTGWSTDAVVLERLVDEHEIIQHLIKHRTLSKLLSTYIDALPNLINEKTGRVHTNFNQAATATGRLSSSNPNLQNIPVRTEFSRRIRKAFLPEKNWKLLSADYSQIELRILAHLADEEILINAFHKNDDIHSLTARLIFEKEEISSDERRVGKTINFGVIYGMGIKKFARSTGVSTPEAKEFLIKYKERYSKIFKFLELQERLALSKGYVKTIFGRKREF

SEQ ID NO: 135371 - protein, 285 aa, Unknown
  Bacterial polypetide isolated from the Sargasso Sea
PMINILSKIETNGIKVDDNYLKSLSKKFNDRLIKIEKDIYKTSGKEFNIGSPKQLGEIIYHDLKIAKLKKTKKGSLATNAKILEDLALSGHKFPNLVLEWRQVSKLKSTYTDALQEHISKKTKRVHTSFLLAATNTGRLASSDPNLQNIPIKSTDGKEIRKAFVADKNNILISADYNQIEMRILADMADVKELKKAFKNKQDIHTLTASQVFDVPINKVTDNFRRKAKAINFGIIYGITQYGLAKQISVSNQEALDFINAYFKKFPEIKDYMNTTIKTCRKLRLC

SEQ ID NO: 135372 - protein, 226 aa, Unknown
  Bacterial polypetide isolated from the Sargasso Sea
SQIELRLAAEISSDKNFIKAFKNNEDIHASTAKEIFNLNDSQINNDYRRKAKAINFGILYGISPYGLAKQLDISNTEAKDYINEYFIKYPKIKKYMEHQIDFAKTNQYVETIFKRKINIKGISDKNFAVRGFAERQAINAPIQGSAADIIKLAMIEIHKQIKLKNIEAEMLLQVHDELIFEVQSKKYDNLVSNVKMIMESVHLQYKDFEVPLTVDFGAGNHWGQAH

SEQ ID NO: 135373 - protein, 295 aa, Unknown
  Bacterial polypetide isolated from the Sargasso Sea
SKECLCRDCERIFQENSARRCAFCGSPRFIQHPELNTLAIAHLDCDAFFAAVEKRDNPSLASKPLIIGGGKRGVVSTCCYIARQYGVHSAMPMFQALSACPDAVVLPPDMPKYRKVGKEVQNLLLKVTPQIEPVSIDEAYLDLQKLLDSSAMSPARALIRLTNDLERTLGISASVGLSSNKFLAKLASDFDKPRGFSIIGTNESTSVIAPLPVRKINGVGPSLTKRLAKMGINTVSQLQNWKEDDLVQRFGVIGHRLANYARGIDPRPVEERTRRKSISCETTLEKHINDLQVLK

SEQ ID NO: 135374 - protein, 298 aa, Unknown
  Bacterial polypetide isolated from the Sargasso Sea
KDFSFVDIDEASIYCGYDVFLTYKIVNIFKERFSKEKDELIKLFEEIELPLEPVLSQMEMNGITIDITYLDKLSRELKSTLEDIESKVYELAEEKFNLSSPKQLGEILFEKLNLDKKKSRKTKTGWSTDAVVLERLIDEHEIIPHLIKHRTLSKLLSTYIDALPTLINEKTGRVHTNFNQAATATGRLSSSNPNLQNIPVRTEFSRRIRKAFLPEKGWKLLSADYSQIELRILAHLADEEILINAFQKNDDIHSLTARLIFEKEEISSEERRVGKTINFGVIYGMGIKKFARSTGVIT

SEQ ID NO: 135375 - protein, 264 aa, Unknown
  Bacterial polypetide isolated from the Sargasso Sea
MSTLFAVDSMAVLYRGYFAMIRTPLINSKGLNTSGIRTFLMQLIKIIEEDKPDYLAVASDSMEPTFRHKRFPEYKATREKMPEDLVDQLPYLPRLVEALNLPYLILPGYEADDIVGTLMRLCREAEIEGVMVTSDKDYMQLISEKIVMLNHRNELIGISEVEDKFSCAPEQVIEMLGLMGDSSDNIPGVRGVGEKTAAKLISDFGSIEGVYENLDRVTSKSLKEKLNNDQENAFLSKELATIDCHVPLSVSLKDVHLGETDLYN

SEQ ID NO: 135376 - protein, 301 aa, Unknown
  Bacterial polypetide isolated from the Sargasso Sea
PKTGQNIKFDALILLRHGLKVEGIRFDTMIAAHLLKPEFRSLKLDNLSLEYLNYTMVPIEDLIGSGRSQISMAEVDIEKVSFYAAEDADIALQLTRIFEKKLKKEGLYNFFSEVEIPLLSVLLEMEFNGMFIDSDLLKSMSTKIGKKINKLVTNIYSESGYEFNVNSTQQLAKILFEIKGLPEVKKRSTAEDVLEKLKNKHVLPGLILEYRKLNKLKNTYIDSLPELVNPISGRIHSTFNQTITATGRLSSTNPNFQNIPIRTDEGREIRRAFRSKDDEWLIFSADYSQIELRIMAHLSQD

SEQ ID NO: 135377 - protein, 204 aa, Unknown
  Bacterial polypetide isolated from the Sargasso Sea
NNEDIHSSTAANIFNIDSSKIDSEMRRKAKAINFGILYGISPYGLAKQLNVTNSEAKNYIEDYFKKYPKIKKYMDSQIEFAKTNLYVETIFGRRCNIKSINDKNFAVRGFSERQAINAPIQGTAADIIKLAMIELQKMISTNNLNAKILLQVHDELIFEVEVSDKEDSIEKITNVMENIHLNYKDFEVPLLVDYGFGNNWGDAH

SEQ ID NO: 135378 - protein, 278 aa, Unknown
  Bacterial polypetide isolated from the Sargasso Sea
MGLNLRGVTFDTLLADYILNNQEKHGLSEISFREFGFKPPTFKEIIGKNKDFSFVDINDASTYCGYDVLLTYKISKIFKERFNNENKDLTKLFKEIELPLEPVLSEMEMNGIRIDTTYLNELSGELKSTLENIEENVFEIAKQEFNLSSPKQLGEILFEKLNLDKKKSRKTKTGWSTDAVVLERLVEEHEIIPFLIKHRTLSKLLSTYIDALPNLISEKTGRVHTNFNQAATATGRLSSSNPNLQNIPVRTEFSRRIRKAFLPEKGWKLLSADYSQIE

SEQ ID NO: 135379 - protein, 310 aa, Unknown
  Bacterial polypetide isolated from the Sargasso Sea
IKYKEVVGSGKSQITFNQVDLKSALKYAAEDADITYKLYLLFKKRINNEKNNYIYSNIEKPLIDCIQTMEFNGIKVNKEYLKKLSIDFSKRILKLESKIYKDTGTEFNIASPKQLSEVLFDKLKLKPPRKTRTGEKSTGIDVLEDLAYGGNKIAETVIEWRQLSKLRNTYTEALQAHIIKSTGRIHTSYAMASTSTGRLASSDPNLQNIPIRTEEGRSIRKAFIPDKDQTIFAADYSQIELRVLAHMADVSQLKDAFNNNEDIHQLTASEIFNVKQKDVTKDLRRKAKAVNFGIIYGISAFGLAKQLSIS

SEQ ID NO: 135380 - protein, 210 aa, Unknown
  Bacterial polypetide isolated from the Sargasso Sea
KTGRVHTSYHQANAATGRLSSSEPNLQNIPIRTEEGRRIRQAFIAPQGRKILAADYSQIELRIMAHLSQDAGLLKAFAEGKDIHRATAAEVFGTDFDSVTSEQRRRAKAVNFGLIYGMSAFGLARQLDIPRNEAQTYIDTYFARYPGVLRYMEETRASAAELGYVSTLFGRRLYLPEIRDRNAMRRQAAERAAINAPMQGTAADIIKKAM

SEQ ID NO: 135381 - protein, 299 aa, Unknown
  Bacterial polypetide isolated from the Sargasso Sea
MRDVSIDKITYYASEDADITLQLKGVFDKEIEVNNLNKIFYDIEIPMINVLSEMETEGIKIDTSYLKKLDKEFEEDLGKLKKEIFKKSGEEFNLNSPKQLGEILFDKLKLVSKPKKTKTGQYSTSEEVLSSLANDHKIIENILEWRSLDKLQNTYVKSLPNEVSSLTNRVHSSFNQTVTTTGRLSSNNPNLQNIPIRTANGQKIRRAFIPRDSDYILMAADYSQIELRVIASLSNEENMIDAFINNQDIHTMTASKIYDVDPENVTREQRGNAKTVNFGIIYGVSAFGLSQQTDLNRSE

SEQ ID NO: 135382 - protein, 250 aa, Unknown
  Bacterial polypetide isolated from the Sargasso Sea
FQNQSLKLEKKIFSLSKIEFNIASPKQLGEILFIEMGIKGGKKTKTGTYSTDSTILEDLSHQGYEIAKLVLEWRELTKLRTTYTDALLDQAKEKTSRVHTSYATATTLTGRLSSNDPNLQNIPIRTENGKKIRNAFIVEKNYKLVSFDYSQIELRLAAEISKDKNFTEAFVNGEDIHTSTAKEIFNLKDQDISSDHRRKAKAINFGIIYGISPYGLAKQLSISNTEGKKYIEDYFAKYPKIKNYMSYQIN

SEQ ID NO: 135383 - protein, 331 aa, Unknown
  Bacterial polypetide isolated from the Sargasso Sea
QLGEIIYNDLKIGGLKKTKKGGLATNASVLEDLAYKGHKFPQLILDWRQLSKLKNTYSDSLPEHINQNTKRVHTSFLLAATSTGRLASSEPNLQNIPIKSDDGKDIRKAFIAKKDYVLLSADYNQIEMRILADLADVKELKKAFKNNEDIHSLTASQIFDIEIDKITFDQRRKAKAINFGIIYGISEYGLAKQINVSNHEAKNFLNSYFLRFPEIKSYMEKTIKFCRKSGYVNNIFGRRSHFININDKNYNIRNFQERAAINAPIQGSASEIMRLAMIRLSKKLNLKKNFKTKMLLQIHDELIFETHKDDVEGISKIIIDEMSSVSKSIYI

SEQ ID NO: 135384 - protein, 87 aa, Unknown
  Bacterial polypetide isolated from the Sargasso Sea
RIRLLVDKGSLKIQANNPEQEEAEEVLEISYDGGGLEIGFNVSYILDVLGAISGSEAKLTLSDGDSSALIEGLDDSNSLYVVMPMRL

SEQ ID NO: 135385 - protein, 198 aa, Unknown
  Bacterial polypetide isolated from the Sargasso Sea
MSTLYAFDSMSVLYRGYFAMIRNPLINSKGINTSGIRTVLMQLVKIIEEVRPQYLAVASDGPEDTFRHIRYPEYKATREKMPEDLVEQLPYLPRAMQALKLPYLLIPGYEADDIIGTLMSLCLNNNIRGVMVTSDKDYLQLVSETTEMLNHKNEIVGLSGVQERFDCRPDQVIEVLGLMGDSSDNIPGVRGVGEKTAI

SEQ ID NO: 135386 - protein, 227 aa, Unknown
  Bacterial polypetide isolated from the Sargasso Sea
DETGLTASAGISINKFLAKVASDINKPNGQKTIHPSKVDSFIDQLPVGKFFGVGKVTAKKMNEMGIFNGADLRKYQKKELVDRFGKTGKRYYKIVRSIQDSPVNPNRIRKSVGAERTLSKNINSEGFMLDELKTIADELERRMIRSKNRGRTVTVKLKYSDFTTQTRSKTVEEYLSKKEEFFPIIEELIYQKKIEKSVRLLGIAISSLHIDKQEPKEEYSLQLKFDF

SEQ ID NO: 135387 - protein, 299 aa, Unknown
  Bacterial polypetide isolated from the Sargasso Sea
SYVLEGGLHGHGMDELARDTLGIETIKFKDVAGTGKSQVTFDRVPLDKALDYAAEDADITLRLHKTFKPRLAQEHMVTVYETLERPLVPVLETMERDGIKVDAQQLKRLSTDFGKRMANLEEDAHKMAGREFNVSSPKQLGEILFDEMGLEGGKRGKTGAYATGADVLEALAAEGHKLPNTVLEFRQLAKLKSTYTDALTAAINPQTGRVHTSYSQAAASTGRLSSTDPNLQNIPVRTEEGRKIRKAFVPKKGHVLISADYSQIELRILAHVAGIDSLKQAFHDGQDIHALTASQVFGE

SEQ ID NO: 135388 - protein, 278 aa, Unknown
  Bacterial polypetide isolated from the Sargasso Sea
KFLNKLEKDLNKEIDKIEQKIFKIAGEEFNIGSPKQLTEIFKKLDIKVTKKTKAGDFQTNVKVLEQLESEGVEIASHILQWRQYSKLVSTYTSSLADHADKKDRVHSTFNIAATITGRLSSSEPNLQNIPIRTEIGKKIRTAFIAEKDHELYSFDYSQIELRVLCEACEDPNLLKAFQEDQDIHESTGQLVFNKKSINDTDRRMAKIINFGIIYGISQYGLAKQLGVSNGEAKLFIDNYFQKFPNINDFMKFTTDKAKKLGFVENLFGRKSHIKDINA

SEQ ID NO: 135389 - protein, 288 aa, Unknown
  Bacterial polypetide isolated from the Sargasso Sea
DIEYPLVHVLLEMENKGALIDTNQLKKLSNDFGSKLIGLTKKIHDTSGSVFNIDSPKQLSEVLFEKMKIDSKGLKKTSTGYYSTSESVLQKLSAENEVVRDILEYRTLAKLKNTYTDKISDICDANSRVHTSYHQAVTSTGRLSSSDPNLQNIPIRTNEGITIREAFIAPKGKKLLAMDYSQIELRLMAHYSKDPIMLDSFRNDEDIHKRTAAEIFGVEITDVDDQMRRRAKTINFGLLYGMSAFGLSNQLEVSRAEADIFLNNYFERYAAVKSFMSEIGKKQKKINW

SEQ ID NO: 135390 - protein, 299 aa, Unknown
  Bacterial polypetide isolated from the Sargasso Sea
LKNTYSDSLQEHINPKTKRVHTSFLLAATTTGRLASSDPNLQNIPIKTEDGKDIRKSFVSEKGNILISADYNQIEMRILADLADVKELKKAFNNQQDIHSLTASQVFNVKISEINSDMRRKAKAINFGIIYGISQYGLAKQIMVSNNEAAEFLNSYFKKFPEIKDYMNDTIKFCRKSGYVNNIFGRRSHITGINDKNFNIRNFQERAAINAPIQGSAAEIMRLAMIRISKRIEETKEKKCKMLLQIHDELIFEVPKESENNFTNLIRQEMTSVKDSDLHSFSTPLTVDVNSGENWGLLH

SEQ ID NO: 135391 - protein, 320 aa, Unknown
  Bacterial polypetide isolated from the Sargasso Sea
SASVLEDLAFKGHKFPQLVLDWRQVSKLKNTYSDSLPEHINPDTKKVHTSFLLAATTTGRLASSDPNLQNIPIKSEDGRDIRKAFVAEKDNILISADYNQIEMRILADLADVKELKKAFKNNEDIHSLTASQIFNVDIDKVNQDQRRKAKAINFGIIYGISQYGLAKQINVSNFEAEEFLNSYFSKFPEIKVYMDRTIKFCRKSGYVSNIFGRRSHFININDKNYNVRNFQERAAINAPIQGSAAEIMRLAMIRIDKKLKEQKLNKTKMLLQIHDELIFESPKNELKKISKVIIDEMSSVAESDQHSFSIPLTVDLNTGE

SEQ ID NO: 135392 - protein, 233 aa, Unknown
  Bacterial polypetide isolated from the Sargasso Sea
EHSRLGGAKVVWIPDAAQLTDAAANALLKTLEEPPAQTWFFLASTEPARLLATLRSRCRLHHLAPPPESYAISWLAREVTASSEALLSALRLSAGSPGAALTLLQAESWAHRTDFCAALVNTLNAGDWYILLAALNHDQSAARLHWLATLFTDALKRPYGIAHLTNPDALDLISSIAERLSVAQIQAILGDVCHCRQQLLNVTGVNRELVLTDLILRIEHYLQPGTVLPVPHL

SEQ ID NO: 135393 - protein, 204 aa, Unknown
  Bacterial polypetide isolated from the Sargasso Sea
ENVDIHAQTASKVFGIPIADLDSETRRSAKAINFGIIYGISSFGLSKQLSCSQSEAKNFIESYFDQFPKIKSYMDAMIESAKMKGYVETFFGRRIPIKGINSKNFQERSFAERQSINAPIQGSAADIIKRAMIKIYNVFQEKNVESKMLLQVHDELVFECPKYEIKNVSNLIKKEMEQANLPFFPLNIPIVVDVGVADNWSEAH

SEQ ID NO: 135394 - protein, 281 aa, Unknown
  Bacterial polypetide isolated from the Sargasso Sea
TTGIKVDDAYLKKLSKKFEERLLKIEREIYKISGKEFNIGSPKQLGEIIYNDLKIAKLKKTKKGSLATSAKILEDLALTGHKFPNLVLEWRQVSKLKSTYTDALQDHISKKTKRVHTSFLLAATNTGRLASSDPNLQNIPIKTSDGKEIRKAFVVDKNNLLISADYNQIEMRILADMADVKELKKAFKNNQDIHSLTASQVFDVPITKVTDDFRRKAKAINFGIIYGITQYGLAKQISVSNEEALNFIKSYFKKFPEIKDYMNTTIRTCRKQGFVTNIFGR

SEQ ID NO: 135395 - protein, 314 aa, Unknown
  Bacterial polypetide isolated from the Sargasso Sea
IYEVFEKPMVKLLSKLEMNGIKIDDNYLKKLSKKFEERLKRKEKEIFKISKKEFNIGSPKQLGEIIYNELKIAKLKKTKKGSLATSAKILEDLALSGHKFPKLVLEWRQDSKLKSTYTDALQDHINSKTKRVHTSFLLAATNTGRLASSDPNLQNIPIKTLDGKDIRKAFIADKNNVLISADYNQIEMRILADMADVKELKKAFKNNQDIHAMTASQVFGLSIDKITEDFRRKAKAINFGIIYGITQYGLAKQISVSNQEAQDFINQYFKKFPEIKDYMNSTIKFCRKNGYVNNIFGRRIHLRGIMIRILASEL

SEQ ID NO: 135396 - protein, 246 aa, Unknown
  Bacterial polypetide isolated from the Sargasso Sea
VFSEINVDVAMPYACEDADITLKLYKYFLKKLKPLKSQYDLYTNIELPLLKVIAQIEQNGVMIDAKKLEKQSIDLGQRIESVEEEVYTLAKQKFNIGSPKQLQEIFYDKLNLPVIKKTPKGQPSTSEDVMQELSLTHELPKLILQYRNLSKLKNTYTDKLGIQIDSKTKRLHTSYNQTVTITGRLSSSNPNLQNIPIKTDDGKKIRQTFITNKDSKIISADYSQIELRVMAHMSNDQSLIQSFMNG

SEQ ID NO: 135397 - protein, 281 aa, Unknown
  Bacterial polypetide isolated from the Sargasso Sea
MEQASPYAAEDADVTLRLHQTLWPMLAQHSGLQKVFRDIEMPLVPILSKMERTGVKIDGNLLAQQSLDLAKRIGEIEQEAYQMAGKEFNLSSPKQLQEILFEQMGLPVLKKTPTGTPSTAEEVLAELALDYEFPKLITEHRGLSKLKSTYTDKLPLSVNPVTGRVHTSYHQAVAATGRLSSTEPNLQNIPIRSEEGRRIRQAFIAEAGKTILAIDYSQIELRIMAHLSRDPALLNAFAQGKDIHRATAAEVFGVELDQVSSEQRRRAKAVNFGLIYGMSAF

SEQ ID NO: 135398 - protein, 324 aa, Unknown
  Bacterial polypetide isolated from the Sargasso Sea
KESLATSAKVLEDLALTGHKFPNLILEWRQVSKLKSTYTDALQEHISKKTKRVHTSFLLAATNTGRLASSDPNLQNIPIKTPDGKEIRKAFVADKNNILISADYNQIEMRILADMADVKELKKAFKNNQDIHALTASQVFNVPINKVTEEFRRKAKAINFGIIYGITQYGLAKQISVSNQEALDFINAYFKKFPEIKDYMNTTIKTCRKKGYVTNIFGRRIHLRGINDKNFSVRSFQERAAINAPIQGSAADIIRLAMIKIDKILEEKQIAKMLLQIHDELIFECSEKKEASVKKIIRDSMVSISSSDHHLFSIPLEVSINSGN

SEQ ID NO: 135399 - protein, 280 aa, Unknown
  Bacterial polypetide isolated from the Sargasso Sea
KRVHTSFLLAATNTGRLASSDPNLQNIPIKTSDGKEIRKAFIAEKNNILISADYNQIEMRILADIADVKELKKAFKQNQDIHKLTASQVFGERINEISEDQRRKAKAINFGIIYGITQYGLAKQISVSNEEAQEFINSYFKKFPEIKDYMQSTIKSCRKNGYVSNIFGRRIHLRGINDKNFSIRSFQERAAINAPIQGSAADIIRLAMIKIDNILEEKKIAKMLLQIHDELIFECSKKDEKNVKKLIQNAMESVSSSEHHKFSIPLEVGINSGNNWGEAH

SEQ ID NO: 135400 - protein, 276 aa, Unknown
  Bacterial polypetide isolated from the Sargasso Sea
IIYNDLKIAGLKKTKKGSFATSASVLEDLAFKGHEFPKLILDWRQVSKLKNTYSDALPEHINPNTKRVHTSFLLAATTTGRLASSDPNLQNIPIKSEDGKDIRKAFTAKKGHLLISADYNQIEMRILADLADVKELKKAFQNKEDIHSLTASQIFNIDIKKVNQDHRRKAKAINFGIIYGISQYGLAKQINVSNYEAEEFLNSYFAKFPEIKVYMDNTIKFCRKSGYVSNIFGRRSHFNGINDKNFNIRNFQERAAINAPIQGSASEVMRLAMIRL

SEQ ID NO: 135401 - protein, 302 aa, Unknown
  Bacterial polypetide isolated from the Sargasso Sea
TYRLFSFFKEKMSDEKQLKLYQKIERPLVSVIARIENNGVFLDKKNLQLQNKKLQTKAKKIEKEIYKLAGKTFNIGSPKQLQEIFYDILEIPILRKTPKGQPSTSEDVLQELSLNYEIPKLVLQFRNFMKLINTYTNKLGEQVSNKTGRLHTSYHQAVTITGRLSSTDPNLQNIPIRTDDGKKIRSAFIAEKNCKIVSADYSQIELRVMAHLSEDKNLTKNFLNNEDVHESTAKEIFDIDSKPDAEQRRSAKTINFGLIYGISSFGLGKQLGIDTNSAKQYIEKYFEKYSGVRKFMESCKKE

SEQ ID NO: 135402 - protein, 697 aa, Unknown
  Bacterial polypetide isolated from the Sargasso Sea
MSSIKKTDHYYLIDGSGYIFRAYYALPPLSRKSDGLPTGAVSGFCSMLFKLLEESRSDNSANKPTHFAVIFDSARKNFRNDIYSEYKANRTEAPDDLVPQFKYIRESVKAFNLPSIELLNYEADDLIATYAKQITDAGGKVTVISSDKDLMQLVSDKIRLYDPMKNKVIGEKEVLEKFGVKPHQVIDVQSLAGDSSDNIPGVPGIGVKTAAELINKYKNLDTLLEKASEIKQNKRRETLLENKDKALLSKQLVTLKKDVPIKDDPNSFIIREVKKDNLYNFLREMEFNRLLSQAISFYGEENSKDYGSYDKTNKISKIDTKLYKSIINEKDLDKLIGLLNEKPLFSIDTETSSLNPLEAELIGISFSYAPNKAYYIPLRHKNVKSLSKQLVLKKIKPLLEDPSIKKVGQNIKFDFIVLKNNGIEINPMEDTMLLSYVLDAGNNRHNMDTLSELHLGHKTISYKDVVGTGKKQLNFSDVNLEEATKYAAEDADVTLRLYNLLLERINNEKLNNIYEIFEKPMIKLLSKLEINGIKIDDMYLKKLSKKFKERLEKIEKEIYKISGKEFNIGSPKQLGEIIYNDLKIAKLKKTKKGSLATSAKILEDLALTGHKFPNLILEWRQVSKLKSTYTDALQDHISKKTKRAHTSFLLAATNTGRLASSDPNLQNIPIKTLDGKEIRKAFIAEKNNILISADYDQ

SEQ ID NO: 135403 - protein, 812 aa, Unknown
  Bacterial polypetide isolated from the Sargasso Sea
SDGLPTGAVSGFCSMLFKLLEDARSDDTKNKPTHFAVIFDSARKNFRNEIYSDYKANRAEAPEDLAPQFEYIRKSVEAFNLPSIELLNYEADDLIATYAKKIIEAGAKVTIISSDKDLMQLVSNKVRLFDPMKSRVIGEKEVIEKFGVKPVQVIDVQSLAGDSSDNVPGVPGIGIKTAAELINKYKNLENLLKRASEIPQNKRRETLLSNKDKAMISKQLVTLKNDVPLKNDAADFIIKNINKDKLYNFLRDMEFNRLLSQAISFYGEPTNKDLNEKTVVKKNNKINTKTYKTISEEKQLNELIKKLDEKSVIAVDTETSSLNPQEADLVGVSVCYEANEAFYIPVGHKERTKLKKDVVLKKLKPILEDPSIKKVGQNIKYDFIIFKNNGIELSSVEDTMLLSYTLDAGNNRHNMDTLSELHLGHKTISYKDLVGTGKKQLNFADVDIKHATEYAAEDADITLRLYEVLSERVSEEKLERVYEEFEKPMIKILSRLEMNGIKVDDAYLKKLSKKFEERLITIEKEIYKISGKKFNIGSPKQLGEIIYNDLKIAKLKKTKKGSLATSAKILEDLASTGHKFPNLVLEWRQVSKLKSTYTDALQDHISKKTKRVHTSFLLAATNTGRLASSDPNLQNIPIKTSDGKEIRKAFVADKNNLLISADYNQIEMRILADMADVKELKKAFKNNQDIHSLTASQVFDVPIAKVTDDFRRKAKAINFGIIYGITQYGLAKQISVSNEEALSFINSYFKKFPEIKDYMNTTIKTCRKQGFVTNIFGRRIHLRGINDKNFSVRAFQERAAINAPIQGSAADI

SEQ ID NO: 135404 - protein, 502 aa, Unknown
  Bacterial polypetide isolated from the Sargasso Sea
NHGIELSSVEDTMLLSYTLDAGNNRHNMDTLSELHLGHKTISYKELVGTGKKQLNFSEVDLKSATEYAAEDADITLRLYEVLSERVSKEKLEKIYEEFEKPMIKILSKLESSGVKVDDAYLKKLSKKFEERLMTIEKDIYKISGKKFNIGSPKQLGEIIYNDLKIAKLKKTKKGSLATSAKILEDLALTGHKFPNLVLEWRQVSKLKSTYTDALQDHISKKTKRVHTSFLLAATNTGRLASSDPNLQNIPIKTSDGKEIRKAFIADKNNLLISADYNQIEMRILADMADVKELKKAFKNKQDIHSLTASQVFDVPIAKVTDDFRRKAKAINFGIIYGITQYGLAKQISVSNEEALSFINSYFKKFPEIKDYMNTTIKTCRKQGFVTNIFGRRIHLRGINDKNFSVRAFQERAAINAPIQGSAADIIRLAMIKIDSILEEKKKAKMLLQIHDELIFECLKKDESEVKKIVKEVMTSVSSSDHHMFSIPLEVSINSGNNWGEAH

SEQ ID NO: 135405 - protein, 425 aa, Unknown
  Bacterial polypetide isolated from the Sargasso Sea
MIKRTKNTDAQFCRDCLHQTKKLSDLCDKCLSPRVINHKELKNLSIAHIDCDAFYASVEKRDNADLKNKPLIIGGGDRGVVSTACYIARTKGIHSAMPIFKARKLCPEAIILRPNMGKYKKASYEIRDLMKELTPLVEPISLDEAFLDLSGTFKLHQKIPAILLAELVNKIKKHVGINVSVGLSYNKYLAKVCSDLDKPKGFSVIGKEESKDFLSNKPVSLLWGIGKKFTNKLNSDGIINIGQIQKIEIKELVKRYGVIGLHIYQLSNGEDSRSIRSNRPIKSISHETTFTKNIKNRKKLENILSDLSRKVALRARKNGLGGKTINLKLKTKNFKSISRSKTISNPTLLERKIYKIAKDLLTNIKDNEEYRLIGVGISELVDENFCDLDNLIDTNENNEKKLDQAINSLRDKFGSNIINHGKNYE

SEQ ID NO: 135406 - protein, 520 aa, Unknown
  Bacterial polypetide isolated from the Sargasso Sea
MELVPKTASQLINEFNDIDGLIKNLIKINKEKRRNILAESENDIRLSLKLVTLKNDVQIPESINRIRTYNELKNENNNIFNFLKEQGFRSTSERLKSNSFISSYNDNIVPKKEIKTKFQLINSKNDFEKVLSEIKKNGICAIDTETNSLDIEKAKLVGISICTSENISYYIPINHTSLDGSKKIDNQLEEKYVINHINKICENESILKIGQNIKYDIRILNKYGVIFNSIADTMLISYSIDNGIFKHNLDDLSFNHLNHTTIKYKEVVGTGKNEITFDKVTIDKAINYAAEDSLLTFRLFHHLYPRLIKEKANFVYQNIDLPLVEVLSSIEANGIEVNKDFLTDLSNEFENESKKLEKNIYKLSKEGFNIGSPKQLGEILFVNLKIPGGKKTKSGTYSTDSSTLNNLALDGFEIAQLVLDWRELTKLKSTYTDALFRLTDDKSRVHTSFGLANTLTGRLSSTDPNLQNIPIRTENGKKIRTAFVSGKGKKLVSFDYSQIELRLAAEISSDKNFIKAFKNQ

SEQ ID NO: 135407 - protein, 301 aa, Unknown
  Bacterial polypetide isolated from the Sargasso Sea
TKLKNTYSDALPEHQNPKTNRIHTSFLLAATTTGRLASSDPNLQNIPIKTEDGKEIRKSFIAEKGCSLVSADYNQVEMRILAEIADVKELKKAFINNEDIHSITASQVFNKKVKDVDKDMRRKAKAINFGIIYGISQYGLAKQIGVSNVEAEDFLNSYFIKFPEIKDYMNETIKFCRKSGYVNNIFGRRTHLIGINDKNYNVRNFQERAAINAPIQGSASEIMRLAMMRLDEKFLQYDADLVSILLQIHDELIFEIKSSKVGEITKIIKEIMISVKSSDHHKFTVPLLVDLNSGENWGVLH

SEQ ID NO: 135408 - protein, 266 aa, Unknown
  Bacterial polypetide isolated from the Sargasso Sea
KFILPTLPVDDYPIMTNIEKGHEFNLQSIDLANLIDNTKFAISLEETRYYLNGIFLHVPNSDIQKLRAVATDGHRLAQAEIPLPEGASDMPGIILPRKAVGEIRKLTDGTDGKIKVIISNTKAQFVFPNSILTTKLIDGSFPDYQRVIPKENLNKLVVSNQEFSKAIDRVSTVSIEKTRAVKLSLSNNLLSLNVNSHDLGNASEDLEIDYNYDILEIGFNSKYLLDIASQIKGKEIEILLSDSASPALITDPDQDGVIFVLMPMRV

SEQ ID NO: 135409 - protein, 463 aa, Unknown
  Bacterial polypetide isolated from the Sargasso Sea
VLSEIHLSHKTISYKDVVGTGKKQLNFSDVNLEEATKYAAEDADVTLRLHNLLIERVNNEKLKKIYEIFEKPMVKLLAKLEINGVKVDDVYLKQLSKKFEDRLRKIEKEIYKASGKEFNIGSPKQLGEIIYNELKIAKLKKTKKGSLATSAKILEDLALTGHKFPNLVLEWRQVSKLKSTYTDALQSHINNKTKRVHTSFLLAATNTGRLASSDPNLQNIPIKTLDGKEIRKAFIAEKNNILISADYDQIEMRILADMADVKELKKAFKNNQDIHVLTASQVFGLSTNKVTDDFRRKAKAINFGIIYGITQYGLAKQIAVSNQEALDFINSYFKKFPEIKEYMNSTIKTCRKQGYVTNIFGRRIHLRGINDKNFSVRSFQERAAINAPIQGSAADIIRLAMIKIDKILEDKKNKAKMLLQIHDELIFECLQKDEKEIKKIIKDAMTSISSSEHHMFSILLEVS

SEQ ID NO: 135410 - protein, 782 aa, Unknown
  Bacterial polypetide isolated from the Sargasso Sea
IVSSDKDLMQLYRKNVRIYDPMKNKFINEEDVQNKFGVEAGKVIDVQALAGDSTDNVPGVPGIGVKTAAELIKEYGNLENLLKNAHNIKQNKRRETLIENKDKAIISKKLVTLKKDVPVKNKIEEFELKEIDKQKLYNFLREMEFNRLLSSAISIYGETDFSQSKNKNTDEKNNSKITKENYHLIKNEEELQKWLKAAEDKGEFAIDTETNSLDAHQAKLVGISISHTIGKGCYIPTGHKNFKNLDESKILKTLKPYLEDKSIKKIGQNIKFDYIIFNKRGIDINSLEDTMLMSYVLDAGKNRHNMDTLAEIHLGHKTIQFKDLVGTGKKQINFSEVDVNIAKDYAAEDADITYRLYKNFLKSLKEENLLNIYEIFEKPLVKILAKMEIEGIKLDEKSLKNLSSKFEKKIKSLEQKIFKLSKKEFNIGSTKQLGEIMYNDLKIASLKKTKKGSFATSASVLEDLAFKGYDFPKLVLEWRQTSKLKNTYSDTLPEHINKNTKRIHTSFLLAATTTGRLASSDPNLQNIPIKTEEGKDIRRAFISEKNKKLISADYNQIEMRILADLADVKELKKAFNNNDDIHSLTASQVFGTEINKVDSDMRRKAKAINFGIIYGISQYGLAKQINVSNVEAEEFLNSYFLKFPEIKEYMSETIKFCRRSGYVNNIFGRKTHITGINDKNFNVRNFQERAAINAPIQGSASEIMRMAMIRLDDEISDKKNNNLKMLLQIHDELIFEVEEKNIINNSKIIKKIMTSVKDSNLHSFSIPLLVDINSGDNWGQLH

SEQ ID NO: 135411 - protein, 438 aa, Unknown
  Bacterial polypetide isolated from the Sargasso Sea
YASEDADITFRLYKVFSKNIKLEKLFNIYEIFEKPLIKILAIMEIYGIKVDQKFLQLLSNKFEKKINNLEKEIYKITKKEFKIGSTKQLGEVMYNEMKISSLKKTKKGSYATSAQVLEDLAFKGHKLPKLVLDWRQVTKLKNTYSDSLQEHINPKTKRVHTSFLLAATSTGRLASSDPNLQNIPIKSEDGKEIRRAFVAEKNSKLISADYNQIEMRILADLADVKELKKAFKNKEDIHSLTASQVFNTNIKKVNPDMRRKAKAINFGIIYGISQYGLAKQIGVSNIEAAEFLNSYFLKFPEIKDYMESTIKFCRKSGYVNNIFGRRTHITGINDKNFNIRNFQERAAINAPIQGSASEIMRMAMIRISQKLEEIKESNCKLLLQIHDELIFEVKKEYIDKYSKIIQEQMSSVKNSDLHSFSIPLLVDINVGNNWGDLH

SEQ ID NO: 135412 - protein, 746 aa, Unknown
  Bacterial polypetide isolated from the Sargasso Sea
MVTKKEKLLIVDGHAMVFRAWFSIPERLNSNKIDTRGAFGFINTLIKSIRENNITHIAVCFDTKAATFRDEIFPEYKAQRPPVDPDLHKQIPIAKDLLESMDIPVFEKDGFEADDLVGTISEIANSKNINCLILTGDADQLQLVNEKTNVLMYSGFGDIRIYDEEKVQERYDGLGPEFVAEIKALEGDPSDNIPGVPGIGKKAARALLSEFGHFESLFMNIENIENMSIRGAKRIQNILSENIEIAKKGLSLTQIVREVDIDFSIDNCEFINHNIEEIKATFEHYELRNSFNNLKSIIEFPSEFQLEINVESNNKDIPNDQLVLVNDQESFERMITDMNSTDHFSFDTETTGLKTLEDEIIGVSFCNSETKSYYLVIRHDNLSVSFTKENFKKLKSLFENSNISKSAHNANFDIMVLRNFGIDVENLNFDTVIAASLCGRKSLGLKNLSSEILNINMTKIEELIGTGKNQKTLNQANISEVYKYAAADSLITYKLRNFFKEELKKFNQEDLFYEVEIPLIKEIINMQYNGFLIDSEKLSEMSEKLEVELNELDQAIHNTYPEKDFNLNSGKQVAEILIGELKAPAIKKTKTGISVDADVLENYSKNKNLDERVNQISSGILRYRELSKIKSTYVDSLPNLINKRTKRIHTTFNQLGTSTGRLSSQNPNVQNIPVRTDIGRQVRSAFITDSKNNFQMLAVDYSQIELRVLAHLSKEENLVKAFINGEDIHNSTAKLMYSTEEVSSEQ

SEQ ID NO: 135413 - protein, 255 aa, Unknown
  Bacterial polypetide isolated from the Sargasso Sea
MSTLYAFDSMSVLYRGYFAMIRNPLINSKGINTSGIRTVLMQLVKIIEEVRPQYLAVASDGPEDTFRHIRYPEYKATREKMPEDLVEQLPYLPRAMKALKLPYLLIPGYEADDIIGTLMSLCLNNNIRGVMVTSDKDYLQLVSETTEMLNHKNEIVGLSGVQERFGCRPDQVIEVLGLMGDSSDNIPGVRGVGEKTAIKLIQQFGSIEKVYENLEEVPGKSLKSKLEEGRDQAMLSKELVTIHREVPLEIDLEDL

SEQ ID NO: 135414 - protein, 922 aa, Unknown
  Bacterial polypetide isolated from the Sargasso Sea
MTKIKKTDHFYLIDGSGYIFRAYYALPPLTRKSDGLPTGAVNGFCNMLFKLLEDSKSDDNKEKPTHFVVIFDSARKNFRNEIYSDYKGNRSDAPDDLIPQFDYIRKSVEAFNLPSVELLNYEADDLIATYSEQILSAGAKVTIISSDKDLMQLYKKNIRIYDPMKNKYISDQDILDKFGVEPSKVIDVQALAGDSSDNVPGVPGIGVKTAAELINEYKTLENLLKKASEIKQNKRRQTLIENKDKAIVSKKLVTLKKDVPIKNEIIEFKLKNVDKKKLYDFLREMEFNRLLSSAISTYGEIGFEKDQKIEKSINQKINSKNYQLIENEKDIDKWLKEAEEKGEFAIDTETTSLDPHQADLVGISLSTKVGHACYIPLAHKSKKNMNEKSIIKKIKPILEDKSIKKIGQNIKFDYIILFHRGIDMTSMEDTMLMSYVLDAGKNRHNMDTLSQIHLDHKTISYKDLVGTGKKQINFSEVDLDLAKNYASEDADITFRLYQIFIKNLKSEKLLNIYEIFEKPLIKILAHMEICGIKVDNNFLKILSKKFEGKIQKLEKEIFKISKKEFNIGSTKQLGEIMYNELKIANIKKTKKGSFATSAQVLEDLSFKGHELPKLVLDWRQVTKLKNTYSDSLQEHINKNSKRVHTSFLLAATSTGRLASSDPNLQNIPIKSDDGKDIRKSFIADNQSLLISADYNQIEMRILADLADVKELKKAFKNNEDIHSLTASQVFNVKVKDVNSDMRRKAKAINFGIIYGISQYGLAKQIGVSNVEAEEFLNAYFIKFPEIKNYMEYTIKFCRKSGFVNNIFGRRTHVTGINDKNFNIRNFQERAAINAPIQGSASEIMRLAMIRINKKFESIKNLNCKILLQIHDELIFEVKKDEVLEYEKLIKKEMSSVKDSDLHTFSIPLSIDINHGNNWGELH

SEQ ID NO: 135415 - protein, 466 aa, Unknown
  Bacterial polypetide isolated from the Sargasso Sea
QTISYKDLVGTGKKQITFDDVDIDQAKDYAAEDADVTYRLYKKFLKDIKEEKLVNIYESFEKPMIEILAKMEISGIKLDKDFLIKLSKKFEKKIAELEKDIFKISKKKFKIGSTKQLGEIMYNDLKISALKKTKKGSFATSASVLEDLAFKGHELPKLVLEWRQISKLQNTYSDSLPEFINPASKRVHTSFLLAATTTGRLASSDPNLQNIPIKSEDGKEIRKAFISEKGNSLLSADYNQIEMRILSDLADVKELKKAFNNNEDIHSLTASQIFNVEINKVTKDMRRKAKAINFGIIYGISQYGLAKQISVSTADAEIFLKAYFKKFPEIKDYMSSTIKHCRRSGFVNNIFGRKTHIIGINDKNFNIRNFQERAAINAPIQGSASELMRIAMIRIFNKLNDDTKFKTKLLLQIHDELIFEIPNNELDRIKKIIKSEMTSVKSSEHHTFSIPILVDVNIGDNWGMLH

SEQ ID NO: 135416 - protein, 281 aa, Unknown
  Bacterial polypetide isolated from the Sargasso Sea
RVHTSFLLAATNTGRLASSDPNLQNIPIKSADGKEIRKAFVADKGNILISADYSQIEMRILADMADVKELKKAFKNNEDIHSLTASQVFGVPIKKIDEDLRRKAKAINFGIIYGITQYGLAKQISVSNQEAQDFINEYFKKFPEIKDYMNSTIKFCRKNGYVNNIFGRRIHLRSINDKNFSIRSFQERAAINAPIQGSAADIIRLAMIEIDRVTEKEKKISAKMLLQIHDELVFESSIKNQKNNEKLIKKVMTSVSASEHHMFSIPLEVNVNSGYNWGEAH

SEQ ID NO: 135417 - protein, 917 aa, Unknown
  Bacterial polypetide isolated from the Sargasso Sea
MSKTSKKENYYLIDGSGYIFRAYYALPPLSRKSDGLPTGAVAGFCNMLFKLLEDAKSSDNKSKPTHFAVIFDSARKNFRNEIYSEYKANRSDAPDDLIPQFDYIRKSVEAFNLPSIELINYEADDLIATYSEQIIKKGGDVTIVSSDKDLMQLYKKNIRIYDPMKNKFINEEDIQKKFGVKAEKVIDVQSLAGDSSDNVPGVPGIGIKTAAELINEYGTLENLLSNSKNIKQNKRRETLIENKQKAMISKKLVTLKKDVPVKVPYSDFVLKQIDKKKLYNFLRDMEFNRLLSSAISTYGEVDFKDDRKEFFRAKPETKIDKRKYILIKNENELSELISKIEQESEISIDTETSSLDPHQAELIGISISPKIGEAYYIPLNHKNFENLMEKNVLKKLQNILEDKSIKKIGQNIKFDYIMLYHRGIDLEPLEDTMLMSYVLDAGKNRHNMDTLSEIHLGHKTISYKDLVGSGKKQINFSEVKIEVAKDYAAEDADITFRLYKKFLINLKNEKLMNIYETFEKPLIKILAHMEMDGIKLDKKFLNKLSENFQKKISDLEKKIFKISKKEFKIGSTKQLGEVLYNDLKISALKKTKKGSFATGASVLEDLAYKGHELPQLVLEWRQLTKLKNTYSDSLPEFLNPNTSRVHTSFLLAATTTGRLASSDPNLQNIPIKSNDGKEIRKAFISDKGYNLLSADYNQIEMRILADLADVKELKKAFNNKEDIHSLTASQVFNVKIKDVTSELRRKAKAINFGIIYGISQYGLAKQISVTTNEADEFLKSYFKKFPEIKDYMSTTINFCRKSGYVNNIFGRRTHITGINDKNFNVRNFQERAAINAPIQGSASELMRMAMINIFEKIKVKKIKDCKLLLQIHDELIFEVKKDNIENIKKLVENGMKSVQKSDLHSFSIPILVDVNIG

SEQ ID NO: 135418 - protein, 272 aa, Unknown
  Bacterial polypetide isolated from the Sargasso Sea
MNRERSSADAEIPPDRKVSCEDASTILELHDLFEQQLKQAEMINSYRYIEIPLAETLARIEWSGVRVDTEKLKEISQEFEERLDELRERIHEQAEETFNVNSVVDLQNVLYEKFKLHERFKVKPRKIKLGNGMSTDEETLEKLCEDPLPRAILDYRSLNKLKNTYVDQLPDHVHPRSGHIHSRFQQTATATGRLSSDNPNMQNIPIRSAEGRRIREAFVPSDSNRILISADYSQIELRIVAHYSKDPTFLEAYRNNEDIHALTASTIFKVPV

SEQ ID NO: 135419 - protein, 905 aa, Unknown
  Bacterial polypetide isolated from the Sargasso Sea
MPPNKTKKKRLYLIDGYAMLYRAHFAMIRNPLINSKGMHTSALFGFINQIMKLINNEKPDLMIAAFDSSKKTFRHEKYPEYKATREKMPDEMIGQLPYLWKILQSMDIPTLEEPGFEADDIIGTLATKAPCDEFEVFIVSGDKDFMQLINENIFLYAPSGRQADIRIYDRSGVIDKWGVPPEKIIDLLGLMGDSSDNVPGVPGVGEKTAVKLINEYGSLEKSLENANEVKNKRAREGLLNARSEAVLSKELVTIDTNMNIDIDYKTLNTNTINKESLAEIFQELEFETLHKQIIGNDKKISVDANKPKKDYLTLFKEEEIVQFFKTIKEKQWLSFDIETTSVNPMTCDIVGFSFSFKEHSGVYIPIHYPEREDSLFDDYTNSVIELMRPIMENSSIPKTGQNIKFDALILLRHGLKVEGIRFDTMIAAHLLKPEFRSLKLDNLSLEYLNYPMVPIEDLIGSGRNQISMAEVDIEKVSFYAAEDADVALQLTHIFEKKLKKEGLYNFFSEVEIPLLSVLLEMEFNGMFIDSDLLKSMSTKIGKKINKLVTNIYSESGYEFNVNSTQQLAKILFDIKDLPEVKKRSTAEDVLEKLKNKHVLPGLILEYRKLNKLKNTYIDSLPELVNPLSGRIHSTFNQTITATGRLSSTNPNFQNIPIRTDEGREIRRAFRSKDDDWLIFSADYSQIELRIMAHLSQDKALVDAFNKGEDIHTRTAADVFNVSLEDVQPSMRRTAKIVNFGLLYGAGPFRMSQELGITQKEAKALIETYFSTYSGIKNYVESVMKVAKNSRYVETLLGRRRPVWDIDSSNHLHREAAKRMAINMPIQGTSAEMIKLAMIAISNHISSKSMRSKLLLQIHDELVFEVPKDELEELEGLVLDKMVNALPLSVPIEVDSGYGQSWYEAH

SEQ ID NO: 135420 - protein, 319 aa, Unknown
  Bacterial polypetide isolated from the Sargasso Sea
MAFKGNIFPQLVLDWRQVSKLKNTYSDSLPEHLNPNSKRVHTSFLLAATTTGRLASSDPNLQNIPIKTEDGKDIRKAFVAEKNKLLISADYNQIEMRILADLADVKELKKAFKNNVDIHSLTASQIFNVDIKKVNKDQRRKAKAINFGIIYGISQYGLAKQINVSNYEAEEFLNSYFAKFPEIKVYMDNTIKFCRKSGYVNNIFGRRSHFNAINDKNYNVRNFQERAAINAPIQGSASEIMRLAMIRLDKILSDQKDLKSKMLLQIHDELIFEVEKNEINKMTKIIKEQMASVAVSEYHSFSIPLTVDVNSGDNWGELH

SEQ ID NO: 135421 - protein, 414 aa, Unknown
  Bacterial polypetide isolated from the Sargasso Sea
MVNIYELFEKPMIKILAFMEIEGIKIDNKFLKILSSKFEKKIEKIQKNVFKISKKEFNIASPKQLGEILYNELKIADLKKTKKGSFATSASVLEDLAFKGHEFPQLVLDWRQVSKLKNTYSDSLPEHINPLTNRVHTSFLLAATTTGRLASSDPNLQNIPIKSEDGRDIRKSFIAEKDNVLISADYNQIEMRILADLADVKELKKAFKNNEDIHSLTASQIFNTEIKKVDQDQRRKAKAINFGIIYGISQYGLAKQINVSNYEAEEFLNSYFAKFPEIKVYMDQTIKFCRKNGYVNNIFGRRSHFININDKNYNVRNFQERAAINAPIQGSASEIMRLAMIRLEKRLNEQKNKDTKMLLQIHDELIFETPKFGVEKIRKIITEEMTSVVNSDQHSFSIPLTVDLNIGDNWGSLH

SEQ ID NO: 135422 - protein, 896 aa, Unknown
  Bacterial polypetide isolated from the Sargasso Sea
MFLIDGYAMLYRAHYAMIRNPLITSYGLPTSALFGFLNQLFRILNKEKPDYVATIFDRKEKTFRHKKYPDYKANRDPMPEELQIQLPHLWKLIEALQIINLSKKGYEADDIIGTLAIDGVKNNLEVYIVSGDKDFMQLINDNVFLYAPGTKNKPDKVYDKDGVKDRWGVPPDKIIDLFGLMGDSSDNIPGVSGVGPKSAMKLINEYGTLEETLNNADAVTNKRVRNGLLDGKESAIISKDLVTIVTNVPIKYNFEDLEKKELNINSVESLLTEYEFHALINQLPGTSDLAETVVKKSSKDYKIIKDLDELNKFVQSIKPKTILSFDIETDGLNPMQNNIVGLSFSTKINTGFYIPIEFKDKEKNLFGEDDIGTVIEIIRPIMEDEKILKTGQNIKFDMLIYKRYGVNINGLICDSMLAAHILKPEARSYKLDNLSIEYLNYKMIPIEELIGKGKNQITMAEVELENAGYYACEDADIALQLTNIFLKELKDSDLDHFFNKIELPLIDVLLNMEYEGAFVDEEMLKNMSSDLSKKVEKLSTEIIKEAGSEFNINSTQQLANILFDKLNLTKIKQRSTAEPVLEALRKEHPLPKLILDYRKLTKLKNTYLDSLPPLINKKTGRIHTTFSQTIASTGRLSSSKPNFQNIPIRTEEGREVRKAFKAQKKNWLIFSADYSQIELRVMAHLSNDQSLIESFNENEDVHTRTASDVFGVKINDVLPDMRRTAKVVNFGIMYGAGAFRLSQELGIPRSEAQGIIDTYFKRYAGIRNYMDKTIENAEKQKFVETLLGRRRNIWNVDSENHIQREAAKRMAINMPIQGTAAEMIKLAMLDINRTLESENYRSRMVLQIHDELLFESPEEEIDKLEEMVRDKMVNAMPLIVPLVVDCGRGISWFDAH

SEQ ID NO: 135423 - protein, 437 aa, Unknown
  Bacterial polypetide isolated from the Sargasso Sea
KSLKTWIAEIEVAGVVAFDTETNSLDSMQADLVGLSLSVVGGSACYVPLAHVAPGGSDGELDLGDGGKVVESPKQIKLEKALKLLKPVLEDPGILKVGHNIKYDMHVMARYGIEVAPVDDTMLLSYVLEGGAHGHGLDELATLHLGHTNIKYSEVTGTGKKQIGFAEVALDKALDYAAEDAEVTGRLYRQFKPRVAEERMTGVYETLERGLIPVLSDMERTGIIVDPAFLNDLSKDFEKRTANIAEDVYKLAGHEFNIGSPKQLGEVLFDEMGIDGGKKTKTGAYGTGADVLEGLAAQGHDLPRRVLDWRQLSKLRSTYTDALIKQINPATKRIHTSYAQAIASTGRLSSTDPNLQNIPIRTEEGRKIRQAFVPQKGHVLLSADYSQIELRLLAHVAGIDVLREAFREGQDIHAMTASEVFGIPLEGMEPSVRSRAK

SEQ ID NO: 135424 - protein, 312 aa, Unknown
  Bacterial polypetide isolated from the Sargasso Sea
EIDEKPKELINLILKHREQSKLQNTYAEPLPKLVNEKTGRLHPNFNQAGTSTGRLSSSDPNLQNIPVRTENRNQIRKAFESTSGYVLMSADYSQIELRVLAHLSEEPSLLKAFNNNEDIHESTAKTIYQINDVSKEQRRVAKILNFGVIYGLGPDGVSRQTDLTRTQGKEFIDIYFGKYPGIKNYLNSVINFAKKNMFVETLTKRRRLIPEINSNAFQLRNSSERMAINMPIQGTAADVIKIAMININKEIIEKKMLSKMIIQVHDELIFEVPKEEIFLMESMLRETMSSALKLKVPLIVDIYYADNWGDLK

SEQ ID NO: 135425 - protein, 758 aa, Unknown
  Bacterial polypetide isolated from the Sargasso Sea
KFITEEDVFKKFGVDASKVIDVQSLAGDSSDNVPGVPGIGVKTAAELINKYGTLEKLLKSAHEIKQNKRRETLLENKDKALISKKLVTLDHKSPIKRELSEFELKSIDKDKLYKFLREMEFNRLLSSAISAYGESVLSSSSPEIKSIEKQSPINNKNYHLISNPDEIDEWVKEAEELGEVAVDTETNSLDPHQAELVGISLSPKIGKACYIPIGHKSSKCIKKDIVIKKLKKLLEDPSVKKIGQNIKFDFIVFFKHGITLSAMEDTMLMSYVLDAGKNRHNMDTLSELHLGHKTISFKEMVGTGKKEINFSEVEVDKAKDYAAEDADITFRLYKKFLKNLKSEKLINIYEIFEKPLIKILAFMEIEGVEIDSKFLQSLSKKFEKKILTLEKDIFKISKKEFNIGSPKQLGEIIYNDLKIAGLKRTKKGGFATSASVLEDLAFKGNKFPKLILDWRQLSKLKNTYSDALPEHVNPTTKRVHTSFLLAATTTGRLASSDPNLQNIPIKSDDGKDIRKAFKAKKDHLLISADYNQIEMRILADLADVKELKKAFKNDEDIHSLTASQIFNIDIKKVNQDHRRKAKAINFGIIYGISQYGLAKQINVTNYEAEEFLNSYFGKFPEIKVYMDNTIKFCRKSGYVNNIFGRRSHFNGINDKNFNVRNFQERAAINAPIQGSASEIMRLAMIRLDKKLSESKISKPKMLLQIHDELIFEVPKKDEKLMTKIIKNEMTSVAQSDFHSFSTPLTVDVNVGDNWGMLH

SEQ ID NO: 135426 - protein, 430 aa, Unknown
  Bacterial polypetide isolated from the Sargasso Sea
MDKKTNVSESINDYKTIFSIEDFDILLMKLKKQKFVSLDLETTSLSPINAKIVGLSFSFSAGSGFYIPVAHAEDINQLDLGFVLKGLKPLLEDKNIKKIGQNLKYEYMIFKNHNIELNGLFFDTMIASHIIDSSLQSYSLDNLARRFLDYKMISYKDVTQVDKKKIPFDEVPIDKASVYSCEDADITLRLFEFLKEKLDEYGLFENYINYEIPFIKVLGNIEYSGVNIDTKRLSKLSSEFLGIINKIEKNITGFLGEEINLNSPMQLREILFNKLSLKPNKKTKTGEFSTDSQTLQGIVDQHEVVSEILSYRFYSKLQTTYIDALPGLLDKKTKKIHTSYNQVGTSTGRLSSSSPNLQNIPIKTKEGKRIRDSFSSAKKNMVILSADYSQIELRLLAHFSSDPIMVESFNANDDIHSITAGEIFNIDKDK

SEQ ID NO: 135427 - protein, 432 aa, Unknown
  Bacterial polypetide isolated from the Sargasso Sea
LAVAFDKGGSDIRNEMFPEYKANRDATPEAIKIAVPYIQEILKAMHIPIMEKPGYEADDLIGTLAKQAEKEGYQVFMVTPDKDFAQLVSENIFMYRPARMGNGIEIWGIPEVQAKFEVENPLQVIDFLGMMGDAVDNIPGLPGVGEKTAKKFLAQYGSMEKLLESTHELKGKMKENIEANKEKGILSKKLATILLDCPVTFNEVDFELSKPDVAKTEAIFQELEFRRMQEQFDKMFGDGNEYDEINTSTNDVQKTTKKSTSKNEDQMDLFGFSDDSNQDSNHNSFYATLANTEHFYQIIQGDLALKLLVQNLQNQSSVCFDTETTGLDALTAELVGIAFSYEKGKGFYVPFPENKEEAMVLIQKLQPFFENEAIEKIGQNLKYDLKILSNYNITVKGKLFDTMIAHYLINPDMRHNMDVLSETYLKYSPKKH

SEQ ID NO: 135428 - protein, 745 aa, Unknown
  Bacterial polypetide isolated from the Sargasso Sea
MNKQNRLILIDGSAYIFRAYYGLPPMNRSDGTPINAVFGFTNMLVKLIEDYREDKMIVVFDAARENFRNKIFKDYKANRGETPEELIPQFEIIRECVDAFNIPQIEIEGFEADDIIASYCILAEKQKIESIIVSSDKDLMQLVNKNVTMLDPMKNKSIGIDQVIEKFGLPPEKVIQIQALTGDKVDNIPGAPGIGPKTALQLIEEFGDVKSLIKNANKINQEKRRNIIVDNKDEILVSLELVKLKRDIKLPLTIDNIHSYSSIDTNENLSQFLSNQGFKSIAARLKNNSFIKTNLEDKTQANQIEKKYYLIKKLEDLDKLINLIKKTGFCAIDTETNSLNIEEAILVGVSIAIDENSAYYIPVNHKNLENNKRIKGQINEVELIKALQSICYNKSILKIGHNIKYDLRILDKYNLKFNSIADTMLLSYAIDNGVTKHNMDDLAYLHLNHTNIKFKELVGSGKKAITFDYVNINQALEYAAEDALVTLKLYNLLNNRIKNEKSNFVYNEIDLPLINVLSSIEKSGIKVDTKYLYKLSKEFEKESSILEKKIFKLAGKDFNIGSPKQLGEILFIDLSIQGAKKTKTGTFSTDSSTLSNLSEQGYEIASLILEWRELTKLKSTYTDALQNQATKDNSRVHTSYGIANTLTGRLSSNDPNLQNIPIRTNNGRKIRKAFICDTKKTLISFDYSQIELRLAAEISGDNNFIEAFKNNEDIHSSTACQIFGTSSKKLDSEMRRKAKAINLEF

SEQ ID NO: 135429 - protein, 461 aa, Unknown
  Bacterial polypetide isolated from the Sargasso Sea
KDLVGTGKKQLNFSEVNISEAKDYAAEDADITFRLYKIFLKSLKAEKLLNIYELFEKPLIKILAEMEIKGIKLDKSSLNKLSSKFSTKIEKLEKSIFKISKKIFNIGSTKQLGEIMYNDLKIAALKKTKKGSFATSASVLEDLAFKGYEFPKLILEWRQISKLKNTYSDALPEHINQNTKRVHTSFLLAATTTGRLASSDPNLQNIPIKSDDGKDIRKAFVSEKNNKLISADYNQVEMRILADLADVKQLKKAFLNNEDIHTLTASQVFGKEINKIDSETRRKAKAINFGIIYGISQYGLAKQINVSNNEAEEFLNSYFKKFPEIKDYMKTTVNFCRKSGYVSNIFGRKTHLTGINDKNFNIRNFQERAAINAPIQGSASEIMRLAMIRINKEISNNKNNSLKMLLQIHDELIFEESLKETKKSTKLIKDLMLSVKNSELHSFSIPLLVDVNIGENWGELH

SEQ ID NO: 135430 - protein, 212 aa, Unknown
  Bacterial polypetide isolated from the Sargasso Sea
MKIEVKTENLLKCLQSVIGVVERKQTMPILANVLVNVADDKLSITATDLEVELISKTTVSSTENGSFTLPGRKLLDICRALPVSSDLTLQQDDSKISISSKRSKFSLSTLPESEFPLIKGINDVEVISVDQSSLKNLINKTHFSMAQQDVRYYLNGLLVESEGNKLRAVATDGHRLAISDTDLTDPRDGKKQVILPRKGVIELQRLLDKKGS

SEQ ID NO: 135431 - protein, 724 aa, Unknown
  Bacterial polypetide isolated from the Sargasso Sea
LLLVDGSSYLYRAYHAMPDLRGPEGGPTGALYGMINMLRRMRKEVTAEYSACVFDAKGKTFRDDWYADYKANRPSMPEDLARQIEPIHVAVRALGWPLLMIEGVEADDVIGTLSTEAEKRGMNVIVSTGDKDLAQLVSDHVTLINTMTNEKLDREGVIAKFGVPPERIIDYLSLIGDTVDNVPGVEKCGPKTAIKWLTQYETLDGIVAHADEIKGAVGDNLRRALDFLPMAKKLVTVERQCDLTGHIVSIEESLQSRPESREELRDVFTRNGFKTWLREVEIADAVEGPETDVPPALTVDHERHYDTVQSWEQFDTWLEKINAAGLTAFDTETTSLDPMTAQIVGLSLSVEPGRAAYVPLAHRGPDAPVQLPRDEVLAKLKPWLESAEHKKVGQHMKYDEQVLANYGIEMRGVEHDTLLESYVLESHRTHDMDSLALRHLGIKTIKYEEVAGKGASQIGFDEVALDKAAEYAAEDADITLRLHQALYSQVAAEKTLDYVYRDIEVPTSRVLRKMERTGVLIDAEKLRAQSSEIATRLIQLESEAYELAGGEFNLGSPKQIGQIFFEKLELPVVKKTPSGAPSTDEEVLQKLAEDYPLPKILLEHRGLSKLKSTYTDKLPRMVNATTGRVHTNYAQAVAVTGRLASNDPNLQNIPVRTAEGRRIREAFIAPPGHKLVSADYSQIELRIMAHISGDESLLRAFSQGEDIHRATAAEISADAARSVE

SEQ ID NO: 135432 - protein, 367 aa, Unknown
  Bacterial polypetide isolated from the Sargasso Sea
KIYKISKKKFNIASTKQLGEIMYEDLKIASLKKTKKGSFATSASVLEDLAFKGNEFPKLVLEWRQISKLKNTYSDSLQEHINPKTKRVHTSFLLAATTTGRLASSDPNLQNIPIKTEDGKDIRKSFVSEKGNILISADYNQIEMRILADLADVKELKKAFNNQQDIHSLTASQVFNVKISEINSDMRRKAKAINFGIIYGISQYGLAKQIMVSNNEAAEFLNSYFKKFPEIKDYMNETIKFCRKSGYVNNIFGRRSHITGINDKNFNIRNFQERAAINAPIQGSAAEIMRLAMIRISKRIEEAKEKKCKMLLQIHDELIFEVPKESEKKFTNLIRQEMTSVKDSDLHSFSTPLTVDVNSGENWGLLH

SEQ ID NO: 135433 - protein, 355 aa, Unknown
  Bacterial polypetide isolated from the Sargasso Sea
ASPKQLGEIIYNELKIAGLKKTRKGSFATSAVVLEDLAFKGYEFPKLILDWRQTSKLKNTYSDSLPQHINNNTNRVHTSFLLAATTTGRLASSDPNLQNIPIKSEDGKDIRKAFISRKGYSLVSADYNQIEMRILADLADVKELKKAFKNNEDIHSLTASQVFNIDIKKIDQNARRKAKAINFGIIYGISQYGLAKQINVSNHDAEKFLNSYFLKFPEIKKYMDSTINFCRKSGYVNNIFGRRSYFNGINDKNFNVRNFQERAAINAPIQGSASEIMRLAMIRLDKKFKSLKYIKSKILLQIHDELIFEVPNSEIKKIIPIIEQEMTSVANSDLHSFSTPLTVDINSGDNWGILH

SEQ ID NO: 135434 - protein, 224 aa, Unknown
  Bacterial polypetide isolated from the Sargasso Sea
DYSQIELRIMAHLSKDQGLMDAFANGQDIHQATAAEIFSINIDDVTPNQRRSAKAINFGLIYGMSAFGLSKQLQITRAEAQNYIEQYFERYPGVKNYMDETKSSAKQNGYVETVLGRRLYLADIESSNYQRRQYAERSAINAPMQGTAADLIKMAMTDLHRRIRNESLDAKIIMQVHDELVIEVDENQLDELSDLTVNIMADIFKLDVDLKVDADIGNNWDEAH

SEQ ID NO: 135435 - protein, 208 aa, Unknown
  Bacterial polypetide isolated from the Sargasso Sea
EAFKNNEDIHSSTASQIFCVDLTKLDPEMRRKAKAINFGILYGISPYGLAKQLSVTNSEAKIYIENYFKKYPKIKQYMDSQIEFAKTNLYVETIFGRRCNVKNINDKNFAVRGFAERQAINAPIQGTAADIIKLAMIELNRIILKEELKAKMLLQVHDELIFEIEKREKDTSVKKIKFVMENTHLQFKDFQVPLLVDYGFGNNWGDAH

SEQ ID NO: 135436 - protein, 508 aa, Unknown
  Bacterial polypetide isolated from the Sargasso Sea
GRFKVYLIDEVHMLSRHSFNALLKTLEEPPPYVKFLLATTDPQKLPITILSRCLQFHLKSLDQTQIAKQLEWVLDQEGQPFEPRALLALAKAADGSMRDALSLTDQALAHGNGSVRLDSVLAMLGTLDHRHLHQLLEAVLRQDAPATMAKITEIATLGPDFDQLHAELEGLLHRIAMAQLLPATVQEQGADADALLQLAQAMSPEEVQLCYQIVLGGRKDLPWAPDGRTALEMTCLRMLAFSPRREVLHPASLTALPPAMGGLAPEARSGAAAPGKPQGAEPAPAASAAPQASSAVAATAPAATMAPVVMAEPTAVEPAPDRQDNGAELDPLFAEQDELLREAEQMGYEAATLPAASGDLPAEASVAPPSVPVMAEPEPIAQAEVVADAEAVPSTVSSMQSLLGKRNLLRSRLRSEPSAATSAARTAPAKPVAAARPATAMQPAAVTPAPAFEPQPARVDGQGQTSARPAPQTGYDDLPPLDAYEESGSDYEEYLSQGFSDAFASVPL

SEQ ID NO: 135437 - protein, 412 aa, Unknown
  Bacterial polypetide isolated from the Sargasso Sea
MEGAYHNIEIPLAGTLAELEMTGVKLDVGGLKKVALEFDGRLTELRNKITELSGEEFNPNSVIELQKILYEKLRMHERFNIKPKKIKLGNRMSTDEETLEKLAEDELPRTILDYRTLNKLKNTYIDQLPEYVHLNSGNIHSTFHQTGTSTGRLSSENPNLQNIPVRSTEGRRVRSAFIASGTENILISADYSQIELRVVAHYSKDPTFLEAYRRNLDIHSLTASTIFGVAEKDVTREMRDRAKEVNFGLIYRMGAERLSIVSKTTKAEAKEFIERYFEKYSTIHALQEQFLEQARKEGFAETLFGRRRYLPDINSKGLLKRMAEGAAINTPIQGSAAEIIKLAMIDVENLLREKKMQSRMILTVHDELVFDALKEEEYELCEIVKHAMENVVGLEVPLLVEIGKGQTWLEAH

SEQ ID NO: 135438 - protein, 774 aa, Unknown
  Bacterial polypetide isolated from the Sargasso Sea
MQLYKKGVRIYDPMKNKFINQDDVHNKFGVTPEKVIDVQSLAGDSTDNVPGVPGIGVKTAAELINQYGTLENLLKNASKIKQNKRRETLINNKDEAIISKKLVTLKKDVPVKNKIEEFKLKSVDQEKLYTFLREMEFNRLLSSAISKYGGTNNPGTKDIDKNLEKTAEIKKKNYELIKNEKEIEDWMKESEEIGEFAIDTETTSLDPHTAKLVGISISNRIGNACYIPLNHVSGNNLNEKKVLSVLKNYLEDESIKKVGQNIKFDFIVFYHRGITLNSMEDTMLMSYTLDAGKNRHNMDTLSEIHLGHKTIKFKDLVGTGKKQLNFSEVDISEAKDYAAEDADITFRLYKIFLKSLKAEKLLNIYELFEKPLIKILAEMEIKGIKLDKSSLNKLSSKFSNKIQKLEKSIFKISKKIFNIGSTKQLGEIMYNDLKIAALKKTKKGSFATSASVLEDLAFKGYEFPKLILEWRQISKLKNTYSDALPEYINQNTKRVHTSFLLAATTTGRLASSDPNLQNIPIKSDDGKDIRKAFVSEKNNKLISADYNQVEMRILADLADVKQLKKAFLNNEDIHTLTASQVFGKEIDKIDSETRRKAKAINFGIIYGISQYGLAKQINVSNNEAEEFLNSYFKKFPEIKDYMKTTVNFCRKSGYVSNIFGRKTHLTGINDKNFNVRNFQERAAINAPIQGSASEIMRLAMIRINKEISNNKNNSLKMLLQIHDELIFEESSKETKKSTKLIKDLMLSVKDSELHSFSIPLLVDVNIGENWGELN

SEQ ID NO: 135439 - protein, 465 aa, Unknown
  Bacterial polypetide isolated from the Sargasso Sea
TIKFKDIVGTGKKQINFSEVDLEVAKNYASEDADITYRLYKIFLKSLKSENLINIYEIFEKPLIKILAMMEINGIGLDKGFLKKLSSKFSSKIQQFEKKIYKISNKKFNIASTKQLGEIMYNDLKISSLKKTKKGSFATSASVLEDLAFKGHELPKLVLDWRQTSKLKNTYSDSLPEHLNSKTNRVHTSFLLAATTTGRLASSDPNLQNIPIKSEDGRDIRKAFISEKNKKLISADYNQIEMRILADLADVKALKKAFLNSEDIHSLTASQVFGVEIKKVNSEMRRKAKAINFGIIYGISQYGLAKQIGVSNNEAEEFLNSYFQKFPEIKEYMNSTIKFCRKSGYVQNIFGRKTHIIGINDKNFNVRNFQERAAINAPIQGSASEIMRLAMIRLNSELNLPKNQNLKMLLQIHDELIFETNINDLKKSSKLISDIMMSVKNSEQHSFSIPLLVDVNSGKNWGELH

SEQ ID NO: 135440 - protein, 428 aa, Unknown
  Bacterial polypetide isolated from the Sargasso Sea
RLYKKFQKSLKDEKMINIYEIFEKPLLKILAHMEIEGVKIDNKFLKSLSTKFEKKIVKIQNEVFKISKKEFNIASPKQLGEILYNDLKIADLKKTKKGSFATSASVLEDLAFKGHKFPQLVLDWRQVSKLKNTYSDSLPEHINPNTQRVHTSFLLAATTTGRLASSDPNLQNIPIKSEDGKDIRKAFIAKKDHVLISADYNQIEMRILADLADVKGLKKAFKNNEDIHSLTASQIFNVDIKKVNQDQRRKAKAINFGIIYGISQYGLAKQINVTNHEAEEFLNAYFLKFPEIKIYMDRTIKFCRKSGFVNNIFGRRSHFININDKNYNIRNFQERAAINAPIQGSAAEIMRLAMIRLDKKLSDQKNQNTKMLLQIHDELIFETPKEEVKRISKIIIDEMSSVVKSEQHSFSIPLTVDLNTGENWGTLH

SEQ ID NO: 135441 - protein, 376 aa, Unknown
  Bacterial polypetide isolated from the Sargasso Sea
MKYTLDYKANREAMPDELVSQIQLLYKALDYNGLKPIIIEGYEADDVIGTLTKKFKDEIEILIFSGDKDFSQLVDDRVSIINPVTYKPLDHDGIFEKFNVYPKEFIDFLALVGDKSDNIPGVDGIGPKTASSLIRKFGSTENIIKNADKITGKNKEKIKNSQNNINLSKKLAEIKCDVKNSYTLDQLIKKDIQLSELIQLYKKLEFKNLLKDIDRSNEKPDKDNTKITKKKYSIISDEKKLNKLIEEINDKKIISLDLETTSLDYIKAEIVGISISYTVAEAFYIPVMHDDDSIKQIKRDKVLKKLHKIFESKLIKKIGHNLKYDKNVLFNYGINLQGVSDDTMVLSYVYNSGIMRHNLDSLASMYLDYETIKYEE

SEQ ID NO: 135442 - protein, 229 aa, Unknown
  Bacterial polypetide isolated from the Sargasso Sea
VLISADYSQIELRIMAHLSGDKNLTHAFNNNIDVHSATASEIFNISLEEVTPEHRRSAKAINFGLIYGMSAFGLTRQLGIPRHEAQAYLDTYFERYTGVRKYMDTTKELAKKNLFVETILGRKLHVAAINDSNGLRRQAAERAAINAPLQGSAADIIKKAMIDVDQWIGKNNSDIKMIMQVHDELIFEVKKGFADEALKNIISLMEGSVKLDIPLIVDANTGANWNEAH

SEQ ID NO: 135443 - protein, 924 aa, Unknown
  Bacterial polypetide isolated from the Sargasso Sea
MNKIKNSDHYYLIDGSGYIFRAYYALPPLTRKSDGMPTGAVSGFCNMLFKLLEDSKSDENKNKPTHFAIIFDSARKNFRNEIYSDYKANRSDAPDDLIPQFEYIRKSVEAFNLPSIELLNYEADDLIATYSEQILKEGAKVTIVSSDKDLMQLYKSNIRIYDPMKNKFISNEDINNKFGVNPEKVIDVQALAGDSSDNVPGVPGIGVKTAAELINEYGNLENLLRNSEKIKQNKRRETLIQNKDKAIISKKLVTLKKDVPIKIKISEFKLKEINKDRLYNFLREMEFNRLLSSVISTYGDINFKDKNKDFDNKQKKQSISKNNYQLITKVEEINKFLNEAEENGEIAIDTETSSLDAHQAKLIGISLSTKIGKACYIPIGHKTGINLDEKTVVQKIKPILEDQSIKKIGQNIKFDFIILNNRGINMNAMEDTMLMSYVLDAGINRHNMDTLSEIHLGHKTISFKDIVGSGKKQINFSEVEIDKAKNYAAEDADITYRLYKLFSKRLKLEKLLNIYEIFEKPLIKILALMEVRGIKVDKKILTILSNIFDQKTKKLEKEIYKISKKEFKIGSTKQLGEIMYNEMKISSIKKTKKGSFATSAQVLEDLAFKGHKLPKLVLEWRQVTKLKNTYSDSLQEHINSNTKRVHTSFLLAATTTGRLASSDPNLQNIPIKSEDGKEIRKAFVAEKHNKLISADYNQIEMRILADLADVKELKKAFNNKEDIHSLTASQVFNTSITKVNPDMRRKAKAINFGIIYGISQYGLAKQIGVSNVEASEFLNAYFLKFPEIKSYMDATIKYCRKSGYVSNIFGRRTHVTGINDKNFNIRNFQERAAINAPIQGSASEIMRMAMIRVNKKLEEIKDSKCKMLLQIHDELIFEVNENDVKKYSKIIQDEMSSVKDSNLHSFSIPLLVDINVGNNWGELH

SEQ ID NO: 135444 - protein, 454 aa, Unknown
  Bacterial polypetide isolated from the Sargasso Sea
KNQKTLNQIDISKVYKYAAADSLITFKLRNFFIEELKKFDQENLFYNVEIPLINEIIDMQFSGINLDINLLGNMSNKLEIDLNEIENTIHNIYPEKEFNLNSGKQLSEILVENLKAPPIKKTKTGISVDAEVLEKYSKDKDLDERVQQISSGILKYRELAKLKSTYVDSLPSLVSKKTKKIHTTFNQIGTSTGRLSSQNPNVQNIPVRSKIGKQVRSAFIVDYKKNYQMLSVDYSQIELRVLAHLSKEENLVMAFNNGEDIHNSTAKLMYETNDVNSEQRRIAKILNFGVLYGLGPHGVAQQTDLSREQGKQFIDLYFGKYPGIKDFQKLQIDNSKKTGYSKTLLGRRRYLEDINSPNARIRGFAERIAINMPIQGTAAEIIKVAMIKLGQKIRYEGMRSKMLVQVHDELIFEVAPGELMELGSMINEIMPEAIKLDVPVLVDIKTGSSWGSLE

SEQ ID NO: 135445 - protein, 301 aa, Unknown
  Bacterial polypetide isolated from the Sargasso Sea
MNYRTLNKLKNTYIDQLPEYVHLKSGNIHSTFHQTGTATGRMSSENPNLQNIPVRSTEGRRVRRAFIASGTENILISADYSQIELRVVAHYSKDPTFLEAYRRNLDIHSLTASTIFGVEEIDVTREMRDRAKEVNFGLIYRMGAEKLSIVSKTSKSEAKEFIERYFEKYSTIHALQERFLEQARKEGFSETLFGRRRYLPDINSKGILKRMAEGAAINTPIQGSAAEIIKLAMIAVENLLREKKMQSRMILTVHDELVFDALKEEEYELCEIVKHAMENVVGLEVPLLVEIGKGQNWLDAH

SEQ ID NO: 135446 - protein, 457 aa, Unknown
  Bacterial polypetide isolated from the Sargasso Sea
GTGKKEINFSEVELDKAKDYAAEDADVTFRLYKKFIKNLKSEKMINIYEIFEKPLIKILAFMEIEGVEIDSKFLKSLSSKFEKKIKKLEKKVFKISKKEFNIASPKQLGEIIYNDLKIAGLKKTKKGSFATSASVLEDLAFKGHEFPKLILDWRQVSKLKNTYSDALPEHLNPNTKRVHTSFLLAATTTGRLASSDPNLQNIPIKSEDGKDIRKAFTAKKGHLLISADYNQIEMRILADLADVKELKKAFKNKEDIHSLTASQIFNIDIKKVNQDQRRKAKAINFGIIYGISQYGLAKQINVSNYEAEEFLNSYFAKFPEIKVYMDNTIKFCRKSGYVNNIFGRRSHFNGINDKNFNVRNFQERAAINAPIQGSASEVMRLAMIRLDKKLSEQKNSNSKMLLQIHDELIFEIPKKDEKVMIKLIEKEMTSVAESDYHSFSTPLTVDINVGDNWGMLH

SEQ ID NO: 135447 - protein, 581 aa, Unknown
  Bacterial polypetide isolated from the Sargasso Sea
KPFISIDTETSSLNPLEADLVGISFSYDNNEAYYIPIGHKNIKGLNKELVLKKIKPLLEDPSIKKVGQNIKYDLIILEKNGINIDPVEDTMLLSYVLDAGNNRHNMDTLSELHLGHKPISYKDVVGSGKKQLNFSDVSLEEATKYAAEDADVTLRLYNLLLERVNNEKLKKIYEVFEKPMIKLLSKLEINGVKVDHTYLKKLSKKFEERLKKIEKAIYEVSGKEFNIGSPKQLGEIIYNDLKIAKLKKTKKGSLATSAKVLEDLALTGHKFPNLVLEWRQVSKLKSTYTDALQEHISNKTKRVHTSFLLAATNTGRLASSDPNLQNIPIKTFDGKEIRKAFIAEKNHILISADYDQIEMRILADMADVKELKKAFKNNQDIHALTASQVFGLPLNKVTDETRRKAKAINFGIIYGITQYGLAKQIAVSHQEALDFINSYFKKFPEIKDYMNSTIKTCRKQGYVTNIFGRRIHLRGINDKNFSVRSFQERAAINAPIQGSAADIIRLAMIKIDKILSGNKNPAKMLLQIHDELIFECLKKNENEIKKIIKDAMTSISSSEHHMFSIPLEVSINSGNNWGEAH

SEQ ID NO: 135448 - protein, 425 aa, Unknown
  Bacterial polypetide isolated from the Sargasso Sea
MIKKTKNTDIQFCRDCLHQTKKLSDLCGKCLSPRVINHKELKNLSIAHIDCDAFYASVEKRDNADLKNKPLIIGGGDRGVVSTACYIARTKGIHSAMPIFKARKLCPEAIILRPNMSKYKKVSYEIRDLMKELTPLVEPISLDEAFLDLSGTFKLHQKIPAVLLAELVNKIKKHVGINVSVGLSYNKYLAKVCSDLDKPKGFSVIGQEESKDFLSNKPVSLLWGVGKKFTNKLNSDGIINIGQIQKIEIKELVKRYGIIGLHIYQLSNGKDSRSIRSNRPIKSISHEITFTKNIKNRKKLENILSDLSRKVAFRAKKNGLGGKTINLKLKTKNFKSISRSKTINNPTQLERKIYKIAKDLLTSIKDNEEYRLIGVGISELVDENFCDLDNLIDTNENNEKKLDQAINSLRDKFGSNIINHGKNYE

SEQ ID NO: 135449 - protein, 234 aa, Unknown
  Bacterial polypetide isolated from the Sargasso Sea
NILVSIDYSQIELRLLAEIANIDSLKEAFRDGIDIHAQTASEVFNISLENMDPMVRRNAKAINFGIIYGISSFGLARQLRCPQTEAKEYIDAYFDRYPGIQTYMEQTKIGARENGFVQTLFGRKVHLSGIKEANPARRGFYERAAINAPIQGTAADIIKRAMIRIPSLLKEESLDAKMLLTVHDELLFEVPTAQLDKTSQIISAAMEGAAAPAVEMSVPLVAEVGVGSNWAEAH

SEQ ID NO: 135450 - protein, 751 aa, Unknown
  Bacterial polypetide isolated from the Sargasso Sea
MSKPRLILVDGSGYIFRAYYALPPMNNSKGIPTNAVYGFCNMMLRLIEEHPNDKILIILDAGRNTFRNTLFPKYKANRGEAPEDLIPQFSIIREAIDAFGLDVIEKKDFEADDVIASYVKYGEDNKIPTTVFSSDKDLFQLLSANNRIMDPMKNIEIDEAKVMEKFGVGPDKITDVQALIGDSVDNIPGVPGIGPKTASKLINEFGSFEGLLANKEKISNERIKNLIHDHEEKAKISHQLVILKNDLELPITIEKLKDFEDSPKLNDFFKKYEFKSLIRNSAHETKPHAAKKNLEFKSLIKTKDIIEYLKSLQSEKTLAIDLETDSLDVNEANIIGISLSNAQQAYYLPFKSPENEISETDQKKILKELNLLCEDPSILKIFHNAKYDSVILKRFNVNTISFQDTLLMSFFVNNGLTKHNLEDLYYYYFGEEKEKFKDVIKNESKRNYKDFSEVPLQSATNYAAHDAYATYKLYETLHDQILDAPDSYIYFDIDKKLSLVLQQVENNGCKIDLKFLTKLEKDLNKEIEKIEQKIFKIAGEEFNIGSPKQLTEIFKKLDVKVTKKTKAGDFQTNVKVLEQLESEGVEIASHILQWRQYSKLVSTYTSSLAEHADNNDRVHSTFNIAATITGRLSSSEPNLQNIPIRTEIGKKIRTAFIAEKDHELYSFDYSQIELRVLCEACEDPNLLKAFQEDQDIHQSTGQLVFNKKTINANDRRMAKIINFGIIYGISQYGLAKQLGVSNAEAKLFIDN

SEQ ID NO: 135451 - protein, 366 aa, Unknown
  Bacterial polypetide isolated from the Sargasso Sea
MNFNINRNELLPALQAVSGIVDRRQTLPILSNLLFDIKAESFTITATDMEVELVVEVSAKLGQSTRLTLPAKKISDICRLSPDGAELEFNIKENKTLIKSGKSRYTLATLPAQEFPLVDVADETVDFSVDQNKLTELLANTEFAMAQQDVRYYLNGLLLEISGDKLVAVATDGHRLAFDETKINASLSNVKQIIVPRKAVTELVKLLHSAKSEVNVSVSKNHIQITTGSLSFTSKLIDGKFPDYKKVVPEPSSTATLADREALKNSLERVSILSNEKYRGVRIAFGKDALSLTAHNPEKEEADEELAVEYQGEEMEIGFNVEYLKDALKTIKTKKVILSVLNPNSSCLILPEKESCCQYVVMPMKL

SEQ ID NO: 135452 - protein, 908 aa, Unknown
  Bacterial polypetide isolated from the Sargasso Sea
MNKIQKSDHFYLIDGSGYIFRAYYALPPLTRKSDGLPTGAVSGFCSMLFKLLEDSKSNQNKQKPTHFAVIFDSARKTFRNEIYRDYKANRSEAPDDLAPQFEYIRKSVLAFNLPSVELANYEADDLIATYVDQILKKGANVTIVSSDKDLMQLFKKNVRIYDPMKNRFISDEDVQKKFGVDSSKVIDVQALAGDSSDNVPGVPGIGVKTAAELINKYGNLETLLKSANEIKQNKRRETIIENKDKALISKKLVTLKNDAPVDRSLTEFQLKEIDKDKLYKFLREMEFNRLLSSAISAYGEPKLTSEKDIVKTDEKQKAIDRKKYYLITNLDEIDSWIKEAEEVGEVAVDTETSSLDPHQADLIGISLSSKIGKACYIPVGHKSKKNIDKDQTLKKLKPLLEDPSIKKIGQNIKFDFIVLFKHGIKITSMEDTMLMSYVLDSGKNRHNMDTLSEIHLNHKPIAFKDLVGTGKKEINFSFVDLEKAKDYAAEDADVTFRLYKKFNKSLKDEKMINIYETFEKPMIKILADMEIEGIKIDNDFLKTLSSKFGKKIEKIQREVYKISKKEFNIASPKQLGEILYNDLKIADLKKTKKGSFATSASVLEDLAFKGHKFPQLVLDWRQISKLKNTYSDTLPEHINPKTKRIHTSFLLAATTTGRLASSDPNLQNIPIKSEDGKDIRKAFIAENGLSLISADYNQIEMRILADLADVKELKKAFRNNEDIHSLTASQIFNIGINKVNEDQRRKAKAINFGIIYGISQYGLAKQINVSNQDAEEFLNAYFAKFPEIKLYMDKTIKFCRKSGYVNNIFGRKSHFININDKNYNVRNFQERAAINAPIQGSASEIMRLAMIRLDKRLKEQKNKKTKMLLQIHDELIFETSKEEVKRISKIIIEEMSSVVKSEHHSFSI

SEQ ID NO: 135453 - protein, 304 aa, Unknown
  Bacterial polypetide isolated from the Sargasso Sea
RQLSKLKNTYSESLPNYINKKTKRIHTSFLLAATTTGRLASSDPNLQNIPIKTEDGKDIRKAFIAKKGFTLISADYNQIEMRILADLADVKQLKKAFQNNEDIHSLTASQVFNTDVKKINNDMRRKAKAINFGIIYGISQYGLAKQIGVSNQEAEEFMNSYFLKFPEIKEYMSSTINFCRKSGFVNNIFGRRTHIVGINDKNYNVRNFQERAAINAPIQGSASEIMRMAMIRINNKLEKNKSLNCKMLLQIHDELIFEVEEKESKKAGNLIKDEMTSVKNSDLHSFSIPLSVDINFGSNWGVLH

SEQ ID NO: 135454 - protein, 482 aa, Unknown
  Bacterial polypetide isolated from the Sargasso Sea
KNRHNMDTLSEIHLGHKPISYKDLVGTGKKQINFKDVDIKKALEYAAEDADITFRLYKILKTNLNKEKLLNIYEIFEKPMIKILAGMEISGIKVDDKFLKILSKKFEKKIKDLEQKIFKISKKEFNIASTKQLGEILYNELKISTLKKTKKGSFATSASVLEDLAFKGNELPKLVLDWRQISKLKNTYSDSLQEHINPKTKRVHTSFLLAATTTGRLASSDPNLQNIPIKTEDGKEIRKSFIAERGKKLISADYNQIEMRILADLADVKELKKAFKNNQDIHSLTASQIFNCDIKKVNADMRRKAKAINFGIIYGISQYGLAKQIMVSNQEAQEFLNSYFLRFPEIKDYMTKTIKFCRKSGYVNNIFGRRSHISGINDKNFNVRNFQERAAINAPIQGSASEIMRLAMIRLNKKFEQTKNNQCKMLLQIHDELIFEIPINEEKNLVKLIINEMASVKDSDLHTFSTPLTVDVNTGENWGILH

SEQ ID NO: 135455 - protein, 555 aa, Unknown
  Bacterial polypetide isolated from the Sargasso Sea
FSFCFESGKAFYVPLEHNESTDLSKDVGIKWLKEILPKNSSKLIGQNLKYDLAVLSKEGIYLESFLADTMLMSYVLNSTASRHNLDALSEYYLNFKTIKYEDVIGKGAKKYKSFADVPIKEATNYAAEDADITLRLYEKLCDLLDEGAQDILKKMEYPLLIVLMQMEKDGARVDTGHLKKLSNNFGDQLMKLAKKIHDASASVFNIDSPKQLSEVLFEKLKIETKGLKKTSTGYYSTSESVLQKLANENPIVKDILNYRSLAKLKSTYTDKLSEICDASSRVHTSYQQAVTSTGRLSSSEPNLQNIPIRTREGVTIREAFVASEGKKILAMDYSQIELRLMAHYSKDQIMLDSFKNNEDIHKRTASEVFSVEMENVTDEMRRRAKTINFGLLYGMSAFGLSNQLSVSRAEAEEFLLNYFTKYSSIKVFMKDIVEQAKKDKYVSTLYGRKIHVPNIESPNYMLRQASERAAVNGPLQGSAADIIKRAMINIFKESGKNEKDVKMILQVHDELVFEVPEDYDEKNISYLIDLMEESSSIDVPLKVEYGFGANWREAH

SEQ ID NO: 135456 - protein, 924 aa, Unknown
  Bacterial polypetide isolated from the Sargasso Sea
MNKIQKTDHFYLIDGSGYIFRAYYALPPLTRKSDGLPTGAVSGFCSMLFKLLEDSKSNENLQKPTHFAVIFDSARKTFRNEIYSDYKANRSEAPDDLAPQFEYIRKSVLAFNLPSVELVNYEADDLIATYVDQILKKGAKVTIVSSDKDLMQLYRKDVRIFDPMKNKFISNEDVKNKFGVDPDKVIDVQALAGDSSDNVPGVPGIGVKTAAELINKYGDLETLLKSADEIKQNKRRETLLNNKDKALISKKLVTLKHDAPIEMKLNDFELKKIDKDKLYKFLREMEFNRLLSSAISAYGEPDFSGEKKDIQLKEKKIEIDKKNYFLITEHSKIDEWIKEAEEIGEVAVDTETNSLDPHQADLVGVSLSSKIGKACYIPIGHNSNKCIDKDIVLKKLKPLLEDPSIKKIGQNIKFDFIVFFNHGITLSAMEDTMLMSYVLDAGKNRHNMDTLSEIHLNHKTIKFKELVGSGKKQINFSEVDLEKAKDYAAEDADITYRLYKKFYKSLKEEKMINIYEIFEKPLLRILADMEIHGIKVDKKFLKTLSTKFEKKIEKIQKEVFKLSKKEFNIASPKQLGEILYNDLKIADLKKTKKGSFATSASVLEDLAFKGHKFPQLVLDWRQVSKLKNTYSDSLPEHINPDTKKVHTSFLLAATTTGRLASSDPNLQNIPIKSEDGRDIRKAFVADKDNILISADYNQIEMRILADLADVKELKKAFQNNEDIHSLTASQIFNIDINKVNQDQRRKAKAINFGIIYGISQYGLAKQINVSNFEAEEFLNSYFSKFPEIKVYMDRTIKFCRKSGYVSNIFGRRSHFININDKNYNVRNFQERAAINAPIQGSAAEIMRLAMIRIDKKLREQKLNKTKMLLQIHDELIFESPKNEVKKISKVIIEEMSSVAESDQHSFSIPLTVDLNTGENWGTLH

SEQ ID NO: 135457 - protein, 924 aa, Unknown
  Bacterial polypetide isolated from the Sargasso Sea
MSKIQKTDHFYLIDGSGYIFRAYYALPPLSRKSDGLPTGAVSGFCSMLFKLLEDSKSNQNLQKPTHFAVIFDSARKTFRNEIYSEYKANRSEAPDDLAPQFEYIRKSVLAFNLPSVDLPNYEADDLIATYVDQIIKKGAKVTIVSSDKDLMQLYQKNVRIFDPMKNKFVTEEDVIKKFGVDASKVIDVQSLAGDSSDNVPGVPGIGVKTAAELINKYGTLEKLLKSAHEIKQNKRRETLLENKDKALISKKLVTLDHKSPIKRELDEFQLKSIDRDKLYKFLREMEFNRLLSSAISAYGEPDLTSSVPETKNIEKQSPINNKNYYLISNPDEIDEWVKEAEELGEVAVDTETNSLDPHQAELVGISLSSKIGKACYIPIGHKSSKCIKKEVVIKKLKKLLEDPSVKKIGQNIKFDFIVLFKHGITLSAMEDTMLMSYVLDAGKNRHNMDTLSELHLGHKTISFKEMVGTGKKEINFSEVEADKAKDYAAEDADVTFRLYKKFLKNLKSEKLINIYEIFEKPLIKILAFMEIEGVEIDSRFLTSLSKKFEKKILTLEKDIFKISKKEFNIGSPKQLGEIIYNDLKIAGLKKTKKGGFATSASVLEDLAFKGNKFPKLILDWRQLSKLKNTYSDALPEHVNPKTNRVHTSFLLAATTTGRLASSDPNLQNIPIKSDDGKDIRKAFKAKKDHLLISADYNQIEMRILADLADVKELKKAFKNEEDIHSLTASQIFNIDIKKVNQDHRRKAKAINFGIIYGISQYGLAKQINVTNYEAEEFLNAYFGKFPEIKVYMENTIKFCRKSGYVNNIFGRRSHFNGINDKNFNVRNFQERAAINAPIQGSASEIMRLAMIRLNKKMSEDKITKPKMLLQIHDELIFEVPKKDEKLMTKIIKNEMTSVAQSDFHSFSIPLTVDVNVGDNWGMLH

SEQ ID NO: 135458 - protein, 116 aa, Unknown
  Bacterial polypetide isolated from the Sargasso Sea
LNQNYKNIPIKTAEGRRIREAFVPEKGNILISADYSQIELRIMAHLSDDKNLTNAFNNDIDVHSSTAAEVFGVSIEDVSQDQRRSAKAINFGLMYGMSAFGLTRQLEFQEAKHKNI

SEQ ID NO: 135459 - protein, 417 aa, Unknown
  Bacterial polypetide isolated from the Sargasso Sea
AEKLLNIYELFEKPLIKILAQMEIKGIKLDKSSLNKLSSKFSNKIEKLEKSIFKISKKTFNIGSTKQLGEIMYNDLKIAALKKTKKGSFATSASVLEDLAFKGYEFPKLILEWRQISKLKNTYSDALPEHINQNTKRVHTSFLLAATSTGRLASSDPNLQNIPIKSDDGKDIRKAFVSEKNNKLISADYNQVEMRILADLADVKQLKKAFLNNEDIHTLTASQVFGKEINKIDSETRRKAKAINFGIIYGISQYGLAKQINVSNNEAEEFLNSYFKKFPEIKDYMKTTVNFCRKSGYVSNIFGRKTHLTGINDKNFNVRNFQERAAINAPIQGSASEIMRLAMIRINKEIANNKNNSLKMLLQIHDELIFEESSKETKKSTKLVKDLMLSVKDSELHSFSIPLLVDVNIGENWGELH

SEQ ID NO: 135460 - protein, 106 aa, Unknown
  Bacterial polypetide isolated from the Sargasso Sea
AVLKEAFSRAAILSNEKFRGVRLNLSSGELKITANNPEQEEAEEIVDVQYQGDDLEIGFNVAYLIDVLNALGSDGVKVSLSDSNASALIEDDADDAALYVIMPMRL

SEQ ID NO: 135461 - protein, 263 aa, Unknown
  Bacterial polypetide isolated from the Sargasso Sea
MASSDPNLQNIPIKSEDGKDIRKSFIAEKDHILISADYNQIEMRILADLADVKELKKAFKKNEDIHSLTASQIFNIDIKKVNQDQRRKAKAINFGIIYGISQYGLAKQINVSNYEAEEFLNSYFAKFPEIKVYMDQTIKFCRKSGYVNNIFGRKSHFVNINDKNYNVRNFQERAAINAPIQGSAAEIMRLAMIRLYKKLSNQKTKMLLQIHDELIFETHKDEAKRISKIIIEEMSSVAKSDQHSFSIPLTVDLNTGENWGTLH

SEQ ID NO: 135462 - protein, 375 aa, Unknown
  Bacterial polypetide isolated from the Sargasso Sea
NIKYDNSILNKYGVDVKGFHDTMLMSYVLDAGVNRHSMDELASIHLNRQTIKFKDVVGSGKSQITFDKVKIKDALNYAAEDAEITFKLYLFLKKRVNQERGNYIYTNIERELINPIQSMEINGIKVDKKYLSNLSIKFSQRIEKLEKKIYKETGSEFNIGSPKQLSEILFDKLKLKPPKKTKTGEKSTGIDVLEDLAYEGNKVADNIIQWRQLSKLKNTYTDALQNHIVRETGRIHTSFAMASTNTGRLASSDPNLQNIPIRTEEGKSIRKAFVPDEGFVMLAADYSQIELRVLAHMADVKQLKEAFINNEDIHQITAAEIFNVKLKEVDNELRRKAKAVNFGIIYGISAYGLAKQLAISNYEAGDFIKRIFSEI

SEQ ID NO: 135463 - protein, 281 aa, Unknown
  Bacterial polypetide isolated from the Sargasso Sea
RVHTSFLLAATSTGRLASSDPNLQNIPIKSDDGKEIRRAFAADTNSNLISADYNQIEMRILADLADVGELKKAFKNNEDIHSLTASQVFNKSIKKIDKDMRRKAKAINFGIIYGISQYGLAKQINVSNVEAEDFLNSYFIKFPEIKEYMEQTIKSCRKNGYVKNIFGRKTHITGINDKNYNVRNFQERAAINAPIQGSASELMRLAMIRINKKFRELKKENCNILLQIHDELIFESKKDSVEYYTKIIKEEMTSVKESELHSFSIPLLVDINIGKNWGDLH

SEQ ID NO: 135464 - protein, 316 aa, Unknown
  Bacterial polypetide isolated from the Sargasso Sea
KGNKFPKLILDWRQISKLKNTYSDTLPEFINPKTDRVHTSFLLAATTTGRLASSDPNLQNIPIKTEDGKEIRKSFIAEKGNVLISADYNQIEMRILADLADVKQLKKAFKNNEDIHSLTASQVFNIDLKKITSEMRRKAKAINFGIIYGISQYGLAKQIMVSNSEAEEFLNSYFLKFPEIKDYMQKTIKFCRSSGYVSNIFGRRSHITGINDKNFNVRNFQERAAINAPIQGSASEIMRLAMIRLRNKIDDINQKNIRMLLQIHDELVFEVKKTDLKSTIKLIKDEMTSVKESEFHTFSMPLIVDIKTGENWGELK

SEQ ID NO: 135465 - protein, 512 aa, Unknown
  Bacterial polypetide isolated from the Sargasso Sea
KENTDLDAVYETLDAVEAEGPKASRGAIKGALKGKLRNDKDNAYLSRKLAEILVDIPLPQEPSLPLSTVNAEGLSSCLEDLELNSLLRQVGGFVAAFSEGGYGANAEAAAPAQPSSRPKATNEDSGLEETLGSVPALRPQLIQDVSALKGLVQRLMRCTDAGSPVALDTETTDLNPFKAELVGIGVCWGEELDALAYIPLAHNGSADSQPIQLPLEDVVTAIAPWLASKDHPKTLQNAKFDRLILMRHGLALGGVVIDTLLADYLRDAAAKHGLELMAEREFGFQPTAYSDLVGKKQTFADVPLEAASQYCAMDVHVTRRLALLLRNQLEAMGPALLKLLEQVEQPLEPVLAEMEATGIRIDVPYLQELSTEMGTTLERLETEAKEAAGVDFNLASPKQLGELLFDTLGLDRKKSRRTKTGYSTDATVLEKLGDDHPVVPLVLEHRVLSKLKSTYIDALPQLVEAETGRVHTDFNQAVTATGRLSSSNPNLQNIPVRTEYSRRIRKAFCPLP

SEQ ID NO: 135466 - protein, 340 aa, Unknown
  Bacterial polypetide isolated from the Sargasso Sea
IASLKKTKKGSFATGAAVLEDLAYKGNEFPKLVLEWRQSSKLKNTYSDSLPEHLNPNTKRVHTSFLLAATTTGRLASSDPNLQNIPIKTEEGKDIRKAFISEKNKKLISADYNQIEMRILADLADVKELKKAFKNNEDIHSLTASQVFGADIKKIDADMRRKAKAINFGIIYGISQYGLAKQIGVSNNEAEEFLNSYFIKFPEIKEYMNNTIKFCRKSGYVRNIFGRKTHIPGINDKNFNVRNFQERAAINAPIQGSASEIMRLAMIRINDELDTKKTNEFNMLLQIHDELIFEVIDNGTKSASKKIKDIMTSVKDSDLHSFSIPLSVDVNIGDNWGELH

SEQ ID NO: 135467 - protein, 287 aa, Unknown
  Bacterial polypetide isolated from the Sargasso Sea
LNPNTKRVHTSFLLAATTTGRLASSDPNLQNIPIKSEDGKDIRKAFTAKKGHLLISADYNQIEMRILADLADVKELKKAFKNKEDIHSLTASQIFNIDIKKVNQDHRRKAKAINFGIIYGISQYGLAKQINVSNYEAEEFLNSYFAKFPEIKVYMDNTIKFCRKSGYVNNIFGRRSHFNGINDKNFNVRNFQERAAINAPIQGSASEVMRLAMIRLDKKLSEEKNSNSKMLLQIHDELIFEIPKKDEKVMIKLIEREMTSVAESDYHSFSTPLTVDINVGDNWGMLH

SEQ ID NO: 135468 - protein, 335 aa, Unknown
  Bacterial polypetide isolated from the Sargasso Sea
KTKKGSFATSAQVLDDLAFKGHKLPKLVLDWRQVTKLKNTYSDSLQEHINPNTKRVHTSFLLAATSTGRLASSDPNLQNIPIKSEDGKEIRRAFVAENNCKLISADYNQIEMRILADIADVKELKKAFHNKEDIHSLTASQVFNTNINKVDSDMRRKAKAINFGIIYGISQYGLAKQIGVSNVEAQEFLNSYFLKFPEIKAYMESTIKFCRKSGYVNNIFGRRTHITGINDKNFNVRNFQERAAINAPIQGSASEIMRMAMIRVNKKFDEIKESSCKILLQIHDELIFEVHKDDIKKYSKIIKEEMSSVKNSDLHSFSIPLLVDINIGNNWGDLH

SEQ ID NO: 135469 - protein, 393 aa, Unknown
  Bacterial polypetide isolated from the Sargasso Sea
KGIKLDKSSLNKLSSKFTTKIEKLEKSIFKISKKTFNIGSTKQLGEIMYNDLKISALKKTKKGSFATSASVLEDLTFKGYEFPKLILEWRQISKLKNTYSDALPEHINQNTKRVHTSFLLAATTTGRLASSDPNLQNIPIKSDDGKDIRKAFVSEKNNKLISADYNQVEMRILADLADVKQLKKAFLNNEDIHTLTASQVFGKEINKIDPETRRKAKAINFGIIYGISQYGLAKQINVSNNEAEEFLNSYFKKFPEIRDYMKTTVNFCRKSGYVSNIFGRKTHLTGINDKNFNVRNFQERAAINAPIQGSASEIMRLAMIRINKEISNNKNNSLKMLLQIHDELIFEESSKETKKSTKLIKDLMLSVKDSELHSFSIPLLVDVNIGENWGELH

SEQ ID NO: 135470 - protein, 841 aa, Unknown
  Bacterial polypetide isolated from the Sargasso Sea
SDYKANRSEAPDDLAPQFEYIRKSVLAFNLPSVDLPNYEADDLIATYVEKILKKGAKVTIVSSDKDLMQLYKKGVRIFDPIKNKFITKEDIINKFGVDASKVIDVQSLAGDSSDNVPGVPGIGVKTAAELINKYGTLEKLLKSAHEIKQNKRRETLIENKDKALISKQLVTLKRDSPTKRDLSEFILKDIDKDKLYKFLREMEFNRLLSSAISIYGEPKLSSSAPEKKILENQKPINNKNYYLITNAKQIDLWIQEAEETGEVAVDTETSSLDPHQADLVGISLCSKIGKACYIPIGHNSFKCINKDIVIKKLKPLLEDPSVKKIGQNIKFDFIVLFKNGINICSMEDTMLMSYVLDAGKNRHNMDTLSEIHLGHKTISFKEIVGTGKKQINFNEVEINRAKDYAAEDADITFRLYKKFIKNLKLEKMINIYEIFEKPLIKILAFMEMEGVEVDSKFLKSLSLKFEKKIKNLEKEIFKISKKEFNIASPKQLGEIIYNHLKIAGLKKTKKGSFATSASVLEDLAFKGHKFPKLVLDWRQISKLKNTYSDSLPEHINPQTKRVHTSFLLAATTTGRLASSDPNLQNIPIKSEDGKDIRKAFTAKKDHVLISADYNQIEMRILADLAEVRELKKAFKNNEDIHSLTASQIFNIDIKKVDQDHRRKAKAINFGIIYGISQYGLAKQINVSNYEAEEFLDAYFAKFPEIKVYMDNTIKFCRKSGYVNNIFGRRSHFNGINDKNFNVRNFQERAAINAPIQGSASEIMRLAMIRLEKKLKDKKNIKSKMLIQIHDELIFEVPKSDEKTMIKIIKEEMMSVVKSDYHSFSIPLTVDVNAGDNWGMLH

SEQ ID NO: 135471 - protein, 293 aa, Unknown
  Bacterial polypetide isolated from the Sargasso Sea
MKSTYTDKLPNQISLSTGKVHTSFHQAVTSTGRLSSSDPNLQNIPIRTEDGRRIRQAFEATKGNKIISADYSQIELRVMAHLSKDSGLLEAFNQGEDVHAKTASEVFDVSLEEVTPDLRRNAKAINFGLIYGISAFGLGKQLGINRNLAAEYMAMYFEKYPNVKTYMEKTKDDAREAGYIETLFGRRLYLRDINANNAIRRQASERIAINAPVQGSAADIMKIAMINTHRSLKKSGLKAKLTLQVHDELIVDTPKNETDKVTKLLTKSMQEAANLDVPLEVDIGMGNNWDQAH

SEQ ID NO: 135472 - protein, 476 aa, Unknown
  Bacterial polypetide isolated from the Sargasso Sea
WKIPGTAKLVYDLKKTLHSLNAEGISLKGVEGDVMIAAHLSDPLSRRYDLDFLIGRRLNRERSTADAEIPPDRKVSCENASTILELHDLFEKQLKQAEMINSYRYIEIPLAETLVRIEWSGVRVDTEKLKEISQEFEERLDELRERIHEQAEETFNVNSVVDLQNVLYEKFKLHERFKVKPRKIKLGNGMSTDEETLEKLCEDPLPRAILDYRSLNKLKNTYVDQLPDHVHPRSGHIHSRFQQTATATGRLSSDNPNMQNIPIRSAEGRRIREAFVPSDSNRILISADYSQIELRIVAHYSKDPTFLEAYRNNEDIHALTASTIFKVPVDQITREMRSKAKEVNFGLIYKMGPERLSIVTQTSKSEAKAFIERFFEKYSTIHALQERFLAQARKEGFTTTLLGRRRYLPDINAKGMLKRMAEGAAVNTPIQGSAAEVIKLAMIKIQQELQNQKMGSKMILTVHDELVFDVPFEEEQ

SEQ ID NO: 135473 - protein, 400 aa, Unknown
  Bacterial polypetide isolated from the Sargasso Sea
EYPLVHVLLEMENKGALIDTNQLKKLSNDFGSKLIGLTKKIHDTSGSVFNIDSPKQLSEVLFEKMKIDSKGLKKTSTGYYSTSESVLQKLSAENEVVRDILEYRTLAKLKNTYTDKISDICDANSRVHTSYHQAVTSTGRLSSSDPNLQNIPIRTNEGITIREAFIAPKGKKLLAMDYSQIELRLMAHYSKDPIMLDSFRNDEDIHKRTAAEIFGVEITDVDDQMRRRAKTINFGLLYGMSAFGLSNQLEVSRAEADIFLNNYFERYAAVKSFMSEIVEEAKKDKLVKTLYNRKIHVPNIEAGNYMMRQGSERAAINGPLQGSAADIIKIAMIKIQDLINNDKPDIKMILQVHDELIFEVPADFTDEDIKPIISIMEETTKISVPLKVEYGFGANWREAH

SEQ ID NO: 135474 - protein, 323 aa, Unknown
  Bacterial polypetide isolated from the Sargasso Sea
KLVRLNLIFASPKQLGEILFLKMGIKGGKKTKTGTYSTDSGILEDLKNKGYEIAKLVLEWRELTKLRSTYTEALLSQAIDKTDRVHTSYAIASTITGRLSSNDPNLQNIPIRTEKGRKIRNAFIAENNYKIVSFDYSQIELRLAAEISKDKNFIEAFIKEQDIHTSTASKIFNLKPENINSEHRRKAKAINFGIIYGISSYGLAKQLSISNSDGKKYIDEYFSRYPKIKNYMDYQIQFAKTNHYVETIFGRKCNIVGINDKNFSIRGFAERQSINAPIQGTASDIIKLAMIEIDKKIKLKKISAKMLLPVHDELVFEIHKDQN

SEQ ID NO: 135475 - protein, 287 aa, Unknown
  Bacterial polypetide isolated from the Sargasso Sea
KANFVYKNIDLPLVEVLTKIEANGIEVNKKFLTSLSTEFENESKRLEKNIYKLSKEEFNIGSPKQLGEILFINLKIPGGKKTKSGTYSTDSSTLNNLASDGFEIAKLVLEWRELTKLKSTYTDSLFRLTDHRSRVHTSFGLANTLTGRLSSTDPNLQNIPIRTENGKKIRTAFISGKGKKLVSFDYSQIELRLAAEISGDKNFIKAFKNNEDIHASTAKEIFNLKDSEINDDLRRKAKAINFGILYGISPYGLAKQLDISNTEAKDLYNEYFNKYPKIKIIWINKLT

SEQ ID NO: 135476 - protein, 377 aa, Unknown
  Bacterial polypetide isolated from the Sargasso Sea
EYLLFFQNNFDNIKKQFRDFKKDRKLFQIYKDIDFPMLNILSSMEKDGISVSLPKMKKLSKQLSKELESLSNKCYQITNQEFNLNSPKQLSEIFYNEMNFPVLKKTPKGAPSTDASVLEELSKEHDLPKYILKYRELEKIRSTYVDGLIPEVTKHNKIHTHFNLFGTATGRLSSEKPNLQNIPNKTELGQKIRDFFISKPNFSFIIADYSQIELRVLAHLSQDSTMIEILKNKKSDIHSETASRIFNVPIGDVTSDMRRKAKEVNFGLIYGMEAFGLSKSLDIEQKEASQLIESYFSQFPEIKGFLDNIVLKATKDSFTETLIGRKRYIRELNSSNFQVKAAGKRIAMNAPIQGTAADIMKIAKNKVLHKIKELDQT

SEQ ID NO: 135477 - protein, 312 aa, Unknown
  Bacterial polypetide isolated from the Sargasso Sea
LLKEKPIQEKLLEDLEYPLVHVLSRVEQNGAKIDKKKLANHSKELSEKIDELSSAAFKIAGEEFNLDSPKQLLEILYEKLGLPVLKKTPKGQPSTNEDTLQRLSEEYELPKIILQYRTLAKLKSTYTDSLINIENPKTKRIHTSYQQAVTSTGRLSSTEPNLQNIPIKTAEGRRIREAFVPEKGNILISADYSQIELRIMAHLSDDKNLTNAFNNDIDVHSSTAAEVFGVSIEDVSQDQRRSAKAINFGLMYGMSAFGLTRQLGIPRGEAQEYLDTYFARYTGVRDYMDNIKAKAKEDKFVETIMGRRLYLN

SEQ ID NO: 135478 - protein, 183 aa, Unknown
  Bacterial polypetide isolated from the Sargasso Sea
MSDSRKIIHIDMDAFYASVEQLDQPQFRGKPLAVGGPSEKRGVIAAASYEARKFGVRSAMPTAEAFRRCPELNLVSPRFPRYREISEQVHGIFRCYTDLIEPVALDEAWLDVSANLIREPSGTRVAERIKSEILEQTALTCSAGVSYNKFLAKIASEENKPDGLFVITPEQASAFLKELPVRK

SEQ ID NO: 135479 - protein, 283 aa, Unknown
  Bacterial polypetide isolated from the Sargasso Sea
LNWRHFSKLKSTYTDALVQQINPKTNRVHTNYSMVGASTGRLSSSNPNLQNIPIKTEEGRLIRTAFESKPGFKLVSMDYSQIELRLIAHIADEIKMLDAFNNDLDIHSDTASKVFGVHINEMTSDLRRKAKAINFGIIYGISAYGLSKQLKCTTNEAKEFIDSYFKRFPKIRDYMEEIKSNLEENGYVETLFNRRIYINDSNAKNQRLRGFAERQAINAPIQGSAADIIKLAMVKIHKNLFNYKNDVSMLMQVHDELVFEIRENSIDKYSKIIQEIMEHANLP

SEQ ID NO: 135480 - protein, 270 aa, Unknown
  Bacterial polypetide isolated from the Sargasso Sea
LSLRIDKLQKQAYKIAGEEFNLDSPKQLLEILFNKLGLPILKKTPKGQPSTNEETLVRLSEEYELPKVILEYRGLAKLKSTYTDSLVKMIHNQTKRVHTSYQQAVTSTGRLSSTEPNLQNIPIKTEEGRKIRQAFIAEPGNIIISADYSQIELRIMAHLSEDTNLTRAFKEGLDVHASTASEIFSIPIDEVTSDHRRKAKAINFGLMYGMSAFGLTRQLGISRQDAQQYLDSYFDKYQGVNAYMESIRGEAKAKGYVETVMGRRVHVPEI

SEQ ID NO: 135481 - protein, 298 aa, Unknown
  Bacterial polypetide isolated from the Sargasso Sea
LTTFEEVAGKGVKQLTFNKVNLNVASDYAAEDADITLQMYDTIGEHLKKQKTLQKVLKDIELPLIPVLSDMEQKGTVIDSDILNLQSKNLGQRINGLEEQAFSMAGKEFNLSSPKQLQEILFDEMNIPVIEKTPGGQPSTAESVLQELAKQYELPQVILEHRTLSKLKSTYTDRLPEQISEKTGRVHSTFHQAVTTTGRLSSSDPNLQNIPIKTEEGRMIREAFVAPKGFDLISIDYSQIELRIMAHLSKDEGLITAFENGEDIHSATAKEVFGSADDQDRRSAKAINFGLIYGMSAF

SEQ ID NO: 135482 - protein, 305 aa, Unknown
  Bacterial polypetide isolated from the Sargasso Sea
HRVLSKLKSTYIDALPQLVEEETGRVHTDFNQAVTATGRLSSSNPNLQNIPVRTEYSRRIRKAFLPQDGWTLLSADYSQIELRILTHLSGEEVLQEAYRSGDDVHALTARLLLDKDEVSTDERRLGKTINFGVIYGMGAQRFARETGVSQSEAKDFLAKYKQRYPKVFAFLELQERLALSRGYVETILGRRRPFHFERNGLGRLLGKDPLEIDLDVARRGGMEAQQLRAAANAPIQGSSADIIKVAMVQLQATLTSQGLPARLLLQVHDELVLEVKPEALEKTRDTVVRTMENAVKLTVPWWQRR

SEQ ID NO: 135483 - protein, 268 aa, Unknown
  Bacterial polypetide isolated from the Sargasso Sea
DTLPELVNKKTNRIHTNYMQAVAATGRLSSNHPNLQNIPIRTEKGREIRKAFTARNEDFVLLAADYSQIELRIIAALSGDESMIEAFQQNIDVHSLTASKVFNVDLDEVNRDMRSKAKMVNFGIIYGISAFGLSQRLGIPRKEAKAIIDNYFIKYPKIKNYMDDSIAFAQKHEYVETIMKRRRYLKDINAKNAIVRGFAERNAINAPIQGSAADIIKKAMIEIHKEIKENEFQSKLLLQVHDELIFDAHKDELNKLMKMVKIKMKIRS

SEQ ID NO: 135484 - protein, 242 aa, Unknown
  Bacterial polypetide isolated from the Sargasso Sea
VEVISVDQSNLKNLINKTHFSMAQQDVRYYLNGLLIESEGNKLRAVATDGHRLAISDTDLTDPRDGKKQVILPRKGVIELQRLLDKKGSIEVLLGSNHIRVKFDDVCFTSKLIDGNFPEYQRVIPANPENRLKVNTKKLKEALSRAAILSNEKYRGIRLIVKKNDLVIQAHNPEQEQAEEKMDVDYDGTEIEIGFNVNYLIDALNAIDSEDVHVLLMDNNSSCLIQDTNNSSYKFVVMPMRL

SEQ ID NO: 135485 - protein, 308 aa, Unknown
  Bacterial polypetide isolated from the Sargasso Sea
EKFLFIDLNIKGEKKTKTGTFSTDSSTLSNLSDQGYEIASLILDWRELTKLKSTYTDALQNQATKNNSRVHTSYGVANTLTGRLSSNDPNLQNIPIRTSNGRKIRKAFICDSKKILMSFDYSQIELRLAAEISGDNNFIKAFKNNEDIHSSTASQIFNINVDSLDPEMRRKAKAINFGILYGISPYGLAKQLDVTNSEAKKYIEDYFKKYPQIKKYMDDQIEFAKTNLYVETIFGRKCNIKSINDKNFAVRGFAERQAINAPIQGTAADIIKLAMIELYKMITSNDLNAQILLQVHDELIFEIDESYK

SEQ ID NO: 135486 - protein, 228 aa, Unknown
  Bacterial polypetide isolated from the Sargasso Sea
ADYSQIELRVLAHMADVSQLKDAFNNNEDIHQLTASEIFNVKHKDVTKDLRRKAKAVNFGIIYGISAFGLAKQLSISNYEASDFIKEYFKKFTGIKEYMENTKELCRENGYVETLCGRKCFFPRIKDKNFALRSFQERAAINAPIQGTAADIIKLAMIKINDKIKSTNECKMLLQVHDELIFEIKNDKLKKFRKIIVAEMENALKPKFDLSVPLSVDSNNANNWSDAH

SEQ ID NO: 135487 - protein, 270 aa, Unknown
  Bacterial polypetide isolated from the Sargasso Sea
NGAKIDKKKLASHSKELSEKIDELSSAAFKIAGEEFNLDSPKQLLEILYEKLGLPVLKKTPKGQPSTNEDTLQRLSEEYELPKIILQYRTLAKLKSTYTDSLINIENPKTKRIHTSYQQAVTSTGRLSSTEPNLQNIPIKTAEGRRIREAFVPEKGNILISADYSQIELRIMAHLSDDKNLTNAFNNDIDVHSSTAAEVFGVSIEDVSQDQRRSAKAINFGLMYGMSAFGLTRQLGIPRGEAQEYLDTYFARYTGVRDYMDNIKAKAKED

SEQ ID NO: 135488 - protein, 231 aa, Unknown
  Bacterial polypetide isolated from the Sargasso Sea
MSFDYSQIELRLAAEISGDTNFIKAFKNNEDIHSSTASQIFNVKTEKLDAEMRRKAKAINFGILYGISPYGLAKQLSVTNSEAKKYIEDYFNKYPKIKKYMDDQIQFAKTNLYVETIFGRRCNIKSINDKNFSVRGFAERQAINAPIQGTAADVIKLAMIELNKLITSDDLDAKILLQVHDELIFEIDEANKEVSIDKIKNVMENIHLNFKNFEVPLLVDYGFGNNWGDAH

SEQ ID NO: 135489 - protein, 160 aa, Unknown
  Bacterial polypetide isolated from the Sargasso Sea
MAVTRKIIHIDMDAFYASVEQLDNPSIRNKPVAVGSSDLRGVVATASYEARHFGVRSAMSSKLARKLCPNLIFAKPRFERYKELSKIISEVFFSYTDLVETLSLDEAYLDVTENKRGIISASRIARLIREDILKKTGLTSSAGISVNKLVAKIASDYNKP

SEQ ID NO: 135490 - protein, 272 aa, Unknown
  Bacterial polypetide isolated from the Sargasso Sea
MSEQGYEIASLILEWRELTKLKSTYTDALQNQATKDYSRVHTSYGIANTLTGRLSSNDPNLQNIPIRTNNGRKIRKAFVCDSKKTLMSFDYSQIELRLAAEISGDNNFIEAFKNNEDIHSSTASQIFGISSKKLDSEMRRKAKAINFGILYGISPYGLAKQLDVTNSEAKIYIENYFKKYPKIKKYMDDQIAFAKTNFYVETMFGRRCNIKNINDKNFAVRGFAERQAINAPIQGTAADIIKLAMIELNKMIINEELEVKILLQVHDELILK

SEQ ID NO: 135491 - protein, 311 aa, Unknown
  Bacterial polypetide isolated from the Sargasso Sea
AEGHELPEQVLGWRQLAKFKSTYTDTLVDQINPETGRVHTNYGQAIASTGRLSSNDPNLQNIPIRTEEGRKIRQAFIPSEGHVLVSADYSQIELRLLAHVAGIDALKRAFHDGMDIHALTASQVFGVPVEGMDPMIRRQAKAINFGIIYGISAFGLARQLSIPRGEASDYIQAYFEKYPGIRDFMEHAKETAREKGYVTTLYGRKCFVPGINDKNPNRRNFMERAAINAPIQGGAADIIKRAMIQLPKALKTSKLSAKMLLQVHDELIFDVPKKELEDTVEVVKNIMESAADLSVPIVVDAGHGKNWDEAH

SEQ ID NO: 135492 - protein, 271 aa, Unknown
  Bacterial polypetide isolated from the Sargasso Sea
NYGQAIASTGRLSSNDPNLQNIPIRTEEGRKIRQAFIPSEGHLLVSADYSQIELRLLAHVAGIEALKRAFHDGMDIHALTASQVFGVPVEGMDPMIRRQAKAINFGIIYGISAFGLARQLSIPRGEASDYIQAYFQKYPGIRDFMESAKETAREKGYVTTLYGRKCFVPGINDKNPTRRNFMERAAINAPIQGGAADIIKRAMTQLPKALKTSNLSAKMLLQVHDELIFDVPKNELENTLEVVKNVMESAADLSVPIVVDTGHGKNWDEAH

SEQ ID NO: 135493 - protein, 294 aa, Unknown
  Bacterial polypetide isolated from the Sargasso Sea
PKVLMQYRSLSKLKSTYTDKLPEQINPRTGRIHTSYHQAVAATGRLSSSDPNLQNIPIRTAEGRRIRQAFVAPKGYKLMAADYSQIELRIMAHLAKDKGLLDAFHHDLDVHRATAAEVFGVALEEVTSDQRRKAKAINFGLIYGMSAFGLAKQIDVERKEAQAYIDRYFARYPGVLTYMESTRAQAAEQGYVETVYGRRLYLPEIHAQNQAMRKGAERAAINAPMQGTAADIIKRAMIAVDGWLQDSGIDARIILQVHDELVLEVREELIDEVSAKLQSLMSGAADLDVPLLGG

SEQ ID NO: 135494 - protein, 168 aa, Unknown
  Bacterial polypetide isolated from the Sargasso Sea
MRKIIHIDMDAFYASVEQRDDPALRGRPVVVAWRGARSVVCAASYEARRFGVRSAMPAVRAERLCPDAVFVPPDFARYKAVSRQIREIFLQHTALVEPLSLDEAYLDVSGSSTCGGIATEIARTVRAQIREATSLTASAGIAPNKFLAKIASDWRKPDGQFVVPPARV

SEQ ID NO: 135495 - protein, 193 aa, Unknown
  Bacterial polypetide isolated from the Sargasso Sea
MNKIIRKIIHIDMDAYYASVEQLDNPELRGKPVAVGGGKKRGVVAAASYEAREFGVRSAMPSVIAIKRCENLIFVRPRFDRYKEISFQIRQIFADYTDLIEPLSLDEAFLDVTVNKKNIELAADIATDIRARIKDETGLTASAGVSINKFLAKVASDINKPNGQKTIHPSQVDSFIDQLPVGKFFGVERDSKK

SEQ ID NO: 135496 - protein, 257 aa, Unknown
  Bacterial polypetide isolated from the Sargasso Sea
MSDSRKIIHIDMDAFYASVEQLDQPQFRGKPLAVGGPSEKRGVIAAASYEARKFGVRSAMPTAEAFRRCPELNLVSPRFPRYREISEQVHGIFRCYTDLIEPVALDEAWLDVSANLIREPSGTRVAKLIKSEILEQTALTCSAGVSYNKFLAKIASEENKPDGLFVITPEQASAFLKELPVRKIPGVGRVTEEKLRDFGIEFTEDLLKKDAEWLNQHFGKFGMVLFQRARGIDHRPVEPERETKSVSVETTFDRNLT

SEQ ID NO: 135497 - protein, 261 aa, Unknown
  Bacterial polypetide isolated from the Sargasso Sea
SDPNVQNIPIRTAEGRQIRTAFVAAPGKKLISADYSQIELRLVAHVAGEQSMIDAFRAGVDIHARTASEVFGVPPDQMDGETRRRAKAINFGIIYGISGFGLARQLGIRQGEARDYINAYFENFPGIRAYMERIKLEARETGHVETLFGRRIHIAGIKASNPAQRGFAERQAINAPIQGSAADIIKRAMVRLPSALAEAGIEARMLLQVHDELIFEAEESIAEAAVKAIRAVMESAADPVLELAVPLVAEAGIADSWANAH

SEQ ID NO: 135498 - protein, 296 aa, Unknown
  Bacterial polypetide isolated from the Sargasso Sea
KLIFKITGKEFNIGSPKQLGEILFVEMKIKGGKKTKTGTYSTDSGILEDLSSQGHEIAQLVLEWREVSKLRSTYTDSLQEQIDVDTKRVHTSYATATTLTGRLSSNDPNLQNIPIRTDKGKQIRHAFIAEEQNQLISFDYSQIELRLAAEISRDENFITSFINNEDIHSSTAKEIFNLSDIKPSSEHRRKAKAINFGILYGISPYGLAKQLKITNSEAKLYIDNYFQKYPKIKEYMNYQIQFAKSSNFVSTIFGRRCNIKGINDKNFNVRGFAERQAINAPIQGSAADIIKLAMIE

SEQ ID NO: 135499 - protein, 243 aa, Unknown
  Bacterial polypetide isolated from the Sargasso Sea
MSLDQSLVKELIDSTAFAMAQQDVRYYLNGLYMEILGGRLRVVATDGHRLALATGPALVEAADTGVIIPRKGVLELSRLLDGSVPLKLVIGTNHIRAANEQFTFTSKLIDGKFPDYERVIPKNADKSVVGERGELKQAFTRTAILSNEKYRGVRLKLSDNNLDITASNPEQEQAEEVVGVQYNGGELEIGFNVSYLLDVLSVLEQPKVRLSLSDEASSALLENAEAPSEGEPERLYVVMPMRL

SEQ ID NO: 135500 - protein, 267 aa, Unknown
  Bacterial polypetide isolated from the Sargasso Sea
MSDSRKIIHIDMDAFYASVEQLDQPQFRGKPLAVGGPSEKRGVVAAASYEARKFGVRSAMPTAEAFRLCPELNLVSPRFPRYREISEQVHGIFRCYTDLIEPVALDEAWLDVSDNLIREPSGTRVAERIKSEILEQTALTCSAGVSYNKFLAKIASEENKPDGLFVITPEQASAFLKELPVRKIPGVGRVTEEKLRDFGIEITEDLLQKDTEWLNQHFGKFGMVLFQRARGIDHRPVQPERETKSVSVETTFDRNLTNLEELDLELQ

SEQ ID NO: 135501 - protein, 298 aa, Unknown
  Bacterial polypetide isolated from the Sargasso Sea
ILRYRAISKLKSTYTDKLPKMVNSNTGRVHTSYHQAVTATGRLSSSDPNLQNIPIRSEEGRRIREAFIAPEGYKILAADYSQIELRIMAHLSKDQGLMDAFAKGQDIHQATGAEIFATNIDEVTANQRRSAKAINFGLIYGMSAFGLSKQLQITRAEAQNYIEQYFDRYPQVKNYMDETKLSAKKMGYVETVFGRRLYLAEIESSNYQRRQYAERSAINAPMQGTAADLIKMAMIHLHQKIREESFDAKIIMQVHDELVIEVNESQSDELSELTTSIMSKISKLDVDLKVDADIGNNW

SEQ ID NO: 135502 - protein, 225 aa, Unknown
  Bacterial polypetide isolated from the Sargasso Sea
MNKIIRKIIHIDMDAYYASVEQLDNPELRGKPVAVGGGKKRGVVAAASYEAREFGVRSAMPSVIALKRCENLIFVRPRFDRYKEISFQIRQIFADYTDLIEPLSLDEAFLDVTVNKKNIELAANIATEIRARIKDETGLTASAGVSINKFLAKVASDINKPNGQKTIHPSQVDSFIDQLPVGKFFGVGKVTAKKMNEMGIFNGADLRKYQKEELVDRFGKTGKHY

SEQ ID NO: 135503 - protein, 258 aa, Unknown
  Bacterial polypetide isolated from the Sargasso Sea
LSSTEPNLQNIPVRTEDGRRIREAFVAEDGNILVSLDYSQIELRILAHIAQIDALKQAFHDGLDIHAMTASEMFDVPLDEMTSDIRRQAKAINFGVIYGISGFGLARNLRIPRSEAQGFIDRYFERFPGIKEYMDKTVKFSKENNRVETLFGRVIHTPEINAKGPIAGFAKRAAINAPIQGTAADIIRRAMIRVPDAIKDLPAKMLLQVHDELLFEVKEEYCDDLIVQVKSIMESASLPFLKMDIPLSVDAGRGMNWA

SEQ ID NO: 135504 - protein, 187 aa, Unknown
  Bacterial polypetide isolated from the Sargasso Sea
MNKIIRKIIHIDMDAYYASVEQLDNPELRGKPVAVGGGKKRGVVAAASYEAREFGVRSAMPSVIAIKKCENLIFVRPRFDRYKEISFQIRQIFADYTDLIEPLSLDEAFLDVTVNKKNIELAADIATEIRARIKDETGLTASAGVSINKFLAKVASDINKPNGQKTIHPSQVESFIDQLPVGKFFGV

SEQ ID NO: 135505 - protein, 243 aa, Unknown
  Bacterial polypetide isolated from the Sargasso Sea
DVSDSSLFSGSATLIAEDIRRVIFAETGLTASAGVAPNKFLAKIASDENKPDGLFVLPPEKVSDFVKFLPLHKIPGVGKKTAERLATLGFYKCVDIQNAPLHTLVKHFGSFAETLIERSFGRDSRDVQNDYPRKSVAVEHTYTEDLPDLNAGQQSLSELLPKLRRRIERCEASAHIQKIGIKLKFADFQQTTIEKQQPELDMASLKQLLEQAWHRGQGKKVRLVGIHVGLKAQEAQAQLSLEL

SEQ ID NO: 135506 - protein, 281 aa, Unknown
  Bacterial polypetide isolated from the Sargasso Sea
DMPQFRGKPLAVGGPSEKRGVIAAASYEARKFGVRSAMPTAEAFRRCPELNLVSPRFPRYREISEKVHGIFRCYTDLIEPVALDEAWLDVSANLIREPSGTRVAERIKSEILEQTALTCSAGVSYNKFLAKIASEENKPDGLFVITPEQASAFLKVLPVRKIPGVGRVTEEKLRDFGIEITEDLLKKDAEWLNQHFGKFGMVLFQRARGIDHRPVEPERETKSVSVETTFDRNLTNLEELDLELQNLTEKLLQRLDRNGISGFTLTLKLKFTDLSKSHVRK

SEQ ID NO: 135507 - protein, 214 aa, Unknown
  Bacterial polypetide isolated from the Sargasso Sea
MSDSRKIIHIDMDAFYASVEQLDQPQFRGKPLAVGGPSEKRGVIAAASYEARKFGVRSAMPTVEAFRRCPELNLVSPRFPRYREISEQVHGIFRCYTDLIEPVALDEAWLDVSANLIREPSGTRVAERIKSEILEQTALTCSAGVSYNKFLAKIASEENKPDGLFVITPEQASAFLKVLPVRKIPGVGRVTEEKLRDFGIEITEDLLKKDAEWL

SEQ ID NO: 135508 - protein, 158 aa, Unknown
  Bacterial polypetide isolated from the Sargasso Sea
MGKIIRKIIHVDMDAFYASVEQMDDPALTGKPVAVGGSRDRGVVAAASYEARKYGVRSAMPSVQAKKMCPGLLFVRPRFNRYKEISAQIRKIFQDYTDLIEPLSLDEAFLDVTINKKGIDLASEIAAQIRQRIHSEIGLTASAGISINKFVAKVASDI

SEQ ID NO: 135509 - protein, 269 aa, Unknown
  Bacterial polypetide isolated from the Sargasso Sea
MVSVYETIERPLIKPIVEMENAGIKINLSILNSLSSEFEIRQAELKEKIYELSDDKFNLASPKQLGEILFEKMNLPGGKKTKSGTYGTSISILEELSSKGFEIADKVIEWRGLTKLKSTYTDALQDNVNKKTGRVHTSFSMAAASTGRLASTNPNLQNIPIRTVDGKRIRSAFISELGFKLLSADYSQIELRLVAHASQEKTMLQAFKDGNDIHSETAAQVFNLNLNEVSEENRRKAKAINFGIIYGISPFGLSRQLNSTQAEAKYIIE

SEQ ID NO: 135510 - protein, 248 aa, Unknown
  Bacterial polypetide isolated from the Sargasso Sea
NGKKIRTAFISGKGKKLVSFDYSQIELRLAAEISSDKNFIKAFKNNEDIHASTAMEIFNLKDSQINDDYRRKAKAINFGILYGISPYGLAKQLDISNTEAKDYINEYFIKYPKIKEYMDHQVDFAKTNQYVETIFKRRINIKGITDKNFAVRGFAERQAINAPIQGSAADIIKLAMIDIHKEIKLRNIEAEMLLQVHDELIFEVENKKYDNLVKNVKTIMESVHLKYKDFSVPLIVDYGVGDNWGQAH

SEQ ID NO: 135511 - protein, 278 aa, Unknown
  Bacterial polypetide isolated from the Sargasso Sea
KTERIHTSYQQAVTSTGRLSSTEPNLQNIPIKTAEGRRIREAFVPEKGNTLISADYSQIELRIMAHLSNDKNLTHAFNNNIDVHSSTAAEVFGVSIDDVSQDQRRSAKAINFGLMYGMSAFGLTRQLGISRAEAQEYLDTYFARYTGVKDYMDNIKAKAKEDKFVETIMGRRLYLNEINAANGLRRQAAERAAINAPLQGSAADIIKKAMLDIDQLLLNEMQEVKMIMQVHDELVFECPEGNAEDVMNKMKSTMEQTVELNIPLIVEAAIGKNWNEAH

SEQ ID NO: 135512 - protein, 199 aa, Unknown
  Bacterial polypetide isolated from the Sargasso Sea
RTVATDGHRLAVCSMPVGQPLPSHSVIVPRKGVIELMRMLDGGDNPLRVQIGSNNIRAHVGDFIFTSKLVDGRFPDYRRVLPKNPDKHLEAGCDILKQAFARAAILSNEKFRGVRLYVSENQLKITANNPEQEEAEEILDVSYPGTELEIGFNVSYVLDVLNALKCENVRILLTDSVSSVQIEDAASQSAAYVVMPMRL

SEQ ID NO: 135513 - protein, 276 aa, Unknown
  Bacterial polypetide isolated from the Sargasso Sea
MRKIIHVDMDCFYAAVEMRDNPSLRNIPIAIGGSSERRGVIATCNYPARKFGVRSAMASAYALKLCPNLKLVKGRMAVYQEESQKIRAIFADYTDLIEPLSLDEAYLDVTGSSLFQGSATRIAEEIRQRIASELNLTASAGVAPCKFVAKVASDENKPNGLCVVTPDQLDEFVKAMSLKKIPGVGQVTVQKLNQLGLHTCADVRAYPMTELQKRFGKFGQVIWDRAHGIDERPVQTNRIRKSVGVERTLSEDIQTVEACDEISISCILRCRKDSPP

SEQ ID NO: 135514 - protein, 274 aa, Unknown
  Bacterial polypetide isolated from the Sargasso Sea
ISSPKQIQEIFYDELKLPILKKTPKGQPSTNEDVMSQLAEDHELPNLVLSYRNLLKLKNTYTDKLGDQVSDISNRLHTSYNQTITITGRLSSSSPNLQNIPIRTDDGKKIRSAFIPREGYKLFSADYSQIELRIMAHLAKDPAMIESFLTGEDIHSSTARKVFNIKDEPSSDQRRAAKAINFGLIYGISAYGLAKQLKIDNVEAKGIIDTYFAKYKRVKEFMEELKELASKQEYVETMHGRKVFLPNISHSNFQVRSAAERTAINAPIQGTAAD

SEQ ID NO: 135515 - protein, 272 aa, Unknown
  Bacterial polypetide isolated from the Sargasso Sea
MLKTQSGELDKRMRELQQEACGLAGEEFNLGSPKQLQDIFFNKLELPVLKKTPKGQPSTAEPVLQELALDYPLPRVILAYRSLSKLKSTYTDQLPKQVHSSTGRVHTSYRQAVTATGRLSSTDPNLQNIPIRTEEGRRVRKAFVAPDGYLLLAADYSQIELRIMAHLSGDPGLVDAFKKNLDIHRATAAEVFGVAVEAVKDYQRRSAKAINFGLIYGMSAFGLARQLNITRNDAQEYIDLYFDRYPGVRNYMDRVRNLAGEQGFVETIFGRR

SEQ ID NO: 135516 - protein, 237 aa, Unknown
  Bacterial polypetide isolated from the Sargasso Sea
MSNHDKKKFIADQRKIIHVDMDSFYASVEIRDKPHLKKLPVAVAGSSQTRGVITTCNYVARKYGIKSAMPSIIAKRLCPDLIFLPVNMEKYRSVSQEIHNIFKCYTKIIEPVSLDEAYLDVSDSGYCDNDPVIMAYQIRKKIFEDLKITASAGIATNKFLAKLASEWNKPNGQFVIYEEDVKNFILDLPVRKINGVGEKTEKKLSNIGVSSFSDLQNIKLEKLVEIFGKHGQNLYDL

SEQ ID NO: 135517 - protein, 253 aa, Unknown
  Bacterial polypetide isolated from the Sargasso Sea
PIRTKEGRLIRTAFEPKIGFKLVSMDYSQIELRLIAHIADEITMLEAFNNELDIHLDTAAKVFNIPTNEITSELRRKAKAINFGIIYGISPYGLAKQLKCSANEAKLFITSYFTRFPKIRDYMEDIKNKINENGFVETLFNRRIYINGSDSKNHKIRGFAERQAINAPIQGTAADIIKNAMIQINKVLLNYKTEASMLLQVHDELVFEINEDNVDEIQKIILPVMENANLPMVPLKVKLKVDTGYGDNWAEAH

SEQ ID NO: 135518 - protein, 303 aa, Unknown
  Bacterial polypetide isolated from the Sargasso Sea
AAEGHDLAKTIIEFRQLSKLKSTYTDALTAAINPQTGRVHTSYSQAATSTGRLASTDPNLQNIPVRTVEGRKIRKAFVPEKGHVLVSADYSQIELRILAHVAGIDALKQAFHDGQDIHALTASQVFGEPIEGMDPITRRKAKAINFGIIYGISAFGLARQLGIPNSEAKAYIDAYFDKYPGIKAYMECTKTQAREEGFVTTLFGRKCHTKGINDRNPNMRGFAERAAINAPIQGGAADIIKRAMIQVPGALTGAGLKAQMLLQVHDELIFEAPKAEAKDTINVVRAAMERAAHLDVPLVVDVG

SEQ ID NO: 135519 - protein, 248 aa, Unknown
  Bacterial polypetide isolated from the Sargasso Sea
MQRKIIHIDADCFYAAIEMRDRPELRGIPMAVGGSAERRGVLTTCNYDARAYGVRSAMPTAQAMRLCPQLTVVPPQMHKYREASKVMRGIFAEFTEVIEPLSLDEAYLDVSEITAETLTATRIAKAIRAQVREALDITVSAGVSVNKFVAKVASDWKKPDGLTVVPPDEVDVFVAALSVTKIPGVGAVTADKMHRYGLRTCADVRGWSLHDLRRRFGKFGVVLHERARGRDERLVQPSRVRKSVSVER

SEQ ID NO: 135520 - protein, 254 aa, Unknown
  Bacterial polypetide isolated from the Sargasso Sea
IPIRSDNGRMIRKAFIPEKGNVLISSDYSQIELRLIAHIADERNLINAFLDEIDIHSSTASEVFNIPLNDMTPDIRRNAKAINFGIIYGISAFGLAKQLNISRTEASEFIKAYFKKYPSIRDYMDETKKYANENGYVKTLLGRKCLVEEINSKNAATRSFMERAAINAPIQGSAADIIKRAMIILGNHKNLEKLETKMLLQVHDELIFETKKENCKESMRIIKKEMESANLPILNLNVPLIADTNFGNNWDEAH

SEQ ID NO: 135521 - protein, 168 aa, Unknown
  Bacterial polypetide isolated from the Sargasso Sea
MLRKIIHIDADCFYAAIEMRDHPELRGIPMAVGGSAERRGVLTTCNYDARAYGVRSAMPTAQAIRLCPQLTVVPPQMHKYREASKVMRGIFANFTEIIEPLSLDEAYLDVSEISDEELTATRIANAIRQQVREELDITVSAGVSVNKFIAKVASDWKKPDGLTVVPPD

SEQ ID NO: 135522 - protein, 154 aa, Unknown
  Bacterial polypetide isolated from the Sargasso Sea
PLRVQIGSNNIRAHVGDFIFTSKLVDGRFPDYRRVLPKNPDKHLEAGCDILKQAFARAAILSNEKFRGVRLYVSENQLKITANNPEQEEAEEILDVSYPGTELEIGFNVSYVLDVLNALKCENVRILLTDSVSSVQIEDAASQSAAYVVMPMRL

SEQ ID NO: 135523 - protein, 259 aa, Unknown
  Bacterial polypetide isolated from the Sargasso Sea
SSTEPNLQNIPIKTAEGRKIREAFIAEKGNVLISADYSQIELRIMAHLSGDKNLTHAFNNNIDVHSATASEIFNVSLEDVTSDHRRNAKAINFGLIYGMSAFGLTRQLGISRDEAQAYLDTYFKRYTGVKDYMDSTKELAKKNLFVETILGRKLHVVAINDSNGLRRQAAERAAINAPLQGSAADIIKKAMIDVDQWIGGENPDIRMIMQVHDELIFEVKKEFADDAINEIVNLMESSVELKIPLIVDANQGTNWNEAH

SEQ ID NO: 135524 - protein, 254 aa, Unknown
  Bacterial polypetide isolated from the Sargasso Sea
AFKIAGEEFNLDSPKQLLEILYEKLGLPVLKKTPKGQPSTNEDTLQRLSEEYELPKIILQYRTLAKLKSTYTDSLINIENPKTKRIHTSYQQAVTSTGRLSSTEPNLQNIPIKTAEGRRIREAFVPEKGNILISADYSQIELRIMAHLSNDKNLTYAFNNDIDVHSSTAAEVFGVSIEDVSQDQRRSAKAINFGLMYGMSAFGLTRQLGIPRGEAQEYLDTYFARYTGVRDYMDNIKAKAKEDKFVETIMGRRL

SEQ ID NO: 135525 - protein, 329 aa, Unknown
  Bacterial polypetide isolated from the Sargasso Sea
TVLAGEEFNPNSIIELQNILYKKLRLHDQFNIKPKKIKLGNRMSTDEETLEKLAEDDLPRAILDYRTLNKLKNTYIDQLPGYVHSNSGNIHSTFHQTGTATGRLSSENPNLQNIPVRSVEGRRVRRAFIASGNENILISADYSQIELRVVAHYSKDPTFIDAYRRNLDIHSLTASTIYGLEEKDVTREMRDRAKEVNFGLIYRMGAERLSIVTKTPKAESKEFIERYFEKYSTIHALQERFLEQARKEGFSETLFGRRRYLPDINAKGLLKRMAEGAAINTPIQGSAAEIIKLAMINVANLILEKKMHSKMILTVHDELVFDALKEEED

SEQ ID NO: 135526 - protein, 230 aa, Unknown
  Bacterial polypetide isolated from the Sargasso Sea
LSSTEPNLQNIPVRTEDGRRIREAFVAEDGNILVSLDYSQIELRILAHIAQIDALKQAFHDGLDIHAMTASEMFNVPLDEMTSEIRRQAKAINFGVIYGISGFGLARNLRIPRSEAQGFIDRYFERFPGIKEYMNNTVKFSKENNRVETLFGRVIHTPEINAKGPMAGFAKRAAINAPIQGTAADIIRRAMIRVPDAIKDLPAKMLLQVHDELLFEVKEEFCEDLIAQVQ

SEQ ID NO: 135527 - protein, 321 aa, Unknown
  Bacterial polypetide isolated from the Sargasso Sea
STDEKVLQELSEEYELPKVLLEHRTLSKLKSTYTDKLPGQVSSNTGKVHTSFHQAVTTTGRLSSSDPNLQNIPIRTEDGRRIRQAFEATKGNKIISADYSQIELRVMAHLSKDKGLLEAFNQGEDIHSKTASEVFDVNLDEVTADLRRNAKAINFGLIYGISAFGLGKQLGINRNLAAEYMGMYFEKYPGVKDYMETTKDAARDAGYIETLFGRRLYLRDINASNAIRRQASERVAINAPVQGSAADIMKIAMINAHRSLKESKLKAQLTLQVHDELIVDAPTKEADKVVELLTSSMQEAANLDVPLVVDIGIGNNWGQAH

SEQ ID NO: 135528 - protein, 151 aa, Unknown
  Bacterial polypetide isolated from the Sargasso Sea
ATVLEKLGNDHPVVPLVLEHRVLSKLKSTYIDALPQLVEAETGRVHTDFNQAVTATGRLSSSNPNLQNIPVRTEYSRRIRKAFLPQEGWTLLSADYSQIELRILTHLSGEEVLQEAYRSGDDVHALTARLLLDKDEVSPDERRLGKTINFG

SEQ ID NO: 135529 - protein, 290 aa, Unknown
  Bacterial polypetide isolated from the Sargasso Sea
STYTDALVEQINPKTNRVHTNYSMVGASTGRLSSSNPNLQNIPVKTEEGRLIRTAFESKPGFKLVSMDYSQIELRLIAHIADEIKMLDAFNNDLDIHSDTASKVFGIPINEMTLDLRRKAKAINFGIIYGISAYGLAKQLKCSAIEAKEFIDSYFKRFPRIRDYMEEIKSNLENNGYVETLFNRRIYINDSNAKNQRLRGFAERQAINAPIQGSAADIIKLAMVKIHKNLFNYKNDVSMLMQVHDELVFEIRENSIDKYSKIIQQIMEHANLPKVSLKVNLKVDTGLEIM

SEQ ID NO: 135530 - protein, 196 aa, Unknown
  Bacterial polypetide isolated from the Sargasso Sea
MSDSRKIIHIDMDAFYASVEQLDQPQFRGKPLAVGGPSEKRGVIAAASYEAREFGVRSAMPTAEAFRRCPELNLVSPRFPRYREISEQVHGIFRCYTDLIEPVALDEAWLDVSANLIREPSGTRVAKRIKSEILEQTALTCSAGVSYNKFLAKIASDENKPDGLFVITPEQASAFLKVLPVRKIPGVGRVTEEKLH

SEQ ID NO: 135531 - protein, 283 aa, Unknown
  Bacterial polypetide isolated from the Sargasso Sea
MKGEKHRHGLDELSDLYLDHTTIKFKDVTGTGKSKISFDKVPINDALEYAAEDADITDRLFKVLKPRLYQDRMVSVYENLERPLIQILKNMEECGVKLDTRRLLTLSEDFSKRLGDLETQIFKLAGKSFNVGSPKQLGEILFEEMKLPGGKKGKSGSYGTGSEVLEDLILQGHEFPNIILDWRQLAKLKSTYTDSLLNQVNPATGRVHTNYGQAIASTGRLSSTEPNLQNIPIRTDEGRKIRQAFIPSEGNLVLSADYSQIELRLLAHVADIKALKEAFEAKY

SEQ ID NO: 135532 - protein, 310 aa, Unknown
  Bacterial polypetide isolated from the Sargasso Sea
GLSDLLDRFADVDSSGIDVQDVPQTAEQAASSCHGVASLIEILSEEIQAGGFGALFSDVELPLAEVLSGMESRGVRVDTKLLSRLSEDYSSQIKILQKESHELAGHAFSLSSPLQVRTVLFEEQGLPVVKRTKTGPSTDAEVLEELAPLHELPAKLLQHRKYSKLKSTYVDALPFLIDPRTNRIHTTFNQTVTATGRLSSSDPNLQNIPIRTAEGQQIRSAFRPAEKGWHFLAADYSQIELRILAHLSGDTAMLAAFRNEEDIHTRTAAAVFEVESEEVTSEMRRTAKAVNFGILYGQSAFGLAKALGIS

SEQ ID NO: 135533 - protein, 305 aa, Unknown
  Bacterial polypetide isolated from the Sargasso Sea
QRKCLQNAKYDRLVLLRHGLELNGVAVDTLLADYLRDASARHNLEELAQRHYGFRPTSFSDLVGKGQTFADVPIEAAAQYCGMDVHLTYRLAIDLVQQLEQLGGALPQLLAELELPLEPVLAQMEATGIRIDVPYLQELGQSMGEKLQQLGQQAIAAAGEEFNLASPKQLGELLFNTLGLDRKKSRKTKTGWSTDAAVLEKLEDAHPVVPLVLEHRTLSKLKSTYVDALPQLVESETGRVHTDFNQAVTATGRLSSSNPNLQNIPVRTAYSRQIRKAFLPQQDWTLLSADYSQIELRILTHLCGE

SEQ ID NO: 135534 - protein, 263 aa, Unknown
  Bacterial polypetide isolated from the Sargasso Sea
IVFSNPNLQNIPIRTEEGRLIRTASEPKEGFKLVSMDYSQIELRLIAHIADENNMLDAFNDNLDIHADTASKVFDIPIKEITSEFRRKAKAINFGIIYGISAYGLAKQLKCSANEAKDFISSYFYRFPKIRDYMEEIKSNLDSDGYVETLFNRRIYINDSNSKNQKLRGFAERQAINAPIQGTAADIIKFAMIKIHKQLLNKKEISMLMQVHDELVFEIRDENIEEFTKVISPIMETANLPMVPLKVNLKVDVGVGNNWAEAH

SEQ ID NO: 135535 - protein, 144 aa, Unknown
  Bacterial polypetide isolated from the Sargasso Sea
MFLYTVFWVSEECKVRKIIHIDMDCYFAAVEMRDFPEYRGKPLAVGGSRVQRGVISTCNYEARKFGVRSAMATGYALKLCPDLILVPGRMQVYKEVSQQIRAIFSRYTELIEPLSLDEAYLDVSDCKLFKGSATLIAEAIRPGY

SEQ ID NO: 135536 - protein, 268 aa, Unknown
  Bacterial polypetide isolated from the Sargasso Sea
ADISLKLYEHIEPLVQKEAKLSKLYSEIEGPLIYTLGDIERNGVLIDSEKLSQQSKELEAKILKLESKVQKNAGEDFNLGSPKQLQEILYEKLGLPVIKKTPKGQPSTSEAVLQELSMDFPIVDDILSYRAISKLKSTYTDKLPKMINSNTGRVHTSYHQAVTATGRLSSSDPNLQNIPIRSEEGRRIREAFIAPEGYKILAADYSQIELRIMAHLSKDQGLMDAFAKGQDIHQATAAEIFSINIDDVTPNQRRSAKAINFGLIYGMS

SEQ ID NO: 135537 - protein, 307 aa, Unknown
  Bacterial polypetide isolated from the Sargasso Sea
PLPALIMEYRGLSKLKSTYTDQLPREIDQGTGRIHTSYRQAVAATGRLSSVDPNLQNIPIRTDEGRRVRRAFVAPPVTRLLAADYSQIELRIMAHLSQDAGLLDAFAQGLDIHRATAAEVFGESIETVQDDQRRSAKAINFGLIYGMSAFGLANQLGISRASAQEYIDLYFDRYPGVQDYMERTRSFAADEGYVETLFGRRLYLPEIKASNYMRRQGAERQAINAPMQGTAADIIKRAMVTVDRWLTDREPASRMIMQVHDELVLEVPEGDVDRVGAGVSQLMSDAASLAVPLVVKVGVGGDWDAAH

SEQ ID NO: 135538 - protein, 138 aa, Unknown
  Bacterial polypetide isolated from the Sargasso Sea
MGKIIRKIIHVDMDAFYASVEQMDDPTLTGKPVAVGGSRDRGVVAAASYEARKYGVRSAMPSVQAKKMCPGLLFVRPRFSRYKDISEQIRRIFQDYTDLIEPLSLDEAFLDVTINKKGIDLAREIAAQIRQRIHSEIG

SEQ ID NO: 135539 - protein, 271 aa, Unknown
  Bacterial polypetide isolated from the Sargasso Sea
SYSQAAASTGRLASTDPNLQNIPVRTEEGRKIRKAFVSERDHVLVSADYSQIELRILAHVAGIDTLKQAFHDGQDIHALTASQVFGKPIEGMDPMTRRNAKAINFGIIYGISAFGLARQLGIPNSEAKAYIDAYFDKYPGIKAYMERTKAKAREEGFVTTLFGRKCHTKGINDRNPNMRSFAERAAINAPIQGGAADIIKRAMIRVPGAITTAGLKARMLLQVHDELIFEVPKAEVTGTIDVVRATMEGAAHLDVPLVVDAGTGMSWDEAH

SEQ ID NO: 135540 - protein, 240 aa, Unknown
  Bacterial polypetide isolated from the Sargasso Sea
TKRVHTSYSMASASTGRLASTNPNLQNIPIRTSDGRRIREAFIARDGYKLISADYSQIELRLMAHAANETEMIKAFNENVDIHSQTASKVFGIPIEDLDSETRRSAKAINFGIIYGISSFGLSKQLSCSQSEAKNFIDSYFDQFPKIKSYMDEMIENAKMKGYVETFFGRMIPIKGINSKNFQERSFAERQSINAPIQGSAADIIKRAMIKIHNVFQEKNIESKMLLQVHDELVFECPKE

SEQ ID NO: 135541 - protein, 266 aa, Unknown
  Bacterial polypetide isolated from the Sargasso Sea
MSEQGYEIASLILEWRELTKLKSTYTDALQNQATKDKSRVHTSYGIANTLTGRLSSNDPNLQNIPIRTNNGRKIRKAFVCDTKKTLMSFDYSQIELRLAAEISGDNNFIEAFKNNEDIHSSTASQIFGTSSKKLDSEMRRKAKAINFGILYGISPYGLAKQLNVTNREAKIYIENYFKKYPKIKKYMDDQIAFAKTNFYVETIFGRRCNIKNINDKNFAVRGFAERQAINAPIQGTAADIIKLAMIELNKMIISKELEVKILLQVH

SEQ ID NO: 135542 - protein, 72 aa, Unknown
  Bacterial polypetide isolated from the Sargasso Sea
MSDSRKIIHIDMDAFYASVEQLDMPQFRGKPLAVGGPSEKRGVIAAASYEARKFGVRSAMPTAGAFRRCPEL

SEQ ID NO: 135543 - protein, 306 aa, Unknown
  Bacterial polypetide isolated from the Sargasso Sea
PELKNLLIDVEFPLACVLSRMEQEGVLIDSQRLRQQSQDLATRIAELESEVHEEAGEPFNLGSTKQLQHVLFEKMSLPIIKKTPKGAPSTSEDVLQELALEYPLPKKIMEYRGLTKLKNTYTDKLPKMINHRTGRVHTSYHQAVTATGRLSSTDPNLQNIPIRNEEGRRVRKAFVPREGNKFVAADYSQIELRIMAHLSGDKGLLDAFAHGKDIHKATAAEVFGVPLDEVTTEQRRSAKAINFGLIYGMSAFGLSKQLNIPRNEAQKYMDLYFERYPGVLEYMDSTRESARIKVCRNRIWSQTLFA

SEQ ID NO: 135544 - protein, 270 aa, Unknown
  Bacterial polypetide isolated from the Sargasso Sea
EIFFEKLRLDPNAKRTRKSKQYQTNERILTRLANRHEIAEKVLHYRESTKLKSTYLDMLPGTVFEKTGRVHTNYEQAVTATGRMQSSNPNLQNIPVRSDQGREIRKAFVPRDDNHTLLAADYSQIELRIVADISGDETMKGAFERGDDIHEMTSMKVFDVAAEDVTAEMRRRAKTVNFGIVYGISAFGLSDRLDIPRAQALDLIESYFTQYPAIRDYMEQTVEFCRENGYVETVTGRRRYLRDINSRNGTLRSAAERNAINSPIQGSAAD

SEQ ID NO: 135545 - protein, 291 aa, Unknown
  Bacterial polypetide isolated from the Sargasso Sea
EWRQLSKLKSTYTDALIGQIDSRTGRVHTSFAQAIASTGRLSSNDPNLQNIPIRTEDGRKIRTAFVADDKNVLLSADYSQIELRLLAHVADIGTLKKAFKDGVDIHALTASEVFGIPISQLDSPTRNRAKAINFGIIYGISPFGLARQLDIAQGDAKSFIEAYFARYPGVKGYMDNAKEFAQKTGYVETIFGRRVHVPGIKDKNPARRNFMERAAINAPLQGSAADIIKRAMILMPDVLKSADLKAQMLLQVHDELIFEVPRSELEKTEKLVKNVMESAASLSVPLICDTG

SEQ ID NO: 135546 - protein, 274 aa, Unknown
  Bacterial polypetide isolated from the Sargasso Sea
SNLYPRLIKEKANFVYQNIDLPLVEVLSSIEANGIEVNKKFLISLSNEFENESKKLEKNIYKLSKEEFNIGSPKQLGEILFINLKIPGGKKTKSGTYSTDSSTLNNLASNGFEIAQLVLDWRELTKLKSTYTDALFRLTDGKSRVHTSFGLANTLTGRLSSTDPNLQNIPIRTENGKKIRTAFISGKGNKLVSFDYSQIELRLAAEISSDKNFIKAFKNNEDIHASTAKEIFNINDSQINNDYRRKAKAINFGILYGISPYGLAKQLDISNTEA

SEQ ID NO: 135547 - protein, 297 aa, Unknown
  Bacterial polypetide isolated from the Sargasso Sea
VILEHRSLTKLKSTYTDKLPLMVNAKTGRVHTSYHQANAATGRLSSSEPNLQNIPIRTEEGRRIRQAFIAPQGRKILAADYSQIELRIMAHLSQDAGLLKAFAEGKDIHRATAAEVFGTDFDSVTSEQRRRAKAVNFGLIYGMSAFGLARQLDIPRNEAQTYIDTYFARYPGVLRYMEETRASAAELGYVSTLFGRRLYLPEIRDRNAMRRQAAERAAINAPMQGTAADIIKKAMISIADWIKSDTQGEIAMIMQVHDELVFEVDADKAETLKLKVCELMAQSGQSGRGTSGGSRYW

SEQ ID NO: 135548 - protein, 278 aa, Unknown
  Bacterial polypetide isolated from the Sargasso Sea
AGEAFNLSSTKQLQTILFEKQGIKPLKKTPGGAPSTSEEVLEELALDYPLPKVILEYRGLAKLKSTYTDKLPLMINKKTGRVHTSYHQAVTATGRLSSTDPNLQNIPVRNDEGRRIRQAFIAPEDYVIVSADYSQIELRIMAHLSRDKGLLTAFAEGKDIHRATAAEVFGLPLDSVTSEQRRSAKAINFGLIYGMSAFGLARQLNIPRKEAQKYMDLYFERYPGVLEYMERTRAQAKEQGYVETLEGRRLYLPDIKSSNGARRAGAERAAINAPMQGT

SEQ ID NO: 135549 - protein, 238 aa, Unknown
  Bacterial polypetide isolated from the Sargasso Sea
LPEMIDARTGRVHTSYHQAVTATGRLSSSDPNLQNIPIRTEEGRRIRQAFIAAPGCKIVAADYSQIELRIMAHLSQDEGLLKAFANELDVHSATAAEVFGVEIGEVSGDQRRKAKAINFGLIYGMSAFGLAKQLGLGRNEAQEYIDLYFARYPGVADYMARTRELAHDTGYVETLKGRRLYLPEINAKNRQRQQAAERTAINAPMQGTAADMIKMAMLAVDGWLYRLHHRRADDHAGA

SEQ ID NO: 135550 - protein, 284 aa, Unknown
  Bacterial polypetide isolated from the Sargasso Sea
YAAEDADITDRLFKILKPRLYQDRMVAVYENLERPLIQILKNMEECGVKLDTHRLLILSEDFSKRLIELETQIFKLAGKSFNVGSPKQLGEILFEEMKLPGGKKGKSGSYGTGSEVLEDLILQGYEFPKIILDWRQLAKLKSTYTDSLLNQVNYKTGRVHTNYGQAIASTGRLSSTEPNLQNIPIRTDEGRKIRQAFIPSEGNLILSADYSQIELRLLAHVADIKALKEAFEANIDIHSLTASQVFGTPVEDVDDDMRRKAKAINFGIIYGISAFGLARQLNIP

SEQ ID NO: 135551 - protein, 272 aa, Unknown
  Bacterial polypetide isolated from the Sargasso Sea
SNLYPRLIREKANFVYQNIDLPLVEVLSSIEANGIEVNKKFLTNLSNEFENESKKLEKNIYKLSKEEFNIGSPKQLGEILFVNLKVPGGKKTKSGTYSTDSSTLNTLASDGFEIAQLVLDWRELTKLKSTYTDALFRLTDGKSRVHTSFGLASTLTGRLSSTDPNLQNIPIRTENGKKIRTAFVSGKGKKLVSFDYSQIELRLAAEISSDKNFIKAFKNNEDIHASTAKEIFNLNDSQINNDYRRKAKAINFGILYGISPYGLAKQLDISNT

SEQ ID NO: 135552 - protein, 282 aa, Unknown
  Bacterial polypetide isolated from the Sargasso Sea
QELALEYPLPKKIMEYRGLTKLKNTYTDKLPKMINHRTGRVHTSYHQAVTATGRLSSTDPNLQNIPIRNEEGRRVRQAFVPREGNKFVAADYSQIELRIMAHLSGDKGLLDAFAHGKDIHKATAAEVFGVPLDEVTTEQRRSAKAINFGLIYGMSAFGLSKQLNIPRNEAQKYMDLYFERYPGVLEYMDSTRESAKEKGYVETVFGRRLYLPDIKASNGARRKGAERAAINAPMQGTAADIIKMAMIKVDDWIRKNASDDVTMMMQVHDELVFEIKEDKVET

SEQ ID NO: 135553 - protein, 296 aa, Unknown
  Bacterial polypetide isolated from the Sargasso Sea
YNRILPRIFNDKRFSVYKRLENPLINVLLEMENTGVTINAQKLSEISKNLSDEILKLENKIFDYSGKTFNVGSPKQLGEILFDKLKIEGGKRSKNGSWQTSVEVLENLSDLGHEIAQLILNWRHFSKLKSTYTDALVEQINPKTNRVHTNYSMVGASTGRLSSSNPNLQNIPIKTEEGRLIRTAFESKPGFKLVSMDYSQIELRLIAHIADEIKMLDAFNNDLDIHSDTASKVFGVPVNEMTSDLRRKAKAINFGIIYGISAYGLAKQLKCSVNEAKEFIDSYFKRFPKIRDYMEE

SEQ ID NO: 135554 - protein, 259 aa, Unknown
  Bacterial polypetide isolated from the Sargasso Sea
SSTEPNLQNIPIKTAEGRRIREAFIPEKGNTLISADYSQIELRIMAHLSEDKNLTNAFNNNIDVHSSTAAEVFSIAIEEVNKDQRRSAKAINFGLMYGMSAFGLTRQLGITRAEAQAYLDTYFARYTGVRDYMDNIKAKAKEDMFVETIMGRRLYLNEINAANGLRRQAAERAAINAPLQGSAADIIKKAMLDIDKLILNEMPDVKMIMQVHDELVFECPKENADLVMEKMKETMEQTVELKIPLIAEAAVGSNWNEAH

SEQ ID NO: 135555 - protein, 200 aa, Unknown
  Bacterial polypetide isolated from the Sargasso Sea
VRTVATDGHRLALNSLEVPEAKTEKQVILPRKGVLELQRLLQEVDGDVVLTIGSNHLGAATDEFALTTKLLDGKFPDYERVIPRDGNRVILADKEELRQALSRTAILSNEKFRAIRVSFNNGIIQLSANNPEQEEAEETMSVAYQGDAVEIGFNVSYLQDVLGVLDSEKVRITVLDANSSALLEEPENDDAIYVVMPMKL

SEQ ID NO: 135556 - protein, 317 aa, Unknown
  Bacterial polypetide isolated from the Sargasso Sea
CKVPLNKAMEYSAEDADMTFRLYKQQKKDLPKKRMAAVYETLERPLIEVLVEMEHTGIKVDPIILKKMSEDFSQRLKSQAGDIYKLAGGEFNIASPKQLGEILFDKLSLPGGKKTKTGSYATGAEILEDLAANGSDIAAKVLDWRQIAKLKSTYTDALIEEINPKTGRIHTSYSMTGASTGRLSSNDPNLQNIPIRTDEGRKIRTAFIAEQDNALVSIDYSQIELRLLAEIANIDSLKQAFRDGVDIHAQTASEVFNISVENMDPMIRRNAKAINFGIIYGISSFGLARQLRCPQTEAKAYIDAYFAKYPGIQTYMD

SEQ ID NO: 135557 - protein, 305 aa, Unknown
  Bacterial polypetide isolated from the Sargasso Sea
SATEYAAEDADIPLRLWKILKPKLHKSGATKVYETMERSLIPVLSDMELTGILIDREFLKKMSNILAQKILACEEVIFSLSQQKFNIGSPKQLGEILFEKLNLSGGKKSKNGTYSTNADVLENLSADGNELAENVLLWRQMAKLKSTYTDALPYHISKSTGRVHTAYNMSGTSTGRLSSSEPNLQNIPIRTDDGKKIREAFISAPGKKIVSLDYSQIELRILAHIANITSLKKAFSEKLDIHAMTASEMFNVPMNEMTPSVRRKAKAINFGVIYGISAFGLARNLRISREEAKNFIDTYFNRFPG

SEQ ID NO: 135558 - protein, 283 aa, Unknown
  Bacterial polypetide isolated from the Sargasso Sea
FAQKMAGLEAEIYELAGESFNVGSPKQLGEIMFDKLGYEGGKKGKNGAYATGADILEDLAMSYDFPKRVLDWRQLSKLKSTYTDALQDHINPNTGRVHTSYSIAGAVTGRLSSTEPNLQNIPVRTEDGRRIREAFVAEDRNIFVSLDYSQIELRILAHIAQIDTLKQAFHDGLDIHAMTASEMFDVPLDEMTSEIRRQAKAINFGVIYGISGFGLARNLRIPRSEAQGFIDRYFERFPGIKEYMDKTVKFSKENNYVETLFGRIIHTPEINAKGPMAGFAKRA

SEQ ID NO: 135559 - protein, 173 aa, Unknown
  Bacterial polypetide isolated from the Sargasso Sea
MSDSRKIIHIDMDAFYASVEQLDQPQFRGKPLAVGGPSEKRGVIAAASYEARKFGVRSAMPTAEAFRRCPDLNLVSPRFPRYREISEHVHGIFRCYTDLIEPVALDEAWLDVSANLIREPSGTRVAERIKSEILEQTALTCSAGVSYNKFLAKIASEENKPDGLFVITPEQAS

SEQ ID NO: 135560 - protein, 283 aa, Unknown
  Bacterial polypetide isolated from the Sargasso Sea
AQRHYGFRPTSFSDLVSKGQTFADVPIEAAAQYCGMDVHLTYRLAIDLVQQLEQLGDALPQLLAELELPLEPVLAQMEATGIRIDVPYLQELGQSMGEKLQQLEQQAIAAAGEEFNLASPKQLGELLFNTLGLDRKKSRKTKTGWSTDAAVLEKLEDAHPVVPLVLEHRTLSKLKSTYVDALPQLVESETGRVHTDFNQAVTATGRLSSSNPNLQNIPVRTAYSRQIRKAFLPQQDWTLLSADYSQIELRILTHLCGEEALVEAYNSGDDVHALTARLLLTKA

SEQ ID NO: 135561 - protein, 302 aa, Unknown
  Bacterial polypetide isolated from the Sargasso Sea
RGKPLAVGGPSEKRGVIAAASYEARKFGVRSAMPTAEAFRRCPELNLVSPRFPRYREISEKVHGIFRCFTDLIEPVALDEAWLDVSANLIREHSGTRVAKRIKSEILEQTALTCSAGVSYNKFLAKIASEENKPDGLFVITPEQASAFLKELPVRKIPGVGRVTEEKLRDFGIEFTEDLLKKDAEWLNQYFGKFGMVLFQRARGIDHRPVEPERETKSVSVETTFDRNLTSLEELYPELQNLTEKLLQRLDRNGICGSTLTLKLKFADFEQITRSESRSLPFDRNSLLETGKRKLHQCCSRE

SEQ ID NO: 135562 - protein, 473 aa, Unknown
  Bacterial polypetide isolated from the Sargasso Sea
VKKFEKKIIESPNEIEKINSEFDRESYQIIQSLDELKQWKLKAENIGYLAFDTETNSLDAVEADMVGFSLCTSENDACYVPLLHEENDKQIDFNQAIDILKSILEDNGIKKILHNMKFDALVVDKYNINIKNYDDTMLMSYSIGSGGIRHKLDTLIKYYFDHDAISFKDLIGSGKDKKTFQELPIKEAGKYAAEDADMTLRLWKIFKSSVTQDKQVKIYEIIEKPLAQVIMNMEKHGISIDVNKLNELSVNFEEKLKNLEKSCYKLIGEEINLGSPKQVGEILFDKLELPGGKKTSTGLWSTNAEILENLANEGYDFPKALLEWRALSKLKTTYTDTLPTYLNIKTNRIHSSFAMATTSTGRLASSDPNLQNIPIRSDNGRMIRKAFIPEKGNVLISSDYSQIELRLIAHIADERNLINAFLDEIDIHSSTASEVFNIPLNDMTPDIRRNAKAINFGIIYGISAFGLAKQLNI

SEQ ID NO: 135563 - protein, 569 aa, Unknown
  Bacterial polypetide isolated from the Sargasso Sea
SIDYMSAQLVGVSFAVCVGEAAYLPLAHDYVGVPEQVDFDKAIKALRPVLENESIAKVGQNLKYDLSILASYGLTLKGELYDTMMESYVLNSVATRHNMDALARHYLDIATTSFEDVAGKGASQLTFNQVPLDVARDYAAEDADVTYRLHQALWPLIEREPKLLHIFRDVEMPLVRVLSKIERQGALLDPGLLNKQSSELGRRIEELKDAAWSSAEEEFNLDSPKQLQEIFFEKQGLPVLKKTPGGKPSTAEPVLVDLARDYELPALILEYRGLAKLKSTYTDKLPKDINADSGRVHTSYHQAVTATGRLSSSDPNLQNIPIKTAQGRKVRAAFVAPEGKKILAADYSQIELRIMGHLSGDDGLLQAFSEGLDVHSFTASEVFNVEIQSVTADQRRSAKAINFGLIYGMSAFGLAKQLDISRALAQDYIDSYFSRYPKVLDYMEQTKEQASKLGYVETVFGRRLYLPEINAKQVMRRQAAERTAINAPMQGTAADIIKKAMLEVDGWLGRTNVDCRMIMQVHDELVFEVAESDIDEVESEVENLMSQSASLDVPLTVSVGRGDNWEEAH

SEQ ID NO: 135564 - protein, 245 aa, Unknown
  Bacterial polypetide isolated from the Sargasso Sea
FQTEIEFTLKQGVLKSLIDATQFSMANQDVRYYLNGLLLETEGNVLRAIATDGHRLALSHRTIDAQLPEKQVIVPRKGVMEMARLLEADDLDIAIAIGDNAIRATTSTTVFTSKLVDGRFPDYRRVLPKGGDKIVIASRNHFKQALTRASILSNEKFRGVRIQLEAGLLKITANNPEQEEAEEIIDVDYNNQPLEIGFNVSYLLDVLNNLKSDDVRITLIDGNSSALLENHLEEDSMYVVMPMRL

SEQ ID NO: 135565 - protein, 245 aa, Unknown
  Bacterial polypetide isolated from the Sargasso Sea
MIRKAFIPEKGNVLISSDYSQIELRLIAHIADERNLINAFLDEIDIHSSTASEVFNIPLNDMTPDIRRNAKAINFGIIYGISAFGLAKQLNISRTEASEFIKAYFKKYPSIRDYMDETKKYANENGYVKTLLGRKCLVEEINSKNAATRSFMERAAINAPIQGSAADIIKRAMIILGNHKNLAKLETKMLLQVHDELIFETKKENCEESMRIIKKEMESANLPILNLNVPLIADTNFGNNWDEAH

SEQ ID NO: 135566 - protein, 910 aa, Unknown
  Bacterial polypetide isolated from the Sargasso Sea
MAPSNPLILVDGSSYLYRAFFASQQADLRTSTGLPSGAVRVMANMMRSLRKQYPDCHVAVVFDAKGKTFRDDIYPEYKANRASMPDDLRSQVAPIHQMIKAMGFPFLMVEGVEADDVIGTLARQATEKQLPVLISTGDKDMAQLVSDHVTLIDTMKDVKTDREGVIEKFGVPPELIIDYLALMGDKVDNIPGMTGVGEKTALALLQGIGSIDEIAANLDKVAALGFRGSKAFADKFREQEEQVRLSYVLATIKTDVALEQSLEELQLGPIDKEALLAVYREYELRNLIKELESGDADESEAEGDDEGAAPVAAIETDYRCILDEAEFDEWLARLQAAPLFAFDTETTSLDYMEARVVGVSFAIEPGKAAYVPFGHDYLGAPVQLTEAVVLGKLKPLLEDPARLKVGQNLKYDRNVLLNHGIELQGIAYDTMLESYVLNSTASRHDMDSLARRYLNAETISFEEIAGKGVKQLTFNQIELEQAAPYAAEDADITLRLHQALWGKLSVEPGLAKVFSEIELPLLPVLARMERLGTTIEPKLLHQQSQEIEVRLAELEKQAHELAGQEFNLSSPKQLGEILFTKLGLPIIKKTPKGAPSTAEEVLAELAETYELPQLLMEHRGLAKLKSTYTDKLPLMIKPQTGRVHTSYHQAVAATGRLSSTDPNLQNIPVRNEQGRRIRQAFIPCAGYKLVAADYSQIELRIMAHLSGDKGLLTAFAEGKDIHKATAAEVFGVALEAVTSDMRRSAKAINFGLIYGMSAFGLAKQLGIGRAEAQKYMDLYFERYPGVLEYMERTRQQADAQGYVETLFGRRLYLPDIKSRNAGLRKAAERAAINAPMQGTAADIIKRAMINVDGWIRGIEDQSIRMLMQVHDELVFEIREEKLEEYIAIIKEKMSAAAELHVPLVVEAGYW

SEQ ID NO: 135567 - protein, 327 aa, Unknown
  Bacterial polypetide isolated from the Sargasso Sea
MSEESNNKIERKIIHVDMDAFFASVEQFDNPEWKGLAIAVGGGGDRGVVSAASYEARKFGVRSAMSGIVAKKLCPQLIFVKPRFDRYKEISDQIRAIFIEYTHLVEPVSLDEAYLDVSDYPSASLLAKEIRNKIKAKTGLTASAGISINKFLAKVASNLNKPNGQKTLPPNEVLDFLDSLDVKKFHGVGKKTKLKMYQHGIYLGSDLKAKSKDFLTTHFGKSGSYYYNVVRGIHNSEVKTRRIPKSLGAERTFKKNLSSELYLENKLKNISGIIEKRLFKNKLAGKTITLKIKYSDFKQQTRSKTGTLYLSSKELIFEYAKELLYNE

SEQ ID NO: 135568 - protein, 388 aa, Unknown
  Bacterial polypetide isolated from the Sargasso Sea
QQGVLIDSQQLSQQSQDLATRIAELEKEVHEEAGETFNLGSTKQLQHILFEKMSLPIVKKTPKGAPSTSEDVLQELALEYPLPQKIMEYRGLTKLKNTYTDKLPKMINHRTGRVHTSYHQAVTATGRLSSTDPNLQNIPIRNEAGRRVRQAFVPRKGNKIVAADYSQIELRIMAHLSKDKGLLDAFANGKDIHKATAAEVFGIALDDVTTEQRRSAKAINFGLIYGMSAFGLAKQLNIPRNEAQKYMDLYFERYPGVLDYMDSTRESAKEKGYVETVFGRRLYLPDIKASNGARRKGAERAAINAPMQGTAADVIKMAMIKVDDWIAKNASDDVTMMMQVHDELVFEIKEDKIDDYVSTIKTLMESAATLNVPLDVEVGIGEKLDEAH

SEQ ID NO: 135569 - protein, 894 aa, Unknown
  Bacterial polypetide isolated from the Sargasso Sea
MSKEKLLLVDGSSYLYRAFHALPDLRSSDGRPTGAIYGVLNMLQKLIKSERPDYLSVVFDTPIKTFRHDIFPEYKANRQKTPEDLIAQIEPLHQAIINLGLPLIAVDGVEADDVIGTLAMEAEKKNIKTMIATGDKDMAQLVTDNIHLIDTMKDIRMGPREVLEKFGILPERFIDYLTLAGDTSDNIPGVEKVGPKTAIKWINEYGSLEGVIQNADQIKGKIGDNLNAALDHLDLFKTLVTIKCDVQTDSNVSDLIIGESNEELLFEQLSDLGLHGLIKQFDIQSPEKKPDVESNYHTIRTKNELDELIEAMKKASYISFDTETTSLDYMNAELVGVSIALKPNEAFYIPINHNYEGVEKQLEEHFVLEALKPFLESDEIPKIGHNLKYDRHILQNLGIDLKGKLLDTMLFSYVNNSTITRHNLDAVSKRYLNINPTSYEDVAGKGAKQIPFSEVSIEVASEYASEDADISLKLYEHIEPLVQKETKLAKLYSEIEGPLIYTLGDIERNGVLIDSEKLNEQSKELEAKILKLEKKVQKSAGEDFNLGSPKQLQEILYEKLGLPVIKKTPKGQPSTAESVLQELSLDFPIVQEILSYRAISKLKSTYTDKLPKMVNSNTGRVHTSYHQAVTATGRLSSSDPNLQNIPIRSEEGRRIREAFIAPEGYKILAADYSQIELRIMAHLSKDKGLMDAFAKGQDIHQATAAEIFDANIEDVTANQRRSAKAINFGLIYGMSAFGLSKQLQITRAEAQNYIEQYFDRYPQVKNYMDETKLSAKKMGYVETVFGRRLYLADIESSNYQRRQYAERSAINAPMQGSAADLIKIAMIHLHQKIKEESFDAKIIMQVHDELVIEVKENQSDELSELTTSIMSEISKLDVDLKVDADIGNNWDEAH

SEQ ID NO: 135570 - protein, 335 aa, Unknown
  Bacterial polypetide isolated from the Sargasso Sea
GNHSKELGDKIADLSAQAFKIAGEEFNLDSPKQLLEILYEKQGLPVLRKTPKGQPSTNEETLQRLSEEYELPKIILQYRTLAKLKSTYTDSLINIENPKTQRIHTSYQQAVTSTGRLSSTEPNLQNIPIKTAEGRRIREAFVPEKGNTLISADYSQIELRIMAHLSEDKNLTNAFNNNIDVHSSTAAEVFGVAIEEVNKDQRRSAKAINFGLMYGMSAFGLTRQLGITRAEAQAYLDTYFARYTGVRDYMDNIKAKAKEDMFVETIMGRRLYLNEINAANGLRRQAAERAAINAPLQGSAADIIKKAMLDIDKLILNEMPDVKMIMQVHDELVFE

SEQ ID NO: 135571 - protein, 351 aa, Unknown
  Bacterial polypetide isolated from the Sargasso Sea
MRKIIHVDMDCFFAAVEMRDNPALRDIPIAIGGSRERRGVISTANYPARKFGVRSAMPTGMALKLCPHLTLLPGRYEAYKEASRQIQAIFSRYTSLIEPLSLDEAYLDVTDSTHCHGSATLMAQEIRQTIFAELQLTASAGIAPVKFLAKIASDLNKPNGQYVITPADVPEFLRTLPLGKIPGVGKVSAAKLEAMGLRTCEDVQKYDLAMLLKRFGKFGRVLWERSQGIDERDVNNDRLRKSVGVERTLAEDIHEWAECEEIIERLYPELERRLAKVKPDLLIARQGVKLKFNDFQQTTQEHVWPRLSKDDLIATARKTWNERRGGRGVRLVGLHVTLLDPQLERQLLLGL

SEQ ID NO: 135572 - protein, 540 aa, Unknown
  Bacterial polypetide isolated from the Sargasso Sea
YDDCPKQLEMDYVIKSLGSAIEDNQEKAIGQNLKFDIPILARHGIKITKFLADTMLMSYVLNSTATRHGMDRLADFYLNYKTTKYTDVTGTASKQISFAEVKLDVATDYAAEDADITLRLYKVLNKLLKEKPTQQKLLNDLEYPLVHVLSRVEQNGAKIDKKKLSNHSKELSEKISDLTSQAFKISGEEFNLDSPKQLLEILYEKQGLPVLKKTPKGQPSTNEDTLQRLSEDYELPKIILQYRTLAKLKSTYTDSLINIENPKTKRIHTSYQQAVTSTGRLSSTEPNLQNIPIKTAEGRRIREAFVPENGNVLISADYSQIELRIMAHLSEDKNLTHSFNNNIDVHSSTAAEVFGVPIDDVSTDQRRSAKAINFGLMYGMSAFGLTRQLGIPRGEAQEYLDTYFARYTGVRDYMDNIKAQAKEDKYVETIMGRRLYLNEINAANGLRRQAAERAAINAPLQGSAADIIKKAMLDIDELLLNELQDVQMIMQVHDELVFECPKNKADAVMKKMKDTMEDTVELKIPLIADAAIGLNWNEAH

SEQ ID NO: 135573 - protein, 360 aa, Unknown
  Bacterial polypetide isolated from the Sargasso Sea
MSIRNKKSFSKNKRKIIHVDMDSFYASVEIRDKPHLRELPVAVAGSSESRGVITTCNYVARKFGIKSAMASVVAKKLCPNLVFLPVNMEKYRSVSKEIHDIFKCYTRIIEPISLDEAYLDVSDSDYCNNDPVMMALQIRRKIFDDLKITASAGIATNKFLAKLASEWNKPNGQLVIYDDDIQDFICKLPVRKINGVGEKTEKKLLDIGVKYFSDLQKIKMNELIKVFGKYGENLYELCRGRDNRQVENNRISKSLSVEDTYFDDINSVKESVTELKKIYEKLLFRLNNKKKDTFSIKSCFVKIKFNDFKTISNQKSSMTYEYDIFENLLIKMLSENKKPIRLIGAGVQFSNNSQLRLNIF

SEQ ID NO: 135574 - protein, 749 aa, Unknown
  Bacterial polypetide isolated from the Sargasso Sea
MKNRIFVIDGSSYLYRAYHAMPPLSTSSGQPTGAVKGVTNMLMNLKKESDESPIVVVFDAKGKTFRNEIYSEYKANRPPMPDELRDQLKPVKDICKAIGFPLIEIEGVEADDVIATITRMAKDAKFKCVVSSLDKDLMQLVEDPDTTLMNTMKNEIFDEAKVFEKFGVQPNQIRDMLALVGDTSDNIPGVPKVGQKTAAKWLIEYGDLEAIKENADAIKGVVGENLRNSLNDLDRNVELVSLKEDVDLGFSFDDLLKFNPNDEELDKLFAELEFSAANKNKQEAPKKDAKYETVLSEIDLKKWISKINKSTAFAIDTETDSVHIVSANLIGISLSVAESEGCYIPIGHSYDDCPKQLSMDYVIKTLGPAIEENQEKAIGQNLKFDIPILARHGIVITKFLADTMLMSYVLNSTATRHGMDRLADFYLNYTTTKYTDVTGTASKQIPFSEVKLDIATDYAAEDADITLRLFNVLQPMLKEKPIQEKLLHDLEYPLVHVLSRVEQNGAKIDKEKLASHSKELSEKISKLSSEAFKISGEEFNLDSPKQLLEILYEKLGLPVLKKTPKGQPSTNEDTLQRLAEEYEMPKIILQYRTLAKLKSTYTDSLINIENPKTERIHTSYQQAVTSTGRLSSTEPNLQNIPIKTAEGRRIREAFVPEKGNVLISADYSQIELRIMAHLSEDNNLTHAFKNDIDVHSSTAAEVFGVSIEDVTQDQRRSAKAINFGLMYGMSAFGLTRQLGIPRGEAQEYL

SEQ ID NO: 135575 - protein, 894 aa, Unknown
  Bacterial polypetide isolated from the Sargasso Sea
MSKEKLLLVDGSSYLYRAFHALPDLRSSDGRPTGAIYGVLNMLQKLIKSERPDYLSVVFDTPAKTFRHDIFPDYKANRQKTPEDLIAQIEPLHQLIINLGLPLIAVDGVEADDVIGTLALEADKKGIKTLIATGDKDMAQLVTENIHLIDTMKDLRMGPAEVKEKFGIQPDRFIDYLTLAGDTSDNIPGVEKVGPKTAIKWINEYGSLDGVIQNADQIKGKIGENLNAALDRLDLFKTLVTIKCDVQMDSNISDLTIGESNEGLLYEQLSDLGLHGLIKQFEIEPSEKESAADKNYQTIRTEKELDELMGLINQADYVSFDTETTSLDYMLAELVGISIALKPNEAFYIPINHNYEGAEKQLEQDFVLEALKPFLESDEIPKIGHNLKYDRHILQNAGIDLKGTLLDTMLFSYVNNSTITRHNLDAVSKRYLNINPTSYEDVAGKGAKQIPFSEVSIDVASDYASEDADISLKLYEHIEPMVQKEAKLAKLYSEIEGPLIYTLGDIERNGVLIDSEKLSQQSKELEAKILKLESKVQKNAGQDFNLGSPKQLQEILYEKLGLPVIKKTPKGQPSTSEAVLQELSIDFPIVHDILSYRAISKLKSTYTDKLPKMINSNTGRVHTSYHQAVTATGRLSSSDPNLQNIPIRSEEGRRIREAFIAPEGYKILAADYSQIELRIMAHLSKDQGLMDAFAKGQDIHQATAAEIFSINIDDVTPNQRRSAKAINFGLIYGMSAFGLSKQLQITRAEAQNYIEQYFERYPGVKNYMDETKSSAKQNGYVETVFGRRLYLADIESSNYQRRQYAERSAINAPMQGTAADLIKMAMTDLHSKIRNESLDAKIIMQVHDELVIEVNENQLDELSDLTVNIMADIFKLDVDLKVDADIGNNWDEAH

SEQ ID NO: 135576 - protein, 417 aa, Unknown
  Bacterial polypetide isolated from the Sargasso Sea
MPSLCRKCFNTFNEEGRCPRCSSPLVVSHSELFDLNIAHMDCDAFYASVEKRDNPDLADKPVIIGGGRRGVVSTACYIARIRGVKSAMPMFKALEKCPDAVVIRPRMKIYAEISQQIRVMMNDITPLVEPLSLDEAFMDMSGTHKLHGAPPAVMLAKLMDRISDNLGLTGSIGLSHNKFLAKIASDLNKPNGYSIIGEAETSSFLKDKSIRLIWGVGASTQKSLEKSGIRTFLDLLRWDRKDLVSKFGSMGDRLWFLARGQDARVVSNSDRIKSISNETTLNENTSNIRVLEGHLWRLCEKVSSRAKSKGLAGTIMILKLKSSNHKIITRRVTLRDPTYMADVLFRSTYPLMETAIENGPFRLVGAGLSGLCLASQAQREPELLDDGALNRIKVERVTDEIREKFGDEAMIKGRSLL

SEQ ID NO: 135577 - protein, 932 aa, Unknown
  Bacterial polypetide isolated from the Sargasso Sea
MKNQKQHICLVDGSTYIFRAYHALPPLTRKSDGFPVGAISGFCNMLDKLVREEKEKKGITHLLVVFDASGKTFRNDIYPEYKANRSEAPEDLIPQFPVIRKATSAFNIPFVELIGYEADDLIASYAEEAKKQNMKVTIVSSDKDLMQLVSDNVSMLDTMKGKVFKKEDVLEKFGVYPEKVIDVQSLAGDSVDNIPGIPGIGIKTAALLINEYDNLEGLFKNSEKIKQKKRRENVIEFENQAYISKQLVTLKNDVPLPLPIDETSLKDIDAEKLISFLKEMEFKTFTEKKSRELNVDSEKIKASDQIEKFERKITDSSNNIKEINSEFDIEKYQIVQSLDELKQWNLKAENMGYIAFDTETNSLDAIKADMVGFSLCTSENDACYVPLLHDEEENKQIGFDEAIKALKPILEDNGIKKILHNMKFDALVLDKYNIKIQNYDDTMLMSYSLGSGGIRHKLDTLIEYYFNHKAISFKELVGSGKDKKNFQELSIIEAGKYAAEDADMTLRLWKKLKSSLVQDKQVKIYEIIEKPLAHVIMNMENHGISIDKKKLNELSEIFEKKLNSLEKDCYKLIDEEINLGSPKQVGEILFDKLELSGGKKTSTGSWSTNAEVLENLANDGHDFPKLLLEWRALSKLKTTYSDALPTYLNQKTNRIHSSFSMATTSTGRLSSSDPNLQNIPIKSEDGRMIRKAFIPEKGNVLISSDYSQIELRLIAHIANERNLMNAFLEGIDIHSATASEVFNISLNDMTPEIRRNAKAINFGIIYGISAFGLAKQLNISRTESSEFIKAYFNKYPSIKDYMDDTKKFASENGFVKTLLGRKCLVEDINSKNAATRSFMERAAINAPIQGSAADIIKRAMIILSNNKKLKELDTKMLLQVHDELIFETKEENCEESMEIIRKEMENAHLPILELNIPLIADTNYGINWDEAH

SEQ ID NO: 135578 - protein, 870 aa, Unknown
  Bacterial polypetide isolated from the Sargasso Sea
IFDAKGKTFRDDIYKEYKANRPPMPDELRSQIEPLHAIIKAMGLPVIVESGVEADDVIGTLAKHATEKGIDTLISTGDKDMAQLVNEHVTLINTMTNQLMDVEGVNTKFGIPPELVIDFLALKGDKVDNIPGVPGVGDKSAQALLNGIGGIDDIYKNLDKIADLSFRGSKSMAAKMQEYEEQARLSYTLATISIDLDLDYDVEALMPCQADNEQLRDLFAEYEFKRWHAEVSALIAGGDTSGANANTNEEKSDSAEESEQSESVEIDKSKYETVLEEERFNAWVAKLEKAELIAFDTETTSLNYMDAELVGVSFCIEEGEAAYVPVAHDYPDAPAQLSREFVLDALKPILESDTVIKVGQHIKYDKNVLANYDITLNGIGFDTMLESYVLNSTAQRHDMDSLALAYLGHKTIHFEEIAGKGAKQLTFNQISLEEAGPYAAEDADITLRLHNAIWTKLKEIPELKNLLIDVEVPLACVLSRMEQEGVLIDSQRLRQQSQDLATRIAELESEVHEEAGEPFNLGSTKQLQHVLFEKMSLPIIKKTPKGAPSTSEDVLQELALEYPLPKKIMEYRGLTKLKNTYTDKLPKMINHRTGRVHTSYHQAVTATGRLSSTDPNLQNIPIRNEEGRRVRQAFVPREGNKFVAADYSQIELRIMAHLSGDKGLLDAFAHGKDIHKATASEVFGVPLDEVTTEQRRSAKAINFGLIYGMSAFGLSKQLNIPRNEAQKYMDLYFERYPGVLEYMDSTRESAKEKGYVETVFGRRLYLPDIKASNGARRKGAERAAINAPMQGTAADIIKMAMIKVDDWIRKNASDDVTMMMQVHDELVFEIKEDKVETYVSTITALMESAATLNVPLVVEAGVGENWDEAH

SEQ ID NO: 135579 - protein, 762 aa, Unknown
  Bacterial polypetide isolated from the Sargasso Sea
MSLKSENSKKPILLLVDGHSLAFRSFYAFSKGIDGGLTTKDGFPTSVTYGFLKSLLDNCKNISPEGVCITFDTEKPTFRHELDPNYKANRDVAPDVFFQDIEQLEIILEESLNLPIFKSPGYEADDLLGTIANDASSKGWCVNILSGDRDLFQLVDDQKDIYVLYMGGGPYAKSGNPTLMNENGVKEKLGVAPERVVDLKALTGDSSDNIPGIKGVGPKTAINLLKENDTLDGIYQALDKIQQNNDKKYKGFIKGSVIEKLRNDKHNAFLSRDLAKINTEVPLILSNGYELKNINQELLSESLKKLELSTLLRQIDIFNSTFSKGGFDKNNVAKEEEKAPKVAGNNELENSENKIPKINVTVVNDFELLDKLIQRLDKTNQIVSLDTETNSLNPIDAELVGIGLCLGEENDDLFYIPLGHQTKKETSNQLSIEDVFSKLRNWIEDPKKEKALQNSKFDRQIFFNHGLDLKGVTFDTLLADYLLNNQEKHGLSEISFRLFGFKPPSFKETVGKNKDFSFVDIDEASIYCGYDVFLTFKIVKIFKESFSKEKDELIKLFEEIELPLEPVLSQMEMNGITIDIPYLDKLSKELKSTLEDIESKVYELAEESFNLSSPKQLGEILFEKLNLDKKKSRKTKTGWSTDAVVLERLVDEHEIIQHLIKHRTLSKLLSTYIDALPNLINEKTGRVHTNFNQAATATGRLSSSNPNLQNIPVRTEFSRRIRKAFLPEKNWKLLSADYSQIELRILAHLADEEILINAFHKK

SEQ ID NO: 135580 - protein, 395 aa, Unknown
  Bacterial polypetide isolated from the Sargasso Sea
RVLSDMELLGIKVDRDTLVRMSNSFSQKMAHLEEEIYSLAGETFNVGSPKQLGEILFDKLGYAGGAKGKTGAYSTGADVLADLATEYDLPRKVIDWRQLSKLKSTYTDALQDHINPSSGRVHTSYVIAGANTGRLASADPNLQNIPIRSEEGRRIREAFIAETGKVLVSLDYSQIELRILAHVASIDSLKKAFRDGLDIHAMTASEMFNVPLDEMTSEIRRQAKAINFGVIYGISGFGLARNLRIPRSDAQAFIDRYFERFPGIKEYMDETIRFAKEKNYVETLFGRIIHTLQINAKGPNAGFAKRAAINAPIQGTAADIIRRAMIRMPTAISHLNAKMLLQVHDELLFEVDQGDVEALITVAKSIMEEASYPAVKLDIPILVDAGHGENWAQAH

SEQ ID NO: 135581 - protein, 711 aa, Unknown
  Bacterial polypetide isolated from the Sargasso Sea
AGDSSDNVPGAPGIGIKTAAQLINEFQSIENLLENYEEIKQQKRRETIRDSRKNILISKELVTLKRDVNNIPALDDLVKKEISVETLVPFLDELELKKLSERIRKKNPNIKITSKKLTSTKKLKNLNEQIEKPDDNFKKSIKISNSKSSYNLINDEKKLKKLVSEIYDVGEFVYDVETDSLNIIDANLVGVSFCFNQKIAYYIPVQHVDHDENKIQSQISLKSFLSIIAPLMKDESIIKIGHNIKYDNSILNKYGVEVRGFHDTMLMSYVLDAGVNRHNMDELANIHLNRETIKFKDIVGSGKSQITFDKVKIDDALNYAAEDAEITYKLYLFLKKRVQQEKGNYIYTNIERELINPIQSMETNGIKVDKKYLNDLSFKFSQRIEKLEKKIYKETGSKFNIGSPKQLSEILFDKLKLKPPKKTKTGEKSTGIEVLEDLAYEGNKVADTIIQWRQISKLKNTYTDALQNHIVEKTGRIHTSFAMASTNTGRLASSDPNLQNIPIRTEEGKSIRKAFIPDQGYVMFAADYSQIELRVLAHMADVAQLKEAFINNEDIHQITASEIFNVKLKEVDNELRRKAKAVNFGIIYGISAYGLAKQLSISNYEAGDFIKKYFQKFSGIKEFMDHTKEFCRNNGYVETICGRKCFFPRIKDKNFALRSFQERAAINAPIQGTAADIIKLAMIKINGKIKNSNDCKMLLQVHDELIFEIKK

SEQ ID NO: 135582 - protein, 323 aa, Unknown
  Bacterial polypetide isolated from the Sargasso Sea
PTFTNEDTLQRLAEEYDLPKIIIEYRGLAKLKSTYTDSLIDIQHPVTKRIHTSYQQAVTSTGRLSSTEPNLQNIPIKTAEGRKIREAFIAEKGNVLISADYSQIELRIMAHLSGDKNLTHAFNNNIDVHSATASEIFNISLEEVTPEHRRSAKAINFGLIYGMSAFGLTRQLGIPRHEAQAYLDTYFERYTGVRKYMDTTKELAKKNLFVETILGRKLHVAAINDSNGLRRQAAERAAINAPLQGSAADIIKKAMIDVDQWIGKNNSDIKMIMQVHDELIFEVKKGFADEALKNIISLMEGSVKLDIPLIVDANAGANWNEAH

SEQ ID NO: 135583 - protein, 456 aa, Unknown
  Bacterial polypetide isolated from the Sargasso Sea
LADYYLNYTTTKYTDVTGTASKQISFAEVQIDVATDYAAEDADVTLRLFNTLSALLKEKPIQEKLLKEIEYPLVHVLSRVEQNGAKIDKIKLGNHSKELGDKIADLSAQAFKIAGEEFNLDSPKQLLEILYEKQGLPVLRKTPKGQPSTNEETLQRLSEEYELPKIILQYRTLAKLKSTYTDSLINIENPKTQRIHTSYQQAVTSTGRLSSTEPNLQNIPIKTAEGRRIREAFVPEKGNTLISADYSQIELRIMAHLSEDKNLTNAFNNNIDVHSSTAAEVFSVAIEEVNKDQRRSAKAINFGLMYGMSAFGLTRQLGITRAEAQAYLDTYFARYTGVRDYMDNIKAKAKEDMFVETIMGRRLYLNEINAANGLRRQAAERAAINAPLQGSAADIIKKAMLDIDKLILNEMPDVKMIMQVHDELVFECPKENADLVMEKMKETMEQTVELKIPLIA

SEQ ID NO: 135584 - protein, 486 aa, Unknown
  Bacterial polypetide isolated from the Sargasso Sea
MMMSYVLDASATRHNLDALSSFYLNYKTSTFEEVAGKGTKQVTFDKVPLDKATHYAAEDADITLRLYEALEPKLNSIKPLKKLMEEIEIPLIEVLSDMEQNGMLLNSKILSSQSKDLESRIDKLEKLAYEIAGEEFNLGSTKQLREIFFEKLNYRIIKKTPGGQPSTDEKVLQELSEEYELPKVLLEHRTLSKLKSTYTDKLPGQISSNTGKVHTSFHQAVTTTGRLSSSDPNLQNIPIRTEDGRRIRQAFEATEGNKIISADYSQIELRVMAHLSKDKGLLEAFNQGEDIHAKTASEVFDVELNKVTTDLRRNAKAINFGLIYGISAFGLGRQLGINRNLAAEYMAMYFEKYPGVKTYMETTKDTARDTGYIETLFGRRLYLRDINASNAIRRQASERVAINAPVQGSAADIMKIAMINAYRALKKSKSKAQLTLQVHDELIVDTPKEETDKVISILTKSMQEAANLDVPLEVDIGIGSNWDQAH

SEQ ID NO: 135585 - protein, 366 aa, Unknown
  Bacterial polypetide isolated from the Sargasso Sea
MKFSIDRDALLKPLQLVCGAVERRHNLPILANLLVEVSGHSLKMTGTDLEVELVGQAVVHGDIEEGRTTVPAKKLLDIVKSLPEQSELKVEQQDNKWLLRSGRSRFSLATLPAEEYPNVEAFQAEIEFSLKQGVLKSLIDATQFSMANQDVRYYLNGLLLETEGNVLRAIATDGHRLALSHRTIDAQLPEKQVIVPRKGVMEMARLLEADDLDIAIAIGDNAIRATTSTTVFTSKLVDGRFPDYRRVLPKGGDKIVIASRNHFKQALNRASILSNEKFRGVRIQLEAGLLKITANNPEQEEAEEIIDVDYNNQPLEIGFNVSYLLDVLNNLKSDDVRITLIDGNSSALLENHLEEDSMYVVMPMRL

SEQ ID NO: 135586 - protein, 890 aa, Unknown
  Bacterial polypetide isolated from the Sargasso Sea
MKDRIFVIDGSSYLYRAFHAMPPLSTSSGKPTGAIKGVTNMLINLKKESEGSPIIVVFDAKGNTFRNDIYKEYKANRPPMPDELREQLEPVKSICRAIGFPLIEISGVEADDVIATIASMAKDAKYKCVISSLDKDLMQLVEDPNITMMNTMKHIIFNEEKVIEKFGVKPCQVRDMLALTGDSSDNIPGVPKVGQKTAAKWLNEYGDLEGIKKNAESITGVVGENLRNSLNDLDRNVELVSLKKDVDLKLDFKDLLKLTPNDEELDKIFAELEFKAIENNKEKVTPKKDSKYETILIKKDLTKLINKINKSKVFALDTETDSLNTVSANLIGISISVSENEGCYIPIGHSYDGCPDQLSMDYVIKTLGPVIEQNQKKIVGQNLKYDIPILSRHGINITVFCADTMLMSYVLNSTATRHGMDRLADYYLNYTTTKYTDVTGTASKQISFSEVKLDVATDYASEDADITLRLYNVLISMLKDKPTQEKLLHDIEYPLVHVLSRVEQNGAKIDKNKLSKHSKELGKKIDELSSQAFNIAGEEFNLDSPKQLLEILYEKQGLPVLKKTPKGQPSTNEDTLQRLSEEYELPKIILQYRTLAKLKSTYTDSLINIENPKTERIHTSYQQAVTSTGRLSSTEPNLQNIPIKTAEGRRIREAFIPEKGNVLISADYSQIELRIMAHLSKDENLTYAFNNDIDVHSSTAAEVFGVSIDDVSQDQRRSAKAINFGLMYGMSAFGLTRQLGIPRGEAQEYLDTYFARYTGVRDYMDNIKAQAKEDKYVETIMGRRLYLNEINAANARLRQGAERAAINAPLQGSAADIIKKAMLDIDDLIINEMSDVKMIMQVHDELVFECPKNNADMVMEKMKDIMEKTVELNIPLIAEAAIGSNWNEAH

SEQ ID NO: 135587 - protein, 922 aa, Unknown
  Bacterial polypetide isolated from the Sargasso Sea
MPTIANNPLVLVDGSSYLYRAYYAPPHLTNSKGEATGAVYGVVNMLRSLLSRYQPSHIAVVFDAKGKTFRNDLYEEYKAHRPPMPDDLRSQIEPLHRIIRALGLPLISILGVEADDVIGTIARQASRENRAVLISTGDKDMAQLVDDNITLINTMTDTIMGPEEVAAKYGVGPDRIIDFLALMGDKADNIPGLPGVGEKTALAMLTGAGSVANLLAEPEKVTELGFRGAKTMAAKIIDNADMLKLSYELATIKTDVELEQDWHELTAKPADRDELIKCYGEMEFKRWLAEVLDNKAPATVAAKAETTETQEESAPSVTIETQYDTILTEAQLDEWIAKLKQAPLMAVDTETTSLDYMVAELVGMSFAVEAGKAAYLPLAHDYVGAPQQLDKQTALEKLRPLLEDAKIKKVGQNLKYDISVLANAGIKLQGVVFDTMLESYVFNSIASRHDMDGLALKYLGHKNIAFEDIAGKGAKQLTFNQISLETAAPYAAEDADITLRLHQHLWPRLEKEAELASVFTDIELPLIQILSDIERQGVFIDSMLLGQQSDELARKIDELETKAYDIAGEKFNLSSPKQLQVLFFEKLGYPVIKKTPKGAPSTAEEVLVELALDFPLPKVILEHRSLTKLKSTYTDKLPLMVNAKTGRVHTSYHQANAATGRLSSSEPNLQNIPIRTEEGRRIRQAFIAPQGRKILAADYSQIELRIMAHLSQDAGLLKAFAEGKDIHRATAAEVFGTDFDSVTSEQRRRAKAVNFGLIYGMSAFGLARQLDIPRNEAQTYIDTYFARYPGVLRYMEETRASAAELGYVSTLFGRRLYLPEIRDRNAMRRQAAERAAINAPMQGTAADIIKKAMISIADWIKTDTQGEIAMIMQVHDELVFEVDADKAEKLKLKVCELMAKAANLDVELLAEAGIGDNWDQAH

SEQ ID NO: 135588 - protein, 305 aa, Unknown
  Bacterial polypetide isolated from the Sargasso Sea
WKWRQISKLINTYIESLINEVNKKTLRIHTSYSMASTNTGRLSSTDPNLQNIPIRTDEGKKIRNAFISEKRFKLVSLDYSQIELRLLAHIGKVEDLKKALEQNIDVHKKTASQIFNVKLEDVDEDLRRKAKTINYGIIYGISAFGLAKQLKIQRSEADLILKEYFKNYKGILNYIDEITNFCKKNGFVKTLFGRKCYIDGINNKNPNLRNFAIRAAVNAPIQGSAADIIKKAMININKFLEEKKTKSKMILQVHDELLFEMYESEISYLSMEIKKIMENAALPEVKLDIPLIADIGQGVSWAEAH

SEQ ID NO: 135589 - protein, 510 aa, Unknown
  Bacterial polypetide isolated from the Sargasso Sea
LDLKGVTFDTLLADYLLNNQEKHGLSEISFRLFGFKPPSFKETVGKNKDFSFVDIDEASIYCGYDVFLTFKIVKIFKERFSKEKNELIKLFEEIELPLEPVLSQMEMNGIIIDVSYLEELSKELKSTLENIEVKVYELAEEKFNLSSPKQLGEILFEKLSLDKRKSRKTKTGWSTDAVVLEKLVDEHEIIQHLIKHRTLSKLLSTYIDSLPNLINEKTGRVHTNFNQAATATGRLSSSNPNLQNIPVRTEFSRRIRKAFLPEKGWKLLSADYSQIELRILAHLANEEILINAFQQNDDIHSLTARLIFEKEEISSDERRVGKTINFGIIYGMGPRKLARSTGVSTEEAKDFLIKYKKRYSKVFTFLELQQRLSLSKGYVETIFGRKREFKFDKNGLGRLLGKDPYEIDLQSARKAGMEALSLLAAANAPIQGSSADIIKVAMVQLNRKFIEMNAPAKMLLQVHDELLFEAEPNSLEETTKLIKETMEGCVKLSVPLLVDIGIGDNWMETK

SEQ ID NO: 135590 - protein, 877 aa, Unknown
  Bacterial polypetide isolated from the Sargasso Sea
MSDKKSLFLLDAYALIYRGYYAFIKNPRINSKGLDTSAILGFTNSLFEIIRSQKPDYIGVAFDKGGSVTRSEMFVEYKSNRDKTPEPIIMAIPYIKNILEGMNIPILEQEGFEADDIIGTVAKKAEKKNFKVFMVTPDKDFSQLVSENIFLCKPARMGNGMEIWGTKEVNEKFEVNSPEQVVDFLGMMGDSVDNIPGLPGVGEKTAKKFLKEYGSLENLLSNSHLIPGKLGEKITNNKELGIISKELAKIILDVPIDYNLKDFKLTEPDKGKVIEVFNELEFRRIKETFFKIYGTEVQTDNSVNQPISIQTDLFNQSQYTGVTDKKTNSNSSRSSYQFIDNIEELKFFVEKLMNQEVVSFDTETETLNSLETKLIGISFSWKKYTGYFISFNNDKKKNNEFIELLKPFFESNKIEKVGHNLKFDIKVLFKYGISVCAPIYDTMIAHYIINPDMRHNLDSLAESYLNYSPISEEDLIGKKGKNQKSIRDISIEEITKYSVQDPDLCLQLKEIFDKEIKDNNLSEIFSEIELPIIEVLSFMEKEGIKIDEKYLKSLEDDFQNELNILENKIFKESGEDFNLNSPKQLGEILFNKLKLVSNPKKTKTGQFSTSEEVLSALSKDHKIISNILEWRSLDKLLNTYVKALPNEINSSTGRIHTKFNQAVTSTGRLSSNNPNLQNIPIRTENGQKIRKAFTPRDKEFILMCADYSQIELRVIASLSGDINMIDAFNKDEDIHTSTASRIFNVHKDKVSREQRSNAKTVNFGIIYGVSAFGLSQQTDLNRKESKILIDNYYENYPTLKEYMSKQIDFARENGYVETLMGRRRYLTNINSQNGMIRSADERNAVNAPIQGSAADIIKIAMKNIFNILSEKQFKSQM

SEQ ID NO: 135591 - protein, 741 aa, Unknown
  Bacterial polypetide isolated from the Sargasso Sea
GIGIKTAAQLINEFQSIENLLENYEEIKQQKRRETIRDSRKNILISKELVTLKRDVNNIPALDDLVKKEISVKTLVPFLDELELKKLSERIRKKNPNIKITSKNLKSTKKLKNLNEQIEKPDDNFKKSIKISNSKSSYNLISDEKKLKKLVSEIYDVGEFVYDVETDSLNIIEANLVGVSFCFNQKVAYYIPVQHVDHDEKKIQSQISLKSFLSIIAPLMKDESIIKIGHNIKYDNSILNKYGVEVRGFHDTMLMSYVLDAGVNRHNMDELANIHLNRETIKFKDIVGSGKSQITFDKVKIDDALNYAAEDAEITYKLYLFLKKRVQQEKGNYIYTNIERELINPIQSMETNGIKVDKQYLNDLSFQFSQRIEKLEKKIYKETGSKFNIGSPKQLSEILFDKLKLKPPKKTKTGEKSTGIEVLEDLAYEGNKVADTIIQWRQISKLKNTYTDALQNHIVEKTGRIHTSFAMASTNTGRLASSDPNLQNIPIRTEEGKSIRKAFIPDQGYVMFAADYSQIELRVLAHMADVAQLKEAFINNEDIHQITASEIFNVKLKEVDNELRRKAKAVNFGIIYGISAYGLAKQLSISNYEAGDFIKQYFQKFSGIKEFMDYTKEFCRNNGYVETICGRKCFFPRIKDKNFALRSFQERAAINAPIQGTAADIIKLAMIKINGKIKNSNDCKMLLQVHDELIFEIKKSKLDHFKKIIIEEMENALMPKFDFSVPLVVDHNHALNWSDAH

SEQ ID NO: 135592 - protein, 364 aa, Unknown
  Bacterial polypetide isolated from the Sargasso Sea
MEEPFVRKIIHVDMDCYFAAVEMRDFPEYRGKPLAVGGSRERRGVISTCNYEARRFGVRSAMATAYALKLCPDLILVPGRMQVYKDVSQQIRAIFSRYTELIEPLSLDEAYLDVSDCKLFKGSATLIAEAIRHDILAETGLTASAGVAPVKFLAKVASDLNKPNGLYVISPDKVPEFIKTLSLRKIPGVGKVTAEKLSSLGLNTCGDIQTYPKQDLITRFGKFGAVLIERSHGIDERGLSVSRERKSVGIETTLAQDIYTLEQCQQVMPGLIHELSTRLSRSAKDRQIHKQVVKLKFSDFKQTTIEHRSDEVSIVMFYELLSQAMARQEGRGIRLLGISVGLAESKDTLQPIMARETKQLDLVF

SEQ ID NO: 135593 - protein, 917 aa, Unknown
  Bacterial polypetide isolated from the Sargasso Sea
MPEERNLEGKTLLLVDGSSYLYRAYHAMPDLRGPGGEPTGALYGIINMLRRMRKEVSAEYSACVFDAKGKTFRDDLYADYKANRPSMPPDLALQVEPIHGAVRALGWPLLMVEGVEADDVIGTLAREAERHGMNVIVSTGDKDLAQLVTDHVTLVNTMTNETLDRDGVIAKFGVPPERIIDYLALIGDTVDNVPGVEKCGPKTAVKWLAQYDSLDGVIEHAGDIKGVVGDNLRRALDFLPLGRKLVTVDTACDLAPHLESIEASLKTDGEARDLLRDIFARYGFKTWLREVDSAPAEGGGADAPEGEPAPVVAADIVREYDTIQTWEQFDAWFAKIDAAELTAFDTETTALDPMLARLVGLSFSVEPGKAAYLPVAHRGPDMPEQLPLDEVLARLKPWLESADRKKVGQHLKYDAQVLANYDIALNGIEHDTLLESYVAESHRTHDMDSLALRHLGVKTIKYEDVAGKGAKQIGFDEVALTQAAEYAAEDADITLQLHHALYPQVAREPGLLYVYREIEMPVSLVLRKMERTGVLIDDARLQAQSTEIATRLIELEAQAYELAGGEFNLGSPKQIGQIFFEKLQLPVVKKTPSGAPSTDEEVLQKLAEDYPLPKLLLEHRGLSKLKSTYTDKLPRMVNPSTGRVHTNYAQAVAVTGRLASNDPNLQNIPVRTAEGRRIREAFIASPGHRIVSADYSQIELRIMAHISGDASLLRAFSQGEDIHRATAAEVFGVTPLEVNSDQRRIAKVINFGLIYGMSAFGLASNLGITRDAAKLYIDRYFARYPGVAQYMEDTRSVAKEKGYVETVFGRRLWLPEINGGNGPRRQAAERAAINAPMQGTAADLIKLSMIAVDDWLTRDKLASRMIMQVHDELVLEVPDGELSLVREKLPEMMCGVAKLKVPLVAEVGAGANWEEAH

SEQ ID NO: 135594 - protein, 404 aa, Unknown
  Bacterial polypetide isolated from the Sargasso Sea
SISVKENEGCYIPIGHSYKDCPEQLSLDRIQKKLGPAIEKNQKKAVGQNLKFDIPILSRHGINLSEFLADTMLMSYVLNSTATRHGMDRLAEYYLNYTTTKYSDVTGTASKQISFAEVQIDVATDYAAEDADITLRLFNTLSVLLKDKPIQEKLLKEIEYPLVHVLSRVEQNGAKIDKNKLGNHSKELGEKIADLSAQAFKIAGEEFNLDSPKQLLEILYKKQGLPVLRKTPKGQPSTNEETLQRLSEEYELPKIILQYRTLAKLKSTYTDSLINIENPKTQRIHTSYQQAITSTGRLSSTEPNLQNIPIKTAEGRRIREAFVPEKGNTLISADYSQIELRIMAHLSEDKNLTNAFNNNIDVHSSTAAEVFGVAIEEVNKDQRRSAKAINFGLMYGMSALDSQD

SEQ ID NO: 135595 - protein, 466 aa, Unknown
  Bacterial polypetide isolated from the Sargasso Sea
TIKCDVEMDSNISDLTIGESNEGLLYEQLSDLGLHGLIKQFEIEPSEKESAADKNYQTIRTEKELDELMGLINQADYVSFDTETTSLDYMLAELVGISIALKPNEAFYIPINHNYEGAEKQLEQDFVLEALKPFLESDEIPKIGHNLKYDRHILQNAGIDLKGTLLDTMLFSYVNNSTITRHNLDAVSKRYLNINPTSYEDVAGKGAKQIPFSEVSIDVASDYASEDADISLKLYEHIEPLVQKEAKLAKLYSEIEGPLIYTLGDIERNGVLIDSEKLSQQSKELEAKILKLESKVQKNAGEDFNLGSPKQLQEILYEKLGLPVIKKTPKGQPSTSEAVLQELSIDFPIVHDILSYRAISKLKSTYTDKLPKMINSNTGRVHTSYHQAVTATGRLSSSDPNLQNIPIRSEEGRRIREAFIAPEGYKILAADYSQIELRIMAHLSKDQGLMDAFAKGQDIHQATAAE

SEQ ID NO: 135596 - protein, 366 aa, Unknown
  Bacterial polypetide isolated from the Sargasso Sea
MRKIIHVDMDCFYAAVEMRDNPALRDIPIAIGGSADRRGVISTCNYPARKFGVRSAMATAYALKLCPNLTLVKGRMDVYAVESQKIRKIFADYTDLIEPLSLDEAYLDVTNSEFCGGSATLIAEEIRERIKNELGLTASAGVAPCKFVAKVASDENKPDGICVITPDKLDEFVREMPLKKIPGVGKVTMQKLQRMGLNTCDDVRQYPFERIQKELGKFGSVLWERAHGIDERELSVSRERKSIGVERTLSEDIHTFEQCIDFLPHLFEKLQERMENHKKRTGKPVRIRTQGVKLKFNDFQLTTVEHRCATLDEAYFRTLMQEAFERATGRGIRLVGVHIGLAADQSTQQLMLPFEPDLANKLPSTF

SEQ ID NO: 135597 - protein, 440 aa, Unknown
  Bacterial polypetide isolated from the Sargasso Sea
ALEQASPYAAEDADVTLRLHQALWPMLEQHSGLHKVFRDIEMPLVPILSAMERTGVKIDGNLLAQQSLDLAKRISEIEQQAYQMAGKEFNLSSPKQLQEILFEQMGLPVLKKTPTGTPSTAEEVLAELAHDYEFPKLITEHRGLSKLKSTYTDKLPLSVNPVTGRVHTSYHQAVAATGRLSSTEPNLQNIPIRSEEGRRIRQAFIAEPGKTILAIDYSQIELRIMAHLSRDPALLNAFAQGKDIHRATAAEVFGVALDQVSAEQRRRAKAVNFGLIYGMSAFGLARQLGISRGEAQQYVDLYFERFPGVLGYMERTRTQAHEQGYVETLFGRRLYLPEINAKNMARKKGAERAAINAPMQGTAADIIKMAMIKVAAWQDKQPEGVVAMIMQVHDELVFEVKTEELERVSRELVEIMQTAASLDVPLLAEAGSGPNWDQAH

SEQ ID NO: 135598 - protein, 337 aa, Unknown
  Bacterial polypetide isolated from the Sargasso Sea
MKFTVEREHLLKPLQQVSGPLGGRPTLPILGNLLLQVADGTLSLTGTDLEMEMVARVALIQPHEPGATTVPARKFFDICRGLPEGAEIAVQLEGDRMLVRSGRSRFSLSTLPAADFPNLDDWQSEVEFTLPQATMKRLIEATQFSMAHQDVRYYLNGMLFETEGEELRTVATDGHRLAVCSMPVGQPLPSHSVIVPRKGVIELMRMLDGGDNPLRVQIGSNNIRAHVGDFIFTSKLVDGRFPDYRRVLPKNPDKHLEAGCDILKQAFARAAILSNEKFRGVRLYVSENQLKITANNPEQEEAEEILDVSYPGTELEIGFNVSYVLDVLNALKCENVR

SEQ ID NO: 135599 - protein, 335 aa, Unknown
  Bacterial polypetide isolated from the Sargasso Sea
MEAEGIKIDTSYLKKLDKEFENDLEKLKKEIFNKCGEEFNLNSPKQLGEILFDKLKLVSKPKKTKTGQYSTSEEVLSSLANDHRIIENILEWRSLDKLQNTYVKSLPNEVSNLTNRVHSSFNQTVTTTGRLSSNNPNLQNIPIRTDNGQKIRKAFIPRNDDYIIMAADYSQIELRVIASISNEENMIDAFVNNQDIHTMTASKIYNVDPENVSREQRGNAKTVNFGIIYGVSAFGLSQQTDLNRSESKQMIDNYFLNYPGLKKYMSDQIDFARNNGYVETIMGRRRYLQNINSQNNMLRSGAERNAINAPIQGSAADIIKIAMININSEFKKPVL

SEQ ID NO: 135600 - protein, 357 aa, Unknown
  Bacterial polypetide isolated from the Sargasso Sea
MNINNLPNRKIIHVDMDCFYASVEIRDHPEYRNKPVAVAGSSENRGVVTTCNYIARKYGVRSAMPSITAKKLCPKIVFLPVNMQKYRTTSEEIHKIYKCYTKIIEPVSLDEAYLDVTESKYCDGNPALMAQQIRNKIYEDLKITASAGIASNKFLAKIASDWNKPNGQFLIADDEIQDFVLKIPVRHIHGVGKKTEELLKQRKINTCADLQRISKYDLINLLGKYGETLFYLCRGIDDRIVEPNRIRKSLSVEDTYRFDLKTHESCIKELEILYKELIKRLNGNSYNNKIIKSCFIKIKYNDFKLTNSQAPCQYLQFKIFLDLLLKNLVNNKKSIRLLGLGVNFDNSVNDQLNLDIT

SEQ ID NO: 135601 - protein, 486 aa, Unknown
  Bacterial polypetide isolated from the Sargasso Sea
MMMSYVLDASATRHNLDALSSYYLNYKTSTFEDVAGKGVKQITFDKVPIEAATNYAAEDADITLRLYEELNPRLEGETSLNKLNDEIEIPLIEVLSEMEQNGAILNSKILNSQSKDLEGRIKKLEEKAYQIAGEEFNLGSTKQLREIFFEKLKYRIIKKTPGGQPSTDEKVLAELAEEYELPKVLLEHRTLSKLKSTYTDKLPNQVSLSTGKVHTSFHQAVTTTGRLSSSDPNLQNIPIRTEDGRRIRQAFEPSKGNKFISADYSQIELRVMAHMSKDEGLLEAFREGQDVHSKTASEVFDVGIKDVTSDLRRNAKAINFGLIYGISAFGLGKQLGISRNLAAEYMAMYFEKYPDVKKYMESTKEFASQNGYVETLFGRRLYLRDINATNAMRRQASERAAINAPVQGTAADIMKIAMINMHKAIKTQKSKAKLILQVHDELILDTPKDEIDKIVSLVTDSMMGAANLDVPLEIDIGIGDNWDQAH

SEQ ID NO: 135602 - protein, 460 aa, Unknown
  Bacterial polypetide isolated from the Sargasso Sea
IPSEIENTQTKIENKPKYKLINTKKDFEKIIQEIELKGICAIDTETNSLNIESALLVGISLCYEEQTSYYIPINHTSIDGSKKIENQLEEKYVINQIHKISNNDAILKIGQNIKYDIRILNKYGVYFKSIADTMLISYSIDNGIYKHNLDDLSFNHLNHNTIKYKDVVGTGKNEITFDKVSIESAVNYAAEDSLLTYKLFLNLYPRLIKERANFVYQNIDLPLVEVLSKIEQNGIEVNKNFLTKLSKDFEKESKKLELNIYKLSNEEFNIGSPKQLGEILFINLKIPGGKKTKSGTYSTDSSTLNALASDGYEVAKLVLEWRELTKLKSTYTDALFRLTDSKSRVHTSFGLANTLTGRLSSTDPNLQNIPIRTENGKKIRTAFISKEGSKLLSFDYSQIELRLAAEISGDKNFIKAFKNNEDIHASTAREIFNLKDNQINQDFRRKAKAINFGILYGISP

SEQ ID NO: 135603 - protein, 271 aa, Unknown
  Bacterial polypetide isolated from the Sargasso Sea
ATISTGRLASSDPNLQNIPIRSDDGRMIRKAFIPEKGNVLISSDYSQIELRLIAHIADEKNLINAFLDEIDIHSSTASEVFNIPLNDMTPDIRRNAKAINFGIIYGISAFGLAKQLNISRTEASEFIKAYFKKYPSIRAYMDETKKFANENGFVKTLLGRKCLVEEINSKNAATRSFMERAAINAPIQGSAADIIKRAMIILGNHKELAKLETKMLLQVHDELIFETKKENCEESMRIIKKEMESANLPILNLNVPLIADTNFGNNWDEAH

SEQ ID NO: 135604 - protein, 696 aa, Unknown
  Bacterial polypetide isolated from the Sargasso Sea
SSDKDLMQLVSKKVTMLDPIKNKKIEMKDVEEKFGVKPDKVIFIQALTGDKVDNIPGAPGIGPKTASQLINDFTDIDGLLNNLDKIKQEKRRNILRDAESDIRMSLKLVTLKNDVKISENINKIRTYNELKKEGNHIFKFLKDQGFRSTSERLKSNSFISSDNHEVIQKETEPKYHLINSKKNFEKILNEIEKQGICAIDTETNSLNIEKAKLVGISICYSKNTSYYIPINHTTSDGSKKIDNQLEENYVINHINKICKNESILKIGQNIKYDIRILNKYGVKFNSIADTMLISYSIDNGIYKHNLDDLSFNHLNHTTIKYKEVVGTGKNEITFDKVTIDNAINYAAEDSLLTFRLFQNLYPRLIKEKANFVYKNIDLPLVEVLSSIEANGIEVNKKFLTSLSDEFENESKKLEKNIYKLSNEEFNIGSPKQLGEILFINLKIPGGKKTKSGTYSTDSSTLNNLASDGFEIAQLVLDWRELTKLKSTYTDALFRLTDGKSRVHTSFGLANTLTGRLSSTDPNLQNIPIRTENGKKIRTAFVSGKGKKLVSFDYSQIELRLAAEISSDKNFIRAFKNNEDIHASTAKEIFNLNDSQINNDYRRKAKAINFGILYGISPYGLAKQLNISNTEAKDYINEYFIKYPKIKKYMDHQIDFAKTNQYVETIFKRKINIKGITDKNFAVRGFAERQAINAPIQ

SEQ ID NO: 135605 - protein, 497 aa, Unknown
  Bacterial polypetide isolated from the Sargasso Sea
RLPSYNQEKHGLSEISFRLFGFKPPSFKETVGKNKDFSFVDINEASIYCGYDVFLTFKIVKIFKERFSTEKNELIKLFEEIELPLEPVLSQMEMNGITIDIPYLDKLSKELKSTLEDIESKVYELAEETFNLSSPKQLGEILFEKLNLDKKKSRKTKTGWSTDAVVLERLVDEHEIIQHLIKHRTLSKLLSTYIDALPNLINEKTGRVHTNFNQAATATGRLSSSNPNLQNIPVRTEFSRRIRKAFLPEKNWKLLSADYSQIELRILAHLADEEILINAFHKNDDIHSLTARLIFEKEEISSEERRVGKTINFGVIYGMGIKKFARSTGVSTPEAKEFLIKYKERYSKIFKFLELQERLALSNGYVKTIFGRKREFKFDKNGLGRLIGKDPYEIDLQSARRAGMEAQSLRAAANAPIQGSSADIIKIAMVQLNKKFIEMNVPAKMLLQVHDELLFEVEPDSLEITTKLVKKTMEDCVKLNVPLLVDIGIGDNWMETK

SEQ ID NO: 135606 - protein, 367 aa, Unknown
  Bacterial polypetide isolated from the Sargasso Sea
MQLEISREALLRPLQLVSGALGGRPTLPILGNVLLDVSNGLLSLTGTDLEVEMIGQVYLNSDSQDGRTTVPARKLLDICRGLPEGADIRLNTEGERLIIRSGRSRFNLSTLPATEYPNIEDWESVLEFDIGQLELKKLIDATQFSMASQDVRYYLNGMLFESEGHGLRTVATDGHRLATCRREVVTESLPDHQVILPRKGVLELVRLLEAEDKPVRLQIGRSNLRAALDGFIFTSKLVDGRFPDWRRVIPRNSDKALIAGREDLRQAFARAAILSNEKFRGVRLNLQENLLRITANNPEQEEAEELLDVQYEAGEMEIGFNVSYVLDVLNTLKCDQIRISLSDSISSAIIEDFDSQDAQYVVMPMRI

SEQ ID NO: 135607 - protein, 288 aa, Unknown
  Bacterial polypetide isolated from the Sargasso Sea
RELPALVNPDTGRVHTSYHQAAVATGRLSSSDPNLQNIPIRTAEGRRIREAFVPAPGSQLVAADYSQIELRIMAHLSADEGLLGAFEKGEDVHRATAAEVFGTPVEEVSGDQRRSAKAINFGLIYGMSAFGLARQLGIERGQAQEYIDLYFERYPGVRAFMDEIRAQVREQRFVETVFGRRLFLADISSSNHARRQAAERAAINAPMQGTAADLIKLAMLAVDQWLVDDQCGARIIMQVHDELVLEVPESEADRVSQAVTQMMSSVAQLAVPLKVDVGSGVNWAQAHS

SEQ ID NO: 135608 - protein, 920 aa, Unknown
  Bacterial polypetide isolated from the Sargasso Sea
MSSKKKTDHFYLVDGSGYIFRAYYALPPLSRKSDGLPTGAVSGFCSMLFKLLEDARSDDSKNKPTHFAVIFDSARKNFRNEIYSEYKANRAEAPDDLAPQFEYIRKSVEAFNLPSIELLNYEADDLIATYAKKIIESGAKVTVISSDKDLMQLVSTKIRLFDPMKSRVIGEKEVIEKFGVKPNQVIDVQSLAGDSSDNIPGVPGIGVKTAAELINKYKNLDTLLKKASEIKQNKRRETLIANKDKALLSKQLVTLKDDVPIKNNPSEFLIKKINKDKLYNFLREMEFNRLLSQAISFYGEPGEKNFSQDKVSKPSKINTKQYQKITKENDLNKLIIDLNKKSIISVDTETSSLDPQVAELIGISLSYAKNISFYIPVGHKNIKSLNKDFVIKKLKPILEDPSIKKVGQNIKYDFIILKKYGVELNSVEDTMLLSYTLDAGNNRHNMDTLSELHLNHKTISYKDLVGSGKKQLKFSEVDIDKATEYAAEDADVTLRLYEILSERVSDEKLSQIYEAFEKPMIKILSKLETYGIKVDDNYLKELSKKFEKRLEKIEKEIFKISGKEFNIGSPKQLGEIIYNELKIAKLKKTKKGSLATSAKILEDLALTGQKFPNLILEWRQVSKLKSTYTDALQDHINKDTKRVHTSFLLAATNTGRLASSDPNLQNIPIKTSDGKEIRKAFIAEKNNVLISADYNQIEMRILADMADVKELKKAFKQNQDIHKLTASQVFGVPINKISEDQRRKAKAINFGIIYGITQYGLAKQISVSNEEAQEFINSYFKKFPEIKDYMNSTIKSCRKLGYVSNIFGRRIHLRGINDKNFSVRSFQERAAINAPIQGSAADIIRLAMIKIDNILEEKKIAKMLLQIHDELIFECLKKDENNVKKLIQNAMVSVSSSEYHKFSIPLEVGVNSGNNWGEAH

SEQ ID NO: 135609 - protein, 922 aa, Unknown
  Bacterial polypetide isolated from the Sargasso Sea
MPTIANNPLVLVDGSSYLYRAYYAPPHLTNSKGEATGAVYGVVNMLRSLLSRYQPSHIAVVFDAKGKTFRNDLYEEYKAHRPPMPDDLRSQIEPLHRIIRALGLPLISIPGVEADDVIGTIARQASRENRAVLISTGDKDMAQLVDENITLINTMTDTIMGPEEVAAKYGVGPDRIIDFLALMGDKADNIPGLPGVGEKTALAMLTGAGSVANLLAEPEKVTELGFRGAKTMAAKIIDNADMLKLSYELATIKTDVELEQDWHELEAKPADRDELIKCYGEMEFKRWLAEVLDNKAPTTIAAKVETTETQEESTPSVTIKTQYDTILTEAQLDEWIAKLKQAPLMAVDTETTSLDYMVAELVGLSFAVEAGKAAYLPLAHDYVGAPAQLDKQTTLEKLRPLLEDAKIKKVGQNLKYDISVLANAGIKLQGVVFDTMLESYVFNSVASRHDMDGLALKYLGHKNIAFEDIAGKGAKQLTFNQIPLETAAPYAAEDADITLRLHQHLWPRLEKETELASVFTDIELPLIQILSDIERQGVFIDSMLLGQQSDELARKIDELETKAYDIAGEKFNLSSPKQLQVLFFEKLGYPVIKKTPKGAPSTAEEVLVELALDFPLPKVILEHRSLTKLKSTYTDKLPLMVNAKTGRVHTSYHQANAATGRLSSSEPNLQNIPIRTEEGRRIRQAFIAPQGRKILAADYSQIELRIMAHLSQDAGLLKAFAEGKDIHRATAAEVFGTDFDSVTSEQRRRAKAVNFGLIYGMSAFGLARQLDIPRNEAQTYIDTYFARYPGVLRYMEETRASAAELGYVSTLFGRRLYLPEIRDRNAMRRQAAERAAINAPMQGTAADIIKKAMISIADWIKSDTQGEIAMIMQVHDELVFEVDADKAETLKLKVCELMAKAANLDVELLAEAGIGDNWDQAH

SEQ ID NO: 135610 - protein, 719 aa, Unknown
  Bacterial polypetide isolated from the Sargasso Sea
GIGSIEKLYQQLDQIAALNFRGSKTIAAKMEEFKDQLKLSYQLATIKTDVELSLQPDSLDIKTPDQTKLAELFAACEFRRWLSEVLAGKDTATAVATAAAKQTEEQASETPANGIDTSSYPCILTEADFLQLLKRLPEVELVAFDTETTSLDYMQADVVGISLALAAGDACYIPLAHDYVGAPEQLNRDWVLAQLKDWLEDESKAKVGQNLKYDQSVLARHGITLRGIRFDTMLESYIVNSVASRHDMDSLSLKYLGHKTISFEDIAGKGAKQITFNQIALEQASPYAAEDADVTLRLHQTLWPMLEQHSGLQKVFRDIEMPLVPILSKMERTGVKIDGNLLAQQSLDLAKRIGEIEQEAYQMAGKEFNLSSPKQLQEILFEQMGLPVLKKTPTGTPSTAEEVLAELALDYEFPKLITEHRGLSKLKSTYTDKLPLSVNPETGRVHTSYHQAVAATGRLSSTEPNLQNIPIRSEEGRRIRQAFIAEAGKTILAIDYSQIELRIMAHLSRDPALLNAFAQGKDIHRATAAEVFGVALDQVSSEQRRRAKAVNFGLIYGMSAFGLARQLGISRGEAQQYVDLYFERFPGVLDYMERTRTQAHEQGYVETLFGRRLYLPEINAKNMARKKGAERAAINAPMQGTAADIIKMAMIKVSAWQDKQPAGIVAMIMQVHDELVFEVKTEELERVSSELVEIMQSAASLDVPLLAEAGFGPNWDQAH

SEQ ID NO: 135611 - protein, 373 aa, Unknown
  Bacterial polypetide isolated from the Sargasso Sea
MFLYTVFWVSEECKVRKIIHIDMDCYFAAVEMRDFPEYRGKPLAVGGSRVQRGVISTCNYEARKFGVRSAMATGYALKLCPDLILVPGRMQVYKEVSQQIRAIFSRYTELIEPLSLDEAYLDVSDCKLFKGSATLIAEAIRRDILAETGLTASAGVAPIKFLAKVASDLNKPNGQCVIPPDEVPEFVKSLSLRKIPGVGKVTAEKLSSLGLNTCADVQAYPKQELIARFGKFGTVLVERAHGIDDRGISVSRERKSVGVETTLAQDIYTLEQCQQVMPGLIQELSSRLGRSAKGRQIHKQVVKLKFNDFKQTTIEHRSDEVSVVMFYELLSQAMARQEGRGIRLLGVSVGLAESKDTLSPLMVRETKQLDFVF

SEQ ID NO: 135612 - protein, 350 aa, Unknown
  Bacterial polypetide isolated from the Sargasso Sea
MRKIIHIDMDCFYAAVEMRDNPALREVPLAIGGSADRRGVISTCNYVARRFGVRSAMPSGLARKLCPPLVLIPGRMAVYKEVSRQLRAIFLRYTEQVEPLSLDEAYLDVTMSPCCGGSATLMAREIRAAIKAELGLTASAGVAPNKFLAKLASEQRKPDGLFVIRPQEVDEFVRQLPLGKLPGIGRKTADRLESLGLYSCEDARQLGNEELLARFGKLGEMLAGRIWGHDEQPVQAQRVRKTIGVETTLASDVLDEAACWQVLSQLIPELEQRFSVSHGREQLMGQGIKLKFADFQQTTVYRRGGYQPERFHDLLHEGLLRAQGKPIRLLGLVVGLPAAGEVNQLALDLA

SEQ ID NO: 135613 - protein, 822 aa, Unknown
  Bacterial polypetide isolated from the Sargasso Sea
MSKINSNSTLFLIDGSTFIFRAYFAMYKASQSRGSGFTRSDGTPTGAVMAFCNMMWKIITNGIDGIHPSHIAVIFDTKEKTFRSDIYPSYKANRDAPPEDLIPQFPLIQRAVEAFNIKCISQIGYEADDLIATYSKIASERDAETIIISGDKDLMQLINKNVRMYDPMPGKERFIDTNGVQDKFGVTPDKVVDVQALAGDSTDNIPGVPGIGIKIASELINEYHSLENLLSNAENIKQNKRRENLINHAEDARISYRLALLESSSPIEIDIDDLFNEHLDYDKIISFSTEMELSNLSNRINNWFSKEGPENIISNNTTLINTTPQSSHHVSTKTEKQGRESNIEIHSNNLLEELANEIASSEAFCIDFEINDSEIREISISTGMQKYFLSNDKNREGRPSIQDLIKKINPFMADETIKKIFFDLKNILPILHSYKINIKSFDDVSLMSYVINNGKLKNDLNTLTIAYKEQIKTQISIGSNEESRDQKINIPCSDRASIIFDLWEYLRFYLLDSDLIQMYELVEKPLISVLYEIEKNGIKADRRILSELSEEFGQKIKKIEQNIYNLAGSEFNIASPKQLGEILFENLGLSGGKKTKSGTWATGIDILEDLSAIGHTIADVIIEWRQLNKLKTTYTDSLPNFIDPSSGRVHTKFSQALTSTGRLSSSNPNLQNIPIRTSEGKLIRSAFIAEKGQTFLSADYSQIELRVLSHVANIQQLQNAFLNDLDIHQMTASTIFATPLNEVTEKMRYSAKAINFGIIYGISAFGLSKQLKIQRKDAQQFISDYFIRFPGIREYMDSTIEFARTNEHVKTIFGRRCYFPDI

SEQ ID NO: 135614 - protein, 358 aa, Unknown
  Bacterial polypetide isolated from the Sargasso Sea
EILFEKLNLDKKKSRKTKTGWSTDAVVLERLVDEHEIIQHLIKHRTLSKLLSTYIDALPNLINEKTGRVHTNFNQAATATGRLSSSNPNLQNIPVRTEFSRRIRKAFLPEKNWKLLSADYSQIELRILAHLADEEILINAFHKNDDIHSLTARLIFEKEEISSDERRVGKTINFGVIYGMGIKKFARSTGVSTPEAKEFLIKYKERYSKIFKFLELQERLALSKGYVKTIFGRKREFKFDKNGLGRLIGKDPYEIDLQSARRAGMEAQSLRAAANAPIQGSSADIIKIAMVQLNKKFIEMNVPAKMLLQVHDELLFEVEPDSLEITTKLVKKTMEDCVKLNVPLLVDVGIGDNWMETK

SEQ ID NO: 135615 - protein, 321 aa, Unknown
  Bacterial polypetide isolated from the Sargasso Sea
TSEEVLVELALDYPLPKIILEHRSLAKLKSTYTDKLPLMVNATTGRVHTSYHQANAATGRLSSSEPNLQNIPIRTEEGRRIRQAFIAPAGRKILAADYSQIELRIMAHLSQDKGLLTAFAEGKDIHRATAAEVFGVHFEEVTTEQRRRAKAVNFGLIYGMSAFGLAKQLDIPRNEAQTYIDTYFARYPGVLKYMEETRAAAAEQGYVSTLFGRRLYLPEINDRNAMRRQGAERAAINAPMQGTAADIIKKAMIAIHQWINQDTQGEITLIMQVHDELVFEVDEAQADALKTKVCDLMAQAATLDVPLLAEAGIGNNWDEAH

SEQ ID NO: 135616 - protein, 413 aa, Unknown
  Bacterial polypetide isolated from the Sargasso Sea
LHRSKVTKVYETLERPLVSVLAQVERNGIKVDRETLSRMSNAFAQKMAGLEAEIYELAGESFNVGSPKQLGEIMFDKLGYGGGKKGKNGAYATGADILEDLATNYDFPKRVLDWRQLSKLKSTYTDALQDHINPNTGRVHTSYSIAGAVTGRLSSTEPNLQNIPVRTEDGRRIREAFVAEDGNILVSLDYSQIELRILAHIAQIDALKQAFHDGLDIHAMTASEMFDVPLDEMTSDIRRQAKAINFGVIYGISGFGLARNLRIPRSEAQGFIDRYFERFPGIKEYMDKTVEFSKENNYVETLFGRVIHTPEINAKGPMAGFAKRAAINAPIQGTAADIIRRAMIRVPDAIKDLPAKMLLQVHDELLFEVKEEFCEDLIEQVQSIMETASLPFLKMDIPLSVDAGRGMNWAEAH

SEQ ID NO: 135617 - protein, 661 aa, Unknown
  Bacterial polypetide isolated from the Sargasso Sea
EADDVLGSLSKLFNEVKKEVLIVTGDRDIFQLISKKTKILYTKKGISETDTMDEKSFKEKYEITPSQYIEYLALKGDPSDNIPGLPGVGEKTAITLLKKYKNLDNILQNLDELTPKLKNTFKTNKDILFISKKLATIKTDLELDLPDLKLSDSAYFSDDVLENAQEKVKNLELNKYTLKNKNEIDKDKENTEDKDIHEYESIEGEIFIISFDNETYFFNSNKFGKYTGNLLKINNYVLITSQRTISLTEDELDFDKFDAYDCMLFLKDPSIKPDNLLNIAKHIDRSSGLSKKSDIIDFLKFFQQKTSFINNEISEFKKDKKLILLYKDLDFPMLKILSSMNKKGVKVSLKKIDKLSDEINVDLNIYKKNIKSITKKDFNLNSPKQLSEILYEDMKYPIIKKTPKGAPSTDASVLEELSKSHELPKLILKYREYEKLRSTYIEGLKTVIVNNRVHTSYNLFGTTTGRLSSEKPNLQNIPNKTEMGQKIREFFVADSKHTFVIADYSQIELRVLAHLSDDKNMINMLKNRDADIHSETAAKIFNTNIDSVTKDMRRKAKEVNFGLIYGMESFGLSKSLDISKKEADELIKAYFGQFPKIKGFLEKIVVDATKNTYTETLYGRKRFIRELSSSNFSVKAMGKKIAMNAPIQGTASDIMKIAMIK

SEQ ID NO: 135618 - protein, 690 aa, Unknown
  Bacterial polypetide isolated from the Sargasso Sea
MNNQIYDVSGVQEKFGVHPNQIIDYLAIVGDSSDNIPGVPKVGPKTAVKWLKEFKNLKGIIKNADSLTGVVGQNFRDSIPDLDRNIELVTLKRDVDIGVSLESLLKAKEDQEELNKLFTSLEFKTWIKSSSDSSDEKPKNTNTKKEYQSVLKEKELIAWAKKIEKCKAFAIDTETSSLDTMTADLIGISLACDEGEGCYIPINHSYEGMPSQLSIDLIQKTLGSVISKNQKKLVGQNLKFDLPMLNRYGINITDFLGDTMLMSYVLNSTGTRHGLDRMAQHYLNYEPMKYEEVVGSASKQINFAQVEISIATFYAAEDADITLRLFNHLNKMLADQPKLLNLLKDIEYPMLNSLIRVERNGAKIDAKMLSEYSDVLSIKIEELSKTAYEVAGEEFNMDSPKQLVEILYNKLDLPVLKKTPKGQPSTNEDTLQRLAEEFELPKTIIEYRGLAKLKSTYTDSLTKIQHPITKRIHTSYQQAVTSTGRLSSTEPNLQNIPIKTPEGRKIREAFIAEKGNVLISADYSQIELRIMAHLSGDKNLTRAFKNNIDVHSATASEIFNVPLENVTPDHRRSAKAINFGLIYGMSAFGLTRQLGIPRNEAQAYLDTYFERYTGVKDYMESTKELAKKNLFVETILGRKLHVATINDPNGLRRKAAERAAINAPLQGSAADIIKKAMIDVDQWIGVNNPD

SEQ ID NO: 135619 - protein, 444 aa, Unknown
  Bacterial polypetide isolated from the Sargasso Sea
KGVKQLTFNKVNLDIASDYAAEDADITLQMYDTIAEHLKKQKMLQKVLIDIELPLIPVLSDMEQKGTVIDSDILNLQSKNLGQRINGLEEQAFSMAGKEFNLSSPKQLQEILFDEMNIPVVEKTPGGQPSTAESVLQELAKQYELPQVILEHRTLSKLKSTYTDRLPEQISEKTGRVHSTFHQAVTTTGRLSSSDPNLQNIPIKTEEGRMIREAFVAPKGFDLISIDYSQIELRIMAHLSKDEGLITAFENGEDIHSATAKEVFGSADDQARRSAKAINFGLIYGMSAFGLGKALGVTRPEAADYIASYFGKYPGVKIYMDEMKAKAKEQGFVETAFGRRLYLPGIHSGRTRMAAERAAINAPMQGTAADIMKLAMINMHDYIKGTGKDIHLILQVHDEVIVECPEKDTKTTLKALEQIMTDVTKLSVPLVVESGVANNWGKAH

SEQ ID NO: 135620 - protein, 641 aa, Unknown
  Bacterial polypetide isolated from the Sargasso Sea
KQLNIDSDKIKASDQVEKFEKKIIDSPKEIEEINSKFERENYQVIQSLDELAQWKLKAENIGYVAFDTETNSLDAVQADMVGFSLCTSENDACYVPLLHEENDKQIDFDQAISILKSILEDNGIKKILHNMKFDALVIDKYNINIKNYDDTMLMSYSIGSGGIRHKLDTLIKYYFDHDAISFKDLTGSGKDKKTFQELTIKEAGKYAAEDADMTLRLWKIFKSSMVQDKQVKIYEIIEKPLTQVILNMEKHGIAIDVNKLNELSSNFEEKLNNLEKSCYKLIGEEINLGSPKQVGEILFDKLALPGGKKTSTGSWSTNAEVLENLANEGYDFPKILLEWRALSKLKTTYTDALPAYLNIKTNRIHSSFSMATTSTGRLASSDPNLQNIPIRSDDGRMIRKAFIPEKGNVLISSDYSQIELRLIAHIADEKNLINAFLDEIDIHSSTASEVFNVPLNEMTPDIRRNAKAINFGIIYGISAYGLAKQLNISRTEASEFIKAYFNKYPSIRDYMDETKKFANENGFVKTLIGRKCLVEDINSKNAATRSFMERAAINAPIQGSAADIIKRAMIILGNNKKLEKLETKMLLQVHDELIFETKKENCEESIRIIKKEMESANLPILNLNVPLIADTNFGNNWDEAH

SEQ ID NO: 135621 - protein, 862 aa, Unknown
  Bacterial polypetide isolated from the Sargasso Sea
SKSFRNEIFEDYKANRSEAPEDLIPQFSLIRDATVAFNIPYIELKGYEADDIIATYSSQASKAGWEVDIISSDKDLMQLVNDNVKMIDPMKMVNIGREEVFKKFGVYPEKVIDVQALAGDSTDNIPGVPGIGVKTAAELINEYGDLDSLLNRAGEIKQPKRRENLINFADLARISMKLVKLDDDIKDIENFNNFQRKDIDINKLKTFLIEQGFNSLIGRLPNEDGFINTKSSYVALPDNSESENEKPAVKNNYKLITDENTLKSWIKNIEATGIVSIDTETTSLDATSAKLVGISLAIEAGKAVYIPINHQSKEGPIVAKKINQLDEKLVLSLLKPIMEDPSIIKIGQNIKYDMTILFNAGNINIYPYHDTMLMSFALDAGKRSGHGMDSLSKTHLNITPISYSEITGKGKDQITFDYVDLDTALDYAAQDADITLRLYNFLKDRLVKEKMTSLYETIERPLPHVIANMERNGVGIDSGYLKNLSDIFISKMEPIQINIFKLAGEEFNISSPKQLGEILYNKLGLKGGKKGKSGLYSTSAAVLEKLGQDGNEICKLILNWRALQKLKSTYSDALVDQINSATGRVHTHFQMTGAMTGRFSSSNPNLQNIPIKSEDGRAIRRAFISQKGMKIVACDYSQIELRLLAEVANIEPLIEAFKNNIDIHTLTASQVFMVNTDNVTSEMRRNAKTINFGIIYGQSAFGLAKQLNISRTEAKEYIELYFKQYPGIKSYMENTQEFARKNGYVETIYGRRCYIPSINDKNPMIRAGAERQAINAPLQGAAADIIKRSMKNFPEILIKEKIDAKLILQVHDELIFECASIDLDRLIPIVKSKMINAPKPGFKMKVPLEVEIGIGNNWDEAH

SEQ ID NO: 135622 - protein, 885 aa, Unknown
  Bacterial polypetide isolated from the Sargasso Sea
MIFRPDVILIDGSSYIYRAFHALPPLSTSKGKPTGATRGVASMLRKLISTYPGVPMVMVFDAKGPTFRSDYYQAYKANRPSMPNELRVQIDDIKNLSRLFHFSIQEVAGVEADDVIATLADKLGKKQKVLISSPDKDLTQLVKENVIQHNSVSNEFFDEKYVEEKFGVPPNRIAELLALVGDKSDNIPGITKVGNKTASKWLNQYGDIDNLVAKADEVTGVVGENLRNEKNILQRNLFLVALKKDLDLDLKLDSLNIPQATNDELKDFYKDLEFNSFIEDKIVEKVSKNYSSIKNLKQLKEIEKELDDSKCFAFDTETTSLLAHEAELVGFSFALKENTGVYVPIRHNEQTDLDADETTKWLKAVLERNQQKIVGQNLKYDLSVLEKYDIEINKFCADTMLMSYAINSTATRHNLDALAEHYLNVQTIKYSDVMGKGANKYKNFNEVPIKEATNYAAEDADITFQLYEKFKELINKETENLLQDIEYPLVSVLLKMENKGALIDTKHLQKLSNEFGSKLIGLTKKIHDMSGSVFNIDSPKQLSEVLFEKMKIDSKGLKKTSTGYYSTSESVLQKLSAENEIVRNILEYRTLAKLKNTYTDKISDICDANSRVHTSYHQAVTSTGRLSSSDPNLQNIPIRTNEGITIREAFVAPKDKKLLAMDYSQIELRLMAHYSKDPIMLNSFRNDEDIHKRTAAEIFGVEIDDVDGQMRRRAKTINFGLLYGMSAFGLSNQLEVSRAEADIFLNNYFERYSAVKSFMSKIVEEAKKDKFVKTLYNRKIHVPNIEAGNYMMRQGSERAAINGPLQGSAADIIKIAMIKIQDLINNSKSDIKMILQVHDELIFEVPTDFTDEDIKPIISIMEETTKISVPLKVEYGFGANWREAH

SEQ ID NO: 135623 - protein, 894 aa, Unknown
  Bacterial polypetide isolated from the Sargasso Sea
MSEEKDPIILVDGSSYLYRAYHALPPLTNSKNQPTGAIKGVISMIKKILIDHPESPLAVVFDAKGKTFRHDMYSEYKANRPPMPEDLVQQIEPIHQIISLMGIKLIMIPGVEADDVIGTLAEQARQKKLNAVISTGDKDMTQLVCENVSVVNTMSGELLDESGVLKKFGVGPELITDYLALIGDKSDNVPGVDKVGPKTAVKWLNEYSDIQGVKENSESIGGKVGENLRSSIEMLDLAHELVKIKTDVELELGIEDLARSEPDTEKLTEIYEELEFNAWLQEAPEKKTTTTKVNSSYICISSQDLLEKVIKNASKAKTIAIDTETTGLDYMDTDLVGISLSYKLGEAYYIPINHQDDTVNQLKLNVVLDALKPVLESSKNKIIGQNIKFDRNVLAKYGINISSIKNDTMMMSYVLDASATRHNLDALSSYYLNYKTSTFEDVAGKGVKQITFDQVPIEEATNYAAEDADITLRLYEELNPKLESVASLKKLNDEIEIPLIEVLSEMEQNGAILNSKILSSQSKDLENRIKKLEKKAYEIAGEEFNLGSTKQLREIFFDKLNYRIIKKTPGGQPSTDEKVLVELAEEYELPGVLLEHRTLSKLKSTYTDKLPGQISETTGKVHTSFHQAVTTTGRLSSSDPNLQNIPIRTEDGRRIRQAFEPSKGHRFISADYSQIELRIMAHISKDVGLLQAFQEGEDVHSKTASEVFDVAIEEVTADLRRNAKAINFGLIYGISAFGLGKQLGISRNLAAEYMAMYFEKYPGVKKYMESTKDFASQNGYVETLFGRRLYLRDINASNAIRRQASERAAINAPVQGTAADIMKIAMIKTHQAIKAENVKAKLILQVHDELILDTPKKEIDSVINLLTDSMMGAASLDVPLEIDVGVGDNWDQAH

SEQ ID NO: 135624 - protein, 738 aa, Unknown
  Bacterial polypetide isolated from the Sargasso Sea
FNIPQVSEVGYEADDVLGSLAKKYNDKGQEVMIVTGDRDTFQLISKNTKILYTKRGISEIDIVDEKFFLNKYGFKTDQYIEYLALKGDPSDNIPGLAGVGEKTATSLLKKYKTIEGIYKNLNDLTPKIKNSFQENKEMLKTSKDLATIRTDLKIEIPKVQLKDTAYYSDEVLEASQDKVKKLELNKYIKSSNSQEKENKENDENDVLIITENLTGPQLMINFEDQLYFINSNNYGKYIGKLSNLDYFISLNTQKLINNNEEGINNLKFDAYDCVLFLRDPSIRPDNLLSISKHLDRTAGLTNKSEIFDYLIFFQKHFLFISKEVQTFKNEKKLYKIYEDLDFPLLSILDSMSKKGVKVSKTKIETLSKEINNELDLLDKEIKKITNKDFNLNSPKQLSEILYVDMEYPIIKKTPKGAPSTDASVLEELSKSYELPKFILKYREYEKLRSTYIEGLKNEIVKNRIHTSYNLFGTTTGRLSSEKPNLQNIPNKTPIGQKIREFFIADTNHSFIIADYSQIELRVLAHLSKDKNMISMLKNRDADIHSETAARIFNMDIDSVSKDMRRKAKEVNFGLIYGMESFGLSKSLDIPKKEATELIDSYFNQFPKIKGYLDSIVKNAESSTFTETLYGRKRFIRELASSNFQLKAMGKRIAMNAPIQGTASDIMKISMIKLEDKIKKLNSTDIILQIHDEIIIQTPDDIASKTAKLVQKEMENATVLDVPLYVDIKQNKNLANFNN

SEQ ID NO: 135625 - protein, 773 aa, Unknown
  Bacterial polypetide isolated from the Sargasso Sea
MSKEKLLLVDGSSYLYRAFHALPDLRSSDGRPTGAIYGVLNMLQKLIKSERPDYLSVVFDTPVKTFRHDIFPEYKANRQKTPEDLIAQIEPLHQAIINLGLPLIAVDGVEADDVIGTLAMEAEKKNIKTLIATGDKDMAQLVTDNIHLIDTMKDIRMGPREVLEKFGILPERFIDYLTLAGDTSDNIPGVEKVGPKTAIKWINEYGSLEGVIQNADQIKGKIGDNLNAALDQLDLFKTLVTIKCDVQTDSNFSDLIIGESNEDLLHEQLSDLGLHGLIKQFDIQSPEKKPDVESNYHTIRTKNELDELIEVMKKAPYISFDTETTSLDYMNAELVGVSIALKPNEAFYIPINHNYEGVEKQLEEHFVLEALKPFLESDEIPKIGHNLKYDRHILQNLGIDLKGKLLDTMLFSYVNNSTITRHNLDAVSKRYLNINPTSYEDVAGKGAKQIPFSEVSIEVASEYASEDADISLKLYEHIEPLVQKETKLAKLYSEIEGPLIYTLGDIERNGVLIDSEKLNEQSKELEAKILKLEQKVQKSAGEDFNLGSPKQLQEILYEKLGLPVIKKTPKGQPSTAESVLQELSMDFPIVQDILSYRAISKLKSTYTDKLPKMVNSNTGRVHTSYHQAVTATGRLSSSDPNLQNIPIRSEEGRRIREAFIAPDGYKILAADYSQIELRIMAHLSRDQGLMDAFAKGQDIHQATAAEIFSTNIDEVTANQRRSAKAINFGLIYGMSAFGLSKQLQITRAEAQNYIEQYFDRYPQVKHYMDETKQ

SEQ ID NO: 135626 - protein, 522 aa, Unknown
  Bacterial polypetide isolated from the Sargasso Sea
MREIFNIKSNTVVCQNIKYEMNVLRKYNITFSCKYHDTMIMSYIFNSNGKHDLSTLSSKYLNHESISYEDVVGKGSKQILFNELLLEEAITYACEDSDITLQLYDYLLDKLSSANDQYELYKNIELPLVSVIADIEYTGVKVNSENLNKQSKDLRKRIQLIEKKVYDEAGQEFNIGSPKQIQEIFYDVLKLPVLKKTPKGAPSTNEDVMNDLSEIHDLPKLILEYRNLSKLKNTYTDKLGEQVSEISNRLHTSYNQTVTITGRLSSSNPNLQNIPVRNQDGRNIRKAFIPEKGYKILSADYSQIELRIMSHLSQDETLKQNFMDGEDIHMATAREVFKSKSQPTKEDRRAAKAINFGLIYGISSYGLAKQLRIDNSSAKEYIDRYFKKYEGVRDFMEDTKKQAKKNGFVETMKGRKIYLPNISHSNFQVRSAAERTAINAPIQGTAADILKIAMLDISKWMQNHQDKVKLLMQVHDELVFEIDIDFIDKASKKIKALMSNCVSIDVPLDVDLGVGNNWDKAH

SEQ ID NO: 135627 - protein, 774 aa, Unknown
  Bacterial polypetide isolated from the Sargasso Sea
DKDMAQLVNEHVTLINTMTDSISDPDTVVEKFGVGPDLIIDYLALMGDKVDNIPGVEGCGPKTAVKWLQKYGSLQGVMDNAGEIKGKIGEKLANALDHLPLSYELATIKCDVEVESDLDTFKLQEPNKDELIALYGECEFRRWLAELLDNPSDAQTHLAVPSQETELPKVEEAHYETILTEAQFDTLIEQLNGADLFAFDTETTSLDYMQAQLVGMSFSVKAGEAAYLPVAHDYPDAPDQLSLEFVMQKLGPILADANKAKVGQNLKYDKSVLANAGYELNGIKFDTMLESYVFNSVGTRHDMDSLALKYLGHKNISFEDIAGKGKKQLTFNQIELDKAAPYAAEDADITLRLHEVLWPKIEADEKLKSVFEEIEMPLVSVISDIERTGVAIDSNMLGAHSQRLGERLIELEKEAFEIAGEPFNLSSPKQLQVLLFEKLELPIIKKTPKGAPSTAEEVLQELAHDYPLPKVIIEHRGLSKLKSTYTDKLPLMVNEKTQRVHTSYHQAVTATGRLSSTDPNLQNIPIRSEEGRRIREAFIAADGYKIVAADYSQIELRIMAHLSQDKGLLNAFANGLDVHSATAAEVFGVDLDDVTTDMRRKAKAVNFGLIYGMSAFGLARQLDVPRHEAQHYIDKYFERFPGVLEYMETTREKAAENGYVETIFGRRLHLPEINARNGARRKGAERAAINAPMQGTAADIIKKAMLSVNQWVYEQAPNTVKLLMQVHDELVFEIKTDCAEAYTKQICELMSQAASLDVPLIVEADEGENWEQAH

SEQ ID NO: 135628 - protein, 318 aa, Unknown
  Bacterial polypetide isolated from the Sargasso Sea
VLEHRVLSKLKSTYIDALPQLVEAETGRVHTDFNQAVTATGRLSSSNPNLQNIPVRTEYSRRIRKAFLPQDGWTLLSADYSQIELRILTHLSGEEVLQEAYRSGDDVHALTARLLLNKDEVSADERRLGKTINFGVIYGMGAQRFARETGVSQAEAKDFLAKYKQRYPKVFAFLELQERLALSRGYVETILGRRRPFHFDRNGLGRLLGKDPLEIDLDVARRGGKEAQQLRAAANAPIQGSSADIIKVAMVQLQAALTSQGLPARLLLQVHDELVLEVKPEALETTRDTVVRTMENAVKLTVPLVAETGVGASWMEAK

SEQ ID NO: 135629 - protein, 344 aa, Unknown
  Bacterial polypetide isolated from the Sargasso Sea
VLFDKLKLIPPKKTRTGEKSTGIDVLEDLAYGGNKVAETIIEWRQLSKLKNTYTEALQAHIIKSTGRIHTSYAMASTSTGRLASSDPNLQNIPIRTEEGRSIRKAFIPDKDQTIFAADYSQIELRVLAHMADVSQLKDAFNNNEDIHQLTASEIFNVKHKDVTKDLRRKAKAVNFGIIYGISAFGLAKQLSISNYEASDFIKEYFKKFTGIKEYMENTKELCRKNGYVETLCGRKCFFPRIKDKNFALRSFQERAAINAPIQGTAADIIKLAMIKINDKIKSTNECKMLLQVHDELIFEIKNDKLKKYRKIIVSEMENALKPKFDLSVPLSVDSNNADNWSDAH

SEQ ID NO: 135630 - protein, 470 aa, Unknown
  Bacterial polypetide isolated from the Sargasso Sea
QAKDGRPASFAEVALEPAAQYCAMDVHLTRRLALDLMDQLRGMGAATTQLLLQVEQPLEPVLARMEATGIRIDVPYLKTLSTEMGTNLKRLEQEAKAAAAVDFNLASPKQLGELLFDTLGLDRKKSRKTKTGWSTDATVLERLEDAHPVVPLVLEHRTLSKLKSTYVDALPQLVEAETGRVHTDFNQAVTATGRLSSSNPNLQNIPIRTAFSRQIRKAFLPQPGWTLLSADYSQIELRILTHLSGEETLVEAYNQGDDVHALTARLLLDKQEVSADERRLGKTINFGVIYGMGAQRFARATGVSQAEAKEFLSRYKKRYPKVFLFLEWQERLALSQGYVETLMGRRRPFHFDPQGLGRLKGKDPAAIDLDVARRGGMEAQQLRAAANAPIQGSSADIIKKAMVDLQQRLDCEQLPAQLLLQVHDELVLECDPASQAAVTTAVRETMETAVSLKVPLVVDVGCGPNWMEAK

SEQ ID NO: 135631 - protein, 697 aa, Unknown
  Bacterial polypetide isolated from the Sargasso Sea
SRSLVTLKKDVPVKSNIDEFKINSILDLNKLIPFLKLHGFKSLLNKYENVVKEEIKEESKVSKLDVIKNDQEFKSISKNYYLIENLLDLKLFLDKCYDKSTIAVDCETDSLNAKNANLVGLSLSFKEGEACYIPLRHGINLENNQSGFIFDDVKSFKQIPFNDAISLIKPLLEDSSILKIGHNIKYDSLVMKQEHNGNINLNPVGDTMCISYVVDPGRVDSHKLDALALRELNHDTIKYDDICGKGKNKISFNQLSPLDALNYAAEDADITLSIYNRVLPRIINDKKFSVYKRLENPLINVLLEMENTGIIINSKKLNEISKNLSSQIDKLEEQIFKLSETNFNVGSPKQLGEILFDKMKIEGGKRSKNGSWQTSVEILEKISDMGYEIGEVILSWRHFSKLKSTYTDALVEQINSKTKRVHTNYSMVGASTGRLSSSNPNLQNIPIRTEEGRLIRTAFEPKEGFKLVSMDYSQIELRLIAHIADESKMLDAFNDNIDIHADTASKVFGIPIKEMTSEFRRKAKAINFGIIYGISAYGLAKQLKCSANEAKDFISSYFYRFPRIRDYMEQIKSNLDSDGYVETLFNRRVYINDSNSKNQKLRGFAERQAINAPIQGTAADIIKLAMIKIHKQLLNKKEISMLMQVHDELVFEIREKNIEEFTNAILPIMETANLPMVPLKVNLKVDVGVGNNWAEAH

SEQ ID NO: 135632 - protein, 386 aa, Unknown
  Bacterial polypetide isolated from the Sargasso Sea
NGVLIDSEKLNEQSKELEAKILKLEQKVQKSAGEDFNLGSPKQLQEILYEKLGLPIIKKTPKGQPSTAESVLQELSMDFPIVQDILSYRAISKLKSTYTDKLPKMVNSNTGRVHTSYHQAVTATGRLSSSDPNLQNIPIRSEEGRRIREAFIAPDGYKILAADYSQIELRIMAHLSRDQGLMDAFAKGQDIHQATAAEIFSTNIDEVTANQRRSAKAINFGLIYGMSAFGLSKQLQITRAEAQNYIEQYFDRYPQVKHYMDETKQSAKKMGYVETVFGRRLYLADIESSNYQRRQYAERSAINAPMQGTAADLIKMAMILLHQKIREESFEAKIIMQVHDELVIEVNENQSDELSEITTSVMSEISKLDVDLKVDADIGNNWDEAH

SEQ ID NO: 135633 - protein, 357 aa, Unknown
  Bacterial polypetide isolated from the Sargasso Sea
MRKIIHCDCDCFYASVEMRDDPSLRNRPLAVGGRPDQRGVIATCNYEARRYGVHSAMSSALAMRKCPDLLILPSAMDKYRAASRQIMAIYRDYTPDVEPLSLDEAYLDVSGSERCQGSATLIAREIRQRVFDTVGVTVSAGVAPNKFIAKIASDWNKPDGLFVVRPHEIDAFVAALPVRKLHGVGKVTATRLDRLGIQTCAQLRDWPLIDLHREFGAFGRRLYELSRGIDERRVQADQERKSVSVETTYVTDLTTLEQCAEEIRRLVVQLDARIERAGAARSIRKLYVKIRFADFQRTTVECVADATNADTAVALLAKGLQRRAQAVRLLGVGVRIDEDTAERHGQFSLFDDESPAS

SEQ ID NO: 135634 - protein, 804 aa, Unknown
  Bacterial polypetide isolated from the Sargasso Sea
KDAEESNFKVYMVTPDKDFAQLVSDNIFLCKPARMGNSMEIWGVDEVKDKFEVESPDQVIDYLGMMGDSVDNIPGLPGVGDKTAKKFIKQYGSLENLLQNAHEVTGKLGEKIIENKELGVLSKKLAKIILDVPIDYNLDEFKLSNPDKEIVLKVFDELEFRRIKETFFKMFGTNSSKLEVKGAEVVQGDLFSETYNIESNKDSLNDLKLMYQRIESFEELKLLVEKMMKQEIVAFDTETEGLNALETDIVGISFSWQKGIGYYLPVKNNKSVHENSFEILRPFFESTEIIKVGHNIKFDIQVLHKYNIRVSSPIYDTMVAHYLINPDMRHNLDTLSESYLNYSPISIESLIGKKGKNQISMRDVSIDKITNYASEDADITLQLKGIFDKEIEVNNLNKIFYDIEIPMISVLSEMETEGIKIDTSYLEKLDKEFEEDLGKLKKEIFKKSGEEFNLNSPKQLGEILFDKLKLVSKPKKTKTGQYSTSEEVLSSLANDHKIIEDILEWRSLDKLQNTYVKSLPNEVSSITNRVHSSFNQTVTTTGRLSSNNPNLQNIPIRTANGQKIRRAFIPRNSDYILMAADYSQIELRVIASISNEENMIDAFVSNQDIHTMTASKIYNVDPENVTREQRGNAKTVNFGIIYGVSAFGLSQQTDLNRSESKAMIDNYFLNYPGLKKYMSDQIDFARNNGYVETIMGRRRYLQNINSQNNMLRSGAERNAINAPIQGSAADIIKIAMININSELKKQSLKSKMLLQVHDELVFDVHKSEKDQIKDIVKTTMESAVKLKVPLRIDLEFGKNWLEAH

SEQ ID NO: 135635 - protein, 628 aa, Unknown
  Bacterial polypetide isolated from the Sargasso Sea
IVTGDRDTFQLFSKNTKILYTKRGISEIDVVDEKFFTNKYGFKTEQYIEYLALKGDPSDNIPGLPGVGEKTATSLLKKYKTIEGIYKNLDDLTPKIKNSFEENKEMLKTSKDLATIRTDLKIKLPKVKLKDTAYFSDEVLEASQDKVKKLELNKYISSSNPHEEQNNENEHNDDLLITDQLEGLQLMINYEEQLYYINSDNYGKYSGKLSNLDYFISLNTQKLINKNEEGVSNLKFDAYDCILFLKDPSIRPDNLLSISKYLDRTSGITNKSEVLDYLLFFQKHFLYISKEVQTFKNEKKLFRIYENLDFPLLSILDSMNKKGVKVSKNKIETLSKEINYELDLLDKEIKNITKKDFNLNSPKQLSEILYVDMKYPIIKKTPKGAPSTDASVLEELSKSHELPKFILKYREYEKLRSTYIEGLKNEIVKNRVHTSYNLFGTTTGRLSSEKPNLQNIPNKTQIGQKIREFFIADSNHSFIIADYSQIELRVLAHLSKDKNMIGMLKNRDADIHSETAARIFNIDIDSVSKDMRRKAKEVNFGLIYGMESFGLSKSLDIPKKEAAELIDSYFNQFPKIKGYLDSIVKNAENSTFTETLYGRKRFIRELASSNFQLKAMGKRIAMNAPIQG

SEQ ID NO: 135636 - protein, 300 aa, Unknown
  Bacterial polypetide isolated from the Sargasso Sea
QYRTLAKLKSTYTDSLINIENPKTERIHTSYQQAVTSTGRLSSTEPNLQNIPIKTAEGRRIREAFIPEKGNVLISADYSQIELRIMAHLSQDKNLTHAFNNDIDVHSSTAAEVFGVSIDNVTQDQRRSAKAINFGLMYGMSAFGLTRQLGISRGEAQEYLDTYFARYTGVRDYMDNIKTQAKEDKYVETIMGRRLYLNEINAANGLRRQAAERAAINAPLQGSAADIIKKAMLDIDELILNEMPEVRMIMQVHDELVFECPKDNADKTMDKMKDTMEQTVELNIPLIAEAAIGSNWNEAH

SEQ ID NO: 135637 - protein, 434 aa, Unknown
  Bacterial polypetide isolated from the Sargasso Sea
AEDALITLKLYNILKPRLIKEKISYIYEKIDKPLINVLSLMEARGIKVDSKYLQKLSKEFLNESKKIEKLIFKITGKEFNIGSPKQLGEILFLEMKIKGGKKTKTGTYSTDSGILEDLSSQGHEIAKLVLEWREVSKLRSTYTDSLQEQIDTNTKRVHTSYATATTLTGRLSSNDPNLQNIPIRTNKGKQIRHAFIAEEKNQLISFDYSQIELRLAAEISKDENFIKSFINNEDIHSSTAKEIFNLSDAKPSSEHRRKAKAINFGILYGISPYGLAKQLKITNSEAKLYIENYFRKYPKIKEYMNYQIQFAKSSNFVSTIFGRRCNIKGINDKNFNVRGFAERQAINAPIQGSAADIIKLAMIEIHNNIISNQINAKMLLQVHDELIFEVNKNEINEVTKKIKIIMESSHLKYDDFKVPLIVDYGIGNTWGESH

SEQ ID NO: 135638 - protein, 399 aa, Unknown
  Bacterial polypetide isolated from the Sargasso Sea
EKPLIPILHQMEESGVLIDDIMLQDQSDEISSTLQELETKAYESAEKQFNLSSPKQLQEILFDNLKLPVIKKTPKGQPSTSEDVLQELAEEFELPKIILEHRTLSKLKSTYTEKLPKRISESTGRVHTSYHQANTATGRLSSNSPNLQNIPIRTSQGRRIRKAFIAPDGYRILAADYSQIELRIMAHLSQDQSLLEAFSSGEDIHTRTAAEVLNIAVNAVSSEQRRWAKAINFGLMYGMSAFGLGKQIGITRNAAQEYIDMYFSKYPNVHSFMEESRKNAREKGYIETLFGRRLYLPDINNKNAIRRKYAERSAINAPMQGSAADIIKLAMINVHHWLINDDVPAKIVMQVHDELILEVNENNSQEIKESIVKLMESVTKIDVPLIVDAAIGSNWEEAH

SEQ ID NO: 135639 - protein, 504 aa, Unknown
  Bacterial polypetide isolated from the Sargasso Sea
VGISLSFNEDKGFYIPINHKDIESGKRLKEQLEEKKVLEQIRLICSDSSILKIGQNLKYDIRLLKKYNITFNSIDDTMLLSYALDNGLTRHGMDDLSYRHLNHATIKYKDLVGTGKKQITFDYVSIDQATKYAAEDALITLKLYNILKPRLIKEKISYIYEKIDKPLIDVLSLMEEKGIKVDSKYLEKLSKEFLNESNKIEKLIFKITGKQFNIGSPKQLGEILFLEMNIKGGKKTKTGTYSTDSGILEDLSSQGHEIAKLVLEWREVSKLRSTYTDSLQEQIDTDTKRVHTSYATATTLTGRLSSNDPNLQNIPIRTNKGKQIRHAFIAEEKKQLISFDYSQIELRLAAEISGDENFITSFINNEDIHSSTAKEIFNLKDTKPSSEHRRKAKAINFGILYGISPYGLAKQLKINNSEAKLYIENYFQKYPKIKEYMNYQIQFAKSSNFVSTIFGRRCNIKGINDKNFNVRGFAERQAINAPIQGSAADIIKLAMIEIHKNISQ

SEQ ID NO: 135640 - protein, 549 aa, Unknown
  Bacterial polypetide isolated from the Sargasso Sea
VYIPIGHLEGDAKKNQLPLDMVLREIKPLLESKDRVKVGQNLKYDVNVLSNYGINVAPPYIDTMLQSYVLNSTATRHNMDDMARHYLGRETIHFEDVAGKGAKQILFSEVSIEAASEYAAEDADVTLQLHQELSGSMAKAPSLEKVLDEIEIPLVSVLAKVERNGALVDANMLLAQSEELGERLGGIRDSVWSIAGEEFNLDSTKQLQEILYEKQGLPVLKKTPGGKPSTAEPVLVDLARDYDLPAAILEYRSLSKLKTTYADKLPLQINEKSGRIHTSYHQAVTATGRLSSTNPNLQNIPIKSEEGRRIRQAFVPKAGSKIIAADYSQIELRIMAHLSKDEQLCRAFHEGIDVHRATAAEVFGSPPEAVSDEERRSAKAINFGLIYGMSAFGLARQLGVSRAVAQNYIDVYFDRYPGVAEYMAYSRSGAKEKGFVETVFGRRLYVPEIEAKHAQRRQAAERTAINAPMQGTAADVIKIAMCNVQKWLDDCDINAKMIMQVHDELVFEVETSHVDAVSSRVKELMETAVELDVLLEVEVGVGENWDQAH

SEQ ID NO: 135641 - protein, 659 aa, Unknown
  Bacterial polypetide isolated from the Sargasso Sea
NQLLDFLAKMEFRTLTKRISQKFDVEMPTSHILDSDNKISYPEQIAFDNKKYEHIKNSEQLQTWINKIYEIGYVAVDTETTSLNDMLAELAGISLAIEVGSACYIPLGHKEGQNDDLFENAQLVEGQLDLEFVLECLRPILEDDSILKIGQNIKYDAKVLSRYGVMITAFDDTMLLSYALHGGLHNHGMDALSERYLDHSPIAIKTLIGSGKSAITFDQVKIEDAVAYAAEDADITLRLWKIFKQKLHRSKVTKVYETLERPLVSVLAQVERNGIKVDRETLSRMSNAFAQKMAGLETEIYEMAGESFNVGSPKQLGEIMFDKLGYEGGKKGKNGAYATGADILEDLATNYDFPKRVLDWRQLSKLKSTYTDALQDHINPNTGRVHTSYSIAGAVTGRLSSTEPNLQNIPVRTEDGRRIREAFVAEDGNILVSLDYSQIELRILAHIAQIDALKQAFHDGLDIHAMTASEMFDVPLDEMTSEIRRQAKAINFGVIYGISGFGLARNLRIPRSEAQGFIDRYFERFPGIKEYMDKTVKFSKENNYVETLFGRVIHTPEINSKGPMAGFAKRAAINAPIQGTAADIIRRAMIRVPDATKDLPAKMLLQVHDELLFEVKEEYCEELIAQVQSVMEGASLPFLKMDIPLSVDAGRGINWAEAH

SEQ ID NO: 135642 - protein, 821 aa, Unknown
  Bacterial polypetide isolated from the Sargasso Sea
SEYKANRPPMPEDLVQQIEPIHRIISLMGIKLIMIPGVEADDVIGTLAEQARQKKLNTVISTGDKDMTQLVCDNVSVVNTMSGELLDENGVMNKFGVGPELITDYLALIGDKSDNVPGVDKVGPKTAVKWLNEYKNIEGIKKNAESIGGKVGENLRSSIETLDLAHELVKIKTDVPLEIGIEDLAVSESDSEQLSEVYKELEFNSWLQEVPEKKIVKPEVNSSYVCISTEKSLKELIKKASKAKTIALDTETTGLDYMDTELVGISLSYQAGEAYYIPLKHDDDSVDQLDLDIVLKELRPLLEGSSNKIIGQNIKFDRNVLAKYGVDIASIKNDTMMMSYVLDASATRHNLDALSSYYLNYKTSTFEDVAGKGVKQITFDKVPIEAATNYAAEDADITLRLYEELNPRLEGEDSLNKLNDEIEIPLIEVLSEMEQNGAILNSKILNSQSKDLESRIKKLEEKAYQLAGEEFNLGSTKQLREIFFEKLKYRIIKKTPGGQPSTDEKVLAELAEEYELPKVLLEHRTLSKLKSTYTDKLPNQVSLSTGKVHTSFHQAVTTTGRLSSSDPNLQNIPIRTEDGRRIRQAFEPSKGNKFISADYSQIELRVMAHMSKDAGLLEAFREGEDVHSKTASEVFDVSIKDVTSDLRRNAKAINFGLIYGISAFGLGKQLGISRNLAAEYMAMYFEKYPDVKKYMESTKEFASQNGYVETLFGRRLYLRDINATNAMRRQASERAAINAPVQGTAADIMKIAMINMHKAIKMEKSEAKLILQVHDELILDTPKDEIDKIVSLITDSMMGAANLDVPLEIDIGIGDNWDQAH

SEQ ID NO: 135643 - protein, 294 aa, Unknown
  Bacterial polypetide isolated from the Sargasso Sea
KLKSTYTDSLINIENPKTERIHTSYQQAVTSTGRLSSTEPNLQNIPIKTAEGRRIREAFVPEKGNVLISADYSQIELRIMAHLSEDSNLTHSFNNNIDVHSSTAAEVFGVSIENVTQDQRRSAKAINFGLMYGMSAFGLTRQLGIPRGEAQEYLDTYFARYTGVRDYMNNIKAQAKEDKFVETIMGRRLYLNEINAANGLRRQAAERAAINAPLQGSAADIIKKAMLDIDELLLNEMPDVKMIMQVHDELVFECPKDNADTVMQKMKDTMEQTVDLNIPLIAEAAIGSNWNEAH

SEQ ID NO: 135644 - protein, 194 aa, Unknown
  Bacterial polypetide isolated from the Sargasso Sea
MFKVFKKEIELNGKKISLETGKIARQADGAIIAKCGETVVLATVVGAKKINPDVDYFPLSVNYQEKYYAAGKIPGGYFKREARPTESETLISRLIDRPIRPLFPDEFKNEVQLLPTVISYDKENEADILSIIASSAALAISGMPFMGPVGASRVGFVEGKYILNPSKKELENSKLDLVVAGTKDAVLMVESETS

SEQ ID NO: 135645 - protein, 258 aa, Unknown
  Bacterial polypetide isolated from the Sargasso Sea
TVMSSDKKQNPDIASMIGTSAALTISGVPFDGPMGAARVGFIDGEYVLNLSFEELNDSYLDMVVAGTDEAVLMVESEAKELNEDLMLGAVLFGHQEMKAVIIACNELKEKTSKEAWNIESVKEENNYYDELQSNHKDEIESAFKISNKAERNEALKEIRDKIKENYEELDELDMGKLMNEFKKLEKNIVRGNILNNQPRIDGRDQDTVRPIFVETNILPGAHGSALFTRGETQAIVAATLGSSRDAQRIESIEGEDSD

SEQ ID NO: 135646 - protein, 153 aa, Unknown
  Bacterial polypetide isolated from the Sargasso Sea
MNEVISREIKWGDQVLSIETGKVAKQATASTIVRYGETVVMANVTAAKQAKPDIDFFPLTVNYQEKFYAAGKIPGGFFKREGRPTEFETLTSRLIDRPIRPLFPEGFKNETQVILTVLSHDGETNPDIIAMIAASSALTLSGIPFMGPIAGCR

SEQ ID NO: 135647 - protein, 310 aa, Unknown
  Bacterial polypetide isolated from the Sargasso Sea
TLGSKRDEMIIDSMDEDFKKSYYMHYNFPPYCVGEVGRIGFTSRREIGHGNLAQRAIKPVLPDYDDFPYTMRIVSEIMESNGSSSMASVCGGSLALMSAGAPLKAPVAGIAMGLITDGERHAILSDILGMEDHLGDMDFKIAGTNDGITAIQLDLKIEGLSFEIMEKALQQAKEGRMHILGKMNEVMPKPNDISPYAPRIMSVSINPEKIGALIGPGGKNIKKIIEDTECEVNVDDDGLVTIAGMNTEKCNEALELVKAITFEPEVGMEFDGKVTRLMSFGAFVEFAPGREGMVHISELEWHRVEKVEDV

SEQ ID NO: 135648 - protein, 310 aa, Unknown
  Bacterial polypetide isolated from the Sargasso Sea
ALAISGLPFQGPIGASRVGYKDGKYLLNPSIEELKESELDLVVAGTKDAVLMVESETSGLSEKVMLDAVKFGHENFVPIIEAIEKLAKKAGKPKWEVEEIDHSQVKNKISEKFEKDLRSAFKEIDKKKRSTAISEIETKCKEMFAEDENVTENQAMAQLKSLEKDIVRTAILKDKKRIDGRGLADVRQIKCEVGVLPRTHGSALFTRGETQALVVTTLGMTDDEQRLESLEGMQRSNFMLHYNFPPFSVGECGRIGTGRREIGHGKLAWRAINSSLPSKENFPYTLRVVSEITESNGSSSMATVCGTSLS

SEQ ID NO: 135649 - protein, 113 aa, Unknown
  Bacterial polypetide isolated from the Sargasso Sea
MFKIHKEEIELDGKKITLETGKIARQADGAIIATHGETVVIATVVGAKKVDPETDYFPLSVNYQEKYYAAGKIPGGYFKREARPTESETLTSRLIDRPIRPLFPDGFRNEVQV

SEQ ID NO: 135650 - protein, 330 aa, Unknown
  Bacterial polypetide isolated from the Sargasso Sea
LPFQGPIAASRVGYINNNYVLNPSKEKLKESKLDLVVAGTKDAVLMVESEASVLTEKQMLDAVKFGHEKFVPIIKAIESLAKKSSKEAWKIEEKDYSELKKKISKELTKDLEKAFSEKDKKKRSELVNLATEKCKSLFEGDDTYSELEISLQLKNLEKDIVRTKILKSKQRIDGRGLSDVRPIKCEVGVLPRTHGSALFTRGETQALVTTTLGTTEDEQRIESLEGQKRVRFMLHYNFPPFSVGEVGRIGTGRREVGHGKLAWRALNSSLPEKEKFPYTLRLVSEITESNGSSSMATVCGASLALMDAAVPIIEPVAGIAMGLIKDKKEY

SEQ ID NO: 135651 - protein, 155 aa, Unknown
  Bacterial polypetide isolated from the Sargasso Sea
MFKVFKKEIDFGGKKITLETGKVARQADGAIIATCGETVVLATAVGAKKVNPEVDYFPLSVNYQEKYYAAGKIPGGYFKREARPTESETLISRLIDRPIRPLFPDEFKNEVQVLPTVISYDKENEADILSIIASSAALSISGMPFLGPSWSIKSW

SEQ ID NO: 135652 - protein, 318 aa, Unknown
  Bacterial polypetide isolated from the Sargasso Sea
PTKENLSNSSLELVVAGTKEGVLMIESEAHELSEQQMLDAVVLGQDSYKPVIEAIISLAKKAAKEPWKIKEKDEELTNLPNIINEEYGNKFIEAYKITEKQNRSEKLSLIRSEISEKFSSETISSVLLSDAIKNVEKDIVRGELINTGNRIDGRDTKTVRPIVCETGILERTHGSALFTRGETQAIVVSTLGTGQDEQRIDAIDGEYTENFMLHYNFPPYSVGEVGRVGSTSRREIGHGKLAWRAIHPMLPSKEKFPYTYRVVSEITESNGSSSMATVCGTSMSLMDAGVPLERPVAGIAMGLIKENDKYVILSDILR

SEQ ID NO: 135653 - protein, 196 aa, Unknown
  Bacterial polypetide isolated from the Sargasso Sea
MFKIHKEELEVNGKKLTLETGKIARQADGAIIASLGETVVIATAVGAKKVAEGQDYFPLSVNYQEKYYAAGKIPGGYFKREARPTEAETLISRLIDRPIRPLFPSGFMNEVQVLPTVLSYDSKNQPDILSIIASSAALAISGLPFMGPIAASRVGYKDGKYLLNPSVEELKESDLDLVVAGTKEAVLMVESETSGL

SEQ ID NO: 135654 - protein, 167 aa, Unknown
  Bacterial polypetide isolated from the Sargasso Sea
MFKVYKKEIEVAGKKISLETGKVARQADGAIIATCGETVVLATVVGAKKVNPDVDYFPLSVNYQEKYYAAGKIPGGYFKREARPTESETLISRLIDRPIRPLFPDEFKNEVQLLPTVISYDKENEPDILSIVASSAALAISGMPFMGPVGASRVGFVDGNYVLNPSK

SEQ ID NO: 135655 - protein, 260 aa, Unknown
  Bacterial polypetide isolated from the Sargasso Sea
TESNGSSSMATVCGTSLALMDAGVPIKEPVAGIAMGLIKEGKDFSVLSDILGDEDHLGDMDFKVAGTKDGITSLQMDIKITGITFEIMEQALSQAKEGRVHILGEMNKALSKSREDVGKYTPKMEKITVDKKDIAAVIGKGGASIREIVEKSGAKVDVNDEGVVTVSAPDEESRNSAMQMIKDITAKPELDKIYSGKVMKIMEFGAFVNFLGKQDGLVHISELANKRVAKVTDVVKEGDEVKVKVIGFDRGKVKLSIKQV

SEQ ID NO: 135656 - protein, 186 aa, Unknown
  Bacterial polypetide isolated from the Sargasso Sea
MFKEYKKEIDLNGKKVSLETGKIARQADGAIIAKCGETVVLATVVGAKKVNPDMDYFPLSVNYQEKYYAAGKIPGGYFKREARPTESETLISRLIDRPIRPLFPDEFKNEVQLLPTVISYDKENEADILSIIASSAALAISGMPFMGPIGASRVGFIDGKYVLNPSKKELENSKLDLVVAGTKDAV

SEQ ID NO: 135657 - protein, 38 aa, Unknown
  Bacterial polypetide isolated from the Sargasso Sea
KREARPTEAETLISRLIDRPIRPLFPSGFMNEVQVLPT

SEQ ID NO: 135658 - protein, 217 aa, Unknown
  Bacterial polypetide isolated from the Sargasso Sea
PALIKGITALQMDMKITGLPVSIISDAIKKARPARLHILEKMQAAIDKPQESLSPHAPRLLSFRIDPELIGTVIGPGGRTIKGITERTNTKIDIEDGGIVTIASHDGAAAEEAQKIIEGLTRKVHEGEIFSGVVTRIIPIGAFVEILPGKEGMVHISQLSEARVERVEDVVRQGDEVTVRVREIDSRGRINLTLRGVGQNNGMSYPEPTPTPVAPLN

SEQ ID NO: 135659 - protein, 298 aa, Unknown
  Bacterial polypetide isolated from the Sargasso Sea
GFIDNKNVLNPTKKELENSKLDLVVAGTKDAVLMVESEASGLTEKQMLEAVKFGHESFANVIKGIEKLAKKASKEKWKIEEKDFSEVSKKIKKELTKDLEKAFTEKDKKKRSDLISSAGETCKSLFKDDETLLEHEVMTQLKNLEKDIVRTRILKSKKRIDGRGLSDVRPIKCQVGILPRVHGSALFTRGETQAIVTTTLGTSDDEQRIESLEGLKRERFMLHYNFPPFSVGETGRIGTGRREVGHGKLAWRALNSSLPKKENFPYTLRIVSEITESNGSSSMATVCGSSLALMDAAV

SEQ ID NO: 135660 - protein, 263 aa, Unknown
  Bacterial polypetide isolated from the Sargasso Sea
RIKGKKISLETGKIARQADGAIIAKCGETVVLATVVGAKKINPDVDYFPLSVNYQEKYYAAGKIPGGYFKREARPTESETLISRLIDRPIRPLFPDEFKNEVQLLPTVISYDKENEADILSIIASSAALAISGMPFKGPVGASRVGFVDGKYVLNPSKKELENSKLDLVVAGTKDAVLMVESETSGLTEEEMLNAVKFGHENFVPVINMIEELAAECKKPDWVVEKKDLSEVKKKIEDEFTNELKKAFSIKDKQERSNLISEI

SEQ ID NO: 135661 - protein, 110 aa, Unknown
  Bacterial polypetide isolated from the Sargasso Sea
MFKEFKKEIELNGKKIKLETGKIARQADGAVIATCGETVVLATVVGAKKVNPEVDYFPLSVNYQEKYYAAGKIPGGYFKREARPTESETLISRLIDRPIRPLFPDEFKNE

SEQ ID NO: 135662 - protein, 139 aa, Unknown
  Bacterial polypetide isolated from the Sargasso Sea
MFKEFKEEIDFGGKKVILETGKIARQADGAVIATCGETVVIATVVGAKKVNPETDYFPLSVNYQEKYYAAGKIPGGYFKREARPTEAETLISRLIDRPIRPLFPENFKNEVQILPTVLSYDNENEADILSIIACSAALS

SEQ ID NO: 135663 - protein, 105 aa, Unknown
  Bacterial polypetide isolated from the Sargasso Sea
MFKVVKKEIDVSGKKISLETGKIARQADGAIMAQCGETVVLATVVGAKKVNPDIDYFPLSVNYQEKYYAAGKIPGGYFKREARPTESETLISRLIDRPIRPLFPD

SEQ ID NO: 135664 - protein, 236 aa, Unknown
  Bacterial polypetide isolated from the Sargasso Sea
VAPERLRNTLSIKDKQERYESLDKLHDEIIIEILGDDPESDTVKEFSQIFSDIKKGEMRSRLINENIRIDGRKPEDIRPITCETKVLPRTHGSALFTRGETQALATTTLGAREDEKMIDSLDGISFKRFMLHYNFPSFCVGETSPPRGPGRREIGHGTLAERGLSTLIPGKTEFPYTIRLVSEILESNGSSSMATVCAGSLALMDAGVPLKAATAGIAMGLISDGKNHVILSRHSW

SEQ ID NO: 135665 - protein, 195 aa, Unknown
  Bacterial polypetide isolated from the Sargasso Sea
MFKVYKKEIEVAGKKISLETGKVARQADGAIIATCGETVVLATVVGAKKVNPDMDYFPLSVNYQEKYYAAGKIPGGYFKREARPTESETLISRLIDRPIRPLFPDEFKNEVQLLPTVISYDKENEPDILSITASSAALAISGMPFMGPVGASRVGFIDGKYVLNPSKAELEKSSLDLVVAGTKDAVLMVESESSG

SEQ ID NO: 135666 - protein, 228 aa, Unknown
  Bacterial polypetide isolated from the Sargasso Sea
PSKESFPYTFRILSEITESNGSSSMATVCGTSLALMDAGVPIKEPVAGIAMGLIKEGDDFSVLSDILGDEDHLGDMDFKVAGTKDGITSLQMDIKITGITFEIMEKALNQAKDGRIHILGEMNKALDKSRADVGKHTPKMEKITVDKKDIAAVIGKGGATIREIVEKSGAKVDVNDDGVVTVAAPDEESRNIAMQFIKDITAKAELNKIYNGKVMKIMEFGAFVNFLG

SEQ ID NO: 135667 - protein, 270 aa, Unknown
  Bacterial polypetide isolated from the Sargasso Sea
ALVVSTLGTGQDEQRIDAIDGEYTENFMLHYNFPPYSVGEVGRIGSTSRREIGHGKLAWRAIHPMLPSKEKFPYTYRVVSEITESNGSSSMATVCGTSMSLMDAGVPLERPVAGIAMGLIKEDDKYVILSDILGDEDHLGDMDFKVAGTSEGITSLQMDIKITSITAEIMEEALAQAKDGRFHILVEMAKAIDKPKQSISQYAPTITNLQINKDKIREVIGKGGAVIREISETTGAKIEINDEGLVSIAAVDQKSGNDALEWIKGMSKSQ

SEQ ID NO: 135668 - protein, 208 aa, Unknown
  Bacterial polypetide isolated from the Sargasso Sea
MFKISKEEIDVNGKKIILETGKVARQADGAIIATCGETVVIATAVGAKKLNEGQDYFPLSVNYQEKYYAAGKIPGGYFKREARPTEAETLISRLIDRPIRPLFPNSFMNEVQLLPTVLSYDGENQPDILSIIASSAALSISGLPFQGPIAASRVGYKDGKYLLNPSPNELKDSELDLVVAGTKEAVLMVESETSGLSEKVMLDAVKFG

SEQ ID NO: 135669 - protein, 143 aa, Unknown
  Bacterial polypetide isolated from the Sargasso Sea
MFKVVRKEIEVSGKKISLETGKIARQADGAIIAQCGETVVLATVVGAKKVNPDMDYFPLSVNYQEKYYAAGKIPGGYFKREARPTESETLISRLIDRPIRPLFPDEFKNEVQLLPTVISYDKENEPDILSIIASSAALAISGM

SEQ ID NO: 135670 - protein, 253 aa, Unknown
  Bacterial polypetide isolated from the Sargasso Sea
EKFMLHYNFPPYSVGEVGRTGFTSRREVGHGKLAWRAIKAVLPDSEEFDYTIRLVSEITESNGSSSMATVCGSSLALMDAGVPIKNAVSGIAMGLIKEGDDFAVLSDILGDEDHLGDMDFKVAGTKDGITSLQMDIKITGITTEIMEKALNQAHAGRMHILSEMNKTIDAPRTELGPYTPRSEMIKIQRDNIGAVIGKGGAVIKDIIAESGAKVDISDNGTVKISGTNKEMIQSAIDMINGIIQEPEVGDIFE

SEQ ID NO: 135671 - protein, 234 aa, Unknown
  Bacterial polypetide isolated from the Sargasso Sea
IASSAALAISGLPFQGPVAASRVGYINNEYVLNPSKEQLKESKLDLVVAGTKDAVLMVESEASGLTEGQMLDAVKFGHEKFAPVIKAIENLKKKCAKEEWIIEKKDYSKLKDKISKELTKDLEKAFSEKDKKKRSELVNLATEKCKSLFEGDETYSELEIMLQLKNLEKDIVRTKILKTKKRIDGRGLSDVRTIKCEVGVLPRTHGSALFTRGETQALVTTTLGMTDDEQRIES

SEQ ID NO: 135672 - protein, 211 aa, Unknown
  Bacterial polypetide isolated from the Sargasso Sea
MFKVFKKEIELNGKKISLETGKIARQADGAIIAKCGETVVLATVVGAKKINPDVDYFPLSVNYQEKYYAAGKIPGGYFKREARPTESETLISRLIDRPIRPLFPDEFKNEVQLLPTVISYDKENEADILSIIASSAALAISGMPFKGPVGASRVGYIDGKYVLNPSKKELENSKLDLVVAGTKDAVLMVESETSGLTEEEMLNAVKFGHEN

SEQ ID NO: 135673 - protein, 257 aa, Unknown
  Bacterial polypetide isolated from the Sargasso Sea
TIHDACYDKCYSIAKKGTSKAERSLAFSNLKEEVKALFTEEEIEENVKLIEKYFSKSQKEAIRELTLSEGVRLDGRKTDEIREIWSEVDYLPSTHGSAIFSRGETQALATVTLGTSRESNKIDMPSYEGEETFYLHYNFPPFCTGEARPLRGTSRREVGHGNLAQRGLKGMIPENCPYTVRVVSEVLESNGSSSMATVCSGTLALMDAGIQIKRPVSGIAMGLISDGERYAVLSDILGDEDHLGDMDFKVTGTTEGI

SEQ ID NO: 135674 - protein, 233 aa, Unknown
  Bacterial polypetide isolated from the Sargasso Sea
MDTGRIARQATGSVMVTMGSTSVLCTVVAEQKAKAGQAFFPLSVHYVEKTYSVGKIPGGFFKREGRPSEKETLTSRLIDRPIRPLFEDGFMNEVQVVCTVMSADKDTDPDIPAMIGTSAALALSGCPFNGPIGGARVGFTESSGYLLNPSYTALADSQLDMVVAGTKDAVLMVESEAKELTEDQMLGAVLYAHQEMQTVINAINELVCEAGKPRWDWQAPAADVELVAAVEAA

SEQ ID NO: 135675 - protein, 288 aa, Unknown
  Bacterial polypetide isolated from the Sargasso Sea
LVVAGTSQGVLMVESEANQLSEEQMLEAVLVGQETYKEVINAIIALAKKAAKNPWEIAEKDQDIKELPSIIEKSYKKNFEDAYKIQEKQKRSEELSNLRIQIEEEFVSEKLSSVIVADAIKSVEKDIVRGELLKSGKRIDGRDTKTVRPIECEVGVLDRTHGSALFTRGETQALVVTTLGTGLDEQRIDAIEGEYKENFMLHYNFPPYSVGEVGRAGSTSRREIGHGKLAWRAIHPMLPSAEKFPYTYRVVSEITESNGSSSMATVCGTSLSMMDAGVPLEKPIAGIA

SEQ ID NO: 135676 - protein, 104 aa, Unknown
  Bacterial polypetide isolated from the Sargasso Sea
MYKEFKEEIDFGGKKLTLATGKIARQADGAIIATWGETVVIATVVGAKKVNPETDYFPLSVNYQEKYYAAGKIPGGYFKREARPTESETLISRLIDRPIRPLFP

SEQ ID NO: 135677 - protein, 287 aa, Unknown
  Bacterial polypetide isolated from the Sargasso Sea
CDNPEQRLDLVIAGTKDAVMMVESEAYELSEKEMLGAVEYGHKMMQPVIDLIVSMAEEGANEPFEFTASDTSALLSAIKKAGEKDLRKAFSLTDKQKRQAAINEAVEKIKASLSEDQLEDENLESCIKAVESDIVRGDILSKGSRIDGRDLNTVRPIVCETSLLPRTHGSALFTRGETQGLVVTTLGTGDDEQIIDALHGTGRSNFMLHYNFPPYSVGECGRNAGPGRREIGHGKLAWRALQAVLPAATDFPYTIRVVSEITESNGSSSMASVCGGSLSMMDAGVPL

SEQ ID NO: 135678 - protein, 300 aa, Unknown
  Bacterial polypetide isolated from the Sargasso Sea
AQQLSEEQMLEAVVLGQETYKEVIDAIINLAKKAAKDPWDIPEKEEEIKNLPIEIEKKYKAKFIDAYKIQEKQKRSETLNELRSEISENYESETLSSVIVGDATKSIEKDIVRGELLKSGKRIDGRDTKTVRPINCEVGILERTHGSALFTRGETQALVVTTLGTGQDEQRIDAIEGEYKENFMLHYNFPPYSVGEVGRVGSTSRREIGHGKLAWRAIHPILPSSEKFPYTYRVVSEITESNGSSSMATVCGTSLSLMDAGVPLEKPIAGIAMGLIKEDSNYIVLSDILGDEDHLGDMDL

SEQ ID NO: 135679 - protein, 144 aa, Unknown
  Bacterial polypetide isolated from the Sargasso Sea
MFKIHKEELKVNDQKLTLETGRIARQADGAIIATLGETVVIATAVGAKKVAEGQDFFPLSVNYQEKYYAAGKIPGGYFKREARPTEAETLISRLIDRPIRPLFPSGFMNEVQILPTVLSYDSKNQPDILSIIASSAALAISGLP

SEQ ID NO: 135680 - protein, 282 aa, Unknown
  Bacterial polypetide isolated from the Sargasso Sea
SVNYQEKYYAAGKIPGGYFKREARPTEAETLISRLIDRPIRPLFPSSFLNEVQLLPTVLSYDGENQPDVLSIIASSAALAISGLPFQGPIAASRVGYKDGKYLLNPSLEELKESELDLVVAGTKNAVLMVESETSGLSEKVMLDAVKFGHEKFVPIIEAIEKLAKKAGKPKWEVEEIDHSSVKKKIAEKFEVGLRSAFKEIDKKKRSTAISEIETQCKEMFAEDESLTENQVMAQLKSLEKDIVRTAILKDKKRIDGRGLADVRQINVELVYLPRTMDLLYH

SEQ ID NO: 135681 - protein, 260 aa, Unknown
  Bacterial polypetide isolated from the Sargasso Sea
ENFMLHYNFPPYSVGEVGRVGSTSRREIGHGKLAWRAIHPMLPSAEKFPYTYRVVSEITESNGSSSMATVCGTSLSLMDAGVPIEKPIAGIAMGLIKEDKKYIILSDILGDEDHLGDMDFKVAGTEDGITSLQMDIKITSITSEIMKEALAQAKEGRLHILDEMSKSIKTFRSKISDYAPTIKTFQVQKDKIRDVIGKGGAVIREITEKTGAKIEINDEGTVSIASIDNESGQAAIDWINSIVEEPEIGKIYSGKVVKLM

SEQ ID NO: 135682 - protein, 255 aa, Unknown
  Bacterial polypetide isolated from the Sargasso Sea
SMATVCGTSLALMDAGVPIKEPVAGIAMGLIKEGDDFSVLSDILGDEDHLGDMDFKVAGTKDGITSLQMDIKITGITFEIMEQALSQAKDGRVHILTEMNKALSSSRSDVGKHTPKMEKITVDKKDIAAVIGKGGATIREIVEKSGAKVDVNDEGVVTVAAPDEQSRNSAMQMIKDITAKAELNKIYSGKVMKIMEFGAFVNFLGKQDGLVHISELADKRVAKVADVVKEGDEVKVKVIGFDRGKVKLSMKQAAE

SEQ ID NO: 135683 - protein, 148 aa, Unknown
  Bacterial polypetide isolated from the Sargasso Sea
MFKVYKKEIEVAGKKISLETGKVARQADGAIIATCGETVILATVVGAKKVNPDMDYFPLSVNYQEKYYAAGKIPGGYFKREARPTESETLISRLIDRPIRPLFPDEFKNEVQLLPTVISYDKENEADILSITASSAALAISGMPFMGP

SEQ ID NO: 135684 - protein, 215 aa, Unknown
  Bacterial polypetide isolated from the Sargasso Sea
TEKGITALQMDMKIKGLPVSVISDAIKKARPARLHILEKMQEAIDKPQESLSPHAPRLLSFRIDPELIGTVIGPGGRTIKGITERTNTKIDIEDGGIVTIASHDGAAAEEAQKIIEGLTRKVHEGEIFSGVVTRIIPIGAFVEILPGKEGMVHISQLSEARVERVEDVVRQGDEVTVRVREIDSRGRINLTLRGVAQNSGMSYPEPTPTPVAPLN

SEQ ID NO: 135685 - protein, 295 aa, Unknown
  Bacterial polypetide isolated from the Sargasso Sea
VNPTIQELKNSKLDLVVAGTKNGVLMVESEAQQLSEEKMLEAVVLGQDSYLPVIDAIISLAKQAAKDPWDIPEKDNEISNLPKLIGDEYGSKFSEAYKLTEKQLRVEKLNVLRSEIEEKHLSEILTSVIVSDAIKSVEKDIVRGDLLKTGNRIDGRDTKTVRPIVCETGILERTHGSALFTRGETQALVVTTLGTGMDEQRIDAIEGEYKENFMLHYNFPPYSVGEVGRAGSTSRREIGHGKLAWRAIHPMLPSNDKFPYTYRVVSEITESNGSSSMATVCGTSMSLMDAGVPIE

SEQ ID NO: 135686 - protein, 312 aa, Unknown
  Bacterial polypetide isolated from the Sargasso Sea
PDEFKNEVQLLPTVISYDKENEADILSIIASSAALAISGMPFKGPVGASRVGFIDGKYVLNPSKKELENSKLDLVVAGTKDAVLMVESETSGLTEEEMLNAVKFGHENFVPIIKMIEELAAECKKPDWVVEKKDLSEVKKKIEDEFTEELKKAFSIKDKQERSNLISEITDKAKIFFEDNESFTDLDVNSELKNLEKRIVRTDILKNKNRIDGRGLSDVRPIMCEVGILPRTHGSALFTRGETQAIVTTTLGTSDDEQRIESLEGLQRERFMLHYNFPPFSVGETGRIGTGRREIGHGKLAWRANNSSLPSK

SEQ ID NO: 135687 - protein, 141 aa, Unknown
  Bacterial polypetide isolated from the Sargasso Sea
MFKLYKKEIEVAGKKISLETGKLARQADGAIIATCGETVVLATVVGAKKVNPDMDYFPLSVNYQEKYYAAGKIPGGYFKREARPTESETLISRLIDRPIRPLFPDEFKNEVQLLPTVISYDKENEPDILSITASSAALAIS

SEQ ID NO: 135688 - protein, 241 aa, Unknown
  Bacterial polypetide isolated from the Sargasso Sea
MFKVHKEEIKISGKKITLETGKIARQADGAIIATCGETVVIATAVGAKSLKDGQDYFPLSVNYQEKYYAAGKIPGGYFKREARPTEAETLISRLIDRPIRPLFPSSFMNEVQLLPTVLSYDGENQPDILSIIASSAALAISGLPFQGPIAASRVGYKEGKYLLNPSPAELEESDLDLVVAGTKDAVLMVESETSGLTEKVMLDAVKFGHENFIPIIKAIESLAKKAGKTKWIVEEIDHSEV

SEQ ID NO: 135689 - protein, 197 aa, Unknown
  Bacterial polypetide isolated from the Sargasso Sea
MFKIQKEELEVNGKKLTLETGKVARQADGAILATLGETVVIATAVGAKKVAEGQDYFPLSVNYQEKYYAAGKIPGGYFKREARPTEAETLISRLIDRPIRPLFPAGFMNEVQVLPTVLSYDSENQPDILSIIASSAALAISGLPFLGPIAASRVGYKDGKYLINPSVEEMKESELDLVVAGTKEAVLMVESETSGFI

SEQ ID NO: 135690 - protein, 317 aa, Unknown
  Bacterial polypetide isolated from the Sargasso Sea
FPEGFLNEVQVLPTVLSYDGDNQPDILSIIASSAALAISGIPFQGPIAASRVGFNKGKYLLNPSIKDLEESQLDLVVAGTNDAVLMVESETSGLTEKEMLGAVKFGHEKFNPIIKAIEKLKNKVGKPQWKIESKDHSKIKDKIAKALEKDLRKAFKEIDKKKRSLAISEAETKCKEMFVDDESVTENQARSQLKSIEKDIVRTAIMKDKKRIDGRGLSDVRQIKCEVGILPRTHGSALFTRGETQALVVTTLGMSDDEQRLESLEGMKRSSFMLHYNFPPFSVGECGRIGTGRREIGHGKLAWRAINSSLPKKENFP

SEQ ID NO: 135691 - protein, 287 aa, Unknown
  Bacterial polypetide isolated from the Sargasso Sea
IGLIDDKFIVNPTIDEIKNSKLDLVVAGTKNGVLMVESEAHQLSEEKMLEAVILGQESYLPVIDAIISLAKKAAKEPWDIPQKDSEIAKLPKLISDEYGDKFDDAYLVTEKQKRVERLSELRAKIEEQYLSDSLTSVIISDATKSVEKDIVRGGLLKTGNRIDGRDTKTVRPIVCETGILNRTHGSALFTRGETQALVVTTLGTGMDEQRIDAIEGEYKENFMLHYNFPPYSVGEVGRAGSTSRREIGHGKLAWRAIHPMLPSNDQFPYTYRVVSEITESNGSSSMA

SEQ ID NO: 135692 - protein, 274 aa, Unknown
  Bacterial polypetide isolated from the Sargasso Sea
INNKPVINPNVSEMENSDLDLIVAGTTDAILMVESEAKELSEEVMLDCVMKGHDEIKKIIDGINDLVKEAGKEKWILDEITKDETLKNKVIEIAGGDIESAYSIVEKSERSTRLAEIKQNTIDQIIESDGEISKDDVASEIKKIEKETVRSKILNGEPRIDGRDTKTVRDINVDINILERTHGSALFTRGETQSIVVTTLGSERSSQIIDALEGEYKDKFMLHYNFPPYSVGEVGFMGSPKRREIGHGKLARRALEAVLPNMAEYPYTIRIVSE

SEQ ID NO: 135693 - protein, 288 aa, Unknown
  Bacterial polypetide isolated from the Sargasso Sea
LGKSDLNIFMAASKDAILMVEGEANNISESVMLDALWYGHEQIQPIISMQEELMQSVGKKKRNVEAPETDIELKNKIEAVAPERLRKALSIKDKQERYESLDTLHDEMSIEILGDGPESDSVKEFRQIFSDIKKEEMRSRLIKENIRLDGRKPEEIRPITCETKVLPRTHGSALFTRGETQALAVTTLGAREDEKMIDSLDGISFKRFMLHYNFPSFSVGETSVPRGPGRREIGHGTLAERGLSTLIPGKSEFPYTIRLVSEILESNGSSSMATVCAGSLALMDAGVP

SEQ ID NO: 135694 - protein, 203 aa, Unknown
  Bacterial polypetide isolated from the Sargasso Sea
DMDFKVAGSEKGITALQMDIKIDGINEKIMDQALTSAKDARMHILEKMNEVLSKPKELASDAPSMQKFMVNKDKIKEIIGKGGAVIKSIQEESGAVVDINDSGEVSVFGDNQAKMQVALDIIDKIIEEPEVDKVYEGTVVKIVDFGAFVNILPGKDGLLHISEISEERTEDVSAVLEEGQKVTVKLIGFDRGKMKLSIKALSK

SEQ ID NO: 135695 - protein, 172 aa, Unknown
  Bacterial polypetide isolated from the Sargasso Sea
MFKIIKKEIELNGKKISLETGKIARQADGAIIAKCGETVVLATVVGAKKVNPDMDYFPLSVNYQEKYYAAGKIPGGYFKREARPTESETLISRLIDRPIRPLFPDEFKNEVQLLPTVISYDKENEADILSIIASSAALAISGMPFMGPIAASRVGFIDGKYVLNPSKKELEN

SEQ ID NO: 135696 - protein, 200 aa, Unknown
  Bacterial polypetide isolated from the Sargasso Sea
MATVCGTSLALMDAGVPIKEPVAGIAMGLIKEGDDFSVLSDILGDEDHLGDMDFKVAGTKDGITSLQMDIKIIGITFEIMEQALNQAKEGRVHILGEMNKALSASRSDVGKHTPKMEKISVDKKDIAAVIGKGGATIREIVEKSGAKVDVNDEGVVTVAAPDEESRSIAMQMIKDITAKAEMNKIYSGKVMKIMEFGAFV

SEQ ID NO: 135697 - protein, 322 aa, Unknown
  Bacterial polypetide isolated from the Sargasso Sea
SDILSIIASSAALAISGLPFQGPIAASRVGYVNEKYILNPSKEVLKDSKLDLVVAGTKDAVLMVESEASGLSEKQMLDAVKFGHEKFIPIIKAIESLAKKCSKEAWLVEKKDYSDLKSKISKELTKDLEKAFSEKDKKKRSELVNLATEKCKSLFEGDETYSELEISLQLKNLEKDIVRGKILKTKKRIDGRGLADVRPIKCEVSVLPRTHGSALFTRGETQALVTTTLGMSDDEQRIESLEGQKRISFMLHYNFPPFSVGEVGRIGTGRREVGHGKLAWRALNSSLPEKDKFPYTIGVVSEITESNGSSSMGTVCGASLAL

SEQ ID NO: 135698 - protein, 127 aa, Unknown
  Bacterial polypetide isolated from the Sargasso Sea
MFKVFKKEIKIGGKKITLETGKIARQADGAIIAQCGETVVMATVVGAKKVNPEVDYFPLSVNYQEKYYAAGRIPGGYFKREARPTESETLISRLIDRPIRPLFPDEFRNEVQLLPTVISYDKENEAD

SEQ ID NO: 135699 - protein, 248 aa, Unknown
  Bacterial polypetide isolated from the Sargasso Sea
TSLALMDAGVPIKEPVAGIAMGLIKEGDDFSVLSDILGDEDHLGDMDFKVAGTKDGITSLQMDIKITGITFEIMEQALNQAKDGRVHILGEMNKALDKSRAEVGKHTPKMEKITVDKKDIAAVIGKGGATIREIVEHSGAKVDVNDEGVVTVAAPDEESRNKAMQMIKDITAKAELNKIYNGKVMKIMEFGAFVNFLGKQDGLVHISELAEKRVAKVTDVVKEGDEVKVKVIGFDRGKVKLSIKKAAI

SEQ ID NO: 135700 - protein, 283 aa, Unknown
  Bacterial polypetide isolated from the Sargasso Sea
LDLVVAGTKDAVLMVESEASVLTEKQMLDAVKFGHENFSPVIKAIENLKKKCGKEEWKIEEKDYSKLSKKISKELTKDLEKAFSEKDKKKRSELVNLATEKCKSLFEEDETYSELEILLQLKNLEKDIVRTKILKTKKRIDGRGLSDVRPIKCEVGVLPRTHGSALFTRGETQALVTTTLGTTEDEQRIESLEGQKRVRFMLHYNFPPFSVGETGRIGTGRREVGHGKLAWRALNSSLPNKEKFPYTLRVVSEITESNGSSSMATVCGASLALMDAAVPNSRT

SEQ ID NO: 135701 - protein, 326 aa, Unknown
  Bacterial polypetide isolated from the Sargasso Sea
ILVRTKILKTKKRIDGRGLSDIRPIKCEVGVLPRTHGSALFTRGETQALVTTTLGTTEDEQRIESLEGQKRVRFMLHYNFPPFSVGETGRVGTGRREVGHGKLAWRALNSSLPEKEKFPYTLRVVSEITESNGSSSMATVCGASLALMDAAVPIAQPVAGIAMGLIKEKKEFSVLSDILGDEDHLGDMDFKVAGTKDGITSLQMDIKITGITFEIMEQALNQAKDGRAHILAEMNKAIKSSRKEVSKYTPKIETIKVDKKDIAAVIGKGGATIREIVELSGAKVDVKDTGEVTIAAPDEESRKKAMDMVKNIIAKTEVGKIYKGKS

SEQ ID NO: 135702 - protein, 285 aa, Unknown
  Bacterial polypetide isolated from the Sargasso Sea
NEADILSIIASSAALSISGLPFKGPVGASRVGFIDGKCVLNPTKKELENSKLDLVVAGTKDAVLMVESEASGLTEKEMLDAVKFGHEGFVTVIKGIEKLSKKCSKEKWKIEEKDFSKVSKKIEKELTKDLEKAFSEKDKKTRSDLISQAGEKCKSLFEGDEDLLEHEIMLQLKKLEKDIVRTRILKNKKRIDGRGLSDVRPIKCEVGVLPRTHGSALFTRGETQALVTTTLGTTDDEQRIESLEGLKRQRFMLHYNFPPFSVGETGRIGTGRKEVGHGKLAWRAL

SEQ ID NO: 135703 - protein, 302 aa, Unknown
  Bacterial polypetide isolated from the Sargasso Sea
FSHDLINPSDVAAMNGASAALAISDIPFHNPLGGVRVGRIEGELIINPSVKDLEKCDLNIFMAASKEAILMVEGEADGVSEKDILDALWFGQDAITPIIEMQEELMKSVGKKKRKVEKKEVDQNIKQKLEKIAPERLKKTLSIQEKVERYEKLDLLLGELKLEVLGDSPDTEDEIQVAKVFEEIKKFEMRSSLIKNKIRIDGRKPNEIRPIACETKVLPRTHGSALFTRGETQALAVTTLGAREDEKMIDGLDGVTFKRFMLHYNFPSFSVGEARAPRGPGRREIGHGTLAERGLIPVIPSS

SEQ ID NO: 135704 - protein, 146 aa, Unknown
  Bacterial polypetide isolated from the Sargasso Sea
MFKVYKKEIEVAGKKISLETGKVARQADGAIIAKCGETVVLATVVGAKKVNPDVDYFPLSVNYQEKYYAAGKIPGGYFKREARPTESETLISRLIDRPIRPLFPDKFKNEVQLLPTVISYDKENEADILSITASSAALAISGMPFM

SEQ ID NO: 135705 - protein, 284 aa, Unknown
  Bacterial polypetide isolated from the Sargasso Sea
KNEIQIFCTVLSSDKNINPDIASLIGASASLSISGVPFQGPLGAARVGFIDSNYVLNPSPEELEKSMLDMVVAGTEDAVLMVESEANELSEDLMLGSVLYGHQEMQKVIKACSDLRAKVNPTPWDYSEDELTAEYKIKIADTFTDEIASAFKIADKSDRGEAINTVREKINEAHEDLDEMERGKLMNAFKLVEKDVVRKSILSNEPRIDGRDLDTVRPIYVETDVLPSVHGSSLFTRGETQALVAATLGSTRDAQRIEGLNGEQSNTFMLHYNFPAYSVGEIGM

SEQ ID NO: 135706 - protein, 278 aa, Unknown
  Bacterial polypetide isolated from the Sargasso Sea
KCKSLFEGDETYSELEVMLQLKHLEKDIVRGRILKTKKRIDGRGLSDVRPIKCEVGVLPRTHGSALFTRGETQALVTTTLGTTEDEQRIESLEGQKRVRFMLHYNFPPFSVGETGRIGTGRREVGHGKLAWRALNSSLPEKEKFPYTLRVVSEITESNGSSSMATVCGASLALMDAAVPIAQPVAGIAMGLIKEKDEFSVLSDILGDEDHLGDMDFKVAGTKDGITSLQMDIKITGITFEIMEQALNQAKDGRTHILAEMNKAIKSSRKEVSKYTPKN

SEQ ID NO: 135707 - protein, 276 aa, Unknown
  Bacterial polypetide isolated from the Sargasso Sea
VAGTKDAVLMVESETSGLSEEVMLAAVKFGHEGFVPVIEMIEELAKECRKPEWTVEKKDLSEVKQKLEETFTEDLTKAFATRDKQDRSNQISEITEKAKKLFEENENYSDLDVNSQLKNLEKKIVRTDILKNKNRIDGRGLSDVRPIECEVGVLPRTHGSALFTRGETQAIVVTTLGTSDDEQRIESLDGLQRERFMLHYNFPPFSVGETGRIGTGRREIGHGKLAWRAINSSLPSKEAFPYTFRIVSEITESNGSSSMATVCGASLALMDAGVPI

SEQ ID NO: 135708 - protein, 140 aa, Unknown
  Bacterial polypetide isolated from the Sargasso Sea
MFKIFKEELELGEKKLTLETGKIARQADGAIIATLGETVVISTVVGKKQVNPDTDYFPLQVNYQEKYYAAGKIPGGYFKREARPTESETLISRLIDRPIRPLFPEGFRNEVQILPTVLSYDNENEADILSIIASSAALAI

SEQ ID NO: 135709 - protein, 246 aa, Unknown
  Bacterial polypetide isolated from the Sargasso Sea
SYHCPLGETVVIATAVGAKKVAEGQDYFPLSVNYQEKYYAAGKIPGGYFKREARPTEAETLISRLIDRPIRPLFPSGFMNEVQVLPTVLSYDSENQPDILSIIASSAALAISGLPFLGPIAASRVGYKDGKYLLNPSVEELKESELDLVVAGTKDAVLMVESETSGLSEKVMLDAVKFGHENFVPVIEAIEKLAKKVGKQKWEVEEVDHSEIKKKITEKFESGLRGAFKEIDKKKRSTAISEIETQ

SEQ ID NO: 135710 - protein, 262 aa, Unknown
  Bacterial polypetide isolated from the Sargasso Sea
AALAISGMPFLGPVGASRVGFIDGKYVLNPSKKDLENSKLDLVVAGTKDAVLMVESEANGLTEQQMLDAVKFGHEGFVPVIKMIEDLAKECKKPEWATEKKDLSSVKKKLEEEFSEDLKKAFSIKDKQERSNLISEVTEKAKKLYEEDEKFTELDVMHELKDIEKGIVRTDILKNKNRIDGRGLADVRPIMCEVGILPRVHGSALFTRGETQAIVTATLGTSDDEQRIESLDGLQRERFMLHYNFPPFSVGETGRIGTGRRE

SEQ ID NO: 135711 - protein, 245 aa, Unknown
  Bacterial polypetide isolated from the Sargasso Sea
LALMDAGVPIKEPVAGIAMGLIKEGDDFSVLSDILGDEDHLGDMDFKVAGTKDGITSLQMDIKITGITFEIMEKALKQAKDGRIHILGEMNKALGKSRDSVGKHTPKMEKITVDKKDIATVIGKGGATIREIVEKSGAKVDVNDEGVVTVAAPDDESRNIALQIIKDLTAKAEMNKIYNGKVIKIMEFGAFVNFLGKQDGLVHISELANKRVAKVTDIVKEGDEVKVKVIGFDRGKVKLSIKAAV

SEQ ID NO: 135712 - protein, 267 aa, Unknown
  Bacterial polypetide isolated from the Sargasso Sea
LSVNYQEKYYSAGKIPGGYFKREARPTESETLISRLIDRPIRPLFPDEFRNEVQLLPTVISYDKENESDILSIIASSAALAISGMPFMGPVGASRVGFIDGKYVLNPSKKELEKSKLDLVVAGTKEAVLMVESQANGLSEEEMLKAVKFGHENFIPVIKMIEDLAKDCKKPDWIVEKKDLSAVKKRIDKEFSAELKKAFSIKDKQERSNLISDITERAKKLYEEDENISELDVNYELKNLEKKIVRTDILKNKKRIDGRGLADVRPI

SEQ ID NO: 135713 - protein, 282 aa, Unknown
  Bacterial polypetide isolated from the Sargasso Sea
HSSLPSKEAFPYTFRVVSEITESNGSSSMATVCGTSLALMDAGVPIKEPVAGIAMGLIKEGDDFSVLSDILGDEDHLGDMDFKVAGTKDGITSLQMDIKITGITFEIMEQALSQAKDGRVHILGEMNKALSASRADVGKHTPKMEKINVDKKDIAAVIGKGGATIREIVEKSGAKVDVNDEGVVTVAAPDEDSRNVAMQMIKDITAKAELNKIYSGKVMKIMEFGAFVNFLGKQDGLVHISELADKRVAKVTDVVKEGDEVKVKVIGFDRGKVKLSIKQALV

SEQ ID NO: 135714 - protein, 251 aa, Unknown
  Bacterial polypetide isolated from the Sargasso Sea
TGRRELGHGQLAQRALEPVIPGREDFPYVIRLVSEILESNGSSSMASVCSGSLSLMSSGVPIKGQVSGIAMGLLMDDAGQYTILSDIQGLEDHYGDMDFKVAGTSKGITALQLDIKIEGLSKEILVDALTQAKAGRFHILDKMNEVIDAPRASVTDRAPKVETIMIKPDKVGLLIGPGGKQIKKIEEDTKAVVYVVDGDKGEVSISGKNSDIINAARKIIQDLVKEVEKGEVYDGKVVKIMNFGAFVELLP

SEQ ID NO: 135715 - protein, 162 aa, Unknown
  Bacterial polypetide isolated from the Sargasso Sea
MFKVYKKEIEVAGKKISLETGKVARQADGAIIATCGETVVLATVVGAKKVNPDMDYFPLSVNYQEKYYAAGKIPGGYFKREARPTESETLISRLIDRPIRPLFPDEFKNEVQLLPTVISYDKENEPDILSITASSAALAISGMPFMGPVGASRVGFVDGKYV

SEQ ID NO: 135716 - protein, 302 aa, Unknown
  Bacterial polypetide isolated from the Sargasso Sea
EEMKSSSLELVVAGTSQGVLMVESEANQLSEEQMLEAVLLGQETYKAVIDAIISLAKKAAKNPWDVIEKDPEIKELPSKIEKEYNDKFSDAYKIQEKQKRSETLSTLRNLIEEQYVSETLSAVIVADAIKSIEKEIVRGELLKSGKRIDGRDTKTVRPIECEVGVLERTHGSALFTRGETQALVVTTLGTGLDEQRIDAIEGEYKENFMLHYNFPPYSVGEVGRAGSTSRREIGHGKLAWRAIHPMLPSSDKFPYTYRVVSEITESNGSSSMATVCGTSLSMMDAGVPLEKPIAGIAMGLIK

SEQ ID NO: 135717 - protein, 281 aa, Unknown
  Bacterial polypetide isolated from the Sargasso Sea
SSLPSKESFPYTFRIVSEITESNGSSSMATVCGTSLALMDAGVPIKEPVAGIAMGLIKEGDDFSVLSDILGDEDHLGDMDFKVAGTKDGITSLQMDIKITGITFEIMEQALNQAKDGRIHILGEMNKALDKSRDNVGKHTPKMEKITVDKKDIAAVIGKGGATIREIVEKSSAKVDVNDEGVVTVAAPDEVSRNIAMQMIKDITAKAELNKIYNGKVMKIMEFGAFVNFLGKQDGLVHISELADKRVAKVTDVVKEGDEVKVKVIGFDRGKVKLSIKQAAI

SEQ ID NO: 135718 - protein, 188 aa, Unknown
  Bacterial polypetide isolated from the Sargasso Sea
MFKLVKKEIELSGKKISLETGKIARQADGAIIAQCGETVVLATVVGAKKVNPDMDYFPLSVNYQEKYYAAGKIPGGYFKREARPTESETLISRLIDRPIRPLFPDEFKNEVQLLPTVISYDKENEADILSIIASSAALAISGMPFMGPVGASRVGFIDGKYVLNPSKTQLEKSKLDLVVAGTKDAVLM

SEQ ID NO: 135719 - protein, 291 aa, Unknown
  Bacterial polypetide isolated from the Sargasso Sea
VRRDILDTGMRIDGRDTKTVRQIAVEVGVLPRAHGSALFTRGETQALVVTTLGTGQDEQIIDGLAEDYRQHFMLHYNFPPYSVGEAGRFGFTGRREVGHGKLAWRAVHPLMPEKVDFPYTVRVVSEITESNGSSSMATVCGASLSMMDAGVPLSSPVAGIAMGLIKEDDGFAVLSDILGDEDHLGDMDFKVAGTEKGITSLQMDIKITSITKEIMEVALDQARDGRLHILDEMAKGLTAAREGVSQHAPRIETISINKDKIRDVIGPGGKMIREICETTGTKVDIDDDGTV

SEQ ID NO: 135720 - protein, 224 aa, Unknown
  Bacterial polypetide isolated from the Sargasso Sea
MFNITRKEINWGGRPLVLETGKIARQADGAVLVTYGGTQVLCTAVSNKAVRPGQDFFPLTVNYQEKTFAAGKIPGGFFKREGRPSEKETLTSRLIDRPIRPLFPDGFRNETQVICTVVAHDLENDPDVVSLVGASAALTISGVPFMGPIGGCRVGCIDGEFVLNPKQDELENSTLDLIVAGTREGVLMVESEAQELDEDTMLRAVTFGHEQSQAVIGAIIELAE

SEQ ID NO: 135721 - protein, 236 aa, Unknown
  Bacterial polypetide isolated from the Sargasso Sea
IAGTGEAVLMVESEANQLSEDIMLGAVKFGHESIQEVIKTIINLAEECANDPWEFEYSINDTLFKEIKDSCESDIKNSYSIVDKMERHQSINQIKNSLEEKYKDNEDCNLIEVMGYFKKIEKDVVRSQILNNKTRIDGRNLDEVRDISSEVSWLPRTHGSALFTRGETQAIVVATLGFGEDEQRIEALQGSYKENFMLHYNFPPYSVGEVGRMGSAGRREIGHWQACMACSKICVT

SEQ ID NO: 135722 - protein, 285 aa, Unknown
  Bacterial polypetide isolated from the Sargasso Sea
MAASAAMSIADVPFRGPMAAARVGFINDEYVLNPSFEELKNSDLDMVVAGSESAVLMVESDANELSEDLMIGAILYGHQEMKPVIKAIHDFSNEVLPERTEFNNPSEEDDKKIFADVKEKTAKGLEDAFTTIDKKERGEKINTVKLDLLEGLDEELHASYLKQFKEVEKEIVRENILGHQRRIDGRSLTEVRNIEIETNFLPSVHGSALFTRGETQAIVTATLGSGRDVQTVDALAGEVKDNFMLHYNFPSYSVGELGFPMGPKRREIGHGALAKRSLQFAVPSL

SEQ ID NO: 135723 - protein, 293 aa, Unknown
  Bacterial polypetide isolated from the Sargasso Sea
AHDLENDPDIVSLVGASAALTISGVPFMGPIGGCRVGCIDGEFVLNPKQDELEASTLDLIVAGTREGVLMVESEAEELDEDTMLQAVTFGHQQSQAIINAIIELAESCAKEPWDLPEAPEQYDAVAARVKELATQPVNEAYQITVKQDRVEALSAARDTVMLALEEEEIDTEIGAAVFKKVEKDIVRGSIIKTGQRIDGRDTKTVRDISCEVGILPRAHGSALFTRGETQALVVTTLGTGQDEQIIDALEGEYRESFLLHYNFPPYSVGEASFLRSPGRREIGHGKLAWRAVR

SEQ ID NO: 135724 - protein, 173 aa, Unknown
  Bacterial polypetide isolated from the Sargasso Sea
MFKVYKKEIEVAGKKISLETGKIARQADGAIIAQCGETVVMATVVGAKKINPDVDYFPLSVNYQEKYYAAGKIPGGYFKREARPTESETLISRLIDRPIRPLFPEEFKNEVQLLPTVISYDKENEADILSIIASSAALAISGMPFMGPVGASRVGFIEGKYVLNPTKKELENS

SEQ ID NO: 135725 - protein, 29 aa, Unknown
  Bacterial polypetide isolated from the Sargasso Sea
MKHLLHRLIDRPIRPLFPERFKNETQVIL

SEQ ID NO: 135726 - protein, 292 aa, Unknown
  Bacterial polypetide isolated from the Sargasso Sea
EAKELSEDQMLGAILFAQQEMKPSLDLIEELVSQVEVNPIEYTIEEDDEELMEMVSNSVSSKIEEAYQIPEKALRQEAVSDARQFLTNQFEEEDEEKIEKAKDYFKSLESSIVRSRLLDGQPRIDGRDLDTVRPINIETGFLKQAHGSALFTRGETQSIGVATIDSLKLSQLLDTLQGDSKDPFMLHYNFPPYSVGEAGMIGSPKRREIGHGKLARRALEAVLPNPEEFEYAIRVVSEITESNGSSSMATVCSSSLAMMDAGIPLKKAVAGVAMGLVKSENDYCVITDILER

SEQ ID NO: 135727 - protein, 110 aa, Unknown
  Bacterial polypetide isolated from the Sargasso Sea
MFKVIKKEIEVAGKKISLETGKIARQADGAIIAKCGETVVLATAVGAKKVNPDMDYFPLSVNYQEKYYAAGKIPGGYFKREARPTDSETLISRLIDRPIRPLFPDEFKNE

SEQ ID NO: 135728 - protein, 279 aa, Unknown
  Bacterial polypetide isolated from the Sargasso Sea
MLDMVVAGTKDAILMVESEAEELSEDQMLGAVLFAHQEMQKTIALIEELASKTSIPQIEYSLREDNSELKEKIINIVKDDLVDAYSIPEKSKRQESVSLARDKMKESLNDEDLEDENVVSGYFKSVESEIVRSRLLNGDSRIDGRDLDTVRPIDIEVGFLNKSHGSCLFTRGETQSIGVATLGGSRDAQLIDALEGTTNDPFMLHYNFPPFSVGEAGFIGAPKRREIGHGKLARRALEAVLPSQEEFPYTIRVVSEITESNGSSSMATVCSSSLSMMDA

SEQ ID NO: 135729 - protein, 153 aa, Unknown
  Bacterial polypetide isolated from the Sargasso Sea
NLEKRIVRTDILKNKNRIDGRGLSDVRPIMCEVGILPRTHGSALFTRGETQAIVTTTLGTSDDEQRIESLEGLQRERFMLHYNFPPFSVGETGRIGTGRREIGHGKLAWRAINSSLPSKESFPYTFRIVSEITESNGSSSMATVCGTSLALMD

SEQ ID NO: 135730 - protein, 183 aa, Unknown
  Bacterial polypetide isolated from the Sargasso Sea
MFKVHKKEIIVAGKKISLETGKVARQADGAIIASCGETVILATVVGAKKVNPDMDYFPLSVNYQEKYYAGGKIPGGYFKREARPTESETLISRLIDRPIRPLFPDEFKNEVQLLPTVISYDKENQPDILAIIASSAALAISGMPFMGPVGASRVGFIDGKYILNPSKTELENSSLDLVVAGTK

SEQ ID NO: 135731 - protein, 240 aa, Unknown
  Bacterial polypetide isolated from the Sargasso Sea
MFEITRKSLQWGGRELTIETGKIARQADGAVIVTYGETQVLATAVGVKENDGTNDFFPLTVHYIEKFYSAGKIPGGYLKREGRPSDKETLTSRLIDRPIRPLFPEGFKNEVQVICQVINYDNENNADIPAIIAASAALTISGIPFLGPIASTRVARIKDKLVLNPTNEEMLESELDLVVAGTKKGVLMVESEANELSEDIMLEAVEFGKKSYIEVLNLIIDLAKETAKDPWVLNKIDLAE

SEQ ID NO: 135732 - protein, 262 aa, Unknown
  Bacterial polypetide isolated from the Sargasso Sea
VIMVESEAKELSEDQMLGGILFAHQEMQVAIEAIKEMVSDIGKPEFQYEPKVLSPEVVELVKNNYSDQISAAYALQIKQERVQALSEIREKILEENVSEDEGSFSQNDLLDAFKKVGKNIVRTRLIEGAPRIDGRDLDTVRPLFIETGVLKNTHGSALFTRGETQAIVTSTLGSPRQAQLIDALEGEYKDQFMLHYNFPPYSVGEAGFMSGPKRREIGHGKLARRALEAVLPSPDDFPYTIRVVSEITESNGSSSMASVCGS

SEQ ID NO: 135733 - protein, 131 aa, Unknown
  Bacterial polypetide isolated from the Sargasso Sea
RPTESETLISRLIDRPIRPLFPDEFKNEVQLLPTVISYDKENEPDILSINASSAALAISGMPFMGPVGASRVGFVDGNYILNPTKAELENSKLDLVVAGTKDAVLMVESKASGLSEEEMLNAVKFGHEGFV

SEQ ID NO: 135734 - protein, 297 aa, Unknown
  Bacterial polypetide isolated from the Sargasso Sea
AVTELIKSQEDLLKDLGLKQVKPSEPEEDKTLPSYLEKNCTKPIELVLKKFNLSKDERDLELEKIKVDTQDKIEALKEDNQLKVLLSENDKLMSSDFKKLTKKLMRAQIINDGKRVDGRELDEVRKITASAGILPKRVHGSALFQRGLTQVLSTTTLGTPSDAQEMDDLNPSTEKTYLHHYNFPPYSVGETRPMRTPGRREIGHGALAERAIIPVLPGKETFPYVLRVVSEVLSSNGSTSMGSVCGSTLSLLDAGVPLKAPVSGTAMGLIKEGKEVRILTDIQGIEDFLGDMDFKVA

SEQ ID NO: 135735 - protein, 251 aa, Unknown
  Bacterial polypetide isolated from the Sargasso Sea
DSLEGDSKRSFMLLYNFPPYSVGEAGRLMTGRRETGHGMLAWRAIHPMLPDHEDFPYTIRVLSEITESNGSSSMATVCGTSLALMDAGVPIKKPVAGIAMGLIKEGDDFAVLSDILGDEDHLGDMDFKVAGTDNGITSLQMDIKITSITKEIMTLALEQAREGRLHILSEMAKEIKTARTEVNEFAPRVEKIQISVDKIREVIGSGGKVIKEISANSDTKIDIDDNGLISIFGQGKESIERAREEINSIVA

SEQ ID NO: 135736 - protein, 305 aa, Unknown
  Bacterial polypetide isolated from the Sargasso Sea
VGCSQFGHEGFVSVIKGIEKLSKKCSKEKWKIEEKDFSKVSKKIEKELTKDLEKAFSEKDKKTRSDLISQAGEKCKSLFEADEDLLEHEIMLQLKKLEKNIVRTRILKNKKRIDGRGLSDVRPIKCEVGVLPRTHGSALFTRGETQALVTTTLGTTDDEQRIESLEGLKRQRFMLHYNFPPFSVGETGRIGTGRREVGHGKLAWRALNSSLPKKENFPYTLRIVSEITESNGSSSMATVCGSSLALMDAAVPIAEPVAGIAMGLIKEKDDFSILSDILGDEDHLGDMDFKVAGTKDGITSLQMDI

SEQ ID NO: 135737 - protein, 244 aa, Unknown
  Bacterial polypetide isolated from the Sargasso Sea
KEAWDWEPPEKNTSLESIVSDKFASSVVEAYQISEKMERYETVSELKQKAIGELVSEENGISEEEVSEIFSALEKSTVRNRILDGAPRIDGRDTKTVRKIEVETGVLEKAHGSALFTRGETQALVVTTLGAVRDSQLIENLSGSIKDPFMLHYNFPPYSVGEAGFMSGPKRREIGHGRLARRGVAAVMPAEEEFPYAIRVVSEITESNGSSSMASVCGSSLSMMDAGVPISAPVAGIAMGLIKE

SEQ ID NO: 135738 - protein, 303 aa, Unknown
  Bacterial polypetide isolated from the Sargasso Sea
RPSEHEILTSRLTDRPLRPLFPKSFKYETQVIVTAMSSDGENMADVLAGVGASAALMVSDIPFSGPIATVRVGRVDNNFIVNPTREQMTSSDMEIIVSGNDSTIVMVEGEAKLITEDEFLDALKFAHGPIKELIALQNKLVSELDIVKREAPPEKDNSEIEKAVEKLVSKKIDKAIKISDKIERQNAISTIHDEAQDSLIESFPESEKIIKSTFDSILKTAFREQILSSKVRSDGRSTTDIRPITIDTGIFARTHGSALFTRGETQAIVVLTMGTPSDEQIIDTMDEDYKKKFMLHYNFPPYW

SEQ ID NO: 135739 - protein, 182 aa, Unknown
  Bacterial polypetide isolated from the Sargasso Sea
MFKVYKKEIEVAGKKISLETGKVARQADGAIIATCGETVVLATVVGAKKVNPDMDYFPLSVNYQEKYYAAGKIPGGYFKREARPTESETLISRLIDRPIRPLFPDEFKNEVQLLPTVISYDKENEPDILSITASSAALAISGMPFMGPVGASRVGFVDEKYILNPSKAELENSSLDLVVAGT

SEQ ID NO: 135740 - protein, 130 aa, Unknown
  Bacterial polypetide isolated from the Sargasso Sea
MFKIAKEEIQINGKKIILETGKIARQADGAIIATCGETVVIATVVGAKNIKDGQDYFPLSVNYQEKYYAAGKIPGGYFKREARPTESETLISRLIDRPIRPLFPSNFMNEVQILPTVLSYDSENQPDILS

SEQ ID NO: 135741 - protein, 270 aa, Unknown
  Bacterial polypetide isolated from the Sargasso Sea
PGGYFKREARPTEAETLISRLIDRPIRPLFPSGFMNEVQVLPTVLSYDSENQPDILSIIASSAALAISGLPFLGPIAASRVGYKDGKYLLNPSVEELKESELDLVVAGTKDAVLMVESETSGLSEKIMLDAVKFGHEKFVPIINAIEKLAKKAGKPKWEVEEIDHSNVKKKIAEKFEQNLRSAFKEIDKKKRSTAISEIETQCKEMFSEDETVTENQAMSQLKSLEKDIVRTAILKEKKRIDGRGLADVRQIKCEVGVLPRTHGSALSPE

SEQ ID NO: 135742 - protein, 205 aa, Unknown
  Bacterial polypetide isolated from the Sargasso Sea
MFKVHKKEIEVAGKKISLETGKVARQADGAIIATCGETVILATVVGAKKVNPDMDYFPLSVNYQEKYYAGGKIPGGYFKREARPTESETLISRLIDRPIRPLFPDEFKNEVQLLPTVISYDKENQPDILAITASSAALAISGMPFMGPVGASRVGYIDGKYILNPSKEELEKSSLDLVVAGTKDAVLMVESETSGLSEEAMLAAV

SEQ ID NO: 135743 - protein, 172 aa, Unknown
  Bacterial polypetide isolated from the Sargasso Sea
IPEKSLRQEAVSDARQFLTNQFEEEEEEKIDKAKDYFKSLESSIVRSRLLEGQPRIDGRDLDTVRPINIETGILKQAHGSALFTRGETQSIGVATIDSLKLSQLLDTLQGDSKDAFMLHYNFPPYSVGEAGMIGSPKRREIGHGKLARRALEAVLPDPEEFEYAIRVVSEIT

SEQ ID NO: 135744 - protein, 169 aa, Unknown
  Bacterial polypetide isolated from the Sargasso Sea
MFKIFKKEVEVSGKKISLETGKIARQADGAIIATCGETVVLATVVGAKKVNPDVDYFPLSVNYQEKYYAAGKIPGGYFKREARPTESETLISRLIDRPIRPLFPDEFRNEVQLLPTVISYDKENEADILSIIASSAALAISGMPFMGPVGASRVGFIGGKYVLNPTKKE

SEQ ID NO: 135745 - protein, 300 aa, Unknown
  Bacterial polypetide isolated from the Sargasso Sea
RLIDRPIRPLFVKGFKNETQVIAQVLSHDQENETDVPALIAASAALTISGLPFMGPVGACRVGYKDGEYLLNPTLEEMAQSELELMLAGTSEGVLMVESEASELSEEVMLGAVTFGHEAFQPVIQAIIELAEACAKDPIDLPAPPDGKDALAARVCELGEGPLREAYKETIKQVRQEKISVAKANIVAALDADAGTDQDLAGAVLGDILKSLESDIVRRDILDTGIRIDGRDTKTVRQIAVEVGVLPRAHGSALFTRGETQALVVTTLGTGQDEQIIDGLAEDYRQHFMLHYNFPPYSVG

SEQ ID NO: 135746 - protein, 227 aa, Unknown
  Bacterial polypetide isolated from the Sargasso Sea
MVESETSGLSEKVMLDAVKFGHEKFVPIIEAIEKLAKKAGKPKWEVEEVDLSEIKKKITKKFESSLKSAFKEIDKKKRSTAISEIESQCKEMFVEDETVTENQVMNQLKSLEKDIVRTAILKEKKRIDGRGLSDVRQIKCEVGVLPRTHGSALFTRGETQALVVTTLGMTDDEQRLESLEGMQRSNFMLHYNFPPFSVGECGRIGTGRREIGHGKLAWRAINSSLPS

SEQ ID NO: 135747 - protein, 312 aa, Unknown
  Bacterial polypetide isolated from the Sargasso Sea
RPLRPCFPEGGGRETQVIAFLLSADPENDSDVLALTGASAALSISSIPFSNPIAAVRVGFVEDKIVINPTFSERKLSALDLIIAGSSDAIMMVEAGAKEVTEDTMLKALEEGHAAIREIVSEIEKMASAIGKQKTEVVGKSIDPAIKSDLESQVLTPLTEAMRVKDKIDSYAQVDSVYASLVESISEDDAEKQSAVSHVFKELKEKILRDEVLERGQRLDGRRFDEVRDIWSEVSVLPRVHGSAVFTRGETQALVTATLGTADDQQKIESVDGESYKRFMLHYNFPPFSVGEVKFLRGPGRREIGHGNLAER

SEQ ID NO: 135748 - protein, 240 aa, Unknown
  Bacterial polypetide isolated from the Sargasso Sea
MITLATEKCKSLFESDETYSELEIMLQLKNLEKDIVRGRILKTKKRIDGRGLSDVRAIKCEVGVLPRTHGSALFTRGETQALVTTTLGTTEDEQRIESLEGQKRVRFMLHYNFPPFSVGETGRIGTGRREVGHGKLAWRALNSSLPDKEKFPYTLRVVSEITESNGSSSMATVCGASLALMDAAVPIAHPVAGIAMGLIKEKDEFSVLSDILGDEDHLGDMDFKVAGTKDGITSLQMDIK

SEQ ID NO: 135749 - protein, 297 aa, Unknown
  Bacterial polypetide isolated from the Sargasso Sea
QQSVRDLKEEVVKEVAGEDDADLSEDIAEIFGKAEKNFVRRRILSGEPRIDGRDLVTVRPIDVEVGVLPKAHGSALFTRGETQAIAAATLGTLRDAAIIDALEGSYKDPFMLHYNFPPYSVGETGMMGGVKRRETGHGRLARRGVAAVMPDGESFPYTIRVVSEITESNGSSSMASVCGTSLALMDAGVPLKAPVAGVAMGLVLEGSEFAVLTDILGDEDHLGDMDFKVAGTSQGVTALQMDIKIEGINEEIMESALEQARDARQHILNEMNKVISESRAELSDNAPAMTTIKVHPD

SEQ ID NO: 135750 - protein, 258 aa, Unknown
  Bacterial polypetide isolated from the Sargasso Sea
PDDFKNEVQCYPTVFSYDKKNEADILSIMASSAALAISGMPFMGPVGASRVGYMMGKYVLNPSKTDLEKSKLDLVVAGTKDAVLMVESEASGLTEVEMLNAVKFGHEGFVPVIKMIEELAKECRKPEWTVEKKDLSEVKKKLEETFTEDLKKAFATRDKQDRSNQISEITDKAKKLYEEDENYTDLDVNSELKNLEKTIVRTDILKNKNRIDGRSLSDVRPISCEVGVLPRTHGSALFTRGETQAIVTATLGTSDENK

SEQ ID NO: 135751 - protein, 220 aa, Unknown
  Bacterial polypetide isolated from the Sargasso Sea
MTVTTVSTLQRSELEESHLDMVIAGSDAAVIMVESEAKELSEDQMLGGILFAHQEMQVAIEAIKEMVSDIGKPEFQYEPKVLSSEVVELVKNNYSEQISAAYALQIKQERVQALSEIREKILDENVSEDEESFSQNDLLDAFKKVGKNIVRTRLIEGAPRIDGRDLDTVRPLFIETGVLKNTHGSALFTRGETQAIVTSTLGSPRQAQLIDALEGEFKDQ

SEQ ID NO: 135752 - protein, 183 aa, Unknown
  Bacterial polypetide isolated from the Sargasso Sea
MFKVYKKEIEVAGKKISVETGKVARQADGAIIAKCGETVVLATVVGAKKVNPDMDYFPLSVNYQEKYYAAGKIPGGYFKREARPTESETLISRLIDRPIRPLFPDEFKNEVQLLPTVISYDKENEPDILSITASSAALAISGMPFMGPVGASRVGFIDGKYVLNPSKAELEKSKLDLVVAGTK

SEQ ID NO: 135753 - protein, 251 aa, Unknown
  Bacterial polypetide isolated from the Sargasso Sea
MFKIHKEEIKINGKKITLETGRIARQADGAIIATCGETVVIATVVGAKKLKDGQDYFPLSVNYQEKYYAAGKIPGGYFKREARPTEAETLISRLIDRPIRPLFPSSFLNEVQLLPTVLSYDGENQPDILSIIASSAALAISGLPFQGPIAASRVGYKDGKFLLNPSIVELKDSELDLVVAGTKDAVLMVESETSGLSEKVMLDAVKFGHESFVPVIDSIEKLAKKAGKPKWEIEEVDHSDVKKKIADKLKV

SEQ ID NO: 135754 - protein, 168 aa, Unknown
  Bacterial polypetide isolated from the Sargasso Sea
MFKEFKKEIELNGKKIKLETGKIARQADGAVIATCGETVVLATVVGAKKINPDVDYFPLSVNYQEKYYAAGKIPGGYFKREARPTESETLTSRLIDRPIRPLFPDEFKNEVQLLPTVISYDKENEADILSIIASSAALAISGMPFLGPVGASRVGFIDGKYVLNPSKI

SEQ ID NO: 135755 - protein, 152 aa, Unknown
  Bacterial polypetide isolated from the Sargasso Sea
MFKITKQEIEIAGKKITLETGKIARQADGAVIATCGETVVISTVVGAKKVDPETDYFPLSVNYQEKYYAAGKIPGGYFKREARPTESETLISRLIDRPIRPLFPDDFRNEVQVLPTVLSYDNENEADILSIIASSAALMISGLPFKGPIAAS

SEQ ID NO: 135756 - protein, 230 aa, Unknown
  Bacterial polypetide isolated from the Sargasso Sea
VRAIKCEVGILPRAHGSALFTRGETQALVTTTLGTTDDEQRIESLEGLRRERFMLHYNFPPFSVGETGRIGTGRREVGHGKLAWRALNSSLPKKENFPYTLRIVSEITESNGSSSMATVCGSSLALMDAAVPIAEPVAGIAMGLIKEKDKFSILSDILGDEDHLGDMDFKVAGTKDGITSLQMDIKITGITLEIMEQALAQAKEGRVHILNEMNKTIKSSRKEVGKHTPK

SEQ ID NO: 135757 - protein, 289 aa, Unknown
  Bacterial polypetide isolated from the Sargasso Sea
KISLVLNPTKEEMIESELDLVVAGTKKGVLMVESEANELSENIMLEAVEFGKKSYMEVLNLIIDLAKEAAKDPWVLNKVDLDKEIKLIEDNIKKDLESAYQIKEKTDRSNALKNIKTKVDELAVEKELDINRLNQAYYKFQKNFVRSKLLNTKNRIDGRGVADVRQINCETGLLSRSHGSALFTRGETQALVSLTLGTSDDEQMVDSLDGMSKERFMLHYNFPPFSVGEAGRMGGVGRREIGHGKLAWRAINPLLPGTEEFPYTLRIVSEITESNGSSSMATVCGSSLA

SEQ ID NO: 135758 - protein, 273 aa, Unknown
  Bacterial polypetide isolated from the Sargasso Sea
ETGRIGTGRREIGHGKLAWRAIKSSLPSKEKFPYTFRIVSEITESNGSSSMATVCGTSLSLMDAGVPMKTPVAGIAMGLIKEGDDFSVLSDILGDEDHLGDMDFKVAGTKDGITSLQMDIKITGITFEIMEQALKQAKDGRIHILGEMNKALDKSREDVGKHTPKMEKITVDKKDIATVIGKGGATIREIVEKSGAKVDVNDEGVVTVAAPDEESRNKAMQMIKDLTAKAELNKVYSGKVMKIMEFGAFVNFLGKQDGLVHISELANKRVAKV

SEQ ID NO: 135759 - protein, 141 aa, Unknown
  Bacterial polypetide isolated from the Sargasso Sea
MFKVFKKEIDFGEKKITLETGKVARQADGAIIATCGETVVLATAVGAKKVNPDVDYFPLSVNYQEKYYAAGKIPGGYFKREARPTESETLISRLIDRPIRPLFPDEFKNEVQVLPTVISYDKENEADILSIIASSAALAIS

SEQ ID NO: 135760 - protein, 161 aa, Unknown
  Bacterial polypetide isolated from the Sargasso Sea
KTGNRIDGRDTKTVRPIKCEVGVLERTHGCALFTRGETQALVVTTLGTGQDEQRIDAIEGEYKENFMLHYNFPPYSVGEVGRAGSTSRREIGHGKLAWRAIHPMLPSAEKFPYTYRVVSEITESNGSSSMATVCGTSLSLMDAGVPLEKSIPGIAMGLIKE

SEQ ID NO: 135761 - protein, 139 aa, Unknown
  Bacterial polypetide isolated from the Sargasso Sea
MFKVYKKEIEVAGKKISLETGKVARQADGAIIATCGETVVLATVVGAKKVNPDMDYFPLSVNYQEKYYAAGKIPGGYFKREARPTESETLISRLIDRPIRPLFPNEFKNEVQLLPTVISYDKENEADILSITASSAALA

SEQ ID NO: 135762 - protein, 152 aa, Unknown
  Bacterial polypetide isolated from the Sargasso Sea
MRKIIKKFQYGAHEVSLETGRIARQAGGAVLVTMGQTTVLVTAVGKQDDADAQRGFFPLTVNYVEKTYAAGKIPGGYFKREGRPTEKETLTSRLIDRPIRPLFPKGFKCEVQIIATVMSLDPEVQPDVPALIGAAAAVALSGMPFGGPLAAA

SEQ ID NO: 135763 - protein, 267 aa, Unknown
  Bacterial polypetide isolated from the Sargasso Sea
IVSEITESNGSSSMATVCGTSLALMDAGVPIKEPVAGIAMGLIKEGDDFSVLSDILGDEDHLGDMDFKVAGTKDGITSLQMDIKITGITFEIMEQALNQAKGGRIHILGEMNKALSKSRDGVGKHTPKMEKITVDKKDIATVIGKGGATIREIVEKSGAKVDVNDEGTVTVAAPDEESRNIALQFIKDLTAKAELNKIYNGKVMKIMEFGAFVNFLGKQDGLVHISELADKRVAKVTDVVKEGDEVKVKVIGFDRGKVKLSIKQAVV

SEQ ID NO: 135764 - protein, 307 aa, Unknown
  Bacterial polypetide isolated from the Sargasso Sea
VLNPSVDDMDNLKENNEQRLDLVVAGTKDAVMMVESEAYELSEKEMLGAVKFGHEQMTSVIDMIIDLAKEAANAPFSFEYKVNDQLFNKISKAGSKDLKKAFEISDKKERQSSVALAVDKIKNSLSDEENEGNEVNDLIKKLESEVVRNNVLDNGTRIDGRDLTTVRSIATETRLLPRAHGSSLFTRGETQGLVVTTLGSGDSEQIIDALHKEGRLNFMLHYNFPPYSVGECGRIAGPGRREIGHGKLAWRALQAVLPSSDEFPYTVRVVSEITESNGSSSMATVCGSSLSMMDAGVPLKAPVAGVA

SEQ ID NO: 135765 - protein, 264 aa, Unknown
  Bacterial polypetide isolated from the Sargasso Sea
TKEAVLMVESETSGLTEKVMLEAVKFGHKNFIPIIEAIEKLVKKAGKPKWEIEETDLSDVKKKIATNFEKDLRKAFQEIDKKKRSTSISEIDAKCKEMFAEDENVTENQAMAQLKLLEKDIVRTAILKDKKRIDGRGLADVRQIKCEVGVLPRAHGSALFTRGETQALVVTTLGMSDDEQRLESLDGMQRSNFMLHYNFPPFSVGECGRIGTGRREIGHGKLAWRAINSSLPKKENFPYTLRVVSEITESNGSSSMATVCGTSL

SEQ ID NO: 135766 - protein, 114 aa, Unknown
  Bacterial polypetide isolated from the Sargasso Sea
MFKVYKKEIEVAGKKISLETGKVARQADGAIIATCGETVVLATVVGAKKVNPDMDYFPLSVNYQEKYYAAGKIPGGYFKREARPTESETLISRLIDRPIRPLFPDEFKNEVQLL

SEQ ID NO: 135767 - protein, 258 aa, Unknown
  Bacterial polypetide isolated from the Sargasso Sea
DYKKSYYMHYNFPPYCVGEVGRIGFTGRREIGHGNLAQRALKPVLPDYDDFPYTIRIVSEIMESNGSSSMASVCGGSLSLMSAGAPLKSAVAGIAMGLITDGQRHAVLSDILGMEDHLGDMDFKIAGTEDGITAIQLDLKIDGLSFDLMEEALSQAKDGRKHILGEMNKVLKEANEISQYAPRILSLTINPEKIGALIGPGGKNIKKIIEDTECEVNVDDDGLVSIAGENTQKCNEAVEMVKALTFEPEVGMEFDSTV

SEQ ID NO: 135768 - protein, 323 aa, Unknown
  Bacterial polypetide isolated from the Sargasso Sea
DLIVAGNKDSYVMVESSAKELPETKIKEAIAYGQDQLQTIITEIEKLKTGSKIANQATTADPKKEASLKQTIEEIKQANVDAFKTALTIPGKVERNIALKELRNSIIQNKISTLNDTETSEDEITKEIDLAIYHVKKEIIRHRAIDENKRIDGRKTNDIRPITVIPGFLDDVHGSALFIRGETQALGITTLSAQESSAQLLDDITSQTKQYDKFMLHYNMPGYSVGECSQPLGPKRREIGHGELAKKALMAVLPSEKDDFSYIIRVVSEILSCNGSSSMATICASSLSLMDAGVPIKSSVAGIAMGLIKEDNQFTILSDILET

SEQ ID NO: 135769 - protein, 270 aa, Unknown
  Bacterial polypetide isolated from the Sargasso Sea
TFRIVSEITESNGSSSMATVCGTSLALMDAGVPIKEPVAGIAMGLIKEGNDFSVLSDILGDEDHLGDMDFKVAGTKDGITSLQMDIKITGITFEIMEQALKQAKDGRIHILGEMNKALDKSREGVGKHTPKMEKITVDKKDIATVIGKGGATIREIVEKSGAKVDVNDEGIVTVAAPDEESRNIALQYIKDLTAKAELNKIYNGKVMKIMEFGAFVNFLGKQDGLVHISELADKRVAKVTDVVKEGDAVKVKVIGFDRGKVKLSIKQAVV

SEQ ID NO: 135770 - protein, 109 aa, Unknown
  Bacterial polypetide isolated from the Sargasso Sea
MFKIIKKEIEISGKKISLETGKIARQADGAIIAQCGETVVLATVVGAKKVNPDMDYFPLSVNYQEKYYAAGKIPGGYFKREARPTENETLISRLIDRPIRPLFPDEFKN

SEQ ID NO: 135771 - protein, 261 aa, Unknown
  Bacterial polypetide isolated from the Sargasso Sea
MFKIFKEEIYFGGKKITLETGKIARQADGAIIATMGETVVIATVVGAKKVNPETDYFPLSVNYQEKYYAAGKIPGGYFKREARPTESETLISRLIDRPIRPLFAESFRNEVQVLPTVLSYDNENEADILSIIASSAALSISGLPFKGPVGASRVGFIDGKCVLNPTKKELENSKLDLVVAGTKDAVLMVESEASGLTEKEMLDAVKFGHEGFISVIKGIEKLSKKSSKEKWKIEEKDFSKVYKKIEKELTKDLEKAFSEKD

SEQ ID NO: 135772 - protein, 235 aa, Unknown
  Bacterial polypetide isolated from the Sargasso Sea
MFKINKEELEVNGKKLTLETGKVARQADGAIIATLGETVVIATAVGAKKVAEGQDYFPLSVNYQEKYYAAGKIPGGYFKREARPTEAETLISRLIDRPIRPLFPSGFMNEVQVLPTVLSYDSENQPDILSIIASSAALAISGLPFLGPIAASRVGYKDGKYLLNPSVEELKDSELDLVVAGTKDAVLMVESETSGLSEKVMLDAVKFGHEKFVPIIEAIEKLAKKACKPKWKSKK

SEQ ID NO: 135773 - protein, 312 aa, Unknown
  Bacterial polypetide isolated from the Sargasso Sea
DFQAVFQKEKQDLVMRRFLPMRIVDRVLRPLFPKDYYNETQVMIQLMSHDENVMPDALVGLAASAALSLSDIPFDGPISEVRVARIDGKFIINPSKAQLEESDIDMMVGASEDSVVMVEGEFNEISEEEMTEAIRYAHDEIKAQIKAQKELIELVGVSSEKREYDSAEEDSELENQIIEKTYQKCYDIAKKGLSKNERSELFSNVKQELVESYDEETFEEKKDLILNYFSKSQKKAVRDLVLNEGVRLDGRKPDNIRDIWTEINYLPSTHGSAVFTRGETQALASVTLGTSREANIIDMPTDQSEETFYLHY

SEQ ID NO: 135774 - protein, 242 aa, Unknown
  Bacterial polypetide isolated from the Sargasso Sea
ATVCGTSLSLMDAGVPIKEPVAGIAMGLIKEGDKFSVLSDILGDEDHLGDMDFKVAGTKDGITSLQMDIKITGITFEIMEKALDQAKAGREHILGEMNKALKSSRKEFSKHTPKMETIKVDKKDIATVIGKGGATIREIVETSGAKVDVKDTGEVTVAAPDEESRKKALEFIKNLIAKPEMGKIYKGKVVKIMEFGAFVNFLGKQDGLVHISELASKRVAKVGDVVKEGDEVSVKVVGFDRG

SEQ ID NO: 135775 - protein, 322 aa, Unknown
  Bacterial polypetide isolated from the Sargasso Sea
HESFANVIKGIEKLAKKASKEKWKIEEKDFSEVSKKLKKELSKDLEKAFTEKDKKKRSDLISAAGETCKSLFKDDETLLEHEVMTQLKNLEKEIVRSRILKSKKRIDGRGLSDVRPIKCQVGILPRVHGSALFTRGETQAIVTTTLGTSDDEQRIESLEGLKRQRFMLHYNFPPFSVGETGRIGTGRREVGHGKLAWRALNSSLPKKENFPYTLRIVSEITESNGSSSMATVCGSSLALMDAAVPIAEPVAGIAMGLIKEKDDFSILSDILGDEDHLGDMDFKVAGTKDGITSLQMDIKITGITFEIMKKLLLKLKMDVFTF

SEQ ID NO: 135776 - protein, 296 aa, Unknown
  Bacterial polypetide isolated from the Sargasso Sea
LVVATLGTGSDEQIIDALEGESKSRFMLHYNFPPFSVGEVGRTGSPGRREIGHGKLAWRSLNPVLPDHDDFPYTIRLVSEITESNGSSSMATVCGSSLAMMDAGVVLPNPVAGIAMGLIKEGKEFAVLSDILGDEDHLGDMDFKVSGTQKGITSLQMDIKITSITKEIMEIALNQAKDGRIHILKEMSKAINIPRKNLAETAPKIFRTTVALEKIRDVIGSGGKVIREICEVSGAKVDIDDDGSITISAVDSTSIDKAKKMIEDIVAEPEKGVVYKGKVVKTVDFGAFVNFLGAKD

SEQ ID NO: 135777 - protein, 251 aa, Unknown
  Bacterial polypetide isolated from the Sargasso Sea
MFKIHKEEIEINGKKITLETGKIARQADGAIIATCGETVVIATVVGAKNLKDGQDYFPLSVNYQEKYYAAGKIPGGYFKREARPTEAETLISRLIDRPIRPLFPSSFMNEVQLLPTVLSYDGENQPDILSIIASSAALAISGLPFEGPIAASRVGYKDGKYLLNPSPTELQDSELDLVVAGTKDAVLMVESETSGLTEKVMLDAVKFGHENFIPVIKVIESLAKKVGKPKWKVEEIDHSDLKKKIVKTFEA

SEQ ID NO: 135778 - protein, 305 aa, Unknown
  Bacterial polypetide isolated from the Sargasso Sea
MNKMESSDLDLMVTGKKDKICMIEGGSNFVPEKTILEALDVAMDGINDIVDLQLEFSEHFDNSYEIIDTKVITEDIEKSLDDAYLSKMEKIFDLDTKQARDDEFNAIEKEALEPYLEDEVMYPEVKNHIKNMFKNTVRKTVLDKKIRVDGRGLEDIRDISVVESILPRVHGSALFTRGETQSIAALTLGSSRDEQIIDSMASDYKKSFLLHYNFPPYCVGEVGRIGFTNRREIGHGHLAERSLKPILPSNEEFPYTVRIVSEITESNGSSSMASVCGGSLAMMNAGVPIKEHVAGIAMGLIMEDD

SEQ ID NO: 135779 - protein, 239 aa, Unknown
  Bacterial polypetide isolated from the Sargasso Sea
MFKIHKEEIEVNGKKLTLETGKVARQADGAIIASLGETVVIATAVGAKKLNDGQDYFPLSVNYQEKYYAAGKIPGGYFKREARPTEAETLISRLIDRPIRPLFPSSFLNEVQLLPTVLSYDGENQPDILSIIASSAALAISGLPFQGPIGASRVGYKDGKYLLNPSIEELKESELDLVVAGTKDAVLMVESETSGLSEKVMLDAVKFGHEKFVPIIESIENLAKELESQNGESKRLIIL

SEQ ID NO: 135780 - protein, 235 aa, Unknown
  Bacterial polypetide isolated from the Sargasso Sea
VGAKKVNPEMDYFPLSVNYQEKYYAGGKIPGGYFKREARPTESETLISRLIDRPIRPLFPDEFKNEVQLLPTVISYDKENQPDILAITASSAALAISGMPFMGPVGASRVGYIDGKYILNPSKEELEKSSLDLVVAGTKDAVLMVESETSGLSEEVMLAAVKFGHEGFVPVIEMIEELAKDCRKPEWIVEKKDLSEVKQKLEETFTEDLKKAFATRDKQDRSNQISEITDKAKKL

SEQ ID NO: 135781 - protein, 122 aa, Unknown
  Bacterial polypetide isolated from the Sargasso Sea
MFKIVKKEIEIAGKKISLETGKIARQADGAIIATCGETVVLATVVGAKKINPDMDYFPLSVNYQEKYYAAGKIPGGYFKREARPTESETLISRLIDRPIRPLFPDEFKNEVQLLPTVISYDK

SEQ ID NO: 135782 - protein, 183 aa, Unknown
  Bacterial polypetide isolated from the Sargasso Sea
GKIPGGYFKREARPTESETLISRLIDRPIRPLFPDEFKNEVQLLPTVISYDKENEADILSIIASSAALAISGMPFMGPVGASRVGYIDGKYVLNPSKAELEKSKLDLVVAGTKDAVLMVESETSGLTEEEMLNAVKFGHEGFVPVIQMIEELAKECRKPEWNVEKKDLSEVKKKLEETFTEDS

SEQ ID NO: 135783 - protein, 172 aa, Unknown
  Bacterial polypetide isolated from the Sargasso Sea
MFKIHKEELEVNGKKLTLETGKIARQADGAIMATLGEKKKIATAVGAKKVAEGQDYFPLSVNYQEKYYAAGKIPGGYFKREARPTEAETLISRLIDRPIRPLFPSGFMNEVQVLPTVLSYDSENQPDILSMIASSAALAISGLPFLGPIAASRVGFKDGKYLLNPSVETTQG

SEQ ID NO: 135784 - protein, 215 aa, Unknown
  Bacterial polypetide isolated from the Sargasso Sea
MFKIHKEELEVNGKKLTLETGKVARQADGAIIATLGETVVIATAVGAKKLNDGQDYFPLSVNYQEKYYAAGKIPGGYFKREARPTEAETLISRLIDRPIRPLFPSSFLNEVQLLPTVLSYDGENQPDILSIIASSAALAISGLPFQGPIGASRVGYKDGKYLLNPSIEELKESELDLVVAGTKDAVLMVESETSGLSEKVMLDAVKFGHEKFVPI

SEQ ID NO: 135785 - protein, 157 aa, Unknown
  Bacterial polypetide isolated from the Sargasso Sea
MFKQYKEEIDFGGKKITLETGKIARQADGAIIATMGETVVIATVVGAKKVNPETDYFPLSVNYQEKYYAAGKIPGGYFKREARPTEAETLISRLIDRPIRPLFPESFRNEVQLLPTVLSYDNENEADILSIIASSAALSISGLPFKGPVGASRVGFI

SEQ ID NO: 135786 - protein, 121 aa, Unknown
  Bacterial polypetide isolated from the Sargasso Sea
MFKIHKEELEVNGKKLTLETGKVARQADGAIIASLGETVVIATAVGAKKLNDGQDYFPLSVNYQEKYYAAGKIPGGYFKREARPTEAETLISRLIDRPIRPLFPSSFFNEVQLLPTSFILP

SEQ ID NO: 135787 - protein, 281 aa, Unknown
  Bacterial polypetide isolated from the Sargasso Sea
SSLPTKEAFPYTFRVVSEITESNGSSSMATVCGTSLALMDAGVPIKEPVAGIAMGLIKEGDDFSVLSDILGDEDHLGDMDFKVAGTKDGITSLQMDIKITGITFEIMEQALSQAKDGRVHILGEMNKALSASRSDVGKHTPKMEQVNVDKKDIAAVIGKGGATIREIVEKSGAKVDVNDEGVVTVAAPDEESRNIAMQMIKDITAKAELNKIYSGKVMKIMEFGAFVNFLGKQDGLVHISELADKRVAKVTDVVKEGDEVKVKVIGFDRGKIKLSMKQATE

SEQ ID NO: 135788 - protein, 284 aa, Unknown
  Bacterial polypetide isolated from the Sargasso Sea
EVAGKNISLETGKIARQADGAIIAQCGETVVLATAVGAKKVNPDVDYFPLSVNYQEKYYAAGKIPGGYFKREARPTESETLISRLIDRPIRPLFPDEFKNEVQVLPTVISYDKENEADILSIIASSAALAISGMPFLGPVGASRVGFIDGKYVLNPSKVELKNSKLDLVVAGTKDAVLMVECEANGLTEEEMLNAVKFGHEGFVPVIQMIEDLAKECRKEEWVVEKKDLTEIKKKLEDEFTADLTKAFSIRDKQERSNMISEITDKAKKLYEENENYTDLDVNS

SEQ ID NO: 135789 - protein, 140 aa, Unknown
  Bacterial polypetide isolated from the Sargasso Sea
MFKIHKEEIDFGGKKLILETGKIARQADGAIIAKLGETVVIATAVGAKKLNEGQDYFPLSVNYQEKYYAAGKIPGGYFKREARPTEAETLISRLIDRPIRPLFPSSFMNEVQLLPTVLSYDGENQPDILSIIASSAALSI

SEQ ID NO: 135790 - protein, 140 aa, Unknown
  Bacterial polypetide isolated from the Sargasso Sea
MFNEFRKEIDFGGRPLILETGKIARQADGAVMVSYGETKVLCTAVGSRSPKPGVDFFPLTVNYQEKTFAAGKIPGGFFKREGRPTEKETLTSRLIDRPIRPLFASGYKNETQVICTVLAHDLENDPDIVALIGASAALTI

SEQ ID NO: 135791 - protein, 184 aa, Unknown
  Bacterial polypetide isolated from the Sargasso Sea
MFKIYKEEIEIEGKKIVLETGKIARQADGAIIATCGETVVIATVVGAKKVNEEIDYFPLSVNYQEKYYAAGKIPGGYFKREARPTESETLISRLIDRPIRPLFPEGFRNEVQVLPTVLSYDNENEADILSIIASSAALAISGLPFQEPVAASRVGYINDKYVLNPSKEQLKESKLDLVVAGTKD

SEQ ID NO: 135792 - protein, 244 aa, Unknown
  Bacterial polypetide isolated from the Sargasso Sea
AARVGFVDDSYVLNPSIEDMDNIRENQKQRLDLVVAGTQDAVMMVESEAYELSEKEMLGAVKFGHEQMQKVIELIIGLAEKTAKEPYNFVPLNNDELINKIKSLGEKDIIKAFSIPDKQERQNALSEVKQNVLNNLSDEELENEELDSCFKKIESNVVRSNILKKGKRIDGRKLDKVRNIETETRFLPRTHGSSLFTRGETQAIVVTTLGTGDDEQIIDALHGEGRSKFLLHYNFPPLLCWRNR

SEQ ID NO: 135793 - protein, 257 aa, Unknown
  Bacterial polypetide isolated from the Sargasso Sea
MFKIQKEEIKVNGKKITLETGRIARQADGAIIATCGETVVIATAVGAKNLKDGQDYFPLSVNYQEKYYAAGKIPGGYFKREARPTEAETLISRLIDRPIRPLFPSSFMNEVQLLPTVLSYDGENQPDVLSIIASSAALAISGLPFQGPIAASRVGYKDGKYLLNPSPAELQDSELDLVVAGTKDAVLMVESETSGLTEKVMLDAVKFGHENFIPVIKAIESLAKKTGKPKWEIEEIDHSDVKKKIVSTFETDLRKAF

SEQ ID NO: 135794 - protein, 299 aa, Unknown
  Bacterial polypetide isolated from the Sargasso Sea
ALVGLAASAAISLSDIPFDGPISEVRVARIEGEFVINPSRSQLEESDIDIMVGATEDSVVMVEGEFDEISEEEMTDAIRYAHDEIKRQIVAQKKLIKQAGISSEKREYDEAEEDQDFETEILDKIYQKSYDIAKKGLSKNERSESFSSLKEELIDSYDDETIEEKKDLIVKYFNKAQKKAIRDLVLNEGTRLDGRKTEDIRDIWTEVGYLPSTHGSAVFTRGETQSLASLTLGTSREVNVIDMPTNQSEESFYLHYNFPPFSTGEARPLRGTSRREIGHGMLAKRALKKVMPDDVRTQL

SEQ ID NO: 135795 - protein, 143 aa, Unknown
  Bacterial polypetide isolated from the Sargasso Sea
MFKVNKKEIELNGKKISLETGKIARQADGAIIARCGETVVMATVVGAKKVNPEVDYFPLSVNYQEKYYSAGKIPGGYFKREARPTESETLISRLIDRPIRPLFPDEFRNEVQLLPTVISYDKENESDILSIIASSAALAISGM

SEQ ID NO: 135796 - protein, 242 aa, Unknown
  Bacterial polypetide isolated from the Sargasso Sea
RNWQNWNCRREIVYGKLAWRAIHSSLPSIESFPYTFRVVSEITESNGSSSMATVCGTSLALMDAGVPIKEPVAGIAMGLIKEGNEFIVLSDILGDEDHLGDMDFKVAGTKDGITSLQMDIKITGITFEIMEQALNQAKEGRIHILGEMNKALGKSRAEVGKHTPKMEKVNVDKKDIAAVIGKGGATIREIVEKSGAKVDVNDEGVVTVAAPDEEARNIAMQMIKDITAKAEMNKIYSGKVMK

SEQ ID NO: 135797 - protein, 283 aa, Unknown
  Bacterial polypetide isolated from the Sargasso Sea
GSWFSSFHSVGETQSLTTLTLGGKMDEQMIDGATRQGTEPFMLHYNFPPFSTGEARMKFSVSRREIGHGNLALRALKPVLPEDNSYTIRLVSEILESNGSSSMATVCAGTLALMDGGVQIKAPVSGIAMGLVAEDGKFAVLSDILGDEDHLGDMDFKVTGTAAGITACQMDIKVDGLPYEVLIQALNQAKEGRLHILNKIVETIAEPNQEFKPQTPRIEAFNVPNDTIGAIIGPGGKIIQQLQKDTNTSITIEELETGEGRVQVMSNNGDDMAAAITAVRLIA

SEQ ID NO: 135798 - protein, 117 aa, Unknown
  Bacterial polypetide isolated from the Sargasso Sea
MFKVYKKEIEVAGKKISLETGKVARQADGAIIATCGETVVLATVVGAKKVNPDMDYFPLSVNYQEKYYAAGKIPGGYFKREARPTESETLISRLIDRPIRPLFPDEFKNEVQLLPTV

SEQ ID NO: 135799 - protein, 143 aa, Unknown
  Bacterial polypetide isolated from the Sargasso Sea
ALKEDIMSKEVSDEDDNSEELSAVFNDLKKDIVRERILSGEKRIDGRDSKTVRPIHVQTGVLPRTHGSALFTRGETQALVVATLGTNKDAQIIDSLNGRVDDSFIFHYNFPPYSVGEIGMIGSPKRREIGHGKLARRGVQAVM

SEQ ID NO: 135800 - protein, 162 aa, Unknown
  Bacterial polypetide isolated from the Sargasso Sea
MFKVYKKEIEVAGKKISLETGKVARQADGAIIATCGETVVLATVVGAKKVNPDMDYFPLSVNYQEKYYAAGKIPGGYFKREARPTESETLISRLIDRPIRPLFPDEFKNEVQLLPTVISYDKENEADILSIIASSAALAISGMPFMGPVGASRVGLLMENMC

SEQ ID NO: 135801 - protein, 249 aa, Unknown
  Bacterial polypetide isolated from the Sargasso Sea
FVVNPTKSQLANTKLELVLAGTKEGVLMIESEAHELSEKQMLDAVVLGQDSYKAVIDAIIALAKKAAKEPWELKEKEDEIKNLPTNISGEFGNDFIEAYKIIEKQKRSDQLSSIRNSISEKYTSETLSAVIIADAIKNVEKDIVRGELINTGKRIDGRDTKTVRPIVCETGILERTHGSALFTRGETQAIVVSTLGTGQDEQRIDAIDGEYTENFMLHYNFPPYSVGEVGRVGSTSRREIGHGKLAWRA

SEQ ID NO: 135802 - protein, 120 aa, Unknown
  Bacterial polypetide isolated from the Sargasso Sea
MFKQFKEEIDFGGKKITLETGKVARQADGAVIATMGETVVIATVVGAKKVNPETDYFPLSVNYQEKYYAAGKIPGGYFKREARPTEAETLISRLIDRPIRPLFPESFRNEVQLLPTVLSY

SEQ ID NO: 135803 - protein, 186 aa, Unknown
  Bacterial polypetide isolated from the Sargasso Sea
MFKVVKKEIEIAGKKISLETGKIARQADGAIIATCGETVVLATVVGAKKINPDIDYFPLSVNYQEKYYAAGKIPGGYFKREARPTESETLISRLIDRPIRPLFPDEFKNEVQLLPTVISYDKENEADILSIIASSAALAISGMPFMGPVGASRVGFIDGNYVLNPSKKELENSKLDLVVAGTKDAV

SEQ ID NO: 135804 - protein, 116 aa, Unknown
  Bacterial polypetide isolated from the Sargasso Sea
MFKIHKEEIEINGKKITLETGKIARQADGAIIATCGETVVIATAVGAKKLNEGQDYFPLSVNYQEKYYAAGKIPGGYFKREARPTEAETLISRLIDRPIRPLFPSSFMNEVQLLPT

SEQ ID NO: 135805 - protein, 136 aa, Unknown
  Bacterial polypetide isolated from the Sargasso Sea
MFKVYKKQIEVAGKKITLETGKVARQADGAIIATCGETVVLATVVGAKKVNPDMDYFPLSVNYQEKYYAAGKIPGGYFKREARPTESETLISRLIDRPIRPLFPDEFKNEVQLLPTVISYEKENEADILSITASSA

SEQ ID NO: 135806 - protein, 252 aa, Unknown
  Bacterial polypetide isolated from the Sargasso Sea
VQIFSTVMSSDKTQNPDIAAMIGASAALTISGVPFDGPMGAARVGFIDGEYVLNPSFEELDNSYLDMVVAGTDEAVLMVESEAKELNEDLMLGAVLFGHQEMKAVINACNELKNKAGKEEWTIEEDENITNYYSDVESKYKDEITEAFTISNKSDRNEALATIKSKIVEDYSDLDEFELGRVLSSFKELEKNIVRGNILNNMPRIDGRDLDTVRPIFVETDVLPSAHGSALFTRGETQAVVVATLGSSRDAQ

SEQ ID NO: 135807 - protein, 283 aa, Unknown
  Bacterial polypetide isolated from the Sargasso Sea
INSSLPSKESFPYTFRIVSEITESNGSSSMATVCGTSLALMDAGVPIKEPVAGIAMGLIKEGEDFSVLSDILGDEDHLGDMDFKVAGTKDGITSLQMDIKITGITFEIMEQALNQAKDGRIHILGEMNKALDKSRDNVGKHTPKMEKITVDKKDIAAVIGKGGATIREIVEKSGAKVDVNDEGVVTVAAPDEESRNFAMQMIKDITAKAELNKIYNGKVMKIMEFGAFVNFLGKQDGLVHISELADKRVAKVTDVVKEGDEVKVKVIGFDRGKVKLSIKQAAI

SEQ ID NO: 135808 - protein, 145 aa, Unknown
  Bacterial polypetide isolated from the Sargasso Sea
MFKVYKKEIEVAGKKISLETGKVARQADGAIIASCGETVILATVVGAKKVNPDMDYFPLSVNYQEKYYAGGKIPGGYFKRETRPTESETLISRLIDRPIRPLFPDEFKNEVQLLPTVISYDKDNQPDILAITASSAALAISGMPF

SEQ ID NO: 135809 - protein, 219 aa, Unknown
  Bacterial polypetide isolated from the Sargasso Sea
QEGNRSSRKEKSLETGKVARQADGAIIATCGETVILATVVGAKKVNPDMDYFPLSVNYQEKYYAGGKIPGGYFKREARPTESETLISRLIDRPIRPLFPDEFKNEVQLLPTVISYDKENQPDILAITASSAALAISGMPFMGPVGASRVGYIDGKYILNPSKEELENSSLDLVVAGTKDAVLMVESETSGLSEEVMLAAVKFGHEGFCSSIEMIEGLAK

SEQ ID NO: 135810 - protein, 291 aa, Unknown
  Bacterial polypetide isolated from the Sargasso Sea
MENLAWRAINSSLPSKESFPYTFRIVSEITESNGSSSMATVCGASLALMDAGVPIKEPVAGIAMGLIKEGDDFSVLSDILGDEDHLGDMDFKVAGTKDGITSLQMDIKITGITFEIMEQALNQAKDGRVHILGEMNKALGKSRDDVGKHTPKMEKITVDKKDIATVIGKGGATIREIVEKSGAKVDVNDVGEVTVAAPDEDSRNKAMQMIKDLTAKAELNKIYNGKVMKIMEFGAFVNFLGKQDGLVHISELADKRVAKVTDVVKEGDEVKVKVIGFDRGKVKLSIKQAAL

SEQ ID NO: 135811 - protein, 275 aa, Unknown
  Bacterial polypetide isolated from the Sargasso Sea
KVFKKEIELNGKKISLETGKIARQADGAIIAKCGETVVLATVVGAKKINPDMDYFPLSVNYQEKYYAAGKIPGGYFKREARPTESETLISRLIDRPIRPLFPNEFKNEVQLLPTVISYDKENEADVLSIIASSAALAISGMPFMGPVGASRVGFIDGKYVLNPSKKELEDSKLDLVVAGTKDAVLMVESETSGLTEEEMLNAVKFGHENFIPVIKMIEELAAECKKPDWILEKKDLSEVKKKIEEEFTDELKKAFSIRDKQERSNLISDITDRAK

SEQ ID NO: 135812 - protein, 150 aa, Unknown
  Bacterial polypetide isolated from the Sargasso Sea
MFKVYKKEIEVAGKKISLETGKVARQADGAIIATCGETVVLATVVGAKKVNPDMDYFPLSVNYQEKYYAAGKIPGGYFKREARPTESETLISRLIDRPIRPLFPDEFKNEVQLLPTVISYDKENEPDILSITASSAALAISGMPFMGPVG

SEQ ID NO: 135813 - protein, 312 aa, Unknown
  Bacterial polypetide isolated from the Sargasso Sea
MLQLKNLEKGIVRSRILKSKKRIDGRGLSDVRPIKCEVGVLPRVHGSALFTRGETQALVTATLGTSDDEQRVESLEGLKRVRFMLHYNFPPFSVGETGRIGTGRREVGHGKLAWRALNSSLPKKENFPYTLRIVSEITESNGSSSMATVCGSSLALMDAAVPIAEPVAGIAMGLIKEKNNFSILSDILGDEDHLGDMDFKVAGTKNGITSLQMDIKITGITFEIMEKALDQAKEGRVHILNEMNKTIKSSRKEVGKHTPKMETIKVDKKDIATVIGKGGATIREIVEKSGAKVDVKDTGEVTVAAANEETRK

SEQ ID NO: 135814 - protein, 281 aa, Unknown
  Bacterial polypetide isolated from the Sargasso Sea
ENFKNEVQIFSTVMSSDKKQNPDIAAMIGASAALTISGVPFDGPMGAARVGFIDGEYILNPSFEELNDSYLDMVVAGTDDAVLMVESEAKELNEDLMLGAVLFGHQEMKAVIRACNELKELVGNEVWVIKEDEDDSDHYSNIETKYKDQITDAFKISNKSDRNEALGEIKNQIVEEHSDLDEFELGKVLSSFKDLEKNIVRGNILNNMPRIDGRDLDTVRPIFVETGVLPSAHGSSLFTRGETQAIVVATLGSSRDAQRIEAIEGEGSDNFMLHYNFPAYS

SEQ ID NO: 135815 - protein, 263 aa, Unknown
  Bacterial polypetide isolated from the Sargasso Sea
ESEANGLTEEEMLNAVKFGHESFVPIIQMIEDLAKECKKPNWVVEKKDLSEVKKKLEEKFTDDLKKAFATRDKQDRSNQISEITDKAKKLFEENENYTELDVNYELKNLEKTIVRTNILKNKNRIDGRGLADVRPIMCEVGILPRTHGSALFTRGETQAIVTTTLGTSDDEQRIESLDGLQKERFMLHYNFPPFSVGEVGRVGTGRREIGHGKLAWRAINSSLPSKESFPYTFRIVSEITESNGSSSMATVCGTSLALMDAGV

SEQ ID NO: 135816 - protein, 301 aa, Unknown
  Bacterial polypetide isolated from the Sargasso Sea
MGEQSNTFMLHYNFPAYSVGEIGMPLGPKRREIGHGNLAKRAIKAVLPDAEKFGYTIRVVSEITESNGSSSMASVCGTSLSLMDAGVPISNPVAGIAMGLIKEENDFAVLTDILGDEDHLGDMDFKVAGSKEGVTALQMDIKVQGITAEIMESALEKAKNARMHILEKMNDVISAPKELSDNTPAMKKITVHQDKIKEIIGKGGAVIKGMQAETGASVDVNDDGVVTIFGETQSIMKAALEIIEGIIEDPELDKVYEGKVVKIVDFGAFVNILPGKDGLLHVSEISSERVENVSDVLTEGD

SEQ ID NO: 135817 - protein, 120 aa, Unknown
  Bacterial polypetide isolated from the Sargasso Sea
MFKVYKKEIEVAGKKISLETGKVARQADGAIIATCGETVVLATVVGAKKVNPDMDYFPLSVNYQEKYYAAGKIPGGYFKREARPTESETLISRLIDRPIRPLFPDEFKNEVQLLPTVIFI

SEQ ID NO: 135818 - protein, 144 aa, Unknown
  Bacterial polypetide isolated from the Sargasso Sea
MFKVVKKEIEISGKKISLETGKIARQADGAIIAQCGETVVLATVVGAKKVNPDMDYFPLSVNYQEKYYAAGKIPGGYFKREARPTESETLISRLIDRPIRPLFPDEFKNEVQLLPTVISYDRENEADILSIIASSAALAISGMP

SEQ ID NO: 135819 - protein, 308 aa, Unknown
  Bacterial polypetide isolated from the Sargasso Sea
TVISYDKENEADILSIIASSAALAISGMPFLGPVGASRVGFIDGKYVLNPSKVELENSKLDLVVAGTKDAVLMVESEANGLSEEEMLNAVKFGHENFVPVIKMIEELAKECRKPDWVVEKKDLSEVKKKLEKEFTGDLKKAFSTRDKQHRSNQISEITEKAKKLFEEDENYTELDVNYELKNLEKRIVRTDILKNKNRIDGRGLADVRPIMCEVGILPRVHGSALFTRGETQAIVTTTLGTSDDEQRIESLDGLQRERFMLHYNFPPFSVGETGRLEQVEEKLVMVNLLGEQSIHLCHQKKVFLIHLE

SEQ ID NO: 135820 - protein, 151 aa, Unknown
  Bacterial polypetide isolated from the Sargasso Sea
MFKVFKKEIEVAGKKISLETGKIARQADGAIIATCGETVVMATVVGAKKINPEVDYFPLSVNYQEKYYAAGKIPGGYFKREARPTESETLISRLIDRPIRPLFPDEFRNEVQLLPTVISYDKENEADILSIIASSAALAISGMPFMGPSRS

SEQ ID NO: 135821 - protein, 120 aa, Unknown
  Bacterial polypetide isolated from the Sargasso Sea
MFEIFKKEIEVGKRKITLETGKIARQADGAVIAKCGETVVMATVVGAKKVNPDIDYFPLSVNYQEKYYAAGKIPGGYFKREARPTESETLISRLIDRPIRPLFPDDFKNEVQLLPTSNIL

SEQ ID NO: 135822 - protein, 130 aa, Unknown
  Bacterial polypetide isolated from the Sargasso Sea
MFKIIKKEIEIAGKKITLETGKIARQADGAIIATCGETVVLATAVGAKKVNPDVDYFPLSVNYQEKYYAAGKIPGGYFKREARPTDSETLISRLIDRPIRPLFPDEFKNEVQVLPTVISYDKENEADILS

SEQ ID NO: 135823 - protein, 333 aa, Unknown
  Bacterial polypetide isolated from the Sargasso Sea
TTLGTSDDEQRIETLDGLVRERFMLHYNFPPFSVGETGRIGTGRREIGHGKLAWRAIKSSLPSQDKFPYTFRIVSEITESNGSSSMATVCGTSLSLMDAGVPMKTPVAGIAMGLIKEGDEFSVLSDILGDEDHLGDMDFKVAGTKDGITSLQMDIKITGITFEIMEQALKQAKDGRIHILGEMNKALDKSRAGVGKHTPKMEKVTVDKKDIATVIGKGGATIREIVEKSGAKVDVNDEGVVTVAAPDEESRNKALQMIKDLTAKAEMNKIYNGKVIKIMEFGAFVNFLGKQDGLVHISELANKRVAKVTDVVKEGDEVKVKVIGFDRGKVKLS

SEQ ID NO: 135824 - protein, 288 aa, Unknown
  Bacterial polypetide isolated from the Sargasso Sea
MSVVKKEFQFGNNKVIIETGRIARQASGAVMVYMGDTAVLVSCVAKRVAKEGQDFFPLTVDYQEKTYAAGKIPGGFFKREGRPSEKETLTSRLIDRPIRPLFPKEFKNEIQIIASVMSLDPSVDPDIPAIIGASASLCLTGAPFDGPIGAARVGYKDNEYVLNPSFDELAKSELDLVVAGTSSSVLMVESEAKQLSENVMLGAVMFGHQQLQIVIDNIKALTEEAGVKSWDWVAPDKDESLENEIKKNATDLLREAYTINDKLERKERISEIKNEIIETIINEEDPRW

SEQ ID NO: 135825 - protein, 254 aa, Unknown
  Bacterial polypetide isolated from the Sargasso Sea
MATVCGSSLALMDAGVPIKEPVAGIAMGLIKEGDDFSVLSDILGDEDHLGDMDFKVAGTKEGITSLQMDIKITGITFEIMEQALKQAKDGRVHILDEMNKALSKSRDDVGKHTPKMEKITVEKKDIATVIGKGGATIREIVEKSGAKVDVNDEGEVTVAAPDEDSRNKAMQMIKDLTAKAELNKIYNGKVMKIMEFGAFVNFLGKQDGLVHISELADKRVAKVTDVVKEGDEVKVKVIGFDRGKVKLSIKQAAV

SEQ ID NO: 135826 - protein, 369 aa, Unknown
  Bacterial polypetide isolated from the Sargasso Sea
TLRCKPDVISMIAASAALSISDIPFNGPIAGVRVGYINNKPVINPKVSEMENSELDLMVAGTTDAILMVESEAKELSEEVMLDCVMKGHDEIKKVIDGINDLVKEAGKEKWILDEIDKDETLKNKVIEIAGGDIESAYSIVEKSERSTRLAEIKQNTIDQIIESDEEISKDDVASEIKKIEKETVRSKILNGEPRIDGRDTKTVRDINVDINILERTHGSALFTRGETQSIVVTTLGSERSSQIIDALEGEYKDKFMLHYNFPPYSVGEVGFMGSPKRREIGHGKLARRALEAVLPNMSEYPYTIRIVSEITESNGSSSMATVCGSSLSLMHAGVPIKSHVAGIAMGLVMEGDKYKVLTDILGDEDHLG

SEQ ID NO: 135827 - protein, 383 aa, Unknown
  Bacterial polypetide isolated from the Sargasso Sea
MESYKKIIKLGDQEITLETGKVARQATGAVLATCGNTQVLATVVVGKAPGEHQDFFPLTVNYQEKTYATGKIPGGFFKREGRPSEKETLTSRLIDRPLRPLFNDDFLYEVQVICTVVSSDKDVDPDILSFIAASAAIGISGLPFNGPLGAVRVGFIEGQYCLNPNRSDMDNSLLDMVIAGSDSAVIMVESEAKELSEDQMLGGILFAHQEMQVIIDAIKEMSLEVGKPAFEYEPKTLDVDLVNSVKDSYSDLISNAYQIQDKQERVQTLNQLKEKLVEDLVSEEENSPKSTDLLDAFKKIEKTIVRSNLIKGEPRIDGRDLDTVRPLFIETGVLKNTHGSALFTRGETQALVTSTLGSPRQAQLIDALEGEFKDQFMLHYNFP

SEQ ID NO: 135828 - protein, 340 aa, Unknown
  Bacterial polypetide isolated from the Sargasso Sea
MFKINKEELEVNGKKLTLETGKIARQADGAIIATLGETVVIATAVGAKKVAEGQDYFPLSVNYQEKYYAAGKIPGGYFKREARPTEAETLISRLIDRPIRPLFPSGFMNEVQVLPTVLSYDSENQPDILSIIASSAALAISGLPFLGPIAASRVGYKDGKYLLNPSVEELKDSELDLVVAGTKDAVLMVESETSGLSEKVMLDAVKFGHEKFVPIIEAIEKLAKKSSKPKWEVEEVDHSEIKKKISEKFEGGLRSAFKEIDKKKRSSAISEIETQCKEMFGEDETVTENQVMSQLKSLEKDIVRTAILKEKKRIDGRGLADVRQIKCEVGVLPRTHGSAL

SEQ ID NO: 135829 - protein, 478 aa, Unknown
  Bacterial polypetide isolated from the Sargasso Sea
MINKEIEINGKTLKISTGQVAKQSAGSVMVSYGETTLIVAVNAAKEMREDIDFFPLQVEYRERHYAGGKIPGGFFKREARPSEREILTSRLTDRPIRPLFPKSFKYETQVIITVLTTDGENPADVLAGVGASAALMVSNIPWNGPIATVRLAKVDKDFIVNPTKEQMEESSMELVVSGNKDTIVMVEGEADLIPEDVFVDALKFAHNDIKKIIGLQEELAKEVSPAKRDIPEEKTNEDLNSAIENAIGDKINDIIQIADKTERESATSQLHQDTFEALEEKFPEAEKEVNNLISDKFKKAFRDRVLDTGVRSDGRSTTDIREITINPSFLPRTHGSVLFTRGETQALVVNTLGSKRDEQIIDSMDEDYKKNYYLHYNFPPYCVGEVGRVGFTSRREVGHGNLAERALKPVMPDYDDFPYTIRIVSEIMESNGSSSMASVCGGSLALMDSGCPLKEHVAGIAMGLILDGDRHAVFSDIL

SEQ ID NO: 135830 - protein, 494 aa, Unknown
  Bacterial polypetide isolated from the Sargasso Sea
EISEEEMTEAIRYAHEEIKAQIKAQKELVKLVGVSSEKREYDSTEEDTELENQIIEKTYQKCYDIAKKGLSKNERSELFSNVKQELVESYDEETFEEKKDLILNYFSKSQKKAVRDLVLNEGIRLDGRKPDSIRNIWTEINYLPSTHGSAVFTRGETQALASVTLGTSREANVIDMPTDQSEETFYLHYNFPPFSTGEARPLRGTSRREVGHGNLAQRALKKVMPSDCPYTVRIVSEILESNGSSSMASVCAGSLALMDAGINIKSNVSGIAMGLITEGDKYAVLSDILGDEDHLGDMDFKVTGTKDGITACQMDIKIKGLKYEILIEALGQAKNGRLDILNKLDETINNPNDSVKAHAPKMVNLEISKDFIGLVIGPGGKNIQELQKDTETTIVINEKDEIGVIEILGVDQEKINYAIDRIKNLVFEPVIDEVYNVKVIKILDFGAVVEFVPGKEALLHVSEIAWERVNNVTDYLNVGDQIEIKYLGIDPRTK

SEQ ID NO: 135831 - protein, 416 aa, Unknown
  Bacterial polypetide isolated from the Sargasso Sea
MFDVKNIEIEWAGRKLKLETGKIARQADSTVIATYGGTTVMCNVVAAKEANPDMDFFPLTVNYQEKYYSVGKIPGGFFKREARPTEKETLVSRLIDRPVRPLFHKDFKNETQVTCTVLSHDQENDSDVVAMVAASAALTLSGLPFLGPLGAIKIGFIDDEFVVNPSNSQLSNSKLELVLAGTKEGVLMIESEAHELSEKQMLDAVVLGQENYKTVIEAIISLAKKAAKEPWALKEKDEEIKSLPSKINEDFGKEFIDAYKITEKQKRSEKLSSLRNEISEKFVSETLSPVLVSDAIKNVEKDIVRGELINTGNRIDGRDTKTVRPIVCETGVLERTHGSALFTRGETQALVVSTLGTGQDEQRIDAIDGEYTENFMLHYNFPPYSVGEVGRIGSTSRREIGHGKLAWRAIHPNVTF

SEQ ID NO: 135832 - protein, 519 aa, Unknown
  Bacterial polypetide isolated from the Sargasso Sea
QDSVVMVEGEFDEISEEEMTDAIKFAHEEIKRQIDAQNKLVKQAGISSEKREYDGAEEDQELESEISEKVYKKSYDIAKKGLSKNERSELFGSLKDELIDSYDEDTLEEKKDLIIKYFNKAQKKAVRDLVLNEGIRLDGRKTESIRDIWTEVGYLPSTHGSAVFTRGETQSLASVTLGTSREVNVIDMPTDQSEETFYLHYNFPPFSTGEARPLRGTSRREVGHGNLAQRALKKVMPEDCPYTVRIVSEILESNGSSSMASVCAGSIALMDAGIKIKSNVSGIAMGLISEGDKYAVLSDILGDEDHLGDMDFKVTGTKEGITACQMDIKIKGLKYEILIEALNQAKKGRLEILEKLDDSINKPNETVKPHAPKMITMEIAKDFIGLVIGPGGKNIQELQKESETTIVINEKDEVGVIEILGVDQEKIDYAIGKIRNLIFEPVIDEVYKVNVVKILDFGAVVEFVPGKEALLHVSEIAWERVDRVTDYINLGDQIEVKYLGIDKRTRKQKISRKVLLEKK

SEQ ID NO: 135833 - protein, 350 aa, Unknown
  Bacterial polypetide isolated from the Sargasso Sea
LSYDNENESDILSIIASSAALSISGLPFKGPVGASRVGFIDGKCVLNPTKKELENSKLDLVVAGTKDAVLMVESEASGLTEKEMLDAVKFGHEGFVSVIKGIEKLSKKCSKDKWKIEEKDFSKVSKKIEKELTKDLEKAFSEKDKKTRSDLISQAGEKCKSLFEGDEDLLEHEIMLQLKKLEKNIVRTRILKNKKRIDGRGLSDVRPIKCEVGVLPRTHGSALFTRGETQALVTTTLGTTDDEQRIESLEGLKRQRFMLHYNFPPFSVGETGRIGTGRREVGHGKLAWRALNSSLPKKENFPYTLRIVSEITESNGSSSMATVCGSSLALMDAAVPIAEPVAGIAMGLIK

SEQ ID NO: 135834 - protein, 387 aa, Unknown
  Bacterial polypetide isolated from the Sargasso Sea
MTNIEKEIGGKILSLQTGKVARQSAGSVVLTYGETVLLIAVNAAKEAREDIDFFPLQVEYREKHYASGKIPGGFFKREARPTEGEVLTSRLTDRPIRPLFPKAFKNETQVMITVLQSDGENIADTWAGVGASAALMVSNIPWHGPIATVRVGKIENEFVFNPTRLQLEDCSLELVVSGNKENIVMVEGEADEVSEAVVVDALKFAHGNIIDIISLQEELANSVDVTKLEEPVIEIDQDLVDAIDNKIGNQIHDIVKIVDKQDRDTKKTALTNDVLSSLEESHPEKEKEINGIIGDRFKETMREMILSESVRSDGRGTKDIREITIDPAILNRVHGSALFTRGETQALVVTTLGSKSDEMIIDSMDEDYKKNYYLHYNFPPYCVGEVG

SEQ ID NO: 135835 - protein, 159 aa, Unknown
  Bacterial polypetide isolated from the Sargasso Sea
MFKIFKKEVEVNGKKISLETGKIARQADGAIIATCGETVVLATVVGAKKVNPDVDYFPLSVNYQEKYYAAGKIPGGYFKREARPTESETLISRLIDRPIRPLFPDEFRNEVQLLPTVISYDKENEADILSIIASSAALAISGMPFMGPVGASRVGFIGG

SEQ ID NO: 135836 - protein, 279 aa, Unknown
  Bacterial polypetide isolated from the Sargasso Sea
CPLKENFPYPLRVVSEITESNGSSSMATVCGTSLSLMDAGVPIKEPVAGIAMGLIKEGEKFSVLSDILGDEDHLGDMDFKVAGTKEGITSLQMDIKITGITFEIMEQALNQAKAGREHILSEMNKAIKTSRKEFSKHTPKMETIKVDKKDIATVIGKGGATIREIVEKSGAKVDVKDTGEVTVAAPDEKSRNTAIDIIKSLIAKPEVGKIYKGKVVKIMEFGAFVNFLGKQDGLVHISELAGKRVAKVSDVVKEGDEVSVKVLGFDRGKVKLSIKQAVA

SEQ ID NO: 135837 - protein, 255 aa, Unknown
  Bacterial polypetide isolated from the Sargasso Sea
FMATVCGTSLALMDAGVPIKEPVAGIAMGLIKEGDDFSVLSDILGDEDHLGDMDFKVAGTKDGITSLQMDIKITGITFEIMEQALKQAKDGRIHILGEMNKALDKSRADVGKHTPKMEKITVDKKDIAAVIGKGGATIREIVEHSGAKVDVNDEGVVTVAAPDDESRNKAMQMIKDITAKAELNKIYNGKVMKIMEFGAFVNFLGKQDGLVHISELADKRVAKVTDVVKEGDQVKVKVIGFDRGKVKLSIKQAAV

SEQ ID NO: 135838 - protein, 113 aa, Unknown
  Bacterial polypetide isolated from the Sargasso Sea
MFKQFKEEIDFSGKKLTLETGKIARQADGAIIATWGETVVIATVVGAKKVNPETDYFPLSVNYQEKYYAAGKIPGGYFKREARPTEAETLISRLIDRPIRPLFPEGFRNEVQV

SEQ ID NO: 135839 - protein, 459 aa, Unknown
  Bacterial polypetide isolated from the Sargasso Sea
MKNQIIEKTYQKCYDIAKKGLSKNERSELFSTIKQELVESFDEESFEEKKDLILNYYNKSQKKAVRDLVLNEGIRLDGRKPDNIRNIWTEIDYLPSTHGSAVFTRGETQALTSVTLGTSREANVIDMPTDQSEETFYLHYNFPPFSTGEARPLRGTSRREVGHGNLAQRALKKVMPSDCPYTVRIVSEILESNGSSSMASVCAGSLALMDAGINIKSNVSGIAMGLITDGDKYAVLSDILGDEDHLGDMDFKVTGTKDGITACQMDIKIKGLKYEILIEALGQSKNGRLDILNKLDETINNPKDSVKAHAPKMVNLEIAKDFIGLVIGPGGKNIQELQKDTETTIVINEKDEIGVIEILGVDQEKINYAIDRIKNLVFEPVIDEVYNVKVIKILDFGAVVEFVPGKEALLHVSEIAWERVNNVTDYLNIGDKIEIKYLGIDPRTKKSKISRKVLLEKKS

SEQ ID NO: 135840 - protein, 105 aa, Unknown
  Bacterial polypetide isolated from the Sargasso Sea
MFKVYKKEIEVAGKKISLETGKVARQADGAIVATCGETVVLATAVGAKKVNPDMDYFPLSVNYQEKYYAAGKIPGGYFKREARPTESETLISRLIDRPIRPLFPE

SEQ ID NO: 135841 - protein, 248 aa, Unknown
  Bacterial polypetide isolated from the Sargasso Sea
MSVVKKEFQFGNQKVTLETGRIARQADGAVMVYMGDTVVLVSCVAKKEAKEDQNFFPLTVDYQEKTYSAGKIPGGFFKREGRPSEKETLTSRLIDRPIRPLFPKEFKNEVQIIASVMSLDPAVDPDIAAIIGASASLSLTGAPFNGPIGAARVGYKNGEYILNPSFQDLEESDLDLVVAGTKSSVLMVESEAKQLSEDIMLGAVMYGHQELQVVIDSIESFVKDANVKSWNWSAPEKDSSLEKEIQKQ

SEQ ID NO: 135842 - protein, 368 aa, Unknown
  Bacterial polypetide isolated from the Sargasso Sea
MNKYVKKEIQFGSKTLVIETGKIARQATSVVATMGGTVVLCSIVTKKAAEKRDFFPLSVHYLEKTYAAGKIPGGYFKREARPTEYETLTSRLIDRPLRPLFPDFYSDEVQVNCLLLSLDKSNPSDIVAMLAASAAMSIADVPFNGPIGGARVGLINDEYVLNPAIDEMDDSDLDMVVAGSEKAVLMVESDANELSEDLMIGGILFAHQEMQSVIKGIKDFSNEVLPERTKYENENLESEKKVFDEIKNKFGDEIKDAFSTTDKKARGEKISSVREKLLDGVDEENSAEHLKQFKEVEKDIVRNNVLLDKARIDGRAMNEVRDINIELNFLPSVHGSALFTRGETQAIVTTTLGATKEVQIVDALVGEY

SEQ ID NO: 135843 - protein, 126 aa, Unknown
  Bacterial polypetide isolated from the Sargasso Sea
MKKSISREMNWGNQVLKIETGKVAKQATASTIVSYGDTVVMANVVAAKTAKPDVDFFPLTVSYQEKFYAAGKIPGGFFKREGRPTEFETLTSRLIDRPIRPLFPEGFKNETQVILTVLSHRYRDKS

SEQ ID NO: 135844 - protein, 112 aa, Unknown
  Bacterial polypetide isolated from the Sargasso Sea
MFKVHKKEIEVAGKKISLETGKVARQADGAIIATCGETVILATVVGAKKVNPDMDYFPLSVNYQEKYYAGGKIPGGYFKREARPTESETLISRLIDRPIRPLFPDELKMKYS

SEQ ID NO: 135845 - protein, 476 aa, Unknown
  Bacterial polypetide isolated from the Sargasso Sea
MSVTNVTCKIGEKEIKFETGKLALQAPGAVVVTSGETNVLVTTVANETVREGIDFFPLTVDVEERMYSAGKIPGGFFRREGRQTEKAILACRLIDRPLRPSFNDGFRCETQIIATVLSVDNENEYDVLSLNAASLGLQLAGVPLDSPVGAVRMSLINDNWVVQATNSEMEESVFDMVIAGNLNENNDVDIVMVEAGATETAFDKIDSGSTTPTEDIVADGIDKSKEYISELIKAQAELVSQNEVPEIDWPLIEDYTPELLSELEESYKSDIETITSITDRKERSTKQAELEESAVEKYLNEEEDNSKAIKLAFKSIVKNVVRDRVISGGARLDGRTPTDIRNISAEIDLLPTVHGSSLFLRGETQVLNVTTLGMGRLEQMLDTIDTVTSKRYMHHYNFPPYSTGEAYMMRGPKRREIGHGALAEKALVPVIPTKVDFPYTIRVVSEAISSNGSTSQASVCASSLSLMAAGVPIREH

SEQ ID NO: 135846 - protein, 107 aa, Unknown
  Bacterial polypetide isolated from the Sargasso Sea
MFKVVKKEIEVAGKKISLETGKIARQADGAIVAQCGETVVLATAVGAKKVNPDMDYFPLSVNYQEKYYAAGKIPGGYFKREARPTDSETLISRLIDRPIRPLFPRGI

SEQ ID NO: 135847 - protein, 389 aa, Unknown
  Bacterial polypetide isolated from the Sargasso Sea
KETLVSRLIDRPVRPLFHKDFKNETQVTCTVLSHDQENDSDIVAMVAASAALTLSGLPFLGPLGAIKIGFIDDEFVVNPSKSQLSNSKLELVLAGTKEGVLMIESEAHELSEKQMLDAVVLGQENYKTVIEAIISLAKKAAKEPWELKEKDEEIKNLPTKINEDFGKDFIDAYKITEKQKRSEKLSSLRNEISEKFVSETLSPVLVSDAIKNVEKDIVRGELINTGNRIDGRDTKTVRPIVCETGVLERTHGSALFTRGETQALVVSTLGTGQDEQRIDAIDGEYTENFMLHYNFPPYSVGEVGRIGSTSRREIGHGKLAWRAIHPMLPSKEKFPYTYRVVSEITESNGSSSMATVCGTSMSLMDAGVPLERPVAGIAMGLIKDNDKYV

SEQ ID NO: 135848 - protein, 446 aa, Unknown
  Bacterial polypetide isolated from the Sargasso Sea
KIEKELTKDLEKAFSEKDKKKRSTLISLAGDKCKALFDSDENLLEHEIMLQLKNLEKNIVRGKILKSKKRIDGRGLSDVRPIKCEVGILPRVHGSALFTRGETQALVTTTLGTSDDEQRIESLEGLKRSRFMLHYNFPPFSVGETGRIGTGRREVGHGKLAWRALNSSLPKKENFPYTLRIVSEITESNGSSSMATVCGSSLALMDAAVPIAEPVAGIAMGLIKEKDKFSILSDILGDEDHLGDMDFKVAGTKDGITSLQMDIKITGITFEIMEQALAQAKEGRIHILNEMNKTLKSSRKEVGKHTPKMETIKVDKKDIATVIGKGGATIREIVEKSGAKVDVKDTGEVTVAAANEETRKIAVQMINDLVAKPEMGKTYKGKVVKIMEFGAFVNFLGKQDGLVHISQLASKRVQKVTDVVKEGDEVSVKVIGFDRGKVKLSIKEAV

SEQ ID NO: 135849 - protein, 255 aa, Unknown
  Bacterial polypetide isolated from the Sargasso Sea
MFKIFKKVVEIGGKKLSLETGKIARQADGAIIATCGETVVLATVVGAKKVNPDIDYFPLSVNYQEKYYAAGKIPGGYFKREARPTESETLISRLIDRPIRPLFPDEFRNEVQLLPTVISYDKENEADILSIIASSAALAISGMPFMEPVGASRVGFIGGKYVLNPTKKELENSKLDLVVAGTKDAVLMVESEAKGLTEQQMLDAVKFGHEGFVPVVKMIEELAKECKKPDWVIEKKDLSAVKEKLEKEFTKDLKK

SEQ ID NO: 135850 - protein, 255 aa, Unknown
  Bacterial polypetide isolated from the Sargasso Sea
GRGLSDVRPISCEVGVLPRAHGSALFTRGETQAIVVATLGTSDDEQRIESLDGLQRERFMLHYNFPPFSVGETGRIGTGRREIGHGKLAWRAINSSLPTKEAFPYTFRVVSEITESNGSSSMATVCGTSLALMDAGVPIKEPVAGIAMGLIKEGDDFSVLSDILGDEDHLGDMDFKVAGTKDGITSLQMDIKITGITFEIMEQALSQAKDGRVHILGEMNKALSASRSDVGKHTPKMEQVNVDKKDIAAVIGKGG

SEQ ID NO: 135851 - protein, 279 aa, Unknown
  Bacterial polypetide isolated from the Sargasso Sea
TLISRLIDRPIRPLFPDEFKNEVQLLPTVISYDKENEADILSITASSAALAISGMPFMGPVGASRVGFINGKYVLNPSKTELENSSLDLVVAGTKDAVLMVESEANGLTEEEMLNAVKFGHEGFVPVIEMIEEIAKECRKPEWTFEKKDLSEVKKKLEETFTEDLKKAFGTRDKQDRSNQISEITDKAKKLYEENENYTDLDVNTELKNLEKNIVRTDILKNKNRIDGRGLSDVRPISCEVGFLPRTHGSALFTRGETQAIVTATLGTSDDEQRIESLD

SEQ ID NO: 135852 - protein, 319 aa, Unknown
  Bacterial polypetide isolated from the Sargasso Sea
NPSKKELENSKLDLVVAGTKDAVLMVESEANGLTEEEMLKAVKFGHENFVPIINMIEELASECKKPDWVVEKKDLSEVKKKIENEFTDELKKAFSIKDKKTRSNLISEITDKAKKLFEEDENFTDLDVNSELKNLEKRIVRTDILKNKKRIDGRGLSDVRQIMCEVGVLPRTHGSALFTRGETQAIVTTTLGTSDDEQRIESLEGLQRERFMLHYNFPPFSVGETGRIGTGRREIGHGKLAWRAIKSSLPSKESFPYTFRIVSEITESNGSSSMATVCGTSLALMDAGVPIKEPVAGIAMGLIKEGDDFSVLSDILGDE

SEQ ID NO: 135853 - protein, 285 aa, Unknown
  Bacterial polypetide isolated from the Sargasso Sea
MYPEVKNHIKNMFKNTVRKTVLDKKVRVDGRGLEDIRDISVVESILPRVHGSALFTRGETQSIAALTLGSSRDEQIIDSMASDYKKSFLLHYNFPPYCVGEVGRIGFTNRREIGHGHLAERSLKPILPSSDEFPYTVRIVSEITESNGSSSMASVCGGSLAMMNAGVPIKEHVAGIAMGLIMEDDDNYAVLSDILGTEDFLGDMDFKVAGTKDGISAIQLDLKVPGLSMDVLSNALEQANKGRLHILGEMNKAIDKPNALSPYAPQIESFKMDKDKIGALIGPRR

SEQ ID NO: 135854 - protein, 324 aa, Unknown
  Bacterial polypetide isolated from the Sargasso Sea
ETQALVVQHLGTEKDAQMIDSLDGRIDDTFIFHYNFPPYSVGEIGRTGSPKRREIGHGKLARRGIQSVVPTVDEFPYTIRVVSEILESNGSSSMASVCGSSLSMMDAGVPIKRPVAGIAMGLVKEGDKHVVLTDILGDEDHLGDMDFKVAGTSVGINALQMDIKVDGITSEIMSKALAQARDARLHILSEMGKVISEARKEPSPFAPRYTHVKIDQSKIAAVIGKGGATIKSIIEKTGAQIDIDDNGLIKIASNDQSIGDKAKEMIEEITVGPQVDKIYEGKVVKIMDFGAFVSITPSQDGLVHISQISEERVNNVSDVLTEGD

SEQ ID NO: 135855 - protein, 263 aa, Unknown
  Bacterial polypetide isolated from the Sargasso Sea
CRKPEWTVEKKDLSEVKQKLEETFTEDLTKAFATRDKQDRSNQISEITDKAKKLFEENENYSDLDVNSELKNLEKKIVRTDILKNKNRIDGRGLSDVRPIECEVGVLPRTHGSALFTRGETQAIVVATLGTSDDEQRIESLDGLQRERFMLHYNFPPFSVGETGRIGTGRREIGHGKLAWRAINSSLPSKEAFPYTFRIVSEITESNGSSSMATVCGTSLALMDAGVPIKEPVAGIAMGLIKEGDDFSVLSDILGDEDHLGDM

SEQ ID NO: 135856 - protein, 308 aa, Unknown
  Bacterial polypetide isolated from the Sargasso Sea
DKDAVLMVESETKGLSEKVMLEAVKFGHENFIPVIKAIESLAKKAGKPKWEVKDEDHSDIKSKISKVLESDLRKAFKETDKKKRSTAISEAEKKCKEMFAEDENISENQAMAQLKSLEKDIVRTAIIKDKKRIDGRGLADVRQIKCEVGVLPRTHGSALFTRGETQALVVTTLGMSDDEQRLESLDGMQRSSFMLHYNFPPFSVGECGRIGTGRREIGHGKLAWRAIYSSLPKKENFPYTLRVVSEITESNGSSSMATVCGTSLSLMDAGVPIKEPVAGIAMGLIKESEDFSVLSDILGDEDHLGDMD

SEQ ID NO: 135857 - protein, 329 aa, Unknown
  Bacterial polypetide isolated from the Sargasso Sea
MFKIYKKEVEVAGKKISLETGKVARQADGAIIATQGETVVLATVVGAKKINPEVDYFPLSVNYQEKYYAAGKIPGGYFKREARPTESETLISRLIDRPIRPLFPDEFKNEVQLLPTVISYDKENEADILSIIASSAALAISGMPFKGPVGASRVGYIDGKYVLNPSKVELEKSKLDLVVAGTKDAVLMVESEAKGLTEEEMLNAVKFGHEGFVPVIEMIEELAKECKKPEWKVEKKDLSEVKKKLEVTFTKDLKKAFATRDKQDRSNQISEITDKAKKLYEEDENYTDLDVNSELKNLEKSIVRTDILKNKNRIDGRGLSDVRPILCEV

SEQ ID NO: 135858 - protein, 304 aa, Unknown
  Bacterial polypetide isolated from the Sargasso Sea
VEEVDYSEIKKKIKEKFESGLRGAFKETDKKKRSTAISEIENQCKEMFVEDETITENQVMNQLKSLEKDIVRTAILKEKKRIDGRGLSDVRQIKCEVGVLPRTHGSALFTRGETQALVVTTLGMTDDEQRLESLEGMQRSNFMLHYNFPPFSVGECGRIGTGRREIGHGKLAWRAINSSLPKKENFPYTLRVVSEITESNGSSSMATVCGTSLSLMDAGVPIKEPVAGIAMGLIKEGEDFSVLSDILGDEDHLGDMDFKVAGTKNGITSLQMDIKITGITFEIMEKALDQAKGGRERILDEMNK

SEQ ID NO: 135859 - protein, 208 aa, Unknown
  Bacterial polypetide isolated from the Sargasso Sea
MFKEFKKEIKLNGKKIKLETGKIARQADGAVVATCGETVVLATVVGAKKVNPEVDYFPLSVNYQEKYYAAGKIPGGYFKREARPTESETLISRLIDRPIRPLFPDEFKNEVQLLPTVISYDKENEADILSIIASSAALAISGMPFLGPVGASRVGFIDGKYVLNPSKVDLEKSKLDLVVAGTKDAVLMVESEAKGLSEEEMLNAVKFG

SEQ ID NO: 135860 - protein, 276 aa, Unknown
  Bacterial polypetide isolated from the Sargasso Sea
MGLILEGDDYVILSDILGDEDALGDMDFKVAGTKNGITALQMDIKIEGINRDIVAKAINQANKGRLHILNEMAKTLDKSRDEINSNAPTIKTIKISKNKIGELIGPGGKNIKAICEKTGAKIDIAEDGTVNIAATDGDMLKEALAMVELTSFEPELNQIYEGKVVKLLDFGAFVNFRGRDGLVHISEIASERVENINDVLKIDDLVKVKFIGIDNKGRVKLSIKQVLIGDSDESASASKAKIAADDKPKQSKKKKESQQQSKDSSKSKVERKKYVL

SEQ ID NO: 135861 - protein, 272 aa, Unknown
  Bacterial polypetide isolated from the Sargasso Sea
MNWGDQKLKIETGKVAKQATASTIVSYGDTVVMANVVAAKEPKPDLDFFPLTVSYQEKFYAAGKIPGGFFKREGRPTEFETLTSRLIDRPIRPLFPEGFKNETQVILTVLSHDGETNPDIVAMIAASSALTLSGVPFMGPIGGCRVGYDGSNYTLNPKINDDGDLDLVVAGTSDAVLMVESEAKQLSEEIMLGAVKFGHESMQEVIKIIINLAEECANDPWEFSHTINESLLDEIKKTCEDKIAKSYSIVDKMERQSSLSEIKSSLEDQYKE

SEQ ID NO: 135862 - protein, 252 aa, Unknown
  Bacterial polypetide isolated from the Sargasso Sea
MSQLKSLEKDIVRTAILKDKKRIDGRSLADVRQIKCEVGVLPRTHGSALFTRGETQALVVTTLGMTDDEQRLESLDGMQRSNFMLHYNFPPFSVGECGRIGTGRREIGHGKLAWRAINSSLPNKENFPYTLRVVSEITESNGSSSMATVCGTSLSLMDAGVPIKEPVAGIAMGLIKEGNEFSVLSDILGDEDHLGDMDFKVAGTKNGITSLQMDIKITGITFEIMEKALDQAKSGREHILGEMNKAIKTSRK

SEQ ID NO: 135863 - protein, 303 aa, Unknown
  Bacterial polypetide isolated from the Sargasso Sea
EEARQADGAIIATWGETVVIATVVGAKKVNPETDYFPLSVNYQEKYYAAGKIPGGYFKREARPTEAETLISRLIDRPIRPLFPEGFRNEVQVLPTVLSYDNENEADILSIIASSAALSISGLPFKGPVGASRVGFIDGKCILNPTKKELENSKLDLVVAGTKDAVLMVESEASGLTEKEMLDAVKFGHEGFASVIKGIEKLAKKCSKEEWTFEKKDYSKVSKKINKELTKDLEKAFSEKNKKKRSELISLAGEKCKDLFKDDEDLLEHEVMLQLKNLEKDIVRTRILKSKKRIDGRSLADVRP

SEQ ID NO: 135864 - protein, 317 aa, Unknown
  Bacterial polypetide isolated from the Sargasso Sea
KVTPEVDYFPLSVNYQEKYYAAGKIPGGYFKREARPTESETLISRLIDRPIRPLFPNEFKNEVQLLPTVISYDKENEADILSIIASSAALSISGMPFMGPVGASRVGFVDGKYVLNPSKKELEKSKLDLVVAGTKDAVLMVESEAKGLTEEEMLNAVKFGHENFIPIIKMIEELAKECKKPDWVIEKKDLSEVKKKLSDEFTDDLKKAFSTRDKQERSNMISEITDKAKKLYEENETITDLDVNSELKNLEKIIVRTDILKNKNRIDGRGLSDVRPIMCEVGILPRVHGSALFTRGETQAIVTTTLGTSDDEQRIES

SEQ ID NO: 135865 - protein, 335 aa, Unknown
  Bacterial polypetide isolated from the Sargasso Sea
GIDFFPLTVNYQEKSYAAGKIPGGFFRREGRPGEKETLTSRLIDRPIRPLFHSKFKNETQVICTVLSHDLENNPDIPSLVGASAALTISGMPFLGPLGAARVGYIDKKYVLNPSADEMINSDLDLVVAGTKDAVLMVESEAKELSEEVMLGAVMFGHEKMQDSIKAIIDLAEHSAKEPWDIPETDENLSLYKDIQNLINSDLEQAYKETSKQQRSEKLSEIKSRAQEEYLNDESISAEVIGDIVKSLEKDIVRTKVLKTGKRIDGRGLSDVRPIISETDIIPRVHGSAVFTRGETQSLSVTTLGTSQDEQIFDALEGEYRERFMLHYNFLLINRE

SEQ ID NO: 135866 - protein, 327 aa, Unknown
  Bacterial polypetide isolated from the Sargasso Sea
MQQEKFLGGYFKREARPTESETLISRLIDRPIRPLFPDEFKNEVQLLPTVISYDKENEADILSIIASSAALAISGMPFMGPVGASRVGYVDGKYVLNPSKKELENSKLDLVVAGTKDAVLMVESEANGLTEEEMLNAVKFGHDNFIPIINMIEELAKECRKPDWVIEKKDLSEVKKKLENEFTDELKKAFSIKDKQERSNLISEITDKAKKLFEENENFTDLDVNSELKNLEKAIVRTDILKNKNRIDGRGLSDVRPIMCEVGILPRTHGSALFTRGETQAIVTTTLGTSDDEQRIESLEGLQRERFMLHYNFPPFSVGETGRIGTG

SEQ ID NO: 135867 - protein, 310 aa, Unknown
  Bacterial polypetide isolated from the Sargasso Sea
SILKTNTRIDGRDLNTVRDIDVRVDLLDNVHGCALFTRGETQALVTTTLGTSSDEQMLDTLDGDKKEKFLLHYNFPPFSVNEVGRIGSTGRREVGHGKLAWRAINPILKKVNDFPYTLRVVSEITESNGSSSMATVCGASLSLMDAGVPLEKSVAGVAMGLIKEKDNFVVLTDILGDEDHLGDMDFKVAGTDSGITALQMDIKVNGITEEIMKEALEKAYNARKHILLEMQKVVKKPRKGTKPNAPTVLNIQINKSKIREVIGSGGKVIKDICEKSNAKVEIDDNGFISIFASKADDGEIARQMINDIVA

SEQ ID NO: 135868 - protein, 297 aa, Unknown
  Bacterial polypetide isolated from the Sargasso Sea
GRREIGHGKLAWRAIHSSLPSIESFPYTFRVVSEITESNGSSSMATVCGTSLALMDAGVPIKEPVAGIAMGLIKEGNDFSVLSDILGDEDHLGDMDFKVAGTKDGITSLQMDIKITGITFEIMEQALNQAKEGRIHILGEMNKALGKSRAEVGKHTPKMEKVNVDKKDIAAVIGKGGATIREIVEKSGAKVDVNDEGVVTVAAPDEEARNIAMQMIKDITAKAEMNKIYSGKVMKIMEFGAFVNFLGKQDGLVHISELADKRVAKVTDIVKEGDEVKVKVIGFDRGKVKLSMKQASE

SEQ ID NO: 135869 - protein, 265 aa, Unknown
  Bacterial polypetide isolated from the Sargasso Sea
QRERFMLHYNFPPFSVGETGRIGTGRREIGHGKLAWRAMNSSLPSKESFPYTFRIVSEITESNGSSSMATVCGTSLALMDAGVPIKEPVAGIAMGLIKEGDNFSVLSDILGDEDHLGDMDFKVAGTKDGITSLQMDIKITGITFEIMEQALNQAKDGRVHILGEMNKALSASRDDVGKHTPKMERVTVDKKDIAAVIGKGGATIREIVEKSGAKVDVNDEGVVTVAAPDEEARNIAMQMIKDITAKAELNKIYSGKVMKIMEFGA

SEQ ID NO: 135870 - protein, 210 aa, Unknown
  Bacterial polypetide isolated from the Sargasso Sea
GAKKVNPETDYFPLSVNYQEKYYAAGKIPGGYFKREARPTESETLISRLIDRPIRPLFPESFRNEVQVLPTVLSYDNENEADILSIIASSAALSISGLPFKGPVGASRVGFIDGKCILNPTKKELESSKLDLVVAGTKDAVLMVESEASGLTEKEMLDAVKFGHEGFVSVIKGIEKLSKKSSKEKWKIEEKDFNKVSKKIEKELTKDFRK

SEQ ID NO: 135871 - protein, 277 aa, Unknown
  Bacterial polypetide isolated from the Sargasso Sea
VELKNSKLDLVVAGTKDAVLMVESEANGLTEEEMLNAVKFGHEGFVPVIKMIEDLAKECKKSEWIIEKKDVSEVKKKLETEFTSDLKKAFSTIDKQERSNMISEITDKAKKLYEENQEITDLDVNSELKKLEKTIVRTDILKNKKRIDGRGLSDVRPIMCEVGILPRVHGSALFTRGETQAIVTTTLGTSDDEQKIESLDGLQKERFMLHYNFPPFSVGETGRIGTGRREIGHGKLAWRAINSSLPPKETFPYTFRIVSEITESNGSSSMATVLEHH

SEQ ID NO: 135872 - protein, 307 aa, Unknown
  Bacterial polypetide isolated from the Sargasso Sea
LKNLEKSIVRTDILKNKNRIDGRGLSDVRPIECEVGVLPRTHGSALFTRGETQAIVVATLGTSDDEQRIESLDGLQRERFMLHYNFPPFSVGETGRIGTGRREIGHGKLAWRAINSSLPTKEAFPYTFRVVSEITESNGSSSMATVCGTSLALMDAGVPIKQPVAGIAMGLIKEGDDFSVLSDILGDEDHLGDMDFKVAGTKDGITSLQMDIKITGITFEIMEQALSQAKEGRVHILGEMNKALSASRSDVGKHTPKMEQVNVDKKDIAAVIGKGGATIREIVEKSGAKVDVNDEGIVTVAAPDGRI

SEQ ID NO: 135873 - protein, 255 aa, Unknown
  Bacterial polypetide isolated from the Sargasso Sea
DVRPIMCEVGILPRVHGSALFTRGETQAIVTTTLGTSDDEQRIESLDGLQKERFMLHYNFPPFSVGETGRIGTGRREIGHGKLAWRAINSSLPSKESFPYTFRIVSEITESNGSSSMATVCGTSLALMDAGVPIKEPVAGIAMGLIKEGDDFSVLSDILGDEDHLGDMDFKVAGTKDGITSLQMDIKITGITFEIMEQALNQAKDGRIHILGEMNKALDKSRDNVGKHTPKMEKITVDKKDIAAVIGKGGATIRE

SEQ ID NO: 135874 - protein, 250 aa, Unknown
  Bacterial polypetide isolated from the Sargasso Sea
TGRREIGHGKLAWRAINSSLPSKEAFPYTFRIVSEITESNGSSSMATVCGTSLALMDAGVPIKEPVAGIAMGLIKEGDDFSVLSDILGDEDHLGDMDFKVAGTKDGITSLQMDIKITGITFEIMEQALNQAKDGRIHILGEMNKALDKSRSEVGKHTPKMEQITVDKKDIAAVIGKGGATIREIVEKSGAKVDVNDEGIVTVAAPDEKSRNIALQFIKDITAKAELNKIYNGKVMKIMEFGAFVNFLGKQ

SEQ ID NO: 135875 - protein, 304 aa, Unknown
  Bacterial polypetide isolated from the Sargasso Sea
KVNPDVDYFLLSVNYQEKYYAAGKIPGGYFKREARPTESETLISRLIDRPIRPLFPDEFKNEVQVLPTVISYDKENEADILSIIASSAALAISGMPFMGPVGASRVAFIEGKYVLNPSKEEMKNSKLDLVVAGTKDAVLMVESEANGLTEEEMLNAVKFGHEGFVPVIQIIEDLAKECKKPDWVVEKKDLSEVKKKLEEEFTGDLKKAFATRDKQDRSNQISEITDKAKKLFEEDENYSDLDVNSQLKNLEKSIVRTDILKNKNRIDGRGLSDVRPIECEVGILPRTHGSALFTRGETQAIVTT

SEQ ID NO: 135876 - protein, 274 aa, Unknown
  Bacterial polypetide isolated from the Sargasso Sea
EEIMLNAVSYGHEESKKVIDLIINLAEECANDPWEFEYHENETLLESINSNFKDDIKNAYSIVDKMDRQSALSEIKDKLLEQYSEDENTSSIEALSYFKKVEKDIVRSQILSDKKRIDGRNLDEVRNITSEVSWLPRTHGSALFTRGETQAIVVTTLGFGVDEQRIEALQGSYKENFMLHYNFPPYSVGEVGRIGATGRREIGHGKLAWRALKAVLPSKEDFDYTIRLVSDITESNGSSSMATVCGSSLALMDAGVPIKNSVSGIAMGLIKEGG

SEQ ID NO: 135877 - protein, 287 aa, Unknown
  Bacterial polypetide isolated from the Sargasso Sea
AKEPISIDEEIPEEKDYLKVVKGFKKEIEKAYKIEEKASRYNELDNIKEKIKKDYGDEINLNLFTDVFKKVEADVVRTSILKTKKRIDGRDNNTVRNIVAEVGTLPRTHGSALFTRGETQALVVTTLGSSQDSQIVDGLDGDYKEKFMLHYNFPPFSVGEVGRTGSPGRREIGHGKLAWRAINPLLPSTEEFPYTMRIVSDITESNGSSSMATVCGTSLALMDAGVPLKKPVAGIAMGLIKEDKDFVVLSDILGDEDHLGDMDFKVAGTDEGITSLQMDIKITSITS

SEQ ID NO: 135878 - protein, 202 aa, Unknown
  Bacterial polypetide isolated from the Sargasso Sea
MSIQLESQSISFDYGGHEVTLETGKVARQATAAVITSVGKTRVLTTVVANKKADPLKDFFPLAVFYQEKFYAAGKIPGGYFKREARPTEAETLTSRLIDRPIRPLFPDNFKNEVQIMCTVLSIDPDYTADIAAMIGASAALTISGIPFQGPLGAARVGFIDGNYVLNPSREELNDSFLDMVVGGTRDAVLMVESEAKELNED

SEQ ID NO: 135879 - protein, 284 aa, Unknown
  Bacterial polypetide isolated from the Sargasso Sea
QEKYYAAGKIPGGYFKREARPTESETLISRLIDRPIRPLFPDEFKNEVQLLPTVISYDKENEPDILSIIASSAALAISGMPFMGPVGASRVGFIEGKYVLNPSKSELEKSKLDLVVAGTKDAVLMVESEANCLTEEEMLNAVKFGHKGFLPVIEMIEDLAKECRKPEWTVEKKDLSEIKKKLEEEFTEDLKKAFSTTDKQDRSNQISEITDKAKKLYEENEDYTDLDVNSQLKNLEKSIVRTDILKNKNRIDGRGLADVRPIMCEVGILPRVHGSALFTRGETP

SEQ ID NO: 135880 - protein, 235 aa, Unknown
  Bacterial polypetide isolated from the Sargasso Sea
VKEGENSVILSDILGDEDHLGDMDFKVCGTSEGITALQMDIKIKGISKELFTSAMTQAREGRLHILSEMAKTIEVKKDEISPYAPRITTIQIDPAKIKDIIGSGGKNIRKLTEDNDVKIDVDDTGRLNVISLNEENCKNALRDIAYIIREIEVDKFYVGTVKRILDFGAIVGLSPTLDGLIHISELAKERVKQVSDILNEGDEVLVKCISKERDGKIRLSRKAALDEDIDNYREI

SEQ ID NO: 135881 - protein, 266 aa, Unknown
  Bacterial polypetide isolated from the Sargasso Sea
QEQAVEKFLDEEDDNTKAIKLAFKSIVKNTVRDRVLSGGARLDGRTPTDIRNISAEINLLPTVHGSSLFLRGETQVLNVTTLGMSRLEQMLDTIDTVTSKRYMHHYNFPPYSTGEAYPMRGPKRREIGHGALAEKALVPVVPPKVDFPYTIRVVSEAISSNGSTSQASVCASSLSLMAAGVPIREHVAGIAMGLISKDDTYVTLTDILGAEDALGDMDFKVAGTRNVITALQLDMKIEGLPADVLRKALNQAMDARHHILDIMEDT

SEQ ID NO: 135882 - protein, 299 aa, Unknown
  Bacterial polypetide isolated from the Sargasso Sea
FKVYKKEIEVAGKKISLETGKIARQADGAIIATCGETVVLATVVGAKKVNPDMDYFPLSVNYQEKYYAAGKIPGGYFKREARPTESETLISRLIDRPIRPLFPDEFKNEVQLLPTVISYDKENESDILSITASSAALAISGMPFMGPVGASRVGFINGKYVLNPSKKELENSSLDLVVAGTKDAVLMVESEAKGLTEEEMLNAVKFGHEGFVPVIEMIEELAKECRKPEWTVEKKDLSDVKKKLEETFTEDLKKAFATRDKQDRSNQISEITDKAKKLYEEDENYTDLDVNSQLKNLEK

SEQ ID NO: 135883 - protein, 262 aa, Unknown
  Bacterial polypetide isolated from the Sargasso Sea
MDAGVPLKAPVSGAAMGLIKEGDEIRILTDIQGIEDFLGDMDFKVAGTEKGITALQMDMKITGLAVNTVAEAVKQARPARLHILEKMLEAIDTPRDVLSPHAPRLLSFRIDPELIGTVIGPGGRTIKGITERTNTKIDIEDSGIVTIASHDGAAAEEAQRIIEGLTRKVNEGELFSGSITRIIPIGAFVEILPGKEGMIHISQLSEARVEKVEDVVKVGDEVTVRVREIDNRGRINLTLRGVPQGGEGAEPEPVPTPVAPLN

SEQ ID NO: 135884 - protein, 296 aa, Unknown
  Bacterial polypetide isolated from the Sargasso Sea
TAILKDKKRIDGRGLADVRKIECEVGVLPRTHGSALFTRGETQALVVTTLGMSDDEQRLESLDGMQRSSFMLHYNFPPFSVGECGRIGTGRREIGHGKLAWRAINSSLPSKENFPYTLRVVSEITESNGSSSMATVCGTSLSLMDAGVPIKEPVAGIAMGLIKEGEKFSVLSDILGDEDHLGDMDFKVAGTKDGITSLQMDIKITGITFEIMEQALNQAKAGREHILGEMNKAIKTSRKEFSKHTPKIETIKVDKKDIATVIGKGGATIREIVETSGAKVDVKDTGEVTVAAPDEK

SEQ ID NO: 135885 - protein, 188 aa, Unknown
  Bacterial polypetide isolated from the Sargasso Sea
MSDVRPISCEVGVLPRTHGSALFTRGETQAIVTATLGTSDDEQRIESLDGLQRERFMLHYNFPPFSVGETGRIGTGRREIGHGKLAWRAIHSSLPSKESFPYTFRVVSEITESNGSSSMATVCGTSLALMDAGVPIKEPVAGIAMGLIKEGDDFSVLSDILGDEDHLGDMDFKVAGTKDGITSLQMDI

SEQ ID NO: 135886 - protein, 232 aa, Unknown
  Bacterial polypetide isolated from the Sargasso Sea
ETQALVTATLGTSGDTQRIDGLLGDVKKRFMLHYNFPPFSVGEVKFMRGPSRRDTGHGALAERALTPVLPTEDEFPYVARIVSEILESNGSSSMATVCGGSLALNDAGMPTKAPVAGIAMGLIKEGDDIAVLSDILGDEDHLGDMDFKVAGTAEGITALQMDIKIAGVTQDVMQKAIEQARDGRLHILGEMAKELDSARKEMSPFAPRIEALKIPTDKIRDIIGPGGKGFAV

SEQ ID NO: 135887 - protein, 303 aa, Unknown
  Bacterial polypetide isolated from the Sargasso Sea
MFKVVKKEIEISGKKISLETGKIARQADGAIIAQCGETVVLATVVGAKKVNPDMDYFPLSVNYQEKYYAAGKIPGGYFKREARPTENETLISRLIDRPIRPLFPDEFKNEVQLLPTVISYDKENEPDILSIIASSAALAISGMPFMGPVGASRVGFIEGKYVLNPSKKELENSKLDLVVAGTKDAVLMVESEANGLTEEEMLNAVKFGHEGFVPVIEMIEDLAKECRKPEWTVEKKDLSEIKKKLEEEFTEDLKKAFSTRDKQDRSNQISEITEKAKKLYEENEDYTDLDVNSQLKSLEKSIV

SEQ ID NO: 135888 - protein, 255 aa, Unknown
  Bacterial polypetide isolated from the Sargasso Sea
FTKELEKAFSIKDKKERSDLISEITEKAKKLYEEDENISELDVNYELKNLEKRIVRTNILKNKNRIDGRGLSDVRPIKCEVGILPRTHGSALFTRGETQAIVTTTLGTSDDEQRIESLDGLVRERFMLHYNFPPFSVGETGRIGTGRREIGHGKLAWRAIKSSLPSKESFPYTFRIVSEITESNGSSSMATVCGTSLSLMDAGVPMKTPVAGIAMGLIKEGDDFSVLSDILGDEDHLGDMDFKVAGTKDGITSLQ

SEQ ID NO: 135889 - protein, 252 aa, Unknown
  Bacterial polypetide isolated from the Sargasso Sea
CTELLLKKYENNADYTNVEVMDQLKALEKDIVRTNILKNKIRIDGRKLDEVRNIECEVGILPRSHGSALFTRGETQAIVATTLSTAEDEQKIESLDGMMRSRFMLHYNFPPFSVGEVGRIGTGRREIGHGKLAWRAINSSLPTKEEFPYTIRIVSEITESNGSSSMATVCGSSMSLMHAGVPIKKPIAGIAMGLIKEGKDYSVLSDILGDEDHLGDMDFKVAGTDEGITSLQMDIKITGITFEIMEKALSQA

SEQ ID NO: 135890 - protein, 283 aa, Unknown
  Bacterial polypetide isolated from the Sargasso Sea
YQAIENLEKKASKPKWEIEELDHSKIKKEITKKFEEDLRKAFRETDKKKRSTAISEIDNKCKELFKENEDVTENQVMSQLKSLEKDIVRTAILKDKKRIDGRGLADVRNIKCEVGVLPRTHGSALFTRGETQALVVTTLGMSEDEQRLESLDGMQRSSFMLHYNFPPFSVGECGRIGTGRREIGHGKLAWRAINSSLPLKENFPYTLRVVSEITESNGSSSMATVCGTSLSLMDAGVPIKEPVAGIAMGLIKEGNKFSVLSDILGDEDHLGDMDFKVAGTKDG

SEQ ID NO: 135891 - protein, 258 aa, Unknown
  Bacterial polypetide isolated from the Sargasso Sea
QKDLSKVQKKLKSEFEKDLKKAFSIKDKQERSNLIAEITEKAKKLYEEDENFTELDVMYELKNLEKGIVRTDILKNKNRIDGRGLADVRPIVCEVGILPRTHGSALFTRGETQAIVTTTLGTSDDEQRIESLDGLQRERFMLHYNFPPFSVGETGRIGTGRREIGHGKLAWRAINSSLPSKESFPYTFRIVSDITESNGSSSMATVCGSSLALMDAGVPIKEPVAGIAMGLIKEGKDFSVLSDILGDEDHLGDMDFKV

SEQ ID NO: 135892 - protein, 243 aa, Unknown
  Bacterial polypetide isolated from the Sargasso Sea
KDFFPLAVFYQEKFYAAGKIPGGYFKREARPTEKETLTSRLIDRPIRPLFPDEFKNDVQIMSTVISSDEEFSSDIAAMIGASAALSLSGVPFQGPIGAARVGFIDGSYTLNPSKKIMDQSFLDMVVAGTSEAVLMVESEASELNEDLMLGAVLFGHKSMQIVIDKIKEFKELVGVESWLVEKDEETPKYFAELQSDFSSKIEEAFTIAKKSKRSEAINAIRLEILEKYKDLDELAVGKVMSAF

SEQ ID NO: 135893 - protein, 308 aa, Unknown
  Bacterial polypetide isolated from the Sargasso Sea
TLGTSDDEQRIESLEGLQRERFMLHYNFPPFSVGETGRIGTGRREIGHGKLAWRAINSSLPPKESFPYTFRIVSEITESNGSSSMATVCGTSLALMDAGVPIKEPVAGIAMGLIKEGDDYSVLSDILGDEDHLGDMDFKVAGTKDGITSLQMDIKITGITFEIMEQALKQAKDGRIHILGEMNKALNKSRDGVGKHTPKMEKITVDKKDIATVIGKGGATIREIVEKSGAKVDVNDEGVVTVAAPDEESRNIALQFIKDLTAKAELNKIYNGKVIKIMEFGAFVNFLGKQDGLVHISELADKRVAKVT

SEQ ID NO: 135894 - protein, 270 aa, Unknown
  Bacterial polypetide isolated from the Sargasso Sea
IKEKAEEIKNLPSEIEKNYKLKFIDAYKIQEKQKRSELLNELRTEISENYETELLTSVIVSDATKSIEKDIVRSELLKTGSRIDGRDTKTVRPIKCEVGVLERTHGSALFTRGETQALVVTTLGTGQDEQRIDAIEGEYKENFMLHYNFPPYSVGEVGRAGSTSRREIGHGKLAWRAIHPMLPSAEKFPYTYRVVSEITESNGSSSMATVCGTSLSLMDAGVPLEKPIAGIAMGLIKEDKNYLVLSDILGDEDHLGDMDFKVAGTKDGIT

SEQ ID NO: 135895 - protein, 261 aa, Unknown
  Bacterial polypetide isolated from the Sargasso Sea
KYYAAGKIPGGYFKREARPTEAETLISRLIDRPIRPLFPENFRNEVQVLPTVISYDNENEADVLSIIASSAALSISGLPFKGPIGASRVGFIGGNCVLNPTKKELENSKLDLVVAGTKDAVLMVESEASGLTEKDMLDAVKFGHEGFASVIQGIEKLAKKCAKDTWKIEKKDLSKVSKKIEKELTKDLEKAFSEKDKKKRSELINLAGEKCKSFFEDDEELLEHEVMSQLKNLEKNIVRTRILKSKKRIDGRGLSDVRPIK

SEQ ID NO: 135896 - protein, 302 aa, Unknown
  Bacterial polypetide isolated from the Sargasso Sea
MFKVVKKEIEISGKKISLETGKIARQADGAIIAQCGETVVLATVVGAKKVNPDMDYFPLSVNYQEKYYAAGKIPGGYFKREARPTESETLISRLIDRPIRPLFPDEFKNEVQLLPTVISYDRENEADILSIIASSAALAISGMPFMGPVGASRVGFIEGKYVLNPSKTELEKSKLDLVVAGTKDAVLMVESEANGLTEEEMLNAVKFGHEGFVPIIEMIEDLAKECRKPEWTVEKKDLSEVKKKLEEEFTEDLKKAFSTRDKQDRSNQISEITEKAKKLYEENEDYSDLDVNSQLKNWKNLL

SEQ ID NO: 135897 - protein, 311 aa, Unknown
  Bacterial polypetide isolated from the Sargasso Sea
VAGTKDAVLMVESEASGLIEEEMLNAVKFGHEGFVPVIQMIEELAKECRKPEWTVEKKDLSEVKKKLEETFTEDLKKAFATRDKQDRSNQISEITDKAKKLYEEDENYTDLDVNSELKNLEKTIVRTDILKNRNRIDGRGLSDVRPISCEVGILPRTHGSALFTRGETQAIVTATLGTSDDEQRIESLDGLQRERFMLHYNFPPFSVGETGRIGTGRREIGHGKLAWRAIHSSLPPKEAFPYTFRVVSEITESNGSSSMATVCGTSLALMDAGVPIKEPVAGIAMGLIKEGDDFSVLSDILGDEDHLGDMD

SEQ ID NO: 135898 - protein, 273 aa, Unknown
  Bacterial polypetide isolated from the Sargasso Sea
KEFTSDLTKAFKIKDKQERSNLISEITEKAKKIFDENENYTELDVNYELKNLEKRIVRTDILKNKNRIDGRGLADVRPIMCEVGILPRVHGSALFTRGETQAIVTTTLGTSDDEQRIESLEGLQRERFMLHYNFPPFSVGEVGRIGTGRREIGHGKLAWRAINSSLPSKESFPYTFRIVSEITESNGSSSMATVCGTSLALMDAGVPIKEPVAGIAMGLIKEGDDFSVLSDILGDEDHLGDMDFKVAGTKDGITSLQMDIKIKGITFEIMEQA

SEQ ID NO: 135899 - protein, 286 aa, Unknown
  Bacterial polypetide isolated from the Sargasso Sea
KIIDGINDLVKKAGKEKWILDEIEKDETLKNKVKEIAGADIESAYSIVEKSERSNRLADIKKNTIERITESDEEISKDDIASEIKKIEKETVRSKILNGEPRIDGRDTKTVRDINVDINVLERTHGSALFTRGETQSIVVTTLGSERSSQIIDALEGEYKDKFMLHYNFPPYSVGEVGFMGSPKRREIGHGKLARRALEAVLPNMDEYPYTIRIVSEITESNGSSSMATVCGSSLSLMHAGVPIKSHVAGIAMGLVMEGDKYKVLTDILGDEDHLGDMDFKVAGTD

SEQ ID NO: 135900 - protein, 324 aa, Unknown
  Bacterial polypetide isolated from the Sargasso Sea
MEVIVSGTDDSIVMVEGESDFISEEDFLSAIQYAHEVIKDIIGLQQELAKECGKQKRLVAEKAVNEELNADIDSLIDGKISGFNKPKDKHSRYEDIRLFRNDIVEQLSEKYPDDGGKIKSYIDEKISDDLRSKTLEGVRADGRKLDEVRSIDIMTSVLPRAHGSAVFTRGETQALAALTLGNKKDEQMIDNIEGLSYKRHMLHYNFPPFSVGEARMRFSLSRREVGHGNLAERSVSKILPDFEDFPYTIRLVSEVLESNGSSSMATVCSSVLAMMDGGVPIKEPVAGVAMGLIMESKDKYAILTDILGTEDHLGDMDFKVAGTK

SEQ ID NO: 135901 - protein, 284 aa, Unknown
  Bacterial polypetide isolated from the Sargasso Sea
GDIIKNKSRIDGRNLDEVRQITCELDILPRAHGSSLFTRGETQALVVTTLGTGDDEQMIDSLDPMHKQHFMLHYNFPPYSVGEVGRVGATGRREIGHGKLAWRAVHPMLPKKEDFPYTLRLVSEITESNGSSSMATVCGSSLALMAAGVPIKKHIGGIAMGLIKEGEDFVVLSDILGDEDHLGDMDFKVAGTMDGITSLQMDIKITSITKEIMEIALNQASGGRKHIIGVMSDALPEARTKFSKHAPQVISITIDKAKIKDVIGSGGKVIKNIVEVSGAKLEVN

SEQ ID NO: 135902 - protein, 195 aa, Unknown
  Bacterial polypetide isolated from the Sargasso Sea
MFKVVKKEIEVSGKKLSLETGKIARQADGAIIAQCGETVVLATVVGAKKVSPDMDYFPLSVNYQEKYYAAGKIPGGYFKREARPTESETLISRLIDRPIRPLFPDEFKNEVQLLPTVISYDKENEPDILSIIASSAALAISGMPFMGPVGASRVGFIKGKYVLNPSKKELEESKLDLVVAGTKDAVLMVESEANG

SEQ ID NO: 135903 - protein, 282 aa, Unknown
  Bacterial polypetide isolated from the Sargasso Sea
SSSIVCETGVLERTHGSALFTRGETQALVVSTLGTGQDEQRIDAIDGEYTENFMLHYNFPPYSVGEVGRIGSTSRREIGHGKLAWRAIHPMLPSKEKFPYTYRVVSEITESNGSSSMATVCGTSMSLMDAGVPLERPVAGIAMGLIKEKDKYVILSDILGDEDHLGDMDFKVAGTSEGITSLQMDIKITSITAEIMEEALAQAKDGRFHILGEMAKAIDKPNQSISQYAPTITNLQINKDKIREVIGKGGAVIREISETTGAKIEINDEGLVSIAAVDQKSG

SEQ ID NO: 135904 - protein, 294 aa, Unknown
  Bacterial polypetide isolated from the Sargasso Sea
LKNKNRIDGRGLADVRPIVCEVGILPRTHGSALFTRGETQAIVTATLGTSDDEQRIESLDGLQRERFMLHYNFPPFSVGETGRIGTGRREIGHGKLAWRAINSSLPTKESFPYTFRIVSEITESNGSSSMATVCGTSLALMDAGVPMKEPVAGIAMGLIKEGDEFSVLSDILGDEDHLGDMDFKVAGTKDGITSLQMDIKITGITFEIMEQALKQAKDGRIHILGEMNKALSKSRDNVGKHTPKMEKITVDKKDIATVIGKGGATIREIVEKSGAKVDVNDVGESTVAAPDEDS

SEQ ID NO: 135905 - protein, 245 aa, Unknown
  Bacterial polypetide isolated from the Sargasso Sea
MLPVKFLGGYFKREARPTESETLTSRLIDRPIRPLFPDQFRNEVQLLPTVISYDKENEADILSIIASSAALAISGMPFMGPIAASRVGFINGKYVLNPSKKDLEKSKLDLVVAGTKDAVLMVESEAKGLTEEEMLNAVKFGHENFIPVIKMIEELAKECKKPAWEIEKKDLSEVKNKLVKEFTERLKKAFSIKDKQERSNLIANITEEAKKLYEEDENISELDVNYELKNLEKTIVRTDILKNKK

SEQ ID NO: 135906 - protein, 285 aa, Unknown
  Bacterial polypetide isolated from the Sargasso Sea
RVGFIDGKYVLNPSKEQLKNSKLDLVVAGTKDAVLMVESEANGLTEQEMLNAVKFGHESFVPVIKMIEELAEQCKKPDWTLEKKDLSEIKNTLDKEFTSDLKKAFATRDKQDRSNQISKITEKAIKLYEENEKYTDLDVNYELKNLEKRIVRTDILKNKNRIDGRGLADVRPIMCEVGILPRTHGSALFTRGETQAIVTATLGTSDDEQRIESLDGLQRERFMLHYNFPPFSVGETGRIGTGRREIGHGKLAWRAINSSLPSKESFPYTFRIVSEITESNGSSSM

SEQ ID NO: 135907 - protein, 305 aa, Unknown
  Bacterial polypetide isolated from the Sargasso Sea
LDLVVAGTKDAVLMVESETSGLSEEVMLAAVKFGHEGFVPVIEMIEELAKECRKPEWTVEKKDLSEVKQKLEETFTEDLKKAFATRDKQDRSNQISEITDKAKKLFEENENYSDLDVNSQLKNLEKKIVRTDILKNKNRIDGRGLSDVRPIECEVGVLPRTHGSALFTRGETQAIVVTTLGTSDDEQRIESLDGLQRERFMLHYNFPPFSVGETGRIGTGRREIGHGKLAWRAINSSLPSKEAFPYTFRIVSEITESNGSSSMATVCGASLALMDAGVPIKEPVAGIAMGLIKEGDDFSVLSEYF

SEQ ID NO: 135908 - protein, 300 aa, Unknown
  Bacterial polypetide isolated from the Sargasso Sea
QPDIVAILGTSAALAISGIPFSGPLGAARVGYIDGQYVLNPSETELKTSKLDLVVAGTANAVLMVESEAGVLSEEVMLGAVVYGHDQMQTAINAIAEFAAEGGKPAWEWVAPAKNEPLIAKIEALSTAALGEAYRITEKAKRYERIGAIKAEVFAQIKAELAEGESFNETEAAEIFHNLESKIVRSRIIKGEPRIDGRDNEMIRALSVMTGLLPRTHGSALFTRGETQALVTCTLGTARDAQTVDDLLSDKTDHFLFHYNFPPFSVGETGMVGSPKRREIGHGRLAKPWCCRGDARFLKL

SEQ ID NO: 135909 - protein, 321 aa, Unknown
  Bacterial polypetide isolated from the Sargasso Sea
LYHLGCSFDGPMGAARVGFINGEYVLNPSFEELEDSYLDMVVAGTDEAVLMVESEAKELNEDLMLGAVLFGHQEMKSVIKACNELKEKAGNEIWDIVVPENQNNYYQELDTNYKSQISEAFKISIKSDRNDALREIRNLIQEQYEDLDEMEMGKLMSDFKKLEKDIVRGNILNNQPRIDGRDLDTVRPIFVETDVLPGAHGSALFTRGETQAIVVATLGSSRDAQRIESIEGEGTDNFMLHYNFPAYSVGEIGMPMGPKRREIGHGNLAKRAIKSVLPDVDEFGYTMRVVSEITEIYGSSSMASVCGTFLSLMDAGGPLSS

SEQ ID NO: 135910 - protein, 285 aa, Unknown
  Bacterial polypetide isolated from the Sargasso Sea
AVLPDVDEFGYTMRVVSEITESNGSSSMASVCGTSLSLMDAGVPLSSPVAGIAMGLIKEGDDFAVLTDILGDEDHLGDMDFKVAGTETGITALQMDIKISGIDESIMESALIKAKSARNHILGIMNDVLSSPKELSENAPSMKSFMVDKDKIKEIIGKGGAVIKSMQEKTGATVDINDDGVVSVFGQNQKSMKECLAIIEGILEEPELDKVYKGKVVKIVEFGAFVNILPSKDGLLHISEISEERTENVNDVLEEGQEIEVKLIGFDRGKMKLSMKALANKADLV

SEQ ID NO: 135911 - protein, 205 aa, Unknown
  Bacterial polypetide isolated from the Sargasso Sea
QRIESLDGLQRERFMLHYNFPPFSVGETGRIGTGRREIGHGKLAWRAIHSSLPSKESFPYTFRVVSEITESNGSSSMATVCGTSLALMDAGVPIKEPVAGIAMGLIKEGDDFSVLSDILGDEDHLGDMDFKVAGTKDGITSLQMDIKITGITFEIMEQALGQAKDGRVHILGEMNKALSASRSDVGKHTPKMEQINVDKKDIAAV

SEQ ID NO: 135912 - protein, 281 aa, Unknown
  Bacterial polypetide isolated from the Sargasso Sea
MDYFPLSVNYQEKYYAGGKIPGGYFKREARPTESETLISRLIDRPIRPLFPDAFKNEVQLLPTVISYDSENQPDILAITASSAALAISGMPFMGPVGASRVGYIEGKYVLNPSKKELENSKLDLVVAGTKDAVLMVESEANGLTEEEMLNAVKFGHEGFVPVIEMIEELAKECRKPEWTVEKKDLSEIKKKLEDEFTEDLKKAFSTRDKQDRSNQISEITEKAKKLYEENEAYTDLDVNSQLKNLEKSIVRTDILKNKNRIDGRGLADVRPIMCEVGILPR

SEQ ID NO: 135913 - protein, 268 aa, Unknown
  Bacterial polypetide isolated from the Sargasso Sea
GALAERAILPVLPGKETFPYVLRVVSEVLSSNGSTSMGSVCGSTLSLLDAGVPLKAPVSGTAMGLIKEGKEVRILTDIQGIEDFLGDMDFKVAGTDKGITALQMDMKITGLPVSIISDAIKKARPARLHILEKMQAAIDKPQESLSPHAPRLLSFRIDPELIGTVIGPGGRTIKGITERTNTKIDIEDGGIVTIASHDGAAAEEAQKIIEGLTRKVHEGEIFSGVVTRIIPIGAFVEILPGKEGMVHISQLSEARVERVEDVVRQGDE

SEQ ID NO: 135914 - protein, 264 aa, Unknown
  Bacterial polypetide isolated from the Sargasso Sea
KLDLVVAGTKDAVLMVESEAKGLTEEEMLNAVKFGHEGFVPVIEMIEDLAKECRKPEWAVEKKDLSEIRKKLEEEFTEDLKKAFSTTDKQDRSNQISEITDKAKKLYEENEDYTDLDVNSQLKNLEKSIVRTDILKNKNRIDGRGLADVRPIMCEVGILPRVHGSALFTRGETQAIVTTTLGTSDDEQRIESLDGLQKERFMLHYNFPPFSVGETGRIGTGRREIGHGKLAWRAINSSLPSKENFPYTFRIVSEITESNGSSSM

SEQ ID NO: 135915 - protein, 313 aa, Unknown
  Bacterial polypetide isolated from the Sargasso Sea
KKEYIKVVDKYKSDFEKAYKIKIKTDRSGALESIKSKIEEQFDDDVNKNLLASVIKNKEADIVRSSILKTKNRIDGRDNKTVRNIFAEVGTLPKAHGSALFTRGETQALVVTTLGSSQDTQMIDGLDGDSKQSFMLHYNFPPYSVGEAGRVGTPGRREIGHGKLAWRAINPLLPSLEEFPYTIRMVSEITESNGSSSMATVCGTSLALMDAGVPLKKPIAGIAMGLIKEKDKFVVLSDILGDEDHLGDMDFKVAGTNDGITSLQMDIKITSITSKIMKEALDQALEGRKYILSEMKKAISKPRISLAENAPKI

SEQ ID NO: 135916 - protein, 299 aa, Unknown
  Bacterial polypetide isolated from the Sargasso Sea
KLESEITEELKKAFSIKDKQERSNLISEITDKAKKLYEEDENYTDLDVNSELKNLEKRIVRTDILKNKNRIDGRGLADVRPIICEVGILPRVHGSALFTRGETQAIVTTTLGTSDDEQKIESLEGLQKERFMLHYNFPPFSVGETGRIGTGRREIGHGKLAWRAINSSLPSKESFPYTFRIVSEITESNGSSSMATVCGSSLALMDAGVPIKEPVAGIAMGLIKEGDDFSVLSDILGDEDHLGDMDFKVAGTKDGITSLQMDIKITGITFEIMEQALKQAKDGRIHILGEMNKAFPNQE

SEQ ID NO: 135917 - protein, 254 aa, Unknown
  Bacterial polypetide isolated from the Sargasso Sea
GLSDVRPIMCEVGILPRTHGSALFTRGETQAIVTTTLGTSDDEQRIESLEGLQRERFMLHYNFPPFSVGETGRIGTGRREIGHGKLAWRAINSSLPSKESFPYTFRIVSEITESNGSSSMATVCGTSLALMDAGVPIKEPVAGIAMGLIKEGDDFSVLSDILGDEDHLGDMDFKVAGTKDGITSLQMDIKITGITFEIMEQALKQAKDGRIHILGEMNKALAKSREGVGKHTPKMEKITVDKKDIATVIGKGGA

SEQ ID NO: 135918 - protein, 226 aa, Unknown
  Bacterial polypetide isolated from the Sargasso Sea
VVGAKKVNPDMDYFPLSVNYQEKYYAAGKIPGGYFKREARPTESETLISRLIDRPIRPLFPDEFKNEVQLLPTVISYDKENEADILSIIASSAALAISGMPFMGPVGASRVGFIEGKYVLNPSKTELEKSKLDLVVAGTKDAVLMVESEANGLTEEEMLNAVKFGHEGFLPIIEMIEDLANECRKPEWTVEKKDLSEIKKKLEEEFTDDLKKAFSTRDKQDRSNQI

SEQ ID NO: 135919 - protein, 283 aa, Unknown
  Bacterial polypetide isolated from the Sargasso Sea
DRPIRPLFPDEFKNEVQLLPTVISYDKENEPDILSITASSAALAISGMPFMGPVGASRVGFIDGKYVLNPSKAELEKSKLDLVVAGTKDAVLMVESEASGLTEEEMLNAVKFGHEGFVPVIEMIEELAKECRKPEWTVEKKDLSEIKKKLEETFTKDLEKAFATRDKQDRSNQISEITDKAKRLYEEDENYTDLDVNSQLKNLEKSIVRTDILKNKNRIDGRGLSDVRPISCEVGVLPRAHGSALFTRGETQAIVVATLGTSDDEQRIESLDGLQRERFMLHY

SEQ ID NO: 135920 - protein, 229 aa, Unknown
  Bacterial polypetide isolated from the Sargasso Sea
MGLVKEEDGFAVITDILGDEDHLGDMDFKVAGTAEGITALQMDIKIDGITEEIFDVALEKAQKARTNILNSMNEVLSASREELSDKAPQAVVIQINTKKIRDVIGKGGETIRGLTEETGAIIEVEDSGKVTIYGDTPESRESALKRIEEITAEPEVNKIYTGTVANIMDFGAFVTIMPGRDGLVHVSEISEERVENVSDYFVEGEEVKVKVLEVDRQGKIRLTMKGLED

SEQ ID NO: 135921 - protein, 261 aa, Unknown
  Bacterial polypetide isolated from the Sargasso Sea
VNPDVDYFPLSVNYQEKYYAAGKIPGGYFKREARPSESETLISRLIDRPIRPLFPDEFKNEVQVLPTVISYDKENEADILSIIASSAALAISGMPFLGPVGASRVGFVDGNYILNPSKTDLKNSKLDLVVAGTKDAVLMVESEASGLTEEEMLNAVKFGHEGFVPVIKMIEDLAKECRKPDWIVEKKDLSEVKNKLESEFTVGLKKAFSTRDKQERSNMISEITDKAKKLYEENEEITDLDVNSELKNLEKAIVRTDILKI

SEQ ID NO: 135922 - protein, 294 aa, Unknown
  Bacterial polypetide isolated from the Sargasso Sea
SLGETVVLATAVGAKKINPDVDYFPLSVNYQEKYYSAGKIPGGYFKREARPTDSETLISRLIDRPIRPLFPDEFKNEVQLLPTVISYDKENEPDILSIIASSAALAISGMPFMGPVGASRVGFINGNYVLNPSKVELEKSKLDLVVAGTKEAVLMVESEASGLTEEEMLNAVKFGHKGFLPVIQMIEDIAKECRKPEWTIEKKDLSEVKKKLESTFTEDLKKAFATEDKQQRSNQISEITDKAKKLYEEDENYTDLDINSELKNLEKSIVRTDILEKKNRIDGRGLSDIRPDFL

SEQ ID NO: 135923 - protein, 286 aa, Unknown
  Bacterial polypetide isolated from the Sargasso Sea
SDLISETTEKAKKLYEEDENISELDVNYALKNLEKSIVRTNILKNKSRIDGRGLADVRPINCEVGILPRTHGSALFTRGETQAIVTTTLGTSDDEQRIETLDGLIRERFMLHYNFPPFSVGETGRIGTGRREIGHGKLAWRAIKSSLPSKESFPYTFRIVSEITESNGSSSMATVCGTSLSLMDAGVPMKTPVAGIAMGLIKEGNDFSVLSDILGDEDHLGDMDFKVAGTKDGITSLQMDIKITGITFEIMEQALKQAKDGRIHILGEMNKALNKSRDGVGKHTPK

SEQ ID NO: 135924 - protein, 301 aa, Unknown
  Bacterial polypetide isolated from the Sargasso Sea
FKGPVGASRVGFVDGKYILNPSKAELENSSLDLVVAGTKDAVLMVESEANGLTEEEMLNAVKFGHDGFVPVIKMIEEFAKECRKPEWVVEKKDLSEIKKKLEVTFTDDLKKAFSTRDKQDRSNQISEITDKAKKLYEEDENYTDLDVNSQLKSLEKAIVRTDILKNKNRIDGRGLSEVRPISCEVGVLPRTHGSALFTRGETQAIVTATLGTSDDEQRIESLDGLQRERFMLHYNFPPFSVGETGRIGTGRREIGHGKLAWRAIHSSLPPKESFPYTFRIVSEITESNGSSSYGPLSVEHL

SEQ ID NO: 135925 - protein, 251 aa, Unknown
  Bacterial polypetide isolated from the Sargasso Sea
SGTAMGLIKEGKEVRILTDIQGIEDFLGDMDFKVAGTDKGITALQMDMKITGLPVSVISDAIKKARPARLHILEKMKEAIENPQESLSPHAPRLLSFRIDPELIGTVIGPGGRTIKGITERTNTKIDIEDGGIVTIASHDGAAAEEAQKIIEGLTRKVHEGEIFSGVVTRIIPIGAFVEILPGKEGMVHISQLSEARVERVEDVVRQGDEVTVRVREIDSRGRINLTLRGVGQNNGMSYPQPTPTPVAPLN

SEQ ID NO: 135926 - protein, 227 aa, Unknown
  Bacterial polypetide isolated from the Sargasso Sea
MFKVYKKEIEVAGKKISLETGKIARQADGAIIAQCGETVVMATVVGAKKVNPDVDYFPLSVNYQEKYYAAGKIPGGYFKREARPTESETLISRLIDRPIRPLFPDEFKNEVQLLPTVISYDKENEADILSIIASSAALAISGMPFMGPVGASRVGFIEGKYVLNPSKKELENSKLDLVVAGTKDAVLMVESEANGLTEEEMLDAVKFGHEGFSPIIKMIEELALECK

SEQ ID NO: 135927 - protein, 271 aa, Unknown
  Bacterial polypetide isolated from the Sargasso Sea
KLIVRTDILKNKNRIDGRGLSDVRPISCEVGVLPRTHGSALFTRGETQAIVVTTLGTSDDEQRIESLDGLQRERFMLHYNFPPFSVGETGRIGTGRREIGHGKLAWRAINSSLPSKEAFPYTFRIVSEITESNGSSSMATVCGASLALMDAGVPIKEPVAGIAMGLIKEGDDFSVLSDILGDEDHLGDMDFKVAGTKDGITSLQMDIKITGITFEIMEQALNQAKDGRIHILGEMNKALSASRSDVGKHTPKMEQVNVDKKDIAAVIGKGG

SEQ ID NO: 135928 - protein, 255 aa, Unknown
  Bacterial polypetide isolated from the Sargasso Sea
KSIVRTDILKNKNRIDGRGLADVRPIECEVGILPRVHGSALFTRGETQAIVTTTLGTSDDEQRIESLEGLQRERFMLHYNFPPFSVGETGRIGTGRREIGHGKLAWRAINSSLPSKESFPYTFRIVSEITESNGSSSMATVCGTSLALMDAGVPIKEPVAGIAMGLIKEGDDFSVLSDILGDEDHLGDMDFKVAGTKDGITSLQMDIKITGITFEIMEQALNQAKDGRIHILGEMNKALDKSRAEVGKHTPKMEK

SEQ ID NO: 135929 - protein, 301 aa, Unknown
  Bacterial polypetide isolated from the Sargasso Sea
KDLGIKQIKPSKPEDDKTLPSYIEKNCTKAIELVLKKFNHSKEERDLELENIKIETQSKIESLKDDNQVKILVSENDKLLSSDFKKLTKKLMRSQIINDGKRVDGRELDEVRKISASAGILPKRVHGSALFQRGLTQVLSTTTLGTPSDAQEMDDLNPSTEKTYLHHYNFPPYSVGETRPMRTPGRREIGHGALAERAIIPVLPGKETFPYVLRVVSEVLSSNGSTSMGSVCGSTLSLLDAGVPLKAPVSGTAMGLIKEGKEVRILTDIQGIEDFLGDMDFKVAGTEKGITALQMDMKITG

SEQ ID NO: 135930 - protein, 297 aa, Unknown
  Bacterial polypetide isolated from the Sargasso Sea
RERFMLHYNFPPFSVGETGRIGTGRREIGHGKLAWRAIHSSLPSKESFPYTFRVVSEITESNGSSSMATVCGTSLALMDAGVPIKEPVAGIAMGLIKEGNDFSVLSDILGDEDHLGDMDFKVAGTKDGITSLQMDIKITGITFEIMEQALSQAKDGRVHILGEMNKALSASRSDVGKHTPKMEKINVDKKDIAAVIGKGGATIREIVEKSGAKVDVNDEGVVTVAAPDEESRNTAMQMIKDITAKAELNKIYSGKVMKIMEFGAFVNFLGKQDGLVHISELADKRVAKVTDVVKEGD

SEQ ID NO: 135931 - protein, 278 aa, Unknown
  Bacterial polypetide isolated from the Sargasso Sea
KDKKRIDGRGLADVRQIECEVGILPRTHGSALFTRGETQALVVTTLGMSDDEQRLESLEGMQRSNFMLHYNFPPFSVGECGRIGTGRREIGHGKLAWRAINSSLPKKENFPYTLRVVSEITESNGSSSMATVCGTSLSLMDAGVPIKEPVAGIAMGLIKEGEDFSVLSDILGDEDHLGDMDFKVAGTKNGITSLQMDIKITGITFEIMEEALNQAKAGREHILGEMNKAIKTSRKEFSKHTPKMETIKVDKKDIATVIGKGGATIREIVETSGAKVDV

SEQ ID NO: 135932 - protein, 265 aa, Unknown
  Bacterial polypetide isolated from the Sargasso Sea
MPFLGPVGASRVGFIKGEYVLNPNKAQLKDSKLDLVVAGTKDAVLMVESEASGLTEEEMLNAVKFGHEGFVPVIEMIEDLAKECKKSDWVVEKKDLSEVKNKLESEFTEELKKAFSIKDKQERSNLISVITDKAKKLYEEDENYTDLDVNSELKNLEKRIVRTDILKNKNRIDGRGLADVRPIMCEVGILPRVHGSALFTRGETQAIVTTTLGTSDDEQKIESLEGLQKERFMLHYNFPPFSVGETGRIGTGRREIGHGKLAGEQ

SEQ ID NO: 135933 - protein, 306 aa, Unknown
  Bacterial polypetide isolated from the Sargasso Sea
EKDIVRGDLLKTGNRIDGRDTKTVRPIVCETGILERTHGSALFTRGETQALVVTTLGTGMDEQRIDAIEGEYKQNFMLHYNFPPYSVGEVGRVGSTSRREIGHGKLAWRAIHPMLPSSDKFPYTYRVVSEITESNGSSSMATVCGTSMSLMDAGVPIDKPIAGIAMGLIKEDDKYVVLSDILGDEDHLGDMDFKVAGTKDGITSLQMDIKITSITSEIMKEALTQAKDGRIHILGEMAKAIEKPKEKISDYAPTITTFHVHKDKIREVIGKGGAVIREISETTGAKIEIDDEGLVSVAAVDGKVRK

SEQ ID NO: 135934 - protein, 265 aa, Unknown
  Bacterial polypetide isolated from the Sargasso Sea
GKKISLETGKVARQADGAIIATCGETVVLATVVGAKKVNPDMDYFPLSVNYQEKYYAAGKIPGGYFKREARPTESETLISRLIDRPIRPLFPDEFKNEVQLLPTVISYDKENEADILSIIASSAALAISGMPFMGPVGASRVGYIDGKYVLNPSKAELEKSKLDLVVAGTKDAVLMVESEASGLTEEEMLNAVKFGHEGFVPVIQMIEELAKECRKPEWTVEKKDLSEVKKKLEETFTEDLKKAFATRDKQDRSNQISEITDKAK

SEQ ID NO: 135935 - protein, 272 aa, Unknown
  Bacterial polypetide isolated from the Sargasso Sea
NLEKSIVRTDILKNKNRIDGRGLSDVRPISCEVGVLPRTHGSALFTRGETQAIVVATLGTSDDEQRLESLDGQHRERFMLHYNFPPFSVGETGRIGTGRREIGHGKLAWRAINSSLPSKEAFPYTFRIVSEITESNGSSSMATVCGTSLALMDAGVPIKEPVAGIAMGLIKEGDDFSVLSDILGDEDHLGDMDFKVAGTKDGITSLQMDIKITGITFEIMEQALSQAKDGRIHILGEMNKALDKSRADVGKHTPKMEQITVDKKDIATVIGK

SEQ ID NO: 135936 - protein, 305 aa, Unknown
  Bacterial polypetide isolated from the Sargasso Sea
PKWEVVEIDHTKVKNKISDKFEKDLRSAFKEIDKKKRSTAIAEIETQCKELFAEDENVTENHVMAQLKSLEKDIVRTAILKDKKRIDGRGLADVRQIKCEVGVLPRTHGSALFTRGETQALVVTTLGMSDDEQRLESLDGMQRSNFMLHYNFPPFSVGECGRIGTGRREIGHGKLAWRAINSSLPLKENFPYTLRVVSEITESNGSSSMATVCGTSLSLMDAGVPIKEPVAGIAMGLIKEGKDFSVLSDILGDEDHLGDMDFKVAGTKDGITSLQMDIKITGITFEIMEKALDQAKDGREHILSE

SEQ ID NO: 135937 - protein, 302 aa, Unknown
  Bacterial polypetide isolated from the Sargasso Sea
LAISGMPFMGPVGASRVGFIDGKYVLNPSKAELEKSKLDLVVAGTKDAVLMVESEASGLTEEEMLNAVKFGHEGFVPVIEMIEELAKECRKPEWTVEKKDLTEVKKKLEETFTEDLKKAFATRDKQDRSNQISEITDKAKKLYEEDENYTDLDVNSQLKSLEKSIVRTDILKNKNRIDGRGLSDVRPIECEVGLLPRAHGSALFTRGETQAIVVATLGTSDDEQRIESLDGLQRERFMLHYNFPPFSVGETGRIGTGRREIGHGKLAWRAINSSLPSKEAFPYTFRVVSEITESNGSSSMAT

SEQ ID NO: 135938 - protein, 295 aa, Unknown
  Bacterial polypetide isolated from the Sargasso Sea
IKEKDEELKKLPNNINEKYGKQFIEAYKINEKQNRSEKLSTIRSEINEKFISDTISSVLLSDAIKNVEKDIVRGELINTGNRIDGRDTKTVRPIVCETGILERTHGSALFTRGETQAIVVSTLGTGMDEQRIDAIDGEYTENFMLHYNFPPYSVGEVGRVGSTSRREIGHGKLAWRAIHPMLPSKDKFPYTYRVVSEITESNGSSSMATVCGTSMSLMDAGVPLERPVAGIAMGLIKENDKYVILSDILGDEDHLGDMDFKVAGTSEGITSLQMDIKITSITADIMKEALAQAKE

SEQ ID NO: 135939 - protein, 263 aa, Unknown
  Bacterial polypetide isolated from the Sargasso Sea
MISEITDKAKKLYEENEEITDLDVNSELKNLEKTIVRTDILKNKNRIDGRGLSDVRPIMCEVGILPRVHGSALFTRGETQAIVTTTLGTSDDEQKIESLDGLQKERFMLHYNFPPFSVGETGRIGTGRREIGHGKLAWRAINSSLPPKETFPYTFRIVSEITESNGSSSMATVCGTSLALMDAGVPIKEPVAGIAMGLIKEGDDFSVLSDILGDEDHLGDMDFKVAGTKDGITSLQMDIKITGITFEIMEQALNQAKDGRIIF

SEQ ID NO: 135940 - protein, 289 aa, Unknown
  Bacterial polypetide isolated from the Sargasso Sea
VNLAKRAIKGVLPDFDAFGYTVRIVSEITESNGSSSMATVCGTSLSLMDAGVPLTAPVAGIAMGLIKDGDEFAVLTDILGDEDHLGDMDFKVAGSEKGITALQMDIKIDGINEKIMDEALTSAKEARMHILEKMNEVLSKPKELASDAPSMQKFMVNKDKIKEIIGKGGSVIKSIQEESGAVVDINDTGEISVFGDNQAKMQAALDIIDKIIEEPELDKVYEGTVVKIVDFGAFVNILPGKDGLLHISEISEERTEDVSAVLEEGQKVSVKLIGFDRGKMKLSIKALSK

SEQ ID NO: 135941 - protein, 293 aa, Unknown
  Bacterial polypetide isolated from the Sargasso Sea
MLEAVVFGQESYKPVIDAIISLAKQAAKDPWLLPEKDEEISKLPENIGRDYKEEFKKAYNIQEKQNRSEKLNFLRSEIEEKFVSENLSSVVVADAVKSIEKDIVRGELLNTGNRIDGRDTKTVRPIICETGILERTHGSALFTRGETQALVITTLGTGSDEQRIDAIEGEYKENFMLHYNFPQYSVGEVGRAGSTSRREIGHGKLAWRAIHPMLPSPEQFPYTYRVVSEITESNGSSSMATVCGTSMSLMDAGVPLEKPIAGIAMGLIKDADKYVVLSDILGDEDHLGDMDFK

SEQ ID NO: 135942 - protein, 240 aa, Unknown
  Bacterial polypetide isolated from the Sargasso Sea
MFKVFKKEIELNGKKLSLETGKIARQADGAIIAKCGETIVMATVVGAKKINPEIDYFPLSVNYQEKYYAAGKIPGGYFKREARPTESETLISRLIDRPIRPLFPDEFKNEVQLLPTVISYDKENEADILSIIASSAALAISGMPFMGPVGASRVGFIDGKYVLNPSKKELENSKLDLVVAGTKDAVLMVESEAKGLTEEEMLKAVKFGHESFVPVISMIEELAKECKKPDWVVKKKIYPK

SEQ ID NO: 135943 - protein, 299 aa, Unknown
  Bacterial polypetide isolated from the Sargasso Sea
KVNPDVDYFPLQVNYQEKYYAAGKIPGGYFKREARPTENETLVSRLIDRPIRPLFPDEFKNEVQLLPTVISYDKENEPDILSIIASSAALAISGMPFMGPIGASRVGFIEGKYILNPSKKELENSKLDLVVAGTKDAVLMVESEAKGLSEEEMLSAVKFGHEGFVPVIKMIEELAKECKKPDWIVEKKDLAEVKKKLEEEFTTDLKKAFATRDKQDRSNQISEITDKAKKLYEENEIYSDLDVNSQLKIIEKSIVRTDILKNKNRIDGRGLADIRPIECEVGILPRVHGSALLQEARLK

SEQ ID NO: 135944 - protein, 270 aa, Unknown
  Bacterial polypetide isolated from the Sargasso Sea
NSYLDMVVAGTDEAVLMVESEAKELNEDLMLGAVLFGHQEMKAVINACNELKNKAGKEEWIIEEDENVTNYYSDVESKYKDEITEAFTISNKSDRNEALATIKAKIVEDYSDLDEFELGRVLSSFKELEKNIVRGNILNNMPRIDGRDLDTVRPIFVETDVLPSAHGSALFTRGETQAVVVATLGSSRDAQRIEAIEGEGSDNFMLHYNFPAYSVGEIGMPMGPKRREIGHGNLAKRAIKPVLPDIDEFGYTMRVVSEITESNGSSSMAS

SEQ ID NO: 135945 - protein, 292 aa, Unknown
  Bacterial polypetide isolated from the Sargasso Sea
GTMRDAAMIDALEGTYKDSFMLHYNFPPYSVGEAGFMSGPKRREIGHGRLARRGVQAMLPDVEEFPYTLRVVSEITESNGSSSMASVCGTSLALMDAGVPMKAPVAGVAMGLVKEGNKYAVLTDILGDEDHLGDMDFKVAGSESGITALQMDIKIDGITEEIMEAALEQAKEGRLHILSEMNQVIDKSRESVSDNAPSMVVIKVHPDKIRDIIGKGGATIRSIVEETGADIDIEDDGSVRIYAEDGESKDAALAKIEEITAEAEVGKIYKGQVARIVDFGAFINILPGKDGL

SEQ ID NO: 135946 - protein, 323 aa, Unknown
  Bacterial polypetide isolated from the Sargasso Sea
STIDKQQRSNMISEITDKAKKLYEENEEISDLDVNSELKNLEKTIVRTDILKNKKRIDGRSLSDVRPIMCEVGILPRVHGSALFTRGETQAIVTTTLGTSDDEQKIESLDGLQKERFMLHYNFPPFSVGETGRIGTGRREIGHGKLAWRAINSSLPPKETFPYTFRIVSEITESNGSSSMATVCGTSLALMDAGVPIKEPVAGIAMGLIKEGENFSVLSDILGDEDHLGDMDFKVAGTKDGITSLQMDIKITGITFEIMEQALKQAKDGRIHILGEMNKALAKSRDDVGKHTPKMEKISVDKKDIATVIGKRWSNNKRDCRSL

SEQ ID NO: 135947 - protein, 298 aa, Unknown
  Bacterial polypetide isolated from the Sargasso Sea
TVRPIVCETGVLERTHGSALFTRGETQALVVSTLGTGQDEQRIDAIDGEYTENFMLHYNFPPYSVGEVGRIGSTSRREIGHGKLAWRAIHPMLPSKEKFPYTYRVVSEITESNGSSSMATVCGTSMSLMDAGVPLERPVAGIAMGLIKEKDKYVILSDILGDEDHLGDMDFKVAGTSEGITSLQMDIKITSITAEIMEEALAQAKDGRFHILGEMAKAIDKPNQSISQYAPTITNLQINKDKIREVIGKGGAVIREISETTGAKIEINDEGLVSIAAVDQKSGNDALEWIKGIVEEPE

SEQ ID NO: 135948 - protein, 307 aa, Unknown
  Bacterial polypetide isolated from the Sargasso Sea
VAQVMSYDPEVQTDVPAIIGTAAALALSGMPFNGPLAAARVGFKDGHYLLNPSLSEIENSDLNLVVAGTSEAVLMVESEASELSEQVMLGAVLFGHDQMQVAINVINEMKEEANVQAWNWQPPVENTALMTALKEKSQSQLQAAYAISDKQERYDALNLARSQAIESLCDGEEHSPEEREVGNLLHDLEAQIVRSQILGGHPRIDGRDTETVRPISIDVGLLPRVHGSVVFTRGETQAIVTATLGTERDAKIIDDLDGDRKDPFMLHYNFPPFCVGETGMMSGPKRREIGHGWLARRAVTAILPDMS

SEQ ID NO: 135949 - protein, 310 aa, Unknown
  Bacterial polypetide isolated from the Sargasso Sea
KVARQADGAIIATCGETVVLATVVGAKKVNPDMDYFPLSVNYQEKYYAAGKIPGGYFKREARPTESETLISRLIDRPIRPLFPDEFKNEVQLLPTVISYDKENEPDILSITASSAALAISGMPFMGPVGASRVGFIDGKYVLNPSKAELEKSKLDLVVAGTKDAVLMVESEASGLTEEEMLNAVKFGHEGFVPVIEMIEELVKECRKPEWTVEKKDLSEVKKKLEKTFTEDLKKAFATRDKQDRSNQISEITDKAKKLYEEDENYTDLDVNSQLKNLEKSIVRTDILKNKNRIDGRGLSDVRPIECEVGV

SEQ ID NO: 135950 - protein, 309 aa, Unknown
  Bacterial polypetide isolated from the Sargasso Sea
YKTVIEAIISLAKKAAKEPWELKEKDEEIKNLPSKINEDFGKDFIDAYKITEKQKRSEKLSSLRNEISEKFVSETLSPVLVSDAIKNLEKDIVRGELINTGNRIDGRDTKTVRPIVCETGVLERTHGSALFTRGETQALVVSTLGTGQDEQRIDAIDGEYTENFMLHYNFPPYSVGEVGRIGSTSRREIGHGKLAWRAIHPMLPSKEKFPYTYRVVSEITESNGSSSMATVCGTSMSLMDAGVPLERPVAGIAMGLIKENDKYVILSDILGDEDHLGDMDFKVAGTSEGITSLQMDIKITSITAEIMEE

SEQ ID NO: 135951 - protein, 234 aa, Unknown
  Bacterial polypetide isolated from the Sargasso Sea
TDIQGIEDFLGDMDFKVAGTDKGITALQMDMKITGLPVSIISEAIKKARPARIHILEKMQEAIDKPQESLSPHAPRLLSFRIDPELIGTVIGPGGRTIKGITERTNTKIDIEDGGIVTIASHDGAAAEEAQKIIEGLTRKVHEGEIFSGVVTRIIPIGAFVEILPGKEGMVHISQLSEARVERVEDVVRQGDEVTVRVREIDSRGRINLTLRGVGQNNGMSYPQPTPTPVAPLN

SEQ ID NO: 135952 - protein, 280 aa, Unknown
  Bacterial polypetide isolated from the Sargasso Sea
GVLPRTHGSALFTRGETQALVITTLGMSDDEQRLESLDGMQRSSFMLHYNFPPFSVGECGRIGTGRREIGHGKLAWRAINSSLPLKENFPYTLRVVSEITESNGSSSMATVCGTSLSLMDAGVPIKEPVAGIAMGLIKEGEKFSVLSDILGDEDHLGDMDFKVAGTKDGITSLQMDIKITGITFEIMEQALKQAKAGREHILGEMNKAIKISRKEFSKHTPKMETIKVDKKDIATVIGKGGATIREIVEKSGAKVDVKDTGEVTVAAPDEKSRNSAIEII

SEQ ID NO: 135953 - protein, 308 aa, Unknown
  Bacterial polypetide isolated from the Sargasso Sea
PDEDSTVPAYLEKQCTKAISAVLSKFDQSKDERDTALETVKGEVSETIAGLKDDHAVRQALASSPKLLGNSFKALTKKLMRQQILKDGKRVDGRGLDEVRQISAMAGVLPRRVHGSGLFQRGLTQVLSTATLGTPSDAQEMDDLHPNTEKLYLHHYNFPPYSVGETRPMRSPGRREIGHGALAERAILPVLPEKDTFPYVVRVVSEVLSSNGSTSMGSVCGSTLSLMDAGVPLKAPVSGAAMGLIKEGDEVRILTDIQGIEDFLGDMDFKVAGSEKGITALQMDMKITGLSVKTVAEAVNQARPARLH

SEQ ID NO: 135954 - protein, 270 aa, Unknown
  Bacterial polypetide isolated from the Sargasso Sea
MYEEDENYTDLDVNSELKNLEKRIVRTDILKNKNRIDGRGLADVRPIMCEVGILPRVHGSALFTRGETQAIVTTTLGTSDDEQKIESLDGLQKERFMLHYNFPPFSVGETGRIGTGRREIGHGKLAWRAINSSLPSKESFPYTFRIVSEITESNGSSSMATVCGSSLALMDAGVPIKEPVAGIAMGLIKEGEEFSVLSDILGDEDHLGDMDFKVAGTKDGITSLQMDIKITGITFEIMEQALKQAKDGRIHILGEMNKALSKSREDVGKH

SEQ ID NO: 135955 - protein, 250 aa, Unknown
  Bacterial polypetide isolated from the Sargasso Sea
NLEKKIVRTDILKNKNRIDGRGLSDVRPIECEVGVLPRTHGSALFTRGETQAIVVTTLGTSDDEQRIESLDGLQRERFMLHYNFPPFSVGETGRIGTGRREIGHGKLAWRAINSSLPSKEAFPYTFRIVSEITESNGSSSMATVCGASLALMDAGVPIKEPVAGIAMGLIKEGDDFSVLSDILGDEDHLGDMDFKVAGTKDGITSLQMDIKITGITFEIMEQALKQAKDGRIHILGEMNKALGESRSDVG

SEQ ID NO: 135956 - protein, 287 aa, Unknown
  Bacterial polypetide isolated from the Sargasso Sea
ESEANGLSEEEMLNAVKFGHEGFVPVIEMIEELAKECRKPEWIVEKKDLSEVKQKLEETFTEDLKKAFATRDKQDRSNQISEITEKAKKLYEENENYSDLDVNVELKNLEKSIVRTDILKNKNRIDGRGLSDVRPISCEVGILPRTHGSALFTRGETQAIVVTTLGTSDDEQRLESLDGQQRERFMLHYNFPPFSVGETGRIGTGRREIGHGKLAWRAINSSLPSKESFPYTFRIVSEITESNGSSSMATVCGTSLALMDAGVPIKEPVAGIAMGLIKEGNDFSVFP

SEQ ID NO: 135957 - protein, 269 aa, Unknown
  Bacterial polypetide isolated from the Sargasso Sea
TVVLATVVGAKKVNPDMDYFPLSVNYQEKYYAAGKIPGGYFKREARPTESETLVSRLIDRPIRPLFPDEFKNEVQLLPTVISYDKENEADILSIIASSAALAISGMPFMGPVGASRVGFIEGKYVLNPSKTELEKSKLDLVVAGTKDAVLMVESEANGLTEEEMLNAVKFGHEGFVPIIEMIEDLANECKKPEWTVEKKDLSEIKKKLEEEFTEDLKKAFSTRDKQDRSNQISEITEKAKKIYEENEAYTDLDINSQLKNLEKSIVRND

SEQ ID NO: 135958 - protein, 295 aa, Unknown
  Bacterial polypetide isolated from the Sargasso Sea
MLNAVKFGHEGFVPIIEMIEDLAKECRKPEWTVEKKDLSEIKKKLEEEFTEDLKKAFSTRDKQDRSNQISEITEKAKKLYEENETYTDLDVNSQLKNLEKSIVRTDILKNKNRIDGRGLADVRPIMCEVGILPRVHGSALFTRGETQAIVTTTLGTSDDEQRIESLDGLQKERFMLHYNFPPFSVGETGRIGTGRREIGHGKLAWRAINSSLPSKESFPYTFRIVSEITESNGSSSMATVCGTSLALMDAGVPIKEPVAGIAMGLIKEGDDFSVLSDILGDEDHLGDMDFKVAGT

SEQ ID NO: 135959 - protein, 257 aa, Unknown
  Bacterial polypetide isolated from the Sargasso Sea
NQISEITDKAKKLYEEDENYTDLDVNSQLKNLEKSIVRTDILKNKNRIDGRGLSDVRSISCEVGVLPRTHGSALFTRGETQAIVVATLGTSDDEQRLESLDGQHRERFMLHYNFPPFSVGETGRIGTGRREIGHGKLAWRAINSSLPSKEAFPYTFRIVSEITESNGSSSMATVCGTSLALMDAGVPIKEPVAGIAMGLIKEGDDFSVLSDILGDEDHLGDMDFKVAGTKDGITSLQMDIKITGITFEIMEQALSQA

SEQ ID NO: 135960 - protein, 285 aa, Unknown
  Bacterial polypetide isolated from the Sargasso Sea
KQSRSEKLTSIRSDIADKFTSDTLSSVLISDAIKNVEKDIVRSELLSTGNRIDGRDTKTVRPIVCETGILERTHGSALFTRGETQALVVSTLGTGQDEQRIDAIDGEYTENFMLHYNFPPYSVGEVGRMGSTGRREIGHGKLAWRAIHPMLPSKEKFPYTYRVVSEITESNGSSSMATVCGTSMSLMDAGVPIERPVAGIAMGLIKEQDKYVILSDILGDEDHLGDMDFKVAGTSEGITSLQMDIKITSITAEIMKEALAQAKEGRFHILDEMAKAINKPNKSIS

SEQ ID NO: 135961 - protein, 264 aa, Unknown
  Bacterial polypetide isolated from the Sargasso Sea
IESLDGLQKERFMLHYNFPPFSVGETGRIGTGRREIGHGKLAWRAINSSLPSKESFPYTFRIVSEITESNGSSSMATVCGTSLALMDAGVPIKEPVAGIAMGLIKEGEDFSVLSDILGDEDHLGDMDFKVAGTKDGITSLQMDIKITGITFEIMEQALNQAKDGRIHILGEMNKALDKSRDEVGKHTPKMEKISVDKKDIAAVIGKGGATIREIVEKSGAKVDVNDEGVVTVAAPDEESRNIAMQMIKDITAKAELNKIYNGKV

SEQ ID NO: 135962 - protein, 296 aa, Unknown
  Bacterial polypetide isolated from the Sargasso Sea
FPLTVSYQEKFYAAGKIPGGFFKREGRPTEFETLTSRLIDRPIRPLFPEGFKNETQVILTVLSHDTETNPDIVAMIAASSALTLSGIPFMGPIGGCRVGYDGENYILNPKINEETQLDLVVSGTQDAVLMVESEAKELSEEIMLGAVKFGHESMQEVIKMIINLAEECAKDPWEFEYSVNDELMKELKNEYEDQIRKSYSIVDKIERQNSLNEIKSTLEEKYTENENQNINDVMSYFKKIEKDVVRSQILRDKSRIDGRKLDEVRNITSEVSWLPRTHGSSLFTRGENTAIVVATL

SEQ ID NO: 135963 - protein, 245 aa, Unknown
  Bacterial polypetide isolated from the Sargasso Sea
MFAEDENVSENQVMGQLKSLEKDIVRTAILKEKKRIDGRGLADVRQIKCEVGVLPRTHGSALFTRGETQALVVTTLGMSDDEQRLESLEGMQKSNFMLHYNFPPFSVGECGRIGTGRREIGHGKLAWRAINSSLPAKENFPYTLRVVSEITESNGSSSMATVCGTSLSLMDAGVPIKEPVAGIAMGLIKEGEDFSVLSDILGDEDHLGDMDFKVAGTKDGITSLPMDIKITGITFEIMEKALGQS

SEQ ID NO: 135964 - protein, 241 aa, Unknown
  Bacterial polypetide isolated from the Sargasso Sea
KVAKQATASTIVRCGDTVVMCNVTAAKQAKPDIDFFPLTVNYQEKYYAAGKIPGGFFKREARPTEAETLVSRLIDRPIRPLFPEGFKNETQVILTVLSHDTETNADIVAMVAASSALTISGIPFMGPISGCRVGYKDSEYLLNPKMNEESDLDLVVAGTNSAVLMVESEANQLSEEVMLGAVTFGHEAMKPVIDMIIDLAEECAKEPWEFEYIENTQIKEIVKSECSDDIANAYALTDKME

SEQ ID NO: 135965 - protein, 120 aa, Unknown
  Bacterial polypetide isolated from the Sargasso Sea
LISRLIDRPIRPLFPESFKNEVQLLPTVLSYDNENEADILSIIASSAALSISGLPFKGPVGASRVGFIDGKCVLNPTKKELENSKLDLVVAGTKDAVLMVESEASGLTEKEMLDAVKFGH

SEQ ID NO: 135966 - protein, 248 aa, Unknown
  Bacterial polypetide isolated from the Sargasso Sea
EIGHGKLARRALEAVLPSPDDFPYTIRVVSEITESNGSSSMASVCGSSLALMDAGIPLKAAVAGIAMGLVKEEEGFAVITDILGDEDHLGDMDFKVAGTSEGITALQMDIKIDGITEEIFEVALEKAHTARNHILSSMNEVISSSREQLSEKAPQAVVVQINTKKIRDVIGKGGETIRGLTEETGAIIEVEDSGKVTIYGDTPESRESAQKRIEEITAEPEVNKIYTGTVANIKDFGAFVTIMPGRDG

SEQ ID NO: 135967 - protein, 277 aa, Unknown
  Bacterial polypetide isolated from the Sargasso Sea
SALFTRGETQAIVVATLGTSDDEQRIESLDGLQRERFMLHYNFPPFSVGETGRIGTGRREIGHGKLAWRAINSSLPTKEAFPYTFRVVSEITESNGSSSMATVCGTSLALMDAGVPIKEPVAGIAMGLIKEGDDFSVLSDILGDEDHLGDMDFKVAGTKDGITSLQMDIKITGITFEIMEQALSQAKDGRVHILGEMNKALSASRSDVGKHTPKMEQVNVDKKDIAAVIGKGGATIREIVEKSGAKVDVNDEGVVTVAAPDEESRNIAMQMIKDITA

SEQ ID NO: 135968 - protein, 257 aa, Unknown
  Bacterial polypetide isolated from the Sargasso Sea
SVGETGRIGTGRREIGHGKLAWRAINSSLPSKESFPYTFRIVSEITESNGSSSMATVCGTSLALMDAGVPIKEPVAGIAMGLIKEGDDFSVLSDILGDEDHLGDMDFKVAGTKDGITSLQMDIKITGITFEIMEQALKQAKDGRIHILGEMNKALDKSRDGVGKHTPKMEKITVDKKDIATVIGKGGATIREIVEKSGAKVDVNDEGVVTVAAPDEESRNIALQFIKDLTAKAELNKIYNGKVMKIMEFGAFVNFLG

SEQ ID NO: 135969 - protein, 283 aa, Unknown
  Bacterial polypetide isolated from the Sargasso Sea
MLHYNFPPFSVGECGRIGTGRREIGHGKLAWRAISSSLPKKENFPYTLRVVSEITESNGSSSMATVCGTSLSLMDAGVPIKEPVAGIAMGLIKEGKDFSVLSDILGDEDHLGDMDFKVAGTKNGITSLQMDIKITGITFEIMEKALEQAKAGREHILGEMNKALKSSRKEFSKHTPKMEVIQVDKKDIATVIGKGGATIREIVETSGAKVDVKDTGEVTVAAPDEESRKKALEFIKSLVAKPEVGKIYKGKVVKIMEFGAFVNFLGKQDGLVHISELAGKRVA

SEQ ID NO: 135970 - protein, 284 aa, Unknown
  Bacterial polypetide isolated from the Sargasso Sea
DGRGLADVRQIKCEVGVLPRTHGSALFTRGETQALVVTTLGMADDEQRLESLEGMQRSNFMLHYNFPPFSVGECGRIGTGRREIGHGKLAWRAINSCLPKKENFPYTLRVVSEITESNGSSSMATVCGTSLSLMDAGVPIKEPVAGIAMGLIKEGEDFSVLSDILGDEDHLGDMDFKVAGTKNGITSLQMDIKITGITFEIMEKALEQAKSGREHILGEMNKAIQTSRKEFSKHTPKIETIKVDKKDIATVIGKGGATIREIVETSGAKVDVKDTGEVTVAAPR

SEQ ID NO: 135971 - protein, 275 aa, Unknown
  Bacterial polypetide isolated from the Sargasso Sea
VATLGTSDDEQKIESLDGLKRERFMLHYNFPPFSVGETGRIGTGRREIGHGKLAWRAINSSLPTKEAFPYTFRVVSEITESNGSSSMATVCGTSLALMDAGVPIKEPVAGIAMGLIKEGDDFSVLSDILGDEDHLGDMDFKVAGTKDGITSLQMDIKITGITFEIMEQALSQAKDGRIHILGEMNKALSTSRSDVGKHTPKMEQVNVDKKDIAAVIGKGGATIREIVEKSGAKVDVNDEGVVTVAAPDEESRSVAFAMIKDITAKAELNKFIQAK

SEQ ID NO: 135972 - protein, 160 aa, Unknown
  Bacterial polypetide isolated from the Sargasso Sea
EIGHGALAERAIIPVLPGKETFPYVLRVVSEVLSSNGSTSMGSVCGSTLSLLDAGVPLKAPVSGTAMGLIKEGKEVRILTDIQGIEDFLGDMDFKVAGTDKGITALQMDMKITGLPVSIISDAIKKARPARLHILEKMQAAIDKPQESLSPHAPKLLSFR

SEQ ID NO: 135973 - protein, 282 aa, Unknown
  Bacterial polypetide isolated from the Sargasso Sea
ISEITDKAKKLYEEDENITELDVNAELKNLEKSIVRTDILKNKNRIDGRGLSDVRPISCEVGVLPRVHGSALFTRGETQAIVTATLGTSDDEQRIESLDGLQRQRFMLHYNFPPFSVGETGRIGTGRREIGHGKLAWRAIHSSLPSKEAFPYTFRVVSEITESNGSSSMATVCGTSLALMDAGVPIKEPVAGIAMGLIKEGDDFSVLSDILGDEDHLGDMDFKVAGTKDGITSLQMDIKITGITFEIMEQALSQAKDGRVHIIGEMNKALSASRSEVENILQ

SEQ ID NO: 135974 - protein, 268 aa, Unknown
  Bacterial polypetide isolated from the Sargasso Sea
VRVVSEITESNGSSSMATVCGTSLSLMDAGVPLTAPVAGIAMGLIKDGDEFAVLTDILGDEDHLGDMDFKVAGSEKGITALQMDIKIDGINEKIMDEALTSAKEARMHILEKMNEVLSKPKDLASDAPSMQKFMVNKDKIKEIIGKGGSVIKSIQEESGAVVDINDTGEISVFGDNQAKMQAALDIIDKIIEEPEVDKVYEGTVVKIVDFGAFVNILPGKDGLLHISEISEERTEDVSAVLEEGQKVTVKLIGFDRGKMKLSIKALSK

SEQ ID NO: 135975 - protein, 274 aa, Unknown
  Bacterial polypetide isolated from the Sargasso Sea
TGRREIGHGKLAWRAINSSLPSKESFPYTFRIVSEITESNGSSSMATVCGTSLALMDAGVPIKEPVAGIAMGLIKEGDDFSVLSDILGDEDHLGDMDFKVAGTKDGITSLQMDIKITGITFEIMEQALKQAKDGRIHILGEMNKALNKSRDGVGKHTPKMEKITVDKKDIATVIGKGGATIREIVEKSGAKVDVNDEGIVTVAAPDEESRNIALQFIKDLTAKAELNKIYNGKVMKIMDFGAFVNFLGKQDGLVHISELADKRVAKVTDVVKEG

SEQ ID NO: 135976 - protein, 248 aa, Unknown
  Bacterial polypetide isolated from the Sargasso Sea
MDYFPLSVNYQEKYYAAGKIPGGYFKREARPTESETLISRLIDRPIRPLFPDEFKNEVQLLPTVISYDKENEPDILSITASSAALAISGMPFMGPVGASRVGFIDGKYVLNPSKSELEKSKLDLVVAGTKDAVLMVESEANGLTEEEMLSAVKFGHEGFVPVIEMIEELAKECSKPEWTVEKKDLSEVKKKLEETFTEDLKKAFATRDKQDRSNQISEITDKAKKLYEEDENYTDLDVNSQLKSLEKS

SEQ ID NO: 135977 - protein, 288 aa, Unknown
  Bacterial polypetide isolated from the Sargasso Sea
MKKKIYSEIKQKLEETFTEDLKKAFATRDKQDRSNQISEITDKAKKLYEENENYSDLDINTELKNLEKSIVRTDILKNKSRIDGRGLSDVRPISCEVGILPRAHGSALFTRGETQAIVVTTLGTSDDEQRLESLDGQQRERFMLHYNFPPFSVGETGRIGTGRREIGHGKLAWRAINSSLPSKESFPYTFRIVSEITESNGSSSMATVCGTSLALMDAGVPIKEPVAGIAMGLIKEGDDFSVLSDILGDEDHLGDMDFKVAGTKNGITSLQMDIKITGITFEIMEQAL

SEQ ID NO: 135978 - protein, 307 aa, Unknown
  Bacterial polypetide isolated from the Sargasso Sea
SGLTEKEMLNAVKFGHEGFVPVIKMIEELAKECRKPEWTVEKKDLSEVKKKLEETFTTDLKKAFTTRDKQDRSNQISEITDKAKKLYEEDENYTDLDVNSELKNLEKTIVRTDILKNKNRIDGRGLSDVRPISCEVGVLPRTHGSALFTRGETQAIVTATLGTSDDEQRIESLDGLQRERFMLHYNFPPFSVGETGRIGTGRREIGHGKLAWRAIHSSLPSKESFPYTFRVVSEITESNGSSSMATVCGTSLALMDAGVPIKEPVAGIAMGLIKEGDDFSVLSDILGDEDHLGDMDFKVAGTKDGIT

SEQ ID NO: 135979 - protein, 295 aa, Unknown
  Bacterial polypetide isolated from the Sargasso Sea
QAIVTTTLGTSDDEQRIESLDGLQRERFMLHYNFPPFSVGETGRIGTGRREIGHGKLAWRAIKSSLPSKESFPYTFRIVSEITESNGSSSMATVCGSSLALMDAGVPIKEPVAGIAMGLIKEGDDFSVLSDILGDEDHLGDMDFKVAGTKDGITSLQMDIKITGITFEIMEQALKQAKDGRVHILGEMNKALAKSRSGVGKHTPKMEKITVDKKDIATVIGKGGATIREIVEKSGAKVDVNDEGVVTVAAPDEDSRNKAMQMIKDLTAKAELNKIYNGKVMKIMEFGAFVNFLGK

SEQ ID NO: 135980 - protein, 279 aa, Unknown
  Bacterial polypetide isolated from the Sargasso Sea
VGYIDKKFVLNPSKSKLENSDLDLVVAGTKDGVLMVESEVKELPEKIMLDAVMFAHKEFQDVIKFIETFAKGKKVSEIEYKNENGDKNSKDLFSKIEKKYKNDFINAYKEKDKAIRSDALLGIRKNITEEFIVEDNDEITENLVSSATKKVEKELVRSSILKSGKRIDGRDTKTVRPIKAEVGVLSRVHGSALFTRGETQALVVTTLGTSLDEQIIDDLEGEFKESFMLHYNFPPYSVGEANMLRPPGRREIGHGKLAWRAIKPLMPIKDKFPYTIRVV

SEQ ID NO: 135981 - protein, 328 aa, Unknown
  Bacterial polypetide isolated from the Sargasso Sea
ERKDKICMIEGGSKFCFGKKQFLEALDVAMDGINDIVDLQMEFSEHFDNSYEVIDTKVITEDVEKSLDDAYLSKMEKIFDLDTKQARDDEFNAIEKEALEPYLEDEEMYPEVKNHIKNMFKNTVRKTVLDKKVRVDGRGLEDIRDISVVESILPRVHGSALFTRGETQSIAALTLGSSRDEQIIDSMASDYKKSFLLHYNFPPYCVGEVGRIGFTNRREIGHGYLAERSLKPILPSSDEFPYTVRIVSEITESNGSSSMASVCGGSLAMMNAGVPIKEHVAGIAMGLIMEDDDNYAVLSDILGTEDFLGDMDFKVAGTKDGISAIQLD

SEQ ID NO: 135982 - protein, 268 aa, Unknown
  Bacterial polypetide isolated from the Sargasso Sea
MFKVYKKEIEVAGKKISLETGKVARQADGAIIATCGETVVLATVVGAKKVNPDMDYFPLSVNYQEKYYAAGKIPGGYFKREARPTESETLISRLIDRPIRPLFPDEFKNEVQLLPTVISYDKENEPDILSITASSAALAISGMPFMGPVGASRVGYIDGKYVLNPSKADLEKSKLDLVVAGTKDAVLMVESEASGLTEEEMLSAVKFGHEGFVPIIEMIEELAKECRKPEWTVEKKDLSEVRKNLKKLLQMILKKHFAQEINKIDQIK

SEQ ID NO: 135983 - protein, 297 aa, Unknown
  Bacterial polypetide isolated from the Sargasso Sea
VNYQEKYYAAGKIPGGYFKREARPTEAETLISRLIDRPIRPLFPDEFKNEVQLLPTVISYDKENEADILSIIASSAALSISGMPFKGPVGASRVGFINGKYVLNPTKSEIEQSKLDLVVAGTRDAVLMVESEASGLSEEEMLNAVKFGHQGFIPVIDMIEELAKECKKTDWIIEKKDLSEVKKKLEEEFTATLKKAFATKDKQDRSNQISEITEKAKKLFEDNDNYTDLDVNSELKGLEKTIVRTDILKNKNRIDGRGLDQVRPIMCEVGIFARTHGSALFYRGETQAIVTTTLGTS

SEQ ID NO: 135984 - protein, 224 aa, Unknown
  Bacterial polypetide isolated from the Sargasso Sea
MTKVISREMNWGDQVLKIETGKVAKQATASTIVSYGDTVVMANVVAAKTAKPDIDFFPLTVSYQEKFYAAGKIPGGFFKREGRPTEFETLTSRLIDRPIRPLFPEGFKNETQVILTVLSHDTETNPDIVAMIAASSALTLSGIPFMGPIGGCRVGYDGKDYILNPKINEETQLDLVVSGTQDAVLMVESEAKELAEEIMLGAVKLKHESMQEVIKIIINLQRSV

SEQ ID NO: 135985 - protein, 243 aa, Unknown
  Bacterial polypetide isolated from the Sargasso Sea
TTLGSERSSQIIDALEGEYKDKFMLHYNFPPYSVGEVGFMGSPKRREIGHGKLARRALEAVLPNMAEYPYTIRIVSEITESNGSSSMATVCGSSLSLMHAGVPIKSHVAGIAMGLVMEGDKYKVLTDILGDEDHLGDMDFKVAGTDNGITALQMDIKIAGITEEIMKDALSQAKDAKDHILKIMNEAISSPSEEYSPYAPSIISITVPKDKIRDVIGKGGATIRSITEVNGAQVDINDDGIVT

SEQ ID NO: 135986 - protein, 299 aa, Unknown
  Bacterial polypetide isolated from the Sargasso Sea
TVVGAKKVNPEVDYFPLSVNYQEKYYAAGKIPGGYFKREARPTESETLISRLIDRPIRPLFPDEFRNEVQLLPTVISYDKENEPDILSIIASSAALAISGMPFMGPIAASRVGFIEGKYVLNPSKKELENSSLDLVVAGTKDAVLMVESEANGLTEEEMLKAVKFGHEKFIPIINTIEELAKECKKTEWILEKKDLSEVKKKIEQEFKNELTKAFSIKDKQQRSNLISEVTDKAKKLFEENESYTDLDVNYELKNLEKRIVRTDILKNKKRIDGRGLSDVRQIMCEVEFAKDSWLSIIT

SEQ ID NO: 135987 - protein, 311 aa, Unknown
  Bacterial polypetide isolated from the Sargasso Sea
NRVHGSALFQRGLTQVLSTATLGTPSDAQEMDDLNPNTDKTYIHHYNFPPYSVGETRPMRTPGRREVGHGALAERALIPVLPAKDTFPYVLRVVSEVLSSNGSTSMASVCGSTLALMDAGVPLKAPVGGAAMGLIKEGKEVRILTDIQGIEDFLGDMDFKVAGTEKGITALQMDMKITGLPIETIGEAINQALPARTHILGKMLDAIETPKDNLSPHAPRLLSFRIDPELIGTVIGPGGRTIKGITERTNTKIDIEDGGIVTIASHDGAAAEEAQRIIEGLTRKVHEGEIFPGSITRIIPIGAFVEILPGK

SEQ ID NO: 135988 - protein, 303 aa, Unknown
  Bacterial polypetide isolated from the Sargasso Sea
GYFKREARPTESETLISRLIDRPIRPLFPDEFKNEVQLLPTVISYDKENEPDILSITASSAALAISGMPFMGPVGASRVGFIDGKYVLNPSKTDLENSSLDLVVAGTKDAVLMVESEANGLTEEEMLNAVKFGHEGFVPVIEMIEELAKECRKPEWTVEKKDLSEVKKKLEETFTEDLKKAFATIDKQDRSNQISEITDKAKKLYEEDENYSDLDVNSQLKNLEKSIVRTDILKNKNRIDGRGLSDVRPISCEVGVLPRAHGSALFTRGETQAIVVATLGTSDDEQRIESLDGLQRERFMLHY

SEQ ID NO: 135989 - protein, 302 aa, Unknown
  Bacterial polypetide isolated from the Sargasso Sea
ETQGLVVTTLGSGDSEQIIDALHKEGRLNFMLHYNFPPYSVGECGRMMGPGRREIGHGKLAWRALQAVLPSSEEFPYTVRVVSEITESNGSSSMATVCGSSLSMMDAGVPLKAPVAGVAMGLILEGKKFAVLTDILGDEDHLGDMDFKVAGTKAGITSLQMDIKVAGITPQIMEKALDQAKEARLHILGEMAKSLSAPSEFSQYAPKIESITVPSDKIREVIGSGGKVIKEIVEVSGAKVDINDDGLVRIASQNKESLDIARKMIKEIVEDPIVGQVYEGKVVKLMDFGAFVNFYGKRDGLV

SEQ ID NO: 135990 - protein, 311 aa, Unknown
  Bacterial polypetide isolated from the Sargasso Sea
WDILKGEARPTESETLISRLIDRPIRPLFPDEFKNEVQLLPTVISYDKENEADILSIIASSAALAISGMPFMGPVGASRVGFIKGKYVLNPSKKELEDSKLDLVVAGTKDAVLMVESEANGLTEEEMLNAVKFGHEGFLPIIDMIENLAKECRKPEWTVEKKDLSEIKKKLEEEFTEDLKKAFSTRDKQDRSNQISEITEKAKKLYEENEAYTDLDVNSQLKNLEKSIVRTDILKNKNRIDGRGLADVRPIMCEVGILPRVHGSALFTRGETQAIVTTTLGTSDDEQRIESLDGHQKERFMLHYNFPPFSV

SEQ ID NO: 135991 - protein, 299 aa, Unknown
  Bacterial polypetide isolated from the Sargasso Sea
EAKELSEDQMLGGILFAHQEMQVAIEAIKEMVSDIGKPEFQYEPKVLNPEVVELVKNNYSDQISAAYALQIKQERVQALSEIREKILEENASEDEESFSQNDLLDAFKKVGKNIVRKRLIEGAPRIDGRDLDTVRPLFIETGVLKNTHGSALFTRGETQAIVTSTLGSPRQAQLIDALEGEYKDQFMLHYNFPPYSVGEAGFMSGPKRREIGHGKLARRALEAVLPSPDDFPYTIRVVSEITESNGSSSMASVCGSSLALMDAGIPLKSAVAGIAMGLVKEEAGFAVITDILGDEDHLG

SEQ ID NO: 135992 - protein, 295 aa, Unknown
  Bacterial polypetide isolated from the Sargasso Sea
IKISISSKIDGLKDDNAVKKSLSLNNKLLENSYKALTKKLMREQIIKEGKRVDGRELNEVRAIDADAAVLPNRVHGSALFQRGLTQVLSTATLGTPSDAQEMDDLNPNTDKTYIHHYNFPPYSVGETRPMRTPGRREVGHGALAERALIPVLPAKDTFPYVLRVVSEVLSSNGSTSMASVCGSTLALMDAGVPLKAPVGGAAMGLIKEGKEVRILTDIQGIEDFLGDMDFKVAGTEKGITALQMDMKITGLPIETIGEAINQALPARTHILGKMLDAIETPKDNLSPHAPRLLSF

SEQ ID NO: 135993 - protein, 294 aa, Unknown
  Bacterial polypetide isolated from the Sargasso Sea
LETGKVARQADGAVIATIGETVVLATVVGAKKVNPEVDYFPLSVNYQEKYYAAGKIPGGYFKREARPTESETLISRLIDRPIRPLFPDEFKNEVQLLPTVISYDKENEADILSIIASSAALAISGMPFLGPVGASRVGFIDGKYVLNPSKTDLEKSKLDLVVAGTKDAVLMVESEANGLTEEEMLNAVKFGHENFVPVIKMIEELAKECRKPDWVVEKKDLSEVKKKLEKEFTDDLKKAFSTRDKQDRSNQISEITEKAKKLYEEDENYTELDVNYELKNLEKRIVRTDILKNK

SEQ ID NO: 135994 - protein, 203 aa, Unknown
  Bacterial polypetide isolated from the Sargasso Sea
MFKVFNKEIEVAGKKISLETGKIARQADGAIIAKCGETVVMATVVGAKKINPDVDYFPLSVNYQEKYYAAGKIPGGYFKREARPTESETLISRLIDRPIRPLFPDEFKNEVQLLPTVISYDKENEADILSIIASSAALAISGMPFMGPVGASRVGFVEGKYVLNPSKKELENSKLDLVVAGTKDAVLMVESEANGLTEEEMLN

SEQ ID NO: 135995 - protein, 281 aa, Unknown
  Bacterial polypetide isolated from the Sargasso Sea
TIVRGTDILKNKNRIDGRGLSDVRPISCEVGILPRTHGSALFTRGETQAIVTATLGTSDDEQRIESLDGLQRERFMLHYNFPPFSVGETGRIGTGRREIGHGKLAWRAIHSSLPSSESFPYTFRVVSEITESNGSSSMATVCGTSLALMDAGVPIKEPVAGIAMGLIKEGDEFSVLSDILGDEDHLGDMDFKVAGTKNGITSLQMDIKITGITFEIMEQALSQAKDGRIHILGEMNKALSVSRSDVGKHTPKMEKINVDKKDIAAVIGKGGATIREIVEKS

SEQ ID NO: 135996 - protein, 297 aa, Unknown
  Bacterial polypetide isolated from the Sargasso Sea
RLESLEGMQRSNFMLHYNFPPFSVGECGRIGTGRREIGHGKLAWRAINSSLPKKDNFPYTLRVVSEITESNGSSSMATVCGTSLSLMDAGVPIKEPVAGIAMGLIKEGDNFSVLSDILGDEDHLGDMDFKVAGTKNGITSLQMDIKITGITFEIMKKALDQAKSGREHILNEMNKAIKTSRKEFSKHTPKMETIKVDKKDIATVIGKGGATIREIVETSGAKVDVKDTGEVTVAAPDESSRNKAIEFIKNLIAKPEMGKIYKGKVVKIMEFGAFVNFLGKQDGLVHISELADKRVAK

SEQ ID NO: 135997 - protein, 292 aa, Unknown
  Bacterial polypetide isolated from the Sargasso Sea
PTESETLISRLIDRPIRPLFPDEFKNEVQLLPTVISYDKENQPDILAITASSAALAISGMPFMGPVGASRVGYVDGKYILNPSKEELESSSLDLVVAGTKDAVLMVESETSGLSEEVMLAAVKFGHEGFVPVIEMIEELAKECRKPEWIVEKKDLSEVKQKLEETFTEDLRKAFATRDKQDRSNQISEITDKAKKLFEENENYSDLDVNSQLKNLEKKIVRTDILKNKNRIDGRGLSDVRPISCEVGVLPRTHGSALFTRGETQAIVVTTLGTSDDEQRIESLDGLQRERFM

SEQ ID NO: 135998 - protein, 306 aa, Unknown
  Bacterial polypetide isolated from the Sargasso Sea
IQTWIIFPLSVNYQEKYYAGGKIPGGYFKREARPTESETLISRLIDRPIRPLFPDAFKNEVQLLPTVISYDKENQPDILAITASSAALAISGMPFMGPVGASRVGFVDGKYILNPSKAELENSNLDLVVAGTKDAVLMVESEANGLTEEEMLNAVKFGHEGFIPVIKMIDELAKECRKPEWTVEEKDLSEVKKKLEETFTKDLKKAFATRDKQDRSNQISEITDKAKKLYEENENYTDLDVNSQLKNLEKSIVRTDILKNKNRIDGRGLSDVRPISCEVGVLPRTHGSALFTRGETQAIVVATLGT

SEQ ID NO: 135999 - protein, 322 aa, Unknown
  Bacterial polypetide isolated from the Sargasso Sea
RIEALQGSYKENFMLHYNFPPYSVGEVGRMGSAGRREIGHGKLAWRALKAVLPNKEVFDYTIRLVSDITESNGSSSMATVCGSSLALMDAGVPIKNSVSGIAMGLIKEGDDFAVLSDILGDEDHLGDMDFKVAGTKDGITSLQMDIKITGITYEIMEKALDQAKGGRDYILNEMNKALDSPRTELGPYTPRVETMKVKRDNIGEIIGKGGATIKDIIEKSGAKIDISDSGSVKIAGTNDESIQAAMELINSIIEEPEIGQVYEGKVVKIMEFGAFVNFFGKRDGLVHISQLSEERVEKVTDVVSEGDIVKVKVIGFDKGKVK

SEQ ID NO: 136000 - protein, 320 aa, Unknown
  Bacterial polypetide isolated from the Sargasso Sea
KIKVETQVKIESLKDDNELKILISENDKLLGSDFKKLTKKLMRLQIINDGKRVDGRDLDEVRKISASTGILPKRVHGSALFQRGLTQVLSTTTLGTPSDAQEMDDLNPSTEKTYLHHYNFPPYSVGETRPMRTPGRREIGHGALAERAIMPVLPGKEKFPYVLRVVSEVLSSNGSTSMGSVCGSTLSLLDAGVPLKAPVSGTAMGLIKEGKEIRILTDIQGIEDFLGDMDFKVAGTDKGITALQMDMKITGLPVSIISDAIKKARPARLHILEKMQQAIDKPQESLSPHAPRLLSFRIDPELIGTVIGPGGRTIKGITER

SEQ ID NO: 136001 - protein, 278 aa, Unknown
  Bacterial polypetide isolated from the Sargasso Sea
TVSYQEKFYAAGKIPGGFFKREGRPTEFETLTSRLIDRPIRPLFPEGFKNETQVILTVLSHDTETNPDIVAMIAASSALTLSGIPFMGPIGGCRVGYDGKDYILNPKINEETQLDLVVSGTQDAVLMVESEAKELSEEIMLGAVKFGHDSMQEVIKIIINLAEECARDPWEFEYNVNDELMNELKSEFEDQIKKSYSIVDKMERQNSLSEIKSAVEEKYADIEDENINEVMSYFKKIEKDVVRSQILNDKSRIDGRKLDEVRDITSEVSWLPRTHGSS

SEQ ID NO: 136002 - protein, 313 aa, Unknown
  Bacterial polypetide isolated from the Sargasso Sea
MLNAVKFGHEGFVPVIEMIEQLAKECKKPDWIVEKKDLSEVKKKLEEDFTDDLKKAFATKDKQDRSNQISEITDKAKKLYEENENYSDLDVNSQLKNLEKNIVRTDILKNKNRIDGRGLADVRPIECEVGILPRVHGSALFTRGETQAIVTTTLGTSDDEQRIESLEGLQRERFMLHYNFPPFSVGETGRIGTGRREIGHGKLAWRAINSSLPSKESFPYTFRIVSEITESNGSSSMATVCGTSLALMDAGVPIKEPVAGIAMGLIKEGDDFSVLSDILGDEDHLGDMDFKVAGTKDGITSLSMDIKITGITF

SEQ ID NO: 136003 - protein, 318 aa, Unknown
  Bacterial polypetide isolated from the Sargasso Sea
FQGPIGAARVGLFEDSYVLNPSYNQLSNSYLDMVVAGTKDAVLMVESEAKELSEDLMLGAVLYAHQEMQAVVNACNELKEKVNPNIWDIEEQDLSHFEKDILENYSSKIKEAFKTSDKSLRGEMISKIHKDVKDSAGEIDEIELSKMMKSLKNVEKDILRKDILENNQRIDGRSLDQVRPIEIETSVLSRAHGSALFTRGETQSIVVATLGSTKDAQRIENLNAETTDPFMLHYNFPGYSVGEISFPGGPKRREIGHGNLAKRAIKNVLPNLEEFGYTIRVVSEITESNGSSSMATVCGTSLSLMDAGVPITSPCCQG

SEQ ID NO: 136004 - protein, 315 aa, Unknown
  Bacterial polypetide isolated from the Sargasso Sea
VYQKEEMLNAVKFGHEGFIPIIQMIEDLSKECRKPEWVVEKKDLSEIKKKLEEEFTEDLKKAFSTRDKQDRSNQISEITDKAKKLYEENEDYTDLDVNSELKNLEKSIVRTDILKNKNRIDGRGLADVRPIMCEVGILPRVHGSALFTRGETQAIVTTTLGTSDDEQRIESLDGLQKERFMLHYNFPPFSVGETGRIGTGRREIGHGKLAWRAINSSLPSKESFPYTFRIVSEITESNGSSSMATVCGTSLALMDAGVPIKEPVAGIAMGLIKEGDDFTVLSDILGDEDHLGDMDFKVAGTKDGITSLQMDIKIT

SEQ ID NO: 136005 - protein, 253 aa, Unknown
  Bacterial polypetide isolated from the Sargasso Sea
ESLDGLKRERFMLHYNFPPFSVGETGRIGTGRREIGHGKLAWRAIHSSLPSSEVFPYTFRVVSEITESNGSSSMATVCGTSLALMDAGVPIKEPVAGIAMGLIKEGDDFSVLSDILGDEDHLGDMDFKVAGTKEGITSLQMDIKITGITFEIMEQALSQAKEGRIHILDEMNKALGKSRDEVGKHTPKMEKITVDKKDIAAVIGKGGATIREIVEKSSAKVDVNDEGVVTVAAPDEESRNIAMQMIKDITAKA

SEQ ID NO: 136006 - protein, 324 aa, Unknown
  Bacterial polypetide isolated from the Sargasso Sea
DYTKVEVMDQLKSLEKDIVRTNILKNKIRIDGRKLDDVRKIECEVGILPRSHGSALFTRGETQAIVATTVSTAEDEQKIESLEGMMKSRFMLHYNFPPFSVGEVGRIGTGRREIGHGKLAWRAINSSLPTKEEFPYTIRIVSEITESNGSSSMATVCGSSMSLMHAGVPIKKPIAGIAMGLIKEGKDYSVLSDILGDEDHLGDMDFKVAGTDEGITSLQMDIKITGITFEIMEKALNQAKDGRLKILNAMSKAISKSNSELSKYTPKMEKIQVEKKEIAAIIGKGGATIREIVETSGAKVDINDDGIVTISAADEETRNKAIKM

SEQ ID NO: 136007 - protein, 273 aa, Unknown
  Bacterial polypetide isolated from the Sargasso Sea
RPLFPDEFKNEVQLLPTVISYDKENQPDILAITASSAALAISGMPFMGPVGASRVGYVDGKYILNPSKAELENSNLDLVVAGTKDAVLMVESEANGLTEEEMLNAVKFGHKGFVPVIEMIEELAKECRKPEWIVEKKDLSEVKQKLEDTFTEDLKKAFATRDKQDRSNQISVITDKAKKLYEENENYSDLDVNTELKNLEKSIVRSDILKNKNRIDGRGLSDVRPISCEVGVLPRTHGSALFTRGETQAIVVTTLGTSDDEQRLESLDGQQRE

SEQ ID NO: 136008 - protein, 330 aa, Unknown
  Bacterial polypetide isolated from the Sargasso Sea
LYEENENYSDLDVNSQLKNLEKSIVRTDILKNKNRIDGRGLSDVRPIECEVGILPRAHGSALFTRGETQAIVTTTLGTSDDEQRIESLEGLQRERFMLHYNFPPFSVGETGRIGTGRREIGHGKLAWRAINSSLPSKESFPYTFRIVSEITESNGSSSMATVCGTSLALMDAGVPIKEPVAGIAMGLIKEGDEFSVLSDILGDEDHLGDMDFKVAGTKDGITSLQMDIKITGITFEIMEQALNQAKDGRIHILGEMNKALDKSRAEVGKHTPKMEKITVDKKDIAAVIGKGGATIREIVENSGAKVDVNDEGVVTVAAPDEESRNKAMQM

SEQ ID NO: 136009 - protein, 263 aa, Unknown
  Bacterial polypetide isolated from the Sargasso Sea
LERTHGSALFTRGETQALVVTTLGTGQDEQRIDAIEGEYKENFMLHYNFPPYSVGEVGRAGSTSRREIGHGKLAWRAIHPMLPSAEKFPYTYRVVSEITESNGSSSMATVCGTSLSLMDAGVPLEKPIAGIAMGLIKEDKNYLVLSDILGDEDHLGDMDFKVAGTKDGITSLQMDIKITSITSAIMKEALAQAKEGRLHILNEMSKAIDKSREEISNYAPTITTIQVHKDKIREVIGKGGAVIREITEKTGAKIEINDEGLVS

SEQ ID NO: 136010 - protein, 324 aa, Unknown
  Bacterial polypetide isolated from the Sargasso Sea
IVRTDILKNKNRIDGRGLSDVRPIMCEVGILPRTHGSALFTRGETQAIVTTTLGTSDDEQRIESLDGLQRERFMLHYNFPPFSVGEVGRVGTGRREIGHGKLAWRAINSSLPSKESFPYTFRIVSEITESNGSSSMATVCGASLALMDAGVPIKEPVAGIAMGLIKEGNDFSVLSDILGDEDHLGDMDFKVAGTKDGITSLQMDIKITGITFEIMEQALKQAKDGRVHILGEMNKALNKSRADVGKHTPKMEKITVDKKDIATVIGKGGATIREIVEKSGAKVDVNDEGVVTVAAPDEESRNKAMQFIKDLTAKAEMTKFTTVK

SEQ ID NO: 136011 - protein, 287 aa, Unknown
  Bacterial polypetide isolated from the Sargasso Sea
EVAGKKISLETGKVARQADGAIIATCGETVVLATVVGAKKVNPDVDYFPLSVNYQEKYYAAGKIPGGYFKREARPTESETLISRLIDRPIRPLFPDEFKNEVQLLPTVISYDKENEPDILSINASSAALAISGMPFMGPVGASRVGFIDGKYVLNPSKVELEKSKLDLVVAGTKDAVLMVESEANGLTEEEMLNAVKFGHEGFVPVIEMIEELAKECRKPEWTVEKKNLSEVKKKLEETFTEDLKKAFATRDKQDRSNQISEITEKAKKLYDDDENYSDLDVNSELK

SEQ ID NO: 136012 - protein, 244 aa, Unknown
  Bacterial polypetide isolated from the Sargasso Sea
MQRSNFMLHYNFPPFSVGECGRIGTGRREIGHGKLAWRAINSSLPSKENFPYTLRVVSEITESNGSSSMATVCGTSLSLMDAGVPIKEPVAGIAMGLIKEGNNFSVLSDILGDEDHLGDMDFKVAGTKNGITSLQMDIKITGITFEIMEKALDQAKGGREHILAEMNKAIKTSRKEFSKHTPKMETIKVDKKDIATVIGKGGATIREIVETSGAKVDVKDTGEVTVAAPDEDSRNKAIEFIKNL

SEQ ID NO: 136013 - protein, 289 aa, Unknown
  Bacterial polypetide isolated from the Sargasso Sea
MGPVGASRVGYIDGKYVLNPSKVELEKSKLDLVVAGTKDAVLMVESEANGLTEEEMLSAVKFGHEGFVPVIGMIEELAKECRKTEWVVENKDLSKVKKKLEETFTEDLKKAFATRDKQDRSNQISEITDKAKKLYEKDENYTDLDVNSELKNLEKKIVRTDILKNKNRIDGRGLSEVRPISCEVGVLPRTHGSALFTRGETQAIVTATLGTSDDEQRIESLDGLQRERFMLHYNFPPFSVGETGRIGTGRREIGHGKLAWRAIHSSLPSKEAFPYTFRLVSEITESNGS

SEQ ID NO: 136014 - protein, 218 aa, Unknown
  Bacterial polypetide isolated from the Sargasso Sea
MFKVLKKEIEVAGKKISLETGKIARQADGAIIAKCGETIVLATVVGAKKVNPEVDYFPLSVNYQEKYYAAGKIPGGYFKREARPTESETLISRLIDRPIRPLFPDEFRNEVQLLPTVISYDKENEADILSIIASSAALAISGMPFMGPVGASRVGFIDGKYVLNPSKKDLEKSKLDLVVAGTKDAVLMVESEAKGLTEKQMLDAEKFGHENFVPLIKM

SEQ ID NO: 136015 - protein, 296 aa, Unknown
  Bacterial polypetide isolated from the Sargasso Sea
RIESLDGLQKERFMLHYNFPPFSVGEIGRIGTGRREIGHGKLAWRAINSSLPSKENFPYTFRIVSEITESNGSSSMATVCGTSLALMDAGVPIKEPVAGIAMGLIKEGDDFTVLSDILGDEDHLGDMDFKVAGTKDGITSLQMDIKITGITFEIMEQALNQAKDGRIHILGEMNKALSKSRDNVGKHTPKMEKITVDKKDIAAVIGKGGATIREIVEKSGAKVDVNDEGEVTVAAPDEESRNIAMQMIKDITAKAELNKIYNGKVMKIMEFGAFVNFLGKQDGLVHISELADKRVA

SEQ ID NO: 136016 - protein, 296 aa, Unknown
  Bacterial polypetide isolated from the Sargasso Sea
AKRAIQAVLPDNEDFPYTVRIVSDVLESNGSSSMATVCGSSLSLMDAGVPIEAPVAGIAMGLIKEGDSYIILSDILGDEDHLGDMDFKVCGTSEGITALQMDIKIKGISEDIMKEALEQAKKGRNHILSEMSKTISSQKENISSYAPRITTIMVDPAKIKDIIGSGGKNIRKLIEDNNVKIDVDDTGRVNVIAVNEEDAKGALKDIAYIVRDIEVGKYYIGSVKRVLDFGAIVGLSPTMDGLIHVSELAKERVAKVTDILNEGDEVLVKCLEKGRDGKIRLSRKEALDQNIEDFRE

SEQ ID NO: 136017 - protein, 279 aa, Unknown
  Bacterial polypetide isolated from the Sargasso Sea
MFKVYKKEIEVAGKKISLETGKIARQADGAIIAKCGETVVLATVVGAKKVNPEVDYFPLSVNYQEKYYAAGKIPGGYFKREARPTESETLISRLIDRPIRPLFPDEFKNEVQLLPTVISYDKENEADILSIIASSAALAISGMPFKGPVGASRVGFIDGKYVLNPSKIELEKSKLDLVVAGTKDAVLMVESEASGLTEEEMLNAVKFGHEGFVPVIKMIEEFAKECKKTEWTFEKKDLSEVKKKLEETFTEDLKKAFATKDKQDRSNQISEITDKAKKL

SEQ ID NO: 136018 - protein, 280 aa, Unknown
  Bacterial polypetide isolated from the Sargasso Sea
MSYLKKIEKDVVRSQILNDKSRIDGRKLDEVRDISSEVSWLPRTHGSSLFTRGETQAIVVATLGFGEDEQRIEALQGSYKENFMLHYNFPPYSVGEVGRMGSAGRREIGHGKLAWRALKAVLPNKEDFDYTIRLVSDITESNGSSSMATVCGSSLALMDAGVPIKNSVSGIAMGLIKEGDDFAVLSDILGDEDHLGDMDFKVAGTKDGVTSLQMDIKITGITYEIMEKALDQAKGGREYILNEMNKALNSPRTELGPYTPRVEMMKVKRDNIGEIIGKRW

SEQ ID NO: 136019 - protein, 283 aa, Unknown
  Bacterial polypetide isolated from the Sargasso Sea
YKNEIEVAGKKISLETGKVARQADGAIIAKCGETVVLATVVGAKKVNPEVDYFPLSVNYQEKYYAAGKIPGGYFKREARPTESETLISRLIDRPIRPLFPDEFRNEVQLLPTVISYDKENEADILSITASSAALAISGMPFKGPVGASRVGFINGEYVLNPSKAELENSKLDLVVAGTKDAVLMVESEANGLSEEEMLNAVKFGHEGFVPVIKMIEELAKECRKPEWTVEKKDLSEVKKKLEGTFTEDLKKAFATRDKQDRSNQISEITDKAKKLYEEDENYT

SEQ ID NO: 136020 - protein, 285 aa, Unknown
  Bacterial polypetide isolated from the Sargasso Sea
SLEGLQRERFMLHYNFPPFSVGETGRIGTGRREIGHGKLAWRAINSSLPSKESFPYTFRIVSEITESNGSSSMATVCGTSLALMDAGVPIKEPVAGIAMGLIKEGEDFRVLSDILGDEDHLGDMDFKVAGTKDGITSLQMDIKITGITFEIMEQALKQAKDGRIHILGEMNKALDKSREGVGKHTPKMEKITVDKKDIATVIGKGGATIREIVEKSGAKVDVNDEGVVTVAAPDEESRNIALQFIKDITAKAELNKIYNGEVMKIMEFGAFVNFLGKTRWFSSYF

SEQ ID NO: 136021 - protein, 222 aa, Unknown
  Bacterial polypetide isolated from the Sargasso Sea
ELYSEITESNGSSSMASVCGTSLSLMDAGVPLSSPVAGIAMGLIKEGDDFAVLTDILGDEDHLGDMDFKVAGTESGITALQMDIKIKGINESIMETALAKAKNARNHILGIMNEVISSAKDLSENAPAMKTFMVDKGKIKEIIGKGGAVIKGMQEKTGATVDVNDDGVVSVFGQNQSSMKECLAIIEEILEEPELNKVYKGKVVKIVEFGAFVNILPGKDGL

SEQ ID NO: 136022 - protein, 275 aa, Unknown
  Bacterial polypetide isolated from the Sargasso Sea
PSMGSVCGSTLSLLDAGVPLKAPVSGTAMGLIKEGKEVRILTDIQGIEDFLGDMDFKVAGTEKGITALQMDMKITGLPVAVISDAIKKARQARLHILEKMQEAINKPQESLSPHAPRLLSFRIDPELIGTVIGPGGRTIKGITERTNTKIDIEDGGIVTIASHDGAAAEEAQKIIEGLTRKVHEGEVFSGVVTRIIPIGAFVEILPGKEGMVHISQLSEARVERVEDVVRQGDEVTVRVREIDSRGRINLTLRGVSQNSGMSYPEPTPTPVAPLN

SEQ ID NO: 136023 - protein, 290 aa, Unknown
  Bacterial polypetide isolated from the Sargasso Sea
VVAGTKDAVLMVESETSGLSEEVMLAAVKFGHQGFVPVIEMIEELAKECRKSEWIVEKKDLSEVKQKLEETFTEDLKKAFATRDKQDRSNQISEINEKAKKLFEENENYSDLDVNSQLKNLEKKIVRTDILKNKNRIDGRGLSDVRPISCEAGVLPRTHGSALFTRGETQAIVVTTLGTSDDEQRIESLDGLQRERFMLHYNFPPFSVGETGRIGTGRREIGHGKLAWRAINSSLPSKEAFPYTFRIVSEITESNGSSSMATVCGASLALMDAGVPIKEPVAGIAMGLIK

SEQ ID NO: 136024 - protein, 249 aa, Unknown
  Bacterial polypetide isolated from the Sargasso Sea
MKEVISREMNWGDQKLKIETGKVAKQATASTIVSYGDTVVMANVVAAKEPKPDLDFFPLTVSYQEKFYAAGKIPGGFFKREGRPTEFETLTSRLIDRPIRPLFPEGFKNETQVILTVLSHDGETNPDIVAMIAASSALTLSGVPFMGPIGGCRVGYDGSNYTLNPKINDDGDLDLVVAGTSDAVLMVESEAKQLSEEIMLGAVKFGHESMQEVIKIIINLAEECANDPWEFSHTINESLLDEIKKTCED

SEQ ID NO: 136025 - protein, 312 aa, Unknown
  Bacterial polypetide isolated from the Sargasso Sea
GRSNLIIETGKIAKQATASTIVKYGDTVVMANVTAAKEPKLDQDFFPLTVSYQEKFYAAGKIPGGFFKREGRPTEFETLTSRLIDRPIRPLFPEGFKNETQVVLTVLSHDGETNADVVAMIAASSALTLSGIPFMGPIGGCRVGYNGEKYILNPKITNETELDLVVAGTASAVLMVESEANQLSEEVMLGAVKFGHESMQDVIKVIINLAEECAKDPWEFEHIENSELLNSLKEEYTDDIKKSYSIVDKMERHSSLSEIRSRIEDAYSGNSDINMNEVMGYFKKIEKGIVRSQILEEKKRIDGRSLNEVRNI

SEQ ID NO: 136026 - protein, 297 aa, Unknown
  Bacterial polypetide isolated from the Sargasso Sea
ANKLVDQLDITKREVLNEEIDEDLKKQVSDVVKDKIDNAINTADKLEREKKIGELHDEAQAHFEESHPESEKIINGFVNDELKTAFREQILAKGVRSDGRKTTDIRPISIETGILPRTHGSALFTRGETQAIVVLTMGTPRDEQIIDSMDVDMKKKFFLHYNFPPYSVGETGRIGFTGRREIGHGNLAERAVKEIMPDYEDFPYTVRIVSEITESNGSSSMASVCGGSLALMHAGAKTKGHVAGIAMGLIKDEDRHAVLSDILGAEDHLGDMDFKVAGTREGISAIQLDLKIDGISF

SEQ ID NO: 136027 - protein, 297 aa, Unknown
  Bacterial polypetide isolated from the Sargasso Sea
EKDIVRPAILKDKKRIDGRGLADVRKIECEVGVLPRTHGSALFTRGETQALVVTTLGMSDDEQRLESLDGMQRSNFMLHYNFPPFSVGECGRIGTGRREIGHGKLAWRAINSSLPLKENFPYTLRVVSEITESNGSSSMATVCGTSLSLMDAGVPIKEPVAGIAMGLIKEGEKFSVLSDILGDEDHLGDMDFKVAGTKDGITSLQMDIKITGITFEIMEQALNQAKAGREHILNEMNKAIKTSRKEFSKHTPKIETIKVDKKDIATVIGKGGATIREIVETSGAKVDVKDTGEVTVA

SEQ ID NO: 136028 - protein, 264 aa, Unknown
  Bacterial polypetide isolated from the Sargasso Sea
MFKVYKKEIEVAGKKISLETGKVARQADGAIIATCGETVVLATVVGAKKVNPDIDYFPLSVNYQEKYYAAGKIPGGYFKREARPTESETLISRLIDRPIRPLFPGEFKNEVQLLPTVISYDKENEADILSIIASSAALAISGMPFMGPVGASRVGFIDGKYVLNPSKTELEKSELDLVVAGTKDAVLMVESEASGLSEEEMLNAVKFGHEGFVPVIEMIAELAKECRKPEWTVEKKDLSEIKKKIEKTFTEDLKKAFATRDKQD

SEQ ID NO: 136029 - protein, 327 aa, Unknown
  Bacterial polypetide isolated from the Sargasso Sea
VAGTKDAVLMVESETSGLSEKIMLDAVKFGHENFIPVINLIEKLEKKASKTKWEIEEVDHAELKKKIAKEFESDLRKAFKEIDKKKRSTAISEIDSKCKEMFKEDENVTENQAMAQLKSLEKDIVRTAILKDKKRIDGRGLADVRKIECEVGVLPRTHGSALFTRGETQALVVTTLGMSDDEQRLESLDGMQRSNFMLHYNFPPFSVGECGRIGTGRREIGHGKLAWRAINSSLPLKENFPYTLRVVSEITESNGSSSMATVCGTSLSLMDAGVPIKEPVAGIAMGLIKEGEKFSVLSDILGDEDHLGDMDFKVAGTKDGITSLQMD

SEQ ID NO: 136030 - protein, 256 aa, Unknown
  Bacterial polypetide isolated from the Sargasso Sea
TLISRLIDRPIRPLFPDGFRNEVQVLPTVLSYDNENEADILSIIASSAALAISGLPFQGPVAASRVGYINNNYVLNPSKEQLKESKLDLVVAGTKDAVLMVESEASGLTEKQMLDAVKFGHEKFAPIIKAIDSLKKKCSKEAWKIEDKDYSKLSDKISKKLAKDLEKAFSEKDKKKRSELVNLATEKCKSLFEGDETYSELEILLQLKNLEKDIVRTKILKTKKRIDGRGLSDVRPIKCEVGVLPRTHGSALFTRR

SEQ ID NO: 136031 - protein, 242 aa, Unknown
  Bacterial polypetide isolated from the Sargasso Sea
MFKVVKKEIEVSGKKISLETGKIARQADGAIIAQCGETVVLATVVGAKKVNPDMDYFPLSVNYQEKYYAAGKIPGGYFKREARPTESETLISRLIDRPIRPLFPDEFKNEVQLLPTVISYDKENEADILSIIASSAALAISGMPFMGPVGASRVGFIKGEYVLNPSKKELEESKLDLVVAGTKDAVLMVESEANGLTEEEMLNAVKFGHEGFIPIIQMIEDLAKECRKPEWVVEKKDLSEIK

SEQ ID NO: 136032 - protein, 284 aa, Unknown
  Bacterial polypetide isolated from the Sargasso Sea
VPVIEMIEELAKECRKPEWTVEKKDLSEVKKKLEETFTEDLKKAFATRDKQDRSNQISEITDKAKKLYEEDENYTDLDVNSQLKNLEKSIVRTDILKNKNRIDGRGLSDVRPIECEVGVLPRAHGSALFTRGETQAIVVATLGTSDDEQRIESLDGLQRERFMLHYNFPPFSVGETGRIGTGRREIGHGKLAWRAINSSLPSKEAFPYTFRVVSEITESNGSSSMATVCGTSLALMDAGVPIKEPVAGIAMGLIKEGDDFSVLSDILGDEDHLGDMDFKVAGTK

SEQ ID NO: 136033 - protein, 317 aa, Unknown
  Bacterial polypetide isolated from the Sargasso Sea
LRAKVSPIPWEFSEDELTAEFKNKIADSFTEEIASAFKIADKASRGEAINAVRVKINEAHDELDDLERGKLMNAFKLVEKDVVRKSILANEPRIDGRDLDTVRPIYVETDVLPSVHGSSLFTRGETQALVAATLGSIRDAQRIEGLNGEESNTFMLHYNFPAYSVGEIGMPLGPKRREIGHGNLAKRAIKAVLPSSEEFGYTLRVVSEITESNGSSSMASVCGTSLSLMDAGVPISNPVAGVAMGLIKEENSFAVLTDILGDEDHLGDMDFKVAGTKEGVTALQMDIKVQGITSEIMESALEKAKNARMHILEKMNE

SEQ ID NO: 136034 - protein, 248 aa, Unknown
  Bacterial polypetide isolated from the Sargasso Sea
PPYSVGEIGFIGSPKRREIGHGKLARRGVQAVMPTLEDFPYTIRVVSEIMESNGSSSMASVCGSSLSMMDAGVPLSAPVAGIAMGLVKEGDKFVVLTDILGDEDHLGDMDFKVAGTESGINALQMDIKVDGITSEIMSQALVQAKDARLHILAEMAKVISKPKEDMSEFAPRYTHIKIDPSKIAAVIGKGGAVIRSIVEETGAVIDITDDGVVKIAATDQSISDHAKSMIEEITAGPQVNKIYEGKVV

SEQ ID NO: 136035 - protein, 295 aa, Unknown
  Bacterial polypetide isolated from the Sargasso Sea
NRIDGRGLSDVRPIMCEVGILPRTHGSALFTRGETQAIVTTTLGTSDDEQRIESLNGLQRERFMLHYNFPPFSVGETGRIGTGRREIGHGKLAWRAINSSLPSKESFPYTFRIVSEITESNGSSSMATVCGTSLALMDAGVPIKEPVAGIAMGLIKEGEDFSVLSDILGDEDHLGDMDFKVAGTKDGITSLQMDIKITGITFEIMEQALKQAKDGRIHILGEMNKALNKSREGVGKHTPKMEKITVDKKDIATVIGKGGATIREIVEKSGAKVDVNDEGIVTVAAPDEESRNMLK

SEQ ID NO: 136036 - protein, 266 aa, Unknown
  Bacterial polypetide isolated from the Sargasso Sea
MFKEFKEEIDFGGKKVILETGKIARQADGAIIATCGETVVIATVVGAKKVNPETDYFPLSVNYQEKYYAAGKIPGGYFKREARPTESETLISRLIDRPIRPLFPENFKNEVQVLPTVLSYDQENEADILSIIACSAALAISGLPFKGPIAASRVGFIDNKNVLNPTKKELENSKLDLVVAGTKDAVLMVESEASGLTEKQMLDAVKFGHESFANVIKGIENLAKKASKEKWKIEEKDLSEVSKKIKKEHTKDLEKAFQKKTKRKGQ

SEQ ID NO: 136037 - protein, 279 aa, Unknown
  Bacterial polypetide isolated from the Sargasso Sea
SSAALAISGMPFMGPVGASRVGYIDGKYVLNPSKTDLEKSKLDLVVAGTKDAVLMVESEASGLTEEEMLNAVKFGHEGFVPVIEMIEELAKECRKPDWSVEKKDLSEVKKKLEETFNDDLKKAFATRDKQDRSNQISEITDKAKKLYEEDENYTDLDVNSELKKIEKSIVRTDILKNKNRIDGRGLSDVRPISCEVGILPRVHGSALFTRGETQAIVTATLGTSDDEQRIESLDGLQRERFMLHYNFPPFSVGETGRIGTGRREIGHGKLAWRAIHSSL

SEQ ID NO: 136038 - protein, 215 aa, Unknown
  Bacterial polypetide isolated from the Sargasso Sea
KKSFMLHYNFPPFSVGEARPFRGTSRREIGHGNLAERAIQPLLPEYDDFPYTIRVVSDVLESNGSSSMATVCGSSLSLMDAGVPIKAPCAGVAMGLIKEGGDVAILTDILGLEDALGDMDFKVAGTRDGVTSIQMDIKIEGLTMDILTEALERATKGRLHILDQMGQALEAHREDLSDYAPRIVSIQINPEKIGEIIGPKGKTIRAIQEESGASI

SEQ ID NO: 136039 - protein, 241 aa, Unknown
  Bacterial polypetide isolated from the Sargasso Sea
KLDLVVAGTKDAVLMVESEASGLTEEEMLNAVKFGHEGFVPVIEMIEELAKECRKPEWIVEKKDLSEVKKKLEETFTEDLKKAFATRDKQDRSNQISEITDKAKKLYEEDENYTDLDVNSQLKNLEKSIVRTDILKNKNRIDGRGLSDVRPIECEVGVLPRAHGSALFTRGETQAIVVATLGTSDDEQRIESLDGLQRERFMLHYNFPPFSVGETGRIGTGRREIGHGKLAWRAINSSLPT

SEQ ID NO: 136040 - protein, 270 aa, Unknown
  Bacterial polypetide isolated from the Sargasso Sea
VCGSTLSLLDAGVPLKSPVSGTAMGLIKEGKEIRILTDIQGIEDFLGDMDFKVAGTEKGITALQMDMKITGLPVAVISDAIKKARPARLHILEKMQEAIDKPQESLSPHAPRLLSFRIDPELIGTVIGPGGRTIKGITERTNTKIDIEDGGIVTIASHDGAAAEEAQKIIEGLTRKVHEGEIFSGVVTRIIPIGAFVEILPGKEGMVHISQLSEARVERVEDVVRQGDEVTVRVREIDSRGRINLTLRGVAQNGGMSYPEPTPTPVAPLS

SEQ ID NO: 136041 - protein, 260 aa, Unknown
  Bacterial polypetide isolated from the Sargasso Sea
PRVHGSALFTRGETQAIVTTTLGTSDDEQRIESLDGLQKERFMLHYNFPPFSVGETGRIGTGRREIGHGKLAWRAINSSLPSKENFPYTFRIVSEITESNGSSSMATVCGTSLALMDAGVPIKEPVAGIAMGLIKEGEDFSVLSDILGDEDHLGDMDFKVAGTKDGITSLQMDIKITGITFEIMEQALNQAKDGRIHILGEMNKALAKSRDNVGKHTPKMEKITVDKKDIAAVIGKGGATIREIVEKSGAKVDVNDVGEV

SEQ ID NO: 136042 - protein, 249 aa, Unknown
  Bacterial polypetide isolated from the Sargasso Sea
MQWGLIKEDKEVRILTDIQGIEDFLGDMDFKVAGTEKGITALQMDMKITGLPVSVISDAIKKARPARLHILEKMQEAIDKPQDSLSPHAPRLLSFRIDPELIGTVIGPGGRTIKGITERTNTKIDIEDGGIVTIASHDGAAAEEAQKIIEGLTRKVHEGEIFSGVVTRIIPIGAFVEILPGKEGMVHISQLSEARVERVEDVVRQGDEVTVRVREIDSRGRINLTLRGVAQNGGMSYPEPTPTPVAPLS

SEQ ID NO: 136043 - protein, 288 aa, Unknown
  Bacterial polypetide isolated from the Sargasso Sea
KQNGAIIAQCGETVVLATVVGAKKVNPDMDYFPLSVNYQEKYYAAGKIPGGYFKREARPTESETLISRLIDRPIRPLFPDEFKNEVQLLPTVISYDKENEADILSIIASSAALAISGMPFMGPVGASRVGFIKGKYVLNPSKKELEESKLDLVVAGTKDAVLMVESEAKGLTEEEMLNAVKFGHEGFVPIIEMIEDLAKECRKPEWTVEKKDLSEIKKKLEEEFTEDLKKAFATKDKQDRSNQISEITEKAKKLYEENEDYTDLDVNSQLKNLEKSIVRTDILKNKIV

SEQ ID NO: 136044 - protein, 284 aa, Unknown
  Bacterial polypetide isolated from the Sargasso Sea
MNSGLSEEVMLAAVKFGHEGFVPVIEMIEELANECRKPEWTVEKKDLSEVKQKLEETFTEDLKKAFATRDKQDRSNQISEITDKAKKLFEENENYSDLDVNSQLKNLEKKIVRTDILKNKNRIDGRGLSDVRPISCEVGVLPRTHGSALFTRGETQAIVVTTLGTSDDEQRIESLDGLQRERFMLHYNFPPFSVGETGRIGTGRREIGHGKLAWRAINSSLPSKEAFPYTFRIVSEITESNGSSSMATVCGASLALMDAGVPIKEPVAGIAMGLIKEGDDFSVL

SEQ ID NO: 136045 - protein, 307 aa, Unknown
  Bacterial polypetide isolated from the Sargasso Sea
FRNEVQLLPTVVSYDKENEPDILSIIASSAALAISGLPFLGPVGASRVGYINGKYILNPSKIELEKSKLDLVVAGTKDAVLMVESEAKGLTEEEMLSAVKFGHENFVPIIKAIEELAKECGKTAWEVEKKDLSEVKKKLEKEFKKELEKAFSIKDKKERSDLISSITEKAKKLYEEDENISTLDVSYELKNLEKRIVRTEILKNKSRIDGRGLSDVRPIACEVGILPRTHGSALFTRGETQAIVTTTLGTSEDEQRIESLDGLIRERFMLHYNFPPFSVGETGRIGTGRREIGHGKLAWRALSRLYF

SEQ ID NO: 136046 - protein, 308 aa, Unknown
  Bacterial polypetide isolated from the Sargasso Sea
YVLNPSKKELENSKLDLVVAGTKDAVLMVESETSGLTEEEMLNAVKFGHENFIPLIEMIEELAAECKKPDWIVEKKDVSEVKKKLEDEFTDELKKAFSIKDKKERSNLISEITDKAKKLFEENENFTDLDVNSELKNLEKRIVRTDILKNKKRIDGRGLSDVRPIMCEVGILPRTHGSALFTRGETQAIVTTTLGTSDDEQRIESLEGLQRERFMLHYNFPPFSVGETGRIGTGRREIGHGKLAWRAINSSLPPKEGFPYTFRIVSEITESNGSSSMATVCGTSLALMDAGVPIKEPVAGIAMGLIKE

SEQ ID NO: 136047 - protein, 275 aa, Unknown
  Bacterial polypetide isolated from the Sargasso Sea
ETDLRKAFSEIDKKKRSTAISEIDTKCKEMFAEEENITENQAMSQLKSLEKDIVRTAILKDGKRIDGRSLSDVRQIKCEVGVLPRAHGSALFTRGETQALVVTTLGMTDDEQRLESLDGMQRSNFMLHYNFPPFSVGECGRIGTGRREIGHGKLAWRAINSSLPSKENFPYTLRVVSEITESNGSSSMATVCGTSLSLMDAGVPIKEPVAGIAMGLIKEKDKFSVLSDILGDEDHLGDMDFKVAGTKDGITSLQMDIKITGITFEIMEKALNQAK

SEQ ID NO: 136048 - protein, 277 aa, Unknown
  Bacterial polypetide isolated from the Sargasso Sea
RGETQAIVTTTLGTSDDEQRIESLEGLQRERFMLHYNFPPFSVGETGRIGTGRREIGHGKLAWRAINSSLPSKESFPYTFRIVSEITESNGSSSMATVCGTSLALMDAGVPIKEPVAGIAMGLIKEGDDFSVLSDILGDEDHLGDMDFKVAGTKDGITSLQMDIKITGITFDIMEQALKQAKDGRIHILGEMNKALGKSRDGVGKHTPKMEKITVDKKDIATVIGKGGATIREIVEKSGAKVDVNDEGIVTVAAPDEESRNIALQFIKDLTAKAELN

SEQ ID NO: 136049 - protein, 283 aa, Unknown
  Bacterial polypetide isolated from the Sargasso Sea
RKMLNAVKFGHKGFVPIIDMIQEIAKECKKPDWVIEKKDLSEVKNKLESEFTEELKKAFSIKDKQERSNLISDITDKAKKLYGEDENYSDLDVNSELKNLEKRIVRTDILKNKNRIDGRGLADVRPIMCEVGILPRVHGSALFTRGETQAIVTTTLGTSDDEQKIESLDGLQKERFMLHYNFPPFSVGETGRIGTGRREIGHGKLAWRAINSSLPSKESFPYTFRIVSEITESNGSSSMATVCGSSLALMDAGVPIKEPVAGIAMGLIKEGDDFSVLSEYFRR

SEQ ID NO: 136050 - protein, 310 aa, Unknown
  Bacterial polypetide isolated from the Sargasso Sea
RASKTGNRIDGRDTSTVRPIVCETGVLSRTHGSALFTRGETQALVVTTLGTGMDEQRIDAIEGEYKENFMLHYNFPPYSVGEVGRVGSTSRREIGHGKLAWRAIHPMLPSNDKFPYTYRVVSEITESNGSSSMATVCGTSMSMMDAGVPLEKPIAGIAMGLIKEKDNYVVLSDILGDEDHLGDMDFKVAGTKDGITSLQMDIKITSITSAIMKEALEQAKEGRIHILGEMAKAIEKPKEKISDYAPTITTFHVHKDKIREVIGKGGAVIREISETTGAKIEIDDEGLVSVAAVDAKSGNDAIEWIKGIVE

SEQ ID NO: 136051 - protein, 189 aa, Unknown
  Bacterial polypetide isolated from the Sargasso Sea
THGSALFTRGETQAIVTTTLGTSDDEQRIESLEGLQRERFMLHYNFPPFSVGETGRIGTGRREIGHGKLAWRAINSSLPSKESFPYTFRIVSEITESNGSSSMATVCGTSLALMDAGVPIKEPVAGIAMGLIKEGDDFSVLSDILGDEDHLGDMDFKVAGTKDGITSLQMDIKITGITFEIMEQALKQA

SEQ ID NO: 136052 - protein, 267 aa, Unknown
  Bacterial polypetide isolated from the Sargasso Sea
VNYQEKYYAGGKIPGGYFKREARPTESETLISRLIDRPIRPLFPDEFKNEVQLLPTVISYDKENQPDILAITASSAALAISGMPFMGPVGASRVGFVDGKYILNPSKAELENSSLDLVVAGTKDAVLMVESEANGLTEEEMLNAVKFGHEGFVPVIEMIEELAKECRKPEWTIEKKDLSEVKKKLEATFTDDLKKAFATKDKQDRSNQISEITDKAKKLYEEDENYTDLDVNSQLKSLEKSIVRTDILKNKNRIDGRGLSDVRAISC

SEQ ID NO: 136053 - protein, 255 aa, Unknown
  Bacterial polypetide isolated from the Sargasso Sea
KKKIAGKFENDLRSAFKEIDKKKRSTSISEIESKCKEMFAEDEIVTENHIMSQLKSLEKDIVRTAILKEKKRIDGRGLSEVRQIKCEVGVLPRTHGSALFTRGETQALVVTTLGMTDDEQRLESLEGMQRSNFMLHYNFPPFSVGECGRIGTGRREIGHGKLAWRAINSSLPSKENFPYTLRVVSEITESNGSSSMATVCGTSLSLMDAGVPIKEPVAGIAMGLIKEGENFSVLSDILGDEDHLGDMDFKVAGTK

SEQ ID NO: 136054 - protein, 290 aa, Unknown
  Bacterial polypetide isolated from the Sargasso Sea
LNPSKMELKKSKLDLVVAGTKDAVLMVESEANGLTEEEMLNAVKFGHEGFIPIIEMIEDLAKECGKAKWEVEKKDLSKVKKTLEEEFTEDLKKAFSTRDKQDRSNQISEITERAKKLYEENEEYTDLDINSQLKNLEKSIVRTDILKNKNRIDGRGLADVRPIMCEVGILPRVHGSALFTRGETQAIVTTTLGTSDDEQRIESLDGLQKERFMLHYNFPPFSVGETGRIGTGRREIGHGKLAWRSINSSLPPKESFPYTFRIVSEITESNGSSSMATVCGTSLALMDAGV

SEQ ID NO: 136055 - protein, 252 aa, Unknown
  Bacterial polypetide isolated from the Sargasso Sea
MFKVFKKETNFGGKKITLETGKVARQADGAIIATCGETVVLATAVGAKKVNPDVDYFPLSVNYQEKYYAAGKIPGGYFKREARPTESETLISRLIDRPIRPLFPDEFKNEVQVLPTVISYDKENEADILSIIASSAALAISGMPFLGPIGASRVGFIGGKYVLNPSKKDLENSKLDLVVAGTKDAVLMVESEASGLTEQQMLDAVKFGHEGFAPVIKMIEDLAKECKKPDWVVEKKDLSSVKKKLEGEFTKD

SEQ ID NO: 136056 - protein, 331 aa, Unknown
  Bacterial polypetide isolated from the Sargasso Sea
MSDVRPIECEVGVLPRAHGSALFTRGETQAIVVATLGTSDDEQRIESLDGLQRERFMLHYNFPPFSVGETGRIGTGRREIGHGKLAWRAINSSLPSKEAFPYTFRVVSEITESNGSSSMATVCGTSLALMDAGVPIKEPVAGIAMGLIKEGDDFSVLSDILGDEDHLGDMDFKVAGTKDGITSLQMDIKITGITFEIMEQALSQAKDGRVHILGEMNKALSASRSDVGKHTPKMEQVNVDKKDIAAVIGKGGATIREIVEKSGAKVDVNDEGVVTVAAPDEESRNIAMQMIKDITAKAEFDKIYSGKVMKIMEFGAFVYFLGKQDGLVHIS

SEQ ID NO: 136057 - protein, 331 aa, Unknown
  Bacterial polypetide isolated from the Sargasso Sea
HYVLNPSKKELENSKLDLVVAGTKDAVLMVESETSGLTEEEMLNAVKFGHENFIPLIEMIEELAAECKKPDWIVEKKDVSEVKKKLEDEFTDELKKAFSIKDKKERSNLISEITDKAKKLFEENENFTDLDVNSELKNLEKRIVRTDILKNKKRIDGRGLSDVRPIMCEVGILPRTHGSALFTRGETQAIVTTTLGTSDDEQRIESLEGLQRERFMLHYNFPPFSVGETGRIGTGRREIGHGKLAWRAINSSLPPKEGFPYTFRIVSEITESNGSSSMATVCGTSLALMDAGVPIKEPVAGIAMGLIKEGDDFSVLSDILGDEDHLGDMDF

SEQ ID NO: 136058 - protein, 231 aa, Unknown
  Bacterial polypetide isolated from the Sargasso Sea
VVRSQILNDKSRIDGRKLDEVRNISSEVSWLPRTHGSSLFTRGETQAIVVATLGFGEDEQRIEALQGSYKENFMLHYNFPPYSVGEVGRMGSAGRREIGHGKLAWRALKAVLPNKEDFDYTVRLVSDITESNGSSSMATVCGSSLALMDAGVPIKNSVSGIAMGLIKEGDDFAVLSDILGDEDHLGDMDFKVAGTKDGVTSLQMDIKITGITYEIMEKALDQAKGGREYIS

SEQ ID NO: 136059 - protein, 279 aa, Unknown
  Bacterial polypetide isolated from the Sargasso Sea
GGFFKREGRPSEKETLVSRLIDRPIRPLFADGFKCETQVIATVISYDTENDADIVAMIACSAALTLSGVPFMGPIGAARVGYKDGEYILNPTKTEMENSELDLVVAGTKDAVLMVESEAKELSEEIMLGAVTFGQENFSPIIESIISLAEKSAKEPRDFKKKDLSELEKKVNSIIKDKLENAYKEADKQKRTELIAEIKSEVIEELSSDNVDEQDELSETLIGSAFKNIEKNIVRNSILNTGERIDGRDLETVRPIQSDVSILPLTHGSALFTRGETQA

SEQ ID NO: 136060 - protein, 305 aa, Unknown
  Bacterial polypetide isolated from the Sargasso Sea
ALAISGMPFMGPVGASRVGFIEGKYVLNPSKTELEKSKLDLVVAGTKDAVLMVESEANGLTEEEMLNAVKFGHEGFVPIIEMIEDLAKECRKPEWTVEKKDLSEIKKKLEEEFTEDLKKAFSTRDKQDRSNQISEINEKAKKLYEENEAYTDLDVNSQLKNLEKSIVRTDILKNKNRIDGRGLADVRPIMCEVGILPRVHGSALFTRGETQAIVTTTLGTSDDEQRIESLDGLQKERFMLHYNFPPFSVGETGRIGTGRREIGHGKLAWRAINSSLPSKENFPYTFRIVSEITESNGSSSMATVC

SEQ ID NO: 136061 - protein, 290 aa, Unknown
  Bacterial polypetide isolated from the Sargasso Sea
MQQEKFPGGYFKREARPTESETLISRLIDRPIRPLFPDEFKNEVQLLPTVISYDKENESDILSIIASSAALAISGMPFMGPVGASRVGFIEGKYVLNPSKKDLENSKLDLVVAGTKDAVLMVESEANELTEEEMLNAVKFGHEAFVPIIEMIEELAKECKKPDWVVEKKDLSEVRKKLEEEFTDDLKKAFATRDKQDRSNQISEITDKAKKLYEENEDYSDLDVNSQLKNLEKSIVRTDILKNKNRIDGRGLSDVRPIECEVGILPRVHGSALFTRGETQAIVTTTLGTS

SEQ ID NO: 136062 - protein, 312 aa, Unknown
  Bacterial polypetide isolated from the Sargasso Sea
SEVKNKLESEFTEELKKAFSIKDKQERSNLISEITDKAKKLYEENENYTDLDVNSELKNLEKRIVRTDILKNKNRIDGRGLADVRPIMCEVGILPRVHGSALFTRGETQAIVTTTLGTSDDEQKIESLEGLQKERFMLHYNFPPFSVGETGRIGTGRREIGHGKLAWRAINSSLPSKESFPYTFRIVSEITESNGSSSMATVCGSSLALMDAGVPIKEPVAGIAMGLIKEGEEFSVLSDILGDEDHLGDMDFKVAGTKDGITSLQMDIKITGITFEIMEQALKQAKDGRIHILGEMNKALSKSREDVENILL

SEQ ID NO: 136063 - protein, 265 aa, Unknown
  Bacterial polypetide isolated from the Sargasso Sea
KDLSEVKKKLEETFTDELKKAFSTRDKQDRSNQISEITDKAKKLYEENENYSDLDVNSQLKNLEKSIVRTDILKNKSRIDGRGLSDVRPISCEVGVLPRTHGSALFTRGETQAIVVATLGTSDDEQRLESLDGQQRERFMLHYNFPPFSVGETGRIGTGRREIGHGKLAWRAINSSLPSKDSFPYTFRIVSEITESNGSSSMATVCGTSLALMDAGVPIKEPVAGIAMGLIKEGDDFSVLSDILGDEDHLGDMDFKVAGTKDGIT

SEQ ID NO: 136064 - protein, 267 aa, Unknown
  Bacterial polypetide isolated from the Sargasso Sea
CRKPEWTVEKKDLSEVKKKLEATFTDDLKKAFGTKDKKDRSNQISEITDKAKKLFEENENYTDLDVNSQLKNLEKSIVRSDILKNKNRIDGRGLSDVRAISCEVGVLPRTHGSALFTRGETQAIVVATLGTSDDEQRLESLDGQHRERFMLHYNFPPFSVGETGRIGTGRREIGHGKLAWRAINSSLPPKESFPYTFRIVSEITESNGSSSMATVCGTSLALMDAGVPIKEPVAGIAMGLIKEGDDFSVLSDILGDEDHLGDMDFKV

SEQ ID NO: 136065 - protein, 286 aa, Unknown
  Bacterial polypetide isolated from the Sargasso Sea
TASSAALAISGMPFMGPVGASRVGFIDGKYVLNPSKADLEKSKLDLVVAGTKDAVLMVESEASGLTEEEMLNAVKFGHEGFVPVIEMIEELAKECRKSEWTVEKKDLSEVKKKLEETFTEDLKKAFATRDKQDRSNQISEITDKAKKLYEEDENYTDLDVNSQLKNLEKSIVRTDILKNKNRIDGRGLSDVRPIECEVGVLPRAHGSALFTRGETQAIVVATLGTSDDEQRIESLDGLQRERFMLHYNFPPFSVGETGRIGTGRREIGHGKLAWRAINSSLPTKEA

SEQ ID NO: 136066 - protein, 260 aa, Unknown
  Bacterial polypetide isolated from the Sargasso Sea
MFKIYKKEIKVGEKKIILETGKIARQADGAVIAQCGETVVMATVVGAKKVNPDIDYFPLSVNYQEKYYAAGKIPGGYFKREARPTESETLISRLIDRPIRPLFPDEFKNEVQLLPTVISYDKENEADILSIIASSAALAISGMPFKGPVGASRVGFIDGKYILNPSKKELENSKLDLVVAGTKDAVLMVESEANGLTEEEMLKAVKFGHENFVPIINMIEELASECKKPDWVVEKKDLSEVKKKIENEFTDELKKAFSIK

SEQ ID NO: 136067 - protein, 259 aa, Unknown
  Bacterial polypetide isolated from the Sargasso Sea
SKINEDFGKEFIDAYKITEKQKRSEKLSSLRNEISEKFVSDTLSPVLVSDAIKNVEKDIVRGELINTGNRIDGRDTKTVRPIVCETGVLERTHGSALFTRGETQALVVSTLGTGQDEQRIDAIDGEYTENFMLHYNFPPYSVGEVGRMGSTSRREIGHGKLAWRAIHPMLPSKEKFPYTYRVVSEITESNGSSSMATVCGTSMSLMDAGVPLERPVAGIAMGLIKENDKYVILSDILGDEDHLGDMDFKVAGTSEGITS

SEQ ID NO: 136068 - protein, 293 aa, Unknown
  Bacterial polypetide isolated from the Sargasso Sea
FTEDEKVTENQAMAQLKSLEKDIVRTAILKDKKRIDGRGLADVRQIKCEVGVLPRTHGSALFTRGETQALVVTTLGMTDDEQRLESLEGMQRSSFMLHYNFPPFSVGECGRIGTGRREIGHGKLAWRAINSSLPLKENFPYTLRVVSEITESNGSSSMATVCGTSLSLMDAGVPIKEPVAGIAMGLIKEGDKFSVLSDILGDEDHLGDMDFKVAGTKDGITSLQMDIKITGITFEIMEKALNQAKAGREHILTEMNKALKSSRKEFSKHTPKMETIKVDKKDIATVIGKGGAT

SEQ ID NO: 136069 - protein, 235 aa, Unknown
  Bacterial polypetide isolated from the Sargasso Sea
MFKITNKSCTWGGRKLTIETGKVARQADGSVVVTYGETKVLCTVVGNKDEALENDFFPLTVHYIEKFYSIGKIPGGYLKREGRPSEKETLVSRLIDRPIRPLFPEQFLNEVQVICQVLNYDLINSPEIPAMIGASAALTLSGIPFLGPLGAAKVGKINNKLILNPSNEELTESDLELVVAGTKSGVLMVESEAKELSEDKMLEAVVFGQKAYTEIIDLIVELAEEVAKDPWELEE

SEQ ID NO: 136070 - protein, 301 aa, Unknown
  Bacterial polypetide isolated from the Sargasso Sea
EARPTESETLISRLIDRPIRPLFPEGFRNEVQVLPTVISYDNENEADILSIIACSAALSISGLPFKGPVGASRVGFINGKRVLNPTKKELENSKLDLVVAGTKDAVLMVESEASGLTEKEMLEAVKFGHESFVSVIKGIEKLAKKCAKEAWKIEKKDYSKVTKKIQKELTKDLEKAFSEKDKKKRSELINLAGDKCKSLFEKDETLLEHEIMLQLKNLEKDIVRTRILKSKKRIDGRGLSDVRPIKCEVGILPRVHGSALFTRGETQALVTTTLGTTDDEQRIESLEGLKRQRFMLHYNFH

SEQ ID NO: 136071 - protein, 303 aa, Unknown
  Bacterial polypetide isolated from the Sargasso Sea
GKIARQADGAIIATCGETVVISTVVGAKKVNPDVDYFPLSVNYQEKYYAAGKIPGGYFKREARPTEAETLISRLIDRPIRPLFPDNFRNEIQVLPTVLSYDNENEADVLSIIASSAALAISGLPFQGPVAASRVGYINNKYILNPSKEQLKESKLDLVVAGTKDAVLMVESEASGLTEKEMLDAVKFGHEKLGPVIKAIENLKKKCSKDAWKIEDKDYSKVKDKISKELKKDLEKAFSEKDKKKRSELVSEATEKCKTLFEGDENFSEIEVLIQLKNLEKDIVRSKILKTKKRIDGRGLADVR

SEQ ID NO: 136072 - protein, 275 aa, Unknown
  Bacterial polypetide isolated from the Sargasso Sea
LIDRPIRPLFPDEFKNEVQLLPTVISYDKENEPDILSITASSAALAISGMPFMGPVGASRVGFVDGKYVLNPSKAELEKSKLDLVVAGTKDAVLMVESEASGLTEEEMLNAVKFGHEGFVPVIEMIEELAKECRKPEWIVEKKDLSEVKKKLEETFTEDLKKAFATRDKQDRSNQISEITDKAKKLYEEDENYTDLDVNSQLKNLEKSIVRTDILKNKNRIDGRGLSDVRPIECEVGVLPRAHGSALFTRGETQAIVVATLGTSDDEQRIESLDG

SEQ ID NO: 136073 - protein, 227 aa, Unknown
  Bacterial polypetide isolated from the Sargasso Sea
MGLIKDGDEFAVLTDILGDEDHLGDMDFKVAGSEKGITALQMDIKIDGINEKIMDEALTSAKVARMHILEKMNEVLSKPKELASDAPSMQKFMVNKDKIKEIIGKGGAVIKSIQEESGAVVDINDTGEISVFGDNQAKMQAALDIIDKIIEEPELDKVYEGTVVKIVDFGAFVNILPGKDGLLHISEISEERTEDVSAVLEEGQKVNVKLIGFDRGKMKLSIKALSK

SEQ ID NO: 136074 - protein, 260 aa, Unknown
  Bacterial polypetide isolated from the Sargasso Sea
MKKAFSTRDKQDRSNQISEINDKAKKLYEENEDYTDLDVNSQLKNLEKSIVRTDILKNKNRIDGRGLADVRPIICEVGILPRVHGSALFTRGETQAIVTTTLGTSDDEQRIESLDGLQKERFMLHYNFPPFSVGETGRIGTGRREIGHGKLAWRAINSSLPSKESFPYTFRIVSEITESNGSSSMATVCGTSLALMDAGVPIKEPVAGIAMGLIKEGDDFTVLSDILGDEDHLGDMDFKVAGTKDGITSLQMDIKITGIT

SEQ ID NO: 136075 - protein, 292 aa, Unknown
  Bacterial polypetide isolated from the Sargasso Sea
GTSDDEQRIESLDGLQKERFMLHYNFPPFSVGETGRIGTGRREIGHGKLAWRAINSSLPSKESFPYTFRIVSEITESNGSSSMATVCGTSLALMDAGVPIKEPVAGIAMGLIKEGDDFSVLSDILGDEDHLGDMDFKVAGTKDGITSLQMDIKITGITFEIMEQALNQAKDGRIHILGEMNKALDKSRDEVGKHTPKMEKITVDKKDIAAVIGKGGATIREIVEKSGAKVDVNDEGVVTVAAPDEESRNIAMQMIKDITAKAELNKIYNGKVMKIMEFGAFVNFLGKQDGPL

SEQ ID NO: 136076 - protein, 260 aa, Unknown
  Bacterial polypetide isolated from the Sargasso Sea
MRSQIINDGKRVDGRELDEVRKISASAGILPKRVHGSALFQRGLTQVLSTTTLGTPSDAQEMDDLNPSTEKTYLHHYNFPPYSVGETRPMRTPGRREIGHGALAERAIIPVLPGKETFPYVLRVVSEVLSSNGSTSMGSVCGSTLSLLDAGVPLKALVSGTAMGLIKEGKEVRILTDIQGIEDFLGDMDFKVAGTEKGITALQMDMKITGLSVSVISDAIKKARPARLHILEKMKEAIDKPQESLSPHAPRLLSFRIDPE

SEQ ID NO: 136077 - protein, 290 aa, Unknown
  Bacterial polypetide isolated from the Sargasso Sea
VGASRVGYIDGKYVLNPSKVELEKSKLDLVVAGTKDAVLMVESEANVLTEEEMLNAVKFGHEGFVPVIKMIEELAKECKKPEWSIEKKDLSEVKKKLEETFTEDLKKAFATRDKQDRSNQISEITEKAKKIYEEDENYTDLDVNSQLKNLEKTIVRTDILKNKNRIDGRGLSDVRPISCEVGVLPRTHGSSLFTRGETQAIVTATLGTSDDEQRIESLDGLKRERFMLHYNFPPFSVGETGRIGTGRREIGHGKLAWRAIHSSLPSKEAFPYTFRVVSEITESNGSSSMA

SEQ ID NO: 136078 - protein, 279 aa, Unknown
  Bacterial polypetide isolated from the Sargasso Sea
SFVPVIKIIEELAQECKKVDWVVEKKDLSDVKKKIGKEFTKDLKKAFSIKDKQQRSNLISEVSDKAKKLYEENENYTELDVMYELKNLEKDIVRTDILKNKNRIDGRELSEVRPISCEVGILPRAHGSALFTRGETQAIVATTLGTSDDEQRIESLEGLQRERFMLHYNFPPFSVGETGRIGTGRREIGHGKLAWRAINSSLPSKESFPYTFRIVSEITESNGSSSMATVCGTSLALMDAGVPIKEPVAGIAMGLIKEGENFSVLSDILGDEDHLGDMD

SEQ ID NO: 136079 - protein, 273 aa, Unknown
  Bacterial polypetide isolated from the Sargasso Sea
QWIKSVDYSDEIIERVRSVATPQLTEVMAIGDKAEREARQDEVTAEIRAQLEEEFSETADAAKQIGAAVRSVSKEIVRRRIAEDGFRIDGRATNEVRPLSAEVAYVGETAHGSGLFQRGETQVLNVTTLGMSRMEQLIDTLNPNDRKRYMHHYNFPPFSTGEAGFMRGPKRREIGHGALAERALLSAIPSKDKFPYTLRLVSDVLSSNGSTSMGSVCASSLSLMDAGVPIRSHVSGIAMGLVYAEGKYVTLTDILGAEDAFGDMDFKIAGPKT

SEQ ID NO: 136080 - protein, 308 aa, Unknown
  Bacterial polypetide isolated from the Sargasso Sea
NEVQLLPTVISYDKENQPDILAIIASSAALAISGMPFMGPVGASRVGFVDGKYILNPSKSELENSSLDLVVAGTKDAVLMVESEANGLTEEEMLNAVKFGHEGFVPVIQMIEELAKECRKPEWKVEKKDLSEVKKKLESSFTDDLKKAFATKDKQDRSNQISEITDKAKKLYEEDENYTDLDVNSQLKSLEKSIVRTDILKNKNRIDGRGLSDVRAISCEVGVLPRTHGSALFTRGETQAIVVTTLGTSDDEQRLESLDGQHRERFMLHYNFPPFSVGETGRIGTGRREIGHGKLAWRAINSSLPSKE

SEQ ID NO: 136081 - protein, 292 aa, Unknown
  Bacterial polypetide isolated from the Sargasso Sea
KKVNPDVDYFPLSVNYQEKYYAAGKIPGGYFKREARPTESETLISRLIDRPIRPLFPDEFKNEVQVLPTVISYDKENEADILSINASSAALAISGMPFLGPVGASRVGFVDGKYILNPSKTDLKNSKLDLVVAGTKDAVLMVESEASGLTEEEMLNAVKFGHEGFVPVIKMIEDLAKECRKPDWVVEKKDLSEVKKKLESEFTAELKKAFSTRDKQERSNMISEITDKAKKLYEENDEITDLDVNSELKNLEKAIVRTDILKNKNRIDGRGLSDVRPIMCEVEFCQEFMVQR

SEQ ID NO: 136082 - protein, 318 aa, Unknown
  Bacterial polypetide isolated from the Sargasso Sea
LVVAGTKDAVLMVESETSGLSEEVMLAAVKFGHEGFVPVIEMIEELAKECRKPEWTVEKKDLSEVKQKLEETFTEDLTKAFATRDKQDRSNQISEITEKAKKLFEENENYSDLDINSQLKNLEKKIVRTDILKNKNRIDGRGLSDVRPIECEVGVLPRTHGSALFTRGETQAIVVTTLGTSDDEQRIESLDGLQRERFMLHYNFPPFSVGETGRIGTGRREIGHGKLAWRAINSSLPSKEAFPYTFRIVSEITESNGSSSMATVCGASLALMDAGVPIKEPVAGIAMGLIKEGDDFSVLSDILGDEDHLGDMDFKVAG

SEQ ID NO: 136083 - protein, 331 aa, Unknown
  Bacterial polypetide isolated from the Sargasso Sea
DILSIIASSAALAISGMPFMVPVGASRVGFIDGKYVLNPSKKELENSKLDLVVAGTKDAVLMVESETKGLTEEEMLKAVKFGHENFVPIINIIEELAKECKKPDWVVEKKDLSEVKKKIEKEFTSELKKAFSTRDKQERSNLISEINDKAKKIFEENENFTDLDVNYELKNLEKRIVRTDILKNKKRIDGRGLSDVRPIMCEVGILPRVHGSALFTRGETQAIVTTTLGTSDDEQRIESLEGLQRQRFMLHYNFPPFSVGETGRIGTGRREIGHGKLAWRAINSSLPSKESFPYTFRIVSEITESNGSSSMATVCGTSLALMDAGVPIKEP

SEQ ID NO: 136084 - protein, 246 aa, Unknown
  Bacterial polypetide isolated from the Sargasso Sea
MFKVYKKEIEVAGKKISLETGKIARQADGAIIAQCGETVVMATVVGAKKINPDVDYFPLSVNYQEKYYAAGKIPGGYFKREARPTESETLISRLIDRPIRPLFPEEFKNEVQLLPTVISYDKENEADILSIIASSAALAISGMPFMGPVGASRVGFIEGKYVLNPTKKELENSKLDLVVAGTKDAVLMVESEANGLTEEEMLSAVKFGHEGFVPVIEMIEQLAKECKKPDWVVEKKDLTEIKKKLE

SEQ ID NO: 136085 - protein, 281 aa, Unknown
  Bacterial polypetide isolated from the Sargasso Sea
LVVTTLGMSDDEQRLESLDGMQRSSFMLHYNFPPFSVGECGRIGTGRREIGHGKLAWRAINSSLPLKENFPYTLRVVSEITESNGSSSMATVCGTSLSLMDAGVPIKEPVAGIAMGLIKEGEKFSVLSDILGDEDHLGDMDFKVAGTKDGITSLQMDIKITGITFEIMEQALNQAKAGREHILNEMNKAIKTSRKEFSKHTPKIETIKVDKKDIATVIGKGGATIREIVETSGAKVDVKDTGEVTVAAPDEKSRNAAIEIIKGLIAKPEVGKIYKGKVVKI

SEQ ID NO: 136086 - protein, 306 aa, Unknown
  Bacterial polypetide isolated from the Sargasso Sea
QRIEALQGSYKENFMLHYNFPPYSVGEVGRIGATGRREIGHGKLAWRALKAVLPSKEDFDYTIRLVSDITESNGSSSMATVCGSSLALMDAGVPIKNSVSGIAMGLIKEGDSFAVLSDILGDEDHLGDMDFKVAGTKDGITSLQMDIKITGITTEIMDQALNQAKGGRLHILDEMNKAIDSPRTELGPYTPRVEMIKVKRDNIGEIIGKGGATIKDIIEQSGASVDISDNGTVKIAGTSKESIQKAIDLINSIIEEPEVGQVYEGKVVKIMEFGAFVNFFGKKDGLVHISQLSDERVEKVTDVINE

SEQ ID NO: 136087 - protein, 250 aa, Unknown
  Bacterial polypetide isolated from the Sargasso Sea
MFKVYKKEIEVAGKKISLETGKVARQADGAIIATCGETVVLATVVGAKKVNPDVDYFPLSVNYQEKYYAAGKIPGGYFKREARPTESETLISRLIDRPIRPLFPDEFKNEVQLLPTVISYDKENEADILSITASSAALAISGMPFKGPVGASRVGYIDGKYVLNPSKVELEKSKLDLVVAGTKDAVLMVESEASGLTEEEMLNAVKFGHEGFVPVIKMIEELAKECRKPEWIVEKKDLSKVKKKLESAFT

SEQ ID NO: 136088 - protein, 292 aa, Unknown
  Bacterial polypetide isolated from the Sargasso Sea
VRTKLLKTKNRIDGRGVADVRKIDCETGLLSRSHGSALFTRGETQALVSLTLGTSDDEQMVDSLDGMSKEKFMLHYNFPPFSVGEAGRMGGTGRREIGHGKLAWRAINPLLPSVEEFPYTLRIVSEITESNGSSSMATVCGSSLALMNAGVPIKKQVAGIAMGLIKEGDKFLVLSDILGDEDHLGDMDFKVAGTKDGITSLQMDIKIDSITKKIMSDALKQAKKGREIILKAMDKEISKPNTKMNKYAPKMVTMTVKKEKIREVIGAGGKVIREIVETSGAKVDINDDGVIK

SEQ ID NO: 136089 - protein, 283 aa, Unknown
  Bacterial polypetide isolated from the Sargasso Sea
VNPDIDYFPLSVNYQEKYYAAGRIPGGYFKREARPTESETLISRLIDRPIRPLFPDEFKNEVQVLPTVISYDKENEADILSIIASSAALAISGMPFLGPVGASRVGFIDGKYVLNPSKLELKNSKLDLVVAGTKDAVLMVESEARGLTEEEMLNAVKFGHEGFVPVIKMIEDLAKECKKSEWIIEKKDLSEVKKKLETEFTAELKKAFSIRNKQERSNMISEITDKAKKLYEENEEITDLDVNSELKNLEKTIVRTDILKNKNRIDGRGLSDVRPIMCEVGIL

SEQ ID NO: 136090 - protein, 269 aa, Unknown
  Bacterial polypetide isolated from the Sargasso Sea
QRTELEKSKLDLVVAGTKDAVLMVESEANGLTEEEMLNAVKFGHEGFVPIIEMIEDLAKECRKPEWTVEKKDLSEIKKKLEDEFTEDLKKAFSTRDKQDRSNQISEINEKAKKLYEENEAYTDLDVNSQLKNLEKSIVRTDILKNKNRIDGRGLEDVRPIMCEVGILPRVHGSALFTRGETQAIVTTTLGTSDDEQRIESLDGLQKERFMLHYNFPPFSVGETGRIGTGRREIGHGKLAWRAINSSLPSKESFPYTFRIVSEITESNGS

SEQ ID NO: 136091 - protein, 245 aa, Unknown
  Bacterial polypetide isolated from the Sargasso Sea
MFKQFKEEIDFGGKKLTLETGKIARQADGAVIATWGETVVIATVVGAKKVNPETDYFPLSVNYQEKYYAAGKIPGGYFKREARPTESETLISRLIDRPIRPLFPESFRNEVQVLPTVLSYDNENEADILSIIASSAALSISGLPFKGPVGASRVGFIDGKCVLNPNKKELENSKLDLVVAGTKDAVLMVESEASGLTEKEMLDAVKFGHEGFVPVIKGIEKLSKKCSKEKWKIEREDFSKISKKI

SEQ ID NO: 136092 - protein, 309 aa, Unknown
  Bacterial polypetide isolated from the Sargasso Sea
FPPFSVGEPGRIGTGRREIGHGKLAWRAINSSLPSKEAFPYTFRIVSEITESNGSSSMATVCGASLALMDAGVPIKEPVAGIAMGLIKEGDDFSVLSDILGDEDHLGDMDFKVAGTKDGITSLQMDIKITGITFEIMKQALKQAKDGRIHILGEMNKALGESRSDVGKHTPKMEQVTVDKKDIAAVIGKGGATIREIVEKSAAKVDVNDEGVVTVAAPDEESRKIAMQMIKDITAKAEMNKIYSGKVMKIMEFGAFVNFLGKQDGLVHISELADKRVAKVTDVVKEGDEVKVKVIGFDRGKVKLSMKQA

SEQ ID NO: 136093 - protein, 251 aa, Unknown
  Bacterial polypetide isolated from the Sargasso Sea
MFKVYKKEIEVAGKKISLETGKIARQADGAIIAKCGETVVMATVVGAKKVNPDVDYFPLSVNYQEKYYAAGKIPGGYFKREARPTESETLISRLIDRPIRPLFPDEFKNEVQLLPTVISYDKENEADILSIIASSAALAISGMPFMGPVGASRVGYIEGKYVLNPSKKELENSKLDLVVAGTKDAVLMVESEANGLTEEEMLNAVKFGHEGFVPIIKMIEELSSECKKPDWVVEKKDLSEVKKKLEEEFTG

SEQ ID NO: 136094 - protein, 286 aa, Unknown
  Bacterial polypetide isolated from the Sargasso Sea
DAVLMVESEASVLTEQQMLDAVKFGHEGFVPVIKMIEDLAEECKKPDWVVEKKDLSEVKKKLESEFTKDLKKAFSIKIKQDRSNLISEVTEKAKKLYEEDEKFTELDVMHELKNIEKGIVRTDILKNKNRIDGRGLADVRPIMCEVGILPRVHGSALFTRGETQAIVTTTLGTSDDEQRIESLDGLKRERFMLHYNFPPFSVGETGRIGTGRREIGHGKLAWRAINSSLPSKESFPYTFRIVSEITESNGSSSMATVCGSSLALMDAGVPIKEPVAGIAMGLIKEG

SEQ ID NO: 136095 - protein, 222 aa, Unknown
  Bacterial polypetide isolated from the Sargasso Sea
MFKVVKKEIEVSEKKISLETGKIARQADGAIVAQCGETVVLATVVGAKKVNPDMDYFPLSVNYQEKYYAAGKIPGGYFKREARPTESETLISRLIDRPIRPLFPDEFKNEVQLLPTVISYDKENEADILSIIASSAALAISGMPFMGPVGASRVGFIKGKYVLNPSKKELEESKLDLVVAGTKDAVLMVESEANGLTEEEMLNAVKFGHEGFVPVIEMIEEL

SEQ ID NO: 136096 - protein, 273 aa, Unknown
  Bacterial polypetide isolated from the Sargasso Sea
DLKKAFATRDKQDRSNQISEITDKAKKLYEEDENYTDLDVNSQLKNLEKSIVRTDILKNKNRIDGRGLSDVRPIECEVGVLPRAHGSALFTRGETQAIVVATLGTSDDEQRIESLDGLQRERFMLHYNFPPFSVGETGRIGTGRREIGHGKLAWRAINSSLPTKEAFPYTFRVVSEITESNGSSSMATVCGTSLALMDAGVPIKEPVAGIAMGLIKEGDDFSVLSDILGDEDHLGDMDFKVAGTKDGITSLQMDIKITGITFEIMEQALSQAK

SEQ ID NO: 136097 - protein, 293 aa, Unknown
  Bacterial polypetide isolated from the Sargasso Sea
IAQCEKTVVLATVVGAKKVNPDMDYFPLSVNYQEKYYAAGKIPGGYFKREARPTESETLISRLIDRPIRPLFPDEFKNEVQLLPTVISYDKENEADILSIIASSAALAISGMPFMGPVGASRVGFIEGKYVLNPSKTELEKSKLDLVVAGTKDAVLMVESEANGLTEEEMLNAVKFGHEGFVPIIEMIEDLAKECRKPEWTVEKKDLSEIKKKLEDEFTEDLKKAFSTRDKQDRSNQISEITEKAKKLYEENEAYTDLDVNSQLKNLEKSIVRTDILKNKNRIDGRGLADVRP

SEQ ID NO: 136098 - protein, 262 aa, Unknown
  Bacterial polypetide isolated from the Sargasso Sea
KNLEKTIVRTDILKNKNRIDGRGLSDVRPIMCEVGILPRVHGSALFTRGETQAIVTTTLGTSDDEQKIESLDGLQKERFMLHYNFPPFSVGETGRIGTGRREIGHGKLAWRAINSSLPSKESFPYIFRIVSEITESNGSSSMATVCGTSLALMDAGVPIKEPVAGIAMGLIKEGDDFSVLSDILGDEDHLGDMDFKVAGTKDGITSLQMDIKITGITFEIMEQALNQAKDGRIHILGEMNKALSKSRDGVGKHTPKMEKNFC

SEQ ID NO: 136099 - protein, 312 aa, Unknown
  Bacterial polypetide isolated from the Sargasso Sea
EVDYFPLSVNYQEKYYSAGKIPGGYFKREARPTESETLISRLIDRPIRPLFPDEFRNEVQLLPTVISYDKENEADILSIIASSAALAISGMPFKGPVGASRVGFIDGKYVLNPSKKELENSKLDLVVAGTKDAVLMVESEASGLTEEEMLNAVKFGHEKFVPVIKMIEELKKECKKPDWEIEKKDLSDVKKNLEKEFTDELKKAFSIKDKKERSNLIADITDRAKKIYENDENISELDVNYELKNLEKRIVRTDILKNKNRIDGRGLADVRPIMCEVGILPRTHGSALFTRGETQAIVTTTLGTSDDEQRIE

SEQ ID NO: 136100 - protein, 279 aa, Unknown
  Bacterial polypetide isolated from the Sargasso Sea
KLDSEKLTLIRSEISEKFTSDTLSAVQLADAIKNVEKDIVRGELLNSGNRIDGRDTKTVRPIICETGILERTHGSALFTRGETQAIVVSTLGTGQDEQRIDAIDGEYTENFMLHYNFPPYSVGEVGRVGSTSRREIGHGKLAWRAIHPMLPPKEKFPYTYRVVSEITESNGSSSMATVCGTSMSLMDAGVPLERPVAGIAMGLIKEKDKYVILSDILGDEDHLGDMDFKVAGTSEGITSLQMDIKITSITAEIMKEALAQAKDGRFHILDEMGKAISKP

SEQ ID NO: 136101 - protein, 303 aa, Unknown
  Bacterial polypetide isolated from the Sargasso Sea
MVCLWGPKRREIGHGNLAKRAIKAVLPDNEEFGYTIRVVSEITESNGSSSMATVCGTSLSLMDAGVPITAPVAGIAMGLIKDDEEFAVLTDILGDEDHLGDMDFKVAGSETGITALQMDIKINGINEEIMEVALEKAKNARMHILAKMNEVISTPKSVAEDAPAMKTLLVNKDKIKDIIGKGGSVIKSIQEDTGAVVDINDQGEVSVFGNSQPIMQAALDLIDKITEEPEVGKVYDGTVVKIVDFGAFVNILPGRDGLLHISEISNERNRNVGDVLEEGQKLQVKLIGFDRGKMKLSIKALSK

SEQ ID NO: 136102 - protein, 302 aa, Unknown
  Bacterial polypetide isolated from the Sargasso Sea
DITERAKKLYEEDENISELDVNYELKNLEKKIVRTDILKNKKRIDGRGLADIRPIECEVGILPRTHGSALFTRGETQAIVTTTLGTSDDEQRIETLDGLVKQRFMLHYNFPPFSVGETGRIGTGRREIGHGKLAWRAIKSSLPPKESFPYTFRIVSEITESNGSSSMATVCGTSLALMDAGVPIKEPVAGIAMGLIKEGKDFSVLSDILGDEDHLGDMDFKVAGTKNGITSLQMDIKITGITFEIMEQALNQAKDGRIHILGEMNKALDKSRADVGKHTPKMEKITVDKKNIATVIEKVVQL

SEQ ID NO: 136103 - protein, 209 aa, Unknown
  Bacterial polypetide isolated from the Sargasso Sea
MFKVVKKEIEISGKKISLETGKIARQADGAIIAQCGETVVLATVVGAKKVNPDMDYFPLSVNYQEKYYAAGKIPGGYFKREARPTESETLISRLIDRPIRPLFPDEFKNEVQLLPTVISYDRENEADILSIIASSAALAISGMPFMGPVGASRVGFIEGKYVLNPSKTELEKSKLDLVVAGTKDAVLMVESEANGLTEEEMLNAIKFGH

SEQ ID NO: 136104 - protein, 280 aa, Unknown
  Bacterial polypetide isolated from the Sargasso Sea
DLVVAGTKDAVLMVESEATGLTEEEMLNAVKFGHEGFVPVIEMIEELAKECRKPEWTVEKKDLSEVKKKLEETFTEDLKKAFATRDKQDRSNQISEITDKAKKLYEEDENYTDLDVNSQLKNLEKSIVRTDILKNKNRIDGRGLSDVRPISCEVGVLPRAHGSALFTRGETQAIVVATLGTSDDEQRIESLDGLQRERFMLHYNFPPFSVGETGRIGTGRREIGHGKLAWRAINSSLPSKEAFPYTFRVVSEITESNGSSSMATVCGTSLALMDAGVPIK

SEQ ID NO: 136105 - protein, 245 aa, Unknown
  Bacterial polypetide isolated from the Sargasso Sea
VTATLGTSDDEQRIESLDGLQRERFMLHYNFPPFSVGETGRIGTGRREIGHGKLAWRAIHSSLPSKDAFPYTFRVVSEITESNGSSSMATVCGTSLALMDAGVPIKEPVAGIAMGLIKEGNDFSVLSDILGDEDHLGDMDFKVAGTKDGITSLQMDIKITGITFEIMEQALSQAKDGRVHILDEMNKALSASRADVGKHTPKMEKINVDKKDIAAVIGKGGATIREIVEKSGAKVDVNDEGVVTV

SEQ ID NO: 136106 - protein, 204 aa, Unknown
  Bacterial polypetide isolated from the Sargasso Sea
MFKVFKKEIEVGKRKITLETGKIARQADGAVIAQCGETVVMATVVGAKKVNPDIDYFPLSVNYQEKYYAAGKIPGGYFKREARPTESETLISRLIDRPIRPLFPDEFKNEVQLLPTVISYDKENEADILSIIASSAALAISGMPFKGPVGASRVGFIDGKYVLNPSKKELENSKLDLVVAGTKDAVLMVESEANGLTEEEMLKA

SEQ ID NO: 136107 - protein, 298 aa, Unknown
  Bacterial polypetide isolated from the Sargasso Sea
IKIETQTKIESLKEDNQLKVLLSENDKLIHSDFKKLTKKLMRSQIINDGKRVDGRDLDEVRKISASAGILPKRVHGSALFQRGLTQVLSTTTLGTPSDAQEMDDLNPSTEKTYLHHYNFPPYSVGETRPMRTPGRREIGHGALAERAIIPVLPGKETFPYVLRVVSEVLSSNGSTSMGSVCGSTISLLDAGVPLKAPVSGTAMGLIREGKEIRILTDIQGIEDFLGDMDFKVAGTEKGITALQMDMKITGLPVSIISDAINKARPARIHILEKMQEAIDKPQESLSPHAPRLLSFRID

SEQ ID NO: 136108 - protein, 253 aa, Unknown
  Bacterial polypetide isolated from the Sargasso Sea
SLVERQWGLIKEGKEVRILTDIQGIEDFLGDMDFKVAGTEKGITALQMDMKITGLPVSIISDAIKKARPARLHILEKMQEAIDKPQDSLSPHAPRLLSFRIDPELIGTVIGPGGRTIKGITERTNTKIDIEDGGIVTIASHDGAAAEEAQKIIEGLTRKVHEGEIFSGVVTRIIPIGAFVEILPGKEGMVHISQLSEARVERVEDVVRQGDDVTVRVREIDSRGRINLTLRGVAQNGGMSYPEPTPTPVAPLN

SEQ ID NO: 136109 - protein, 276 aa, Unknown
  Bacterial polypetide isolated from the Sargasso Sea
MFKEYKEEIDFGGKKLTLETGKIARQADAAIIATWGETVVISTVVGAKKVNPEIDYFPLSVNYQEKYYAAGKIPGGYFKREARPTESETLISRLIDRPIRPLFPDDFRNEVQVLPTVLSYDNENEADILSIIASSAALSISGLPFKGPVGASRVGFIDGKYILNPTKKELENSKLDLVVAGTKDAVLMVESEASGLTEKEMLDAVKFGHDGFVSVVKGIEKLSKKCSKDAWKIEKKDYSKVYKKIEKELTKDWKKAFSEKDKKKRSELISLAGDNP

SEQ ID NO: 136110 - protein, 305 aa, Unknown
  Bacterial polypetide isolated from the Sargasso Sea
MFKVYKKEIEVAGKKISLETGKVARQADGAIVATSGETVILATVVGAKKVNPDMDYFPLSVNYQEKYYAGGKIPGGYFKREARPTESETLISRLIDRPIRPLFPDEFKNEVQLLPTVISYDKENQPDILAITASSAALAISGMPFRGPVGASRVGFVDGKYILNPSKAELENSSLDLVVAGTKDAVLMVESEANGLSEEEMLNAVKFGHEGFVPVIQMIEELAKECRKPEWNVEKKDLSEVKTKLELTFTDDLKKAFATKDKQDRSNQISEITDKAKKLYEEDENYTDLDVNSQLKSLEKSIVRT

SEQ ID NO: 136111 - protein, 196 aa, Unknown
  Bacterial polypetide isolated from the Sargasso Sea
AAGKYQGGYFKREARPTESETLISRLIDRPIRPLFPESFRNEVQVLPTVLSYDNENEADILSIIASSAALSISGLPFNGPVGASRVGFIDGKCVLNPTKKELEKSKLDLVVAGTKDAVLMVESEASGLTEKEMLDAVKFGHESFISVIKGIEKLARKSSKENWKIEEKDFSKVSKKIEKELTRDLEKAFSEKDKRT

SEQ ID NO: 136112 - protein, 278 aa, Unknown
  Bacterial polypetide isolated from the Sargasso Sea
FKREARPTEAETLISRLIDRPIRPLFPSSFMNEVQLLPTVLSYDGENQPDILSIIASSAALAISGLPFQGPIAASRVGYKDEKFLLNPSIEELKDSKLDLVVAGTKDAVLMVESETSGLTEKVMLDAVKFGHENFIPVIEAIEKLAKKASKPKWEVEEVDHSDVKKKITDKFEKNLRTAFKETDKKKRSTAISEIESQVKEMFAEDETVTENQSMAQLKSLEKDIVRTAILKDKKRIDGRGLSDVRQIQCEVGVLPRTHGSALFTRGETQALVVTTLG

SEQ ID NO: 136113 - protein, 301 aa, Unknown
  Bacterial polypetide isolated from the Sargasso Sea
MGTSDDEQRIESLDGLQKERFMLHYNFPPFSVGETGRIGTGRREIGHGKLAWRAIHSSLPSKEAFPYTFRVVSEITESNGSSSMATVCGTSLALMDAGVPIKEPVAGIAMGLIKEGDDFSVLSDILGDEDHLGDMDFKVAGTKDGITSLQMDIKITGITFEIMEQALSQAKEGRIHILGEMNKALSASRSNVGKYTPKMEKINVDKKDIAAVIGKGGATIREIVEKSGAKVDVNDEGVVTVAAPDEKSRGIALQMIKDITAKAELNKIYSGKVMKIMEFGAFVNFLGKQDGLVHISELQTK

SEQ ID NO: 136114 - protein, 293 aa, Unknown
  Bacterial polypetide isolated from the Sargasso Sea
ERFMLHYNFPPFSVGETGRIGTGRREIGHGKLAWRAINSSLPSKESFPYTFRIVSEITESNGSSSMATVCGTSLALMDAGVPIKEPVAGIAMGLIKEGDDFSVLSDILGDEDHLGDMDFKVAGTKDGITSLQMDIKITGITFEIMEQALKQAKDGRIHILGEMNKALSKSRDDVGKHTPKMEKISVDKKDIATVIGKGGATIREIVELSGAKVDINDEGEVTVAAPDEESRNKAMQMIKDLTAKAELNKIYNGKVMKIMEFGAFVNFLGKQDGLVHISELADKRVAKVTDVCK

SEQ ID NO: 136115 - protein, 245 aa, Unknown
  Bacterial polypetide isolated from the Sargasso Sea
LQRERFMLHYNFPPFSVGETGRIGTGRREIGHGKLAWRAINSSLPSKESFPYTFRIVSEITESNGSSSMATVCGTSLALMDAGVPIKEPVAGIAMGLIKEGDEFSVLSDILGDEDHLGDMDFKVAGTKDGITSLQMDIKITGITFDIMEQALKQAKDGRVHILGEMNKALDKSREGVGKHTPKMEKITVDKKDIATVIGKGGATIREIVEKSGAKVDVNDEGVVTVAAPDEESRNIALQFIKDLT

SEQ ID NO: 136116 - protein, 267 aa, Unknown
  Bacterial polypetide isolated from the Sargasso Sea
GMPFMGPVGASRVGYIDGKYVLNPSKTELEKSKLDLVVAGTKDAVLMVESEANGLTEEEMLNAVKFGHEGFVPVIKIIEELAKECRKPEWIVEKKDLSDVKKKLEETFTEDLKKAFATRDKQDRSNQISEITDKAKKLYEEDENYTDLDVNSELKNLEKTIVRTDILKNKNRIDGRGLSDVRPISCEVGVLPRTHGSALFTRGETQAIVTATLGTSDDEQRIESLDGLQRERFMLHYNFPPFSVGETGRIGTGRREIGHGKLAWRAI

SEQ ID NO: 136117 - protein, 226 aa, Unknown
  Bacterial polypetide isolated from the Sargasso Sea
QRLESLDGQHRERFMLHYNFPPFSVGETGRIGTGRREIGHGKLAWRAINSSLPSKEAFPYTFRIVSEITESNGSSSMATVCGTSLALMDAGVPIKEPVAGIAMGLIKEGDNFSVLSDILGDEDHLGDMDFKVAGTKDGITSLQMDIKITGITFEIMEQALSQAKDGRVHILNEMNKALSTSRSDVGKHTPKMEQINVDKKDIAAVIGKGGATIREIVEKSGAKVDV

SEQ ID NO: 136118 - protein, 287 aa, Unknown
  Bacterial polypetide isolated from the Sargasso Sea
LDVMHELKDIEKGIVRTDILKNKNRIDGRGLADIRPIMCEVGILPRVHGSALFTRGETQAIVTTTLGTSDDEQRIESLEGLQRERFMLHYNFPPFSVGETGRIGTGRREIGHGKLAWRAIKSSLPSKESFPYTFRIVSEITESNGSSSMATVCGSSLALMDAGVPIKEPVAGIAMGLIKEGKDFSVLSDILGDEDHLGDMDFKVAGTKDGITSLQMDIKITGITFEIMEQALKQAKDGRVHILGEMNKALAKSRDNVGKHTPKMEKITVDKKDIATVIGKGGATIRE

SEQ ID NO: 136119 - protein, 301 aa, Unknown
  Bacterial polypetide isolated from the Sargasso Sea
TAGRERIAETQTIADKSARSEAEAEVSAAIQEELAEQFAEIDDAETQISAAIRSVTKDSVRKRIVEEEVRIDGRNPSEIRALSSDVGIIPTAHGSGLFQRGETQVMNVATLGTGKMDQMIDGIDPIDRKRFMHHYNFPPFSTGETGFMRGPKRREIGHGALAERALFPVVPNFEDFPYTLRLVSEVLSSNGSTSMGSVCSGTLSMMDAGVPIKAPVAGIAMGLVLHEGKYVTLTDILGAEDAFGDMDFKVAGTEEFVTALQLDTKIDGIPAEVLASALNQAKEARMQILSVMTNAIPAPRD

SEQ ID NO: 136120 - protein, 215 aa, Unknown
  Bacterial polypetide isolated from the Sargasso Sea
MFKVVKKEIEVAGKKISLETGKIARQADGAIIAQCGETVVLATAVGAKKVNPDVDYFPLSVNYQEKYYAAGKIPGGYFKREARPTESETLISRLIDRPIRPLFPDEFKNEVQVLPTVISYDKENEADILSIIASSAALAISGMPFMGPVGASRVGFIEGKYVLNPSKEEIKNSKLDLVVAGTKDAVLMVESEADGLTEEEMLNAVKFGHEGFVPV

SEQ ID NO: 136121 - protein, 281 aa, Unknown
  Bacterial polypetide isolated from the Sargasso Sea
VIMVESEAKELSEDQMLGGILFAHQEMQVIISAIKEMASEVGKPTFEYEPKTLDKDLVDTIKDSYSDLISDAYQIRDKQERVQTLNQLKEKITEDLVNEEEDSPKSSDLMDVFKKIEKTIVRSNLIKGEPRIDGRDLDTVRPLFIEAGVLKNTHGSALFTRGETQALVAATLGSPRQAQLIDALEGEFKDQFMLHYNFPPYSVGEAGFMSGPKRREIGHGKLARRALEAVLPSPEDFPYTIRVVSEITESNGSSSMASVCGSSLALMDAGIPMKAPVAGIA

SEQ ID NO: 136122 - protein, 289 aa, Unknown
  Bacterial polypetide isolated from the Sargasso Sea
CFRVGFIDGKYVLNPSKKELEKSKLDLVVAGTKDAVLMVESEANGLTEEEMLKAVKFGHENFVPIIKTIEELAKECGKTTWEVEKKDLSEVKKKIEKEFAKELEKAFSIKNKKERSDLISQITEKAKKLFEEDENISDLDVNFELKNLEKRIVRTDILKNKNRIDGRGLSDVRPIMCEVGILPRVHGSALFTRGETQAIVTTTLGTSDDEQRIETLDGLIRERFMLHYNFPPFSVGETGRIGTGRREIGHGKLAWRAIKSSLPSKESFPYTFRIVSEITESNGSSSMAT

SEQ ID NO: 136123 - protein, 290 aa, Unknown
  Bacterial polypetide isolated from the Sargasso Sea
KDAVLMVESEANGLSEEEMLNAVKFGHEGFVPVIKMIEELAKECRKPEWIVEKKDLSEVKQKLESTFTDDLKKAFATRDKQDRSNQISEITDKAKKLYAEDDNYTDLDVNSELKSLEKSIVRTDILKNKNRIDGRGLSDVRPISCEVGVLPRTHGSALFTRGETQAIVTATLGTSDDEQRIESLDGLQRERFMLHYNFPPFSVGETGRIGTGRREIGHGKLAWRAIHSSLPSKESFPYTFRVVSEITESNGSSSMATVCGTSLALMDAGVPIKEPVAGIAMGLIKEGNNF

SEQ ID NO: 136124 - protein, 169 aa, Unknown
  Bacterial polypetide isolated from the Sargasso Sea
TVVGKKEAEAGRDFFPLTVNYQEKTYAAGKIPGGFFKREGRPSEDETLIARLIDRPIRPLFPNGFTNEVQVIITVVSVDPQIEPDIISMIGTSAALAISGIPFSGPLGAARVGYINGEYVLNPTVEQLATSQLNLVVAGTESAVLMVESEAQALPEEVMLGSVVYGHDQ

SEQ ID NO: 136125 - protein, 323 aa, Unknown
  Bacterial polypetide isolated from the Sargasso Sea
SAFKEIDKKKRSTAISEIELKCKEMFAEDDSLTENQVMAQLKSLEKDIVRTAILKDKKRIDGRGLADVRQIKCEVGVLPRTHGSALFTRGETQALVVTTLGMSDDEQRLESLEGMQKSNFMLHYNFPPFSVGECGRIGTGRREIGHGKLAWRAINSSLPKKENFPYTLRVVSEITESNGSSSMATVCGTSLSLMDAGVPIKEPVAGIAMGLIKEGDDFSVLSDILGDEDHLGDMDFKVAGTKNGITSLQMDIKITGITFEIMEKALDQAKSGREHILGEMNKAIKTSRKEFSKHTPKMETIKVDKKDIATVIGKGGATIREIV

SEQ ID NO: 136126 - protein, 320 aa, Unknown
  Bacterial polypetide isolated from the Sargasso Sea
GKIPGGYFKREARPTESETLISRLIDRPIRPLFPDEFKNEVQLLPTVISYDKENEADILSIIASSAALAISGMPFMGPVGASRVAYIDGKYVLNPSKGELEKSKLDLVVAGTKDAVLMVESEANGLTEEEMLNAVKFGHEGFVPIIKMIEELAKECRKPEWNVEKKDLSEVKKKLEKTFTEDLKKAFATRDKQDRSNQISEITDKAKKLYEENENYTDLDVNSELKKIEKSIVRTDILKNKNRIDGRGLSDVRPISCEVGILPRVHGSALFTRGETQAIVTATLGTSDDEQRIESLDGLQRERFMLHYNFPPFSVGRTGR

SEQ ID NO: 136127 - protein, 277 aa, Unknown
  Bacterial polypetide isolated from the Sargasso Sea
LDVNSQLKNLEKSIVRTDILKNKNRIDGRGLSDVRPIECEVGVLPRAHGSALFTRGETQAIVVATLGTSDDEQRIESLDGLQRERFMLHYNFPPFSVGETGRIGTGRREIGHGKLAWRAINSSLPPKEAFPYTFRVVSEITESNGSSSMATVCGTSLALMDAGVPIKEPVAGIAMGLIKEDDDFSVLSDILGDEDHLGDMDFKVAGTKDGITSLQMDIKITGITFEIMEQALSQAKDGRVHILGEMNKALSASRSDVGKHTPKMEQVNVDKKDIAAV

SEQ ID NO: 136128 - protein, 282 aa, Unknown
  Bacterial polypetide isolated from the Sargasso Sea
HDARVSEITESNGSSSMATVCGTSLSLMDAGVPLPRPVAGIAMGLIKEDEGVAVLSDILGDEDHLGDMDFKVAGTEDGITALQMDIKITSITEDIMKTALAQARDGRLHILKEMAGAISTAREDVSQNAPRITVINIPKDKIREVIGPGGKVIREICETTGAKIDIEDDGTVKVAAVDESAAEAAINEIKNITAEPEVGVIYSGKVVKTVDFGAFVNFLGARDGLVHISELRPERVEKTTDIVKEGDQVKVKLIGIDDRGKVKLSMKAVDQDTGKEITGDQS

SEQ ID NO: 136129 - protein, 286 aa, Unknown
  Bacterial polypetide isolated from the Sargasso Sea
MFKVYKKEIEVAGKKISLETGKIARQADGAIIAQCGETVVMATVVGAKKINPDVDYFPLSVNYQEKYYAAGKIPGGYFKREARPTESETLISRLIDRPIRPLFPEEFKNEVQLLPTVISYDKENESDILSIIASSAALAISGMPFMGPVGASRVGFIEGKYVLNPTKKELENSKLDLVVAGTKDAVLMVESEANGLTEEEMLNAVKFGHEGFVPVIEMIEQLAKECKKPDWVVEKKDLTEVKKKLEQEFTADLKKAFATKDKQDRSNQISEITDKAKKLYEENENY

SEQ ID NO: 136130 - protein, 387 aa, Unknown
  Bacterial polypetide isolated from the Sargasso Sea
GASRVGFIDGKYVLNPSKQDLENSKLDLVVAGTKDAVLMVESETSGLTEEEMLNAVKFGHEGFVPVIDMIEELAAECKKPDWVIEKKDLSEVKKKIEDEFTEELKKAFSIRDKQERSNLISEITDKAKKLFEENENFTDLDVNSELKNLEKRIVRTDILKNKNRIDGRGLSDVRPIMCEVGILPRTHGSALFTRGETQAIVTTTLGTSDDEQRIESLEGLQRQRFMLHYNFPPFSVGETGRIGTGRREIGHGKLAWRAINSSLPSKESFPYTFRIVSEITESNGSSSMATVCGTSLALMDAGVPIKEPVAGIAMGLIKEGDDFSVLSDILGDEDHLGDMDFKVAGTKDGITSLQMDIKITGITFEIMEQALKQAKDGRIHILGEMNK

SEQ ID NO: 136131 - protein, 390 aa, Unknown
  Bacterial polypetide isolated from the Sargasso Sea
DIVRTAIIKEKKRIDGRGLADVRQIKCEVGVLPRTHGSALFTRGETQALVVTTLGMTDDEQRLESLEGMQRSNFMLHYNFPPFSVGECGRIGTGRREIGHGKLAWRAINSSLPTKENFPYTLRVVSEITESNGSSSMATVCGTSLSLMDAGVPIKEPVAGIAMGLIKEGEDFSVLSDILGDEDHLGDMDFKVAGTKNGITSLQMDIKITGITFEIMEKALDQAKEGRKHILGEMNKAIKSSRKEFSKHTPKIETIKVDKKDIATVIGKGGATIREIVETSGAKVDVKDTGEVTVAAPDEASRNKAIDFIKNLIAKPEMGKIYKGKVVKIMEFGAFVNFLGKQDGLVHISELANKRVAKVGDVVKEGDEVSVKVVGFDRGKVKLSMKQASA

SEQ ID NO: 136132 - protein, 550 aa, Unknown
  Bacterial polypetide isolated from the Sargasso Sea
APWCIKIGFIDNEFVINPNKDQLNESKLELVVAGTKEGVLMIESEAHELSEQQMLDAVVLGQESYKPVIEAIISLAKKAAKEPWVIKEKDEELKNLPIKINEEYGNKFIEAYKIIEKQTRSEKLNSIRSEISDKFISDTLSSVLLSDAIKNVEKDIVRGELINTGNRIDGRDTKTVRPIICETGVLERTHGSALFTRGETQAIVVSTLGTGQDEQRIDAIDGEYTENFMLHYNFPPYSVGEVGRVGSTSRREIGHGKLAWRAIHPMLPSKDKFPYTYRVVSEITESNGSSSMATVCGTSMSLMDAGVPLERPVAGIAMGLIKENDKYVILSDILGDEDHLGDMDFKVAGTSEGITSLQMDIKITSITAEIMKEALAQAKEGRFHILGEMAKAIEKPKKSISQYAPTITNLQINKDKIREVIGKGGAVIREISETTGAKIEINDEGIVSIAAVDQKSGNDALEWIKGIVEEPEIGKIYEGKVIKIMDFGAFVNFMGSTDGLVHISQLKNERVAKVEDVISEGDIVKVKVLDIDSRGKIKLSMKAVESDSKD

SEQ ID NO: 136133 - protein, 421 aa, Unknown
  Bacterial polypetide isolated from the Sargasso Sea
MQTKEFKLGSQTVKIETGLIAKQANASVTVEIDGTVILGTLVASSEPNTRDFFPLTVNYNEKSYAAGKIPGSFFKREGRPSEKETLISRLIDRPLRPLFAATYNQEVQIILTLVSYNPEIDPEVPALIAASTCVKLAGLPFNGTLGAVKVGYENNEYVLNPTSSQLETSLLDLTVAGTNNAVLMVESEAKELTEKQMLDAVNFGHDKMQDIIKAIDELVSEVGVNIMEAEPAEDNSELYNSLKTKYGNQISDAYQITIKQDRYQKLSTLKEEIMSKEVSDEDDNSDKLSTVFNDLKKDIVRERILSGEKRIDGRDNSTVRPISVQTGVLPRTHGSALFTRGETQALVVATLGTNKDAQIIDSLNGRADDSFIFHYNFPPYSVGEIGMIGSPKRREIGHGKLARRGVQAVMPSLEDFPYTIR

SEQ ID NO: 136134 - protein, 401 aa, Unknown
  Bacterial polypetide isolated from the Sargasso Sea
NEILNSRLIDRPLRPLFHKDFKNETQVICTVINYDGENDPAICAMIGSSAATTIAGLPFLGPLACARVGYSSGEYILNPTVEELDGSELDLVVAGTRDGVLMVESEASELPEKIMLGAVQFGFKEFQCVIDKIIELAEMSAKESWEISKPDKPSYSKKLIEKVQKEISPLYKIKEKKKRNQSLNVTRDKIIEDFLDENSEPGIINSLIKEEEKNIVRSSILNSKKRIDGRDLTTVRDIDVRIDLLENVHGSSLFTRGETQALVTSTLGTSSDEQTKDTLDGDKKEKFMLHYNFPPFSVNEVGRMGSTGRREIGHGKLAWRAINPILNKLDEFPYTVRVVSEITESNGSSSMATVCGTSLALMDAGVPIKKSVAGVAMGLIKEDNNFVVLTDILGDEDHLGD

SEQ ID NO: 136135 - protein, 492 aa, Unknown
  Bacterial polypetide isolated from the Sargasso Sea
LMVESEAHQLSEEKMLEAVVLGQESYLPVIDAIISLAKKAAKEPWDIPEKESEIVNLPKLIADEYANKFSDAYKVTEKQKRVEKLNEIKLEIEEKFLSETLTAVIVSDAIKSVEKDVVRGELLKTGNRIDGRDTRTVRPIVCETGVLSRTHGSALFTRGETQALVVTTLGTGMDEQRIDAIEGEYKENFMLHYNFPPYSVGEVGRVGSTSRREIGHGKLAWRAIHPMLPSNDQFPYTYRVVSEITESNGSSSMATVCGTSMSMMDAGVPLEKPIAGIAMGLIKENDDYVVLSDILGDEDHLGDMDFKVAGTKDGITSLQMDIKITSITSAIMKEALEQAKEGRIHILGEMAKAIEKPQEKISDYAPTITTFHVQKDKIREVIGKGGAVIREISETTGAKIEIDDEGLVSVAAVDSKSGNDAIEWIKGIVEEPEIGKIYEGKVVKLMDFGAFVNFMGSKDGLVHISQLKNERVEKVSDVINEGDVVKVKVLDI

SEQ ID NO: 136136 - protein, 236 aa, Unknown
  Bacterial polypetide isolated from the Sargasso Sea
SALFTRGETQAIVTTTLGTSDDEQRIESLEGLQRERFMLHYNFPPFSVGETGRIGTGRREIGHGKLAWRAINSSLPSKESFPYTFRIVSEITESNGSSSMATVCGTSLALMDAGVPIKEPVAGIAMGLIKEGDDFSVLSDILGDEDHLGDMDFKVAGTKDGITSLQMDIKITGITFEIMEQALNQAKDGRIHILGEMNKALNKSRDNVGKHTPKMEKITVDKKRYCNCHWKRWSNN

SEQ ID NO: 136137 - protein, 452 aa, Unknown
  Bacterial polypetide isolated from the Sargasso Sea
SEIKKKLEEEFTEDLKKAFSTRDKQDRSNQISEITEKAKKLYEENEDYTDLDVNSQLKNLEKSIVRTDILKNKNRIDGRGLADVRPIMCEVGILPRVHGSALFTRGETQAIVTTTLGTSDDEQRIESLDGLQKERFMLHYNFPPFSVGETGRIGTGRREIGHGKLAWRAINSSLPPKESFPYTFRIVSEITESNGSSSMATVCGTSLALMDAGVPIKEPVAGIAMGLIKEGDDFTVLSDILGDEDHLGDMDFKVAGTKDGITSLQMDIKITGITFEIMEQALNQAKDGRIHILGEMNKALSKSRDNVGKHTPKMEKITVDKKDIAAVIGKGGATIREIVEKSGAKVDVNDEGEVTVAAPDEESRNVAMQMIKDITAKAELNKIYNGKVMKIMEFGAFVNFLGKQDGLVHISELADKRVAKVTDVVKEGDEVKVKVIGFDRGKVKLSIKQAAI

SEQ ID NO: 136138 - protein, 358 aa, Unknown
  Bacterial polypetide isolated from the Sargasso Sea
MFKIFKKEIEINGKKITLETGKIARQADGAIIAQCGETVVMATVVGAKKINPEVDYFPLSVNYQEKYYAAGKIPGGYFKREARPTDSETLISRLIDRPIRPLFPDEFKNEVQLLPTVISYDKENEPDILSIIASSAALSISGMPFLGPIGASRVGYIDGKYVLNPSKKDLEKSKLDLVVAGTKDAVLMVESETKGLTEEEMLNAVKFGHKNFVPIIEMIEELAKECKKPDWIVEKKDLSDVKLKLEKEFTDELKKAFSIKDKQERSNLISEITEKSKKLFEDDENFTDLDVNHILKNLEKKIVRTDILKNKNRIDGRGLADIRQIKCEVGILHRVHGSALFTRGETQAIVTTTLGTSD

SEQ ID NO: 136139 - protein, 519 aa, Unknown
  Bacterial polypetide isolated from the Sargasso Sea
LDLVVAGTKSSVLMVESEAKVLSEDVMLGAVNYGHEQMAVAIDAIAELASKADTGTFEWTEAAINEELSQVIVEKFEKQIGEAYGILNKLERRDKLREIKDDIRSMTDSLEDIEASENDVASIIDKLEHDVVRNAVLSGEKRIDGRGKEDVRPIFSEVDVMPRTHGSALFTRGETQALVVTSLGTERDSQIIDAIEGERRESFMLHYNFPPFCVGETGRVGTPKRREIGHGRLAKRGIQAVMPDMSTFPYVIRVVSEITESNGSSSMASICGTSMSLMNAGVPVTAPVAGIAMGLIKEGNDYVVLSDIMGDEDHLGDMDFKVAGTDEGVTALQMDIKIDGITSEIMEVALAQARDGRLHILNEMNKVISTPREEMSEHAPRIITFRIPTDKIRDVIGKGGATIRQITEETGATIDIDDDGTIKIASVDNAAGQAARTRVEAITADIEVGTVYQGKVQKLMDFGAFVNILPGKDGLVHISQISEERVENVSDKLSEGDTVKVKVLEVDKQGRIRLSMKAV

SEQ ID NO: 136140 - protein, 533 aa, Unknown
  Bacterial polypetide isolated from the Sargasso Sea
NEVQVLPTVLSYDGVNEPDILAIIASSAALAISGMPFQGPVGASRVGYINDKYVLNPTKEEIESSKLDLVVAGTKDAVLMVESEASGLSEKIMLDAVKFGHEKFIPVIEAINKLVKDCGKEKWVIEKKDLSEIKETLEATFTEDLQKAFATKDKQDRSNQILEITDKAKKIFGEDEIYTDLDVLMTLKKLEKKIVRTDILKNKSRIDGRSLTDVRQINCEVGVLPRTHGSALFTRGETQALVTLTLGTSEDEQRVESLDGLKRNRFMLHYNFPPFSVGEVGRIGTGRREIGHGKLAWRALKSSLPKQEKFPYTYRIVSEITESNGSSSMATVCGSSLALMDAGVPMKDSVAGIAMGLIKEGKDFSVLSDILGDEDHLGDMDFKVAGTKDGITSLQMDIKITGITFEIMDKALSQAKDGRIHILGEMAKALTGSRDAVSKYTPKIETVMVDKKDIAAVIGKGGATIREIVEMSGAKVDVKDTGEVTVAAPDEESRLKAMNMIKDIIAKPEINKIYKGKVIKIMDFGAFVNFLGK

SEQ ID NO: 136141 - protein, 409 aa, Unknown
  Bacterial polypetide isolated from the Sargasso Sea
ADEEKQAFDEVNSKFRTDIVDAFTTTNKKERSEKISAIQDKLVESLDEELHDLHLKQFKEVEKDVVRRNILNDQKRIDGRGMTEVRDINIETNFLPSVHGSALFTRGETQAIVTTTLGSGRDVQTVDALQGEIKDNFMLHYNFPSYSVGELGFPMGPKRREIGHGALAKRSLKFAVPSLEDFPYAIRVVSEITESNGSSSMASVCGGSLALMAAGVPIKENVAGVAMGLIKEEDKYEVLTDILGDEDHLGDMDFKVAGTKNGVTGLQMDIKIEGINEEILEKALMQAKEARMHILEKMDAVLSTPLELTSLAPSFTKFSVHKDKVKVVIGKGGSTIKGLQEEFGVTIELQDTGEVSVFAENKEIAEKAKEKIELLCAEPEEGKIYEGVVAKVVEFGAFITIMPGKDGLL

SEQ ID NO: 136142 - protein, 228 aa, Unknown
  Bacterial polypetide isolated from the Sargasso Sea
MAILCAAFKSDKIKIEIKGQIVTPITKSFQYGQHTVTLETGVIARQATAAVLASMDDTSVLVTVVGKKEAKADQDFFPLTVNYQEKAYAAGKIPGGFFKREGRPSEGETLIARLIDRPIRPLFPEGFKNEVQVVVTVMSANPDIPTDIISMIGTSAALAISGIPFNGPIGAARVGFSNGEYILNTRAEEQAESELDLVVAGTEGAVLMVESEASVLSEDTMLGAVMFG

SEQ ID NO: 136143 - protein, 586 aa, Unknown
  Bacterial polypetide isolated from the Sargasso Sea
MFNIHSEEISWGDRTLKIETGKIARQADGAVIVTYGGTSVIATVCAEKKPKAGIDFFPLTVNYQEKSYASGKIPGGYFKREGRPTERETLISRLIDRPIRPLFVKEFKNETQVIATVLTYDHENDPDIVAMIACSAALTISGIPFKGPIGAAKIGLIENEMILNPKVEDIENSQLELVVAGTKNAILMIESEASELSEKMMLEAVMFAHESMQEVIEMIINLARKCAKDPMIIEEKDNADITSFIDGEVRLKLEKAFQITDKQERYNQVGTIKDEMIEKLNEKFDDNYDEIEASGVFKDIESSIVRSSILKDSKRIDGRGLSDIRPISVEVGLLPQTHGSSLFTRGETQAIVVTTLGTAEDEQYIDSLDGTKKQNFMLHYNFPPFSVGEVGRIGATGRREIGHGKLAWRAVNPLLPSKEDFPYTIRVVSEITESNGSSSMATVCGTSLALMDAGVPIREPIAGIAMGLILEGKDYAVLSDIIGDEDHLGDMDFKVAGTSKGITTLQMDIKIAGITKEIMKKALDQAKTGRKHILSEMEKAIKASRDDVADTAPRIVTMNIPTDKIKDVIGSGGKVIKEMVEQTGQK

SEQ ID NO: 136144 - protein, 580 aa, Unknown
  Bacterial polypetide isolated from the Sargasso Sea
VQLLPTVLSYDGENQPDILSIIASSAALAISGLPFQGPIAASRVGYKDGKYLLNPSPTELLDSELDLVVAGTKDAVLMVESETTGLSEKIMLDAVKFGHENFLPAIKAIESLAKKAGKPKWEIEEIDHSEIKKKIAGTFEKDLRKAFQETDKKKRSAAISEIDTKCKEMFAEDENITENQAMAQLKSLEKDIVRTAILKDKKRIDGRGLADVRQIKCEVGVLPRTHGSALFTRGETQALVVTTLGMSDDEQRLESLDGMQRSNFMLHYNFPPFSVGECGRIGTGRREIGHGKLAWRAIKSSLPKKENFPYTLRVVSEITESNGSSSMATVCGTSLSLMDAGVPIKEPVAGIAMGLIKEGDKFSVLSDILGDEDHLGDMDFKVAGTKDGITSLQMDIKITGITFEIMEKALDQAKAGREHILGEMNKSLKSSRKEFSKHTPKMETIKVDKKDIATVIGKGGATIREIVETSGAKVDVKDTGEVTVAAPDEESRNKALEFIKSLIAKPEMGKIYKGKVVKIMEFGAFVNFLGKQDGLVHISELATKRVAKVGDVVKEGDEVSVKVVGFDRGKVKLSIKQAVA

SEQ ID NO: 136145 - protein, 463 aa, Unknown
  Bacterial polypetide isolated from the Sargasso Sea
VLSYDNENEADILSIIASSAALSISGLPFKGPVGASRVGFINGKCVLNPTKKELENSKLDLVVAGTKDAVLMVESEASGLTEKEMLDAVKFGHEGFSSVIKGIEKLAKKCSKKDWKIEKKDYSKVVKTIKKELTKDLEKAFSEKDKKKRSELINLAGEKCKALFEDDEDLLEHEAMLQLKNLEKDIVRTRILKSKKRIDGRGLADVRPIKCEVGILPRVHGSALFTRGETQALVTTTLGTSDDEQRIESLEGLKRQRFMLHYNFPPFSVGETGRIGTGRREVGHGKLAWRALNSSLPKKENFPYTLRIVSEITESNGSSSMATVCGSSLALMDAAVPIAEPVAGIAMGLIKEKDKFSILSDILGDEDHLGDMDFKVAGTKDGITSLQMDIKITGITFEIMEQALAQAKEGRVHILNEMNKTLKSSRKEVGKHTPKMETIKVDKKDIATVIGKGGATIREIVEK

SEQ ID NO: 136146 - protein, 688 aa, Unknown
  Bacterial polypetide isolated from the Sargasso Sea
MNKLVKKEIPMGSKTLVLETGKIARQASASVIASMGNTVVMCAVVTKTSDEKRDFFPLSVHYSEKTYSAGKIPGGYFKREGRPTEVETLTSRLIDRPLRPLFPDFFKEEVQVNCMLLSLDKDNPPDVVAMLAASAAMSIADVPFMGPIAGARVGFIDDEYVLNPSFEQMGQSDLDMIIAGSENAVLMVESDANELSEDLMIGGILFAHEEMKPVINSIKGFADEVLPERSKHENKYADEEKQAFDTIDSKVREDLVDAFTTIDKKERNEKVGSIKDNLMQDLDEELHDLYTKQFKEVEKDVVRGNVLNDQKRIDGRGMTEVRDITIETNFLPSVHGSALFTRGETQAIVTTTLGSGRDVQTVDALQGEIKDNFMLHYNFPSYSVGELGFPMGPKRREIGHGALAKRSLKFGVPSLEDFPYAIRVVSEITESNGSSSMASVCGGSLALMAAGVPIKENVAGVAMGLIKEGDKYEVLTDILGDEDHLGDMDFKVAGTKNGVTGLQMDIKIEGINEEILEKALMQAKEARMHILEKMDAVLSKPLELTDLAPSFTKFKVHKDKVKVVIGKGGSTIKGLQEEFGVTIELQDSGEVSVFAENKEIANQAKEKIELMCAEPEEGKVYEGLVAKVVEFGAFVTIMPGKDGLLHISQFKEDFEHLTDVINEGDTIKVKLVEVGRQGRLKLEFADSE

SEQ ID NO: 136147 - protein, 519 aa, Unknown
  Bacterial polypetide isolated from the Sargasso Sea
MVTGKKDKICMIAGGSNFVPEKTILEALDVAMEGINNIVDLQMEFSEHFDNSYEVVETKILTDDIEKSLDDTYSAKIEKIFDLDTKQARDDEYNAIEKEALEPFIEDEVMYPEVKNHIKNMFKNAVRKTVLDKKVRVDGRGLEDIRDISIVPSILPRVHGSALFTRGETQSIAALTLGSSRDEQIIDSMASDYKKSFLLHYNFPPYCVGEVGRIGFTNRREIGHGHLAERSLKPILPSSEDFPYTVRIVSEITESNGSSSMASVCGGSLAMMNAGVPIKEHVAGIAMGLIMDDEDNYAVLSDILGTEDFLGDMDFKVAGTKDGISAIQLDLKVPGLSMDVLSNALEQANKGRLHILDEMNKAIDKPNAISQYAPQIESFMIDKDKIGALIGPGGKNIKALQENAECVINIDDDGTVSVSAEDKTKLDNAISQIKAVVQDPEVGTVFDGKVTKILDFGAFVEFAPGREGLVHISQLAWERVNKVEDVLSEGDEVKIKLFEIDKQGRLNFSIKLLTEKPEK

SEQ ID NO: 136148 - protein, 672 aa, Unknown
  Bacterial polypetide isolated from the Sargasso Sea
MKIEHKFELGNQQITLETNRIAKQADASVVVTCGETMVMANICAAKTQKPDIDFFPLTVNYQEKYYASGKIPGGFFKREARPTERETLTSRLIDRPIRPLFHKNFKNETQVTLTVLSYDSVVDPDIIAMYATGAALAISGLPVAGTLGSARVGYIDGKLVANPSIQDMENSELDLVVAGTEEGVLMVESEAQELSENTMLEAVMFGHDFYQTFIKEVQNFASKTEIKTFEVPSLPDFYEGLQKDIESKISDPIREAYGLVDKQERSQKLTEIRSSIIDNVEDDQILAATTIIKDIEKNVVRGDIIKNKSRIDGRKLDEVRQITCELDILPRAHGSSLFTRGETQALVVTTLGTGDDEQMIDSLDPMHKQHFMLHYNFPPYSVGEVGRVGATGRREIGHGKLAWRAVHPMLPKKEDFPYTLRLVSEITESNGSSSMATVCGSSLALMAAGVPIKKHIGGIAMGLIKEGEDFVVLSDILGDEDHLGDMDFKVAGTMDGITSLQMDIKITSITKEIMEIALNQASGGRKHIIGVMSDALPEARAKFSKHAPQVISITIDKAKIKDVIGSGGKVIKNIVEVSGAKLEVNDDGIVKIASSNEESINKAKQMVEDIVAEPEVGKVYTGKVVKIVEFGAFVNFMGARDGLLHVSQISQKRVENVSDVLSEGQEVQVKVL

SEQ ID NO: 136149 - protein, 208 aa, Unknown
  Bacterial polypetide isolated from the Sargasso Sea
HLGDMDFKVAGTEEGITALQMDIKIDGITEEIFDVALEKAQKARTHILESMNEVLSESREELSDKAPQAVVIHINTKKIRDVIGKGGETIRGLTEETGAIIEVEDSGKVTIYGDTPESRESALQKIEEITAEPEVNKIYTGTVANIMDFGAFVTIMPGRDGLVHVSEISEERVENVSDYFVQGEEVKVKVLEVDRQGKIRLTMKGLDD

SEQ ID NO: 136150 - protein, 284 aa, Unknown
  Bacterial polypetide isolated from the Sargasso Sea
MFKVNKKEIELNGKKISLETGKIARQADGAIIARCGETVVMATVVGAKKVNPEVDYFPLSVNYQEKYYSAGKIPGGYFKREARPTESETLISRLIDRPIRPLFPDEFRNEVQLLPTVISYDKENESDILSIIASSAALAISGMPFMGPVGASRVGFIDGQYVLNPSKKELEKSKLDLVVAGTKEAVLMVESEANGLSEEEMLKAVKFGHENFIPIIKMIEDLAKDCKKPDWIVEKKDLSEVKKRIDKEFSAELKKAFSIKDKQERSNLISDITERAKKLYEEDE

SEQ ID NO: 136151 - protein, 219 aa, Unknown
  Bacterial polypetide isolated from the Sargasso Sea
ALFTRGETQAIVTTTLGTSDDEQRIESLDGLQRERFMLHYNFPPFSVGETGRIGTGRREIGHGKLAWRAIHSSLPSKETFPYTFRVVSEITESNGSSSMATVCGTSLALMDAGVPIKEPVAGIAMGLIKEGDDFSVLSDILGDEDHLGDMDFKVAGTKDGITSLQMDIKITGITFEIMEQALNQAKDGRVYILGEMNKALSVFKVRSWKTYSKNGKNKC

SEQ ID NO: 136152 - protein, 718 aa, Unknown
  Bacterial polypetide isolated from the Sargasso Sea
MSVTNVTCNIGDKEIKFETGKLALQAPGSVVVTSGDTNVLVTTVANESVREGIDFFPLTVDVEERMYAAGKIPGGFFRREGRQTEKAILACRLIDRPLRPSFKDGFRCETQIIATVLSVDNENEYDVLSLNAASLGLQLAGIPLESPVGAVRMSLINDEWVVQATNTEQEDSIFDMVIAGKLNENNEIDIVMVEAGAKENTFEKIDDGSLAPSEEIVADGIDMSKDYILSLINSQKELVSMNDIPSVDWPLVEDYTDELKSKIEASCKEELSEIASIIDRSERSSRQNELQEKVVEEFLDEEEDNSKAIKLAFKSIFKELVRDRVVSGGPRLDGRSPTDIRNISSEINLLPMVHGSSLFLRGETQVLNVTTLGMSRLEQMLDTIDTVTSKRYMHHYNFPPYSTGEAYMMRGPKRREIGHGALAEKAILPVIPPKADFPYTIRVVSEAISSNGSTSQASVCASSLSLMAAGVPIREHVSGIAMGLISKNKEFVTLTDILGAEDALGDMDFKVAGTRGVITALQLDMKIEGLPSDILRKALEQAKDARHHILDIMEDTISEPADSLSGNAPRLESIELPKDKIGEVIGPKGKNIRKIEEETGASVEIDDDGILTLGSTEQESLDTAKEMVMAIIDPEEPELNQEYEGEVVSLAKYGAFINILPGRDGLMHISKFHSEIRVGDPEKVLTVGDKIQVVVDSIENGKVGLTLSKRYRNTRGCN

SEQ ID NO: 136153 - protein, 651 aa, Unknown
  Bacterial polypetide isolated from the Sargasso Sea
MSVTNVTCKIGEKEIKFETGKLALQAPGAVVVTSGETNVLVTTVANETVREGIDFFPLTVDVEERMYSAGKIPGGFFRREGRQTEKAILACRLIDRPLRPSFNDGFRCETQIIATVLSVDNENEYDVLALNAASLGLQLAGVPLDSPIGAVRMSLINDNWVVQASNSEMEESVFDMVVAGNLNENNDVDIVMVEAGATETAFDKIESGSTTPTEDIVADGIDKSKEYISELIKAQAELVSQNEIPDVVWPLIEDYTPELLSELEEAFKSDIETITSITDRKERSTKQSELEESAVEKYLNEEEDNTKAIKLAFKSIVKNVVRDRVISGGARLDGRTPTDIRNISAEIDLLPTVHGSSLFLRGETQVLNVTTLGMGRLEQMLDTIDTVTSKRYMHHYNFPPYSTGEAYMMRGPKRREIGHGALAEKALVPVIPTKIDFPYTIRVVSEAISSNGSTSQASVCASSLSLMAAGVPIKEHVAGIAMGLISKDDNYVTLTDILGAEDALGDMDFKVAGTRNMITALQLDMKIEGLPSDVLRKALNQAMDARHHILDIMEDAISEPAESLSGNAPRLETVELPKDKIGEVIGPKGKNIRKIEEETGVSVEIDDEGILTLGSTEEDSLAEAKEMVMLIIDPPEVEVDTDYDGEVVSVA

SEQ ID NO: 136154 - protein, 385 aa, Unknown
  Bacterial polypetide isolated from the Sargasso Sea
VGASRVGFIDGKCVLNPTKKELENSKLDLVVAGTKDAVLMVESEASGLTEKEMLDAVKFGHEGFVPVIKGIEKLSKKCSKEKWKIEEKDFSKVSKKIAKELTKDLEKAFSEKDKKTRSDLISQAGEKCKSLFEGDEDLLEHEIMLQLKKLEKNIVRTRILKNKKRIDGRGLSDVRPIKCEVGVLPRTHGSALFTRGETQALVTTTLGTTDDEQRIESLEGLKRQRFMLHYNFPPFSVGETGRIGTGRREVGHGKLAWRALNSSLPKKENFPYTLRIVSEITESNGSSSMATVCGSSLALMDAAVPIAEPVAGIAMGLIKEKDDFSILSDILGDEDHLGDMDFKVAGTKDGITSLQMDIKITGITFEIMEKALAQAKDGRVHILNE

SEQ ID NO: 136155 - protein, 239 aa, Unknown
  Bacterial polypetide isolated from the Sargasso Sea
MFKVYKKEIEVAGKKISLETGKVARQADGAIIATSGETVILATVVGAKKVNPDMDYFPLSVNYQEKYYAGGKIPGGYFKREARPTESETLISRLIDRPIRPLFPDEFKNEVQLLPTVISYDKENQPDILAITASSAALAISGMPFMGPVGASRVGFVDGKYILNPSKTELENSSLDLVVAGTKDAVLMVESEANGLTEEEMLNAVKFGHEGFVPVIKMIEELAKECRKPEWTVEKKRSI

SEQ ID NO: 136156 - protein, 344 aa, Unknown
  Bacterial polypetide isolated from the Sargasso Sea
IVVQLLGSERSSQIIDALEGEYKDKFMLHYNFPPYSVGEVGFMGSPKRREIGHGKLARRALEAVLPNMAEYPYTIRIVSEITESNGSSSMATVCGSSLSLMHAGVPIKSHVAGIAMGLVMEGDKYKVLTDILGDEDHLGDMDFKVAGTDNGITALQMDIKIAGITEEIMKDALSQAKDAKDHILKIMNEAISSPSEEYSPYAPSIISITVPKDKIRDVIGKGGATIRSITEVTGAQVDINDDGIVTIASVDQASGLKAKEKIELLTADVEVDKIYEGRVAKIMDFGAFVTILPGKDGLVHISEISEERVESVSDVLSEGQVIQVKVIEVDRQNRIRLSMKAIKD

SEQ ID NO: 136157 - protein, 325 aa, Unknown
  Bacterial polypetide isolated from the Sargasso Sea
MFKVVKKEIEVSGKKLSLETGKIARQADGAIIAQCGETVVLATVVGAKKVNPDMDYFPLSVNYQEKYYAAGKIPGGYFKREARPTESETLISRLIDRPIRPLFPDEFKNEVQLLPTVISYDKENEADILSIIASSAALAISGMPFMGPVGASRVGFIEGKYVLNPSKKELEKSKLDLVVAGTKDAVLMVESEANGLTEEEMLNAVKFGHEGFVPIIEMIEELAKECRKPEWTVEKKDLSEVKKKLEEEFTEDLKKAFSTKDKQDRSNQISQINEKAKNLYEENEAYSDLDVNSQLKSLEKSIVRTDILKNKNRINGRGLADVRPI

SEQ ID NO: 136158 - protein, 400 aa, Unknown
  Bacterial polypetide isolated from the Sargasso Sea
ISRLIDRPIRPLFPEDFKNEVQVLPTVLSYDNENEADILSIIASSAALSISGLPFKGPVGASRVGFIDGKCILNPTKKELENSKLDLVVAGTKDAVLMVESEASGLTEKEMLDAVKFGHEGFVSVIKGIEKLTKKCSKEAWKIEKKDYSKVFKKIEKELTKHLEKAFSEKDKKKRSELISSAGEKCKALFEDDETLLEHEIMSQLKNLEKNIVRTRIIKSKKRIDGRSLSDVRPIHCEVGVLPRAHGSALFTRGETQALVTTTLGTTDDEQRIESLEGLKRQRFMLHYNFPPFSVGETGRIGTGRREVGHGKLAWRALNSSLPKKENFPYTLRIVSEITESNGSSSMATVCGSSLALMDAAVPIAEPVAGIAMGLIKEKDKFSILSDILGDEDHLGDMDF

SEQ ID NO: 136159 - protein, 303 aa, Unknown
  Bacterial polypetide isolated from the Sargasso Sea
TGRIGTGRREIGHGKLAWRAIHSSLPSSESFPYTFRVVSEITESNGSSSMATVCGTSLALMDAGVPIKEPVAGIAMGLIKEGDEFSVLSDILGDEDHLGDMDFKVAGTKDGISSLQMDIKITGITFEIMEQALNQAKDGRIHILGEMNKALSASRSDVGKHTPKMEKISVDKKDIAAVIGKGGATIREIVEKSGAKVDVNDEGIVTVAAPDEEARNIAMQMIKDITAKAELNKIYSGKVMKIMEFGAFVNFLGKQDGLVHISELADKRVAKVTDVVKEGDEVKVKVIGFDRGKVKLSMKQAAK

SEQ ID NO: 136160 - protein, 260 aa, Unknown
  Bacterial polypetide isolated from the Sargasso Sea
MRKKDLSEVKKKLEETFTEDLTKAFATRDKQDRSNQISEITDKAKKLYEENENFTDLDVNYELKNLEKRIVRTDILRNKNRIDGRGLSDVRPIECEVGILPRVHGSALFTRGETQAIVTTTLGTSDDEQRIESLEGLQRERFMLHYNFPPFSVGEVGRVGTGRREIGHGKLAWRAINSSLPSKESFPYTFRIVSEITESNGSSSMATVCGTSLALMDAGVPMKEPVAGIAMGLIKEGDDFSVLSDILGDEDHLGDMDFKV

SEQ ID NO: 136161 - protein, 239 aa, Unknown
  Bacterial polypetide isolated from the Sargasso Sea
MFKVYKKEIEVAGKKISLETGKIARQADGAIIAQCGETVVMATVVGAKKVNPDVDYFPLSVNYQEKYYAAGKIPGGYFKREARPTESETLISRLIDRPIRPLFPDEFKNEVQLLPTVISYDKENEADILSIIASSAALAISGMPFMGPVGASRVGFIEGKYVLNPSKKELENSKLDLVVAGTKDAVLMVESEANGLTEEEMLDAVKFGHEGFSPIIKMIEELALECKKPDWVVEKKRPF

SEQ ID NO: 136162 - protein, 473 aa, Unknown
  Bacterial polypetide isolated from the Sargasso Sea
IPEIEYSIKEDNSELKEKIINIVRDDLVSAYSIPEKAKRQESVSLARDKMKESLSDEDLEDENAVSGYFKSVESEIVRSRLLNGDSRIDGRDLDTVRPIDIEVGFLNKSHGSCLFTRGETQSIGVATLGGSRDAQLIDALEGTTNDPFMLHYNFPPFSVGEAGFIGAPKRREIGHGKLARRALEAVLPSQEEFPYTIRVVSEITESNGSSSMATVCSSSLSMMDAGIPIKKAVAGVAMGLVLDGDDFCVITDILGDEDHLGDMDFKVAGTSDGVTALQMDIKVKGISEEIMEVALEKAQTARTHILEKMDSVLDSPRKELSPNAPQAVNMTIAKDKIREVIGKGGSVIKSITEKSGANVDINDDGEIKIFGDSPESRQTAIDLINKIVADPEVGHIYTGTVVKIVEFGAFVSIDGGKEGLVHVSEIMEERVEKVSDYLVEGEEVDVKVIGIDDRGRVKLSIKAVNSPEGTTQG

SEQ ID NO: 136163 - protein, 396 aa, Unknown
  Bacterial polypetide isolated from the Sargasso Sea
MFKIFKKEIKVGEKKIILETGKIARQADGAVIAQCGETVVMATVVGAKKVNPDVDYFPLSVNYQEKYYAAGKIPGGYFKREARPTESETLISRLIDRPIRPLFPDEFKNEVQLLPTVISYDKENEADILSIIASSAALAISGMPFKGPVGASRVGYIDGKYVLNPSKKELENSKLDLVVAGTKDAVLMVESEANGLTEEEMLKAVKFGHENFVPIINMIEELANECKKPDWVVEKKDLSKVKKKIENEFTDDLKKAFSIKDKKTRSNLISEITDKAKKLFEEDENFTDLDVNSELKNLEKRIVRTDILKNKKRIDGRGLSDVRQIMCEVGILPRTHGSALFTRGETQAIVTTTLGTSDDEQRIESLEGLQRERFMLHYNFPPFSVGETGRIGTEEG

SEQ ID NO: 136164 - protein, 207 aa, Unknown
  Bacterial polypetide isolated from the Sargasso Sea
LGDMDFKVAGTDNGITALQMDIKIAGITEEIMKDALSQAKDAKDHILKIMNEAISSPSEEYSPYAPSIISITVPKDKIRDVIGKGGATIRSITEVTGAQVDINDDGIVTIASVDQASGLKAKEKIELLTADVEVDKIYEGRVAKIMDFGAFVTILPGKDGLVHISEISEERVESVSDVLSEGQVIQVKVIEVDRQNRIRLSMKAIKD

SEQ ID NO: 136165 - protein, 428 aa, Unknown
  Bacterial polypetide isolated from the Sargasso Sea
QDRSNQISEITDKAKKLYEDNENYSDLDVNSQLKNLEKSIVRTDILKNKNRIDGRGLADVRPIECEVGILPRVHGSALFTRGETQAIVTTTLGTSDDEQRIESLDGLQRERFMLHYNFPPFSVGETGRIGTGRREIGHGKLAWRAINSSLPPKESFPYTFRIVSEITESNGSSSMATVCGTSLALMDAGVPIKEPVAGIAMGLIKEGDDFSVLSDILGDEDHLGDMDFKVAGTKDGITSLQMDIKITGITFEIMEQALKQAKDGRIHILGEMNKALDKSRADVGKHTPKMEKITVDKKDIAAVIGKGGATIREIVEHSGAKVDVNDEGVVTVAAPDEESRNKAMQMIKDITAKAELNKIYNGKVMKIMEFGAFVNFLGKQDGLVHISELADKRVAKVTDVVKEGDQVKVKVIGFDRGKVKLSIKQAAV

SEQ ID NO: 136166 - protein, 386 aa, Unknown
  Bacterial polypetide isolated from the Sargasso Sea
MFKIYKKEIEIAGKKIILETGKIARQADGAIIATCGETVVLATAVGAKKINPDVDYFPLSVNYQEKYYAAGKIPGGYFKREARPTDNETLISRLIDRPIRPLFPEEFKNEVQVLPTVISYDKENESDILSIIASSAALAISGMPFLGPVGASRVGYIKGKYVLNPSKEELKNSKLDLVVAGTKDAVLMVESEASDLSEEEMLNAVKFGHEGFVPIIAMIEELAKECKKPDWIIEKKDLSEVKRKLEKEFTNDLKKAFSTRDKQERSNMISEITDKSKKIFEDDENYTDLDVNSQLKNLEKNIVRTDILKNKTRIDGRGLADVRPIKCEVGILPRVHGSALFTRGETQAIVTTTLGTSDDEQKIESLDGLQKERFMLHLHFPPVFSW

SEQ ID NO: 136167 - protein, 422 aa, Unknown
  Bacterial polypetide isolated from the Sargasso Sea
ISEITDKAKKLFEENENYSDLDVNSQLKNLEKKIVRTDILKNKNRIDGRGLSDVRPIECEVGVLPRTHGSALFTRGETQAIVVTTLGTSDDEQRIESLDGLQRERFMLHYNFPPFSVGETGRIGTGRREIGHGKLAWRAINSSLPSKEAFPYTFRIVSEITESNGSSSMATVCGASLALMDAGVPIKEPVAGIAMGLIKEGDDFSVLSDILGDEDHLGDMDFKVAGTKDGITSLQMDIKITGITFEIMEQALKQAKDGRIHILGEMNKALSNSRDEVGKHTPKMEQITVDKKDIAAVIGKGGATIREIVEKSGAKVDVNDEGVVTVAAPDEESRNIAMQFIKDITAKAEMNKIYSGKVMKIMEFGAFVNFLGKQDGLVHISELADKRVAKVTDVVKEGDEVKVKVIGFDRGKVKLSMKQAAE

SEQ ID NO: 136168 - protein, 247 aa, Unknown
  Bacterial polypetide isolated from the Sargasso Sea
LALMDAGIPVKAPVAGIAMGLVKEVNDFAVITDILGDEDHLGDMDFKVAGTEEGITALQMDIKIDGITEEIFDVALEKAQKARSHILNSMNAVLDKSREELSDKAPQAVVIQINTKKIRDVIGKGGETIRGLTEETGAIIEVEDNGKVTIYGDTPESRESALQKIEEITAEPEINKIYTGTVANIMDFGAFVTIMPGRDGLVHVSEISEERVENVSDYFIEGEEVKVKVLEVDRQGKIRLTMKGLDD

SEQ ID NO: 136169 - protein, 371 aa, Unknown
  Bacterial polypetide isolated from the Sargasso Sea
LTEEEMLNAVKFGHEGFVPVIKMIEELAAECKKPDWAVEKKDLSEVKKKIEDEFTEELKKAFSIKDKQERSNLISEITDKAKKLFEENENFTDLDVNSELKNLEKRIVRTDILKNKNRIDGRGLSDVRPIMCEVGILPRTHGSALFTRGETQAIVTTTLGTSDDEQRIESLEGLQRQRFMLHYNFPPFSVGETGRIGTGRREIGHGKLAWRAINSSLPSKESFPYTFRIVSEITESNGSSSMATVCGTSLALMDAGVPIKEPVAGIAMGLIKEGDDFSVLSDILGDEDHLGDMDFKVAGTKDGITSLQMDIKITGITFEIMEQALKQAKDGRIHILREMNKALDKSREGVGKHTPKMEKITVDKKRYCHCN

SEQ ID NO: 136170 - protein, 422 aa, Unknown
  Bacterial polypetide isolated from the Sargasso Sea
EVIEWGGKKLTIETGRVARQAHGSVIATYGGTSVLATVVADREEKKGLDFFPLTVNYQEKAYAAGKIPGGFFKREGRPSEKETLVSRLIDRPIRPLFADGFKCETQVIATVISYDNENDPDIVALIACSAALTLSGVPFMGPIGAARVGFKDGEYILNPTNEEMETSDLDLVVAGTKDAVLMVESEAKELSEEQMLGAVTFGQENFSQVIDSIISLAEKAAKEPREFQKKDTSDVENKVSSIVKDDLSKAYKEADKQKRTEKIAEIKKNLISELVSDDDEDEDNNESSVSSAFKTIEKNIVRNSILDTGERIDGRDLETVRPIQSDVSVLPLTHGSALFTRGETQALVVTTLGTGDDEKFVDGLDETYKERFMLHYNFPPYSVGETGRTGFTGRREIGHGKLAWRALKAVMPEYDSFPYTIR

SEQ ID NO: 136171 - protein, 688 aa, Unknown
  Bacterial polypetide isolated from the Sargasso Sea
MKNIVRKEIPMGSKTLVLETGKIARQATASVIASMGGTVVMCAVVTKPSAEGRDFFPLSVHYMEKTYAAGKIPGGYFKREGKPTEIETLTSRLIDRPLRPLFPDFYVDEVQLNCMLLSLDKDNPPDVVALIAASAAMSIADVPFRGPMAAARVGFVNDEYVLNPSFAEMDESDLDMVVAGSESAVLMVESDANELSEDLMIGAILYGHQEMKPVIKQIDEFAKEVLPEKSDFTNPNEEEEKKIFDEVSEKCGAGLSEAFTTTDKKERGKKITAVKETLLDSLDEDSHNAYLKQFKEVEKHIVRENILGAQKRIDGRGLTEVRDISVETNFLPSVHGSALFTRGETQAIVTATLGSGRDIQTVDALAGEIKDNFMLHYNFPSYSVGELGFPMGPKRREIGHGALAKRSLQFAVPSVEEFPYAIRVVSEITESNGSSSMASVCGGSLALMAAGVPIKENIAGVAMGLVKDDSRYEVLTDILGDEDHLGDMDFKVAGTKNGVSGLQMDIKIEGINEEILEKALMQAKEARMHILGEMDKVLAKPNELTGLAPYFCKFKVHKDKVKVVIGKGGSTIKGLQEEFGVTIELQDTGEVNVFGENKEVAEAAKEKIELLCAEPEVGKDYDAVVAKIMEFGAFVTFMPGKDGLLHISQFKEDFDQLTDVINEGDKIRVKVTEIRRDGKIKLEFSDSE

SEQ ID NO: 136172 - protein, 348 aa, Unknown
  Bacterial polypetide isolated from the Sargasso Sea
RGETQAIVTTTLGTSDDEQRIESLDGLQKERFMLHYNFPPFSVGETGRIGTGRREIGHGKLAWRAINSSLPSKESFPYTFRIVSEITESNGSSSMATVCGTSLALMDAGVPIKEPVAGIAMGLIKEGEDFSVLSDILGDEDHLGDMDFKVAGTKDGITSLQMDIKITGITFEIMEQALNQAKDGRIHILGEMNKALSKSRDDVGKHTPKMEKVTVDKKDIAAVIGKGGASIREIVEKSGAKVDVNDEGVVTVAAPDEESRNIAMQMIKDITAKAELNKIYSGKVMKIMEFGAFVNFLGKQDGLVHISELADKRVAKVTDVVKEGDEVKVKVIGFDRGKVKLSMKQANE

SEQ ID NO: 136173 - protein, 442 aa, Unknown
  Bacterial polypetide isolated from the Sargasso Sea
MEIEEREFGKANLSLETGRLARQANGSVLVRYGDTMVLVAATAAPGSGAGADFFPLSVFYVEKAYAAGRIPGGFFKREARLSDSETLISRIIDRPLRPSFHENYLAETLIVATVLSHDLEFPSDVAAMIGASAALSVSDIPLLQPIGGIRVGMIDGEFITNPNPEEITNSQMNIFMAGSRDAILMVEGEANEVSESVMLDALWYGHEQIQPIIDMQEELVQRCGKAKREVEAPAVDEDLKKKVYQAAPKKIQKALQIKEKQERYASLDEASAEIVSEVGGEEADDSVVTEIKTHVAEIKKKEMREKLIKDQVRIDGRTPTEIRPITCETKVLPRTHGSAVFTRGETQALGVTTLGTREDEQMIDALPGLSYKNFMLHYNFPSFSVGETRPPRGPGRREIGHGTLAERGLAPMLPTKEEFPYTIRLVSEVLESNGSSSMATVC

SEQ ID NO: 136174 - protein, 364 aa, Unknown
  Bacterial polypetide isolated from the Sargasso Sea
KAKKLYEENEEITDLDVNSELKNLEKAIVRSDILKNKNRIDGRGLSDVRPIMCEVGILPRVHGSALFTRGETQAIVTTTLGTSDDEQKIESLDGLQKERFMLHYNFPPFSVGETGRIGTGRREIGHGKLAWRAINSSLPPKETFPYTFRIVSEITESNGSSSMATVCGTSLALMDAGVPIKEPVAGIAMGLIKEGDDFSVLSDILGDEDHLGDMDFKVAGTKDGITSLQMDIKITGITFEIMEQALKQAKDGRIHILGEMNKALAKSRDDVGKHTPKMEKISVDKKDIATVIGKGGATIREIVEVSGAKVDINDEGVVTVAAPDEDSRNKAMQMIKDLTAKPEMNKIYNGKVMKIMEFGAFVNF

SEQ ID NO: 136175 - protein, 401 aa, Unknown
  Bacterial polypetide isolated from the Sargasso Sea
GKRVDGRALDEVRAISAMAGVLPRRVHGSGLFQRGLTQVLSTATLGTPSDAQEMDDLHPSTEKLYLHHYNFPPYSVGETRPMRSPGRREIGHGALAERAILPVLPAKDTFPYVVRVVSEVLSSNGSTSMGSVCGSTLSLMDAGVPLKAPVSGAAMGLIKEGDDIRILTDIQGIEDFLGDMDFKVAGSEKGITALQMDMKVTGLPVKTIAEAINQARPARLHILEKMLEAIDTPREGLSPHAPRLLSFRIDPELIGTVIGPGGRTIKGITERTNTKIDIEDSGIVTIASHDGAAADEAQKIIEGLTRKVNEGEVFSGSITRIIPIGAFVEILPGKEGMIHISQLSEARVEKVEDVVKVGDEVTVRVREIDNRGRINLTLRGVPQSGDGSGDEPQPTPVAPLS

SEQ ID NO: 136176 - protein, 384 aa, Unknown
  Bacterial polypetide isolated from the Sargasso Sea
MFKVFKEEIDFGGKKITLETGKIARQADGAIIATMGETVVIATVVGAKKVNPETDYFPLSVNYQEKYYAAGKIPGGYFKREARPTESETLISRLIDRPIRPLFPESFRNEVQVLPTVLSYDNENEADILSIIASSAALSISGLPFNGPVGASRVGFIDGKCVLNPTKKELENSKLDLVVAGTKDAVLMVESEASGLTEKEMLDAVKFGHESFISVIKGIEKLSKKSSKEKWKVEEKDFSKVSKKIEKELTKDLENAFSEKDKKTRSELISQAGEKCKSLFEEDETLLEHEIMLQLKKLEKNIVRTRILKNKKRIDGRGLSDVRPIKCEVGVLPRTHGSALFTRGETQALVTTTLGTTDDEQRIESLEGLKRQRFMLHYNFPPFS

SEQ ID NO: 136177 - protein, 471 aa, Unknown
  Bacterial polypetide isolated from the Sargasso Sea
EDLAKECKKPDWVVEKKDLSEVKNKLESEFTEELKKAFSIKDKQERSNLISEITDKAKKLYEEDENYTDLDVNSELKNLEKRIVRTDILKNKNRIDGRGLADVRPIMCEVGILPRVHGSALFTRGETQAIVTTTLGTSDDEQKIESLEGLQKERFMLHYNFPPFSVGETGRIGTGRREIGHGKLAWRAINSSLPTKESFPYTFRIVSEITESNGSSSMATVCGSSLALMDAGVPIKEPVAGIAMGLIKEGEEFSVLSDILGDEDHLGDMDFKVAGTKDGITSLQMDIKITGITFEIMEQALKQAKDGRIHILGEMNKALSKSREDVGKHTPKMEKITVDKKDIATVIGKGGATIREIVEVSGAKVDINDEGEVTVAAPDEESRNKATQMIKDLTAKAELNKIYNGKVMKIMEFGAFVNFLGKQDGLVHISELADKRVGKVTDVVKEGDEVKVKVIGFDRGKVKLSIKQAAI

SEQ ID NO: 136178 - protein, 501 aa, Unknown
  Bacterial polypetide isolated from the Sargasso Sea
VAGTKDAVLMVESETSGLTEEEMLNAVKFGHENFVPIIKMIEELAAECKKPDWVVEKKDLSEVKKKIEDEFTEELKKAFSIKDKQERSNLISEITDKAKIFFEDNESFTDLDVNSELKNLEKRIVRTDILKNKNRIDGRGLSDVRPIMCEVGILPRTHGSALFTRGETQAIVTTTLGTSDDEQRIESLEGLQRERFMLHYNFPPFSVGETGRIGTGRREIGHGKLAWRAINSSLPSKESFPYTFRIVSEITESNGSSSMATVCGTSLALMDAGVPIKEPVAGIAMGLIKEGDDFSVLSDILGDEDHLGDMDFKVAGTKDGITSLQMDIKITGITFEIMEQALKQAKDGRIHILGEMNKALDKSREGVGKHTPKMEKITVDKKDIATVIGKGGATIREIVEKSGAKVDVNDEGVVTVAAPDEESRNIALQFIKDLTAKAELNKIYNGKVMKIMEFGAFVNFLGKQDGLVHISELADKRVAKVTDVVKEGDSVKVKVIGFDRG

SEQ ID NO: 136179 - protein, 220 aa, Unknown
  Bacterial polypetide isolated from the Sargasso Sea
MFKVYKKEIELAGKKISLETGKVARQADGAIIASCGETVILATVVGAKKVNPDMDYFPLSVNYQEKYYAGGKIPGGYFKREARPTESETLISRLIDRPIRPLFPDEFKNEVQLLPTVISYDKENQPDILAITASSAALAISGMPFMGPVGASRVGFVEGKYILNPSKAELEKSSLDLVVAGTKDAVLMVESEANGLTEEEMLNAVKFGHEGFIPVIEMIE

SEQ ID NO: 136180 - protein, 457 aa, Unknown
  Bacterial polypetide isolated from the Sargasso Sea
EGFVPVIKMIEELAKECRKPDWTVDKKDLSEVKKKLEETFTEDLKKAFATRDKQDRSNQISEITDKAKMLYEEDENYTDLDVNSQLKNLEKKIVRTDILKNKNRIDGRGLSDVRPIECEVGVLPRAHGSALFTRGETQAIVVATLGTSDDEQRIESLDGLQRERFMLHYNFPPFSVGETGRIGTGRREIGHGKLAWRAINSSLPTKEAFPYTFRVVSEITESNGSSSMATVCGTSLALMDAGVPIKEPVAGIAMGLIKEGDDFSVLSDILGDEDHLGDMDFKVAGTKDGITSLQMDIKITGITFEIMEQALSQAKDGRVHILGEMNKALSASRSDVGKHTPKMEQVNVDKKDIAAVIGKGGATIREIVEKSGAKVDVNDEGIVTVAAPDEESRNIAMQMIKDITAKAELNKIYSGKVMKIMEFGAFVNFLGKQDGLVHISELADKRVAKVTDVLKKV

SEQ ID NO: 136181 - protein, 512 aa, Unknown
  Bacterial polypetide isolated from the Sargasso Sea
MFDIYKEEMNFGGKKLILETGKIARQAAGSVMVTYGGTQVLCTVVAAKDIMPNQDWFPLSVHYQEKSSAAGKIPGGFFKREGRPSEKEVLTSRLIDRPIRPLFMDGFMNEVQVICTVFSHDLENDADIPSIIGTSAALTISGVPFLGPIGGARVAWIDNKYVLNPSYEELENSKLDLVVAGTNQGVLMVESEANELSEKVMLGAVDYGHKEIKKVIKTIINLAEQAAKDPWDFNAPVVGDKEVKHVEKHTKTVLKKAYSELVKQKRQNMLSEIRSKVLEEAETLDLDIPQVNSQLKKAEKDLVRGQVLKTSKRIDGRGLNKIRPIVSEVNVLERTHGSALFTRGETQALVSTTLGSSRDEQILDSLEGDSKRSFMLHYNFPPYSVGEAGRLMTGRRETGHGMLAWRAIHPMLPDHEDFPYTIRVLSEITESNGSSSMATVCGTSLALMDAGVPLKKPVAGIAMGLIKEGEDFAVLSDILGDEDHLGDMDFKVAGTDNGITSLQMDIKITSIT

SEQ ID NO: 136182 - protein, 382 aa, Unknown
  Bacterial polypetide isolated from the Sargasso Sea
SPSASYSLSYDNENHPDILSINASSAALAISGLPFLGPIAASRVGYKDGKYLLNPSVEELKESELDLVVAGTKDAVLMVESETSGLSEKVMLDAVKFGHENFVPVIEAIEKLAKKVGKPKWEVEEVNHSEIKKKITEKFESGLRSAFKEIDKKKRSTAISEIETQCKEFFAEDETVSENQVMSQLKSLEKDIVRTAILKEKKRIDGRGLADVRQIKCEVGVLPRTHGSALFTRGETQALVVTTLGMTDDEQRLESLEGMQRSNFMLHYNFPPFSVGECGRIGTGRREIGHGKLAWRAINSSLPKKENFPYTLRVVSEITESNGSSSMATVCGTSLSLMDAGVPIKEPVAGIAMGLIKEGEDFSVLSDILGDEDHLGDMDFKV

SEQ ID NO: 136183 - protein, 340 aa, Unknown
  Bacterial polypetide isolated from the Sargasso Sea
KEIEVSGKKISLETGKVARQADGAIVATCGETVVLATVVGAKKVNPDVDYFPLSVNYQEKYYAAGKIPGGYFKREARPTESETLISRLIDRPIRPLFPDEFKNEVQLLPTVISYDKENEADILSIIASSAALAISGMPFMGPVGASRVGFIDGKYVLNPSKIELEKSKLDLVVAGTKDAVLMVESEASGLTEEEMLNAVKFGHEGFVPVIKMIEELAKECKKPEWTVEKKDLSEVKKKLEKTFTEDLKKAFATRDKQDRSNRISEITDKAKKLYEENDNYTDLDVNSELKNLEKTIVRTDILKNKNRIDGRGLSDVRPISCEGGILPRTHGSALLPEEKR

SEQ ID NO: 136184 - protein, 274 aa, Unknown
  Bacterial polypetide isolated from the Sargasso Sea
MRVVSEITESNGSSSMASVCGTSLSLMDAGVPISSPVAGIAMGLIKEGDDFAVLTDILGDEDHLGDMDFKVAGTDSGITALQMDIKISGINESIMETALAKAKNARNHILGIMNEVISSPKDLSENAPAMKTFMVDKDKIKEIIGKGGAVIKSMQEKTGATVDINDDGVVSVFGQNQSSMKECLAIIEEILEEPELNKVYKGKVVKIVEFGAFVNILPGKDGLVHISEISTERTEDVNDVLEEGQEVEVKLIGFDRGKMKLSMKALAENASDSD

SEQ ID NO: 136185 - protein, 359 aa, Unknown
  Bacterial polypetide isolated from the Sargasso Sea
RKPEWTVEKKDLSEVKKKLEKEFTEDLKKAFSTRDKQDRSNQISEITEKAKKLYEENEDYSDLDVNSQLKNLEKSIVRTDILKNKNRIDGRGLSDVRPIMCEVGILPRVHGSALFTRGETQAIVTTTLGTSDDEQRIESLDGLQKERFMLHYNFPPFSVGETGRIGTGRREIGHGKLAWRAINSSLPSKENFPYTFRIVSEITESNGSSSMATVCGTSLALMDAGVPIKEPVAGIAMGLIKEGDDFSVLSDILGDEDHLGDMDFKVAGTKDGITSLQMDIKITGITFEIMEQALNQAKDGRIHILGEMNKALDKSRDDVGKHTPKMEKITVDKKDIAAVIGKGGATLEKLSENLVLKLM

SEQ ID NO: 136186 - protein, 233 aa, Unknown
  Bacterial polypetide isolated from the Sargasso Sea
MFKVFKKEIDIGGKKITLETGKIARQADGAVIATCGETVVMATVVGAKKVNPDIDYFPLSVNYQEKYYAAGKIPGGYFKREARPTESETLISRLIDRPIRPLFPDEFRNEVQLLPTVISYDKENEADILSIIASSAALAISGMPFMGPVGASRVGFIDEKFVLNPSKVELAKSKLDLVVAGTKDAVLMVESEANGLSEEEMLNAVKFGHENFIPVIKAIEELSKECGKPAWEV

SEQ ID NO: 136187 - protein, 366 aa, Unknown
  Bacterial polypetide isolated from the Sargasso Sea
IVRGSILDTGIRIDGRDTKTVRPIESEVGILPRAHGSALFTRGETQALVVTTLGTGQDEQIIDALEGEYRENFMLHYNFPPYSVGEAGRMGGAGRREIGHGKLAWRAIRPLLPIKEDFPYTIRVVSEVTESNGSSSMATVCGTSMSMMDSGVPLGQPCAGIAMGLIKEGDRFAVLSDILGDEDHLGDMDFKVAGTSTGITSLQMDIKITSITEEIMKVALEQAREGRLHILAEMEKAIEQGRETVSDNAPRVTTLSINKEKIRDVIGPGGKIIREICEATGAKIDIDDNGTIKVAAVDNDAGQAAIDWIKSIVAEPELGVIYNGKVVKTVDFGAFVNFLGPRDGLVHISELLPGRVNKTTDVVKVD

SEQ ID NO: 136188 - protein, 451 aa, Unknown
  Bacterial polypetide isolated from the Sargasso Sea
LINAQKELVSMNDVPSVDWPIIEDYSDELKSKIEASCKEELNEISSITERSERSSRQNELQEKVVEEFLDEEEDNSKAIKLAFKSIFKELVRDRVVSGGPRLDGRSPTDIRDISSEINLLPMVHGSSLFLRGETQVLNVTTLGMSRLEQMLDTIDTVTSKRYMHHYNFPPYSTGEAYMMRGPKRREIGHGALAEKAMLPVIPPKADFPYTIRVVSEAISSNGSTSQASVCASSLSLMSAGVPIREHVSGIAMGLISKNSEFVTLTDILGAEDALGDMDFKVAGTRGVITALQLDMKIEGLPSDILRKALEQAKDARHHILDIMEDTISEPADSLSGNAPRLESIELPKDKIGEVIGPKGKNIRKIEEETGASVEIDDDGILTLGSTEQESLDTAKEMVMAIIDPEEPELNQEYEGEVVSLAKYGAFINILPGREGLMHISKSHTELRVNNP

SEQ ID NO: 136189 - protein, 359 aa, Unknown
  Bacterial polypetide isolated from the Sargasso Sea
MPRAHGSALFTRGETQAIVVATLGTSDDEQRIESLDGLQRERFMLHYNFPPFSVGETGRIGTGRREIGHGKLAWRAINSSLPTKEAFPYTFRVVSEITESNGSSSMATVCGTSLALMDAGVPIKEPVAGIAMGLIKEGDDFSVLSDILGDEDHLGDMDFKVAGTKDGITSLQMDIKITGITFEIMEQALSQAKDGRVHILGEMNKALSASRSDVGKHTPKMEQLNVDKKDIAAVIGKGGATIREIVEKSGAKVDVNDEGVVTVAAPDEESRNIAMQMIKDITAKAELNKIYSGKVMKIMEFGAFVNFLGKQDGLVHISELADKRVAKVTDVVKEGDEVKVKVIGFDRGKVKLSMKQATE

SEQ ID NO: 136190 - protein, 410 aa, Unknown
  Bacterial polypetide isolated from the Sargasso Sea
SFRNEVHFLPTVLSYDNENEADILSIIASSAALSISGLPFKGPVGASRVGFIDGKCVLNPTKKELENSKLDLVVAGTKDAVLMVESEASGLTEKEMLDAVKFGHEGFISVIKGIEKLSKKSSKEKWKVEEKDFSKVLKKIEKELTKDLEKAFSEKNKKTRSELISQAGEKCKSLFEGDEALLEHEIMLQLKKLEKNIVRTKILKNKKRIDGRGLSDVRPIKCEVGVLPRTHGSALFTRGETQALVTTTLGTTDDEQRIESLEGLKRQRFMLHYNFPPFSVGETGRIGTGRREVGHGKLAWRALNSSLPKKENFPYTLRIVSEITESNGSSSMATVCGSSLALMDAAVPIAEPVAGIAMGLIKEKDDFSILSDILGDEDHLGDMDFKVAGTKDGITSLQMDIKITGITLKL

SEQ ID NO: 136191 - protein, 367 aa, Unknown
  Bacterial polypetide isolated from the Sargasso Sea
DVRDISIETNFLPSVHGSALFTRGETQAIVTTTLGSSRDVQTVDALSGEVKDNFMLHYNFPSYSVGELGFPMGPKRREIGHGALAKRSLKFSVPSLEEFPYAIRVVSEITESNGSSSMASVCGGSLSLMAAGVPLKDNVAGVAMGLVKDGDRYEVLTDILGDEDHLGDMDFKVAGTKNGVSGLQMDIKIEGINEEILEKALAQAKDARMHIIKVMDDALAKPNELTSLAPYFCKFKVHKDKVKVVIGKGGATIKGLQEEFGVTIELQDSGEVNVFGENKEIAERAKEKIELLCAEPEEGKIYDGVVAKVVDFGAFITFMPGKDGLLHISQFKQDFEHLTDIVKEGDQMKVRLVEIGRQGRLKLEQVD

SEQ ID NO: 136192 - protein, 393 aa, Unknown
  Bacterial polypetide isolated from the Sargasso Sea
LEKSIVRTEILKNKNRIDGRGLSDVRPIECEVGVLPRAHGSALFTRGETQAIVVATLGTSDDEQRIESLDGLQRERFMLHYNFPPFSVGETGRIGTGRREIGHGKLAWRAINSSLPTKEAFPYTFRVVSEITESNGSSSMATVCGTSLALMDAGVPIKEPVAGIAMGLIKEGDDFSVLSDILGDEDHLGDMDFKVAGTKDGITSLQMDIKITGITFEIMEQALSQAKDGRVHILGEMNKALSASRSDVGKHTPKMEQVNVDKKDIAAVIGKGGATIREIVEKSGAKVDVNDEGVVTVAAPDEESRNIALQMIKDITAKAELNKIYSGKVMKIMEFGAFVNFLGKQDGLVHISELADKRVAKVTDVVKEGDEVKVKVIGFDRGKVKLSMKQAAE

SEQ ID NO: 136193 - protein, 669 aa, Unknown
  Bacterial polypetide isolated from the Sargasso Sea
DIDFFPLQVEYREKHYAGGKIPGGFFKREARPAEHEVLTSRVTDRPIRPLFPKGFKNETQVMITVLQSDGENMADVLAGVGASAALMLSSIPWNGPIASVRVGRVNGEFIMNPTRTELDESDMEMVVSGNRETVVMVEGEADCVVEAEMLDALKAAHEVIVEIIELQDELVAACDVQKDEVSIPKPDEGLVSRVEKEIGTQVDDIVNISDKKERSDAKDDMVSKILDSMESEFPDEEKNIKSLIDERFKNAFREQVLSTGTRSDGRSTTDIREITVEPNILPRTHGSVLFTRGETQALVVTTLGSKSDEMIVDSMDEDYKKSYYMHYNFPPYCVGEVGRIGFTGRREIGHGNLAQRAIKPVLPDYDDFPYTMRIVSEIMESNGSSSMASVCGGSLALMSAGAPLKAPVAGIAMGLITDGERHAILSDILGMEDHLGDMDFKIAGTADGITAIQLDLKIEGLSFELMEKALQQAKDGRNYILDKMNAVLSEPKEISPYAPRIMSLSINPEKIGALIGPGGKNIKKIIEDTECEVNVDDDGLVTIAGANTEKCNEAVELVKAITFEPEVGMEFDATVTRLMSFGAFVEFAPGREGMVHISELEWHRVEKVEDVLSTGDPVRVKLIKVDDQGRLDFSRKALLEKPEGYVERPKRPRRDGGRGGKKPFKKRRF

SEQ ID NO: 136194 - protein, 419 aa, Unknown
  Bacterial polypetide isolated from the Sargasso Sea
ITDKAKKLYEEDENYTDLDVNSQLKNLEKSIVRTDILKNKNRIDGRGLSDVRPISCEVGVLPRAHGSALFTRGETQAIVVATLGTSDDEQRIESLDGLQRERFMLHYNFPPFSVGETGRIGTGRREIGHGKLAWRAINSSLPTKEAFPYTFRVVSEITESNGSSSMATVCGTSLALMDAGVPIKEPVAGIAMGLIKEGDDFSVLSDILGDEDHLGDMDFKVAGTKDGITSLQMDIKITGITFEIMEQALSQAKDGRVHILGEMNKALSASRSDVGKHTPKMEQVNVDKKDIAAVIGKGGATIREIVEKSGAKVDVNDEGVVTVAAPDEESRNIAMQMIKDITAKAELNKIYSGKVMKIMEFGAFVNFLGKQDGLVHISELADKRVAKVTDVVKEGDEVKVKVIGFDRGKVKLSMKQAVE

SEQ ID NO: 136195 - protein, 697 aa, Unknown
  Bacterial polypetide isolated from the Sargasso Sea
MFDVKNVEIEWAGRKLKLETGKIARQADATVLATYGGTIVMANVVAAKEAKPDIDFFPLTVNYQEKYYSVGKIPGGFFKREARPTEKETLVSRLIDRPVRPLFHKDFKNETQVTCTVLSHDQENDSDVVALVAASAALTLSGLPFLGPLGAIKIGFIDNEFVVNPTKSQLANTKLELVLAGTKEGVLMIESEAHELSEKQMLDAVVLGQDSYKAVIDAIIALAKKAAKDPWELKEKEDEIKNLPTNISSEFGNDFIDAYKIIEKQKRSDQLSSIRNSISEKYTSETLSAVIIADAIKNVEKDIVRGELINTGKRIDGRDTKTVRPIVCETGILERTHGSALFTRGETQAIVVSTLGTGQDEQRIDAIDGEYTENFMLHYNFPPYSVGEVGRVGSTSRREIGHGKLAWRAIHPMLPSNEKFPYTYRVVSEITESNGSSSMATVCGTSMSLMDAGVPLERPVAGIAMGLIKEDDKYVILSDILGDEDHLGDMDFKVAGTSEGITSLQMDIKITSITPEIMEEALAQAKDGRFHILGEMAKAIDKPKKSISQYAPTITNLQINKDKIREVIGKGGAVIREISETTGAKIEINDEGLVSIAAVDQKSGNDALEWIKGIVEEPEIGKIYDGKVIKIMDFGAFVNFMGSTDGLVHISQLKNERVEKVEDVISEGDIVKVKVLDIDSRGKIKLSMKAVDAEENA

SEQ ID NO: 136196 - protein, 538 aa, Unknown
  Bacterial polypetide isolated from the Sargasso Sea
MKKVEMNLNGSTLSIETGHVARQSAGSVIVTHGETSVLVAVNSAKEMREDIDFFPLQVEYRERHYAGGKIPGGFFKREARPSEHEILTSRLTDRPIRPLFPKSFKYETQVIITAMSSDGQNMADVLAGVGASAALTISDIPFNGPIATVRVGRVDGDFVVNPTREQMEESDMEIVVSGNDQTIVMVEGEAELISEKEFLDAMKFAHGPIKEMIALQKELASQLDVNKRPVPEDSEDEELKNKVLELVSDKIDKAIKIADKTERQEAISKLHEEAQVPFVDSHPDSEKDIKSFIDDKLKSAFREQILTDKVRSDGRSTTDIRPISIDTGVFARTHGSALFTRGETQAIAVLTMGTPKDEQIIDSMDDDYKKRFMLHYNFPPYCVGEVGRIGFTSRREVGHGNLAERAIKQILPDYEDFPYTIRIVSEITESNGSSSMASVCGGSLALMNAGAPSKGHVAGIAMGLIKDGDRYAVLSDILGAEDHLGDMDFKVAGTKDGISAIQLDLKIDGISFELMEEALEQARVGRNHILDIMYEAVP

SEQ ID NO: 136197 - protein, 294 aa, Unknown
  Bacterial polypetide isolated from the Sargasso Sea
GHGNLAKRAIKAVLPDVDDFGYTMRVVSEITESNGSSSMASVCGTSLSLMDAGVPLSSPVAGIAMGLIKEGDEFAVLTDILGDEDHLGDMDFKVAGTESGITALQMDIKIKGINESIMETALAKAKNARNHILSIMNNEISSAKEVSENAPAMKTFMVDKDKIKEIIGKGGAVIKGMQEKTGATVDVNDDGVVSVFGQNQSSMKECLAIIEEILEEPELNKVYKGKVVKIVEFGAFVNILPGKDGLLHISEISNERTENVADVLEEDQEIEVKLIGFDRGKIKLSMKALKENTE

SEQ ID NO: 136198 - protein, 362 aa, Unknown
  Bacterial polypetide isolated from the Sargasso Sea
VGVLPRTHGSALFTRGETQALVVTTLGMTDDEQRLESLEGMQRSNFMLHYNFPPFSVGECGRIGTGRREIGHGKLAWRAINSSLPSKESFPYTLRVVSEITESNGSSSMATVCGTSLSLMDAGVPIKEPVAGIAMGLIKEGDDFSVLSDILGDEDHLGDMDFKVAGTKNGITSLQMDIKITGITFEIMEKALDQAKGGREHILGEMNKAIKTSRKEFSKHTPKMETIKVDKKDIATVIGKGGATIREIVETSGAKVDVKDTGEVTVAAPDEASRNKAIDFIKNLIAKPEMGKIYKGKVVKIMEFGAFVNFLGKQDGLVHISELADKRVAKVGDVVKEGDEVSVKVVGFDRGKVKLSMKQASA

SEQ ID NO: 136199 - protein, 328 aa, Unknown
  Bacterial polypetide isolated from the Sargasso Sea
ETVVLATAVGAKKVNPDMDYFPLSVNYQEKYYAAGKIPGGYFKREARPTESETLISRLIDRPIRPLFPDEFKNEVQLLPTVISYDKENEADILSIIASSAALAISGMPFMGPIAASRVGFIDGKYVLNPSKKELENSKLDLVVAGTKDAVLMVESEAGGLTEEEMLDAVKFGHESFAPVINMIEELAKECKKPDWVLEKKDLSEVKKKIEDEFTDELKKAFSIKDKQERSNLISKITDKAKKIFEENENFTDLDVNSELKNLEKRIVRTDILKNKNRIDGRGLSDVRPIMCEVGILPRTHGSALFTRGETQAIVTTTLGTSDDEQRIE

SEQ ID NO: 136200 - protein, 474 aa, Unknown
  Bacterial polypetide isolated from the Sargasso Sea
LGPVGASRVGFIDGKYVLNPSKKELENSKLDLVVAGTKDAVLMVESEANGLTEEEMLNAVKFGHENFVPIIKTIEELAKECRKPEWEVEKKDLSEVKKKMEKEFTKDLEKAFSIKDKKERSDLISEVTEKAKKLYEEDENISELDVNYELKNLEKRIVRTNILKNKSRIDGRGLSDVRPIMCEVGILPRTHGSALFTRGETQAIVTTTLGTSDDEQRIETLDGLVRERFMLHYNFPPFSVGETGRIGTGRREIGHGKLAWRAIKSSLPSKESFPYTFRIVSEITESNGSSSMATVCGTSLSLMDAGVPMKTPVAGIAMGLIKEGDDFSVLSDILGDEDHLGDMDFKVAGSKDGITSLQMDIKITGITFEIMEKALKQAKDGRLHILGEMNKALDKSRAGVGKHTPKMEKISVDKKDIATVIGKGGATIREIVEKSGAKVDVNDEGVVTVAAPDEESRNIALQIIKDLTAKAEMN

SEQ ID NO: 136201 - protein, 297 aa, Unknown
  Bacterial polypetide isolated from the Sargasso Sea
GRREIGHGKLAWRAINSSLPSKDSFPYTFRIVSEITESNGSSSMATVCGTSLALMDAGVPIKEPVAGIAMGLIKEGDDFSVLSDILGDEDHLGDMDFKVAGTKDGITSLQMDIKITGITFEIMEKALNQAKDGRIHILGEMNKALGKSRADVGKHTPKMEKITVDKKDIAAVIGKGGATIREIVELSGAKVDVNDEGVVTVAAPDEESRNKAMQMIKDITAKAELNKIYNGKVMKIMEFGAFVNFLGKQDGLVHISELADKRVAKVTDVVKEGDQVKVKVIGFDRGKVKLSIKQASM

SEQ ID NO: 136202 - protein, 334 aa, Unknown
  Bacterial polypetide isolated from the Sargasso Sea
MHHYNFPPYSVGETRPMRSPGRREIGHGALAERALIPVLPPKESFPYVVRVVSEVLSSNGSTSMGSVCGSTLALMDAGVPIAAPVAGAAMGLIREGSDIRVLTDIQGIEDFLGDMDFKVAGTEKGITALQMDMKITGLAMKTIGEAITQARPARLHILEKMLEALDKPRDTMSPHAPRLLSFRIDPELIGTVIGPGGRTIKGITERTNTKIDIEDTGIVTVASHDGAAAEEAQKIIEGLTRRISEGEYFDGKVTRVIPIGAFVEILPGKEGMIHISQLSDQRVEKVEDVVNVGDEVRVRVREIDNRGRINLTLRGVPQDGSDPQPTVILPIGEA

SEQ ID NO: 136203 - protein, 388 aa, Unknown
  Bacterial polypetide isolated from the Sargasso Sea
AKKINEGQDYFPLSVNYQEKYYAAGKIPGGYFKREARPTEAETLISRLIDRPIRPLFPSSFMNEVQLLPTVLSYDTENQPDILSIIASSAALAISGLPFQGPIAASRVGYKDGKYLLNPSPEELKSSELDLVVAGTKEAVLMVESETSGLSEKIMLDAVKFGHENFVPIIKAIENLEKKAGKPKWEIEELDHSDIKKKITKEFEGDLRKAFKEIDKKKRSTAISEIDKKCKELFKENEDVTENQVMSQLKSLEKDIVRTAILKDKKRIDGRGLADVRNIKCEVGVLPRTHGSALFTRGETQALVVTTLGMSDDEQRLESLDGMQRSNFMLHYNFPPFSVGECGRIGTGRREIGHGKLAWRAINSSLPLKENFPYTLRVVSEITESNGL

SEQ ID NO: 136204 - protein, 523 aa, Unknown
  Bacterial polypetide isolated from the Sargasso Sea
NSKQLDFGYEAVTELIKSQEDLLKDLGIKQIKPSDPEEDKTLPNYLEKNCTKSIELVLKNFDQSKEERDLELEKIKLDAQEKIESLKDDNQVKVLTSENEKLIHSDFKKLTKKLMRSQIINDGKRVDGRELDEVRKITASAGILPKRVHGSALFQRGLTQVLSTTTLGTPSDAQEMDDLNPSTEKTYLHHYNFPPYSVGETRPMRTPGRREIGHGALAERAIIPVLPGKETFPYVLRVVSEVLSSNGSTSMGSVCGSTISLLDAGVPLKAPVSGTAMGLIKEGKEVRILTDIQGIEDFLGDMDFKVAGTEKGITALQMDMKITGLTVSIISDAIKKARPARIHILEKMQAAIDKPQESLSPHAPRLLSFRIDPELIGTVIGPGGRTIKGITERTNTKIDIEDGGIVTIASHDGAAAEEAQKIIEGLTRKVHEGEIFSGVVTRIIPIGAFVEILPGKEGMVHISQLSEARVERVEDVVRQGDEVTVRVREIDSRGRINLTLRGVAQNGGMSYPEPTPTPVAPLN

SEQ ID NO: 136205 - protein, 449 aa, Unknown
  Bacterial polypetide isolated from the Sargasso Sea
GVFKRILASKIADPIKEAYGLVDKQERSQKLEEIRSSIIDNVEDDQVLAATTIIKNIEKDVVRGDIIKNKNRIDGRKLDEVRKITCELDLLPRAHGSCLFTRGETQAIVVTTLGTGDDEQMIDSLDPMHKQHFMLHYNFPPYSVGEVGRMGSTGRREIGHGKLAWRAVHPMLPTKEDFPYTLRLVSEITESNGSSSMATVCGSSLALMAAGVPIKKHIGGIAMGLIKEGDDFVVLSDILGDEDHLGDMDFKVAGTMDGITSLQMDIKITSITKEIMEIALNQASGGRKHIIRIMSEALPEARTKFSRHAPQVISISIDKAKIKDVIGSGGKVIRNIVEVSGAKLEVNDDGIVKIASSNEESINTAKQMVEDIVAEPEIGKVYNGKVVKIVEFGAFVNFMGARDGLLHVSQISQKRVENVSDVLSEGQEVQVKVLDVDRAGKVKLSMKEL

SEQ ID NO: 136206 - protein, 320 aa, Unknown
  Bacterial polypetide isolated from the Sargasso Sea
MFKVVKKEIEVAGKKISLETGKIARQADGAIIAQCGETVVLATAVGAKKVNPDVDYFPLSVNYQEKYYAAGKIPGGYFKREARPTENETLISRLIDRPIRPLFPDEFKNEVQVLPTVISYDKENEADILSIIASSAALAISGMPFMGPVGASRVGFIEGKYALNPSKEEMKNSKLDLVVAGTKDAVLMVESEANGLNEEEMLNAVKFGHEGFVPIIQMIEDLAKECKKLDWIVEKKDLSEVKKKLEEKFTGDLKKAFATRDKQDRSNQISEITDKAKMLYAEDENYSDLDINSQLKNLEKSIVRTDILKNKNRIDGRGLS

SEQ ID NO: 136207 - protein, 474 aa, Unknown
  Bacterial polypetide isolated from the Sargasso Sea
MFEINKVEINWAGKKLTLETGRIARQADASVLATYGGTTVMANVVAAKKEKPDIDFFPLTVNYQEKFYAVGKIPGGFFKREARPTEKETLICRLIDRPIRPLFHKDFKNETQVMCTVLSHDQENDSDIVAMIATSAALTLSGLPFMGPLGAAKIGMVEGKFISTPTLSEMKNSNLELVVAGTNKGVLMVESEAQQLSEDEMLEAVEIGQKTYNEVIDAIIKLAKKAAKDPWDIKEKAEEIKNLPSEIEKNYKSKFIDAYKIQEKQKRSELLNELRAEISENYETDILTSVIVSDATKSIEKDIVRSELLKTGNRIDGRDTKTVRPIKCEVGVLERTHGSALFTRGETQALVVTTLGTGQDEQRIDAIEGEYKENFMLHYNFPPYSVGEVGRAGSTSRREIGHGKLAWRAIHPMLPSAEKFPYTYRVVSEITESNGSSSMATVCGTSLSLMDAGVPLEKSIAGIAMGLIKEDENY

SEQ ID NO: 136208 - protein, 362 aa, Unknown
  Bacterial polypetide isolated from the Sargasso Sea
LFSLRNEISEKFVSETLSPVLVSDAIKNVEKDIVRGELINTGNRIDGRDTKTVRPIVCETGVLERTHGSALFTRGETQALVVSTLGTGQDEQRIDAIDGEYTENFMLHYNFPPYSVGEVGRIGSTSRREIGHGKLAWRAIHPMLPSKEKFPYTYRVVSEITESNGSSSMATVCGTSMSLMDAGVPLERPVAGIAMGLIKENDKYVILSDILGDEDHLGDMDFKVAGTSEGITSLQMDIKITSITAEIMEEALAQAKDGRFHILGEMAKAIDKPNQSISQYAPTITNLQINKDKIREVIGKGGAVIREISETTGAKIEINDEGLVSIAAVDQKSGNDALEWIKDIVEEPEIGKIYDGKVIKIM

SEQ ID NO: 136209 - protein, 356 aa, Unknown
  Bacterial polypetide isolated from the Sargasso Sea
MRPLFPEGFYNEVQVVIHVLSLNPEIPADIPALIGASAALAVSGLPFNGPVGAARVAYINNEYVLNPTRPQMKESALDLIVAGTERAVLMVESEAQQLSEEVMLGAVVFGHDQMQIAINAIHELVAEGGKPEWDWQPAAKNEPLIARVTELAQADLLAAYQIRDKQARSAKLKEVYAATSAKLEEEAAAAGTVAADKASVGNVLFDIEAKIVRSQILNGEPRIDGRDTRTVRPIEIRTGVLPRTHGSALFTRGETQAMVVATLGTKGDEQNIDALEGEYRERFMLHYNMPPFATGETGRVGSPKRREIGHGRLAKRALAACLPSADEFGYSIRVVSEITESNGSSSMASVCGGCLA

SEQ ID NO: 136210 - protein, 487 aa, Unknown
  Bacterial polypetide isolated from the Sargasso Sea
RWDWHAPQADAELVAAVEAAASGPLGEAYRITEKTERYERVGQVKDDVVAQLATDDGPAEDDIKDIFKSLEKQIVRSRILAGEPRIDGRDNRTVRAIACEVDILSKAHGSALFTRGETQAIGAVTLGSTRDAQIIDALEGERRDPFMLHYNFPPYSVGEAGRIGFTSRREIGHGRLARRGLAAVLPGEEEFPYTVRVVSEITESNGSSSMASVCVGSLSMMAAGVPLSAPVAGIAMGLVKEGNQFAVLTDILGDEDHLGDMDFKVAGTAKGVTALQMDIKIEGINEEIMERALEQALEARLHILGQMNTVLDAPREITSENAPSMTTLKVDQDKIRDIIGKGGATIRQITEESGATVDIDDDGTVKVFGQNAAARDAAIEMIQAITAEAEIGEIYTGKVARIVDFGAFVTILPGKDGLVHISQIAEERVENVTDYLSEGEEVQVKVLDVDQRGRIKLSMREVAADGADAPADSVDSAEAEDESLAQE

SEQ ID NO: 136211 - protein, 428 aa, Unknown
  Bacterial polypetide isolated from the Sargasso Sea
QDRSNQISEITDKAKKLYEENENYTDLDVNSELKNLEKSIVRTDILKNKNRIDGRGLSDVRQISCEVGVLPRTHGSALFTRGETQAIVTATLGTSDDEQRIESLDGLRRERFMLHYNFPPFSVGETGRIGTGRREIGHGKLAWRAIHSSLPPIESFPYTFRVVSEITESNGSSSMATVCGTSLALMDAGVPIKEPVAGIAMGLIKEGNDFSVLSDILGDEDHLGDMDFKVAGTKDGITSLQMDIKITGITFEIMEQALNQAKEGRIHILGEMNKALAKSRANVGKHTPKMEKVTVDKKDIAAVIGKGGATIREIVEKSGAKVDVNDEGVVTVAAPDEESRNIALQMIKDITAKAELNKIYSGKVMKIMEFGAFVNFLGKQDGLVHISELADKRVAKVTDVVKEGDEVKVKVIGFDRGKVKLSMKQASE

SEQ ID NO: 136212 - protein, 313 aa, Unknown
  Bacterial polypetide isolated from the Sargasso Sea
SDDEQRIETLDGLVRQRFMLHYNFPPFSVGETGRIGTGRREIGHGKLAWRAIKSSLPPKESFPYTFRIVSEITESNGSSSMATVCGTSLALMDAGVPIKEPVAGIAMGLIKEGKDFSVLSDILGDEDHLGDMDFKVAGTKNGITSLQMDIKITGITFEIMEQALNQAKDGRIHILGEMNKALDKSRAEVGKHTPKMEKITVDKKDIATVIGKGGATIREIVEKSGAKVDVNDEGVVTVAAPDEESRNIALQFIKDLTAKAELNKIYNGKVMKIMEFGAFVNFLGKQDGLVHISELAEKRVAKVTDVVKEGDES

SEQ ID NO: 136213 - protein, 405 aa, Unknown
  Bacterial polypetide isolated from the Sargasso Sea
IVKIVDKQDRDTQKTVLTNDVLSSLEESHPEKEKEINGIIGDRFKETMREMILAESVRSDGRGTKDIREITIDPAILSRVHGSALFTRGETQALVVTTLGSKSDEMIIDSMDEDYKKNYYLHYNFPPYCVGEVGRIGFTSRREIGHGNLAQRAIKPALPDYDDFPYTIRIVSEIMESNGSSSMASVCGGSLSLMCAGAPLKGHVAGIAMGLITDGKRNAILSDILGLEDHLGDMDFKVAGTRDGISAIQLDLKIEGISFELLTEALQQAYDGRMHILDKMYDAVPEPYELSQYAPRILSIQINPEKIGGLIGPGGKNIKKIIEDTQCEVNVDDEGVVTVAGKDPGKCDEAIKLIEAITFDPEVGMEFDGKVTRLMAFGAFVEFAPGREGLVHISELEWHRVDKVK

SEQ ID NO: 136214 - protein, 530 aa, Unknown
  Bacterial polypetide isolated from the Sargasso Sea
KYVLNPSKVELENSKLDLVVAGTKDAVLMVESEANGLTEEEMLNAVKFGHENFIPVIKAIEELANECRKTAWEIEKKDLSEVKKNLEKEFTKDLEKAFSIKDKKERSDLISEITDKAKKLYEESEDISELDVNYELKNLEKRIVRTNILKNKSRIDGRGLSDVRPIMCEVGILPRTHGSALFTRGETQAIVTTTLGTSDDEQRIESLDGLVRERFMLHYNFPPFSVGETGRIGTGRREIGHGKLAWRAIKSSLPSKEKFPYTFRIVSEITESNGSSSMATVCGTSLSLMDAGVPMKTPVAGIAMGLIKEGDNFSVLSDILGDEDHLGDMDFKVAGTKDGITSLQMDIKITGITFEIMEQALKQAKDGRIHILGEMNKALDKSRAGVGKHTPKMEKITVDKKDIATVIGKGGATIREIVEKSGAKVDVNDEGVVTVAAPDEESRNKAMQMIKDLTAKAELNKIYSGKVMKIMEFGAFVNFLGKQDGLVHISELANKRVAKVTDVVKEGDEVKVKVIGFDRGKVKLSIKAAV

SEQ ID NO: 136215 - protein, 618 aa, Unknown
  Bacterial polypetide isolated from the Sargasso Sea
KIPGGYFKREGRPTEVETLTSRLIDRPLRPLFPDFFKEEVQVNCMLLSLDKDNPPDVVAMLAASAAMSIADVPFMGPIAGARVGFIDDEYVLNPSFEKMGQSDLDMIIAGSENAVLMVESDANELSEDLMIGGILFAHQEMKPVINAIKGFADEVLPERTKHENKYADEEKQAFDAIDSKVRGDLVDAFTTTDKKERNEKVSSIKDNLMQDLDEELHDLYTKQFKEVEKDVVRGNVLNDQKRIDGRGMTEVRDITIETNFLPSVHGSALFTRGETQAIVTTTLGSGRDVQTVDALQGEIKDNFMLHYNFPSYSVGELGFPMGPKRREIGHGALAKRSLKFGVPSLEDFPYAIRVVSEITESNGSSSMASVCGGSLALMAAGVPIKENVAGVAMGLIKEGDKYEVLTDILGDEDHLGDMDFKVAGTKNGVTGLQMDIKIEGINEEILEKALMQAKDARMHILEKMDAVLSKPLELTSLAPSFTKFKVHKDKVKVVIGKGGSTIKGLQEEFGVTIELQDSGEVSVFAENKEIANQAKEKIELLCAEPEEGKVYDGVVAKVVEFGAFVTIMPGKDGLLHISQFKEDFEHLTDVINEGDTIKVKLVEVGRQGRLKLEFADSE

SEQ ID NO: 136216 - protein, 423 aa, Unknown
  Bacterial polypetide isolated from the Sargasso Sea
MNTKVYKKEIKLPDGRIISIETGKLAKQADGSAVIQMGNAMLLATVVSSRTPSPVDFLPLTVDYREKFAASGKFPGGFFKREARPSNDEILTMRLVDRVLRPLFPKDYHYETQVMIQLMSHDENVMPDSLAGLAASTVIQLSDIPFEYPISEVRVARIDGEFIVNPSREQLNDSDIDIMVGASYESVSMVEGEFDEISEQEMTDAIKFGHDAIKAQIDAQNDLVNEVGKKETREYEKAVENEDLLKKVNDDCYSKCYEIAKKGLSKKERSEQFSEVKEQLLESFGEEDLEENENLIKKYFSKVEKEAIRELVLSEGIRLDGRKTTNIRPIWCEVAYLPSTHGSAIFTRGETQALATVTLGTSRDANIIDSPTNQGEENFYLHYNFPPFSTGEARPLRGTSRREIGHGNLAQRALSKVFPNDCP

SEQ ID NO: 136217 - protein, 358 aa, Unknown
  Bacterial polypetide isolated from the Sargasso Sea
VGKVLSAFKKLEKDIVRSNILNDRPRIDGRDLDTVRPIFVETNILPSAHGSALFTRGETQAIVVATLGSSRDAQRIESIEGEDSDNFMLHYNFPAYSVGEIGMPMGPKRREIGHGNLAKRALKAVMPDTDDFGYTMRVVSEITESNGSSSMASVCGTSLSLMDAGVPISSPVAGIAMGLIKEGEDFAVLTDILGDEDHLGDMDFKVAGTESGITALQMDIKISGINESIMETALEKAKNARNHILGIMNEVISSPKDLSENAPAMKTFMVDKDKIKEIIGKGGSVIKSMQEKTGATVDINDDGVVSVFGQNQSSMKECLAIIEEILEEPELNKVYKGKVVKIVEFGAFVNILPGKDGL

SEQ ID NO: 136218 - protein, 338 aa, Unknown
  Bacterial polypetide isolated from the Sargasso Sea
RDINVDINVLERTHGSALFTRGETQSIVVTTLGSERSSQIIDALEGEYKDKFMLHYNFPPYSVGEVGFMGSPKRREIGHGKLARRALEAVLPNMDEYPYTIRIVSEITESNGSSSMATVCGSSLSLMHAGVPIKSHVAGIAMGLVMEGDKYKVLTDILGDEDHLGDMDFKVAGTDNGITALQMDIKIAGITQEIMKDALSQAKDAKDHILKIMNEAISSPSEEYSPYAPSIITITVPKDKIRDVIGKGGATIRSITEVTGAQVDINDDGIVTIASVDQESGLKAKEKIELLTADVEVNKVYEGRVAKIMDFGAFVTILPGKDGLVHISEISEERVESV

SEQ ID NO: 136219 - protein, 305 aa, Unknown
  Bacterial polypetide isolated from the Sargasso Sea
VRPLFIETGVLKNTHGSALFTRGETQAIVTSTLGSPRQAQLIDALEGEFKDQFMLHYNFPPYSVGEAGFMSGPKRREIGHGKLARRALEAVLPSPDDFPYTIRVVSEITESNGSSSMASVCGSSLALMDAGIPLKAAVAGIAMGLVKEGEGFAVITDILGDEDHLGDMDFKVAGTSEGITALQMDIKIDGITEEIFEVALEKAHTARNHILASMNEVISSSREQLSEKAPQAVVIQINTKKIRDVIGKGGETIRGLTEETGAIIEVEDNGKVTIFGDTPESRESAQKRIEEITAEPEVIKSILEQ

SEQ ID NO: 136220 - protein, 274 aa, Unknown
  Bacterial polypetide isolated from the Sargasso Sea
GLDVRTGVLPRTHGSALFTRGETQALVTATLGTARDAQVLDELMGERTDNFLFHYNFPPYSVGETGMVGSPKRREIGHGRLAKRGVLAVMPEGDKFPYTVRVVSEITESNGSSSMASVCGASLALMDAGVPIKAAVAGIAMGLVKEGDNFVVLSDILGDEDHLGDMDFKVAGSRDGISALQMDIKIEGITKEIMQVALNQAKGARLHILGVMEQAINAPRGDISQFAPRIHTIKINPDKIKDVIGKGGSVIRALTEETGTTIEIEDDGTGRSQR

SEQ ID NO: 136221 - protein, 300 aa, Unknown
  Bacterial polypetide isolated from the Sargasso Sea
FVKAYKEKDKSIRSNTLSEIRKKIMDEFVTEDNEEITENLVSSATKKVEKELVRSSILKTGKRIDGRDTKTVRDIKAEVGLLSRVHGSSLFTRGETQALVVTTLGTSLDEQIIDDLEGEFKERFMLHYNFPPYSVGEASMLRPPGRREIGHGKLAWRAIKPLMPIKDKFPYTIRVVSEITESNGSSSMATVCGTSLSLMDAGVPLEKPIAGIAMGLIKEKEDYAILSDILGDEDHLGDMDFKVAGTKDGITALQMDIKITGITKEIMEKALAQALDGRIKILSEMDKAITSSRKELNSNA

SEQ ID NO: 136222 - protein, 287 aa, Unknown
  Bacterial polypetide isolated from the Sargasso Sea
MNKLSGEIKELFHDLEKTVVRNLVLEKQYRVDGRGLADVRPINIMTSYLPRVHGSAVFTRGETQALVTATLGTSADEQKMDSLEFKGNKSFLLHYNFPAFCTGEVKFISGPGRREIGHGMLAERSLIPILPGKDEFPYTIRIVSEILESNGSSSMASVCGGSLSMMDAGIPIKAPVAGIAMGLIKEDERIAILSDILGSEDHLGDMDFKVAGTANGITALQMDIKITGLDRDLMKTALQQAKEGRLHILGEMDKALATPRKEINKHAPRIVTLTVPKDKIRDVIGPG

SEQ ID NO: 136223 - protein, 291 aa, Unknown
  Bacterial polypetide isolated from the Sargasso Sea
EVEAPAVDEDLKKKVYKAAPKKIQKALQIKEKQERYASLDEASAEIVTEVGGEEADEAVVAEIKSHVGEIKKKEMREKLIKDQVRIDGRTPTEIRPITCETKVLPRTHGSAIFTRGETQALAVTTLGTREDEQMIDALPGVSYKHFMLHYNFPSFSVGETRAPRGPGRREIGHGTLAERGLTPMLPTKEEFPYTIRLVSEILESNGSSSMATVCAGSLAMMDAGIPLPRATAGIAMGLISEGDDTVILSDILGDEDHLGDMDFKVVGTTEGITALQMDIKIRGLSREIVEK

SEQ ID NO: 136224 - protein, 305 aa, Unknown
  Bacterial polypetide isolated from the Sargasso Sea
AGFMSDLKRREIGHGKLARRAFEAVLPSPEDFPYTIRVVSEITESNGSSSMASVCGSSLALMDAGIPMKAPVAGIAMGLVKEDDGFAVITDILGDEDHLGDMDFKVAGTEEGITALQMDIKIDGITEEIFDVALEKAQKARTHILNSMNQVLSASREELSDKAPQAVVIQINTKKIRDVIGKGGETIRGLTEETGAIIEVEDSGKVTIYGDTPESRESALKRIEEITAEPEVNKIYTGTVANIMDFGAFVTIMPGRDGLVHVSEISEERVENVSDYFVEGEEVKVKVLEVDRQGKIRLTMKGLED

SEQ ID NO: 136225 - protein, 298 aa, Unknown
  Bacterial polypetide isolated from the Sargasso Sea
VEKKKRIVETPETDIELRKKIEVVAPERLRKTLSIKDKQERYESLDTLHDEISTEILGDEPESDTVKEFSQIFSDIKKEEMRSRLINENIRIDGRKPEDIRPITCETKVLPRTHGSALFTRGETQALATTTLGAREDEKMIDNLDGISFKRFMLHYNFPSFSVGETSPPRGPGRREIGHGTLAERGLSTLIPGKTEFPYTIRLVSEILESNGSSSMATVCAGSLALMDAGVPLKAASAGIAMGLISDGKNHVILSDILGDEDHLGDMDFKVIGTESGITALQMDIKIKGLSREVVEKS

SEQ ID NO: 136226 - protein, 331 aa, Unknown
  Bacterial polypetide isolated from the Sargasso Sea
SDAVLMVESEAKELSEEIMLNAVKFGHESMQEVIKIIINLAEECAKDPWDFEHNVNDELMNELKSKFEDQIKKSYSIVDKMERQNSLNEIKSVLEEEYTDAEDQSINEVMSYFKKIEKDVVRSQILNDKSRIDGRKLDEVRNISSEVSWLPRTHGSSLFTRGETQAIVVATLGFGEDEQRIEALQGSYKENFMLHYNFPPYSVGEVGRMGSAGRREIGHGKLAWRALKAVLPNKEDFDYTIRLVSDITESNGSSSMATVCGSSLALMDAGVPIKNSVSGIAMGLIKEGDDFAVLSDILGDEDHLGDMDFKVAGTKDGVTSLQMDIKITGIT

SEQ ID NO: 136227 - protein, 299 aa, Unknown
  Bacterial polypetide isolated from the Sargasso Sea
FPVFQWGETRPPRGPGRREIGHGTLAERGLAPMLPTKEEFPYTIRLVSEVLESNGSSSMATVCAGSLSMMDAGIPLKRATAGIAMGLISEGDDMVILSDILGDEDHLGDMDFKVVGTSEGITALQMDIKIRGLSREIIEKSLNQARDGRLHILDIMNASMEEPRNGLSSFAPRFITHKIPRDMIGKVIGPGGKVIKDIVEKTGVKMNIDDDGIVSIASRDHKAVDVALDMVRDLTRTVEIGQTYTGPVKKVMDFGAFVELFPGTEGLVHISNLAPQRVKCGYRHLPRRRHCHGQGNGHG

SEQ ID NO: 136228 - protein, 290 aa, Unknown
  Bacterial polypetide isolated from the Sargasso Sea
IDEAFKISNKSNRNEALKVIRNDIQEKYNELDEIEMAKLMGDFKKLEKDIVRNNILKNLPRIDGRDLDTVRPIFVETNVLPAAHGSALFTRGETQAIVVATLGSSRDAQRIESIEGEGSDNFMLHYNFPAYSVGEIGMPMGPKRREIGHGNLAKRAIKAVLPDVDDFGYTMRVVSEITESNGSSSMASVCGTSLSLMDAGVPLSSPVAGIAMGLIKEGDDFAVLTDILGDEDHLGDMDFKVAGTETGITALQMDIKISGINESIMETALVKAKVARDHILKIMNETISKQ

SEQ ID NO: 136229 - protein, 310 aa, Unknown
  Bacterial polypetide isolated from the Sargasso Sea
IATETRLLPRAHGSALFTRGETQGLVVTTLGAGDSEQIIDALHKEGRLNFMLHYNFPPYSVGECGRMAGPGRREIGHGKLAWRALQAVLPSSDEFPYTVRVVSEITESNGSSSMATVCGSSLSMMDAGVPIKAPVAGVAMGLILEGKKYAVLTDILGDEDHLGDMDFKVAGTEAGITSLQMDIKVAGITPQIMEKALDQAKEARLHILSEMAKSLSAPSEFSKYAPKIESLTVPNDKIREVIGSGGKVIKEIVEVSGAKVDINDDGMVRIASQSKESLETARQMIKEIVEDPIVGQIYEGKVSKIDGLWS

SEQ ID NO: 136230 - protein, 271 aa, Unknown
  Bacterial polypetide isolated from the Sargasso Sea
EAGFMSGPKRREIGHGKLARRALEAVLPSPDEFPYTIRVVSEITESNGSSSMASVCGSSLALMDAGIPLKAAVAGIAMGLVKEEEGFAVITDILGDEDHLGDMDFKVAGTSEGITALQMDIKIDGITEEIFEVALEKAHTARNHILSSMNEVISSSREQLSEKAPQAVVLQINTKKIRDVIGKGGETIRGLTEETGAIIEVEDSGKVTIYGDTPQSRESAQKRIEEITAEPEVNKIYTGTVANIKDFGAFVTIMPGRDGLVHVSEISEERV

SEQ ID NO: 136231 - protein, 280 aa, Unknown
  Bacterial polypetide isolated from the Sargasso Sea
LDAVKKVEKKIVRTKLINGEPRIDGRDLDTVRPLFIETGVLKNTHGSALFTRGETQAIVTSTLGSPRQAQLIDALEGEFKDQFMLHYNFPPYSVGEAGFMSGPKRREIGHGKLARRALEAVLPSPEDFPYTIRVVSEITESNGSSSMASVCGSSLALMDAGIPLKAAVAGIAMGLVKEDEGFAVITDILGDEDHLGDMDFKVAGTSEGITALQMDIKIDGITEEIFEVALEKAHSARNHILASMNEVISSSREQLSEKAPQAVVIQINTKKIRDVIGKGG

SEQ ID NO: 136232 - protein, 313 aa, Unknown
  Bacterial polypetide isolated from the Sargasso Sea
ISRLIDRPIRPLFPDEFKNEVQLLPTVISYDKENEPDILSITASSAALAISGMPFMGPVGASRVGFIDGKYVLNPSKADLEKSKLDLVVAGTKDAVLMVESEANGLTEEEMLNAVKFGHEGFVPVIEMIEELAKECRKPEWTVEKKDLSEVKKKLEETFTEDLKKAFATRDKQDRSNQISEITDKAKKLYEEDENYTDLDVNSQLKNLEKSIVRTDILKNKNRIDGRGLSDVRPISCEVGVLPRAHGSALFTRGETQAIVVATLGTSDDEQRIESLDGLHRERFMLHYNFPPFSVGETGRIGTGRREIGHGKL

SEQ ID NO: 136233 - protein, 575 aa, Unknown
  Bacterial polypetide isolated from the Sargasso Sea
PQVNPDIVAMIGASAALTLSGIPFNGPIGAARVGYINDQYVLNPTQDELKESKLDLVVAGTEAAVLMVESEAELLSEDQMLGAVVFGHEQQQVVIQAINELAKEAGKPRWDWQPEAVNEALNARVAALAEARLSDAYRITDKQERYAQVDVIKSETIATLVAEDETLDANELGEILHAIEKNVVRSRVLAGEPRIDGREKDMIRGLDVRTGVLPRTHGSALFTRGETQALVTATLGTTRDAQNLDELMGERTDNFLFHYNFPPYCVGETGMVGSPKRREIGHGRLAKRGVLAVMPELDKFPYTVRVVSEITESNGSSSMASVCGASLALMDAGVPIKAAVAGIAMGLVKEGDNFVVLSDILGDEDHLGDMDFKVAGSRDGISALQMDIKIEGITKEIMQVALNQAKGARLHILGVMEQAINAPRGDISEFAPRIHTIKISPDKIKDVIGKGGSVIRALTEETGTTIEIEDDGTVKIAATDGEKAKYAIRRIEEITAEIEVGRIYNGKVTRIVDFGAFVAIGGGKEGLVHISQIADKRVEKVTDYLQMGQEVPVKVLEVDRQGRVRLSIKEATEQS

SEQ ID NO: 136234 - protein, 523 aa, Unknown
  Bacterial polypetide isolated from the Sargasso Sea
AELEKSKLDLVVAGTKNAVLMVESEASGLTEEEMLNAVKFGHEGFVPVIEMIEELAKECRKPEWIVEKKDLSEVMKKLEETFTEDLKKAFATRDKQDRSNQISEITDKAKKLYEEDENYTDLDVNSQLKNLEKSIVRTDILKNKNRIDGRGLSEVRPIECEVGVLPRAHGSALFTRGETQAIVVATLGTSDDEQRIESLDGLQRERFMLHYNFPPFSVGETGRIGTGRREIGHGKLAWRAINSSLPTKEAFPYTFRVVSEITESNGSSSMATVCGTSLALMDAGVPIKEPVAGIAMGLIKEGDDFSVLSDILGDEDHLGDMDFKVAGTKDGITSLQMDIKITGITFEIMEQALSQAKDGRVHILGEMNKALSASRSDVGKHTPKMEQVNVDKKDIAAVIGKGGATIREIVEKSGAKVDVNDEGVVTVAAPDEESRNIAMQMIKDITAKAELNKIYSGKVMKIMEFGAFVNFLGKQDGLVHISELADKRVAKVTDVVKEGDEVKVKVIGFDRGKVKLSIKQAAE

SEQ ID NO: 136235 - protein, 545 aa, Unknown
  Bacterial polypetide isolated from the Sargasso Sea
REARPTESETLISRLIDRPIRPLFPDEFKNEVQILPTVISYDKENEADVLSIIASSAALAISGMPFMGPIGASRVGFIEGKYVLNPSKKELENSKLDLVVAGTKEAVLMVESEAKGLTEEEMLNAVKFGHEGFVPIIETIEQLAKECKKTDWVIEKKDLSEIKKKLEKEFTSDLKKAFATKDKQDRSNQISEITDKAIKLYEENENYSDLDVNSQLKNLEKSIVRTDILKNKNRIDGRGLSDVRPIQCEVGILPRAHGSALFTRGETQAIVTTTLGTSDDEQRIESLEGLQRERFMLHYNFPPFSVGETGRIGTGRREIGHGKLAWRAINSSLPSKEIFPYTFRIVSEITESNGSSSMATVCGTSLALMDAGVPIKEPVAGIAMGLIKEGDEFRVLSDILGDEDHLGDMDFKVAGTKDGITSLQMDIKITGITFEIMEKALKQAKDGRIHILGEMNKALDKSRDGVGKHTPKMEKITVDKKDIATVIGKGGATIREIVEKSGAKVDVNDEGVVTVAAPDEESRNKAMKFIKDLTAKAEINKIYNG

SEQ ID NO: 136236 - protein, 407 aa, Unknown
  Bacterial polypetide isolated from the Sargasso Sea
MFKEFKKEIELNGKKIKLETGKIARQADGAVIATCGETVVLATVVGAKKVNPEVDYFPLSVNYQEKYYAAGKIPGGYFKREARPTESETLISRLIDRPIRPLFPDEFKNEVQLLPTVISYDKENEADILSIIASSAALAISGMPFLGPVGASRVGFIDGKYVLNPSKVDLEKSKLDLVVAGTKDAVLMVESEAKGLSEEEMLNAVKFGHENFIPVIEMIEELAKECRKPEWTVEKKDLSEVKKKLEEEFTKDLKKAFSTKDKQDRSNQISEISEKAKKLYEENENYSELDVNSELKNLEKKIVRTDILKNKNRIDGRGLADVRQINCEVGILPRVHGSALFTRGETQAIVTTTLGTSDDEQRIESLDGLKRERFMLHYNFPPFSVGETGRIGTGRREIGHGKLAGER

SEQ ID NO: 136237 - protein, 446 aa, Unknown
  Bacterial polypetide isolated from the Sargasso Sea
MFPDEFKNEVQLLPTVISYDKENEADILSIIASSAALAISGMPFMGPIAASRVGYIDGKYVLNPSKKELENSKLDLVVAGTKDAVLMVESEAKGLTEEQMLNAVKFGHEKFIPIINIIEELAKECKKSDWVIEKKDLSEVKKKIETEFTSDLTKAFSIKDKQDRSNLISEITEKAKKLFEENENYTELDVNYELKNLEKKIVRTDILKNKKRIDGRGLSDIRPIMCEVGILPRAHGSALFTRGETQAIVTTTLGTSDDEQRIESLEGLQRERFMLHYNFPPFSVGEVGRVGTGRREIGHGKLAWRSINSSLPSKESFPYTFRIVSDITESNGSSSMATVCGTSLALMDAGVPIKQPVAGIAMGLIKEGKDFSVLSDILGDEDHLGDMDFKVAGTKDGITSLQMDIKITGITFEIMEQALKQAQSGRIHILGEMNKALGKSRESMGK

SEQ ID NO: 136238 - protein, 492 aa, Unknown
  Bacterial polypetide isolated from the Sargasso Sea
MFKVIKKEISWNGNKLSIETGKIARQANGSIILRCGDTVILATAVAAKKANPDTDFFPLTVNYQEKYYAAGKIPGGYFKREARPTESETLISRLIDRPIRPLFPSSFRNETQVLATVLSYDKENDPEVLSVIASSAALSVSGLPFMGPVAASKVGFIENKFVLNPTKDQLQKSSLELVVAGTSNAVLMVESEASGLSESQMLEAVKFGHENFKPVIEMISEIKKQVKKEEIEIEKKDYKNLKKDVSQEVEKKLKKAFSEKDKKTRSNLINECKELLQKKYENSEEYTNVEVMDQFKSLEKDIVRTNILKNKVRIDGRKLDEVRDIECEVGILPRSHGSALFTRGETQAIVATTLSTSEDEQKTESLEGMTRSRFMLHYNFPPFSVGEVGRIGTGRREIGHGKLAWRAINASLPTKEDFPYTIRIVSEITESNGSSSMATVCGSSMSLMHAGVPLEKPIAGIGMGLIKEGSEFSILSDILGDEDHLGDMDFKV

SEQ ID NO: 136239 - protein, 702 aa, Unknown
  Bacterial polypetide isolated from the Sargasso Sea
MGHVNPIVKSFEYGQHTVTLETGVIARQADAAVLASMGDTTVLVTVVGKKEAEAGRDFFPLTVNYQEKTYAAGKIPGGFFKREGRPSEDETLIARLIDRPIRPLFPNGFTNEVQVIITVVSVDPQIEPDIISMIGTSAALAISGIPFSGPLGAARVGYINGEYVLNPTVEQLATSQLNLVVAGTESAVLMVESEAQALPEEVMLGSVVYGHDQQQVVVKAINEFKAEAGKPAWNWTAPVANEALVAQVKELAEAGFVEAYQIQVKQERYAQVAVVKAAAKEALLAANPEVDLREVDGLLGSLEKKVVRGRIIRGEPRIDGREPDMVRALSVLAGVLPRTHGSALFTRGETQALVTCTLGTERDAQKIDSIMGERTNRFMLHYNFPPYSVGETGMVGSPKRREIGHGKLAWRGINAVMPTAEEFPYSVRVVSEITESNGSSSMASVCGTSLALMDAGVPIKTSVAGIAMGLVKEGDDFVVLSDILGDEDHLGDMDFKVAGTRDGVTALQMDIKIEGITKEIMEIALQQAYGARVHILNVMDQAIGSHRDDISDHAPRITTIKINPEKIRDVIGKGGAVIRALTEETGTTIELEDDGTVKIASSNGDATREAIRRIEEITSEVEVGRIYNGKVIRIVDFGAFVNILPGKDGLVHISQISDERVANVSDHLELNQEVTVKVMEVDRQGRVRLSIKEAQAKEPAAE

SEQ ID NO: 136240 - protein, 490 aa, Unknown
  Bacterial polypetide isolated from the Sargasso Sea
MFKIIKKEIEIGGKKISLETGKIARQADGAVIAQCGETVVMATVVGAKKVNPDVDYFPLSVNYQEKYYAAGKIPGGYFKREARPTENETLISRLIDRPIRPLFPDEFKNEVQLLPTVISYDKENEADILSIIASSAALAISGMPFMGPVGASRVGFIDGKYILNPSKIDLENSKLDLVVAGTKDAVLMVESEAKGLTEEEMLNAVKFGHDAFVPIIEMIEQLAKECKKPDWIVEKKDLSDVKKKLEEEFTSDLKKAFATRDKKDRSNKISEITDKAKKLFEENENYSDLDVNSQLKNLEKSIVRTDILKNKNRIDGRGLSDVRPIECEVGILPRVHGSALFTRGETQAIVTTTLGTSDDEQRIESLDGLQRERFMLHYNFPPFSVGETGRIGTGRREIGHGKLAWRAINSSLPSKESFPYTFRIVSEITESNGSSSMATVCGTSLALMDAGVPIKEPVAGIAMGLIKEGNDFSVLSDILGDEDHLGDMDF

SEQ ID NO: 136241 - protein, 477 aa, Unknown
  Bacterial polypetide isolated from the Sargasso Sea
GYLGIENMFNPVSKSFEFGGQKVTLETGKVARQATGAVIVSMGATQVLATVVGRKQANPGQDFFPLTVNYQEKTYAVGKIPGGFFKREGRPTEKETLTSRLIDRPIRPLFPKGFMNEVQVICTVISGGKEEDPDIPALIGASAALAISGIPFAEPIGAARVGYDSEKGYILNPNYEQLEESMLDMVVAGTQSAVLMVESEAKQLTEDQMLGAVLFAHQEMQVVINAINELKAEAGKEPWVWEPPEKNTVLASVVADKFGSGVTEAYQISEKMTRYDAISNLKQQAIDEIVDEEAGVSESEVGEIFSALEKSTVRNRILDGAPRIDGRDTKTVRKIEVETGVLGKAHGSALFTRGETQALVVTTLGAVRDSQIIEDLSGSRKDPFMLHYNFPPYSVGEAGFMSGPKRREIGHGRLARRGVAAVMPNEEDFPYAIRVVSEITESNGSSSMASVCGSSLSMMDAGVPLSAPVAGIAMGLI

SEQ ID NO: 136242 - protein, 454 aa, Unknown
  Bacterial polypetide isolated from the Sargasso Sea
ETLVSRLIDRPIRPLFADGFKCETQVIATVISYDTENDADIVALIACSAALTLSGVPFMGPIGAARVGFKDGEYILNPTNEEMETSDLDLVVAGTKDAVLMVESEAKELSEEQMLGAVTFGQENFSQVIDSIINLAEKAAKEPREFQKKDTSDIENKVSSIVKDDLSKAYKEADKQKRTEKIAEIKKSLISELVSDDNEDEENNESTVSSAFKTIEKNIVRNSILDTGERIDGRDLETVRPIQSDVSVLPLTHGSALFTRGETQALVVTTLGTGDDEKFVDGLDETYKERFMLHYNFPPYSVGETGRTGFTGRREIGHGKLAWRALKAVMPEYDSFPYTIRLVSEITESNGSSSMATVCGSSLSMMDAGIPLSKPVAGIAMGLIKEDDKVAVLSDILGDEDHLGDMDFKVAGTNDGITSLQMDIKITGITKDIMETALSQAKNGRIHILEEMAK

SEQ ID NO: 136243 - protein, 690 aa, Unknown
  Bacterial polypetide isolated from the Sargasso Sea
MFKVYKKEIEVAGKKISLETGKVARQADGAVIATCGETVVLATVVGAKKVNPDMDYFPLSVNYQEKYYAAGKIPGGYFKREARPTESETLISRLIDRPIRPLFPDEFKNEVQLLPTVISYDKENEPDILSITASSAALAISGMPFMGPVGASRVGFIDGKYVLNPSKTDLEKSKLDLVVAGTKDAVLMVESEANGLTEEEMLNAVKFGHEGFVPVIEMIEELAKECRKPEWTVEKKDLSEVKKKLEETFTEDLKKAFATRDKQDRSNQISEITDKAKKLYEEDENYTDLDVNSQLKNLEKSIVRTDILKNKNRIDGRGLSDVRPIECEVGVLPRAHGSALFTRGETQAIVVATLGTSDDEQRIESLDGLQRERFMLHYNFPPFSVGETGRIGTGRREIGHGKLAWRAINSSLPTKEAFPYTFRVVSEITESNGSSSMATVCGTSLALMDAGVPIKEPVAGIAMGLIKEGDDFSVLSDILGDEDHLGDMDFKVAGTKDGITSLQMDIKITGITFEIMEQALSQAKDGRVHILGEMNKALSASRSDVGKHTPKMEQVNVDKKDIAAVIGKGGATIREIVEKSGAKVDVNDEGVVTVAAPDEESRNIAMQMIKDITAKAELNKIYSGKVMKIMEFGAFVNFLGKQDGLVHISELADKRVAKVTDVVKEGDEVKVKVIGFDRGKVKLSMKQAAE

SEQ ID NO: 136244 - protein, 437 aa, Unknown
  Bacterial polypetide isolated from the Sargasso Sea
RPLFPEGFVNEVAIVLLPLAVDLTCPLDWLAVVGANAALSLSDIPFNGQVAASNIAYVDNEMIVNPTYEQLDNSDFDLLVSGSKDGVVMIEAEGQEIDEDLMYKAIEKSQEINIDIMNNLDSFINKHGKDNVEFNYEFNESIYSELSSALKDQLKGVYKKDSTKSEKEDEIKEIINSYVESKNSEETYDNEIDQLKADVFRSITLDEKIRVDGRNFDQIRDLSGSVDLIPKVHGSGLFTRGETQVLSLVTLGSSRDYQRLDTLTPLEEKRFMLHYNFPPYSVGEARPMRSPGRREIGHGQLAEKALAQVLPDTDEFPYAIRIVAECLQSNGSTSMGTVCSATLALMDAGVPIKKPVAGISVGMISDNDKYDVMLDIQGIEDHYGDMDFKVAGTDTGITAIQLDIKKKFISMEVVRKALDIAQKGRSDILQTIDSVFA

SEQ ID NO: 136245 - protein, 690 aa, Unknown
  Bacterial polypetide isolated from the Sargasso Sea
MFKVHKKEVEVAGKKISLETGKVARQADGAIIATCGETVVLATVVGAKKVNPDMDYFPLSVNYQEKYYAAGKIPGGYFKREARPTESETLISRLIDRPIRPLFPDEFKNEVQLLPTVISYDKENEADILSIIASSAALAISGMPFMGPVGASRVGYIDGKYVLNPSKTELEKSKLDLVVAGTKDAVLMVESEASGLTEEEMLNAVKFGHEGFVPLIKMIEELAKECRKPEWTVEKKDLSEVKKKLEETFTADLKKAFATRDKQDRSNQISEITDKAKKLYEEDENYTDLDVNSELKNLEKTIVRTDILKNKNRIDGRGLSDVRPISCEVGVLPRTHGSALFTRGETQAIVTATLGTSDDEQRIESLDGLQRERFMLHYNFPPFSVGETGRIGTGRREIGHGKLAWRAIHSSLPSKESFPYTFRVVSEITESNGSSSMATVCGTSLALMDAGVPIKEPVAGIAMGLIKEGDDFSVLSDILGDEDHLGDMDFKVAGTKDGITSLQMDIKITGITFEIMEQALSQAKDGRIHILGEMNKALSASRSDVGKHTPKMEQVNVDKKDIAAVIGKGGATIREIVEKSGAKVDVNDEGVVTVAAPDEESRNIAMQMIKDITAKAELNKIYSGKVMKIMEFGAFVNFLGKQDGLVHISELADKRVAKVTDVVKEGDEVKVKVIGFDRGKVKLSMKQATE

SEQ ID NO: 136246 - protein, 656 aa, Unknown
  Bacterial polypetide isolated from the Sargasso Sea
CGETVVLATAVGAKKVNPDMDYFPLSVNYQEKYYAAGKIPGGYFKREARPTDSETLISRLIDRPIRPLFPDEFKNEVQVLPTVISYDKENEADILSIIASSAALAISGMPFLGPVGASRVGFIKGEYILNPTKAELKDSKLDLVVAGTKNAVLMVESEASGLTEEEMLNAVKFGHEGFVPVIEMIEELAKECKKPDWTVEKKDLSEVKNKLESEFTEELKKAFSIKDKQERSNLISEITDKAKKLYEEDENYTDLDVNSELKNLEKRIVRTDILKNKNRIDGRGLADVRPIMCEVGILPRVHGSALFTRGETQAIVTTTLGTSDDEQKIESLEGLQKERFMLHYNFPPFSVGETGRIGTGRREIGHGKLAWRAINSSLPSKESFPYTFRIVSEITESNGSSSMATVCGSSLALMDAGVPIKEPVAGIAMGLIKEGDDFSVLSDILGDEDHLGDMDFKVAGTKDGITSLQMDIKITGITFEIMEQALKQAKDGRIHILGEMNKALSKSREDVGKHTPKMEKITVDKKDIATVIGKGGATIREIVEVSGAKVDINDEGEVTVAAPDEESRNKAMQMIKDLTAKAELNKIYNGKVMKIMEFGAFVNFLGKQDGLVHISELADKRVGKVTDVVKEGDEVKVKVIGFDRGKVKLSIKQAAI

SEQ ID NO: 136247 - protein, 390 aa, Unknown
  Bacterial polypetide isolated from the Sargasso Sea
VRKNVLEGKPRIDGRDSKTVRNISIETGLLERTHGSALFTRGETQALVVTTLGTDRDSQIIDALEGEYKDRFMLHYNFPPYSVGECGFVGSPKRREIGHGRLAKRAVVPVIPEEKDFPYVLRVVSEITESNGSSSMASVCGAILSLMDAGVPIKSPVAGIAMGLVKEGDKYTVLSDILGDEDHLGDMDFKVAGTENGVTALQMDIKIDGITQEIMQVALKQARDGRIHILNKMSDAISKPNDDVSKFAPRFITIKINPSKVKDVIGKGGATIRSLTEETGAVIDISDDGSIKISSSNLEAAESAKKKIETLTEDVEVDKIYEGKVVKIMDFGAFVSVLPGKDGLVHISQISSERVENVTDKVNEGDIVKVKVIEIDKQGRIKLSMKAVDN

SEQ ID NO: 136248 - protein, 690 aa, Unknown
  Bacterial polypetide isolated from the Sargasso Sea
MFKVHKKEIEVAGKKISLETGKVARQADGAIIATCGETVILATVVGAKKVNPDMDYFPLSVNYQEKYYAGGKIPGGYFKREARPTESETLISRLIDRPIRPLFPDEFKNEVQLLPTVISYDKENQPDILAITASSAALAISGMPFMGPVGASRVGYIDGKYILNPSKEELENSSLDLVVAGTKDAVLMVESETSGLSEEVMLAAVKFGHEGFVPVIEMIEELAKECRKPEWTVEKKDLSEVKQKLEETFTEDLTKAFATRDKQDRSNQISEITDKAKKLFEENENYSDLDVNSQLKNLEKKIVRTDILKNKNRIDGRGLSDVRPIECEVGVLPRTHGSALFTRGETQAIVVTTLGTSDDEQRIESLDGLQRERFMLHYNFPPFSVGETGRIGTGRREIGHGKLAWRAINSSLPSKEAFPYTFRIVSEITESNGSSSMATVCGASLALMDAGVPIKEPVAGIAMGLIKEGDDFSVLSDILGDEDHLGDMDFKVAGTKDGITSLQMDIKITGITFEIMEQALKQAKDGRIHILGEMNKALGESRSDVGKHTPKMEQVTVDKKDIAAVIGKGGATIREIVEKSGAKVDVNDEGVVTVAAPDEESRNIAMQMIKDITAKAEMNKIYSGKVMKIMEFGAFVNFLGKQDGLVHISELADKRVAKVTDVVKEGDEVKVKVIGFDRGKVKLSMKQAAE

SEQ ID NO: 136249 - protein, 408 aa, Unknown
  Bacterial polypetide isolated from the Sargasso Sea
MFKVYKKEIEVAGKKISLETGKVARQADGAVIASCGETVILATVVGAKKVNADMDYFPLSVNYQEKYYAGGKIPGGYFKREARPTESETLISRLIDRPIRPLFPEEFKNEVQLLPTVISYDKENQPDILAITASSAALAISGMPFMGPVGASRVGFVDGKYVLNPSKTELENSSLDLVVAGTKDAVLMVESEANGLTEEEMLNAVKFGHEGFVPVIEMIEELAKECRKPKWTVEKKDLSEVKQKLEETFTEDLKKAFATRDKQDRSNQISEITDKAKKLYEENENFTDLDVNTELKNLEKSIVRTDILKNKNRIDGRGLSDVRPISCEVGILPRTHGSALFTRGETQAIVVTTLGTSDDEQRLESLDGQQRERFMLHYNFPPFSVGETGRIGTGRREIGHGKLAWRAI

SEQ ID NO: 136250 - protein, 503 aa, Unknown
  Bacterial polypetide isolated from the Sargasso Sea
MFKIVKKELSLNGKKISIETGKIARQADGAIIAKCGETVVLATVVGAKKVNPEVDYFPLSVNYQEKYYSAGKIPGGYFKREARPTESETLISRLIDRPIRPLFPDEFRNEVQLLPTVISYDKENEADILSIIASSAALAISGMPFMGPIAASRVGFIDGKYVLNPSKKELENSKLDLVVAGTKDAVLMVESEANGLSEQQMLDAVKFGHENFIPIIEMIEKFTKECKKPDWTIEKKDLTKLKKNLEKEFTKDLKKAFSLKDKQERSNLISDVSEKAKKLYEEDENITDLDVMYELKNLEKDIVRTDIIKNKNRIDGRGLADVRPIMCEVGILPRVHGSALFTRGETQAIVTTTLGTSDDEQRIETLDGLQRERFMLHYNFPPFSVGETGRIGTGRREIGHGKLAWRAINSSLPSKESFPYTFRIVSEITESNGSSSMATVCGASLALMDAGVPIKEPVAGIAMGLIKEGDNFSVLSDILGDEDHLGDMDFKVAGTKDGITSLQ

SEQ ID NO: 136251 - protein, 620 aa, Unknown
  Bacterial polypetide isolated from the Sargasso Sea
DYFPLSVNYQEKYYAAGKIPGGYFKREARPTESETLISRLIDRPIRPLFPDEFKNEVQLLPTVISYDKENEPDILSIIASSAALAISGMPFMGPVGASRVGFIKGEYVLNPSKKELEESKLDLVVAGTKDAVLMVESEANGLTEEEMLNAVKFGHEGFIPIIQMIEDLAKECRKPEWVVEKKDLSEIKKKLEEEFTEDLKKAFSTRDKQDRSNQISEITEKAKKLYEENENYTDLDVNSQLKNLEKSIVRTDILKNKNRIDGRGLADVRPIMCEVGILPRVHGSALFTRGETQAIVTTTLGTSDDEQRIESLDGLQKERFMLHYNFPPFSVGETGRIGTGRREIGHGKLAWRAINSSLPSKESFPYTFRIVSEITESNGSSSMATVCGTSLALMDAGVPIKEPVAGIAMGLIKEGDDFTVLSDILGDEDHLGDMDFKVAGTKDGITSLQMDIKITGITFEIMEQALNQAKDGRIHILGEMNKALSKARDNVGKHTPKMEKITVDKKDIAAVIGKGGATIREIVEKSGAKVDVNDQGEVTVAAPDEEARNIAMQMIKDITAKAELNKIYNGKVMKIMEFGAFVNFLGKQDGLVHISELADKRVAKVTDIVKEGDEVKVKVI

SEQ ID NO: 136252 - protein, 426 aa, Unknown
  Bacterial polypetide isolated from the Sargasso Sea
MLTFCIESSILAREFKAPNCKKEIHVNPIVKSFQYGQHTVTLETGVMARQATAAVMVSMDDTCVFVTVVGKKEADHGRDFFPLTVNYQERTYAAGRIPGGFFRREGRPSEGETLISRLIDRPIRPLFPEGFLNEVQVVATVMSVNPAVSPDIVAMIGASAALAISGIPFGGPIGAARVGYMNGQYVLNPTTTELPQSDLDLVVAGTANAVLMVESEAAILSEEVMLGAVVFGHEQMQAVINAINEFAADVGTKPWNWTAPAVNEALKAKVAELATAELGEAYRITEKAVRYETIGAIKARVVEQVIASGVEEDAKKIGEEFHSLESRIVRGRVVRGEPRIDGRDPEMIRALSVATGVLPRAHGSALFTRGETQAMVVATLGTERDAQNIDELTGNRADRFMLHYNFPPYCVGETGMMGSPKRREIG

SEQ ID NO: 136253 - protein, 424 aa, Unknown
  Bacterial polypetide isolated from the Sargasso Sea
MFKVYKKEIEVAGKKISLETGKVARQADGAIIATCGETVVLATVVGAKKVNPDVDYFPLSVNYQEKYYAAGKIPGGYFKREARPTESETLISRLIDRPIRPLFPDEFKNEVQLLPTVISYDKENEADILSITASSAALAISGMPFKGPVGASRVGYIDGKYVLNPSKVELEKSKLDLVVAGTKDAVLMVESEASGLTEEEMLNAVKFGHEGFVPVIEMIEELAKECRKPEWTVEKKDLSEVKKKLEETFTDDLKKAFATRDKQDRSNQISEITDKAKKLYEEDENYSDLDVNSELKNLEKTIVRTDILKNKNRIDGRGLSDVRPILCEVGILPRTHGSALFTRGETQAIVVATLGTSDDEQRIENLNGLQRERFMLHYNFPPFSVGETGRIGTGRREIGHGKLAWRAIHSSLPTKEAFPYTFRV

SEQ ID NO: 136254 - protein, 723 aa, Unknown
  Bacterial polypetide isolated from the Sargasso Sea
MHEFKGATMSMFNKVVKEFQWGQHKVRLETGEVARQASGAVIVDVEDTVVLATVVGAKSAKPGQDFFPLTVDYLEKTYSAGKIPGGFFRREGRPSEHETLTSRLIDRPLRPLFPEGFYNEVQVVIHVLSVNPEIPADIPALIGASAALAVSGLPFNGPVGAARVAYIDNAYVLNPTRDQIKASSLDLVVAGTERAVLMVESEADQLSEDVMLGAVVFGHEQMQVAIDAIHELVREGGKPEWDWQPAPKNEALIARVTELAQNDLLAAYQLRDKQARSTKLKEVYAATSAKLEEDALAAGTVAADKATVGNVLFDIEAKIVRSQILNGEPRIDGRDTRTVRPIEIRTGVLPRTHGSALFTRGETQALVVATLGTKGDEQIIDALEGEYRERFMLHYNMPPFATGETGRVGSPKRREIGHGRLAKRALVKCLPSADEFGYSIRVVSEITESNGSSSMASVCGGCLALMDAGVPMKAHVAGIAMGLILEGNKFAVLTDILGDEDHLGDMDFKVAGTEQGVTALQMDIKIQGITKEIMQVALAQAKEGRMHILGKMTSAVSGANTQLSEFAPRMITIKINPEKIRDVIGKGGSVIRALTEETGTTIDISDDGVVTIASTSSDGMAEAKKRIEQITAEIEVGQVYEGTVLKLLDFGAIVNLLPGKDGLLHISEIVNERVKDINDYLKEGQQVKVKVIQTDEKGRVRLSAKALLNEAAAASQSDTPPQQ

SEQ ID NO: 136255 - protein, 653 aa, Unknown
  Bacterial polypetide isolated from the Sargasso Sea
VVLATVRVGAKKVNPDMDYFPLSVNYQEKYYAAGKIPGGYFKREARPTESETLISRLIDRPIRPLFPDEFKNEVQLLPTVISYDKENEADILSIIASSAALAISGMPFMGPVGASRVGFIKGKYVLNPSKKELEESKLDLVVAGTKDAVLMVESEANGLTEEEMLNAVKFGHEGFVPIIEMIEDLAKECRKPEWTVEKKDLSEVKKKLEEEFTEDLKKAFSTRDKQDRSNQISEITEKAKKLYEENEAYTDLDVNSQLKNLEKSIVRTDILRNKNRIDGRGLADVRPILCEVGILPRVHGSALFTRGETQAIVTTTLGTSDDEQRIESLDGLQKERFMLHYNFPPFSVGETGRIGTGRREIGHGKLAWRAINSSLPSKENFPYTFRIVSEITESNGSSSMATVCGTSLALMDAGVPIKEPVAGIAMGLIKEGDDFSVLSDILGDEDHLGDMDFKVAGTKDGITSLQMDIKITGITFEIMEQALNQAKDGRIHILGEMNKALDKSRDDVGKHTPKMEKITVDKKDIAAVIGKGGATIREIVEKSGAKVDVNDEGVVTVAAPDEESRNTAMQMIKDITAKAELNKIYNGKVMKIMEFGAFVNFLGKQDGLVHISELADKRVAKVTDVVKEGDEVKVKVIGFDRGKVKLSIKQAAI

SEQ ID NO: 136256 - protein, 690 aa, Unknown
  Bacterial polypetide isolated from the Sargasso Sea
MFKVVKKEIEIAGKKISLETGKIARQADGAIVAQCGETVVLATAVGAKKVNPDVDYFPLSVNYQEKYYAAGKIPGGYFKREARPTESETLISRLIDRPIRPLFPDEFKNEVQVLPTVISYDKENEADILSIIASSAALAISGMPFMGPVGASRVGFIEGKYILNPSKEEMKNSKLDLVVAGTKDAVLMVESEANGLTEEEMLNAVKFGHEGFVPVIQMIEDLAKECKKPDWVVEKKDLSEVKKKLEEEFTGDLKKAFATRDKQDRSNQISEITDKAKKLYEEDEKYSDLDVNSQLKNLEKSIVRTDILKNKNRIDGRGLSDVRPIECEVGILPRTHGSALFTRGETQAIVTTTLGTSDDEQRIESLEGLQRERFMLHYNFPPFSVGETGRIGTGRREVGHGKLAWRAINSSLPSKESFPYTFRIVSEITESNGSSSMATVCGTSLALMDAGVPMKEPVAGIAMGLIKEGDDFSVLSDILGDEDHLGDMDFKVAGTKDGITSLQMDIKITGITFEIMEQALNQAKDGRIHILGEMNKALDKSRADVGKHTPKMEKITVDKKDIAAVIGKGGATIREIVENSGAKVDVNDEGVVTVAAPDEESRNKAMQMIKDITAKAELNKIYNGKVMKIMEFGAFVNFLGKQDGLVHISELADKRVAKVTDVVKEGDEVKVKVIGFDRGKVKLSIKQAAV

SEQ ID NO: 136257 - protein, 593 aa, Unknown
  Bacterial polypetide isolated from the Sargasso Sea
MFPETFKNEVQIFSTVMSSDKTQNPDIAAMIGASAALTISGVPFDGPMGAARVGFIDGEYILNPSFEQLDNSYLDMVVAGTDEAVLMVESEAKELNEDLMLGAVLFGHQEMKAVINACNELKNKAGKEEWVIEEDENVTNYYSDVESKYKDEITEAFTISNKSDRNEALATIKAKIVEGYSDLDEFELGKVLSSFKELEKNIVRGNILNNMPRIDGRDLDTVRPIFVETDVLPSAHGSALFTRGETQAIVVATLGSSRDAQRIEAIEGEGSDNFMLHYNFPAYSVGEIGMPMGPKRREIGHGNLAKRAIKAVLPDVDEFGYTMRVVSEITESNGSSSMASVCGTSLSLMDAGVPLSSPVAGIAMGLIKEGDDFAVLTDILGDEDHLGDMDFKVAGTESGITALQMDIKIKGINESIMETALAKAKNARNHILGIMNEVISSAKDLSENAPAMKTFIVDKDKIKEIIGKGGAVIKGMQEKTGATVDVNDDGVVSVFGQNQSSMKECLAIIEEILEEPELNKVYKGRVVKIVEFGAFVNILPGKDGLLHISEISDERTENVSDVLEEDQEIDVKLIGFDRGKMKLSMKALSDKND

SEQ ID NO: 136258 - protein, 484 aa, Unknown
  Bacterial polypetide isolated from the Sargasso Sea
MFKVYKKEVEVAGKKISLETGKVARQADGAIIATCGETVVLSTVVGAKKVNPDMDYFPLSVNYQEKYYAAGKIPGGYFKREARPTESETLISRLIDRPIRPLFPDEFKNEVQLLPTVISYDKENEPDILSIIASSAALAISGMPFMGPVGASRVGFIDGKYVLNPSKADLEKSKLDLVVAGTKDAVLMVESEASGLTEEEMLNAVKFGHEGFVPVIEMIEELAKECRKPEWTVEKKDLSEVKKKLEETFTADLKKAFATRDKQDRSNQISEITDKAKKLYEEDENYTDLDVNSQLKNLEKSIVRTDILKNKNRIDGRGLSDVRPIECEVGVLPRAHGSALFTRGETQAIVVATLGTSDDEQRIESLDGLQRERFMLHYNFPPFSVGETGRIGTGRREIGHGKLAWRAIHSSLPSKEAFPYTFRVVSEITESNGSSSMATVCGTSLALMDAGVPIKEPVAGIAMGLIKEGDDFSVLSDILGDEDH

SEQ ID NO: 136259 - protein, 472 aa, Unknown
  Bacterial polypetide isolated from the Sargasso Sea
MFKVFKKEIEVAGKKISLETGKIARQADGAIIAKCGETVVMATVVGAKKVNPDVDYFPLSVNYQEKYYAAGKIPGGYFKREARPTESETLISRLIDRPIRPLFPDEFKNEVQLLPTVISYDKENEADILSIIASSAALAISGMPFMGPVGASRVGFIDGKYVLNPSKIDLQKSKLDLVVAGTKDAVLMVESEAKGLTEEEMLNAVKFGHENFVPIIKMIEDLAKECRKPDWEIEKKDLTEIRKKLESEFTDDLKKAFSTRDKQDRSNQISEITEKAKKLYEENENFTDLDVNYELKNLEKRIVRTDILKNKNRIDGRGLADVRPIMCEVGILPRVHGSALFTRGETQAIVTTTLGTSDDEQRIESLDGLQRERFMLHYNFPPFSVGETGRIGTGRREIGHGKLAWRAINSSLPPKESFPYTFRIVSEITESNGSSSMATVCGSSLALMDAGVPIKEPVAGIAMGLIKEGDGF

SEQ ID NO: 136260 - protein, 436 aa, Unknown
  Bacterial polypetide isolated from the Sargasso Sea
MIDLSDHYFPEEFKNEVQVLPTVISYDKENEADILSIIASSAALAISGMPFLGPVGASRVGFIKGEYVLNPTKAELKDSKLDLVVAGTKDAVLMVESEASGLTEEEMLNAVKFGHEGFVPVIEMIEELAKECKKPDWIVEKKDLSEVKNKLENEFTEELKKAFSIKDKQERSNLISEITDKAKKLYEEDENYTDLDVNSELKNLEKRIVRTDILKNKNRIDGRGLADVRPIMCEVGILPRVHGSALFTRGETQAIVTTTLGTSDDEQKIESLEGLQKERFMLHYNFPPFSVGETGRIGTGRREIGHGKLAWRAINSSLPSKESFPYTFRIVSEITESNGSSSMATVCGSSLALMDAGVPIKEPVAGIAMGLIKEGDDFSVLSDILGDEDHLGDMDFKVAGTKDGITSLQMDIKITGITFEIMEQALKQAKDGRIHI

SEQ ID NO: 136261 - protein, 495 aa, Unknown
  Bacterial polypetide isolated from the Sargasso Sea
EQLQTVVSAVNEFAAEVGTEKWDWAPEAENTALKDKVKALAEAEMTAAYQISDKLERKDAVTAATEKALEAILAEDEEQDKKEVLDLLHDLESDVVRSRILSGAPRIDGRDPAMIRALDVATGILPRTHGSALFTRGETQALVAATLGTERDAQMIDELQGKRDSRFMLHYNFPPYCVGETGMIGSPKRREIGHGRLAKRGIQAVMPSEEEFPYVVRVVSEITESNGSSSMASVCGTSLALMDAGVPIKASVAGIAMGLVKSDDNFVVLSDILGDEDHLGDMDFKVAGTTEGITALQMDIKIEGITKEIMQIALKQAKEARLHILNVMDEAIGGHREELSEFAPRIYTMKIDQDKIRDVIGKGGAMIRQITEESDTNIEIEDDGTIKIFATERAKADIAISKIEQVTAEIEVGKTYNGKITRIVDFGAFVEVLPGKEGLVHISQIAHERVNKVTDYLEEGQMVDVKVMEIDRQNRVRLSIKELLEKPAPKSDDAE

SEQ ID NO: 136262 - protein, 401 aa, Unknown
  Bacterial polypetide isolated from the Sargasso Sea
IPFSGPVAGCRIGYVDSEFIVNPTYDQINEGSLDLTISSTNEAVVMVEAGASELPEDIMLDALEKGRQVNSEIIEFIEEIKNTCGKEKIEFIPAAEIEGLEGDIKELVGDRVKAIFDEGAAKGERNEVLDDMQDELKEKLAEKYESSDINEGFEKILKKTMRNKILDDGKRPDGRGVDEIRPLSIEVGILPRTHGTGLFQRGQTQVLSVATLAGLSMVQNLDNLSPEETKRYMHHYNFMPYSTGEVRRIGTGRREIGHGALAERALEPVIPSEEDFPYAIRIVSEILSSNGSTSMGSVCGSTLSLMDAGVPIKSPVAGIAMGLILSDDSSSYAVLTDIQGIEDFQGDMDFKVAGSREGITALQMDVKVQGINFEIMKDALGKAKDARYRILDAMLEVIDTP

SEQ ID NO: 136263 - protein, 646 aa, Unknown
  Bacterial polypetide isolated from the Sargasso Sea
MRREGRPPERATLIARLIDRPMRPLFPSWMRDEIQIVASCLSLDERVPADVLAVTGASIATLVGEIPFYGPMAAVRVGLIGDDFILNPSYREIEKGDLDIVVAGSPEGIVMIEAGANQLSEQDTIEAIDFGYEAVTELIKSQEDLLKDLGIKQIKPSEPEEDKTLPSYLEKNCTKPIELVLKKFDHSKEERDLELEKIKVETQDKIDSSKGDNQLKVLLSENDKLLSVDFKKLTKKLMRSQIINDGKRVDGRDLDEVRKISASAGILPKRVHGSALFQRGLTQVLSTTTLGTPSDAQEMDDLNPSTEKTYLHHYNFPPYSVGETRPMRTPGRREIGHGALAERAIIPVLPGKETFPYVLRVVSEVLSSNGSTSMGSVCGSTLSLLDAGVPLKALVSGTAMGLIKEGKEVRILTDIQGIEDFLGDMDFKVAGTDKGITALQMDMKITGLPVSIISDAIKKARPARLHILEKMQAAIDKPQESLSPHAPRLLSFRIDPELIGTVIGPGGRTIKGITERTNTKIDIEDGGIVTIASHDGAAAEEAQKIIEGLTRKVHEGEIFSGVVTRIIPIGAFVEILPGKEGMVHISQLSEARVERVEDVVRQGDEVTVRVREIDSRGRINLTLRGVGQNNGMSYPEPTPTPVAPLN

SEQ ID NO: 136264 - protein, 690 aa, Unknown
  Bacterial polypetide isolated from the Sargasso Sea
MFKVYKKEIEVAGKKISLETGKVARQADGAIIATCGETVVLATVVGAKKVNPDMDYFPLSVNYQEKYYAAGKIPGGYFKREARPTESETLISRLIDRPIRPLFPDEFKNEVQLLPTVISYDKENEPDILSITASSAALAISGMPFMGPVGASRVGFIDGKYVLNPSKAELEKSKLDLVVAGTKDAVLMVESEARGLTEEEMLNAVKFGHEGFVPVIEMIEELAKECRKPEWIVEKKDLSEVKKKLEETFTEDLKKAFATRDKQDRSNQISEITDKAKKLYEEDENYTDLDVNSQLKNLEKSIVRTDILKNKNRIDGRGLSDVRPIECEVGVLPRAHGSALFTRGETQAIVVATLGTSDDEQRIESLDGLQRERFMLHYNFPPFSVGETGRIGTGRREIGHGKLAWRAINSSLPKKEAFPYTFRVVSEITESNGSSSMATVCGTSLALMDAGVPIKEPVAGIAMGLIKEGDDFSVLSDILGDEDHLGDMDFKVAGTKDGITSLQMDIKITGITFEIMEQALSQAKDGRVHILGEMNKALSASRSDVGKHTPKMEQVNVDKKDIAAVIGKGGATIREIVEKSGAKVDVNDEGVVTVAAPDEESRHIAMQMIKDITAKAELNKIYSGKVMKIMEFGAFVNFLGKQDGLVHISELADKRVAKVTDVVKEGDEVKVKVIGFDRGKVKLSIKQVKD

SEQ ID NO: 136265 - protein, 658 aa, Unknown
  Bacterial polypetide isolated from the Sargasso Sea
MLLWGETVVIATVVGAKKVNPETDYFPLSVNYQEKYYAAGKIPGGYFKREARPTEAETLISRLIDRPIRPLFPESFRNEVQLLPTVLSYDNENEADILSIIASSAALSISGLPFKGPVGASRVGFIDGKCVLNPTKKELENSKLDLVVAGTKDAVLMVESEASGLTEKEMLDAVKFGHEGFVSVIKGIEKLSKKCSKEKWKIEEKDFSKVSKKIEKELKKDLEKAFSEKDKKTRSDLISQAGEKCKSLFEGDEDLLEHEIMLQLKKLEKNIVRTRILKNKKRIDGRGLSDVRPIKCEVGVLPRTHGSALFTRGETQALVTTTLGTTDDEQRIESLEGLKRQRFMLHYNFPPFSVGETGRIGTGRREVGHGKLAWRALNSSLPKKENFPYTLRIVSEITESNGSSSMATVCGSSLALMDAAVPIAKPVAGIAMGLIKEKDDFSILSDILGDEDHLGDMDFKVAGTKDGITSLQMDIKITGITFEIMERALAQAKDGRVHILNEMNKTIKSSRKEVGKHTPKMETIKVDKKDIATVIGKGGATIREIVEKSGAKVDVKDTGEVTVAAANEETRKIAVQMINDLVAKPEMGKTYKGKVVKIMEFGAFVNFLGKQDGLVHISQLAAKRVQKVTDVVKEGDEVSVKVIGFDRGKVKLSIKEAS

SEQ ID NO: 136266 - protein, 690 aa, Unknown
  Bacterial polypetide isolated from the Sargasso Sea
MFKSHKEEVEINGKKITLETGKIARQADGAIIATCGETMIIATAVGAKNLKDGQDYFPLSVNYQEKYYAAGKIPGGYFKREARPTEAETLISRLIDRPIRPLFPSSFMNEVQLLPTVLSYDGENQPDILSIIASSAALAISGLPFQGPIAASRVGYKDGKFLLNPSPAELQDSELDLVVAGTKEAVLMVESETSGLTEKVMLDAVKFGHENFIPIIKAIETLAKKAGKPKWEVEEIDHSDVKKKIVIAFEKDLRKAFKEVDKKKRSTAISEIDAKCKEMFVEDENVTENQAMAQLKLLEKDIVRTAILKDKKRIDGRGLADVRQIKCEVGVLPRAHGSALFTRGETQALVVTTLGMSDDEQRLESLDGMQRSNFMLHYNFPPFSVGECGRIGTGRREIGHGKLAWRAIRSSLPKKEDFPYTLRVVSEITESNGSSSMATVCGTSLSLMDAAVPIKEPVAGIAMGLIKEGDKFSVLSDILGDEDHLGDMDFKVAGTKDGITSLQMDIKITGITFEIMEKALEQAKSGREHILLEMNKTIKSSRKEFSRHTPKMETIKVDKKDIATVIGKGGATIREIVEMSGAKVDVKDTGEVTVAAPDQNSRNKAIEFIKSLIAKPEMGKIYKGKVVKIMEFGAFVNFLGKQDGLVHISELATKRVAKVGDVVKEGDEVSVKVVGFDRGKVKLSIKQAVA

SEQ ID NO: 136267 - protein, 489 aa, Unknown
  Bacterial polypetide isolated from the Sargasso Sea
GKYVLNPSKIELEKSKLDLVVAGTKDAVLMVESEANELSEEEMLNAVKFGHENFVPVIKIIEELAKECRKPDWIVEKKDLSDVKKKLEKEFTEDLKKAFSTRDKQDRSNQISEITEKAKKLYEEDENYTELDVKYELKNLEKRIVRTDILKNKNRIDGRGLADVRPIMCEVGILPRVHGSALFTRGETQAIVTTTLGTSDDEQRIESLDGLQRERFMLHYNFPPFSVGETGRIGTGRREIGHGKLAWRAINSSLPPKESFPYTFRIVSEITESNGSSSMATVCGSSLALMDAGVPIKEPVAGIAMGLIKEGDDFSVLSDILGDEDHLGDMDFKVAGTKDGITSLQMDIKITGITFEIMEQALKQAKDGRIHILGEMNKALAKSRDNVGKHTPKMEKITVDKKDIATVIGKGGATIREIVEKSGAKVDVNDEGVVTVAAPDEDSRNKAMQMIKDLTAKAELNKIYNGKVMKIMEFGAFVNFLGKQDGLVH

SEQ ID NO: 136268 - protein, 637 aa, Unknown
  Bacterial polypetide isolated from the Sargasso Sea
MDYFPLSVNYQEKYYAAGKIPGGYFKREARPTESETLISRLIDRPIRPLFPDEFKNEVQLLPTVISYDKENEADILSIIASSAALAISGMPFMGPVGASRVGFIEGKYVLNPSKTDLEKSKLDLVVAGTKDAVLMVESEANGLTEEEMLNAVKFGHEGFVPIIEMIEDLAKECRKPEWIVEKKDLSEIKKKLEDEFTEDLKKAFSTRDKQDRSNQISEITEKAKKLYEENEAYSDLDVNSQLKNLEKSIVRTDILKNKNRIDGRGLADVRPIMCEVGILPRVHGSALFTRGETQAIVTTTLGTSDDEQRIESLDGLQKERFMLHYNFPPFSVGETGRIGTGRREIGHGKLAWRAINSSLPSKESFPYTFRIVSEITESNGSSSMATVCGTSLALMDAGVPIKEPVAGIAMGLIKEGDDFSVLSDILGDEDHLGDMDFKVAGTKDGITSLQMDIKITGITFEIMEQALNQAKDGRIHILGEMNKALSKSRDNVSKHTPKMEKITVDKKDIAAVIGKGGATIREIVEKSGAKVDVNDEGEVTVAAPDEESRNIAMQMIKDITAKAELNKIYNGKVMKIMEFGAFVNFLGKQDGLVHISELADKRVAKVTDVVKEGDEVKVKVIGFDRGKVKLSIKQAAI

SEQ ID NO: 136269 - protein, 389 aa, Unknown
  Bacterial polypetide isolated from the Sargasso Sea
FIAASAAIGISGLPFNGPLGAVRVGFIEGQYCLNPNRSDMDNSLLDMVIAGSDSAVIMVESEAKELSEDQMLGGILFAHQEMQVIIDAIKEMSLEVGKPAFEYEPKTLDVDLVNSVKDSYSELISNAYQIQDKQERVQTLNQLKEKLVEDLVSEEENSPKSTDLLDAFKKIEKTIVRSNLIKGEPRIDGRDLDTVRPLFIETGVLKNTHGSALFTRGETQALVTSTLGSPRQAQLIDALEGEFKDQFMLHYNFPPYSVGEAGFMSGPKRREIGHGKLARRALEAVLPSPEEFPYTIRVVSEITESNGSSSMASVCGSSLALMDAGIPVKAPVAGIAMGLVKEDNGFAVITDILGDEDHLGDMDFKVAGTEEGITALQMDIKIDGITEEI

SEQ ID NO: 136270 - protein, 455 aa, Unknown
  Bacterial polypetide isolated from the Sargasso Sea
TEAETLISRLIDRPIRPLFPDEFKNEVQLLPTVISYDKENEADILSITASSAALAISGMPFMGPVGASRVGFIEGKYVLNPSKSEMEKSKLDLVVAGTKDAVLMVESEANGLSEEEMLNAVKFGHEGFVPVITMIEELAKECKKPDWTVEKKDLSEIKKKLEDEFTEDLKKAFATRDKQDRSNQISEITDKAKKLYEENENYTDLDVNSQLKNLEKTIVRTDILKNKNRIDGRGLADVRPIMCEVGILPRTHGSALFTRGETQAIVTTTLGTSDDEQRIESLEGLKRERFMLHYNFPPFSVGETGRIGTGRREIGHGKLAWRALHSSLPSQESFPYTFRIVSEITESNGSSSMATVCGTSLALMDAGVPIKEPVAGIAMGLIKEGDDFSVLSDILGDEDHLGDMDFKVAGTKSGITSLQMDIKITGITFEIMEQALKQAKDGRIHILGEMNKAIE

SEQ ID NO: 136271 - protein, 512 aa, Unknown
  Bacterial polypetide isolated from the Sargasso Sea
DFLNEVQVVITVMSLNPEVQTDVISMIAASAALSISDIPFNGPIAGVRVGYINNKPVINPKVSEMENSELDLMVAGTTDAILMVESEAKELSEEVMLDCVMKGHDEIKKVIDGINDLVKEAGKEKWILDEIEKDETLKNKVIEIAGGDIESAYSIVEKSERSTRLAEIKQSTIDQIIESDEEISKDDVASEIKKIEKETVRSKILNGEPRIDGRDTKTVRDINVDINILERTHGSALFTRGETQSIVVTTLGSERSSQIIDALEGEYKDKFMLHYNFPPYSVGEVGFMGSPKRREIGHGKLARRALEAVLPNMAEYPYTIRIVSEITESNGSSSMATVCGSSLSLMHAGVPIKSHVAGIAMGLVMEGDKYKVLTDILGDEDHLGDMDFKVAGTDNGITALQMDIKIAGITEEIMKDALSQAKDAKDHILKIMNEAISSPSEEYSPYAPSIISITVPKDKIRDVIGKGGATIRSITEVTGAQVDINDDGIVTIASVDQESGLKAKEKIELLTA

SEQ ID NO: 136272 - protein, 415 aa, Unknown
  Bacterial polypetide isolated from the Sargasso Sea
MFKIVKKEIEVSGKKLSLETGKIARQADGAIIAQCGETVVLSTVVGAKKVNPDMDYFPLSVNYQEKYYAAGKIPGGYFKREARPTESETLISRLIDRPIRPLFPDEFKNEVQLLPTVISYDKENEADILSIIASSAALAISGMPFMGPVGASRVGFIEGKYVLNPSKKDLEKSKLDLVVAGTKDAVLMVESEANGLTEEEMLNAVKFGHEGFVPIIEMIEELAKECRKPEWTVEKKDLSEVKKKLEEEFTEDLKKAFSTRDKQDRSNQISQITEKAKKLYEENEAYTDLDVNSQLKNLEKSIVRTDILKNKNRIDGRGQADVRPIVCEVGILPRVHGSALFTRGETQAIVTTTLGTSDDEQRIESLDGLLKERFMLHYNFPPFSVGETGRIGTGRREIGHGKLAWRAINSSLPSK

SEQ ID NO: 136273 - protein, 597 aa, Unknown
  Bacterial polypetide isolated from the Sargasso Sea
HMEERVYYVLPVASKSKNDADFFPLTVNYQEKAFAAGKIPGGFFKREGRPTEKETLVCRLIDRPIRPLFHKNFKNETQIIATVLEYDFENDPDIVAIIAASAALTISGLPFMGPLGACRVGWDGKKYQLNPKIDEYDNQKLDLVVAGTTEGVLMVESEAQELNEKIMLGAVDFGHKEMKVVINAIIELAEVAAKEPIEIEDNIPEEKEYNKIVKKFSGEFEKAYKIKEKSERVDAIDLIKEDILNKFDEDVNTNLLSSVIKKTESDVVRTSVIKTKKRIDGRDNKTVRKIVAEVGTLPRSHGSALFTRGETQALVVTTLGSSQDTQIIDGLNGDSKEHFMLHYNFPPYSVGEAGRVGSPGRREIGHGKLAWRAIHPLLPTVEEFPYTVRIVSEITESNGSSSMATVCGTSLALMDAGVPIKKPIAGIAMGLIKEKDKFVVLSDILGDEDHLGDMDFKVAGTKDGITSLQMDIKITSITSEIMKIALDQALEGRKYILAEMKKAISKTRTNLAENAPKIKVMKIKTEKIKEIIGPSGKVIKGICENTNSKIDIDDSGVLKVASPNDESLDKALKMINDIIVEPEMGVIYNGKVVKTVD

SEQ ID NO: 136274 - protein, 508 aa, Unknown
  Bacterial polypetide isolated from the Sargasso Sea
DAVLMVESEAKQLSEEIMLGAVKFGHESMQEVIKIIINLAEECANDPWEFSHTINESLLDEIKKTCEDKIAKSYSIVDKMERQSSLSEIKSSLEDQYKENEEYSINEVMGYFKKIEKNVVRSQILNNQSRIDGRKLDEVRNISSEVSWLPRTHGSALFTRGETQAIVVATLGFGEDEQRIEALQGSYKENFMLHYNFPPYSVGEVGRLGATGRREIGHGKLAWRALKAVLPSKDDFDYTIRLVSDITESNGSSSMATVCGSSLALMDAGVPIKNSVSGIAMGLIKEGDDFAVLSDILGDEDHLGDMDFKVAGTKEGVTSLQMDIKITGITYEIMEKALEQAKGGRDYILNEMNKEISEARTELGPYTPRSEIIKVKRDNIGEIIGKGGSTIKDIIEKSGAKIDISDNGNVKIAGTNNESIEAAKELINSIIEEPEVGQVYEGKVVKIMEFGAFVNFFGKRDGLVHISQLSKERVEKVTDVVNEGDIVKVKVLGFDKGKVKLSIKDTEE

SEQ ID NO: 136275 - protein, 366 aa, Unknown
  Bacterial polypetide isolated from the Sargasso Sea
IETGVLKNTHGSALFTGGETQALVTSTLGSPRQAQLIDALEGEFKDQFMLHYNFPPYSVGEAGFMSGPKRREIGHGKLARRALEAVLPSPDDFPYTIRVVSEITESNGSSSMASVCGSSLALMDAGIPLKAAVAGIAMGLVKEDQGFAVITDILGDEDHLGDMDFKVAGTSEGITALQMDIKIDGITEEIFEVALEKAQVARAHILSSMNEVISESREKLSDKAPQAVVIQINTKKIRDVIGKGGETIRALTEETGAIIEVEDSGKVTIYGDTPESRESAQKRIEEITAEPEVNKVYTGTVANIKDFGAFVTIMPGRDGLVHVSEISEERVENVSDYFVEGEEVKVKVLEVDKQGKIRLTMKGLED

SEQ ID NO: 136276 - protein, 441 aa, Unknown
  Bacterial polypetide isolated from the Sargasso Sea
MFKIVKKEIEVAGKKISLETGKIARQADGAIIAQCGETVVLATAVGAKKVNPDIDYFPLSVNYQEKYYAAGKIPGGYFKREARPTESETLISRLIDRPIRPLFPDEFKNEVQVLPTVISYDKENEADILSIIASSAALAISGMPFLGPVGASRVGFIEGKYVLNPSKKEMENSKLDLVVAGTKEAVLMVESEANVLTEEEMLNAVKFGHEGFVPVIETIEQLAKECKKPDWVIEKKDLSEVKKKLEEEFTADLKKAFATKDKQDRSNQISEITDKAIKLYEENENYSDLDVNSQLKNLEKSIVRTDILKNKNRIDGRGLADVRPIECEVGILPRAHGSALFTRGETQAIVTTTLGTSDDEQRIESLEGLQRERFMLHYNFPPFSVGETGRIGTGRREIGHGKLAWRAINSSLPSKESFPYTFRIVSDITESNGSSSMATVC

SEQ ID NO: 136277 - protein, 588 aa, Unknown
  Bacterial polypetide isolated from the Sargasso Sea
FPDEFKNEVQLLPTVISYDKENEADILSIIASSAALAISGMPFMGPVGASRVGFIEGKYVLNPSKKELEKSKLDLVVAGTKDAVLMVESEANGLTEEEMLNAVKFGHEGFVPIIEMIEELAKECKKPEWTVEKKELSEVKKKLEEEFTEDLKKAFSTRDKQDRSNQISQITEKAKNLYEENEAYTDLDVNSQLKNLEKSIVRTDILKNKNRIDGRGLADVRPIMCEVGILPRVHGSALFTRGETQAIVTTTLGTSDDEQRIESLDGLQKERFMLHYNFPPFSVGETGRIGTGRREIGHGKLAWRAINSSLPSKESFPYTFRIVSEITESNGSSSMATVCGTSLALMDAGVPIKEPVAGIAMGLIKEGEDFSVLSDILGDEDHLGDMDFKVAGTKDGITSLQMDIKITGITFEIMEQALNQAKDGRIHILGEMNKALDKSRDDVGKHTPKMEKITVDKKDIAAVIGKGGATIREIVEKSGAKVDVNDEGIVTVAAPDEESRNIAMQMIKDITAKAELNKIYNGKVMKIMEFGAFVNFLGKQDGLVHISELADKRVAKVTDVVKEGDEVKVKVIGFDRGKVKLSIKQAAI

SEQ ID NO: 136278 - protein, 452 aa, Unknown
  Bacterial polypetide isolated from the Sargasso Sea
VGKKQGDPERDFFPLTVNYQEKAYASGKIPGGFFKREGRPSEKETLVSRLIDRPVRPLFPKGYTNEVQVIATVMSLDPEIDPDIPSLIGSSAALTLSGLPFAGPIGAAKIGYIDGDFVLNPDKSQLLESDLDLVVAGTSEAVLMVESEANILSEDIMLKAVIFGHEQMQLAISAINDLAQEASKPKIEWSPPEEDNELSDAMMQSCSESIKAAYLIKNKQERREKMSSIKDQSIQELLDKHQDKWPSDDLGKAFSALEKRIVRSNVVKEKIRIDGRDSTTVRPIDVKIGVLERTHGSALFTRGETQAIVVTTLGTDRDAQIIDALEGEYKDTFMLHYNFPPYCVGETGFVGSPKRREIGHGKLAKRGIQAVMPDQEEFPYVIRVVSEITESNGSSSMASVCGTSLSLMDAGVPIKSPVAGVAMGLVKEDEDYTVLTDILGDEDHLGDMDFKV

SEQ ID NO: 136279 - protein, 461 aa, Unknown
  Bacterial polypetide isolated from the Sargasso Sea
PTESETLISRLIDRPIRPLFPDEFKNEVQLLPTVISYDKENEADILSIIASSAALAISGMPFMGPVGASRVGFIKGEYVLNPSKKELEESKLDLVVAGTKDAVLMVESEANGLTEEEMLNAVKFGHQGFIPVIQMIEDLAKECRKPEWVVEKKDLSEIKKKLEEEFTEDLKKAFSTRDKQDRSNQISEITEKAKKLYEENEDYTDLDVNSQLKNLEKSIVRTDILKNKNRIDGRGLADVRPIMCEVGILPRVHGSALFTRGETQAIVTTTLGTSDDEQRIESLDGLLKERFMLHYNFPPFSVGETGRIGTGRREIGHGKLAWRAINSSLPSKESFPYTFRIVSEITESNGSSSMATVCGTSLALMDAGVPIKEPVAGIAMGLIKEGDDFTVLSDILGDEDHLGDMDFKVAGTKDGITSLQMDIKITGITFEIMEQALKQAKDGRVHILSEMNKALSKSRDN

SEQ ID NO: 136280 - protein, 423 aa, Unknown
  Bacterial polypetide isolated from the Sargasso Sea
MFKVHKKEIEVAGKKLSLETGKVARQADGAIIATCGETVVLATVVGAKKVNPDMDYFPLSVNYQEKYYAAGKIPGGYFKREARPTESETLISRLIDRPIRPLFPDEFKNEVQLLPTVISYDKENEPDILSITASSAALAISGMPFMGPVGASRVGYIDGKYVLNPSKTDLEKSKLDLVVAGTKDAVLMVESEASGLTEEEMLNAVKFGHEGFVPVIEMIEELAKECRKPEWTVEKKDLSEVKKKLEETFTEDLKKAFATRDKQDRSNQISEITDKAKKLYEEDENYTDLDVNSELKNLEKSIVRTDILKNKNRIDGRGLSDVRPISCEVGILPRTHGSALFTRGETQAIVTATLGTSDDEQRIESLDGLQRERFMLHYNFPPFSVGETGRIGTGRREIGHGKLAWRAIHSSLPSSESFPYTFR

SEQ ID NO: 136281 - protein, 592 aa, Unknown
  Bacterial polypetide isolated from the Sargasso Sea
IRPLFPEDFKNEVQLLPTVISYDKENEADILSIIASSAALAISGMPFGGPVAASRVGFIDGKYILNPSKKELENSKLDLVVAGTKDAVLMVESEAKGLTEEEMLSAVKFGHKGFVPAINAIEELAKECKKPNWVIEKKDLSEVKKKLEEEFTADLKKAFATKDKQDRSNQISEITDKAKKLYEENENYSDLDVNSQLKSLEKSIVRTDILKKKNRIDGRGLADVRPIECEVGILPRVHGSALFTRGETQAIVTTTLGTSDDEQRIESLEGLQRERFMLHYNFPPFSVGETGRIGTGRREIGHGKLAWRAINSSLPSKESFPYTFRIVSEITESNGSSSMATVCGSSLALMDAGVPIKEPVAGIAMGLIKEGDDFSVLSDILGDEDHLGDMDFKVAGTKDGITSLQMDIKITGITFEIMDQALKQAKDGRIHILKEMNKALNKSRESVGKHTPKMEKITVDKKDIAAVIGKGGATIREIVEKSGAKVDVNDEGVVTVAAPDEESRNIALQLIKDITAKAELNKIYNGKVMKIMEFGAFVNFLGKQDGLVHISELADKRVAKVTDVVKEGDEVKVKVIGFDRGKVKLSIKQATV

SEQ ID NO: 136282 - protein, 572 aa, Unknown
  Bacterial polypetide isolated from the Sargasso Sea
MFKIIKKEIEIGGKKITLETGKIARQADGAIIATCGETVVMATVVGAKKVNPEVDYFPLQVNYQEKYYAAGKIPGGYFKREARPTESETLISRLIDRPIRPLFPDEFRNEVQLLPTVISYDKENEADILSIIASSAALAISGMPFLGPIGASRVGYIDEKYVLNPSKAELKNSKLDLVVAGTKDAVLMVESEAKGLSEEAMLKAVKFGHENFISVIKMIEDLAKDCRKPDWEIDKKDLSEVKEKLEKELTSDLTKAFTIKDKQERSNLIAEITEKAKKLFEENENYTELDVNYELKNLEKRIVRTDILKNKNRIDGRGLSDVRPIMCEVGILPRVHGSALFTRGETQAIVTTTLGTSDDEQRIESLEGLQRERFMLHYNFPPFSVGEVGRIGTGRREIGHGKLAWRAINSSLPSKENFPYTFRIVSEITESNGSSSMATVCGTSLALMDAGVPIKEPVAGIAMGLIKEGDDFSVLSDILGDEDHLGDMDFKVAGTKDGITSLQMDIKITGITFEIMEQALKQAKDGRIHILGEMNKALDKSRAGVGKHTPKMEKITVDKKDIATVIGKGGAT

SEQ ID NO: 136283 - protein, 584 aa, Unknown
  Bacterial polypetide isolated from the Sargasso Sea
RSRENSRWIFKREGRPSEKETLISRLIDRPLRPSFRDDFLNEVQVIITVMSLNPEVQTDVISMIAASAALSISDIPFNGPIAGVRVGYIDNKSVINPTVSEMENSALDLIVAGSTDAILMVESEAKELSEEVMLDCVMNGHSEIKKIIDGINDLVKKAGKEKWILDEIEKDETLNNKVKEIAGADIESAYAIVEKSERSSRLTEIKKSTIDQLTESDEEISKDDIASEIKKIEKETVRSKILNGEPRIDGRDTKTVRDINVDLNVLERTHGSALFTRGETQSIVVTTLGSERSSQIIDALEGEYKDKFMLHYNFPPYSVGEVGFMGSPKRREIGHGKLARRALEAVLPNMDEYPYTIRIVSEITESNGSSSMATVCGSSLSLMNAGVPIKTHVAGIAMGLVMDGDKYKVLTDILGDEDHLGDMDFKVAGTDNGITALQMDIKIAGITEEIMKDALSQAKDAKDHILKIMNDAISSPADDYSPYAPSIISMTVPKDKIRDVIGKGGATIRSITEVTGAQVDINDDGIVTIASVDQESGLKAKEKIELLTADVEVDKIYEGRVAKIMDFGAFVTILPGKDGLVHIS

SEQ ID NO: 136284 - protein, 419 aa, Unknown
  Bacterial polypetide isolated from the Sargasso Sea
EDNSDLDEFELGKVLSSFKELEKNIVRGNILNNKLRIDGRDLDTVRPIFVETDVLPSAHGSALFTRGETQAVVVATLGSSRDAQRIEAIEGEGSDNFMLHYNFPAYSVGEIGMPMGPKRREIGHGNLAKRAIKAVLPDTDEFGYTMRVVSEITESNGSSSMASVCGTSLSLMDAGVPLSSPVAGIAMGLIKEGDDFAVLTDILGDEDHLGDMDFKVAGTESGITALQMDIKIKGINESIMETALAKAKNARNHILGIMNEVISSAKDLSENAPAMKTFMVDKDKIKEIIGKGGAVIKGMQEKTGATVDVNDDGTVSVFGQNQSSMKECLAIIEEILEEPELNKIYKGKVVKIVEFGAFVNILPGKDGLLHISEISEERTENVEDVLKEDQEIEVKLIGFDRGKMKLSMKAITNKKEESD

SEQ ID NO: 136285 - protein, 620 aa, Unknown
  Bacterial polypetide isolated from the Sargasso Sea
GGFFKREGRPSEKETLISRLIDRPLRPSFRDDFLNEVQVVITVMSLNPEVQTDVISMIAASAALSISDIPFNGPIAGVRVGYIDKKSVINPTVSEMENSALDLVVAGSTDAILMVESEAKELSEEVMLDCVINGHNEIKKIIDGINELVKKAGKEKWVLDEIEKDETLKNTVKEIAGPDIESAYSIVEKSERSNRLADIKKNTIERIADSDEEISKDDIASEIKKIEKETVRSKILNGEPRIDGRDTKTVRDINVDINVLERTHGSALFTRGETQSIVVTTLGSERSSQIIDALEGEYKDKFMLHYNFPPYSVGEVGFMGSPKRREIGHGKLARRALEAVLPNMDEYPYTIRIVSEITESNGSSSMATVCGSSLSLMHAGVPIKSHVAGIAMGLVMEGDKYKVLTDILGDEDHLGDMDFKVAGTDNGITALQMDIKIAGITEEIMKDALSQAKDAKDHILKIMNDAISSPSEQYSPYAPSIISMTVPKDKIRDVIGKGGATIRSITEVTGAQVDINDDGIVTIASVDQESGLKAKEKIELLTADVEVDKIYEGRVAKIMDFGAFVTILPGKDGLVHISEISEERVESVDDVLSEGQVINVKVIEVDRQNRIRLSMKAIKD

SEQ ID NO: 136286 - protein, 650 aa, Unknown
  Bacterial polypetide isolated from the Sargasso Sea
MATVVGAKKVNPEVDYFPLSVNYQEKYYAAGKIPGGYFKREARPTESETLISRLIDRPIRPLFPDEFKNEVQLLPTVISYDKENEADILSIIASSAALSISGMPFMGPVGASRVGFIDGKYVLNPSKKELEKSKLDLVVAGTKDAVLMVESEAKGLTEEEMLNAVKFGHENFIPIIKMIEELAKECKKTGWVVEKKDLSEVKKKLSDEFTDDLKKAFSTRDKQERSNMISEITDKAKKLFEENETITDLDVNSELKNLEKSIVRTDILKNKNRIDGRGLSDVRPIMCEVGILPRVHGSALFTRGETQAIVTTTLGTSDDEQRIESLEGLQRERFMLHYNFPPFSVGETGRIGTGRREIGHGKLAWRAINSSLPSKESFPYTFRIVSEITESNGSSSMATVCGTSLALMDAGVPIKEPVAGIAMGLIKEGDDFSVLSDILGDEDHLGDMDFKVAGTKDGITSLQMDIKITGITFEIMEQALNQAKDGRVHILGEMNKALGKSRDEVGKHTPKMEKITVDKKDIATVIGKGGATIREIVEKSGAKVDVNDEGVVTVAAPDDESRNKAMQFIKDLTAKAEMNKIYNGKVIKIMEFGAFVNFLGKQDGLVHISELANKRVAKVTDVLKEGDAVKVKVIGFDRGKVKLSIKQAAV

SEQ ID NO: 136287 - protein, 688 aa, Unknown
  Bacterial polypetide isolated from the Sargasso Sea
MQTKTFDLGGQSVKIETGLLAKQSTASVTVDIEGTVILATLVADKNDSDRDFFPLTVDYIEKTYAAGKIPGGFFKREGRPSEKETLISRLVDRPLRPLFDSSFTREVQLILTLLSYNPDVDAEIPALIAASACVKLSGLPFNGTLGAVKVGYDGNDYILNPSNSALKESLLDLTVAGTKNAVMMVESEAKELTEDVMLGAVNFGHEKMQVIITAIEELVADANVSQIDWTPPVSDNQAYEEFFDKYKERITDAYSITKKQERNTKLSNIKTEIIESDSNEDEDIEDKISCMFEKAQKNIVRKRIIDGERRIDGRDTVTVRPIDVKVGILPRTHGSALFTRGETQALVVTALGTEKDAQMIDSLDGRIDDTFIFHYNFPPYSVGEIGRTGSPKRREIGHGKLARRGIQSVVPTVDEFPYTIRVVSEILESNGSSSMASVCGSSLSMMDAGVPIKRPVAGIAMGLVKEGDKHVVLTDILGDEDHLGDMDFKVAGTSVGINALQMDIKVDGITSEIMSKALAQARDARLHILSEMGKVISEARKEPSPFAPRYTHVKIDQSKIAAVIGKGGATIKSIIEKTGAQIDIDDSGLIKIASNDQSIGDKAKEMIEEITVGPQVDKIYEGRVVKIMDFGAFVSITPSQDGLVHISQISEERVNNVSDVLTEGDVVKVKVLEVDKQGRVKLTMKNLD

SEQ ID NO: 136288 - protein, 690 aa, Unknown
  Bacterial polypetide isolated from the Sargasso Sea
MFKVFKKEIDFGGKKITLETGKVARQADGAIIATCGETVVLATAVGAKKINPDVDYFPLSVNYQEKYYAAGKIPGGYFKREARPTESETLISRLIDRPIRPLFPDEFKNEVQVLPTVISYDKENEADILSIIASSAALAISGMPFLGPVGASRVGFIDGKYVLNPSKIDLENSKLDLVVAGTKDAVLMVESEASGLTEKQMLDAVKFGHEGFVPVIKMIEDLAKECKKPNWVVEKKDLSSIKKKLEKEFTEDLKKAFSIKDKQERSNLISEVTEKAKKLYEEDENFTELDVMHELKDIEKGIVRTDILKNKNRIDGRGLADVRPIMCEVGILPRVHGSALFTRGETQAIVTTTLGTSDDEQRIESLDGLQRERFMLHYNFPPFSVGETGRIGTGRREIGHGKLAWRAIKSSLPSKESFPYTFRIVSEITESNGSSSMATVCGSSLSLMDAGVPIKEPVAGIAMGLIKEGEDFSVLSDILGDEDHLGDMDFKVAGTKDGITSLQMDIKITGITFEIMEQALKQAKDGRVHILGEMNKALAKSRSGVGKHTPKMEKITVDKKDIATVIGKGGATIREIVEKSGAKVDVNDEGVVTVAAPDEDSRNKAMQMIKDLTAKAELNKIYNGKVMKIMEFGAFVNFLGKQDGLVHISELADKRVAKVTDVVKEGDEVKVKVIGFDRGKVKLSIKQAAV

SEQ ID NO: 136289 - protein, 498 aa, Unknown
  Bacterial polypetide isolated from the Sargasso Sea
MFKIFKKEIELNGKKISLETGKIARQADGAIIAKCGETVVLATVVGAKKVNPDMDYFPLSVNYQEKYYAAGKIPGGYFKREARPTESETLISRLIDRPIRPLFPDEFKNEVQLLPTVISYDKENEADILSIIASSAALAISGMPFMGPIAASRVGFIDGKYVLNPSKKELENSKLDLVVAGTKDAVLMVESETSGLTEGEMLDAVKFGHENFVPVINMIEELAKECKKPDWVVEKKDLSEVKKKIEDEFTDELKKAFSIKDKQERSNLISEITDKAKKLFEENESFTDLDVNSELKNLEKRIVRTDILKNKNRIDGRGLSDVRPISCEVGILPRTHGSALFTRGETQAIVTTTLGTSDDEQRIESLEGLQRERFMLHYNFPPFSVGETGRIGTGRREIGHGKLAWRAIKSSLPSKESFPYTFRIVSEITESNGSSSMATVCGTSLALMDAGVPIKEPVAGIAMGIIKEGDDFSVLSDILGDEDHLGDMDFKGAGTKDG

SEQ ID NO: 136290 - protein, 690 aa, Unknown
  Bacterial polypetide isolated from the Sargasso Sea
MFKVFKKEIELNGKKIILETGKIARQADGSIIAKCGETVVLATVVGAKKVNPDMDYFPLSVNYQEKYYAAGKIPGGYFKREARPTESETLISRLIDRPIRPLFPDEFKNEVQLLPTVISYDKENEADILSIIASSAALAISGMPFMGPVGASRVGFIDGKYVLNPSKKELENSKLDLVVAGTKDAVLMVESETSGLTEEEMLNAVKFGHENFIPVINMIEELASECKKPDWVVEKKDLSEVKKKIEEEFTDELKKAFSIRDKKERSNLISEITEKAKKLFEENENFTDLDVNSELKNLEKRIVRTDILKNKNRIDGRGLSDVRPIMCEVGILPRTHGSALFTRGETQAIVTTTLGTSDDEQRIESLEGLQRERFMLHYNFPPFSVGETGRIGTGRREIGHGKLAWRAINSSLPSKESFPYTFRIVSEITESNGSSSMATVCGTSLALMDAGVPIKEPVAGIAMGLIKEGEDFSVLSDILGDEDHLGDMDFKVAGTKDGITSLQMDIKITGITFEIMEQALKQAKDGRIHILGEMNKALNKSRDGVGKHTPKMEKITVDKKDIATVIGKGGATIREIVEKSGAKVDVNDEGVVTVAAPDEESRNIALQFIKDLTAKAELNKIYNGKVMKIMEFGAFVNFLGKQDGLVHISELADKRVAKVTDVVKEGDEVKVKVIGFDRGKVKLSIKQAEI

SEQ ID NO: 136291 - protein, 633 aa, Unknown
  Bacterial polypetide isolated from the Sargasso Sea
MFKVFKKEIELNGKKISLETGKIARQADGAIIAKCGETVVLATVVGAKKINPDVDYFPLSVNYQEKYYAAGKIPGGYFKREARPTESETLISRLIDRPIRPLFSDEFKNEVQLLPTVISYDKENEADILSIIASSAALAISGMPFMGPVGASRVGFIDDKYVLNPSKKELENSKLDLVVAGTKDAVLMVESETSGLTEEEMLNAVKFGHESFIPVIKMIEELAAECKKPDWTIEKKDLSEVKNKIEKEFTEELKKAFSIKDKQERSNLISEITDKAKKLFEENENFTDLDVNSELKNLEKRIVRTDILKNKNRIDGRGLSDVRPIMCEVGILPRTHGSALFTRGETQAIVTTTLGTSDDEQRIESLEGLQRERFMLHYNFPPFSVGETGRIGTGRREIGHGKLAWRAINSSLPSKENFPYTFRIVSEITESNGSSSMATVCGTSLALMDAGVPIKEPVAGIAMGLIKEGDDFSVLSDILGDEDHLGDMDFKVAGTKDGITSLQMDIKITGITFEIMEQALKQAKDGRIHILGEMNKALDKSRDGVGKHTPKMEKITVDKKDIATVIGKGGATIREIVEKSGAKVDVNDEGVVTVAAPDEESRNIALQFIKDLTAKAELNKIYNGKVMKIMEFG

SEQ ID NO: 136292 - protein, 471 aa, Unknown
  Bacterial polypetide isolated from the Sargasso Sea
MFPDAFKNEVQVLPTVISYDKENEADILSIIASSAALSISGMPFLGPVGASRVGFVDGKYVLNPSKTELKNSKLDLVVAGTKDAVLMVESEASVLTEEEMLNAVKFGHEGFVPVIEMIEELTKECKKPDWVLEKKDLSEVKKKLEGEFTKELKKAFSIKDKQERSNMISEITDKAKKIYEEDENYTDLDINSELKNLEKSIVRTDILKNKNRIDGRSLSDVRPIMCEVGILPRVHGSALFTRGETQAIVTTTLGTSDDEQKIESLDGLQKERFMLHYNFPPFSVGETGRIGTGRREIGHGKLAWRAINSSLPPKETFPYTFRIVSEITESNGSSSMATVCGTSLALMDAGVPIKEPVAGIAMGLIKEGNDFSVLSDILGDEDHLGDMDFKVAGTKDGITSLQMDIKITGITFEIMEQALKQAKDGRIHILGEMNKALTKSRDDVGKHTPKMEKISVDKKDIATVIGKGGAT

SEQ ID NO: 136293 - protein, 440 aa, Unknown
  Bacterial polypetide isolated from the Sargasso Sea
RNRQNRKTSRWSDNSNVWRNSCFSNCCGAKKINPDIDYFPLSVNYQEKYYAAGKIPGGYFKREARPTESETLISRLIDRPIRPLFPDEFKNEVQLLPTVISYDKENEADILSIIASSAALAISGMPFMGPVGASRVGFIDGNYVLNPSKKELENSKLDLVVAGTKDAVLMVESETSGLTEEEMLNAVKFGHENFIPVIEMIEELAAECKKPDWIVEKKDVSEVKKKLEDEFTDELKKAFSIKDKQERSNLISEITDKAKKLFEENENFTDLDVNSELKNLEKRIVRTDILKNKKRIDGRGLSDVRPIMCEVGILPRTHGSALFTRGETQAIVTTTLGTSDDEQRIESLEGLQRERFMLHYNFPPFSVGETGRIGTGRREIGHGKLAWRAINSSLPPKEGFPYTFRIVSEITESNGSSSMATVCGTSLALMDAGVPIKEPV

SEQ ID NO: 136294 - protein, 702 aa, Unknown
  Bacterial polypetide isolated from the Sargasso Sea
MGHVNPIVKSFEYGQHTVTLETGVIARQADAAVLASMGDTTVLVTVVGKKEAEAGRDFFPLTVNYQEKSYAAGKIPGGFFKREGRPSEDETLIARLIDRPIRPLFPNGFTNEVQVIITVVSVDPQIEPDIISMIGTSAALAISGIPFSGPLGAARVGYINGEYVLNPTVTQLESSQLNLVVAGTESAVLMVESEAQALPEEVMLGSVVYGHDQQQVVIKAIAEFKAEAGKPAWNWTAPVQDETLVAQIKALAEAGLGDAYKIQVKQDRYAQVAVVKAATKEALLASNPNIDLREVDGLLGSLEKKVVRGRIIRGEPRIDGREPDMIRALSVLAGVLPRTHGSALFTRGETQALVTCTLGTERDAQKIDSIMGERTSRFMLHYNFPPYSVGETGMVGSPKRREIGHGKLAWRGINAVMPSAEEFPYSVRVVSEITESNGSSSMASVCGTSLALMDAGVPIKTSVAGIAMGLVKEGDDFVVLSDILGDEDHLGDMDFKVAGTRDGVTALQMDIKIEGITKEIMEIALQQAYGARVHILNVMDQAIGSHRDDISDHAPRITTIKINPEKIRDVIGKGGAVIRALTEETGTTIELEDDGTVRIASSNGEATKEAIRRIEEITSEVEVGRIYNGKVIRIVDFGAFVNILPGKDGLVHISQISDERVANVSDHLELNQEVTVKVMEVDRQGRVRLSIKEAQTKESAAE

SEQ ID NO: 136295 - protein, 439 aa, Unknown
  Bacterial polypetide isolated from the Sargasso Sea
MFKVYKKEIEVAGKKIILETGKVARQADGAIIATCGETVVLATVVGAKKVNPDMDYFPLSVNYQEKYYAAGKIPGGYFKREARPTESETLISRLIDRPIRPLFPDEFKNEVQLLPTVISYDKENEPDILSITASSAALAISGMPFMGPVGASRVGLVDGKYVLNPSKAELEKSKLDLVVAGTKDAVLMVESEANGLTEEEMLNAVKFGHEGFVPVIEMIEELAKECRKPEWIVEKKDLSEVKKKLEETFTEDLKKAFATRDKQDRSNQISEITDKAKKLYEEDENYTDLDVNSQLKNLEKSIVRTNILKNKNRIDGRGLSDVRPIECEVGVLPRAHGSALFTRGETQAIVVATLGTSDDEQRIESLDGLQRERFMLHYNFPPFSVGETGRIGTGRREIGHGKLAWRAINSSLPTKEAFPYTFRIVSEITESNGSSSMAT

SEQ ID NO: 136296 - protein, 458 aa, Unknown
  Bacterial polypetide isolated from the Sargasso Sea
MFKIVKKEIEVAGKKVSLETGKIARQADGAIIAKCGETVVLATAVGAKKINPEVDYFPLSVNYQEKYYAAGKIPGGYFKREARPTESETLISRLIDRPIRPLFPDEFKNEVQVLPTVISYDKENEADILSIIASSAALAISGMPFMGPVGASRVGFIEGKYILNPSKADLKNSKLDLVVAGTKDAVLMVESEARGLTEEEMLKAVKFGHEGFVPVIKMIEDLAKECKKPDWIVESKDLSEVKKKIEKEFTTDLTKAFATRDKQDRSSQISEITDKAIKLFEDNENYTDLDVNYELKNLEKRIVRTDILKKKNRIDGRGLADVRPIMCEVGILPRTHGSALFTRGETQAIVTATLGTSDDEQRIESLDGLQKERFMLHYNFPPFSVGETGRIGTGRREIGHGKLAWRAINSSLPTKESFPYTFRIVSEITESNGSSSMATVCGTSLALMDAGVPLKSLL

SEQ ID NO: 136297 - protein, 690 aa, Unknown
  Bacterial polypetide isolated from the Sargasso Sea
MFKIYKKEVEVDGKKITLETGKIARQADGSIIAQCGETVVMATVVGAKKVNPEVDYFPLSVNYQEKYYAAGKIPGGYFKREARPTESETLISRLIDRPIRPLFPDEFRNEVQLLPTVISYDKENEPDVLSIIASSAALAVSGMPFMGPVGASRVGFIDGKYVLNPTKKELENSKLDLVVAGTKDAVLMVESEANGLTEEEMLNAVKFGHENFVPIINMIEELAKECKKPDWVIEKRDLSEIKKKLEKEFKTDLIKAFSIRDKKERSNLISEITDKAKKIYEENENYTDLDVNYELKNLEKRIVRNDILKNKKRIDGRGLADVRQIMCEVGILPRTHGSALFTRGETQAIVTTTLGTSDDEQRIESLEGLQRQRFMLHYNFPPFSVGETGRIGTGRREIGHGKLAWRAINSSLPSKESFPYTFRIVSEITESNGSSSMATVCGTSLALMDAGVPIKEPVAGIAMGLIKEGDDFSVLSDILGDEDHLGDMDFKVAGTKDGITSLQMDIKITGITFEIMEQALKQAKDGRIHILGEMNKALGKSRDGVGKHTPKMEKITVDKKDIATVIGKGGATIREIVEKSGAKVDVNDEGVVTVAAPDEDSRNKAMQFIKDLTAKAEMNKIYNGKVIKIMEFGAFVNFLGKQDGLVHISELANKRVAKVTDVVKEGDQVKVKVIGFDRGKVKLSIKQAVA

SEQ ID NO: 136298 - protein, 557 aa, Unknown
  Bacterial polypetide isolated from the Sargasso Sea
AASSALTLSGIPFMGPIGGCRVGYDGKDYILNPKINEETQLDLVVSGTQDAVLMVESEAKELSEEIMLDAVKFGHESMQEVIKIIINLAEECAKDPWDFEHNVNDELMNELKSEFEDQIKKSYSIIDKMERQSSLSEIKSVLEEKYADIEDQNINEVMSYFKKIEKDVVRSQILNDKSRIDGRKLDEVRDISSEVSWLPRTHGSSLFTRGETQAIVVATLGFGEDEQRIEALQGSYKENFMLHYNFPPYSVGEVGRMGSAGRREIGHGKLAWRALKAVLPNKEDFDYTIRLVSDITESNGSSSMATVCGSSLALMDAGVPIKNSVSGIAMGLIKEGDDFAVLSDILGDEDHLGDMDFKVAGTKDGVTSLQMDIKITGITYEIMEKALDQAKGGREYILNEMNKALDSPRTELGPYTPRVEMMKVKRDNIGEIIGKGGATIKDIIEKSGARIDISDSGNVKIAGTNNESIQAAIELINSIIEEPEVGQVYEGKVVKIMEFGAFVNFFGKRDGLVHISQLSEERVEKVTDVVSEGDIVKVKVIGFDKGKVKLSIKDAEI

SEQ ID NO: 136299 - protein, 411 aa, Unknown
  Bacterial polypetide isolated from the Sargasso Sea
KPDLDFFPLTVSYQEKFYAAGKIPGGFFKREGRPTEFETLTSRLIDRPIRPLFPEGFKNETQVILTVLSHDGETNPDIVAMIAASSALTLSGVPFMGPIGGCRVGYDGSNYTLNPKINDDGDLDLVVAGTSDAVLMVESEAKQLSEEIMLGAVKFGHESMQEVIKIIINLAEECANDPWEFSHTINESLLDEIKKTCEDKIAKSYSIVDKMERQSSLSEIKSSLEDQYKENEEYSINEVMGYFKKIEKNVVRSQILNNQSRIDGRKLDEVRNISSEVSWLPRTHGSALFTRGETQAIVVATLGFGEDEQRIEALQGSYKENFMLHYNFPPYSVGEVGRLGATGRREIGHGKLAWRALKAVLPSKDDFDYTIRLVSDITESNGSSSMATVCGSSLALMDAGVPIKNSVSGNS

SEQ ID NO: 136300 - protein, 229 aa, Unknown
  Bacterial polypetide isolated from the Sargasso Sea
MKIKTALILCAGLGTRLNPLTLKTPKPLLELKNITMLERCIKMVIELGIRKILLNTYHLENQIIKFINIKKFPIEIQIIEDGQKILDTGGGILNMIEQSNENDFIIFNPDTLWSKGYIVEINKMQDLYFSKNLNNILLLTKKENSFDKNLKGDFNLINNSINKDDLNDFIYIGCQILSKNLFKKFEISNFSITKIWNRLLEKNKLNGFQSYNKFYHLTNLETFKKLKDF

SEQ ID NO: 136301 - protein, 226 aa, Unknown
  Bacterial polypetide isolated from the Sargasso Sea
MIKKAVIPVAGFGTRFLPASKATPKEMLPIIDKPLVQYAVEEAIDSGINEIIFITSPEKHSIKKHFKTNKDLELRLQNTNKEEMIEKLNPKKFSKTKFYYINQYEQNGLGHAVLQAESVIGNNSFAVLLPDDLFISKKSCLDQLIDIFVEKKSCVIAVNKIDENNIHKYGVIKPGQQSQGSIKIDDIVEKPTAEDAPSDMAVCGRYILNPAIFKHLKLTKSDKSGE

SEQ ID NO: 136302 - protein, 237 aa, Unknown
  Bacterial polypetide isolated from the Sargasso Sea
MTAAGETKVFLRGGDGGRGNARFKSSTNQAPRRYDPGWPGEELWVWLRLKLIAEAGLVGLPNAGKSTFLSAVTRAHPKIGDYPFTTLHPNLGVVRRGNDEFVLADIPGIIEGASQGAGLGTRFLGHVERCRVLLHLIDATGDDPVHSYETVRKEIEAYGGGLSDKLEIIALNKCDAIDDEEAKWLANELKAATGRDVMHLSAVAGAGVDDVIRRLFYVIGMVMEAKAEDEPWEAHPL

SEQ ID NO: 136303 - protein, 270 aa, Unknown
  Bacterial polypetide isolated from the Sargasso Sea
MCGFVGYINRNLDQIDPFMIKKMMQLQQHRGPDDSGLALFSSKEKFSLTYNQNDLEKLNIKDDISKLNGGLGFNRLSVIDITKNGHQPMANEDKTVYISFNGEIYNAFQLKNELIDSNYNFKSKTDTEIILVLYEKYGLEFTLKKLNGMFAICILDLNKNQIFLARDRFGIKPLYYIFNEDFFSFSSEIKSFLAINNFKFKLNKKHISEYFIFKYLAPPNTLISEINLMLPGELIVFEKNKIKKEIYFDFQNYNEKIDTKDNKLETLKEK

SEQ ID NO: 136304 - protein, 253 aa, Unknown
  Bacterial polypetide isolated from the Sargasso Sea
MINKVVIPAAGLGTRFRPATQFIPKELIPVLNVPALTHTANEAIQSGIREIIIINSKTKPLLSEWISRFNTEHQSEGVSAIELTQEFPLGLGHAILQAKQAVGMEAFGIMLPDDIIFSKPPALKRMIELHYQLRGSILCVKENPINLIKNYGVIEPHGNKVAGIIEKPDPHDAPSQFCALGRYILEPEIFNYLEKAKPSVNNEIQLTDSLNAMMGDQDFFHYIVEGHHFDIGTPPGLISASIFASQNPNLIIG

SEQ ID NO: 136305 - protein, 221 aa, Unknown
  Bacterial polypetide isolated from the Sargasso Sea
MKVSAIIPAAGLGNRFGEAKQFKLLAGTPLFIHSIKAFLNSSKIHEIVVVVPKDKKDSIHKAIMSISGDKKITITPGGERRQDSVKNGVLVSDITSDLICIHDAARPFITETLIDDSINSCESFDGAVIAIPSVDTVKYSENNIIMKTIDRNSIWLAQTPQVFWRDKLLKAYDSIDDSIVITDEAAIMEKMGYKICLVPGDIKNNKITTFEDWKYAESRLK

SEQ ID NO: 136306 - protein, 286 aa, Unknown
  Bacterial polypetide isolated from the Sargasso Sea
MIKKAVIPVAGFGTRFLPASKATPKEMLPIIDKPLVQYAVEEAIDSGINEIIFITSPEKHSIKKHFKTNKDLELRLQNTNKEEMIEKLNPKKFSKTKFYYINQYEQNGLGDAVLQAESVIGNNSFAVLLPDDLFISKKSCLDQLIDIFVEKKSCVIAVNKIDENNIHKYGVIKPGQQSQGSIKIDDIVEKPTAEDAPSDMAVCGRYILNPAIFKHLKLTKSDKSGEIQLTDAIRSLLKEEGIYATIYNGEKFDCGSKEGYVHATISLALRDESINKKIKKIIQDIV

SEQ ID NO: 136307 - protein, 76 aa, Unknown
  Bacterial polypetide isolated from the Sargasso Sea
MKSNQNNKKISLILAAAGLGTRFSSEIPKQYYKIDNQTILEKTLNIFTNISAIKKIVIPLHKNDKEFKKLDLPDGS

SEQ ID NO: 136308 - protein, 296 aa, Unknown
  Bacterial polypetide isolated from the Sargasso Sea
MDKYMDSSNEIKTVIFPVAGLGSRFLPATKVVAKELLPILNKPLIDYAMTEAIKAGIEKFIFVTSPEKQSIINYFKKNIKLENELKDKNADYLKLINNKLILEDNLIEVIQDKPLGLGHAIWCAKDYISGPFAVILPDDLIVSELPCIKQLIDTHREYKCNVVAVQEVDENNIEKYGVIDYYKNISNAFYVKDMIEKPSKEIAPSNLAIIGRYVLQPSIMKELSNQELGFGGEIQLTDAIKNLINKENVIGYKFKGKRFDCGNVMGALEAQISIAMNDSKYKDQVKEIMNKNLSKD

SEQ ID NO: 136309 - protein, 87 aa, Unknown
  Bacterial polypetide isolated from the Sargasso Sea
MSVLKVVIPVAGLGTRMLPATKAIPKEMLPLVDKPLIQYVVNECIAAGVKQIVLVTHSSKNSIENHFDKSFELESMLEKRVKRQLLQ

SEQ ID NO: 136310 - protein, 254 aa, Unknown
  Bacterial polypetide isolated from the Sargasso Sea
MVKLKKAVIPVAGLGTRMLPATKAIPKEMLPVVDKPLIQYVVEEAAAAGITEIVLVTHSSKNSIENHFDTSFELENQLEKRVKRSLLDDVRSINPKNVTVISVRQPVALGLGHAVLCAAPVVGNEPFAVILPDVLIDKYHADARIHNLKAMIERFETTGASQIMVEPVPALEVNKYGIVDIAGETLVQGQSALIRTMVEKPEIEDAPSNLAITGRYVLSAKVWDLLRHTAPGAGGEIQLTDALHHLLLIEKIEA

SEQ ID NO: 136311 - protein, 83 aa, Unknown
  Bacterial polypetide isolated from the Sargasso Sea
MSNSKAIKKAVLPVAGLGTRFLPASKAIPKEMLPIVDTPLVEFAVREAVEAGIEEIIFITSHTKRPIEDHFKRNEELKTNFIA

SEQ ID NO: 136312 - protein, 141 aa, Unknown
  Bacterial polypetide isolated from the Sargasso Sea
MIKKAVLPVAGLGTRFLPASKATPKEMLPIIDKPLVQYAVEEAINVGINEIIFITSPEKNSIKNHFNKNEEIESRLIKSGKKDMVKKLNPEIFSDITFYYINQETQNGLGDAVLHAESIIKNEDFAVLLPDDLFFSKSILP

SEQ ID NO: 136313 - protein, 80 aa, Unknown
  Bacterial polypetide isolated from the Sargasso Sea
MKKSLNKVVIPVAGLGTRMLPATKAIPKEMLPILDKPIIQYVVEECILAGFKEIILITHSSKNSKENHFDTSFELESTWK

SEQ ID NO: 136314 - protein, 99 aa, Unknown
  Bacterial polypetide isolated from the Sargasso Sea
MQAPDNRKVTRAVIPVAGLGTRMLPATKAIPKEMLPVVDKPLIQYVIEEAAAAGITEVILVSHSSKNSIENHFDTSFELETQLEKRVKRSLLDEVRSIN

SEQ ID NO: 136315 - protein, 227 aa, Unknown
  Bacterial polypetide isolated from the Sargasso Sea
MSVKKAVFPVAGFGTRFLPATKATPKEMLPIVDKPIVQYAVEEAYEAGIREFIFITHHAKRAIEDHFDQNKELHEKLINDKKLELAKSIEKIGGTETKFTYIRQDEPKGLGHAIGCAQHVIQKGEHFAVILADDLMMVERKNVMQQMISVNEKYNKQVIGLEKIDGEDISKFGVVAVEKSEEKVNFLSDIVEKPNYNDAPSNLAVVGRYIFKDSIFKFIDNENPGKN

SEQ ID NO: 136316 - protein, 184 aa, Unknown
  Bacterial polypetide isolated from the Sargasso Sea
MNVKKAIFPVGGLGTRFLPATKSMPKEMLPIVDKPLIQYAVEEAANAGIEQFIFVTSRGKSAIENHFDHSFELENNLLAKGKRDTLASAQEMLKIPGSYAYVRQQEPAGLGHAIWCARHLIQNESFAVILADDLIFGQSTTKEMIKNYTSGNMVAIMEVDKQKVSSYGIVKVDKSDKDLMQINQ

SEQ ID NO: 136317 - protein, 70 aa, Unknown
  Bacterial polypetide isolated from the Sargasso Sea
MVKIAVLPVAGLGTRFLPASKAIPKEMLPIIDKPLIQYAVEEAINIGVDEIIFITSPEKYSIKKHFDKNI

SEQ ID NO: 136318 - protein, 93 aa, Unknown
  Bacterial polypetide isolated from the Sargasso Sea
MRGIKKAIFPVAGFGSRFLPATKSIPKEMLPIVDKPLIQYAVEEAVEAGITEIIFITGRNKRAIEDHFDKAFELETDLERRGKDDLLNRIQNS

SEQ ID NO: 136319 - protein, 301 aa, Unknown
  Bacterial polypetide isolated from the Sargasso Sea
MIPEASIKPVSSLPDYNSLKAEDPALLKSTVMVKLNGGLGTGMGLEKAKSLLDLKDGMTFLDFIASQVTEMRTRFGVPLAFMLMNSFATSADTLKYLAKYKDLKSDGLPLEFVQNKAPKVTESDLSPASWPSKPDCEWCPPGHGDLYPAMLGTDSLDSLLKKGFKYMFVSNSDNLGATMDLKLLTWFASSGKPFAMECAERTDADKKGGHLAQDAATGGLLLRESAQCPDEDEKEFQNVGKYKYFNTNNLWVNLEALKATIDKNNGVLPLPVIKNSKTADPRDKKSTKVLQLETAMGAAIA

SEQ ID NO: 136320 - protein, 96 aa, Unknown
  Bacterial polypetide isolated from the Sargasso Sea
MVLKDNRVKKAVFPVAGLGTRFLPATKASPKEMLNVVDKPLIQYAAEEAVSAGIDTLIFVTGRNKVSIPNHFDRAYELESELLQKNKNSELELVQN

SEQ ID NO: 136321 - protein, 49 aa, Unknown
  Bacterial polypetide isolated from the Sargasso Sea
MSSNPKKLKIAVFPVAGMGTRFLPATKASPKEMLPIVDKPLIQYAAEEA

SEQ ID NO: 136322 - protein, 119 aa, Unknown
  Bacterial polypetide isolated from the Sargasso Sea
MKVLKAVIPVAGLGTRMLPATKAIPKEMLPVVDKPLIQYVVSECIAAGIKQIVLVTHSSKNSIENHFDKSFELESMLEKRVKRQLLEEVQAICPKDVTIMHVRQNEAKGLGHAVLCALP

SEQ ID NO: 136323 - protein, 78 aa, Unknown
  Bacterial polypetide isolated from the Sargasso Sea
MKVKKAIFPVGGLGTRFLPATKSMPKEMLPIVDKPLIQYAVEEAANAGIEQFIFVTSRGKSAIENHFDHSFELENNLL

SEQ ID NO: 136324 - protein, 42 aa, Unknown
  Bacterial polypetide isolated from the Sargasso Sea
MIKKAVLPVAGLGTRFLPASKATPKEMLPIIDKPLVQYAVEE

SEQ ID NO: 136325 - protein, 228 aa, Unknown
  Bacterial polypetide isolated from the Sargasso Sea
MLIKKVVIPVAGLGTRFLPATKSTPKEMLPVVDKPLIQYAVEEASKAGIEEFIFITHHSKSSIKKHFEENNDLFKKLIEDGKEDLASTIKNIGGSGAKFTYIEQGEPKGLGHAISCAKDVIDEGEWFFVILPDDLFMTKGANVTEQMIDIAKSENRQVLALQKIENEEISKYGVISPESTDGKISTINGIVEKPDYVDAPSNLASIGRYLFNQTIFNHIDNDNPGKNG

SEQ ID NO: 136326 - protein, 38 aa, Unknown
  Bacterial polypetide isolated from the Sargasso Sea
MYNPSTMLIKKVVIPVAGLGTRFLPATKSTPKEMLPVV

SEQ ID NO: 136327 - protein, 242 aa, Unknown
  Bacterial polypetide isolated from the Sargasso Sea
MKSKVTKAIFPVAGLGTRFLPATKSIPKEILTLVDRPLIQYAIDEARAAGIEEFIFVTSRGKSALEDYFDNAPELESALAQKGKTEILDELQQTNMDSGAIAYVRQNQPLGLGHAVWCARRLVHDEAFAVILTDDVIAADKPCLQQMMEAYNETGGNYVAAMEVPADKTASYGVLDVAPGDGPRLQVNGMVEKPKPEDAPSNLAVIGRYILTPRIMWNLDARKAGAGGEIQLTDAIAQEIHG

SEQ ID NO: 136328 - protein, 72 aa, Unknown
  Bacterial polypetide isolated from the Sargasso Sea
MKIKKAIFPVGGLGTRFLPATKSMPKEMLPIVDKPLIQYAVEEAAMAGIDQFIFVTSRSKSAIENHFDHSFE

SEQ ID NO: 136329 - protein, 238 aa, Unknown
  Bacterial polypetide isolated from the Sargasso Sea
MSVKKAVFPVAGFGTRFLPATKATPKEMLPIVDKPIVQYAVEEAYEAGIREFIFITHHAKRAIEDHFDQNKELHEKLINDKKLELAKSIEKIGGSETKFTYIRQDEPKGLGHAIGCAQHIIQKGEHFAVILADDLMMVEGENVIQQMISVNEKYNKQVIGLEKIDGEDISKFGVVAVEKSEEKVNFLSDIVEKPNYNEAPSNLAVVGRYIFKDSIFKFIENENPGKNNEIQITDAIQK

SEQ ID NO: 136330 - protein, 273 aa, Unknown
  Bacterial polypetide isolated from the Sargasso Sea
MIRKCLFPVAGYGTRFLPATKAMPKEILPVVNKPLVQYGVEEAADAGIHEFGFVTGRGKRAIEDHFDISYELEHQIAGSGKEGLLTSIRDLIDNNTFAFTRQNEMKGLGHAILTGRNLVGDNPFAVVLADDFCVGPEDGDGVLTQMVKLYNQFRCSIVAIEEVPQDETHKYGVIAGESMKDGLYRITDMVEKPAPEDAPSNLAIIGRYILTPDIFDILERTPPGKNGEVQITDALLEQAKNGCVLAYQFKGQRFDCGSIDGFVEATNYVYENI

SEQ ID NO: 136331 - protein, 50 aa, Unknown
  Bacterial polypetide isolated from the Sargasso Sea
MKTVPAHSDTRRSKITKAVIPVAGLGTRMLPATKAIPKEMLPVLDKPLIQ

SEQ ID NO: 136332 - protein, 286 aa, Unknown
  Bacterial polypetide isolated from the Sargasso Sea
MIKKAVLPVAGLGTRFLPASKATPKEMLPIIDKPLVQYAVEEAVDIGIDEIVFIISEDKYSIERHFQKNTNIEKRLIENGKTEFIEKLNPKIFSNVKFHYVNQDEQNGLGHAVLLAEPIIAGDPFALLLPDELFFARESCLNQISEIFNKTNSSTIAVTKVDEKNIHKYGVIKPGKVENNAILLEDIVEKPLKEDAPSDIAVSGRYILTPTIFNHLKKIGPGKSGEIQITDAIKTLINEENVYAKIYEGEKFDCGSKLGFVHATIALALKDPSISENIKKIIKEIV

SEQ ID NO: 136333 - protein, 294 aa, Unknown
  Bacterial polypetide isolated from the Sargasso Sea
MLKVTKAVFPVAGLGTRFLPATKASPKEMLPVVDKPLIQYAVEEAIDAGITEMIFVTGRSKRAIEDHFDKSYEIEAELEARGKEKLLSLVRSIKPSHVDCFYVRQAEALGLGHAVLCAEKLVGDQPFAVILADDLLDGPTPVLRQMIDVFDHYHASVIGVEEIAPEASKSYGVIDGKRWEDNLFKLSGIVEKPEPAKAPSNFGVVGRYVLKPKVFEHLRALRPGAGGELQLTDAIQSLLTDEQVLAHRYDGTRFDCGSKLGYLKATVEFALRHPEVAADFESFLTARMSALQAA

SEQ ID NO: 136334 - protein, 286 aa, Unknown
  Bacterial polypetide isolated from the Sargasso Sea
MIKKAVLPAAGLGTRFLPASKATPKEMLPVIDKPLIQYAVEEAVSIGIKEIIFITSSEKYSIKKHFDKNIKLESKLKKIVNEDILQKVNPNKFADVQFHYVNQAEQNGLGHAILEAEDLINNEPFAVLLPDDLFFSEKSCLQQLLDVYMETKSSVIAVNKIDKDNIHKYGVIKPGTEDSQKILIDDIVEKPKSEEAPSDIAVCGRYIFNSSIFEHLKKVTFDNSGEIQLTDGIRNLLLSEDVFACLYNGEKFDCGSKKGFVHATISLALRDSSISEDIKQLIREII

SEQ ID NO: 136335 - protein, 93 aa, Unknown
  Bacterial polypetide isolated from the Sargasso Sea
MKHSISKAIFPIAGLGTRFLPATKSLPKEMLTILDRPVIEWAVIEAAKSGIKEMIFVTSSRKNIVLEHFEKSELLEMNLKKKKKIDKIDLIES

SEQ ID NO: 136336 - protein, 295 aa, Unknown
  Bacterial polypetide isolated from the Sargasso Sea
MLKVTKAVFPVAGLGTRFLPATKASPKEMLPVVDKPLIQYAVEEAINAGITEMIFVTGRSKRAIEDHFDKSYEIEAELEARGKEKLLELVRGIKPSHVNCFYVRQPEALGLGHAVLCAEKLVHGEPFAVILADDLLHGEQPVLKQLVDVFDHYHSSVIGVETIARDDSRSYGVVEGREWEEDIIKLSGIIEKPAPEDAPSNLGVVGRYVFMPTIFDHLRKLKPGAGGELQLTDAVQSLLANEQVLAYRYYGTRFDCGSKIGYLKATVELALQHPEVSREFEAYLRTCLPALAAVA

SEQ ID NO: 136337 - protein, 155 aa, Unknown
  Bacterial polypetide isolated from the Sargasso Sea
MVKLKKAVIPVAGLGTRMLPATKAIPKEMLPVVDKPLIQYVVEEAAAAGITEIVLVTHSSKNSIENHFDTSFELENQLEKRVKRSLLEDVRSINPKNVTVISVRQPVALGLGHAVLCAAPVVGNEPFAVILPDVLIDKYHADARIHNLKAMIQRF

SEQ ID NO: 136338 - protein, 110 aa, Unknown
  Bacterial polypetide isolated from the Sargasso Sea
MKNIPLVVRKAVLPVAGLGTRMLPATKAIPKEMLPVVDKPLIQYVVREAIAAGIKEIILVTHSSKNSIENHFDKSFELEATLEKRVKRQLLEEVQHICPKDVTIMHVRQG

SEQ ID NO: 136339 - protein, 295 aa, Unknown
  Bacterial polypetide isolated from the Sargasso Sea
MTVATTVRKAVFPVAGLGTRFLPATKASPKEMLPVVDKPLIQYAVEEAYAAGIRHMIFVTGRSKRAIEDHFDTAYELEAELEAAGKKELLELVRSIQPSDMDCAFVRQPRSLGLGHAVLCAEPLVGKEPFAVLLADDLMVGPQGGQPVLAQMATAFRQQGRSVIAVQEVPEDQVHKYGIVAGEPAGGPLIRIQRIVEKPKAAEAPSRMGVAGRYILTPGVFDEIRNQPRGVGGEIQLTDGIARLMNNEAVYAFQYEGKRYDCGSKEGFLEATVELALQHPQVGAHFRDYLKNLAL

SEQ ID NO: 136340 - protein, 289 aa, Unknown
  Bacterial polypetide isolated from the Sargasso Sea
MLIKKVVIPVAGLGTRFLPATKSTPKEMLPVVDKPLIQYAVEEASKAGIEEFIFITHHSKSSIKKHFEENNDLFKKLIEDGKEDLASTIKNIGGSGAKFTYIEQGEPKGLGHAISCAKDVIDEGEWFFVILPDDLFMTKGANVTEQMIDIAKSENRQVLALQKIENEEISKYGVISPESTDGKISTINGIVEKPDYVDAPSNLASIGRYLFNQTIFNHIDNDNPGKNGEVQITDAILSDIENFIGYEFDGLRFDCGSKSGYLKANIEFGLADEELNSELESFIEEKKNL

SEQ ID NO: 136341 - protein, 292 aa, Unknown
  Bacterial polypetide isolated from the Sargasso Sea
MPGTVRKAIFPVGGLGTRFLPATKSMPKEMLPVVDKPLIQYAVEEAANAGIEEFIFVTGRGKSAIEDHFDHAYELQALLETRGKKLPLKLVKASIPNPGQIAYIRQQEPLGLGHAVWCARNFVGSEPVAILLADDLIHAEPGCLKQMIDTYKIVGGNMLALAEVSSEDVSSYGIIEPEEEDGDNLVKVKGLVEKPNISDAPSNLAIIGRYILQPKIFETLNSFELGAGGEIQLTDAIARQIGDEPLYGFRFKGQRFDCGSQVGFLEANISLALDRPELKTSILDFLQKISRT

SEQ ID NO: 136342 - protein, 67 aa, Unknown
  Bacterial polypetide isolated from the Sargasso Sea
MIKKAVLPVAGLGTRFLPASKAIPKEMLPIIDKPLVQYAVEEAVNVGINEIVFITSPEKFSIKNHLK

SEQ ID NO: 136343 - protein, 132 aa, Unknown
  Bacterial polypetide isolated from the Sargasso Sea
MSVKKAVFPVAGFGTRFLPATKATPKEMLPIVDKPIVQYAVEEAYEAGIREFIFITHHAKRAIEDHFDQNKELHEKLINDKKLELAKSIEKIGGTETKFTYIRQDEPKGLGHAIGCAQHIIQKGEHFAVILA

SEQ ID NO: 136344 - protein, 286 aa, Unknown
  Bacterial polypetide isolated from the Sargasso Sea
MIKKAVLPAAGLGTRFLPASKATPKEMLPIIDKPLIQYAVEEAVNVGIDEIIFITSSEKYSIKKHFDNNVELEYKLKKIGKEEIIQKVNPNKFFDIQFHYVNQSEQNGLGHAILEAEDLINNEPFAVLLPDDLFFSEKSCLYQLLEIYIETKSSVIAVNKIDKENIHKYGVIKPGNDDLQKILIDDIVEKPKAEEAPSDIAVCGRYIFNPSIFEYLKKVTFDNSGEIQLTDGIKNMLESEDVFACLYNGEKFDCGSKKGFVHATISLALRDPSISEDIKQLIREII

SEQ ID NO: 136345 - protein, 256 aa, Unknown
  Bacterial polypetide isolated from the Sargasso Sea
MIKKAVLPVAGLGTRFLPASKATPKEMLPIIDKPLVQYAVEEAINAGINEIIFITSPEKNSIKKHFNKNEEIESKLIKSGKKDMVKKLNPEIFSDITFYYINQEMQNGLGDAVLHAESIIKNEDFAVLLPDDLFFSKRSCLSQLIDIYDNKKSSVIAVNKIDKENIHKYGVIKPGNISDKFINIQDIVEKPSFEDAPSDIAVCGRYILTSSIFNHLKCTDLDKNEEIQLTDAIRSLIKEEEVLACLYEGEKFDCGS

SEQ ID NO: 136346 - protein, 289 aa, Unknown
  Bacterial polypetide isolated from the Sargasso Sea
MLIKKVVIPVAGLGTRFLPATKSTPKEMLPVVDKPLIQYAVEEASKAGIEEFIFITHHSKSSIKKHFEEDNDLFNKLMEDGKEDLASTIKNIGGSGAKFTYIEQGEPKGLGHAISCAKDVIDEGEWFFVILPDDLFMTKGANVTEQMIDIAKSENRQVLALQKIENEEISKYGVISPESTDGKISTINGIVEKPDYVDAPSNLASIGRYLFNQTIFNHIDNDNPGKNGEVQITDAILSDIKNFIGYEFDGLRFDCGSKSGYLKANIEFGLADEELNSELESFIEEKKNL

SEQ ID NO: 136347 - protein, 109 aa, Unknown
  Bacterial polypetide isolated from the Sargasso Sea
MSVKKAVFPVAGFGTRFLPATKATPKEMLPIVDKPIVQYAVEEAYEAGIREFIFITHHAKRAIEDHFDQNKELHEKLINDKKLELAKSIEKIGGAETKFTYIRQDEPKG

SEQ ID NO: 136348 - protein, 196 aa, Unknown
  Bacterial polypetide isolated from the Sargasso Sea
MIKKAVLPAAGLGTRFLPASKATPKEMLPIIDKPLIQYAVEEAIDVGINEIVFITSSEKYSIKKHFDHNDDIQTQLLNTGKKDMIEKVNPSIFSGIKFHYINQVNQNGLGDAILHAKDVIGEDPFAVLLPDDLFFSKKSCLSQLIEIYEEKKSTVLAVNQISKSNIHKYGVIKPEDINSAPIKVEDIVEKPSADEA

SEQ ID NO: 136349 - protein, 294 aa, Unknown
  Bacterial polypetide isolated from the Sargasso Sea
MLKVTKAVFPVAGLGTRFLPATKASPKEMLPVVDKPLIQYAVEEAIAAGITEMIFVTGRSKRAIEDHFDKSYEVEAELEARGKEKLLELVRSIKPSHVDCFYVRQPEALGLGHAVLCAEKLVADNPFAVILADDLLDGNPPVMKQMVDVFDHYHSSVIGVEEIPPSETKSYGIVDGKEWEESIVKMSAIIEKPAPEVAPSNLGVVGRYILKPRIFEHLRALKPGAGGELQLTDAIQALLADEQVLAYKYQGTRYDCGSKLGYLKATVEFALRHAEVGAEFDAYLRARSGAHPAA

SEQ ID NO: 136350 - protein, 201 aa, Unknown
  Bacterial polypetide isolated from the Sargasso Sea
MKAVIPVAGLGTRMLPATKAIPKEMLPVVDRPLIQYVVNEAVAAGIKEIVLVTHSSKNSIENHFDTSFELEATLEKRVKRQLLAEVQAICPKDVTIIHVRQGEAKGLGHAINCAAPIIGNEPFVVILPDVIIDDVESDLKKDNLAEMIAHFEQTKHSQIMVEPVPMQEVDKFGVVDLGGTEIAQGESSPIVSMVEKHRLTR

SEQ ID NO: 136351 - protein, 238 aa, Unknown
  Bacterial polypetide isolated from the Sargasso Sea
MQIRKAVIPAAGLGTRFLPVTKSVPKELLPIIDRPLLQYVVAEAAEAGVEEIIIVTSPEKESFGDYFQAQPILERHLADSKEDILLAKVSEARNLANVTFVIQHEPLGLGHAVLMAKDMVGDEPFAVILPDDIIAHSPGAISQLVQVSKELNAGVIAVEALPWDVVHNYGVVDAKKNSDRIHKIQGLVEKPKKGTAPSNLSIVGRYILPPQIFQYLETIKPGAKGEIQLTDGLLSMLN

SEQ ID NO: 136352 - protein, 108 aa, Unknown
  Bacterial polypetide isolated from the Sargasso Sea
MKILKKVIFPVAGLGTRFLPATKAIPKEMLPIVDKPIIQYAVEEAIKAGVTDMIFVIGRTKNAIIDHFDSSPDLENELIKANKKNLLKLLKDVSKSNVNYYFVRQKSP

SEQ ID NO: 136353 - protein, 84 aa, Unknown
  Bacterial polypetide isolated from the Sargasso Sea
MKAVIPVAGLGTRMLPMTKAIPKEMLPIVDKPLIQYIVAECIAAGIKEIVLVTHSSKNAIENHFDTSYELEATLEKRVKRALLE

SEQ ID NO: 136354 - protein, 100 aa, Unknown
  Bacterial polypetide isolated from the Sargasso Sea
MKAVIPVAGLGTRMLPATKAIPKEMLPVVDRPLIQYVVNEAVAAGIKEIVLVTHSSKNSIENHFDTSFELEATLEKRVKRQLLAEVQAICPKDVTIIHVR

SEQ ID NO: 136355 - protein, 277 aa, Unknown
  Bacterial polypetide isolated from the Sargasso Sea
MKKISKAVFPVAGLGTRFLPATKAIPKEMLPIIDKPLIEYAVEEAVMAGIEEIIFITSHTKRSIENHFEKNEELEEKLLNSGNKDVIKKINRDIFQDVKFTYIRQEFQKGLGDAILQASHLIEDEYFAILLADDLIVNNPSATQQLINVAKETNTSVIGLNRVPEEHINRYGVISFADSSKNEKLFHLNGIIEKPKSNPPSDMVVFGRYVLSHHIFDYLEHLEPGFAGEIQLTDAIKLMLKDHNINGYLYDGIKFDCGSKEGYVQAIAHLASDMISK

SEQ ID NO: 136356 - protein, 293 aa, Unknown
  Bacterial polypetide isolated from the Sargasso Sea
MLKVTKAVFPVAGLGTRFLPATKASPKEMLPIVDKPLIQYAVEEAMAAGITEMIFVTGRSKRAIEDHFDKSYEIEAELEARGKAKLLELVRSIKPSHVDCFYVRQPEALGLGHAVMCAEKLVGDNPFAVILADDLLYGTPPVMTQMIEVFDHYHSSVIGVEEIPAAETKSYGIVDGKEWEDSIIKMSGIVEKPEPSVAPSNLGVVGRYVLKPRIFEHLRALKPGAGGELQLTDAIQSLLADEQVLAYKYHGTRFDCGSKLGYLKATVEFALRHPEVAADFEEYLRTRSPVLEG

SEQ ID NO: 136357 - protein, 302 aa, Unknown
  Bacterial polypetide isolated from the Sargasso Sea
MKQHQIRKAVIPVAGLGTRMLPATKAIPKEMLPVVDKPLIQYVVSEAIDAGIKEIVLVTHASKNSIENHFDTSFELEAQLERRVKRQLLEAVQSICPKDVTVISVRQSQAKGLGHAILCAKSVVGDAPFAVLLPDVIIDDASCNLKTDNLAAMVSLFDESQVGQIMVEGVPHHLVNQYGIADVNGHDLQPGESEPLVELVEKPPVDEAPSNLAVVGRYVLPAAIWPLLAKTPAGAGDEIQLTDAIAMLMKEETVNAYYMQGKSHDCGNKQGYMRANVEYALRHSEIGEDFAQYLKTVVKGIK

SEQ ID NO: 136358 - protein, 302 aa, Unknown
  Bacterial polypetide isolated from the Sargasso Sea
MKQHQIRKAVIPVAGLGTRMLPATKAIPKEMLPVVDKPLIQYVVSEAIAAGIKEIVLVTHASKNSIENHFDTSFELEAQLERRVKRQLLEAVQSICPKDVTVISVRQSQAKGLGHAILCAKSVVGDAPFAVLLPDVIIDDASCDLKTDNLAAMVSLFDETQVGQIMVEGVPHHLVNQYGIADVNGHDLQPGESEPLVELVEKPPVDEAPSNLAVVGRYVLPAAIWPLLAKTPAGAGDEIQLTDAIAMLMKQETVNAYYMQGKSHDCGNKQGYMRANVEYALRHSEIGEDFAHYLKTVVKGIK

SEQ ID NO: 136359 - protein, 276 aa, Unknown
  Bacterial polypetide isolated from the Sargasso Sea
MKLNKAILPVAGLGTRFLPATKSIPKEMLPIVDTPLVEFAVDEAVDAGIEEIIFITSHTKIAIQEHFRRNIELEQKLLDVKKDYQVERINLEKYKDIKFSFVNQEIQLGLGDAIYQAKSLIRSDEFFCVLLADDLFYSKVGVISQLVEKFKELGKSIIALNKVDSSETKKYGVIDPEKLENGIYKINDIIEKPQSDPPSNLAVTGRYILSGEIMSILKDTKAGFGGEIQLTDAIKHMISSEGVFGLEYDGKKFDCGSKEGFIDANIFFAKKQNLIS

SEQ ID NO: 136360 - protein, 76 aa, Unknown
  Bacterial polypetide isolated from the Sargasso Sea
MLIKKVVIPVAGLGTRFLPATKSIPKEMLPVVDKPLIQYAVEEASKAGIEEFIFITHHSKSSIKKHFEEDNDLFNK

SEQ ID NO: 136361 - protein, 291 aa, Unknown
  Bacterial polypetide isolated from the Sargasso Sea
MKKITKAVFPVAGLGTRFLPATKANPKEMLPIVDKPLIQYAVEEAITAGITELIFITGKTKKSITNHFDKAYELEIELEKQGKTKELEIVRNIIPDNVTCNYIKQSEPLGLGHAVLCAEHVVGDEPFVVILPDDLIDNDNDVATAQLIHQYNKMESSVVAVQNIAKEETLKYGVIEKASDSHDKTYKIKNIIEKPDPEKSPSTLGVVGRYALSPKIFKYLKETEKGTGNEIQLTDAIKALIKNESVYACEFEGVRYDCGSKFGYMHASVKYALKDKDINQDFFELIKLIIK

SEQ ID NO: 136362 - protein, 289 aa, Unknown
  Bacterial polypetide isolated from the Sargasso Sea
MLIKKVVIPVAGLGTRFLPATKSIPKEMLPVVDKPLIQYAVEEASKAGIEEFIFITHHSKSSIKKHFEEDNDLFNKLMEDSKEDLASTIKNIGGSGTKFTYIEQGEPKGLGHAISCAKDVIDEDEWFFVILPDDLFMTKGANVTEQMIDIAKSENKQVLALQKIENEEISKYGVISPESTDGKISTINGIVEKPDYVDAPSNLASIGRYLFNQTIFNHIDNDNPGKNGEVQITDAILSDIKNFIGYEFDGLRFDCGSKSGYLKANIKFGLADEELNSELESFIEEKKNL

SEQ ID NO: 136363 - protein, 297 aa, Unknown
  Bacterial polypetide isolated from the Sargasso Sea
MSQVKKAVIPVAGLGTRMLPATKAIPKEMLPVVDKPLIQYVVSECVAAGLKEIILVTHASKNSIENHFDTSFELEATLEKRVKRQLLEEVQSICPKDVTIMHIRQGVANGLGHAVLCARPLIGDAPFAVVLPDVIIDDAASNPKKDNLADMVAKFNTSRVSQVMVEQVPDEDISKFGIADLDGAAIAPGESAKIHKMVEKPPRDEAPSDLAVVGRYVLSEKIWDLLEFTPPGAGGEVQLTDAIDALMKLEQVDAYYMKGKSHDCGSKLGYMKANVEYALRHPSLGDEFKEYLASVVK

SEQ ID NO: 136364 - protein, 263 aa, Unknown
  Bacterial polypetide isolated from the Sargasso Sea
MVSKDNKVKKAVFPVAGLGTRFLPATKASPKEMLNVVDKPLIQYAAEEAVSAGIDTLIFVTGRNKVSIPNHFDRAYELESELLQKNKNSELELVQNILPSSVNCIYIRQKEALGLGHAVLCAEPAVGNDPFAVILADDLILSRQKSCICQMSDKFKQHEGSIISVQNVDKNNIHKYGVIDGEKINNSDWLLSKIVEKPKASEAPSNMGVVGRYIFNPLIFEYIRKTSKGSGGEIQLTDAIDLMLKKEKVYAYEFEGKRYDCGS

SEQ ID NO: 136365 - protein, 228 aa, Unknown
  Bacterial polypetide isolated from the Sargasso Sea
MTKITKAVFPVAGLGTRFLPATKAIPKEMLPIIDKPLIEYAVEEAVNSGITEIIFITSHTKRAIEDHFDQNFELEEKLINSGKKDFVDKINRDIFQNIKFTYVRQKSQKGLGDAILHSEHLIQDESFAIILADDLIINNPSCISQLISAYDENQCSIIGLNEVPEHETDKYGMVAIEEPSSPTNSFVLKDIVEKPKNNSPSNLAVVGRYVLSSKIFKYLKNLKPTVGW

SEQ ID NO: 136366 - protein, 161 aa, Unknown
  Bacterial polypetide isolated from the Sargasso Sea
MVEYILNLISEKSGALNVLTYLSSRTISSTLTGLLIVLLFGDKFIQIIKKFQFNQNFDGRAPESHKKKDGTPTMGGILIIGSVVLSGLIWGDLSNKYLLLGLACLVGFAIIGFIDDYKKIFSLDSTGLSSTTKIFYQAMVALVVSVILFASSTSPQELEYI

SEQ ID NO: 136367 - protein, 162 aa, Unknown
  Bacterial polypetide isolated from the Sargasso Sea
MAQQPMQLDAMQVSGAPLSEIEAAQEELKRVPGATNLVDMDKVEQGRVAGVADVLAYQPGVYAQSPGNEGVKISVRGSGINRGPGSHASGTHILLDGLPLTGSGGTPYELLEPLWISRAEVLRGANGFDRGSLALGGAIDYITHTGYTAPKLQLRYETGSYG

SEQ ID NO: 136368 - protein, 113 aa, Unknown
  Bacterial polypetide isolated from the Sargasso Sea
AATFGLLGAYDDYQKIKKNNSSGVSSKFKILIQILLALIGILILYIFSDSSELKNLYFPFFKNFIINLGWFFIPFYLFVIVGSSNAVNLTDGLDGLATVPVILVAACFAFISY

SEQ ID NO: 136369 - protein, 93 aa, Unknown
  Bacterial polypetide isolated from the Sargasso Sea
MPISYLVLVGISNSVNLTDGLDGLAAGCSGVIFYGLGTEILMKGQQELLVFSILCYSMSGICLGFLKYNSYPARIFMGDTGSLTIGAILSSIA

SEQ ID NO: 136370 - protein, 114 aa, Unknown
  Bacterial polypetide isolated from the Sargasso Sea
MFEYLGTVLVSVDPGFDVLRYLTVRTIGGTVTALLLSILMGPLIINSLKSMQFEQFVRKDGPESHFKKTGTPTMGGLLILSSLVISTLLWADLGNRYIWVVLGVTIGFSIIGFF

SEQ ID NO: 136371 - protein, 55 aa, Unknown
  Bacterial polypetide isolated from the Sargasso Sea
QVSFFKISKGKRLFLMAPLHHHYEKKGLSEQKIVIRFWILSFLFCLLALSLLKIR

SEQ ID NO: 136372 - protein, 159 aa, Unknown
  Bacterial polypetide isolated from the Sargasso Sea
MFKIIAQHFVEQYSFFNLFNFITFRVGASILTALFFSLIFGQYIINKISKIQPIGQPIRNDGPENHIIQKAGTPTMGGLLIILSVVISLILWSDLQNTFVWIGFLSLLVFGFIGFVDDYNKIKSHSSNGLKASTRIVLQIFFAFIISVIIINHLNDQFD

SEQ ID NO: 136373 - protein, 192 aa, Unknown
  Bacterial polypetide isolated from the Sargasso Sea
MLYQFLLNFVDTFGFLNVFKYITFRTGLSLFTSLAIVLIIGGPFIKYFSNQKILNPIRDDGPEEHIVKKIGTPTMGGVIILIGLLVSVLFWGDLTNINILFCIYIAISFGVLGAFDDFKKIKHSNSSGVSSKFKIISQIILAIIGVCFFVYYVDNQNITNLYFPFFKNLIINLGWFFIPFAVFVLIGSSQCS

SEQ ID NO: 136374 - protein, 119 aa, Unknown
  Bacterial polypetide isolated from the Sargasso Sea
MLYSLFSYLTDSYSFLNVFKYLTVRTGLSMFTSMIIVFFIGPIIIRYFSNKKIHNPIRSDGPTEHIIKKIGTPTMGGVMILIGIFSGTLLWGDLNSHYNWFLIFIVGSLGVLGAYDDYK

SEQ ID NO: 136375 - protein, 140 aa, Unknown
  Bacterial polypetide isolated from the Sargasso Sea
MLFHFFTSLIDQYSFFNVFKYLTFRTGLSVITSLVIVFIIGSPLIKIFSEKMITGPIRQDGPIDHIIKKSGTPTMGGVIIIIGIISSTLLWADLSNIYVWTLIFVSLSLGGLGFLDDMLKIKFKNSSGLKSKYKFSGQLI

SEQ ID NO: 136376 - protein, 208 aa, Unknown
  Bacterial polypetide isolated from the Sargasso Sea
MIGRIKKFNFKSLLILNTLALIATSYIFDNFIFIGVFTLFFFISIFATKNGLEIIRKLNLLQNIRTEGPSNHHKKSDTPTMGGVFLIIPFLIFLLIITINLGSLKLFLLLLTIFGFFITGFLDDYLSIKNKENTGLKPKEKFFLQSVISIIFILLAYEKNLINPLIMISDSWGINMNIFILPISFLVLVGISNSVNLTDGLDGLAAGC

SEQ ID NO: 136377 - protein, 41 aa, Unknown
  Bacterial polypetide isolated from the Sargasso Sea
LWLLFHHHFEKRGWKESTIVIRFWIIAVILALIGLSTLKLR

SEQ ID NO: 136378 - protein, 141 aa, Unknown
  Bacterial polypetide isolated from the Sargasso Sea
MLYEFLYPLSESIQILNVFKYITFRTGGAILTSLILSFIFGPLLIQTLKNFQKQGQPIRIDGPSDHIIKKKGTPTMGGILILFSSVGSTIIWMQLDNQFVWSILLIMIGFGAIGIIDDWMKISKNSSSGLNGKLKNCFTNI

SEQ ID NO: 136379 - protein, 109 aa, Unknown
  Bacterial polypetide isolated from the Sargasso Sea
MFKLLAQEYVSQYSFLNLFNFITFRVGASILTSLFFSLIFGQFIINKLSKIQPNGQPIRNDGPQTHIIKKAGTPTMGGVLIILSVFFSSVLWSDLQNYFVWIGLLSLIT

SEQ ID NO: 136380 - protein, 164 aa, Unknown
  Bacterial polypetide isolated from the Sargasso Sea
MLYSLLINLIDTFSFLNVFKYLTVRTGLAVFTSMFVVFLIGTPFINFFSARQILDPIREDGPSDHIVKKIGTPTMGGVLILLGLFSGIFLWGDLSNYFIWFLIFIVGGYGLLGAYDDYRKIKHKNSSGVSFKFKLIVQVLIAVIGIMFLTYFSDHSELEYLYFP

SEQ ID NO: 136381 - protein, 90 aa, Unknown
  Bacterial polypetide isolated from the Sargasso Sea
SIALLTNSVFILSIFSGIFIIESLSVMIQVGFFKITKKLLNTGKRIFLMAPLHHHFELKGIKEQKIVENFWKFNILLVILGIVLNDQHFK

SEQ ID NO: 136382 - protein, 93 aa, Unknown
  Bacterial polypetide isolated from the Sargasso Sea
MFEYLGTVLVSVDPGFDVLRYLTVRTIGGTITALVISILLGPVIINFLKSIQFEQYVREDGPKSHYKKTGTPTMGGLLILSSLIISTLLWADL

SEQ ID NO: 136383 - protein, 172 aa, Unknown
  Bacterial polypetide isolated from the Sargasso Sea
MFKYVAEQYVEQYSFLNLFNFITFRVGASILTSLFFSLIFGQYIINKISQIQPIGQPIRDDGPKTHIIKKAGTPTMGGVLIILSVIISISLWSDLKNIFVWIGLLTLFLFGFIGFIDDYNKIRSSSSNGIKAKTRIISQLIFAIFISILILNNIDDQIDTTIAFPFFKNLII

SEQ ID NO: 136384 - protein, 38 aa, Unknown
  Bacterial polypetide isolated from the Sargasso Sea
MAPLHHHFELGGWSERRVVVSFWGISLLLVALGLVLVP

SEQ ID NO: 136385 - protein, 42 aa, Unknown
  Bacterial polypetide isolated from the Sargasso Sea
FGWHHLHHHFEQKGWAESTIVIRFWIIAVILALVGISSLKLR

SEQ ID NO: 136386 - protein, 72 aa, Unknown
  Bacterial polypetide isolated from the Sargasso Sea
KITKKLFHRGKRIFLRAPLHHHFELKGVKEQKIVENPGKINILLVIGGIVLKINLGKIRDECFYMERKWINQ

SEQ ID NO: 136387 - protein, 213 aa, Unknown
  Bacterial polypetide isolated from the Sargasso Sea
ATFAISNAVNAIRGGTARVVLVVNPEFASPQVNYRSRDSHFIFGDVCTATIIEAEDTCSSDNAWRINGMRLKTEFSNNIRCDVGYTEHCLTPDPLVPFFKQQGRKVFKELLPIVADVILTEMAVQQVAPEQLKRLWLHQANINMNIFAAKKILGRDPLPQEAPLVLDSYANTASAGSVIAFHKYKQGLQSGDHAILCSFGAGYSVGCLVLQKC

SEQ ID NO: 136388 - protein, 312 aa, Unknown
  Bacterial polypetide isolated from the Sargasso Sea
LALGLTMGLGTGVTSSIARFIGKNDKSGADNCAEHAIAIALLISLLLSIVIIIFGKKILFFFGASGTILSLAWDYLQVMCIGLPFMVFSGFFRSILAGEGDMKFPMMVAGLGTVLNIILDPIFIFDLDNFGGIGFGLGIKGAAIATVISQCIVFSVFIYMLFVKEHAYITFRIKDFSPSRAITWDIIKVGLPASLSMIVMAVGQGVFNRILIYFSADTVAAYQVAGRIDMLVFLPIFSIAGALTTLVGMFYGSKKYEILRYTVKYGIISAFSITVIMSILLYVFAHNIVGFFTSEDTIINVAVTFLRLFAFV

SEQ ID NO: 136389 - protein, 173 aa, Unknown
  Bacterial polypetide isolated from the Sargasso Sea
MRIEKILNENEDIEGLISCAAVGYFGNLENFSIDQILSSINTNLLSHVILTKYLVPFFKKKNKGKLVYIGSESALDGGKKGSLYSAAKFGLRGFTQSIRAEVASRNITVTLINPGMVKTNFFNNLDFQPGLSKKNSIIVYDIAKIVISILQMDTNTSVDEVVMNPIIKSVIKK

SEQ ID NO: 136390 - protein, 173 aa, Unknown
  Bacterial polypetide isolated from the Sargasso Sea
FFLDGQNDLCILSFVVSGSTIGFLYYNFKPAKIFMGDSGSLTLGFILSVISLMGTFHTKSHVMFSLGIPLLLMLIPIFDTTLVTINRKYLNRPVSQGGKDHLSHRLIALGYSERKSLLLMFFISSLGGMIALGLKYLDLSISLLFIVLTLILFIGFGAVLSRVKVYSQKEYDS

SEQ ID NO: 136391 - protein, 306 aa, Unknown
  Bacterial polypetide isolated from the Sargasso Sea
NICIDLRAEGARELVFALVEQADILIENYRPDVMPRLGLGYDSLKEINPKLIMLSISGFGHDGPESHRPAYAPIIHAETGLMARQSKRGDIPYTDLPLSVADTNASLHGLVGLLSAVIHRDRIGVGQHIDIAMMDTVLVTDDQLHYDIESSEDSGPLRNDTWETGVGPILVSADFRWLWKNLVRHFESFRDSGTDNMELEQKIRTRREIVGRYMAKLETWGEVESVFATMNIAWGKVRDPRKMREQETVISRGSITEIDDRAGGVRPIPQSPYRFSNARSEVKGSAKHRGEDNFSVLSSGSVDLRG

SEQ ID NO: 136392 - protein, 61 aa, Unknown
  Bacterial polypetide isolated from the Sargasso Sea
MLLALAQWLQNDYGFLRVFNYLTFRAVMASLTALVIGLGFGPWVIRRLTELKVGQAVRSYG

SEQ ID NO: 136393 - protein, 111 aa, Unknown
  Bacterial polypetide isolated from the Sargasso Sea
MLYKFILDYVEIFSFLNVFKYLTVRTGLAMFTSFLVVFIVGTPFINFFSARQITDPIREDGPDDHIVKKIGTPTMGGVLILLGLFLSVLFWCDLSNPFIWTLIFFAGSLEF

SEQ ID NO: 136394 - protein, 246 aa, Unknown
  Bacterial polypetide isolated from the Sargasso Sea
MLYHLFEILESEFNLPGASLFGYLSFRAAVTVIMALLISIVFGKKIINYLKVKQVGENIRELGLQGEKKKAGTPTMGGIIIIIGTLVPVILMSNLENIYIQILIISSLILGTIGLIDDYIKVFKKDKKGLHGKFKIAGQSLLGIFVGIVLLTNNNITIVEFDKNLNSNNIELSQIEEIKSYKTTIPFFKNNELDYNEVSKAIFGDQSNYLWLTIIPIIILIIASVSNSNNLTDGLDGLSAGLSAII

SEQ ID NO: 136395 - protein, 160 aa, Unknown
  Bacterial polypetide isolated from the Sargasso Sea
MLYYLSLFFINDYSFLNVFKYLTFRSGGALLTSLTFSFILAPFIIEWLRNHQRNKKTIREDLPNKHLIKKRGTPTMGGLLILITFVFSTLLWTDVKNPYIWIVLSITFGFGAIGFIDDYLKLMSKERKGLRAGTKLIFQFLISSITLFFLYNLFEYQFIN

SEQ ID NO: 136396 - protein, 136 aa, Unknown
  Bacterial polypetide isolated from the Sargasso Sea
MFLYFSENLIEWFSPLNAFTYITTRGILAALTALIISFLFGPKIISVLQGKKIGETIRTDGPSSHSLKGGTPTMGGIMIILSIVVSVLIWSDLSNVYNLVLIASIISFGLIGFTDDFTKLKKKQKKACLQKTKFAF

SEQ ID NO: 136397 - protein, 99 aa, Unknown
  Bacterial polypetide isolated from the Sargasso Sea
TGSLTVGGLIAVISILIRKELLIPILCGVFLLEALSVIIQVSYFKLTKKKTGVGKRIFLMSPIHHHFQKAGYHESKIVSRLWIIGIFLAVITILTLKIR

SEQ ID NO: 136398 - protein, 175 aa, Unknown
  Bacterial polypetide isolated from the Sargasso Sea
MIGIIVSGGISFLVVIFSTLIGVNFFRARNIGQEIQEEVNFHDHKKGTPTMGGLFIVFGTIAGYSLSHINFWTIGEGFKVELTSMNLNVILIFVLAFLMAMVGFIDDYLKVKAGRNLGLKPTQKFALQFLIGCISAYYFIFLNYDSNFYFFSGLGFDIGIVKWLVIIFFIIGITN

SEQ ID NO: 136399 - protein, 162 aa, Unknown
  Bacterial polypetide isolated from the Sargasso Sea
MTDGLDGLLSGCSVLIFTGLAISILIENPSDNFTLAPLCIAMAGACMGFLFLNKYPAKLFMGDSGSLAIGASLGGIALISNHLWSLLIMGGILAAESISVIIQVSIFKISKRAKGKGHKLFLMTPLHHHFELKGNNESLIVSSFWLITLFLVVINLIFLIKS

SEQ ID NO: 136400 - protein, 168 aa, Unknown
  Bacterial polypetide isolated from the Sargasso Sea
MFLYFSENLIEWFSPLNAFTYITTRGILAALTALIISFLFGPKIITVLQGKKIGETIRTDGPSSHSLKGGTPTMGGIMIILSIVVSVLMWSDLSNVYNLVLIASIISFGLIGFIDDFTKLKKSKKGMSAKTKFALQLIVAASSTYYLLGQGSEVLSSEVLIPFTNNIR

SEQ ID NO: 136401 - protein, 265 aa, Unknown
  Bacterial polypetide isolated from the Sargasso Sea
MLAIPIFYLFGLYRSLIRYANYQSVITIIFAVTTYMATWYTLIYLLDLQVKPYDFLIINWLISIGLIGASRFLARWFLIINFTNYSNVLIYGAGSAGRQLESAMKYNPEINVIGFLDDDSRYHGKYIQGLKVFNPEKIRNLISKENINQILIAIPSLAKNDLRRIIDSLKDLPLVIRALPSLGEMVQGRVEVSDLKKIKIEDLLRRPIRKPDEDLLKKDIESKNILVTGAGGSIGSELCMQIIQLNPKLVVLYEVTEFALYQIEQ

SEQ ID NO: 136402 - protein, 37 aa, Unknown
  Bacterial polypetide isolated from the Sargasso Sea
IHHHYELKGIPESKIVIRFWIVGLLFALLTITTFKIR

SEQ ID NO: 136403 - protein, 146 aa, Unknown
  Bacterial polypetide isolated from the Sargasso Sea
MFEYLGSVLVSVDPGFDVLRYLTVRTIGGTITALIISILLGPLIINFLKSMQFEQYVREDGPKSHFKKTGTPTMGGLLILSSLVISTLLWADLGNRYIWVVLGVTVSFALIGFFDDYLKIKNKSSDGLSSKQKIIFQSVIALISML

SEQ ID NO: 136404 - protein, 120 aa, Unknown
  Bacterial polypetide isolated from the Sargasso Sea
MFLYFSENLIEWFSPLNAFTYITTRGILAALTALIISFLFGPKIITVLQGKKIGETIRTDGPSSHSLKGGTPTMGGIMIILSIVVSVLMWSDLSNVYNLVLIASIISFGLIGFIDDFTKL

SEQ ID NO: 136405 - protein, 283 aa, Unknown
  Bacterial polypetide isolated from the Sargasso Sea
SARHLAALADWMRLSMAEVWEVASFYDHFDLVREGETAPAACTVRVCTSLSCMIAGSEEMLEKLQETASDDVRFIAAPCIGACHKAPAAAIGHQLVEHADLETLSGVTKAGHAEIPSAARQFDDYCADGGYAVLRELLDGSRSADDVLATLDETALRGLGGAGFPTGRKWRIVGSQPGPRLMAVNGDEGEPGTFKDRLYLSTDPHRMIEGILIAAHVVDVETCFIYMRDEYPEIIVLLRQELDKVRAAGLADHVKLELRRGAGAYICGEESAMIESIEGKRAP

SEQ ID NO: 136406 - protein, 78 aa, Unknown
  Bacterial polypetide isolated from the Sargasso Sea
MGTILVSVDPGFDVLRYLTVRTIGGTVTALLLSILMGPVIINFLKSMQFEQFVRKDGPESHYKKTGTPTMGGLLILSS

SEQ ID NO: 136407 - protein, 135 aa, Unknown
  Bacterial polypetide isolated from the Sargasso Sea
VALISAIFISSISGFLIWNWPPAKIFMGDVGSSFIGFVLGVLALISMHNDTTTVWTWFILLGVFVVDFTWTLAVRVAKGESWYEGHSSHAYQIAGRRWGSHESVILAVLVINCTWLAPLGWLSFHFPNAALYICL

SEQ ID NO: 136408 - protein, 74 aa, Unknown
  Bacterial polypetide isolated from the Sargasso Sea
MLYQFLLNFVDSFGFLNVFRYITFRTGLSLFTSLIIVLLIGGPFINFFSNKKILNPIRHDGPENHIIKKIGTPT

SEQ ID NO: 136409 - protein, 77 aa, Unknown
  Bacterial polypetide isolated from the Sargasso Sea
MLFSLFSNLIEIFSFLNVFKYLTVRTGLSMFTSMIVVFLVGGPLINYFSSHQIHDPIREDGPSEHIVKKIGTPTMGG

SEQ ID NO: 136410 - protein, 31 aa, Unknown
  Bacterial polypetide isolated from the Sargasso Sea
KKGWPESTVVVRFWIVAIILAMIGLATLKFR

SEQ ID NO: 136411 - protein, 76 aa, Unknown
  Bacterial polypetide isolated from the Sargasso Sea
MIYYFLEPLKLAFSPLNVFQYITFRSAAAAILALFISFILGPVIIRKLRQNQIGEEIREHGPESHIKKRGTPTMGG

SEQ ID NO: 136412 - protein, 277 aa, Unknown
  Bacterial polypetide isolated from the Sargasso Sea
MQGSALHSGQLDALLSELYRDESSEFIQELSSQLLQSLQTSTKQGAQQPRWDASTAVLITYANTLQREGESGLATLKGILNRHFSALDAVVHVLPFLKASSDGGFAVASHSELEPGFGEWADLAELAAGRTVMADLVLNHVSASHPWVLQFLQRSEPGSRCILAPDPEAGWANVIRPRSTSLFTTLATDEGPRPVWSTFGPDQLDLDWSEPQVLQGFSELLGRLSRHGVSWLRLDAVGFVWKEAGTTCLHRPEAYTVVRILRQLLETVSSRGVVVTE

SEQ ID NO: 136413 - protein, 258 aa, Unknown
  Bacterial polypetide isolated from the Sargasso Sea
MFKFIAQEFVNQYSFLNLFNFITFRVGASILTSLFFSLIFGQFIINKLSRIQPKGQPIRQDGPENHIIQKAGTPTMGGVLIILSILISSVLWTDLQNSFVWIGLLTLISFGSIGILDDYKKIKTNSSNGLRAITRIIFQLILSLIVSLIILKILDDQIDTSIAFPFFKNLIINFGYFYLIISMFILVGSANAVNLTDGLDGLAIVPIMIVAMTFAFIAYVSGNIVFSDYLLINYISGTGELSVLCGAIIGSALGFLWL

SEQ ID NO: 136414 - protein, 331 aa, Unknown
  Bacterial polypetide isolated from the Sargasso Sea
MSLDQKITQYIWYSKSKLSYFVIFIFFPLSIIYYLLFLLKKIHSNEKSFQTKIVCIGNCSVGGDGKTSTVLSLINLYKSRNIKVAVLLKGYKGKIKVPTQVNIVNHSAVDVGDEALLYVEHARTFISNDRLKGINFIITQFSPDVILIDDGLQDFRIKKDKSILVINGERGFGNGFLLPVGPLRQSPSSAMKLADIIIIVGDDKGNSLNAYKSKFKNKLFLKAEITCEKNQIDKNYFAFSGIGNNPGFINTLDTNNYNLTKIRLFPDHYYYTDTDIKNIKKYATDNDLEIITTEKDWKRLNTKQRLGINFLRISLEFSNDEALSKFLMKND

SEQ ID NO: 136415 - protein, 479 aa, Unknown
  Bacterial polypetide isolated from the Sargasso Sea
GIHVQCSTQHPTEVQHLVAKILKKPFNFVNVETRRMGGAFGGKETQGAPWACLAALAVYHLGCAVKMRLARSDDFKLTGKRHPFYNQYHVGFDENGLIEGADVTVNGFCGYSPDLSDAIVDRAMFHADNAYYYPAATIKGNRCKVNTVSHTAFRGFGGPQGMIMGELIMDDIAAKLGKDPLEIRKLNLYKKGRDTTPYHQTVEQHILKDMITQLEESGDYWARKKAIKAFNASSPIIKKGLAMTPVKYGISFTVQHLNQAGALVHVYSDGSIHLNHGGTEMGQGLNTKIAQIVAHGFGVDFDAVSISATRTDKVPNTSPTAASSGTDLNGMAALNAVNTIKERLINFISEHFEVDSQSIVFKDNLITFSKGEISFSELANLAYMNRISLSSTGYYATPKIHYDRAKGEGRPFFYYAHGVALSEVEIDTLTGENTVTRVDILHDVGSSINPALDIGQIEGAFVQGMGWLTTEDLQWKIKA

SEQ ID NO: 136416 - protein, 259 aa, Unknown
  Bacterial polypetide isolated from the Sargasso Sea
MENKWAIILGCSTGHGAAIAKQLATEGYGIIGFHLDRGSIKKDAARLQEEIASLNNNRVKFWNENAADKEVMFSKMEEIKTILENGKVKLLMHSIAFGSTTNFFNPTPVRQRQMDMTQHVMAHCLIYWTQALLENNLLTSGSRILGLTSEGSYKAMEGYGPVGVAKASLEAVVRQIGWELGSQGITANTIQAGITPTRALTKISTDWEDWVERTKERNPMKRVTTPEDVAGLVSLLLNDKADFVNCSTIFCDGGEHRSL

SEQ ID NO: 136417 - protein, 85 aa, Unknown
  Bacterial polypetide isolated from the Sargasso Sea
MFYNFLLEFVEIFSFLNVFKYITFRTGLAVFTSLLIVLIIGGPFIKMVSEKKIVNPIRDDGPGDHIIKKIGTPTMGGLVILIGII

SEQ ID NO: 136418 - protein, 64 aa, Unknown
  Bacterial polypetide isolated from the Sargasso Sea
SVITQVSYFKMTKKKTGIGQRIFLMSPIHHHFQKKGFHESKIVSRFWIIGILLALLTILTLKIR

SEQ ID NO: 136419 - protein, 192 aa, Unknown
  Bacterial polypetide isolated from the Sargasso Sea
MLYQFLLNFVDTFGFLNVFKYITFRTGLSLFTSLAIVLIIGGPFIKYFSSQKILNPIRDDGPEEHIVKKIGTPTMGGVIILIGLLVSVFCWGDLTNINIIFCIYIAISFGVLGAFDDFKKIKHSNSSGVSSKFKIISQIILAIIGVYFFVYYVDNQNITNLYFPFFKNLIINLGWFFIPFAVFVLIGSSNAV

SEQ ID NO: 136420 - protein, 192 aa, Unknown
  Bacterial polypetide isolated from the Sargasso Sea
MLFSLFSYLTETYSFFNVFKYLTVRTGLSMFTSMVIVFLIGPLIIKFFSSKKIHNPIRSDGPTDHIIKKIGTPTMGGVMILIGIFSGTLLWGDLNNSYNWFLIFIVGSLGILGAYDDYKKIKSENSAGISFKFKIISQIIIALIGIFILTYYVNSPETKNLYFPFFKNLIINLGWFFIPFYIFIILLDHLMQ

SEQ ID NO: 136421 - protein, 216 aa, Unknown
  Bacterial polypetide isolated from the Sargasso Sea
MFYYLFEYLEKNYQLTGASLFQYLSFRSAITFILAIIISTIFGKKIIQFLKSKQIDENIRKLDLPGENEKEGTPTMGGIIIILSTLIPIFLFADFKNIYILILIITTIWLGAFGFADDYIKVFKKNKKGLKGRIKIFAQVILGLFIGLTVYFHPEITTRDSKLPSENKIQINVETKNDKNLKTTVPFFKDNELDYVEVFKMNSNNYNWIFYVNYSN

SEQ ID NO: 136422 - protein, 241 aa, Unknown
  Bacterial polypetide isolated from the Sargasso Sea
MIPLKDDNPTSSRPIVSYGIIGFCVLIFLAQIGLSENELRDFTYSYGLIPSVLMGIDQLPSDLNRISPIGTIFTSMFMHGGWMHLIGNMLYLWIFADNIEDDLGTLNFVIFYFVCGIGAAMSQVLIDVNSQIPMIGASGAIGGVLGAYLINYPNARVLVLIPFGFFSQLLKIRALYVLGFWFILQFINSFLSSSSVGGVAYAAHIGGFISGVILILFFNKSTKRNFKKTTKNIKKKGPWEQ

SEQ ID NO: 136423 - protein, 116 aa, Unknown
  Bacterial polypetide isolated from the Sargasso Sea
MLYWLTQLSDGGDFFNLFRYITFRAGGAFFTALLFGFLFGRPLINVLRKKQGKGQPIRDDGPSSHFEKAGTPTMGGLLILISLLFATCLWARLDNVFIWIVILVTLSFGMIGFADD

SEQ ID NO: 136424 - protein, 190 aa, Unknown
  Bacterial polypetide isolated from the Sargasso Sea
MIGIIVAGAISFICVILSTYIGVNYFKTRNIGQPIQKEVVFHDHKKGTPTMGGVFIIFGTYSGYILSHINFWTIGAGFKVEFIDINPVILISLSLGTLMACVGLIDDLLKVRKNRNLGLRARNKIFLQILVASITSFYFYYLDYSSTFYFFSGFGFEVGYLKWIIITFLIVGITNSVNLTDGLDGLVAGS

SEQ ID NO: 136425 - protein, 88 aa, Unknown
  Bacterial polypetide isolated from the Sargasso Sea
MFEYLGTVLTAVDPGFDVLRYLTVRTIGGTLTALVISILLGPAIINFLKSMQFEQFVREDGPKSHYKKTGTPTMGGLLILSSLTISTL

SEQ ID NO: 136426 - protein, 179 aa, Unknown
  Bacterial polypetide isolated from the Sargasso Sea
MLLPLFEYLSEFFGPFRVVEFLSTRAILATLTSLLFSLVLGPKFINKMKDIQVRQVIREEGPDSHLSKQGTPTMGGTLILSSIFLSVVLWGDLENRYLWVAFLTAISFGILGWIDDRSKIKHQSSDGLSPLNKIFWQSVITILACSYLYITQENISETSLIVPFFKDISIPLGTGFIVL

SEQ ID NO: 136427 - protein, 89 aa, Unknown
  Bacterial polypetide isolated from the Sargasso Sea
MILYILEYLNIPGLYNFFNYLTVRTGFALFTSFFFILLFGPALILKISSYQSIGQPIRDDGPESHIIAKKGTPTMGGIIILLSIVGSIL

SEQ ID NO: 136428 - protein, 297 aa, Unknown
  Bacterial polypetide isolated from the Sargasso Sea
MDLLIFQAPILMVQASLDGILLGILFALIAYGMALQWGVMNIINIAQGELVIMGGYVAYFMYMMGIHPGFGIIISPIIMYFVGWGLYKLVINKVVDRDLFISILATFGISILTQQLMNFIFGSDVVVAQSNFGTTMFFDGMVTLPNAKIFAAVVSVIFAIGLVMYMRKSKLGRAIRATAQNARAAKILGVDTEKVYAATFGINAALCGVAGSLIAITFTLHPYVGLPYTVRSFMIVIVAGLGNLPGVALSGMGLGVFEEFADYILGTEFRIGSVFLLLVLILVYRRFKLSKKREYLK

SEQ ID NO: 136429 - protein, 249 aa, Unknown
  Bacterial polypetide isolated from the Sargasso Sea
MLYQFLLNFVDTFNFLNVFKYLTFRTGLSFFTSFVIVLFIGGPFIKFFSSQKILNPIRDDGPEDHIVKKIGTPTMGGVIILFGLLVSVLFWADLSNINILFCIYIAISFGLLGAFDDYKKIKFSNSSGISSKFKIISQLILAIIGVSLFVYLNDYQDLNNLYFPFFKNLIVNLGWFFIPFAIFVIIGSSNAVNLTDGLDGLATVPVILVAACFAFISYVTGNIVFSNYLQIPYIEGTGEISIFCGAIIG

SEQ ID NO: 136430 - protein, 254 aa, Unknown
  Bacterial polypetide isolated from the Sargasso Sea
MFYWLTQLSDGGDFFNLFRYITFRAGGAFFTALLFGFLFGRPLINVLRKKQGKGQPIRDDGPATHFEKAGTPTMGGLLILISLLFATCLWARLDNVFIWIVVLVTLSFGLIGFADDYSKVAKQNTKGVPGRIRLLLGFIISAIAAYFAATNHPEALQYKLALPVFKDTLMHLGVLFIPFSMIVIVGAANAVNLTDGLDGLAIMPVMIAALALGVIAYAVGRVDFTNYLDVHYVPGTGELLIFCSALFGGGLGFL

SEQ ID NO: 136431 - protein, 109 aa, Unknown
  Bacterial polypetide isolated from the Sargasso Sea
RYPAKIFMGDTGSLSIGAILGSIALLTDSIFTLSIFSGIFIIESLSVMIQVGFFKITKKLFHRGKRIFLMAPLHHHFELQGVKEQKIVENFWKINTLLVILGIVLKINL

SEQ ID NO: 136432 - protein, 181 aa, Unknown
  Bacterial polypetide isolated from the Sargasso Sea
MLYHFLFPLADEYTIFNLFKYLTFRTGGAVLTALVISFVIGPSMIQWLKGQQASGQPIRNDGPETHLAKRGTPTMGGLMILVALIISTLLWADINNPYIWLVLGVTASFGLIGFVDDFLKLKTASSNGMSSRLKIVLQIIVAAIVAFLISSLGPPETKESLSVPFFKDIFIELGWFFLPFS

SEQ ID NO: 136433 - protein, 188 aa, Unknown
  Bacterial polypetide isolated from the Sargasso Sea
MLFSLFSNLIEIFSFLNVFKYLTVRTGLSMFTSMIVVFLVGGPLINYFSSHQIHDPIREDGPSEHIVKKIGTPTMGGLMILLGIFSGVLLWGDFSNPYNWFLLYIAGSFGLLGGYDDYQKIKKNNSNGISSKLKIIIQIILALGGILILYFYSGSNELENLYFPFFKNLIINLGWFFIPFYLFGYGGS

SEQ ID NO: 136434 - protein, 163 aa, Unknown
  Bacterial polypetide isolated from the Sargasso Sea
SYTFLNVFKYLTVRTGLAVFTSLLVVFLIGNPFINFFSIKQILDPIREDGPDQHIIKKIGTPTMGGVLILIGLFSGILLWGDLTNIYIWFLIYIVGGYGLLGAFDDYKKVKYKNSSGISLRFKLLSQILIALVGVLFLTYFSENQDLKNLYFPFFKNLILNLG

SEQ ID NO: 136435 - protein, 169 aa, Unknown
  Bacterial polypetide isolated from the Sargasso Sea
MLYNFLLEYVEIFSFLNVFRYITSRTGLAVFTSLIIVLMIGGPFIQMVSKKKIVDPIRDDGPGDHIIKKIGTPTMGGLVILIGIILSVLMWSDLSNIYILFSLYILISFGLLGALDDYKKIKNNDSSGVSFRFKLFSQVILSIIGVSFLTYYLEYQELTNLYFPFFKDL

SEQ ID NO: 136436 - protein, 162 aa, Unknown
  Bacterial polypetide isolated from the Sargasso Sea
MLYWLTALSDGGDFFNLFRYITFRAGGAFFTALIFGFVFGRPLINVLRRRQGKGQPIRDDGPEAHVAKSGTPTMGGLLVLSALVFSTVMWARLDNNYVIIVLFVTICFGGIGFIDDYLKVSRQNPKGVSSKIRLLSGFLIAAVAAYFIATNHPDALQNRLAL

SEQ ID NO: 136437 - protein, 216 aa, Unknown
  Bacterial polypetide isolated from the Sargasso Sea
MLFSLLTSFIEQYSFLNVFKYLTFRTGLALMTSLLIVFLIGGPLIRIFSRKDITGPIRQDGPIDHIVKKSGTPTMGGIIIIIGMLASTLFWADLSNIYIWTLIFISLSLGLLGFLDDLLKIKHKNSIGLNSKLKFMGQLIIGFITLLIIIIFSDHEFINNLYFPFFKNLIIDLGLFFIPFGLFVIIGSSNAVNLTDGLDGLATVPIMLVALSFTLI

SEQ ID NO: 136438 - protein, 170 aa, Unknown
  Bacterial polypetide isolated from the Sargasso Sea
MLYSLLASLVDTFSFLNVFKYITFRIGLSVVTSLIIIFMIGNPLISYFSKKQITGPIRQDGPIDHIIKKSGTPTMGGLMILIGIIVSTLLWADLKNIYIWIVLFVCTSLGLLGFIDDYLKIKFKNSSGINAKLKFFWQFIISLIAVISLVYFTDHETISNLYFPFFKKYY

SEQ ID NO: 136439 - protein, 98 aa, Unknown
  Bacterial polypetide isolated from the Sargasso Sea
MLYSLFSSLVEIFSFFNVFKYLTVRTGLSMFTSMIVVFLVGNPLIDYFSSKKMHDPIREDGPSEHIIKKIGTPTMGGLMILLGVFSGGVIVGRSIKSI

SEQ ID NO: 136440 - protein, 256 aa, Unknown
  Bacterial polypetide isolated from the Sargasso Sea
MLNELLLPLREYFGFLNLFEYITFRAGASAILALLISFIFGPFVVKKLIYLQIGESIRDHGPDSHKEKQGTPTMGGVLIILSTIIPTVLLADLNNLFIQIICISMVWMGLVGFYDDYLKVVKKRKDGLSGRYKLLAQTILGVFISYIIISSNVYGDYTLLTFVPFLKNVSINFFYPIIYAVFIILVVSATSNAVNLTDGLDGLAAGLLAISVSVFGVIAYISGRVDFTDYLYIEYLPLASELTIFATAFFGGCLGF

SEQ ID NO: 136441 - protein, 267 aa, Unknown
  Bacterial polypetide isolated from the Sargasso Sea
MFLYLAENFTNYFSALNIFNYITFRTGAAILTSLFFSLIFGQMIINYLSSLQPIGQPIRIDGPEDHIFKKSGTPTMGGVLIILSITVSFLLWANLNNTFVWISFLGCILFGAIGFFDDYKKINLNNSKGLKASTRIFFQISFGLLIVWLIYIQFPENINSTINFPFFKKLIIDFGIFFFVFGIFIIVGSANAVNLTDGLDGLAIVPVMIVALSFAFIAYVSGNIFFSNYLQITYIENSGELAVFCGSIVGAALGFLWFNAPPAKVFM

SEQ ID NO: 136442 - protein, 171 aa, Unknown
  Bacterial polypetide isolated from the Sargasso Sea
MLLWLTDYLSDFVRAFSVFQYLTLRSMVSAMTALLLSLIIGPIFIEKLSRQQIGQRVRLDGPESHLAKDGTPTMGGGLIIVVITIATLFWGDLSNRYIWLVLSVTCAFGLIGWLDDYLKIRRQNSDGLSARWKIFWQTIVAVFASSYLYTTADMPIQTDLIVPFFKEVALP

SEQ ID NO: 136443 - protein, 292 aa, Unknown
  Bacterial polypetide isolated from the Sargasso Sea
RAISYLSFRASVSVILSLGISIIYGKKIIQYLRKNQIGENIRSLGLKGEDKKKGTPTMGGLIIIISTLIPVILMSRLDNIYIQILIFTTIWMCIIGLVDDYIKVFRKNKKGLKAKFKLFGQYILGIIVGLIILFHPEITISESINENIQIEVSQESEVLEEVKSFKTTVPFFKDNELDYQEISNLIFNGNTGLIWIIFIPIIILIISSVSNSNNLTDGLDGLSAGLSAIIVFTLGIFAWTSGNIVFSDYLNIMYIPRVGEITIFISALFGALVGFLWYNTYPASFLWVILEV

SEQ ID NO: 136444 - protein, 234 aa, Unknown
  Bacterial polypetide isolated from the Sargasso Sea
MLYQFLLNFVDIFGFLNVFKYLTFRTGLSVFTSLLIVLIIGGPFIKFFSNQKILNPIRDDGPEDHIVKKIGTPTMGGVIILLGLLISVLFWGDLSNINILFCLYIAISFGLLGAFDDYKKIKQSNSSGISSKLKIVIQIILAIIGISLFVYFTDYQDVANLYFPFFKNLIINLGWFFIPFAVFVIVGSSNAVNLTDGLDGLATVPVILVAVCFAFISYVTGNVLFSDYLQIPYI

SEQ ID NO: 136445 - protein, 167 aa, Unknown
  Bacterial polypetide isolated from the Sargasso Sea
MFEYLGSALVSIDPGFDVLRYLTVRTIGGTVTALLISIFLGPIIINFLKSMQFEQYVRDDGPKSHLKKTGTPTMGGLIILSSLIISTLLWADLGNRYIWVVLFVTVGFSIIGFFDDYLKIKFKNPKGLSSIQKILFQSFIAFLAVTYLYYSAEIAPETSFIVPFFKD

SEQ ID NO: 136446 - protein, 28 aa, Unknown
  Bacterial polypetide isolated from the Sargasso Sea
WPESTVVIRFWIISIILAMVGLATLKLR

SEQ ID NO: 136447 - protein, 163 aa, Unknown
  Bacterial polypetide isolated from the Sargasso Sea
MLYSLFSSLVDFFSFFNVFKYLTVRTGLSMFTSMIVVFIVGSPLIKYFSSKQIHDPIREDGPSEHIIKKIGTPTMGGLMILLGVFSGVLLWGDLTNPYNWFLIYIAATFGLLGAYDDYKKIKKNNSNGVSSKFKILIQILLASIGIFILYFFSDSNELKNLYF

SEQ ID NO: 136448 - protein, 257 aa, Unknown
  Bacterial polypetide isolated from the Sargasso Sea
NFVDTFSFLNVFKYLTFRTGLSFFTSLVIVLIIGGPFIKFFSQQKILNPIRDDGPEDHIVKKIGTPTMGGLIILFGLLVSVIFWADLSNINILFCIYIAITFGLLGAYDDFKKIKYSNSSGISSKFKIISQIIIAIIGVSFFVYFNDYQDLNNLYFPFFKNLIINLGWFFIPFAIFVIIGSSNAVNLTDGLDGLATVPVILVAACFAFISYVTGNIVFSNYLQIPYIEGTGEVSIFCGAIIGSCLGFLWFNAPPAKI

SEQ ID NO: 136449 - protein, 178 aa, Unknown
  Bacterial polypetide isolated from the Sargasso Sea
MLYKIFLSFSTSISGLSVAKYITFRALMSLLTALLISFVFSPWFIKKLKNKQLGQTIREDGPQTHLSKKGTPTMGGGLIIFAVLTSSLLWVNYNNPLLWLVLFVVTAYTLLGLSDDYLKIMKKNSDGVSGRKKLLWQTTISIIACSYAYFYIKGTTIVTFPFLKDFSVDLGIWYILIC

SEQ ID NO: 136450 - protein, 232 aa, Unknown
  Bacterial polypetide isolated from the Sargasso Sea
MLYSFLTSLVDQFSFLNVFKYITFRTGLALMTSLVTVFLIGGPLIKIFSTMHITGPIRQDGPIDHIIKKSGTPTMGGIIIIIGMLLSTILWANLSNLFIWSLIFISFSLGLLGFIDDLLKIKYKNSIGLNSKLKFFGQLIIGLTALIFLIYFTDHEYINLIYFPFFKNLVIDLGLFYLIFGLFVITGSSNAVNLTDGLDGLATVPIMLVALSYTLISYIVGNAIFSEYLTNT

SEQ ID NO: 136451 - protein, 50 aa, Unknown
  Bacterial polypetide isolated from the Sargasso Sea
MIPYIKDSGEITIFIGALVGSGLGFLWFNSYPAQVFMGDVGALSLGAALP

SEQ ID NO: 136452 - protein, 118 aa, Unknown
  Bacterial polypetide isolated from the Sargasso Sea
MLYELLLPLKTYYSPLNLFQYITFRSASAAILALFISFLIGPWIIHKLRFHQIGEEIRSSGPESHLVKKGTPTMGGVIILGSVILPTLLFADLSNTFIQIILLSKIWMGVIGFLDDYQ

SEQ ID NO: 136453 - protein, 245 aa, Unknown
  Bacterial polypetide isolated from the Sargasso Sea
EKNIKSIQIVSNEVFSEEKKSTITTIPMVRGNEFDYVSLISWISPELEKYGWIIFIAVVVFIITAVSNGSNLTDGIDGLAAGTSVIIVMALGIFTWVSGNLIFSDYLNIMYIPRVGEVTVFIAAFIGSLIGFLWYNTFPASVFMGDTGSLTIGAIISVLCFITRKELLIPILCGVFFIETLSVLIQVGYFKYSKKKSGVGKRIFRMSPLHHHYQKMGFHESKIATRFWIITVLLAVISIVTLKIR

SEQ ID NO: 136454 - protein, 186 aa, Unknown
  Bacterial polypetide isolated from the Sargasso Sea
MLFSLFSNLVDIFSFFNVFKYLTVRTGLSTFTSMLVVFIVGNPLINYFSSRQLHNPIREDGPSEHIVKKIGTPTMGGLMILLGVFSGVLLWGDLSNPYNWFLIYIAGSFGLLGAYDDYKKIKKNHSSGLSSKLKFFIQLILALIGIFIIYFFTDSNEIKNLYFPFFKNLVINIGWFFIPFYLFIIV

SEQ ID NO: 136455 - protein, 72 aa, Unknown
  Bacterial polypetide isolated from the Sargasso Sea
ALFVIETVSVMCRVSVFKITGGKRVFKMAPLHHHFELKGWAEVTVVIRFWIICGLAVSAGLGIFYAEWVAGQ

SEQ ID NO: 136456 - protein, 119 aa, Unknown
  Bacterial polypetide isolated from the Sargasso Sea
MLFSLFSNLVEIFSFLNVFKYLTVRTGLSMFTSMIVVFLVGGPLINYFSSHQIHDPIREDGPSEHIVKKIGTPTMGGLMILLGIFSGVVLWGDFSNPYNWFLLYITGSFGLLGTYDDYQ

SEQ ID NO: 136457 - protein, 296 aa, Unknown
  Bacterial polypetide isolated from the Sargasso Sea
MGKIKKFNFESLFILNTFALIVTSYFFNNYIFIGVYILFFFISIFTTKNGLKIIKKFNLLQNIRDEGPANHFKKSDTPTMGGIFMIIPFLILLLIITINLGSLKIILLLLTIFGFFITGFLDDYLSIKKKENTGLKTKEKLILQSVISIIFILLAYEKNLISPLITISDSWGINMNIFILPVSFLVLVGISNSVNLTDGLDGLAAGCSGIVFYGLGTEILLKEQQELIVFSILCFSMSGICLGFLKYNSYPAKIFMGDTGSLSIGAILGSIALLTNSIFTLSIFSGIFIIESLSVM

SEQ ID NO: 136458 - protein, 93 aa, Unknown
  Bacterial polypetide isolated from the Sargasso Sea
TGSLSLGGALGAISVITKHELVLAIIGGLFVLETASVIVQVLSFKLTGKRIFRMAPLHHHFEKKGWAEPTVVIRFWIIAVVLALIGLSTLKLR

SEQ ID NO: 136459 - protein, 178 aa, Unknown
  Bacterial polypetide isolated from the Sargasso Sea
MIKYFAFEYQSLFSFLNIFSYITFRTGASILTGLFFSLIFGNYIINKLSNIQPIGQPIRDDGPESHIIAKKGTPTMGGLLIILSVFISTFIWADLQNIFIWILLLTILIFGSIGFADDYKKIKSSTSEGISSKIRIIFQIIFSFFITYLIIINLDPSISKSMTFPFFKNLIIDFGIFY

SEQ ID NO: 136460 - protein, 223 aa, Unknown
  Bacterial polypetide isolated from the Sargasso Sea
MFKIIAQHYVEQYSFLNLFNFITFRVGASILTALFFSLIFGQYIINKISNIQPIGQPIRNDGPENHIIQKAGTPTMGGLLIILSVVISLVLWSDLQNTFVWIGFLTLFVFGFIGFVDDYNKIKSNSSNGLKARTRIVLQIFFALMISILVINNLNDQINTTISFPFFKNLIVNFGYFYFIISLFIIVGSANAVNLTDGLDGLAIVPVMRVAMTFAFIAYVSGN

SEQ ID NO: 136461 - protein, 217 aa, Unknown
  Bacterial polypetide isolated from the Sargasso Sea
MLYQFLLNFVDTFSFLNVFKYLTFRTGLSFFTSLVIVLIIGGSFIKFFSKQKILNPIRDDGPEDHIVKKIGTPTMGGVIILFGLLISVIFWADLSNLNVLFCLYIAISFGLLGAFDDYKKIKYSNSSGISLKIKLTFQIILAIIGVSFYVYFNDYQDLTNLYFPFFKNLIINLGWFFIPFSIFVIIGSSNAVNLTDGLDGLATVPVILVAACFAFIS

SEQ ID NO: 136462 - protein, 238 aa, Unknown
  Bacterial polypetide isolated from the Sargasso Sea
MLYQFLLNFVDTFGFLNVFKYLTFRTGLSVFTSLLIVLIIGGPFIKFFSNQKIYNPIRDDGPEDHIIKKIGTPTMGGVIILLGLLVSVLCWADLSNINILFCIYIAISFGLLGAYDDYKKIKFTNSSGISSKLKIVLQIILAIIGVIFYLQFVDYQDVTNLYFPFFKDLIINLGWFFIPFSVFVIIGSSNAVNLTDGLDGLATVPVILVAACFAFISYVTGNIVFSDYLNIPYIEGTR

SEQ ID NO: 136463 - protein, 122 aa, Unknown
  Bacterial polypetide isolated from the Sargasso Sea
MLFSFFSNLVEIFSFFNVFKYLTVRTGLSMFTSMIVVFIVGNPLIKYFSSKQIHNPIRDDGPTEHIVKKIGTPTMGGLMILMGVFSGVLLWGDLSNPYNWFLIYIAGSFGLLGAYDDYKKIK

SEQ ID NO: 136464 - protein, 293 aa, Unknown
  Bacterial polypetide isolated from the Sargasso Sea
MIGIIVSGGISFLVVIFSTLIGVNFFRSRNIGQEIQEEVNFHDHKKGTPTMGGLFIVFGTIAGYSLSHINFWTIGEGFKVELTSMNINVILLFVIAFLMAMVGFIDDYLKVKAGRNLGLKPTQKFILQFLIGCISAYYFIFLNYDSNFYFFSGLGFDIGIFKWLVIIFFIIGITNSVNFTDGLDGLVAGSSAISFGGILIISFWIYRHPTYYSNFIGDDFLTVELSLLISAVAGACLGFLWWNTNPAKIIMGDVGSHFVGSLFPLILFALGADGLIFFFCFLFILEGVSVVYK

SEQ ID NO: 136465 - protein, 155 aa, Unknown
  Bacterial polypetide isolated from the Sargasso Sea
MAFEYQSLFSFLNIFSYITFRAGASILTGLFFSLIFGNYIINKLSNIQPTGQPIRNDGPESHIIAKKGTPTMGGLLIILSVFVSTIIWADLQNIFIWILLLTILIFGSIGFADDFKKIKSNTSDGISSKIRIIFQIIFSFFITYLILINLDQSIS

SEQ ID NO: 136466 - protein, 191 aa, Unknown
  Bacterial polypetide isolated from the Sargasso Sea
MFVYIAETYTNYFSFLNLFNYITFRTGGAILTSLFFSLIFGEVIIKYLSSLQPIGQPIREDGPVSHILQKSGTPTMGGILILTSILISFLLWSRLTNLYVWISLFACLSFGLVGFLDDYKKIYSKSSRGLKASTRIILQITISLVIIFLIHSQLPDNLRNTINIPFFKNLIFDFGIFFFIFAIIIIVGSAN

SEQ ID NO: 136467 - protein, 32 aa, Unknown
  Bacterial polypetide isolated from the Sargasso Sea
ELKGWPEPRVIVRFWIITFMLVLLGLALLRLR

SEQ ID NO: 136468 - protein, 72 aa, Unknown
  Bacterial polypetide isolated from the Sargasso Sea
VFFIMAGVFVAETVSVVLQVASFRLTGKRIFRMAPLHHHFELKGWAEPKVIVRFWIVTVLLVLVGLASLKLR

SEQ ID NO: 136469 - protein, 251 aa, Unknown
  Bacterial polypetide isolated from the Sargasso Sea
NNFWLPILSLPLSLIGFLDDLRGLNPILRYLTQALTCLVFILNSKIYESGIQSLTIFPQIFFILLLILVGTAIINFLNFMDGIDGILASCMVIIFGVLAIRSFPYLVPFIASIIGFLKFNWHPAKIFMGDVGSTFIGAVFVGCIFQISGNKNDLLMIFIATPLLFDSFICVIRRFFNGDNIFKPHKLHLYQRLNQAGFSHQKVSGIYLLTTIFLALFYLFGNLNMYIISIVSTLIFGIFLEKKYAFPFRNY

SEQ ID NO: 136470 - protein, 247 aa, Unknown
  Bacterial polypetide isolated from the Sargasso Sea
MLYSLFLNLIDNYSFLNVFKYLTVRTGLAMFTSMLVVFLVGTPFINFFSARKIHDPIRSDGPEDHIIKKIGTPTMGGLLILLGLFSGILLWGDLSSPYIWFLMFIVGSFGFIGAYDDYKKIKQKNSSGISLKIKLFLQIFLAFLGIYILMNFVDTPELKNLYFPFFKNLIINLGWFFIPFYIFIIVGSSNAVNLTDGLDGLATVPVILVAGCFAFISYVSGNIVFSEYLQIPYIEGTGEVTVFCGSI

SEQ ID NO: 136471 - protein, 195 aa, Unknown
  Bacterial polypetide isolated from the Sargasso Sea
MLYSLSTNFVEIFTFLNVFQYLTVRTGLAVFTSMFVVFIIGTPFINFFSTKQILDPIREDGPSEHIVKKIGTPTMGGVLILLGLISSILLWGDLSNYFIWFLIFIVSSFGILGAYDDYRKIKYKNSSGVSFTFKIVVQILIAVVGIVFLTYFSDHSKLEYLYFPFFKNLIINLGWFFIPFSVFIIVGSSNAVNLT

SEQ ID NO: 136472 - protein, 251 aa, Unknown
  Bacterial polypetide isolated from the Sargasso Sea
MLYSFLISLVDQFSALNVFRYLTFRTGLSVMSSMVIVFLIGGPFIKFIESHKFTGPIRDDGPLEHIIKKVGTPTMGGVLILIGILFGTLLWADLSNSYIWALLMVATSFGVLGAIDDYLKIKQKNSRGISSGKKIICQIILALIAIFLLMEYTDNDHLKNLYFPFFKYLTVHLGLFFIPFSIFIIVGSSNAVNLTDGLDGLATVPVMLVALSFTLICYVVGNTVFSEYLQIPYIANVGEASIFCGSIVGSC

SEQ ID NO: 136473 - protein, 267 aa, Unknown
  Bacterial polypetide isolated from the Sargasso Sea
MIVTVLTNLFDVENSRLLINRESMILPISVITGMLVLGVWDDFGTFVNRPMTGLTWRLKFASIGLVAGIVAYCMFFLLEAESVNIPWIGKYGLGYSYLAIAFVTVFTTTTAVSVTDGLDGLLGGTAAFAFGAYAVIAFIQGQVFLAIFCFTVSGALLGFLWYNAHPASVFMGDAGALPLGAALATVALMTGHWLILPIVGIVYVLEAGSALVQVIYFKVTGGKRIFLQTPFHHHLELLGWSEPQIVMRLYLLAIAGAMLGVALALKV

SEQ ID NO: 136474 - protein, 203 aa, Unknown
  Bacterial polypetide isolated from the Sargasso Sea
KNKSQTPSMGGLIIIASILISTLLWADIHNDNIWILIFVLITFGLVGFYDDYKKFKYSTSDGIKGKTKLLLQILFSGIVVFYIFQTSDHTVDLSLTIPFIKDYALFMGAFFIPWSIFVIVGSSNAVNLTDGLDGLAILPCILIAAAFVVFSYVQGNFNIANYLLIPYLPDVSETAIFASAVVGSGLGFLWYNSYPAQIFMGDV

SEQ ID NO: 136475 - protein, 210 aa, Unknown
  Bacterial polypetide isolated from the Sargasso Sea
MLYYLFDFLDREFDLIGAGVFQYISFRAGMAALVSLLITIIFGQNLIWMLQKKQVGETIRDLGLAGQLEKKGTPTMGGLIIIAGIVVPTLLFARLENIYIIILLITILFLGAIGFLDDYIKVFKKDKKGLAGKFKVFGQIGVGLIVGLMLYFNDNVVVREFEETPVNTEIEETRRYHDVKSTRTTIPFVKDNELDYSELNPTENDYITAA

SEQ ID NO: 136476 - protein, 40 aa, Unknown
  Bacterial polypetide isolated from the Sargasso Sea
MAPLHHHFPLKGWAEPKVIVRFWIITVFLVLIGLSSLKIR

SEQ ID NO: 136477 - protein, 220 aa, Unknown
  Bacterial polypetide isolated from the Sargasso Sea
MLYQFLLNFVDTFSFLNVFKYLTFRTGLSFFTSLVIVLIIGGPFIKYFSKQKILNPIRDDGPEDHIVKKIGTPTMGGLIILFGLLVSVIFWADLSNINILFCIYIAITFGLLGAYDDFKKIKYSNSSGISSKFKITSQIILAIIGVSFFVYLNDYQNLNNLYFPFFKNLIVNLGWFFIPFAIFVIIGSSNAVNLTDGLDGLATVPVILFAACFAFISYVT

SEQ ID NO: 136478 - protein, 308 aa, Unknown
  Bacterial polypetide isolated from the Sargasso Sea
SASLLIGVVLAASVATDKWIANAQLSLPLLISMTTAALVAAAGIPRLRALKMGQVIREEGPKAHLSKSGTPTMGGLLVVPVGVIIGGLISPEGEASQQLLAVAAVTLAYMAIGGFDDWRSLTRRTNTGLTPRGKLFLQMVAAVAFLSVAAWHGWIDSTISLPLGVTLPLGLLIWPLGLFVFLAESNATNLTDGLDGLASGCGALVFAGLAIQLMLRGHSGDPAMAGFCMAMAGAWLGFLMHNRNPARAFMGDTGSLAMGAALSAVALLTDSLWPLLVMGGVFLAESVSVIVQVWVFKATKGPDGQGRR

SEQ ID NO: 136479 - protein, 158 aa, Unknown
  Bacterial polypetide isolated from the Sargasso Sea
MLNNYFLSLKESITVFNLFEYITFRAALAAITALILSFIIGPFIIRKLKNNQIGEEIRNNGPMTHYVKRGTPTMGGVIIILAALLPTLMFSNLDNTMIRIVIISTIWMGVIGFIDDYLKVIKKIEKGMIARYKMIGQITLGILISYWIISSNDFMAFN

SEQ ID NO: 136480 - protein, 139 aa, Unknown
  Bacterial polypetide isolated from the Sargasso Sea
MNIMYIPNSGEMTVFISAFVGALIGFLWYNSYPASVFMGDTGSLTIGGIIAVLAISVRKEMLLPVLCAIFFAENLSVIIQVSYFKYTKKRFGEGRRVFLMSPLHHHYQKKGYHESKIVTRFWIVAIMLAIVSIVTLKLR

SEQ ID NO: 136481 - protein, 109 aa, Unknown
  Bacterial polypetide isolated from the Sargasso Sea
MIYYFSLFLLENYSFLNIFKYLTFRAGGAFITSIVISFIFGPYLINYFKQKQKLGQPIREDGPRWQIDAKRGTPTMGGTLILFALTISTICGWDFSIKIMAFIFNTLVS

SEQ ID NO: 136482 - protein, 90 aa, Unknown
  Bacterial polypetide isolated from the Sargasso Sea
MLYSFLTSLIETFSFLNVFKYITFRIGLSVVTSLIIIFLIGNPLINYFSKKQITGPIRQDGPIDHIIKKSGTPTMGGLMILIGIIVSTLL

SEQ ID NO: 136483 - protein, 187 aa, Unknown
  Bacterial polypetide isolated from the Sargasso Sea
LVVVFIIGGPLIKIFSENMISGPIRQDGPIDHIIKKSGTPTMGGVIIIIGMLTSTLLWADLTNIYIWTLIFVSLSLGLLGFTDDLLKIRLKNSRGLNSKLKFFGQLIIASIALLIIIKFSNHEYLYNLYFPFFKNLIWQMGLFFIPFGLFVIIGSSNAVNLTDGLDGLATVPVMLVALSFTLISYVV

SEQ ID NO: 136484 - protein, 251 aa, Unknown
  Bacterial polypetide isolated from the Sargasso Sea
MLYYLFEFLETQYNLPGASLFDYLSFRAAVSVIISLIISVVFGKRIIEYLRKRQIGENVRKLGLEGEEEKSGTPTMGGLIIIIATIIPVLLMSNLENIYIKILLISTIILGIIGFIDDYIKVFRKDKKGLKGKFKIAGQTILGIFVGIMLLTSNDVTIVESSSISDINSIENLQSNEIKSFKTTIPFFKNNELDYALISNAIFNNENMLWLILIPIIIFIVTAVSNSNNLTDGLDGLSAGSSAIIVFTLGS

SEQ ID NO: 136485 - protein, 95 aa, Unknown
  Bacterial polypetide isolated from the Sargasso Sea
DTGSQSLGASLAVTSILLKQEIVLAVAGGLFVIETLSVMLQVFYYKSTKGKRLFLMAPLHHHYEKKGLSEQKIVIRFWILSFLFCLLALSLLKIR

SEQ ID NO: 136486 - protein, 100 aa, Unknown
  Bacterial polypetide isolated from the Sargasso Sea
MLYELLLKYIETFSFLNVFKYITFRTGLAFFTSLMIALIIGGPFIRLFSNKQIFDPIREDGPTDHIIKKIGTPTMGGVIILIALIISVLFWADLTNIYIL

SEQ ID NO: 136487 - protein, 297 aa, Unknown
  Bacterial polypetide isolated from the Sargasso Sea
MIAIIVSGALSFLFVILSTSIGVNYFKSRNIGQPIQEEVVFHDHKKGTPTMGGVFIILGTYAGYVLSHINFWTIGQGFKIELISINPVILNLLLFGTLMASVGLIDDLLKVRKNRNLGLRARNKIFLQILVGSFISLYFYNLDYSSTFYFFSGFGFEVGFLKWILIVFLIVGITNSTNLTDGLDGLVAGSSSVSFGGILIIAFWIFRHPDYYINFMNNEMVGLELSTLISALAGSTLGFLWWNTNPAKIIMGDIGSHFIGAMFPIILISLGADGLIFFFCFLYIFEALSVILPVSSY

SEQ ID NO: 136488 - protein, 127 aa, Unknown
  Bacterial polypetide isolated from the Sargasso Sea
MLYWLTALSDGGDFFNLFRYITFRAGGAFFTALIFGFVFGRPLINVLRRRQGKGQPIRDDGPEAHAAKSGTPTMGGLLVLSALVFSTVMWARLDNNYIIIVLFVTICFGGIGFIDDYLKVSRQNPKG

SEQ ID NO: 136489 - protein, 218 aa, Unknown
  Bacterial polypetide isolated from the Sargasso Sea
MLYNLLISLIDNYSFLNVFKYLTFRTGLSVGTSLVIVFLIGGPLIKLFSKHQISGPIRQDGPIDHIITKTGTPTMGGLIIIIGMIGSTLLWADLNNIYVWTLIFVSLSLGLLGFADDMLKIKLNNSRGMSSKMKFLGQLLVGVVTLLILIYFSEHQHLNKLYFPFFKNLILDMGLLFIPFALFILIGSSNAVNLTDGLDGLATVPVMLVALSFTLISY

SEQ ID NO: 136490 - protein, 303 aa, Unknown
  Bacterial polypetide isolated from the Sargasso Sea
IKKFNFKSLFILNTFALIVTSYFFNNFYLIGVFTLFFFISLFTTKNGLEMIKKLNLLQNIKIGAPVNHYKKSDTPTMGGIFMIIPFLIFLLIITINLGSLKFFLLFLTILGFFFTGFLDDYLSIKNKENTGLKTIEKFILQSIISISFILLAYEKNLIDPLITISDSWEINMNIFIFPIAFLVLVGISNSVNLTDGLDGLAAGCSGIVFYGLGTEILMKEQQEFLVFSILCYAMSGLCLGFLKYNSYPAKIFMGDTGSLSIGAILGSIALLTNSVFTLSIFSGVFIIEALSVIIQVGFFKIQK

SEQ ID NO: 136491 - protein, 89 aa, Unknown
  Bacterial polypetide isolated from the Sargasso Sea
ALSAIALLSNSLWPLLLMGGLLLAESLSVILQVWVFKATKGADGQGRRLLRMAPLHHHFELSGWSERQVVVSFWGVSLLLVGLGLVLLP

SEQ ID NO: 136492 - protein, 256 aa, Unknown
  Bacterial polypetide isolated from the Sargasso Sea
MAYEYQSLFSFLNIFSYITFRAGASILTGLFFSLIFGNYIINKLSNIQPIGQPIRDDGPESHIIAKKGTPTMGGLLIILSVLISSIIWADLQNIFIWILLLTIIIFGSIGFADDYKKIKSNTSDGISSKIRILFQIIFSFLITYLILINLDPSISKSMTFPFFKNLIIDFGIFYFLISIFIIIGSANAVNLTDGLDGLAIVPVMIVAISFAFIAYISGNIVFSNYLLIQYIPGTGELSVFCGSLIGAALGFLWFKR

SEQ ID NO: 136493 - protein, 204 aa, Unknown
  Bacterial polypetide isolated from the Sargasso Sea
MIPLRDYFGFLNLFEYITFRAGASAILALLISFIFGPFVVRKLINLQIGESIRDHGPDSHKEKQGTPTMGGVIIILSTIIPTILLADLNNLFIQIICLSMVWMGLVGFYDDYLKVVKKSKDGLSGRYKLLAQTILGVFISYLLINSNVYGDYTLLTFVPFLKNVSINFFYPIIYAVFIILVVSATSNAVNLTDGLDGLAAGLLA

SEQ ID NO: 136494 - protein, 224 aa, Unknown
  Bacterial polypetide isolated from the Sargasso Sea
MLYILFSNLVDTFSFFNVFKYLTVRTGLSMFTAMIVVFIAGGPFIRYFSSKKIHNPIRDDGPDEHIIKKIGTPTMGGLLILFGVFSGVLLWGDLSNPYNWFLIYIAGTFGLLGAYDDYKKIKFNNSSGVSSKFKILIQIFLAIVGILILYYSGVSDEIENLYFPFLKNLVINLGWFFIPFYIFVLVGSSNAVNLTDGLDGLATVPVILVASCFALISYVSETWF

SEQ ID NO: 136495 - protein, 160 aa, Unknown
  Bacterial polypetide isolated from the Sargasso Sea
MLYSFLTSLVDTFTFLNVFKYITFRIGLSVITSLTIIFLIGNPLIKYFSKKQITGPIRQDGPIDHIVKKSGTPTMGGLMILIGIISSTLLWADLNNVYIWIVLFVCTSLGLLGFIDDYLKIKFKNSSGINAKLKFLGQFFVSLVTILVLIYFTDHETISN

SEQ ID NO: 136496 - protein, 264 aa, Unknown
  Bacterial polypetide isolated from the Sargasso Sea
MLFNLLTSFIEHYSFLNVFKYLTFRTGLSVVTSLIVVFIIGGPLIKIFSENMITGPIRQDGPIDHIIKKSGTPTMGGVIIIIGMLTSTLLWADLNNIYIWTLVFVSLSLALLGFSDDLLKIKYKNSRGLNPKLKFLGQLIISVVALFILIKFSDHEYLYNLYFPFFKNLIWQMGLFFIPFGLFVIIGSSNAVNLTDGLDGLATVPVMLVALSFTLISYVVGNTIFSEYLQLQYIPDVGELSIFCGSIVGSCLGFLWYNAPPAKI

SEQ ID NO: 136497 - protein, 58 aa, Unknown
  Bacterial polypetide isolated from the Sargasso Sea
LWFNAPPAKIFMGDTGSLALGGSLGGIGIITKHEIVLAITERTICFRGSFSNSTSNFL

SEQ ID NO: 136498 - protein, 157 aa, Unknown
  Bacterial polypetide isolated from the Sargasso Sea
DGLAAGCSGIVFYGLGTEILIKEQQELFVFSILCYSMSGICLGFLKYNGYPAKIFMGDTGSLSIGAILGSIALLTDSIFTLSIFSGVFIIESLSVMIQVGFFKITKKLFHRGKRIFLMAPLHHHFELQGVREEKIVENFWKINILLIILGIVLKISL

SEQ ID NO: 136499 - protein, 228 aa, Unknown
  Bacterial polypetide isolated from the Sargasso Sea
GQVSLGLLVGFILYFHPDVVMREQISTIDKSAQVVVVQKDLKSSMTTIPFVKDNEFDYSDLLSWLGDTAQDWAWLIFIPMVIFIVTAVSNGANLTDGIDGLATGTSAIIGLVLAIFAYVSGNIIFADYLNIMYIPNSGELVIFIAAFIGACVGFLWYNSYPAQVFMGDTGSLAIGGIIAVFAIAIRKELLIPIICGIFLIENLSVLIQVSYFKYTKKKFGEGKRIFLM

SEQ ID NO: 136500 - protein, 166 aa, Unknown
  Bacterial polypetide isolated from the Sargasso Sea
MLFSLFSNLVEIFSFLNVFKYLTVRTGLSMFTSMIVVFLVGGPLINYFSSKQIHDPIREDGPSDHIVKKIGTPTMGGLMILLGIFSGVLLWGDFSNPYNWFLLYIAGSFGLLGAYDDYQKIKKNNSNGITSKLKIVIQIILALGGIFMLYFYSGSNEIENLYFPIF

SEQ ID NO: 136501 - protein, 257 aa, Unknown
  Bacterial polypetide isolated from the Sargasso Sea
MLYYFLFPLADDFSLLNLFRYLSFRTGAAIITALIISFILGGPLIKWLKSQQGEGQPIREDGPEGHPLTKKGTPTMGGLLILIAVSAATILWADISNRYVWAVLIVTLGFGSIGFFDDYLKLTKRSSNGMSGKIKIIAEIAIAGAAAWWISDILPDPLATGLTIPFFKSLIIDLGWFFIPFATFVIVGASNAVNLTDGLDGLAIVPAMIVAGCLALITYIVGNQIFSLYLQVENVPGAGELTVFCGALVGASLGFLW

SEQ ID NO: 136502 - protein, 184 aa, Unknown
  Bacterial polypetide isolated from the Sargasso Sea
MVELIVSFLFDEISFFNLFSYLSTRTILSTLTSLLLVLIFGEGFIRLISSFQFNQTFDGRAPNRHMVKHGTPTMGGILIVSSVLISGILWGNLFDKYLILGLICIVGFAIIGFIDDYKKVKIESSKGLSSIEKIFFQSILAGIISISLFMLAESKNELIYIVPFFKNIALDLGIFFIFISIFII

SEQ ID NO: 136503 - protein, 232 aa, Unknown
  Bacterial polypetide isolated from the Sargasso Sea
ARNLIKRKTKTPSMGGIGILVGIGIGVMMFSLSLDVLWVFFAMVMFGCIGFYDDLKSFLKGRNQGLSAAQKFMLQACVSFVLLFLFSYLIRGLSFFEYVFYSFVMIGTSNATNLTDGLDGLLAGCSLITLLGFTFLFQLSGDLSAQILCNIVMFSVAAFFLFNRNPASIFMGDTGSLLLGAGFAAFAIVLNNVWVLLPLGAVYIIETLSVMIQVVYYKWTKKRVFLMAPLHH

SEQ ID NO: 136504 - protein, 149 aa, Unknown
  Bacterial polypetide isolated from the Sargasso Sea
MLFSLFSNLVEIFSFLNVFKYLTVRTGLSMFTSMIVVFLVGGPLINYFSSHQIHDPIREDGPSDHIVKKIGTPTMGGLMILLGIFSGVVLWGDFSNPYNWFLLYITGSFGLLGAYDDYQKIKKNNSNGISSKKKIIIQIILALCGVLIL

SEQ ID NO: 136505 - protein, 47 aa, Unknown
  Bacterial polypetide isolated from the Sargasso Sea
QGRRVFRMAPLHHHFELGGTSERTVVPCFWLATAGFVLLGLLLRPTI

SEQ ID NO: 136506 - protein, 279 aa, Unknown
  Bacterial polypetide isolated from the Sargasso Sea
TFRWRRLFHLFRYITFRAGGAFFTALLFGFIFGRPLINVLRKKQGKGQPIRDDGPSSHFEKAGTPTMGGLLILISLLFATCLWARLDNIFIWIVILVTLSFGMIGFADDYSKVSKQNTKGVPGRIRLLLGFIISAIAAYFAAINHPEALQYKLALPVFKDTLLHLGVLFIPFSMIVVVGAANAVNLTDGLDGLAIMPVMIAALALGVIAYAVGRVDFTNYLDVHYVPGTGELLIFCSALFGGGLGFLWYNAPPAAVFMGDTGALSLGGALGSIAVVTKH

SEQ ID NO: 136507 - protein, 234 aa, Unknown
  Bacterial polypetide isolated from the Sargasso Sea
MLLSLFEYLSQYNSGFNVFQYLTLRTVMGAGTSLVISLILGPYIITYLKNKQFYQSIRADGPKSHLDEKNTTPTMGGIIIISSVVISTTLWSDLSNNYILILLFGILGFGAIGFYDDYKKLIKRNSDGIKGRLKFLLQIIFASIITLFLYFFMDTGSIESVFPFLKENSFYLGILFIPWSIFILVGSSNAVNLTDGLDGLAILPCILIASAFVIFSYVHGNTNISSYLLIPYIE

SEQ ID NO: 136508 - protein, 307 aa, Unknown
  Bacterial polypetide isolated from the Sargasso Sea
MIGKIKNFNFESLFILNTFALIVTSYFFNNFIFTGVYILFFFISIFTTKNGLKIIKKFNLLQNIKKEGPANHFKKSDTPTMGGIFMIIPFLILLLIITISLGSLKLFLLLLTIFGFFITGFLDDFLSIKRKENTGLKTKEKFFLQSVISIIFILLAYEKNLISPLITVSDSWGINMNIFILPVSFLVLVGISNSVNLTDGLDGLAAGCSGIVFYGLGTEILLKEQQELFVFSILCFSMSGICLGFLKYNSYPAKIFMGDTGSLSIGAILGSIALLTNSVFTLSIFSGIFIIESLSVIFQVGFFKITK

SEQ ID NO: 136509 - protein, 209 aa, Unknown
  Bacterial polypetide isolated from the Sargasso Sea
MLYQFLLNFVDTFGFLNVFKYITFRTGLSLFTSLAIVLIIGGPFIKYFSSQKILNPIRDDGPEEHIVKKIGTPTMGGLIILIGLLVSVLCWGDLTNINILFCIYIAVSFGVLGAFDDYKKIKHSNSFGVSSKFKIISQIILAVIGVCFFVYYVDNQNIVNLYFPFFKNLIINLGWFFIPFAVFVLIGSSNAVNLTDGLDGLATVPVILV

SEQ ID NO: 136510 - protein, 250 aa, Unknown
  Bacterial polypetide isolated from the Sargasso Sea
MLYYLFEFLETNYKIPGAGLFSFLSFRAAFSVVLSLIISIVFGKKIINYLRKKQIGENIRKLGLEGEENKSGTPTMGGLIIIIATIIPVLLMSNLENIYIRILIISTIILGIIGFIDDYIKVFRKDKKGLKGKFKITGQAILGIFVGIMLLTSSDITIVDFSSINDINSIENFQSNEIKSFKTTTPFFKNNELDYALISNAIFKNENMLWLILIPIIIFIVTAVSNSNNLTDGLDGLSAGTSAIIVFTLG

SEQ ID NO: 136511 - protein, 162 aa, Unknown
  Bacterial polypetide isolated from the Sargasso Sea
MLFSLFSNLVEIFSFLNVFKYLTVRTGLSMFTSMVVVFLVGGPLINYFSSNQIHNPIREDGPSDHIIKKIGTPTMGGLMILLGIFSGVLLWGDFSNPYNWLLLYIAGSFGLLGAYDDYQKIKRNNSNGITSRLKIIIQIILALGGIFIFYFYSGSNEIENLY

SEQ ID NO: 136512 - protein, 33 aa, Unknown
  Bacterial polypetide isolated from the Sargasso Sea
FEKKGWPESTVVIRFWIISIILAMIGLATLKLR

SEQ ID NO: 136513 - protein, 109 aa, Unknown
  Bacterial polypetide isolated from the Sargasso Sea
SYPAKIFMGDTGSLSIGAILGSIALLTDSIFTLSIFSGIFIIESLSVMIQVSFFKITKTLFHRGKRIFLMAPLHHHFELKGVKEQKIVENFWKINILLVILGIVLKVNF

SEQ ID NO: 136514 - protein, 97 aa, Unknown
  Bacterial polypetide isolated from the Sargasso Sea
MILYILEYLNIPGLYNFFNYLTVRTGFALFTSFFFILLFGPALINKISSYQSVGQPIREDGPESHIIAKKGTPTMGGIIILLSHCWIYFALGKPQEV

SEQ ID NO: 136515 - protein, 245 aa, Unknown
  Bacterial polypetide isolated from the Sargasso Sea
MLYQFILNFVDTFGFLNVFKYITFRTGLSLFTSLAIVLIIGGPFIKYFSSQKILNPIRDDGPEEHIVKKIGTPTMGGVIILIGLLVSVLCWGDLTNINILFCIYIAISFGVLGAFDDYKKIKHSNSSGVSSKFKLISQIILAIIGVCYFVYYVESQNITNLYFPFFKNLIINLGWFFIPFAVFVLIGSSNAVNLTDGLDGLATVPVILVAGCFAFISYVTGNIVFSDYLQIPYIKGTGEISIFCG

SEQ ID NO: 136516 - protein, 250 aa, Unknown
  Bacterial polypetide isolated from the Sargasso Sea
MILYLVQILNFDFPGINLFTYLSFRAGCAIITSLLIVLLIGPNFIKSMLIKQGNGQPIREDGPKSHLDSKKGTPSMGGLLILSSFLISTLIWGDIFNSFLWIVILSSILFGLVGYIDDRKKIKDQNPKGISSKNKFLLQILSSFIIIFLISLQSSSELVYSISIPFVNGVFFLGLILYYCFTSFVIVGTSNAVNLTDGLDGLAIVPIMIAIASFGLITYLSGNSVFSEYLGINYITYSGELSILCCALLG

SEQ ID NO: 136517 - protein, 237 aa, Unknown
  Bacterial polypetide isolated from the Sargasso Sea
LDDYLSIKNKENTGLKAKEKFILQSFISITFIYFAYEKNLINPIMEVSESWGINTHILIFPIAFLVLVGMSNSVNLSDGLDGLAAGCSAIVFYGLGTEILIKNQHELIIFSILCYSMSGICLGFLKYNSYPAKIFMGDTGSLSLGAILGSIALLTNSIFTLSIFSGIFIIESLSVMIQVGFFKITKKLFHNGQRIFLMAPLHHHFELKGVKEQKIVENFWKTNILLVILGIVLKINL

SEQ ID NO: 136518 - protein, 190 aa, Unknown
  Bacterial polypetide isolated from the Sargasso Sea
MFLYFSENLIEWFSPLNAFTYITTRGILAALTALIISFLFGPKIILALEGNKIGETIRTDGPSSHSSKDGTPTMGGLMIILSIIVSVLIWSDLSNVYNLVLIASIISFGLIGFIDDFTKLKKSKKGMSAKTKLILQFIVAASSTYYLLGQGSSVLSSEVLIPFTNNIRLDLGWFFLPFAIFVIVGSSNAV

SEQ ID NO: 136519 - protein, 196 aa, Unknown
  Bacterial polypetide isolated from the Sargasso Sea
MLWLILIPIIIFIVTAVSNSNNLTDGLDGLSAGTSAIIVFTLGVFAWTSGNIIFSDYLNIMYIPRVGEITIFIASLLGSLVGFLWYNTYPASIFMGDTGSLTIGGLIAVISILIRKELMIPLLCGVFLIEALSVIFQVGYFKITKKRLGIGKRIFLMSPIHHHYQKVGYHESKIVSRFWIIGIFLAILTILTLKIR

SEQ ID NO: 136520 - protein, 284 aa, Unknown
  Bacterial polypetide isolated from the Sargasso Sea
MIGKIKKFNFESLFILNTFALIVTSYFFNNFIFTGVYILFFFISIFTTKNGLKIIKKFNLLQNIRNEGPANHFKKSDTPTMGGIFMIIPFLILLLIITINLGSLKLLLLLLTIFGFFITGFLDDFLSIKKKENTGLKTKEKFILQSVISIIFILLAYEKNLISPLIIISDSWGINMNVFILPVSFLVLVGISNSVNLTDGLDGLAAGCSGIVFYGLGTEILLKEQQELFVFSILCFSMSGICLGFLKYNSYPAKIFMGDTGSLSIGAILGSIALLTNSVFTLSI

SEQ ID NO: 136521 - protein, 45 aa, Unknown
  Bacterial polypetide isolated from the Sargasso Sea
QRIFLMAPLHHHFERKGWAESTIVIRFWIIAVVLALAGLSSLKLR

SEQ ID NO: 136522 - protein, 215 aa, Unknown
  Bacterial polypetide isolated from the Sargasso Sea
MLLPVFEYLSEFFGPFRVVEFLSTRAILATLTSLLFSLILGPRFINKMKDIQVRQVIREEGPKTHLSKQGTPTMGGTLILSSIFLSVILWGDLENRYLWVAFLTTISFGILGWIDDRLKIKHQSSEGLRASYKILWQSIIAITACSYLFFSHQNLQEVSLIVPFFKDISIPLGVSFIVLSYFVVIGTSNAVNLTDGLDGLAILPLCDGCCWTLVS

SEQ ID NO: 136523 - protein, 202 aa, Unknown
  Bacterial polypetide isolated from the Sargasso Sea
MLYQFLLNFVDTFSFLNVFKYLTFRTGLSFFTSLVIVLIIGSPFIKFFSKQKILNPIRDDGPEDHIVKKIGTPTMGGLIILFGLLISVLFWADLSNINILFCIYIAITFGLLGAYDDFKKIKYSNSSGTSLKFKITSQIIFAIIGVSFFAYFNDYQDLNNLYFPFFKNLILNLGWFFIPFAIFVIIGSSNAVNLTDGLDGLA

SEQ ID NO: 136524 - protein, 70 aa, Unknown
  Bacterial polypetide isolated from the Sargasso Sea
GIIGGLFVLETVSVIIQVVSFKLTGKRVFMMAPLHHHFEKKGWAESTVVIRFWIISIILALIGLATLKLR

SEQ ID NO: 136525 - protein, 39 aa, Unknown
  Bacterial polypetide isolated from the Sargasso Sea
APIHHHFEKKGWAESTIVIRFWIIAIILALVGLATLKLR

SEQ ID NO: 136526 - protein, 313 aa, Unknown
  Bacterial polypetide isolated from the Sargasso Sea
VDIFSFLNVFKYITFRTGLAMFTSLIIVLLIGNPFIRYFANKDITNPIRDDGPSDHIIKKIGTPTMGGLIILTGLLISVLMWGDLKNIYIIFALYIAISFGLLGAYDDYRKIKFKNSSGISSKLKIMIQIIIAFIGIVFLTKFTDNEQLLNLFFPFFKNLIINLGWFFIPFAIFVIVGSSNAVNLTDGLDGLATVPVILVASCFAFISYITGNIVFSDYLQIPYIQGTGEVSIFCGAIIGACLGFLWFNAPPAKIFMGDTGSLSLGGSLGAVGIITKHEIVLAITGGLFVLEAVSVMVQVISYKLTGKRIFKM

SEQ ID NO: 136527 - protein, 215 aa, Unknown
  Bacterial polypetide isolated from the Sargasso Sea
FILTYYVNPAELKNLYFPFFKNLVLNLGWFFIPFYLFIIVGSSNAVNLTDGLDGLATVPVILVASCFAFISYVTGNIVFSEYLHIPYIEGVGEVAVFCGSIIGACIGFLWFNAPPAKIFMGDTGSLALGGSLGAVGIITKHEIVLAITGGLFVLEAVSVIVQVVSYKLTGKRIFKMAPIHHHFEKKGWPESTVVVRFWIISIILAMIGLATLKLR

SEQ ID NO: 136528 - protein, 286 aa, Unknown
  Bacterial polypetide isolated from the Sargasso Sea
YFKVKQKLGQPIRNDGPKWQIEAKKGTPTMGGALILFALTVSVILWTDLFNIYLWLVLFITLSFGLIGFIDDYLKLKKFSFKGLSGKIKIIIQIFIALIFCYLLLLFSEQNNTQLLFPIFKNLYIDLGYFWFIFGMLVIVGSSNSVNLTDGLDGLAIVPIMIVLSTFSIIAYLVGNAIYSDYLNLTYISGVGEIAVFCAAFIGAGLGFLWFNAPPAKIFMGDTGSLSAGAAIGAISVITKNELILLVAGGLFVLEAISVIVQVASFKLTGKRVFRMAPLHHHLSKK

SEQ ID NO: 136529 - protein, 147 aa, Unknown
  Bacterial polypetide isolated from the Sargasso Sea
LICYVVGNTIFSDYLQIQYIPDVGELSIFCGSIVGSCLGFLWYNAPPAKIFMGDTGSLSLGGSLAAIAIIVKHEIVLAIIGGLFVLETVSVIIQVISFKLTGKRIFKMAPIHHHFEQKGWAESTIVIRFWIIAIILALVGLATLKLR

SEQ ID NO: 136530 - protein, 194 aa, Unknown
  Bacterial polypetide isolated from the Sargasso Sea
NLIINLGWFFLPFYLFVIVGSSNAVNLTDGLDGLATVPVILVAACFAFISYVTGNIVFSGYLQITYIEGVGEASIFCGAIIGSCLGFLWFNAPPAKIFMGDTGSLALGGSLGAVGIITKHEIVLAITGGLFVLEAVSVIAQVISFKLTGKRIFKMAPIHHHFEKKGWPESTVVIRFWIISIILAMIGLATLKLR

SEQ ID NO: 136531 - protein, 197 aa, Unknown
  Bacterial polypetide isolated from the Sargasso Sea
FFYPIIYAIFIILVVSATSNAVNLTDGLDGLAAGLLAISVSVFGIIAYISGRVDFTDYLYIAYLPLASELTIFATAFFGGCLGFLWFNAKPAEIFMGDVGSLSTGAALGTLAILLKKEVLLLIVGGVFVIETLSVIIQVLYFRYTKNKYGTGKKFFLMAPIHHHFELKGWPESRVVTRFWIIGILFALMSLTTFKVR

SEQ ID NO: 136532 - protein, 309 aa, Unknown
  Bacterial polypetide isolated from the Sargasso Sea
NGEVYRRMIEILGAYLLNFDPGFNILRYLTFRTLGGTITALTLSILLGPIFINFLKNIQFSQVIRKEGPQSHQKKSGTPTMGGLIIIASVIISTLIWADLSNAYVWTLIIVTILFSIVGLIDDYLKISNKNSKGLSGKMKLLLQTGFALITLIIYLYYSTDSQLYFILPFNKNFIFDISIPLFLLISTFVIVGSSNAVNLTDGLDGLAILPTVLIMGGLGLVAYAMGNIIIADYLYIPHLPQAGELIVVAGSFIGAGIGFLWYNTYPAQVFMGDVGSLTLGAILGTFSVVLRQEIIFAFMAGVFIMETL

SEQ ID NO: 136533 - protein, 186 aa, Unknown
  Bacterial polypetide isolated from the Sargasso Sea
IFIFTGMFVLIGSSNAVNLTDGLDGLAILPTVLIGGALGLIAYAMGNQLIADYLYLPHLPLSGELIVFCGALIGSGIGFLWYNTYPAQVFMGDIGSLTLGAILGIIAIILRHELVFAIMAGVFVVETLSVAIQVISYKTRGKRVFLMAPIHHHYELKGWAEPKIIVRFWIVTLVLILIALATLKLR

SEQ ID NO: 136534 - protein, 168 aa, Unknown
  Bacterial polypetide isolated from the Sargasso Sea
GLAVGASVMSFLAYVLLAIWQYGQNCSFVDSEFCYTTQNPLDLGILAASAAGACFGFLWWNTTPARIFMGDTGSLALGGGIAGLAILSRTELLLPFIAGLFLITTVSVILQVGSFRLTGRRVFHMAPLHHHFEMIGWPEIQIVVRLWIVQGLCIGAGLTLFYAEWVRA

SEQ ID NO: 136535 - protein, 271 aa, Unknown
  Bacterial polypetide isolated from the Sargasso Sea
MLYLTNYLAQFESSFYVFDYITIRAILGALTSLIISMVLGPRMIAKFQSIQLNQPVRDDGPESHKEKIGTPTMGGALIIMSVSLATLMWAEINNPFIWIILFVTISFGTLGYIDDYQKIIKNNSDGISASKKLFWQSLIAIIVITLLIKFNTDSNSTSLLIPYLKNTMIELGVLHLIISFFFIIGFSNAVNLTDGLDGLAIMPTVLVAGALGIFSYVTGNINFSTYLEIPYVAGAGEIFVFCAALVGAGLGFLWFNTYPAQVFMGDVGSLS

SEQ ID NO: 136536 - protein, 343 aa, Unknown
  Bacterial polypetide isolated from the Sargasso Sea
FKYLTFRTGLSVITSLIVVFIIGGPLIKLFSEKMITGPIRQDGPIDHIIKKSGTPTMGGVIIIIGILSSTLLWADLNNVYVWTLIFVSLSLGALGFLDDMLKIKFKNSRGLKSSYKFFGQILIGVITLLILIKYSNHGYLYNLYFPFFKNLIWNMGLFFIPFGLIVIIGASNAVNLTDGLDGLATVPVMLVALSFTLISYVVGNTIFSEYLQIQYIPDVGELSIFCGSVVGSCLGFLWYNAPPAKIFMGDTGSLSLGGSLAAIAIIVKHEIVLAIIGGLFVLETVSVIIQVASFKLTGKRIFKMAPIHHHFEKKGWAESTIVIRFWIIAIILALIGLATLKLR

SEQ ID NO: 136537 - protein, 288 aa, Unknown
  Bacterial polypetide isolated from the Sargasso Sea
MILYLIEYLNLGALNNFLNYLTVRTGLALFTSFFFILFFGPFLIKRIGSYQSIGQPIREDGPESHLVAKKGTPTMGGIIILISIVGSMILWVNPESYISWPIIFLLISFGLVGFADDFSKVKKKSSNGISAKIRIFFQIIISLIFIYWITTYNEIDIRLLSLPFLKDIFLNLGLFSIPFVILVILGSANAVNLTDGLDGLAIVPIMIVSATFAVICYLAGNMIFSNYLYINYLPGAGELTVLCAAIIGSALGFLWYNAPPAMVFMGDTGSLSLGASLGGISVLTKQEI

SEQ ID NO: 136538 - protein, 286 aa, Unknown
  Bacterial polypetide isolated from the Sargasso Sea
GRCLILIGLFAGVFLWGDLYNPYNWLLIFITLSFGILGAFDDFKKIKNNNSKGISSKIKLVIQILLALLSLFIFYNFIETDLKTNLYFPFFKNLIVNLGWFFIPFYLFVIVGSSNAVNLTDGLDGLATVPVILVAGCFAFISYVSGNVIFADYLLIPYIEGVGEVSVFCGAIIGASIGFLWFNAPPAKIFMGDTGSLALGGSLGAVGVVTKHEIVLAITGGLFVLEAVSVIVQVISFKLTGKRIFMMAPLHHHFEKKGWAESTVVIRFWIISLILAMIGLATLKLR

SEQ ID NO: 136539 - protein, 297 aa, Unknown
  Bacterial polypetide isolated from the Sargasso Sea
MLYQFLLNFVDTFGFLNVFKYLTFRTGLALFTSLIIVLLIGGPFIKFFSQQKILNPIRDDGPEDHIIKKIGTPTMGGVIILFGLLISVLFWGDLSNINILFCIYIAISFGLLGAFDDYKKIKYNNSSGISSKFKFITQIFITVVGVSFFVYFVDYQEITNLYFPFFKNLIINLGWFFIPFSVFVIIGSSNAVNLTDGLDGLATVPVILVAGCFAFISYVTGNVVFSNYLQIPYIENTGEISIFCGAIIGSCLGFLWFNAPPAKIFMGDTGSLSLGGSLGAVGIITKHEIVLAITGGL

SEQ ID NO: 136540 - protein, 305 aa, Unknown
  Bacterial polypetide isolated from the Sargasso Sea
TPTMGGLFIVFGTIAGYSLSHINFWTIGEGFKVELTSMNVNVILLFLLAFLMAMVGFIDDYLKVKAGRNLGLKPTQKFALQFLIGCISAYYFLFLNYDSNFYFFSGLGFDIGIVKWLIIIFFIIGITNSVNFTDGLDGLVAGSSAISFGGILIISFWIYRHPTYYSNFIGDDFLTVELSLLISAVAGACLGFLWWNTNPAKIIMGDVGSHFLGSLFPLILFALGADGLIFFFCFLFILEGVSVVVQILSFKYRQKRVFKMAPIHHHFEMSNWAETTIIVRFWIINGIAVVIGLGLFYADYVLFGQ

SEQ ID NO: 136541 - protein, 149 aa, Unknown
  Bacterial polypetide isolated from the Sargasso Sea
IFKNRLALPIFKNLLVDLGFLFVPFAMIVIVGSANAVNLTDGLDGLAIMPVMIAAGALGVIAYAVGRVDFTEYLDVHYVNGTGEILILCSGIFGAGLGFLWYNAPPAAVFMGDTGSLALGGALGAVAVATKHEIVLAIVGGLFVVEALS

SEQ ID NO: 136542 - protein, 219 aa, Unknown
  Bacterial polypetide isolated from the Sargasso Sea
MFNYLSTEYISLFSYLNLFNYITFRTGAAILTSLFFSLIFGELIITKLKKIQPIGQPIREDGPENHIIKKSGTPTMGGVLILSSITISIFLWADLSNKFIWICFFSSIIFGLIGFVDDYQKVKYRNHKGIKASTRIIFQVFISLIIIYFTQQLLSENYKGSLSLPFFKDLILNLGIFYYIVGVIVIVGSANAVNLTDGLDGLAIVPVMIVALSFAFYSY

SEQ ID NO: 136543 - protein, 263 aa, Unknown
  Bacterial polypetide isolated from the Sargasso Sea
HSYNGGGVIILIGIISSTLLWADLKNIYVWTLIFVSVSLGSLGLLDDILKIKYKNSSGLKSRYKFFGQLIISSLALLILIKFTNHQYLFDLYFPFFKNLIWHMGLFFVPFGLFVIIGASNAVNLTDGLDGLATVPVMLVALSFTLISYVVGNTIFSEYLQIQYIPDTGELSIFCGSIVGSCLGFLWYNAPPAKIFMGDTGSLSLGGSLAAIAIIVKHEIVLAIIGGLFVLETVSVIIQVISFKLTGKRIFKMAPIHHHFEKKG

SEQ ID NO: 136544 - protein, 109 aa, Unknown
  Bacterial polypetide isolated from the Sargasso Sea
GFLWYNAPPAKIFMGDTGSLSLGGSLAAVAIIAKHEIVLAIVGGLFVLETVSVIIQVISFKLTGKRIFKMAPIHHHFEQKGWAESTIVIRFWIIAIILALVGLATLKLR

SEQ ID NO: 136545 - protein, 210 aa, Unknown
  Bacterial polypetide isolated from the Sargasso Sea
LNDYQDLNNLYFPFFKNLIVNLGWFFIPFAILVIIGSSNAVNLTDGLDGLATVPVILVAACFAFISYVTGNIVFSNYLQIPYIEGTGEVSIFCGAIIGSCLGFLWFNAPPAKIFMGDTGSLSLGGSLGAVGIITKHEIVLAITGGLFVLEAVSVMVQVISFKLTGKRIFRMAPIHHHFEKKGWPESTVVIRFWIISIILAMIGLATLKLR

SEQ ID NO: 136546 - protein, 279 aa, Unknown
  Bacterial polypetide isolated from the Sargasso Sea
GDYNSNFVLGGLSNRYIWLVLSVTCAFGLIGWLDDYLKILRQNSDGLSAKWKIFWQTIVALSASSYLYTTADMAIQTDLIVPFFKEVALPLGIGFIVFSSLMLVGMSNAVNLTDGLDGLAILPTVMVGGGLGLIAYLVGNSEYATYLQIPYIPGTGELSVFCGALIGAGLGFLWFNTYPAQVFMGDVGSLALGAALAIVAIVTRHEIVLLIMGGLFVLETASVIVQVISYRVTGRRVFRMAPIHHHFELKGWAEPKVIVRFWIITVVLVTIGISSLKLR

SEQ ID NO: 136547 - protein, 97 aa, Unknown
  Bacterial polypetide isolated from the Sargasso Sea
FMGDTGSLSLGGSLGAVSIITKHEIVLAITGGLFVFEAISVIVQVLSYKLTGKRIFKMAPIHHHFEKKGWEESTVVIRFWIISIILAMIGLATLKLR

SEQ ID NO: 136548 - protein, 110 aa, Unknown
  Bacterial polypetide isolated from the Sargasso Sea
LGFLWFNAPPAEIFMGDTGSLSLGGVIGVSSVATRHELVLVIIGGLFVVETISVILQVGYFKLTGKRIFLMAPLHHHFEKRGWEESTIVIRFWIIAVILALIGLSTLKLR

SEQ ID NO: 136549 - protein, 186 aa, Unknown
  Bacterial polypetide isolated from the Sargasso Sea
FIPWSIFILVGSSNAVNLTDGLDGLAILPCILIASAFVIFAYVHGNMNISEYLLIPYVEGSGEVAIFAASLVGAGLGFLWFNSYPAEIFMGDCGSLSLGSSLGLLAVILKQELAFAIMSGIFIAEVLSVIIQVMSFKLRKGKRVFKMAPLHHHYELSGLSEPKIIMRFWIITFILVLIALSTLKIR

SEQ ID NO: 136550 - protein, 119 aa, Unknown
  Bacterial polypetide isolated from the Sargasso Sea
FCGAIIGACLGFLWFNAPPAKIFMGDTGSLSLGGSLGAIGIITKHEIVLAITGGLFVLEAVSVMVQVISFKLTGKRIFRMAPIHHHFEKKGWPESTVVIRFWIISIILAMIGLATLKLR

SEQ ID NO: 136551 - protein, 54 aa, Unknown
  Bacterial polypetide isolated from the Sargasso Sea
YKKQIPVLGKKFFLMAPIHHHFELKGWPESRVVTRFWIIGILFALMSLTTFKVR

SEQ ID NO: 136552 - protein, 280 aa, Unknown
  Bacterial polypetide isolated from the Sargasso Sea
MLYSLFSSLVEFFSFFNVFKYLTVRTGLSMFTSMIVVFLIGNPFINYFSIKKIHDPIRADGPSEHIIKKIGTPTMGGLMILLGVFSGVLLWGDLSNPYNWFLIYIAGTFGLLGAYDDYQKIKNNNSNGVSLKFKIILQITLALIGILILYYFSGSNELKNLYFPFFKNLVLNLGWFFIPFYLFIIVGSSNAVNLTDGLDGLATVPVILVAACFAFISYVSGNIVFSDYLQIPYIQGVGEASIFCGSIIGACLGFLWFNAPPAKIFMGDTGSLALGGSLGA

SEQ ID NO: 136553 - protein, 107 aa, Unknown
  Bacterial polypetide isolated from the Sargasso Sea
LWYNSYPAQVFMGDVGSLSLGAILATIAVLLRLEIVYAIMGGVFVMEALSVMIQVASYKIFKKRVFKMSPIHHHFELKGWPEPKIIVRFWIITFILVLIALASLKIR

SEQ ID NO: 136554 - protein, 212 aa, Unknown
  Bacterial polypetide isolated from the Sargasso Sea
IFYSGSNELQNLYFPFFKNLIINIGWFFIPFYLFVIVGSSNAVNLTDGLDGLATVPVILVAACFAFISYVTGNIVFSGYLQITYIEGVGEASIFCGAIIGSCLGFLWFNAPPAKIFMGDTGSLALGGSLGAVGIITKHEIVLAITGGLFVLEAVSVIAQVISFKLTGKRIFKMAPIHHHFEKKGWPESTVVIRFWIISIILAMIGLATLKLR

SEQ ID NO: 136555 - protein, 284 aa, Unknown
  Bacterial polypetide isolated from the Sargasso Sea
SFLNVFKYLTVRTGLSMFTSMVVVFLVGGPLINYFSTHQIHDPIREDGPSEHIVKKIGTPTMGGLMILLGIFSGVLLWGDFSNPYIWFLLYIAGSFGLLGVYDDYQKIKKNNSNGISSKVKIIIQIFLASIGILIYYFYTGSNEITNLYFPFFKNLVINLGWFFIPFYLFVIVGSSNAVNLTDGLDGLATVPVILVAGCFAFISYVTGNIVFSGYLQITYIDGVGEASIFCGAIIGSCLGFLWFNAPPAKIFMGDTGSLALGGSLGAVGIITKHEIVLAITGGL

SEQ ID NO: 136556 - protein, 171 aa, Unknown
  Bacterial polypetide isolated from the Sargasso Sea
FCNFTDGLDGLATGSLIISFSAITIFTYIAGNSVYSSYLYLPFISNVGEIVVFISALIGSLLGFLWYNSNPAQIFMGDTGSIPMGATLGLVAILIKQEFLLLIIGGIFVIEALSVITQIFSFRIFNKRIFLIAPIHHHFEKLGIKESKIVIRFWIIGIIFSLIAIATLKIR

SEQ ID NO: 136557 - protein, 154 aa, Unknown
  Bacterial polypetide isolated from the Sargasso Sea
IAAGSFGLISYLVGNAVFANYLLIFAVPGSGELAVFCGALVGAALGFLWFNAPPAMVFMGDTGSLSIGGALGGISIVTKHELVLAIIGGLFVLETVSVIVQVTSFKLTGRRVFRMAPLHHHFEQKGWAEPTIVIRFWIIATVLALAGLATLKLR

SEQ ID NO: 136558 - protein, 282 aa, Unknown
  Bacterial polypetide isolated from the Sargasso Sea
ILAAVVLSTLLWADLENRFIWITLLTSLAFGLIGGLDDYQKILRKNSRGMGSGQKFLWQSVAAFAAALALYLTAQSPAETSLIVPLFKDVAVEMGVGFILLTWFVIAGSSNAVNLTDGLDGLAILPSVLVAGGLGVFAYLTGHALFSGYLGIPFIAGAGEVLVLCAALVGAGLGFLWFNTYPAQIFMGDIGALSLGAALGTIAVVVRQEIVLAIMGGLFVIETVSVMLQVASFRLIGRRIFRMAPLHHHFEQKGWREPQVTVRFWIISLILVLIGLATLKVR

SEQ ID NO: 136559 - protein, 52 aa, Unknown
  Bacterial polypetide isolated from the Sargasso Sea
ISYKLTGKRIFRMAPIHHHFELKGWPEPKVIVRFWIVSLVLVVVGLSTLKLR

SEQ ID NO: 136560 - protein, 65 aa, Unknown
  Bacterial polypetide isolated from the Sargasso Sea
MFVLEAVSVIVQVVSYKITGKRIFKMAPIHHHFEKKGWAESTVVVRFWIISIILAMIGLATLKLR

SEQ ID NO: 136561 - protein, 219 aa, Unknown
  Bacterial polypetide isolated from the Sargasso Sea
NNSNNASDKINTDSNSTSLLIPYLKNTMIELGVLHLIISFFFIIGFSNAVNLTDGLDGLAIMPTVLVAGALGIFSYVTGNINFSTYLEIPYVAGAGEIFVFCAALVGAGLGFLWFNTYPAQVFMGDVGSLSIGASLGVIAVIIKQEIVLVIMGGVFVAETLSVMIQVTSFKLTGKRIFRMAPLHHHYELKGWKEPKIIVRFWIITVILVLIGLASLKIR

SEQ ID NO: 136562 - protein, 242 aa, Unknown
  Bacterial polypetide isolated from the Sargasso Sea
KIKNNNSNGISSKLKILIQIFLCLISLVIFYKFIDSDIKTNLYFPFFKNLVINLGWFFIPFYLFVIVGSSNAVNLTDGLDGLATVPVILVAGCFGFISYVSGNIIFADYLLIPYIEDVGEVAVFCGAIIGASIGFLWFNAPPAKIFMGDTGSLALGGSLGAVGVVTKHEIVLAITGGLFVLEAISVIVQVVSFKLTGKRIFMMAPIHHHFEKKGWAESTIVIRFWIISLILAMIGLATLKLR

SEQ ID NO: 136563 - protein, 228 aa, Unknown
  Bacterial polypetide isolated from the Sargasso Sea
MLYSLFSSYVEIFSFLNVFKFLTVRTGLAMFTSMLVVFLVGNPFINYFSSRQMLDPIREDGPEEHIIKKIGTPTMGGLLILLGLFSGVLLWGDLKNSYIWLLIFIVGSFGILGAFDDYKKIKSKNSSGISFKIKIIWQIILALVGVGILTFFSDTPELKNLYLPFFKNLVINLGWFFIPLYVFIIIGSSNAVNLTDGLDGLATVPVILVAACFAFISYVTGNIVFSEY

SEQ ID NO: 136564 - protein, 205 aa, Unknown
  Bacterial polypetide isolated from the Sargasso Sea
LVNIVFIPFTKGFFIDLGNFYYIFAALVIVGSANAVNLTDGLDGLAIGPIMITTLSFAFIAYFTGNLIYSEYLKIPYVSDTGELVIICASLIGAGLGFLWFNAPPAMVFMGDTGSLSIGGTIGAIAVATKHEVILSLIGGIFVLEALSVFAQVISFKLTGKRIFRMAPIHHHFEQKGWSEATIVIRFWIISIILALLGLASLKLR

SEQ ID NO: 136565 - protein, 70 aa, Unknown
  Bacterial polypetide isolated from the Sargasso Sea
AITGGLFVLEAISVIAQVISFKLTGKRIFKMAPIHHHFEKKGWPESTVVIRFWIISIVLAMIGLATLKLR

SEQ ID NO: 136566 - protein, 110 aa, Unknown
  Bacterial polypetide isolated from the Sargasso Sea
LGFLWFNAPPAKIFMGDTGSLALGGSLGAVGIITKHEIVLAITGGLFVLEAVSVIAQVISFKLTGKRIFKMAPIHHHFEKKGWPESTVVIRFWIISIILAMIGLATLKLR

SEQ ID NO: 136567 - protein, 297 aa, Unknown
  Bacterial polypetide isolated from the Sargasso Sea
MLYSFLVSLVDTFSFLNVFKYITFRIGLSVITSLTIIFLIGDPLIKYFSKKQITGPIRHDGPIDHIIKKSGTPTMGGLMILIGIIVSTIMWADLKNVYIWIVLFVCTSLGLLGFVDDYLKIKFKNSSGINAKFKFLGQFLISLFAILILVYFTDHQIISNLYFPFFKNLVLHMGLFFIPFGIFVIIGSSNAVNLTDGLDGLATVPVMLVALSFSLICYLVGNTIFSNYLQIQYIPNVGELSIFCGSIVGSCLGFLWYNAPPAKIFMGDTGSLSLGGSIASVAIIVKHEIVLAIVGGL

SEQ ID NO: 136568 - protein, 64 aa, Unknown
  Bacterial polypetide isolated from the Sargasso Sea
FVLETVSVIIQVLSFKIFGKRVFRMAPLHHHFEKKGWPESTVVIRFWIISIVLALIGLATLKLR

SEQ ID NO: 136569 - protein, 54 aa, Unknown
  Bacterial polypetide isolated from the Sargasso Sea
SVVSFKLTGKRIFKMAPIHHHFEKKGWPESTVVIRFWIIAIILALIGLATLKLR

SEQ ID NO: 136570 - protein, 125 aa, Unknown
  Bacterial polypetide isolated from the Sargasso Sea
VGETAIFCGAIVGSCLGFLWYNAPPAKIFMGDTGSLSLGGSLAAVAIIVKHEIVLAIIGGLFVLETISVIIQVISFKLTGKRVFMMAPIHHHFEKKGWAESTIVIRFWIIAIILALVGLATLKLR

SEQ ID NO: 136571 - protein, 217 aa, Unknown
  Bacterial polypetide isolated from the Sargasso Sea
MLPEILINYVEYFNALNVFKYITFRTGGSILTALLISFIFGPYLIKKLKMNQIEGQPIRIDGPKSHLIKKKGTPTMGGILILFAFSFSTLLWAKLDNIYVWTVFSIVSSFGIIGLIDDWLKLTKRSSQGLNGKIKLLLQVILATLVVYIINQQFEQDLRFTISLPFFKDMNIYLGYFYILFGVLVIVGSSNAVNLTDGLDGLAIVPVMIASMFFCSN

SEQ ID NO: 136572 - protein, 268 aa, Unknown
  Bacterial polypetide isolated from the Sargasso Sea
MGGVLILIGIFSGVFLWSDLSNPYNWFLIFIVGGLGILGAYDDYKKIKSGNSGGVSFKFKLISQVIIALIGIYILTYHANSAELKNLYFPFFKNLVINLGWFFIPFYLFIIVGSSNAVNLTDGLDGLATVPIILVASCFAFISYVTGNIVFSEYLHIPYIKDVGEVAVFCGAIIGSCIGFLWFNAPPAKIFMGDTGSLALGGSLGAVGIITKHEIVLAITGGLFVLEAVSVIVQVISFKLTGKRIFKMAPIHHHFEKKGWAESTVVVR

SEQ ID NO: 136573 - protein, 250 aa, Unknown
  Bacterial polypetide isolated from the Sargasso Sea
GGTLTALMLSILLGPALIRFLTRMQFAQSIRTDGPESHLLKSGTPTMGGLIIIFSLIISTLLWSDFNNPYIWILIFITISFGILGFFDDWLKIREKNSKGLSGKYKLILQSIFATMAISLMLKVSPYGDQQIYIMPFNKEFIFTVSPVIFLCISIFIIVGSSNAVNLTDGLDGLAILPSVLIAGGLGLIAYASGNILISDYLFIPFNPLSGELIVFCGAFIGAGIGFLWYNTYPAQIFMGDLGSLTLGGI

SEQ ID NO: 136574 - protein, 242 aa, Unknown
  Bacterial polypetide isolated from the Sargasso Sea
MFPEIFLNYVDIFQPFNVFRYITFRTGGAILTSLLISLFLGPFLIKRLKAFQTEGQPIREDGPKEHLIRKKGTPTMGGLLILFAFSLSTLMWSKLDNPYVWIVFIIATTFGLIGLLDDWLKLKKRSSEGLNGKKKLLIQILLSALAVYSINLQFDQHLQNSLSLPFFKDTILYLGYLYIPFGILVIVGSSNAVNLTDGLDGLAIVPVMIASMSFALIAYIIGNLNFSNYLQVSYVSGVGELE

SEQ ID NO: 136575 - protein, 147 aa, Unknown
  Bacterial polypetide isolated from the Sargasso Sea
IYQLCIRQHIFAEYLLIPYIEGVGEIAVFCGAIIGASIGFLWFNAPPAKIFMGDTGSLALGGSLGAVGVATKHEIVLAITGGLFVLEAISVIVQVISFKLTGKRIFMMAPIHHHFEKKGWAESTVVIRFWIISLILAMIGLATLKLR

SEQ ID NO: 136576 - protein, 175 aa, Unknown
  Bacterial polypetide isolated from the Sargasso Sea
GTSNAVNLTDGLDGLAILPCVMVAAGLGIIGYLAGNAIYSDFLNIPYLPGTGEMIVFCGALVGSGIGFLWFNTYPAQVFMGDVGSLSLGAALGIVTVIIRHEYVLLVMGGLFVIEALSVIVQVTSFKLTGKRVFNMAPLHHHYELKGWPEPRVIVRFWIITFMLVLLGLALLRLR

SEQ ID NO: 136577 - protein, 201 aa, Unknown
  Bacterial polypetide isolated from the Sargasso Sea
MLYNLLLPFKDSFSIINLFEYITFRAGIAAIAALFISFIIGPWVIHILHKNQIGEEIRSTGPKSHMKKEGTPTMGGVIILMAVLLPTLLFSKINSVLVQIIIFATIWMGVIGFLDDYLKVIKKMKRGLIARYKLAGQISLGCIVSFWILNTPEFIDFNSKTTMPFFKNVEIDLGMLYPLMVILVITGTSNAVNLTDGLDGL

SEQ ID NO: 136578 - protein, 287 aa, Unknown
  Bacterial polypetide isolated from the Sargasso Sea
MLFNLLTSFIEHYSFLNVFKYLTFRTGLSVVTSLIVVFIIGGPLIRIFSENMITGPIRQDGPIDHIIKKSGTPTMGGVIIIIGMLTSTLLWADLNNIYIWTLVFVSLSLALLGFSDDLLKIKYKNSRGLNPKLKFLGQLIISVVALLILIKFSDHEYLYNLYFPFFKNLIWQMGLFFIPFGLFVIIGSSNAVNLTDGLDGLATVPVMLVALSFTLISYVVGNTIFSEYLQLQYIPDVGELSIFCGSIVGSCLGFLWYNAPPAKIFMGDTGSLSLGGSLAAVAIMQNT

SEQ ID NO: 136579 - protein, 92 aa, Unknown
  Bacterial polypetide isolated from the Sargasso Sea
GSLTLGAILGVFAVILRHEIVYAIMAGVFIAETLSVMIQVTSYRLRQKRVFLMAPIHHHFELKGWPEPKIIVRFWIVTLVLILVALATLKLR

SEQ ID NO: 136580 - protein, 186 aa, Unknown
  Bacterial polypetide isolated from the Sargasso Sea
QFHINNMSEVIREDGPSSHMSKSGTPTMGGLLILSSLLISTIFWANLENKYILYLIFTTISFALIGFLDDYKKLTKSKNGMPPRNKIMLQLILAGIIAYTMFTFMETTQEQQLIIPFFKDIIIDLGIFFIPFVMLVIISTSNAVNLTDGLDGLAIMPVVLVSGALGIFAYLSGNINFSEYSLDTLY

SEQ ID NO: 136581 - protein, 86 aa, Unknown
  Bacterial polypetide isolated from the Sargasso Sea
GSLGAVGIITKHEIVLAITGGLFVLEAISVIVQVISFKLTGKRIFRMAPIHHHFEKKGWPESTVVIRFWIISIILALIGIATLKLR

SEQ ID NO: 136582 - protein, 82 aa, Unknown
  Bacterial polypetide isolated from the Sargasso Sea
AVGIITKHEIVLAITGGLFVLEAVSVIAQVVSFKLTGKRIFKMAPIHHHFEKKGWPESTVVIRFWIISIILAMIGLATLKLR

SEQ ID NO: 136583 - protein, 82 aa, Unknown
  Bacterial polypetide isolated from the Sargasso Sea
SLAIIVKHEIVLAIIGGLFVLETLSVIIQVLSFKLTGKRIFRMAPLHHHFEKKGWAEPTIVIRFWIITIVLALIGLATLKIR

SEQ ID NO: 136584 - protein, 67 aa, Unknown
  Bacterial polypetide isolated from the Sargasso Sea
GGLFVLETVSVIIQVISFKLTGKRIFKMAPIHHHFEQKGWAESTIVIRFWIIAIILALVGLATLKLR

SEQ ID NO: 136585 - protein, 170 aa, Unknown
  Bacterial polypetide isolated from the Sargasso Sea
SNLTDGLDGLAIVPVMIVAMSFAFIAYVSGNIVFSNYLLIQYIPGTGELAVFCGSLIGAALGFLWFNAPPAKVFMGDTGSLALGGSLGSIAIICKHEILLAIIGGLFVLETLSVVIQVFIFKMTGKRVFLMAPLHHHFEKKGWPESTIVIRFWIITIVLALIGLATLRIR

SEQ ID NO: 136586 - protein, 236 aa, Unknown
  Bacterial polypetide isolated from the Sargasso Sea
SSGLKSKYKFSGQLLIGVLALFILIKFSNHEYLFNLYFPFFKNLIWEMGPFFILFGLFVIIGASNAVNLTDGLDGLATVPVMLVALSFTLISYVVGNTIFSEYLNIQYIQDVGELSIFCGSIVGSCLGFLWYNAPPAKIFMGDTGSLSLGGSLAAIAIIVKHEIVLAIIGGLFVLETVSVIIQVVSFKLTGRRIFKMAPIHHHFEKKGWAESTIVIRFWIIAIILALVGLATLKLR

SEQ ID NO: 136587 - protein, 269 aa, Unknown
  Bacterial polypetide isolated from the Sargasso Sea
GPFLIKRIGSYQSIGQPIREDGPESHLVAKKGTPTMGGIIILISIVGSMLLWVNPESYISWPIIFLLISFGLVGFADDFSKVKKKSSNGISAKIRIFFQIIISLVFIYWTTTYNEIDIQLLSLPFLKDIFLNLGLFSIPFVILVILGSANAVNLTDGLDGLAIVPIMIVSATFAVICYLAGNMIFSNYLYINYLPGAGELTVLCAAIIGSALGFLWYNAPPAMVFMGDTGSLSLGAALGGISVLTKQEIVLAIVGGIFVAEAVSVILQV

SEQ ID NO: 136588 - protein, 269 aa, Unknown
  Bacterial polypetide isolated from the Sargasso Sea
MIGGPFIRFFSNQKILNPIRDDGPEEHIIKKIGTPTMGGIIILIGLLISVLCWADLSNINILFCIYIAVSFGLLGAFDDFKKIKHRNSSGISSKLKIVLQILLAVIGVSLFIYYIDYQDITNLYFPFFKNLIINLGWFFIPFSVFVIIGSSNAVNLTDGLDGLATVPVILVAVCFSFISYVTGNIVFSDYLQIPYIEGTGEISIFCGAIIGSCLGFLWFNAPPAKIFMGDTGSLSLGGSLGAVGIITKHEIVLAIIGGLFVLEAVSVMV

SEQ ID NO: 136589 - protein, 91 aa, Unknown
  Bacterial polypetide isolated from the Sargasso Sea
FLSLGGSLGAVGIITKHEIVLAITGGLFVLEAVSVMVQVISFKLTGKRVFKMAPIHHHFEKKGWPESTVVIRFWIISIILAMIGLATLKLR

SEQ ID NO: 136590 - protein, 47 aa, Unknown
  Bacterial polypetide isolated from the Sargasso Sea
MGKRIFKMAPIHHHFEKKGWAESTIVIRFWIIAIILALVGLATLKLR

SEQ ID NO: 136591 - protein, 168 aa, Unknown
  Bacterial polypetide isolated from the Sargasso Sea
MVCSRKFSNYCFCLGIFAWVSGNFIFADYLNIIYIPHIGEITVFIASFLGALIGFLWFNTFPALVFMGDTGSLTIGALISVIALIVRKELLIPLLCGIFFVETLSVIIQVGYFKYTRKNFGVGKRIFLMAPIHHHFQKKGFNESKIVTRFWIIGILLAILSIVTLKIR

SEQ ID NO: 136592 - protein, 280 aa, Unknown
  Bacterial polypetide isolated from the Sargasso Sea
LLFADLSNTFIQIILLSLVWMGAIGFLDDYLKVVKKFEKGLIGKYKLIGQISLGMVISYWIYNTPEYANIVSSTSIPFLKNYTIDFGLFYPLIIILVITGTSNAVNLTDGLDGLAAGLLAISFAVFSAIAYISGRVDFSEYLNIMYLPGAGELTVFTAAITGACIGYLWFNTSPAEVFMGDIGSLSTGAALGALAVLLKKELLLAIIGGVFVWEALSVMIQVAYFRWTKYKFGEGERFFKMAPIHHHFELKGWPESRIVVRFWIIGILFALFSLTTFKIR

SEQ ID NO: 136593 - protein, 51 aa, Unknown
  Bacterial polypetide isolated from the Sargasso Sea
SFKLTGKRIFKMAPIHHHFEKKGWPESTVVIRFWIISIILAMIGLATLKLR

SEQ ID NO: 136594 - protein, 191 aa, Unknown
  Bacterial polypetide isolated from the Sargasso Sea
YTLFIILVVSATSNAVNLTDGLDGLATGLLAISVSVFGVLSYISGRVDFSDYLNITYIPMAGELTIFAAALFGGCLGFLWFNARPALIFMGDVGSLSMGAALGTLAILLKKELLLIIVGGVFVLEALSVILQVVYHRWTKKKYGKPKKLFLMAPLHHHFELKGWPESRVIVRFWLLGIFFALLSLTTFKIL

SEQ ID NO: 136595 - protein, 231 aa, Unknown
  Bacterial polypetide isolated from the Sargasso Sea
PLNKIFWQSVITILACSYLYITQESISETSLIVPFFKDISIPLGVGFIVLSYFVVIGTSNAVNLTDGLDGLAILPCVMVAAGLGIIGYLAGNAIYSDFLNIPYLPGTGEMIVFCGALVGSGIGFLWFNTYPAQVFMGDVGSLSLGAALGIVTVIIRHEYVLLVMGGLFVIEALSVIVQVTSFRLTGKRVFNMAPLHHHYELKGWPEPRVIVRFWIITFMLVLLGLALLRLR

SEQ ID NO: 136596 - protein, 234 aa, Unknown
  Bacterial polypetide isolated from the Sargasso Sea
MLFSLFSNLVDIFSFFNVFKYLTVRTGLSMFTSMLVVFIVGNPLINYFSAKQIHNPIRDDGPSEHIVKKIGTPTMGGLMILLGVFSGVLLWGDLSNQYNWFLIYIAGSFGVLGAYDDYKKIRKNNSSGISSKFKIILQIILALIGIFIIYFFSDSTEIKNLYFPFFKNLVINLGWFFIPFYLFVLVGSSNAVNLTDGLDGLATVPVILVAACFAFISYVTGNIVFSDYLQIPYI

SEQ ID NO: 136597 - protein, 163 aa, Unknown
  Bacterial polypetide isolated from the Sargasso Sea
DGLATVPVILVAVCFAFISYVTGNIVFSDYLQIPYIEGTGEISIFCGAIIGACLGFLWFNAPPAKIFMGDTGSLSLGGSLGAVGIITKHEIVLAITGGLFVLEAVSVMVQVISFKLTGKRIFKMAPIHHHFEKKGWPESTVVIRFWIISIILAMVGLATLKLR

SEQ ID NO: 136598 - protein, 69 aa, Unknown
  Bacterial polypetide isolated from the Sargasso Sea
ITGGLFVLEAVSVIVQVLSYKLTGKRVFKMAPIHHHFEKKGWPESTVVIRFWIISIILAMIGLATLKLR

SEQ ID NO: 136599 - protein, 119 aa, Unknown
  Bacterial polypetide isolated from the Sargasso Sea
FCGAIIGSCLGFLWFNAPPAKIFMGDTGSLALGGSLGAVGIITKHEIVLAITGGLFVLEAVSVIAQVISFKLTGKRIFKMAPIHHHFEKKGWPESTVVIRFWIISIILAMIGLATLKLR

SEQ ID NO: 136600 - protein, 248 aa, Unknown
  Bacterial polypetide isolated from the Sargasso Sea
MVSYFVLGFFDDYFKVLKKNTDGISAKGKLVWQFVTALIAAYCLVYSNVIDTKLYVPFMKGPLLDMGFLYPLFAGIVVVACSNAVNLTDGLDGLAIGPIITSAASLGILAYVAGHKEIASYLYIPYVENVGELTVIAAAIIGAGVGFLWYNSYPAQIFMGDVGSLSLGGILGIIAVLTKNEILFILIGGVFVVETLSVIIQVFSFKTRKKRVFKMAPIHHHFELKGWPEPKVIVRFWIISIFLAILSV

SEQ ID NO: 136601 - protein, 262 aa, Unknown
  Bacterial polypetide isolated from the Sargasso Sea
YIVGNPLINYFSAKQIHNPIRDDGPSEHIIKKIGTPTMGGLMILLGVFSGVLLWGDLSNPYNWFLIYIAGSFGLLGAYDDYKKIKKNNSYGISSKLKISIQIILALIGILIIYFFSDSGEIKNLYFPFFKNLVINLGWFFVPFYLFILVGSSNAVNLTDGLDGLATVPVILVAACFAFISYVTGNIVFSDYLQIPYIEGVGEVSIFCGSIIGACLGFLWFNAPPAKIFMGDTGSLSLGGSLGAIGIITKHEIVLAITGGLFV

SEQ ID NO: 136602 - protein, 105 aa, Unknown
  Bacterial polypetide isolated from the Sargasso Sea
EVFMGDIGSLSTGSALGTLAILLKKEFLLIIIGGLFVAEAISVILQVGYFRYTKNKYGEGKKIFLMAPIHHHFELKGLPESKVVIRFWIVGLLLALLTITTFKIR

SEQ ID NO: 136603 - protein, 242 aa, Unknown
  Bacterial polypetide isolated from the Sargasso Sea
FITGFLDDYISIKNKENTGLKTKEKFTLQSIIAIIFILIAYEKNLINPLITVSDSWGIDMNIFILPISFIVLVGISNSVNLTDGLDGLAAGCSGIVFYGLGTEILMKEQQELFVFSILCYSMSGICLGFLRYNSYPAKIFMGDTGSLSIGAILGSIALLTDSIFTLSIFSGIFIIESLSVIIQVGFFKITKKLFHKGKRVFLMAPLHHHFELKGVKEQKIVENFWKINILLIILGIVLKINL

SEQ ID NO: 136604 - protein, 195 aa, Unknown
  Bacterial polypetide isolated from the Sargasso Sea
MLYSLLTSYVEIFSFLNVFKYITFRIGLAVITSLTIIFLIGNPLIQYFSKKQITGPIRQDGPIDHIVKKSGTPTMGGLMILIGIIISTLLWADLSNIYIWIVIFVCASLGLLGFADDFLKIKYKNSSGINAKFKFFWQLLIALIAVLALVYFTDHESILNLYFPFFKNIIINMGLFFIPFGIFVIIGSSNAVNLT

SEQ ID NO: 136605 - protein, 72 aa, Unknown
  Bacterial polypetide isolated from the Sargasso Sea
VLAITGGLFVLEAVSVMVQVISFILTGKRIFRMAPIHHHFEKKGWPESTVVIRFWIISIILAMIGLATLKLR

SEQ ID NO: 136606 - protein, 216 aa, Unknown
  Bacterial polypetide isolated from the Sargasso Sea
IVFLTYFSDHSELEYLYFPFFKNLIINLGWFFIPFAVFIIVGSSNAVNLTDGLDGLATVPVILVASCFAFISYVTGNIVFSEYLQIPYIKGIGEVSVFCGSIIGACIGFLWFNAPPAKIFMGDTGSLALGGSLGAVGIITKHEIVLAITGGLFVLEAISVIIQVGSYKLTGKRVFKMAPIHHHFEKKGWPESTVVVRFWIISIILAMIGLATLKFR

SEQ ID NO: 136607 - protein, 189 aa, Unknown
  Bacterial polypetide isolated from the Sargasso Sea
LGWFFIPFYLFVIVGSSNAVNLTDGLDGLATVPVILVAACFAFISYVTGNIVFSEYLQIVYIDGVGEASIFCGAIIGSCLGFLWFNAPPAKIFMGDTGSLALGGSLGAVGIITKHEIVLAITGGLFVLEAVSVIAQVISFKLTGKRIFKMAPIHHHFEKKGWPESTVVIRFWIISIILAMIGLATLKLR

SEQ ID NO: 136608 - protein, 133 aa, Unknown
  Bacterial polypetide isolated from the Sargasso Sea
LQLQYIPDVGELSIFCGSIVGSCLGFLWYNAPPAKIFMGDTGSLSLGGSLAAVAIIAKHEIVLAIVGGLFVLETASVIIQVISFKLTGKRIFKMAPIHHHFEQKGWAESTIVIRFWIIAIILALVGLATLKLR

SEQ ID NO: 136609 - protein, 177 aa, Unknown
  Bacterial polypetide isolated from the Sargasso Sea
IWPLGLFVVLAESNATNLTDGLDGLASGCGALVFTGLALQLMLRGDNGDPALAGFCMTMAGAWLGFLMHNRNPARAFMGDTGSLAMGAALSGVALLSNSLWPLLVMGGVFLAESLSVIIQVWVFKATKGADGQGRRVFRMAPLHHHFELGGTDERSVVPAFWLVTAGLVLLGLVLRP

SEQ ID NO: 136610 - protein, 164 aa, Unknown
  Bacterial polypetide isolated from the Sargasso Sea
LDGLATVPVILVAACFAFISYVTGNIVFSEYLQIPYIEGTGEISIFCGAIIGACLGFLWFNAPPAKIFMGDTGSLSLGGSLGAVGIITKHEIVLAITGGLFVLEAVSVMVQVISFKLTGKRIFKMAPIHHHFEKKGWPESTVVIRFWIISIILAMIGLATLKLR

SEQ ID NO: 136611 - protein, 278 aa, Unknown
  Bacterial polypetide isolated from the Sargasso Sea
IDTFSFLNVFKYLTVRTGLSMFTAMLVVFIVGTPFINYFSRKQIHNPIREDGPKDHIIKKIGTPTMGGLLILLGLFSGILLWGDLSNPFNWFLIFIVFSFGALGAFDDLKKIKSKSSHGLSSKLKLILQIILGLFGIAILTYLAEPSDLKNLYIPFFKNVVINLSWFFVPFYLFVIVGSSNAVNLTDGLDGLATVPVILVASCFAFISYVTGNIVFSEYLQIPYIEGVGEVAVFCGAIIGACLGFLWFNAPPAKIFMGDTGSLALGGSLGAVSIIPST

SEQ ID NO: 136612 - protein, 111 aa, Unknown
  Bacterial polypetide isolated from the Sargasso Sea
YNSYPAQVFMGDTGSLALGGIIAVFAISIRKELLIPVLCGVFLIENLSVIIQVGYFKYTKKKFGEGRRVFRMAPIHHHYQKVGLHEAKIVARFWIIAVLLAVVAIVTLKVR

SEQ ID NO: 136613 - protein, 112 aa, Unknown
  Bacterial polypetide isolated from the Sargasso Sea
ACLGFLWYNAPPAKIFMGDTGSLSLGGSLATVAIIVKHEIVLAIIGGLFVLETVSVIIQVVSFKLTGKRVFMMAPIHHHFEKKGWAESTIVIRFWIIAIILALIGLATLKLR

SEQ ID NO: 136614 - protein, 261 aa, Unknown
  Bacterial polypetide isolated from the Sargasso Sea
IRKDGPENHIIKKIGTPTMGGLLILLGLFSGVLLWGDLKNPYIWFLIFIAASFGLLGAYDDYKKIKNKNSSGISFKIKIISQIILSILGILILFYFSNSTELKNLYFPFFKNLIINLGWFFIPFYIFIIVGSSNAVNLTDGLDGLATVPVILVAGCFGFISYVTGNVVFSEYLLIPYIRDVGEVAVFCGAVIGSCIGFLWFNAPPAKIFMGDTGSLALGGSLGGIGIITKHEIVLAIIGGLFVLEAVSVIVQVVSYKLTGK

SEQ ID NO: 136615 - protein, 272 aa, Unknown
  Bacterial polypetide isolated from the Sargasso Sea
LWSDLYNPYNWFLFFIVGAFGTLGAFDDYKKIKTGNSNGVSFKFKLISQILIALIGIYILYNFTNSDEITNLYFPFFKNLAINLGWFFIPFYLFIIVGSSNAVNLTDGLDGLATVPIILVAACFAFISYVTGNIVFSDYLHIPYIEGVGEVAVFCGSIIGACIGFLWFNAPPAKIFMGDTGSLALGGSLGAVGIITKHEIVLAITGGLFVLEAVSVIVQVISFKLTGKRIFKMAPIHHHFEKKGWPESTVVIRFWIISIVLAMIGLATLKLR

SEQ ID NO: 136616 - protein, 296 aa, Unknown
  Bacterial polypetide isolated from the Sargasso Sea
FLIFGNYIINKLSNIQPTGQPIRDDGPESHIIAKKGTPTMGGLLIILSVFVSTIIWADLKNIFIWILLLTIFIFGSIGFADDYKKIKSNTSEGISSKIRIIFQIIFSFFITYLILINLDPSISKSMTFPFFKNLIIDFGIFYFLISIFIIIGSANAVNLTDGLDGLAIVPVMIVAMSFAFIAYVSGNIVFSNYLLIQYIPGTGELAVFCGSLIGAALGFLWFNAPPAKVFMGDTGSLALGGSLGSIAIICKHEILLAIIGGLFVLETFSVVIQVFIFKMTGKRVFLMAPLHHHLKK

SEQ ID NO: 136617 - protein, 218 aa, Unknown
  Bacterial polypetide isolated from the Sargasso Sea
VAAYFIATTHPEALQNLLALPIFKNLLVDLGFLFVPFAMIVIVGSANAVNLTDGLDGLAIMPVMIAAGALGVIAYAVGRVDFTEYLDVHYVNGTGEILILCSGIFGAGLGFLWYNAPPAAVFMGDTGSLALGGALGAVAVATKHEIVLAIVGGLFVVEALSVIIQVLYFKMTGKRVFLMAPIHHHFEKKGWAEPQIVIRFWIISLILAMVGLATLKVR

SEQ ID NO: 136618 - protein, 146 aa, Unknown
  Bacterial polypetide isolated from the Sargasso Sea
ISYVTGNIVFSDYLQIPYIEGVGEVSIFCGSIIGACLGFLWFNAPPAKIFMGDTGSLSLGGSLGAIGIITKHEIVLAITGGLFVLEAISVIAQVISFKLTGKRIFKMAPIHHHFEKKGWPESTVVIRFWIISIILAMIGLATLKLR

SEQ ID NO: 136619 - protein, 186 aa, Unknown
  Bacterial polypetide isolated from the Sargasso Sea
IYTGIDIYNLVGSSNAVNLTDGLDGLAILPVILITSALGLIAWAAGNTIVSDYLYIPYVQGTGELLVICGALIGAGIGFLWFNAYPAQIFMGDVGSLSMGAFIALVAIIVRHEIVFAVMSMVFIMEALSVILQVSSFKIRKKRIFKMAPIHHHFELSGWKEPKIIVRFWILTFIFVLVGLSLLKIR

SEQ ID NO: 136620 - protein, 239 aa, Unknown
  Bacterial polypetide isolated from the Sargasso Sea
YSNSSGISSKFKITSQIILAIIGVSFFVYFNDYQDLNNLYFPFFKNLIINLGWFFIPFAIFVIIGSSNAVNLTDGLDGLATVPVILVAACFAFISYVTGNIVFSNYLQIPYIEGTGEVSIFCGAIIGSCLGFLWFNAPPAKIFMGDTGSLSLGGSLGAVGIITKHEIVLAITGGLFVLEAVSVMVQVISFKLTGKRIFKMAPIHHHFEKKGWPESTVVIRFWIISIILAMIGLATLKLR

SEQ ID NO: 136621 - protein, 64 aa, Unknown
  Bacterial polypetide isolated from the Sargasso Sea
FVLEAVSVIVQVISFKLTGKRIFKMAPIHHHFEKKGWAESTVVVRFWIISIILAMIGLATLKLR

SEQ ID NO: 136622 - protein, 196 aa, Unknown
  Bacterial polypetide isolated from the Sargasso Sea
MLLLLAEYLQQFHKGFAVFQYLTLRGILGVLTALALSLWLGPWMIRTLQVRQIGQAVRHDGPQSHLSKKGTPTMGGALILSAITVSTLLWADLSNRYVWVVLAVTLLFGAIGWVDDYRKVIEKNSRGLPSRWKYFWQSVFGLAAAVFLYMTAQSPVETTLILPLLKDVAIPLGAGFVVLTYFVIVGTSNAVNLTDG

SEQ ID NO: 136623 - protein, 167 aa, Unknown
  Bacterial polypetide isolated from the Sargasso Sea
TDGLDGLATVPVILVAGCFAFISYITGNIFFSEYLQILYIEGTGEISIFCGSIIGACLGFLWFNAPPAKIFMGDTGSLSLGGSLGAIGIITKHEIVLAITGGLFVLEALSVVVQVVSFKLTGKRIFKMAPIHHHFEKKGWPESTVVIRFWIISIILAVIGLATLKLR

SEQ ID NO: 136624 - protein, 260 aa, Unknown
  Bacterial polypetide isolated from the Sargasso Sea
MLYNFLISLIDEFSFLNVFRYLTFRTGLSVMSSMIIVFVIGGPFIKFIQSHKITGPIREDGPIDHIVKKVGTPTMGGLLILIGILFGTLLWADLTNSYIWVLLMVATSFGLLGFVDDYLKIKRNNSTGVSSKMKIICQVILSLIAVFLLLNYGNNDHLENLYFPFFKNLSLHLGLFFIPFAIFIIVGSSNAVNLTDGLDGLATVPVMLVALSFTLICYVVGNIVFSDYLQIPYIANVGEASIFCGSIVGSCLGFLWYNAP

SEQ ID NO: 136625 - protein, 275 aa, Unknown
  Bacterial polypetide isolated from the Sargasso Sea
EGTPTMGGVIILMAVLLPTLLFAKVNSVLIQIIVFATIWMGIIGFIDDYLKVVKKIKRGLIARYKLAGQILLGCIVSFWIFNTPDFIDFNTKTTVPFFKNVEIDFGLLYPLMVILVITGTSNAVNLTDGLDGLLAGLLAICFTVFSAIAYISGRIDFSDYLNILYIPGAGELTIFTAAMAGACIGYLWFNSYPAEVFMGDTGSLSTGAALGTLAILLKKELLLLIIGGVFVWEALSVIIQVLYFRYTKEFSGTGKKFFMMAPIHHHFELKGWPES

SEQ ID NO: 136626 - protein, 102 aa, Unknown
  Bacterial polypetide isolated from the Sargasso Sea
MGDVGSHFIGSMFPIILISIGADGLILFFCFLYIFEALSVIIQVSSFKLNQKRIFRMTPIHHHFEMSGWAETTIIVRFWIINGIFIVIGLGLFYGDWVLFGN

SEQ ID NO: 136627 - protein, 265 aa, Unknown
  Bacterial polypetide isolated from the Sargasso Sea
ILGPYIIKFLRTKQFYQSIRQDGPKSHLDDKNTTPTMGGLIIISSIVISTILWSDLGNDYILLLLFGILSFGVIGFYDDYKKLVEGRSDGIKGRVKLFLQILSASLITIYLFSYMNTGEIGSVMPFLKDNSFYLGVLFIPWSIFILVGSSNAVNLTDGLDGLAILPCILIASAFVIFGYVHGNVNISEYLLIPYIEGSGEVAIFAASLVGAGLGFLWFNSYPAEIFMGDCGSLSLGSSLGLLAIILKQELAFAIMSGIFIAEVLS

SEQ ID NO: 136628 - protein, 59 aa, Unknown
  Bacterial polypetide isolated from the Sargasso Sea
LSVAIQVISFKTRGKRVFLMAPIHHHYELKGWAEPKIIVRFWIVTLVLILIALATLKLR

SEQ ID NO: 136629 - protein, 204 aa, Unknown
  Bacterial polypetide isolated from the Sargasso Sea
HIVKKIGTPTMGGLMILLGVFSGVLLWGDLSNPYNWFLIYIAGSFGLLGAYDDYKKIKKNNSSGVSSKFKIIIQIFLALIGILILYFYSESNEIKNLYFPFFKNFVINLGWFFIPFYLFVLVGSSNAVNLTDGLDGLATVPVILVAGCFAFISYVVGNVVFSEYLHIPYIKGVGEASVFCGSIIGACLGFLWFNAPPAKIFMGD

SEQ ID NO: 136630 - protein, 88 aa, Unknown
  Bacterial polypetide isolated from the Sargasso Sea
LGGSLGAVGIITKHEIVLAITGGLFVLEALSVMVQVISFKLTGKRIFKMAPIHHHFEKKGWPESTVVIRFWIISIILAMIGLATLKLR

SEQ ID NO: 136631 - protein, 258 aa, Unknown
  Bacterial polypetide isolated from the Sargasso Sea
NVFIWTLIFVFLSLGVLGFIDDLLKINLKNSRGLNSKLKFLGQLIIALIALYILIQFSDHQYLYNLYFPFFKNLILHMGLFFIPFALFVIIGSSNAVNLTDGLDGLATVPVMLVALSFTFISYIVGNTIFSEYLQLQYIPGVGEISIFCGSIVGSCLGFLWYNAPPAKIFMGDTGSLSLGGSLAAVAIIVKHEIVLAIIGGLFVLETVSVIIQVVSFKLTGKRVFKMAPIHHHFEKKGWAESTIVIRFWIIAIILALV

SEQ ID NO: 136632 - protein, 76 aa, Unknown
  Bacterial polypetide isolated from the Sargasso Sea
KHEVVLAITGGLFVLEAVSVIVQVVSFKITGKRIFKMAPIHHHFEKKGWPESTVVIRFWIISIILAMIGLATLKLR

SEQ ID NO: 136633 - protein, 245 aa, Unknown
  Bacterial polypetide isolated from the Sargasso Sea
DDFTKLKKSKKGMPAKTKFVLQFIVAALSTYYLLGQGSDVLSSEVLIPFTNNIRVDLGWLFLPFAIFVIVGSSNAVNLTDGLDGLAIMPVSMIAIALGIFAYVTGNFNFAEYLDLPFLQDAGEVFVFCCAISGAGLGFLWFNTYPAQIFMGDVGAVSLGGILGTIAVIVKQELILAIMGGVFIMETLSVILQVGSFKLRGKRIFNMAPIHHHFELKGWAEPKVIVRFWIITVFLVLIGLSSLKIR

SEQ ID NO: 136634 - protein, 187 aa, Unknown
  Bacterial polypetide isolated from the Sargasso Sea
MIKYFAFEYQSIFSFLNIFSYITFRSGAAILTALFFSLIFGNYLITKLSNIQPSGQPIREDGPKSHIILKKGTPTMGGLMIILSVLVATILWADLNNNFIWIALLTIIIFGLIGFADDYKKIKNNSSIGISSQIRILFQIFFGLFITFLIIKNLDPAISNSMTFPFFKNLIIDFGLFYFIISVFIII

SEQ ID NO: 136635 - protein, 185 aa, Unknown
  Bacterial polypetide isolated from the Sargasso Sea
MLYKYFLILSNDYAFLNVFRYITFRTAIAVFLGFLFSFFLAPPFIRFLQRRQIGEEIREDGPQSHFSKRGTPTMGGFIILLSILISTVLLNDLSNRFVLLSLFVLVAFGFLGLFDDYKKVVKKNTKGLTAGKKFIFQFLIGLIVGFLLYKGFISKEFKTVVMFPFFKDFLPQLGVFFIPYAAIVI

SEQ ID NO: 136636 - protein, 113 aa, Unknown
  Bacterial polypetide isolated from the Sargasso Sea
LWWNTNPAKIIMVDVGSHFIGSMFPIILISIGADGLILFFCFLYIFEALSVIIQVSSFKLNQKRIFKMTPIHHHFEMSGWAETTIIVRFWIINGIFIVIGLGLFYGDWVLFGN

SEQ ID NO: 136637 - protein, 126 aa, Unknown
  Bacterial polypetide isolated from the Sargasso Sea
GGGEASIFCGSIIGACLGFLWFNAPPAKIFMGDTGSLALGGSLGAVGIITKHEIVLAITGGLFVLEAVSVIAQVISFKLTGKRIFKMAPIHHHFEKKGWPESTVVVRFWIISIILAMIGLATLKLR

SEQ ID NO: 136638 - protein, 257 aa, Unknown
  Bacterial polypetide isolated from the Sargasso Sea
IVKKIGTPTMGGLIILFGLLVSVIFWSDLSNINILFCIYIAITFGLLGAYDDFKKIKYSNSSGISSKFKIISQIILAIIGVSFFVYLNDYQDLNNLYFPFFKNLIINLGWFFIPFAIFVIIGSSNAVNLTDGLDGLATVPVILVAACFAFISYVTGNIVFSNYLQIPYIEGTGEVSIFCGAIIGSCLGFLWFNAPPAKIFMGDTGSLSLGGSLGAVGIITKHEIVLAITGGLFVLEAVSVMVQVISFKLTGKRIFRM

SEQ ID NO: 136639 - protein, 113 aa, Unknown
  Bacterial polypetide isolated from the Sargasso Sea
WRCFGILWFNAPPAKVFMGDTGSLALGATIGSIAIMVKHEIVLAIAGGLFVLETLSVIIQVISFKLTGKRVFMMAPLHHHFEKKGWAESTIVIRFWIITIVLALLSLATLKIR

SEQ ID NO: 136640 - protein, 112 aa, Unknown
  Bacterial polypetide isolated from the Sargasso Sea
AGLGFLWFNTYPAQIFMGDVGAVSLGGILGTIAVIVKQELILAIMGGVFIIETLSVILQVGSFKLRGKRIFNMAPIHHHFELKGWAEPKVIVRFWIITVFLVLIGLSSLKIR

SEQ ID NO: 136641 - protein, 101 aa, Unknown
  Bacterial polypetide isolated from the Sargasso Sea
MLKYSWGDTGSLSLGGSLAAVAIIVKHEIVLAIIGGLFVLETVSVIIQVISFKLTGKRVFMMAPIHHHFEKKGWAESTIVIRFWIIAIILALIGLATLKLR

SEQ ID NO: 136642 - protein, 169 aa, Unknown
  Bacterial polypetide isolated from the Sargasso Sea
NLTDGLDGLATVPVILVAACFGFISYVTGNIVFSEYLQIPYIKDVGEASIFCGSIIGACLGFLWFNAPPAKIFMGDTGSLALGGSLGAVGIITKHEIVLAITGGLFVLEAASVIVQVVSYKLTGKRIFKMAPIHHHFEKKGWPESTVVVRFWIISIILAMIGLATLKLR

SEQ ID NO: 136643 - protein, 129 aa, Unknown
  Bacterial polypetide isolated from the Sargasso Sea
ELTIFTSAMAGACLGYLWFNSHPAEIFMGDTGSLSTGAALGTLAILLKKELLLLIIGGVFVWEAISVIIQLSYFRYTKSLNGEGKRFFNMAPIHHHYELKGWPETKVVIRFWIIGLLLALFSLTTFKIR

SEQ ID NO: 136644 - protein, 227 aa, Unknown
  Bacterial polypetide isolated from the Sargasso Sea
MLFSLFSNLVEFFSFLNVFKYLTVRTGLSMFTSMIVVFLVGGPLINYFSSHQIHDPIREDGPSDHIVKKIGTPTMGGLMILLGIFSGVLLWGDFSNPYNWFLLYIAGSFGLLGAYDDYQKIKKNNSNGISSKLKIIFQIILALVGIFILYFYSGSNEIENLYFPFFKNLIINLGWFFIPFYLFVIVGSSNAVNLTDGLDGLATVPVILVAACFAFISYVTGNIVFFG

SEQ ID NO: 136645 - protein, 92 aa, Unknown
  Bacterial polypetide isolated from the Sargasso Sea
GSLSLGGSLGAFGIITKHEIVLAITGGLFVLEAISVIVQVVSFKLTGKRIFKMAPIHHHFEKKGWPESTVVIRFWIISIILALIGIATLKLR

SEQ ID NO: 136646 - protein, 121 aa, Unknown
  Bacterial polypetide isolated from the Sargasso Sea
MVGACLGFLWFNASPAEIFMGDTGSLSTGAALGTLAIVLKKELLLFIIGGVFVFETISVIIQVLFFRYTKFRLGKGQRFFNMAPIHHHYELAGIKESKIVVRFWIVGILLALFSLTTFKIR

SEQ ID NO: 136647 - protein, 268 aa, Unknown
  Bacterial polypetide isolated from the Sargasso Sea
MFEYLGTALVSIDPGFDVLRYLTVRTIGGTITALLISIFLGPIIINFLKSMQFEQFVRDDGPKSHYKKTGTPTMGGLIILSSLIISTLLWADLGNRYIWVVLFVTFGFSIIGFFDDYLKIKFKNSKGLSSIQKILFQSLIAFLAVTYLYYSAEIPPETSFIVPFFKDAILPMSPFLFIFIGMFVLVGSSNAVNLTDGLDGLAILPSVLIGGALGLIAYAMGNQLLSDYLYLPHLPLSGELIVFCGALIGSGIGFLWYNTYPAQIFMGD

SEQ ID NO: 136648 - protein, 191 aa, Unknown
  Bacterial polypetide isolated from the Sargasso Sea
INLGYFFIPFSIFVVVGSSNSVNLTDGLDGLAIVPVMIAASCFALIAYLVGNINFSSYLQLNYVPGVGEIAIVLGALFGAGLGFLWFNAPPAEIFMGDTGSLSLGGVIGISSVATRHELVLVIIGGLFVVETISVILQVGYFKLTGKRIFLMAPLHHHFEKRGWEESTIVIRFWIIAVILALVGLSTLKLR

SEQ ID NO: 136649 - protein, 116 aa, Unknown
  Bacterial polypetide isolated from the Sargasso Sea
ALIGSEIGFLWYNTYPAQVFMGDIGSLSLGAILGIIAIILRHELVFAIMAGVFVMETLSVAIQVISYKTRGKRVFLMAPIHHHFELKGWAEPKIIVRFWIITLVLILIALSTLKLR

SEQ ID NO: 136650 - protein, 314 aa, Unknown
  Bacterial polypetide isolated from the Sargasso Sea
LTALLISFIFGPSIISILKKTQKKGQPIRSDGPKNHIIFKTGTPTMGGLLILLAFTISTILWAKLDNVYIWVVLSVAIFFGIIGLLDDWLKVSRMTSNGLKSYQKIIPQIIVAFLAAWTILENTPENFQNTLSIPFLKDSILFLGIIYIPFTILVIVGSSNAVNLTDGLDGLAIVPVMIAAGSLAVIVYVVGHVNFSNYLQLNYIPGVGEITVLLGAIIGSGLGFLWFNAPPAMVFMGDTGSLSLGGVIGVTASASRHELVLIIIGGLFVLETVSVIVQILSFKLTGKRIFKMAPLHHHFEQKGWAESTIVIKF

SEQ ID NO: 136651 - protein, 86 aa, Unknown
  Bacterial polypetide isolated from the Sargasso Sea
GSLGAVGIITKHEIVLAIIGGLFVLEAVSVIVQVISFKLTGKRIFKMAPIHHHFEKKGWPESTVVIRFWIISIILAMIGLATLKLR

SEQ ID NO: 136652 - protein, 135 aa, Unknown
  Bacterial polypetide isolated from the Sargasso Sea
YLPLASELTIFATAFFGGCLGFLWFNTKPAEIFMGDVGSLSTGAALGTLAILLKKEVLLLIVGGVFVIETLSVIIQVLYFRYTKNKYGTGKKFFLMAPIHHHFELKGWPESRVVTRFWIIGILFALMSLTTFKVR

SEQ ID NO: 136653 - protein, 89 aa, Unknown
  Bacterial polypetide isolated from the Sargasso Sea
SLGGSLAAIAIIVKHEIVLAIIGGLFVLETVSVIIQVISFKLTGKRIFKMAPIHHHFEKKGWAESTIVIRFWIIAIILALIGLATLKLR

SEQ ID NO: 136654 - protein, 289 aa, Unknown
  Bacterial polypetide isolated from the Sargasso Sea
PTNGRCNNFIGLLVSVIFWADLSNINILFCIYIAITFGLLGAYDDFKKIKYSNSSGISSRFKITSQIILTIIGVSFFIYLNSYQDLNNLYFPFFKNLIVNLGWFFIPFAIFVIVGSSNAVNLTDGLDGLATVPVILVAACFAFISYVTGNIVFSNYLQIPYIEGTGEVAIFCGAIIGSCLGFLWFNAPPAKIFMGDTGSLSLGGSLGAVGIITKHEIVLAITGGLFVLEAVSVMVQVISFKLTGKRIFRMAPIHHHFEKKGWPESTVVIRFWIISIILAMIGLATLKLR

SEQ ID NO: 136655 - protein, 251 aa, Unknown
  Bacterial polypetide isolated from the Sargasso Sea
MLGAYDDYRKIKFNNSNGVSSKFKISIQILLAVFGIIILYYSGVSNEIENLYFPFLKNLVINLGWFFIPFYIFVLVGSSNAVNLTDGLDGLATVPVILVASCFALISYVSGNIVFSGYLQIPYLEGVGEASIFCGAIIGACLGFLWFNAPPAKIFMGDTGSLSLGGSLGAVGIITKHEIVLAITGGLFVLEAVSVIVQVISFKLTGKRIFRMAPIHHHFEKKGWPESTVVIRFWIISIILALIGIATLKLR

SEQ ID NO: 136656 - protein, 282 aa, Unknown
  Bacterial polypetide isolated from the Sargasso Sea
VDTFSFLNVFKYLTFRTGLSFFTSLVIVLIIGGPFIKFFSKQKILNPIRDDGPEDHIIKKIGTPTMGGVIILFGLLVSVIFWADLSNINILFCIYIAISFGLLGAYDDFKKIKNSNSSGISSKFKLILQIILAIVGVSFFVYLNDYQDLNNLYFPFFKNLIINLGWFFIPFAIFVIIGSSNAVNLTDGLDGLATVPVILVAACFAFISYVTGNIVFSNYLQIPYIEGTGEVSIFCGAIIGSCLGFLWFNAPPAKIFMGDTGSLSLGGSLGAVGIITKHEIVL

SEQ ID NO: 136657 - protein, 189 aa, Unknown
  Bacterial polypetide isolated from the Sargasso Sea
LGLFAVPFILIVILGSANAVNLTDGLDGLAIVPVMIVAATFAVICYLAGNIIFAEYLYINYLPGAGELTVLCAAIIGSALGFLWYNAPPAMVFMGDTGSLSLGAALGSISILLKQEIVLAIVGGIFVAEAISVILQVSSFKLTGKRIFKMAPLHHHFEKNGLPESKIVIRFWIVAIILALIGLATLKIR

SEQ ID NO: 136658 - protein, 280 aa, Unknown
  Bacterial polypetide isolated from the Sargasso Sea
HIIKKIGTPTMGGVIILFGLLISVLFWADLSNLNVLFCLYIAISFGLLGAFDDYKKIKYSNSSGISSKLKLIFQIILAIIGVSFYVYFNEYQDLTNLYFPFFKNLIINLGWFFIPFSIFVIIGSSNAVNLTDGLDGLATVPVILVAACFAFISYVTGNVVFSNYLQIPYIEGTGEVSIFCGAIIGSCLGFLWFNAPPAKIFMGDTGSLSLGGSLGAVGIITKHEIVLAITGGLFVLEAVSVIVQVISFKITGKRVFKMAPIHHHFEKKGWPESTVVIRFG

SEQ ID NO: 136659 - protein, 41 aa, Unknown
  Bacterial polypetide isolated from the Sargasso Sea
LMAPIHHHFELKGWAEPKVIVRFWIITFVLVLFALATLKLR

SEQ ID NO: 136660 - protein, 63 aa, Unknown
  Bacterial polypetide isolated from the Sargasso Sea
VLEAVSVIVQVISFKLTGKRVFKMAPIHHHFEKKGWPESTVVIRFWIISIILAMIGLATLKLR

SEQ ID NO: 136661 - protein, 188 aa, Unknown
  Bacterial polypetide isolated from the Sargasso Sea
GWFFIPFAIFVIIGSSTAVTLTDGLDGLATVPVILVAACFAFISYVTGNIVFSNYLQIPYIEGTGEVSIFCGAIIGSCLGFLWFNAPPAKIFMGDTGSLSLGGSLGAVGIITKHEIVLAITGGLFVLEAVSVMVQVISFKLTGKRIFRMAPIHHHFEKKGWPESTVVIRFWIISIILAMIGLATLKLR

SEQ ID NO: 136662 - protein, 257 aa, Unknown
  Bacterial polypetide isolated from the Sargasso Sea
IIQKLRSSQILETIGERGPTTHQSKKGTPTMGGIIILTAVILPTLLWANLMNSYIHIILFSTLWMGLFGFLDDYLKTVKKTKKGLVVRYKLSSQIILGLIVGFWVFFGSDFSEIGPVTSVPFFKNQEIPFGIFYIPWVTLVLTASSNAVNLTDGLDGLAAGLLAICAIGLAIVSYISGRIDFSDYLNIIYLPKASELTVFAAALGGACLGFLWFNAPPAQVFMGDTGALSTGAAIGTLAILLKKELLLIILGGVFVW

SEQ ID NO: 136663 - protein, 202 aa, Unknown
  Bacterial polypetide isolated from the Sargasso Sea
MLYLLILDLIESYSFLNVFKYLTVRTGLAVFTSLLVVFLIGNPFINFFSTNQILDPIREDGPDQHIVKKIGTPTMGGVLILIGLFSGILLWGDLTNIYIWFLIYIVGGYGLLGAFDDYKKVKYKNSSGISFKFKLISQIFIAFLGVLFLTYFSENQDLKNLYFPFFKNLILNLGWFFIPFAIFIIVGSSNAVNLTDGLDGLA

SEQ ID NO: 136664 - protein, 167 aa, Unknown
  Bacterial polypetide isolated from the Sargasso Sea
TDGLDGLATVPVMLVALSFTLICYVVGNTVFSEYLQIPYIPNVGEVSIFCGSMVGSCLGFLWWNAPPAKIFMGDTGSLSLGGSLGAVSIISKHEIVLGIIGGLFVLETVSVIIQVISFKLTGKRVFMMAPLHHHFEKKGWAESTVVIRFWIISIILALIGLATLKLR

SEQ ID NO: 136665 - protein, 206 aa, Unknown
  Bacterial polypetide isolated from the Sargasso Sea
YATRLSVPFFKDFQPELGFSYLLFIVFIMVGTSNAVNLTDGLDGLAIGPIIISILTYTGIVYICGHVKFAEYLRIQYIKDAGEIAVASSAILGASLGFLWYNSYPAQVFMGDVGSLSLGGLIGTIAVIVKHELLLILIGGIFVIEALSVIIQVGYFKYTSGKRFFKMAPLHHHFEELGWSEPKVIVRFWIIAVILAMIGLSTLKLR

SEQ ID NO: 136666 - protein, 224 aa, Unknown
  Bacterial polypetide isolated from the Sargasso Sea
QVLIAIVATLWIISLTSPDLATSLAVPFFKSLLIDLSWFFVAFAVFVMVGASNSVNLTDGLDGLAIGPVMIAAAVFAIISYLIGNSVFSSYLQVHYVPGAGELSVFCGALVGAGLGFLWFNAPPAMVFMGDTGSLSMGGALGAVSVITKHELVLAVVGGLFVLETVSVIVQVTSFKLTGKRVFQMAPLHHHFEKKGWAEPTIVIRFWIIAMILALLGLATLKLR

SEQ ID NO: 136667 - protein, 96 aa, Unknown
  Bacterial polypetide isolated from the Sargasso Sea
MGDTGSLAFCGSLGAVGIITKHEIVLAITGGLFVFEAVSVIVQVVSFKLTGKRIFKMAPIHHHYEKKGWPESTVVIRFWIVAIILAMIGLATLKFR

SEQ ID NO: 136668 - protein, 59 aa, Unknown
  Bacterial polypetide isolated from the Sargasso Sea
VSVMVQVISFKLTGKRVFKMAPIHHHFEKKGWPESTVVIKFWIISIILTMIGLSTLKLR

SEQ ID NO: 136669 - protein, 256 aa, Unknown
  Bacterial polypetide isolated from the Sargasso Sea
ILSVIFSSILWSDLHNNFIWIGLLALILFGTIGIIDDYKKIKSNSSNGLKALTRIILQIIFGLIISLIILKFLDDKIDTTIAFPFFKNLIINFGYFYLFISLFILVGSANAVNLTDGLDGLAIVPVMIVASTFAFIAYVSGNFVFSDYLLINYIPGTGELSILCGALIGSALGFLWFNAPPAKVFMGDTGSLALGATLGSIALMVKHEIVLAIAGGLFVLETMSVVIQVISYKLTGKRVFRMAPLHHHFEKKGWAE

SEQ ID NO: 136670 - protein, 169 aa, Unknown
  Bacterial polypetide isolated from the Sargasso Sea
NLTDGLDGLATVPVILVAACFAFISYVTGNIVFSDYLQIPYIEGTGEISIFCGAIIGSCLGFLWFNAPPAKIFMGDTGSLSLGGSLGAVGIITKHEIVLAITGGLFVLEAVSVMVQVISFKLTGKRIFKMAPIHHHFEKKGWPESTVVIRFWIISIILAMIGLATLKLR

SEQ ID NO: 136671 - protein, 122 aa, Unknown
  Bacterial polypetide isolated from the Sargasso Sea
MIVFCGALVGSGIGFLWFNTYPAQVFMGDVGSLSLGAALGIVTVIIRHEYVLLVMGGLFVIEALSVIVQVSSFKLTGKRVFNMAPLHHHYELKGWPEPRVIVRFWIITFMLVLLGLALLRLR

SEQ ID NO: 136672 - protein, 229 aa, Unknown
  Bacterial polypetide isolated from the Sargasso Sea
MLYSLLTSLVDTFSFLNVFKYITFRIGLSVITSLIIIFLIGNPLIRYFSKKQITGPIRQDGPIDHIIKKSGTPTMGGLMILIGIIVSTLMWADLNNVYIWIVLFVCASLGLLGFVDDYLKIKLKNSSGINAKLKFFGQFLISLVAIVILIYFTDHESISNLYFPFFKNLVLNMGLFFIPFGIFVIIGSSNAVNLTDGLDGLATVPVMLVALSFALICYLVGNTILQIIT

SEQ ID NO: 136673 - protein, 92 aa, Unknown
  Bacterial polypetide isolated from the Sargasso Sea
GSLALGAILGILAIILRHELVFAIMAGVFVVETLSVAIQVISYKTRGKRVFLMAPIHHHFELKGWPEPKIIVRFWIITLVLILIALATLKLR

SEQ ID NO: 136674 - protein, 312 aa, Unknown
  Bacterial polypetide isolated from the Sargasso Sea
MLYNLLTNYSDTYTFLNFFNFLTVRTGLAVITAMVVVFLIGDKFITFFSTNKITNPIRSDGPEGHLIKKIGTPTMGGVLILIGLFSGVFLWGDLSNPYNWLLIFITFSFGILGAFDDYKKIKNNNSKGISSKLKLIIQIILGLISLVILYNFIDSDLTTNLYFPFFKNLVINLGWFFIPFYLFVIVGSSNAVNLTDGLDGLATVPVILVAGCFAFISYVSGNIIFAEYLLIPYIEGVGEVTVFCGSIIGASIGFLWFNAPPAKIFMGDTGSLALGGSLGAVGVVTKHEIVLAITGGLFVLEAVSVIVQSYII

SEQ ID NO: 136675 - protein, 269 aa, Unknown
  Bacterial polypetide isolated from the Sargasso Sea
DLNNIYIWIVLFVCTSLGLLGFIDDYLKIKFKNSSGINAKVKFFGQFLISLFAILMLVYFTDHQIISNLYFPFFKNLVLHMGLFFIPFGIFVIIGSSNAVNLTDGLDGLATVPVMLVALSFSLICYLVGNTIFSNYLQIQYIPDVGELSIFCGSIVGSCLGFLWYNAPPAKIFMGDTGSLSLGGSIASVAIIVKHEIVLAIVGGLFVLETVSVIVQVISFKLTGKRVFMMAPIHHHFEKKGWAESTVVIRFWIIAIILALVGLATLKLR

SEQ ID NO: 136676 - protein, 287 aa, Unknown
  Bacterial polypetide isolated from the Sargasso Sea
FFFNVFKYLTFRSGGALLTSLTFSFIFAPVIINWLRNNQKYKKTIREDVPNKHLIKKRGTPTMGGLLILVSFILSTLLWADTKNYYIWLVLAITFGFGAIGFIDDYFKLTSKDRKGLKVGTKLIFQFLITSITIFFLYNLFDYQYIDTLAVPFLKNYLFDLGVLFPIFAFLVIIGTSNSVNLTDGLDGLAVVPVIITATCLGLISYLVGNKIFSEYLNLFFVIGAGELAVLSSALVGSCLGFLWYNAHPAKIFMGDTGSLSIGAALGSISIIIKHELVLFIIGFLFV

SEQ ID NO: 136677 - protein, 245 aa, Unknown
  Bacterial polypetide isolated from the Sargasso Sea
FVSLFIGFLDDYLSIKNKKNTGLKSKEKFILQSVISITFIFLAYEKDLINPLIAISDTWGINTNIFIFPISFLVLAGLSNSVNLSDGLDGLAAGCSAIVFYGLGTEILIKDQKELIIFSILCYSMSGICLGFLKYNSYPAKIFMGDTGSLSIGAILGSIALLTNSVFTLSIFSGIFIIESLSVMIQVSFFKITKKLLNNGKRIFLMAPLHHHFELKGIKEQKIVENFWKVNILFVILGIVLKINL

SEQ ID NO: 136678 - protein, 269 aa, Unknown
  Bacterial polypetide isolated from the Sargasso Sea
MILLGIFSGVVLWGDFSNAYNWFLLYITGSFGLLGAYDDFQKIKKNNSNGISSKKKIIIQIILALCGILILYFYSGSNELQNLYFPFFKNLIINLGWFFIPFYLFIIVGSSNAVNLTDGLDGLATVPVILVAACFAFISYVTGNTVFSSYLQITYIEGVGEASIFCGAIIGSCLGFLWFNAPPAKIFMGDTGSLALGGSLGAVGIITKHEIVLAITGGLFVLEAVSVIAQVISFKLTGKRIFKMAPIHHHFEKKGWPESTVVIRFWIIS

SEQ ID NO: 136679 - protein, 232 aa, Unknown
  Bacterial polypetide isolated from the Sargasso Sea
MLLMLAQWLQGLSPDFGFLRVFQYLTLRAVLAAVTALLIGLIVGPRAIRMLTALKIGQPVRGYGMETHLVKSGTPTMGGVLILFSIAVSTLLWFDLSNRFVWIVLLVTLGFGAIGWVDDWRKVVNKDPEGMRSGEKYFWQSVIGLLAALYLVFCISENNNAEVFGLFISWVQSGFSMDLPPKAGLMVPFFKEVSYPLGVLGFIVMTYLVIVGASNAVNLTDGLDGLAIMPVI

SEQ ID NO: 136680 - protein, 260 aa, Unknown
  Bacterial polypetide isolated from the Sargasso Sea
LSVITSLVVSFIIGGPLIRIFSENMISGPIRQDGPIDHIIKKTGTPTMGGVIIIIGMLTSTLLWADLNNIYIWTLIFVSLSLGVLGFTDDWLKIRFKNSRGLNPKLKFFGQLIIGSIALFILIKFSNHEYLYNLYFPFFKNLIWQMGLFFIPFGLFVIIGSSNAVNLTDGLDGLATVPVMLVALSFTLIAYVVGNTIFSEYLKLQYIPDVGELSIFCGSIVGSCLGFLWYNAPPAKIFMGDTGSLSLGGSLAAVAIIAKP

SEQ ID NO: 136681 - protein, 286 aa, Unknown
  Bacterial polypetide isolated from the Sargasso Sea
LNPIRNDGPEDHIVKKIGTPTMGGLIILFGLLVSVIFWADLSNINILFCVYIAITFGLLGAYDDFKKIKFSNSSGISSKFKITSQIILAIIGVSLFVYLNDYQGLNNLYFPFFKNLIINLGWFFIPFAIFVIIGSSNAVNLTDGLDGLATVPVILVAACFAFISYVTGNIVFSNYLQIPYIEGTGEVSIFCGAIIGSCLGFLWFNAPPAKIFMGDTGSLSLGGSLGAVGIITKHEIVLAITGGLFVLEAVSVMVQVISFKLTGKRIFRMAPIHHHFEKKGGQSLRL

SEQ ID NO: 136682 - protein, 290 aa, Unknown
  Bacterial polypetide isolated from the Sargasso Sea
KKSGTPTMGGLLIIMSIIVSLILWADLKNNFIWISVLSLLSFGTIGFFDDFKKIKSNSSYGLNAKTRIFAQIIVSFIIVYLIQINLPSSVNNSMSFPFFKNVIIDFGIFYLFIGIFIIIGSANAVNLTDGLDGLAIVPIMIVAMTYSFISYVTGNMIFSDYLHINYIIGTGELSVFCGTIIGSALGFLWFNAPPAKVFMGDTGSLALGSSLGSTAIIVKHEIVLAIVGGLFVLETLSVIIQVLSFKLTGKRIFMMAPLHHHFEKKGWPESTIVIRFWIITIVLALIGLAT

SEQ ID NO: 136683 - protein, 72 aa, Unknown
  Bacterial polypetide isolated from the Sargasso Sea
VFAIMAGVFVIETLSVAIQVISYKTRGKRVFLMAPIHHHYELKGLAEPKIIVRFWIITLVLILIALATLKLR

SEQ ID NO: 136684 - protein, 95 aa, Unknown
  Bacterial polypetide isolated from the Sargasso Sea
GDTGSLSLGGSLAAVAIIAKHEIVLAIVGGLFVLETVSVIIQVISFKLTGKRIFKMAPIHHHFEKKGWAESTIVIRFWIIAIILALVGLATLKLR

SEQ ID NO: 136685 - protein, 213 aa, Unknown
  Bacterial polypetide isolated from the Sargasso Sea
MINYSNHEYLNELYFPFFKNLILDLGILFIPFGLVVIIGASNAVNLTDGLDGLATVPVMLVALSFTLISYVVGNTIFSEYLQIQYIPEVGELSIFCGSIVGACLGFLWYNAPPAKIFMGDTGSLSLGGSLAAIAIIVKHEIVLAIIGGLFVLETVSVIIQVISFKLTGKRIFKMAPIHHHFEKKGWAESTIVIRFWIIAIILALIGLATLKLR

SEQ ID NO: 136686 - protein, 189 aa, Unknown
  Bacterial polypetide isolated from the Sargasso Sea
MPFGLELPLGLLMWPLGLFVVLAESNATNLTDGLDGLASGCGALVFTGLALQLMLRGDNGDPALAGFCMTMAGAWLGFLVHNRNPARAFMGDTGSLAMGAALSGVALLSNSLWPLLVMGGVFVAESLSVIIQVWVFKATKGADGQGRRVFRMAPLHHHFELGGTDERSVVPAFWLVTAGLVILGLVLRP

SEQ ID NO: 136687 - protein, 104 aa, Unknown
  Bacterial polypetide isolated from the Sargasso Sea
VFMGDTGSLSSGAALGTLAVLLKKELLLFIIGGVFVLEAVSVIVQVTYFRWTRYLTGKGERYFKMAPIHHHFELKGWPETKIVIRFWIIGLLLALLSLTTFKVR

SEQ ID NO: 136688 - protein, 67 aa, Unknown
  Bacterial polypetide isolated from the Sargasso Sea
GGLFVVETISVILQVGYFKLTGKRIFLMAPLHHHFEKRGWEESTIVIRFWIIAVILALIGLSTLKLR

SEQ ID NO: 136689 - protein, 68 aa, Unknown
  Bacterial polypetide isolated from the Sargasso Sea
TGGLFVLEAISLMVQVISFKLTGKRIFRMAPIHHHFEKKGWPESTVVIRFWIISIILAMIGLATLKLR

SEQ ID NO: 136690 - protein, 232 aa, Unknown
  Bacterial polypetide isolated from the Sargasso Sea
MLFHILVPLADDFGALNVFRYLTFRTGGAVITALIVSFLFGPVLIELLKSRQQGGQPIRDDGPESHLLTKKGTPTMGGILILIALSSATLLWSDLSNGFVWAGLGVTLAFGMIGFLDDYLKVSNRDSRGLSGKLKILLQVVIAAVATFWIMRHLPPHLATSLAIPFVKNLLLDLGWMFIILAVLVMVGASNAVNLTDGLDGLAIVPVMIAAGVFALIAYLSGHSIFANYLQI

SEQ ID NO: 136691 - protein, 196 aa, Unknown
  Bacterial polypetide isolated from the Sargasso Sea
FKNMVVNLGWFFIPFAIFVIIGSSNAVNLTDGLDGLATVPVILVAACFAFISYVTGNIVFSNYLQIPYIEGTGEVSIFCGAIIGSCLGFLWFNAPPAKIFMGDTGSLSLGGSLGAVGIITKHEIVLAITGGLFVLEAVSVMVQVISFKLTGKRIFRMAPIHHHFEKKGWPESTVVIRFWIISIILAMIGLATLKLR

SEQ ID NO: 136692 - protein, 219 aa, Unknown
  Bacterial polypetide isolated from the Sargasso Sea
MLYNLLLPFKDSFSIINLFEYITFRAGIAAIAALFISFIIGPWVIHILQKNQIGEEIRSTGPKSHMKKEGTPTMGGVIILMAVLLPTLLFSKINSVLVQIIIFATIWMGVIGFLDDYLKVIKKMKRGLIARHKLAGQISLGCIVSFWILNTPEFIDFNSKTTMPFFKNVEIDLGMLYPLMVILVITGTSNAVNLTDGLDGLLAGLLAICFTVFSAIAYI

SEQ ID NO: 136693 - protein, 237 aa, Unknown
  Bacterial polypetide isolated from the Sargasso Sea
TSDGLSALSKLFWQSLITLVACSYLFYSHENLAEVSLIVPFFKDVSIPLGIGFIFLSYFVVLGTSNAVNLTDGLDGLAILPCVMVAAGLGIIGYLSGNIIYADFLNIPYLPGTGEMIVFCGALVGSGIGFLWFNTYPAQVFMGDVGSLSLGAALGIVTVIIRHEYVLLVMGGLFVVEALSVIVQVTSFRLTGKRIFQMAPLHHHYELKGWPEPRVIVRFWIITFMLVLLGLALLRLR

SEQ ID NO: 136694 - protein, 280 aa, Unknown
  Bacterial polypetide isolated from the Sargasso Sea
IGVFSGVLLWCNLFNPYIWTLIFIVAGFGLLGAYDDYKKIKFNNSSGVSFKFKITIQIIIAILGILILINFSDHSNLEYLYFPFFKNLLINLGWFFIPFGAFIIVGSSNAVNLTDGLDGLATVPVILVASCFAFISYVTGNIVFSDYLQIPYVEGVGEVTVFLGAIIGACLGFLWFNAPPAKIFMGDTGSLALGGSLGTVGIITKHEIVLAITGGLFVLEAVSVIVQVLSYKLTGKRVFKMAPIHHHFEKKGWPESTVVIRFWIISIILAMIGLATLKLR

SEQ ID NO: 136695 - protein, 217 aa, Unknown
  Bacterial polypetide isolated from the Sargasso Sea
LTVRTIGGTVTALLLSILMGPLIINSLKSMQFEQFVRKDGPQSHYKKTGTPTMGGLLILSSLIISTLLWADLGNRYIWVVLGVTIGFSIIGFFDDYLKIKNKSPDGLSSKQKIFFQSIIALISITYLYYSAEIIPEQSFIVPFFKDLIIPMSPFVFIFIGVFVLVGSSNAVNLTDGLDGLAILPSVLIGGALGLIAYAMGNQNIADYLYLPHLPLSG

SEQ ID NO: 136696 - protein, 206 aa, Unknown
  Bacterial polypetide isolated from the Sargasso Sea
MLVWLAEFLTQYVNAFNVFSYLTFRSILGVLTALLLSLYFGPKLIAALQKLQIGQTVRDDGPQSHFSKKGTPTMGGLLILGSIAISTLLWADLSNKYVWVVLFVLVSYGWIGFIDDYRKVIRKDPKGLIARWKYFWQSVFAIITAFFLYATAERPAETSLVLPFIKDVLPQLGLFFLVTTYFVMVGFSNAVNLTDGLDGLAIVPTI

SEQ ID NO: 136697 - protein, 96 aa, Unknown
  Bacterial polypetide isolated from the Sargasso Sea
MGELGSLTLGGILGTLAVLIRHEKVFAIMAGVFVKETLSVIIQVGSYKLRGKRVFLMAPIHHHFELKGWAEPKVIVRFWIITFVLVLFALATLKLR

SEQ ID NO: 136698 - protein, 54 aa, Unknown
  Bacterial polypetide isolated from the Sargasso Sea
QVISFKLTGKRVFMMAPLHHHFEKKGWAESTIVIRFWIITIVLALLSLATLKIR

SEQ ID NO: 136699 - protein, 304 aa, Unknown
  Bacterial polypetide isolated from the Sargasso Sea
RDDGPESHLIAKKGTPTMGGLLIILSVFVSTIIWGDLQNIFIWILLLTILIFGSIGFADDYKKIKSNTSEGISSKIRIIFQIIFSFFITYLILINLDPSISKSMTFPFFKNLIIDFGIFYFLISIFIIIGSANAVNLTDGLDGLAIVPVMIVAMSFAFIAYVSGNIVFSNYLLIQYIPGTGELAVFCGSLIGAALGFLWFNAPPAKVFMGDTGSLALGGSLGSIAIICKHEILLAIIGGLFVLETLSVVIQVFIFKMTGKRVFLMAPLHHHFEKKGWHESTIVIRFWIITIVLALIGLATLRIR

SEQ ID NO: 136700 - protein, 182 aa, Unknown
  Bacterial polypetide isolated from the Sargasso Sea
FSVFVIIGSSNAVNLTDGLDGLATVPVILVAGCFAFISYITGNVVFSDYLQIPYIEGTGEVSIFCGAIIGSCLGFLWFNAPPAKIFMGDTGSLALGGSLGVVGIITKHEIVLAITGGLFVLEAVSVMVQVISFKLTGKRIFKMAPIHHHFEKKGWPESTVVIRFWIISIILALIGLATLKLR

SEQ ID NO: 136701 - protein, 263 aa, Unknown
  Bacterial polypetide isolated from the Sargasso Sea
FYLLLIGTLMGLVGLVDDYLKVKKNRNLGLKARNKFTLQTLVALLASYYFYFLDDSTIFYLFSGFGIDVGLLKWFLIVFIIVGITNAVNLTDGLDGLVAGSSAVSFGAILIIAFWIFRHPDYYSNFINPVFISVELAVLISSIAGSCLGFLWWNTNPAKIIMGDVGSQFIGSMFPLILFSIGADTLILFFCFLYIGEALSVIIQVLSFKYRGKRVFKMTPIHHHFEMSNWAETTIIVRFWIINGIVIVIGLGLFYGDWVLFGN

SEQ ID NO: 136702 - protein, 251 aa, Unknown
  Bacterial polypetide isolated from the Sargasso Sea
GFADDFSKVKNNSSKGISAKIRILLQIIVSLIFIYWITKHHHINIKLLSLPFLKDIFINLGLFAVPFLLIVILGSANAVNLTDGLDGLAIVPVMIVAATFAVICYLAGNIIFAEYLYINYLPGAGELTVLCAAIIGSALGFLWYNAPPAMVFMGDTGSLSLGAALGSISILLKQEIVLAIVGGIFVAEAISVILQVSSFKLTGKRIFKMAPLHHHFEKNGLPESKIVIRFWIVAIILALIGLATLKNQINR

SEQ ID NO: 136703 - protein, 186 aa, Unknown
  Bacterial polypetide isolated from the Sargasso Sea
GFYSVFIFVIVGSSNAVTLTDGLDGLATVPVILVAGCFAFISYVTGNIVFSDYLQIPYIEGTGEISIFCGAIIGACLGFLWFNAPPAKIFMGDTGSLSLGGSLGAISIITKHEIVLAITGGLFVLEALSVMVQVISFKLTGKRIFKMAPIHHHFEKKGWPESTVVIRFWIISIILAMIGLATLKLR

SEQ ID NO: 136704 - protein, 190 aa, Unknown
  Bacterial polypetide isolated from the Sargasso Sea
MTLWGINMNIFILPISFLVLVGMSNSVNLTDGLDGLAAGCSGVVFYGLGTEILMKGQQELFVFSILCYSMSGICLGFLKYNSYPAKIFMGDTGSLTIGAILGSIALLTNSVFTLFIFSGIFIIESLSVMIQVGFFKITKKLFHKGKRIFLMAPLHHHFELKGVKEQKIVEHFWKINILLVILGIVLKINL

SEQ ID NO: 136705 - protein, 180 aa, Unknown
  Bacterial polypetide isolated from the Sargasso Sea
SVCISWLFNAVNLTDGLDGLAILPSVLIGGALGLIAYAMGNQNIADYLYLPHLPLSGELIVFCGALIGSGIGFLWYNTYPAQIFMGDIGSLTLGAILGIIAIILRHELVFAIMAGVFVMETLSVAIQVISFKTRGKRVFLMAPIHHHFELKGWAEPKIIVRFWIITLVLILIALSTLKLR

SEQ ID NO: 136706 - protein, 74 aa, Unknown
  Bacterial polypetide isolated from the Sargasso Sea
IVLAITGRIIFVLEAISVIVQVLSFKMTGKRIFKMAPIHHHYEKKGWPESTVVIRFWIVAIILAMVGLATLKFR

SEQ ID NO: 136707 - protein, 122 aa, Unknown
  Bacterial polypetide isolated from the Sargasso Sea
AFFGGCLGFLWFNAKPAEIFMGDVGSLSTGAALGTLAILLKKEVLLLIVGGVFVIETLSVIIQVLFFRYTKNKYGTGKKFFLMAPIHHHFELKGWPESRVVTRFWIIGILFALMSLTTFKVR

SEQ ID NO: 136708 - protein, 71 aa, Unknown
  Bacterial polypetide isolated from the Sargasso Sea
LAITGGLFVLEAVSVIVQVLSYKLTGKRVFKMAPIHHHFEKKGWAESTVVIRFWIISIILAMIGLATLKLR

SEQ ID NO: 136709 - protein, 215 aa, Unknown
  Bacterial polypetide isolated from the Sargasso Sea
SLFVYLNDYQDLNNLYFPFFKNLIINLGWFFIPFAVFVIIGSSNAVNLTDGLDGLATVPVILVAACFAFISYVTGNIVFSNYLQIPYIEGTGEVAIFCGAIIGASLGFLWFNAPPAKIFMGDTGSLSLGGSLGAVGIITKHEIVLAITGGLFVLEAVSVMVQVISFKLTGKRIFRMAPIHHHFEKKGWPESTVVIRFWIISIILAMIGLATLKLR

SEQ ID NO: 136710 - protein, 259 aa, Unknown
  Bacterial polypetide isolated from the Sargasso Sea
AIGFLDDYLKVVQGQTRGLIAQYKMIGQWSFGLALGTYLIWNPISGHPTTWTAVPFFADVAAVFSVPVFIVFTGVVVSGSSNAVNLTDGLDGLAAGLIAIASATIGIFAYVAGRVDTSQYLGFFYLPGAGELTIFALALSGAALGFLWFNAPPAEVFMGDTGSLALGGALGVMAILLKAEFLLVIVGGVFVLETLSVIVQRGWFKYTKWRFGSGRRVFRMAPVHHHFEKLGWSETTVVIRFWIVGVLFAMLAFSTLKIR

SEQ ID NO: 136711 - protein, 156 aa, Unknown
  Bacterial polypetide isolated from the Sargasso Sea
VILVAACFAFISYVTGNIVFSNYLQIPYIEGTGEVSIFCGAIIGSCLGFLWFNAPPAKIFMGDTGSLSLGGSLGAVGIITKHEIVLAITGGLFVLEAVSVIVQVISFKLTGKRVFKMAPIHHHFEKKGWPESTVVIRFWIISIILAMIGLATLKLR

SEQ ID NO: 136712 - protein, 104 aa, Unknown
  Bacterial polypetide isolated from the Sargasso Sea
NAPPAKIFMGDTGSLSLGGSLAAVAIIVKHEIVLAIIGGLFVLETVSVIIQVISFKLTGKRIFKMAPIHHHFEQKGWAESTIVIRFWIIAIILALVGLATLKLR

SEQ ID NO: 136713 - protein, 281 aa, Unknown
  Bacterial polypetide isolated from the Sargasso Sea
LNNYFLSLKETITVFNLFEYITFRSALAAITALILSFIIGPFLIKKLKENQIGEEINDNGPMTHLVKRGTPTMGGVIIIFAALLPTLMFSNLDNTMIKIVIISTIWMGFIGFIDDYLKVIKKVEKGMIARYKMIGQITLGILISYWIVNSNEFMAFNTKTTVPFLKNIEIDLGYMYPVLVIIVISATSNAVNLTDGLDGLAIGLLAISFSVFAAVSYITGRIDFSDYLNILYLPSAGELSVFSSAMVGACLGFLWFNSSPAEIFMGDTGSLSTGAALGTLA

SEQ ID NO: 136714 - protein, 189 aa, Unknown
  Bacterial polypetide isolated from the Sargasso Sea
MGLFFIPFGIFIIIGSSNAVNLTDGLDGLATVPVMLVALSFSLICYVVGNTIFSNYLQIQYIPDVGELSIFCGAIVGSCLGFLWYNAPPAKIFMGDTGSLSLGGSIASVAIIVKHEIVLAIVGGLFVLETVSVIIQVVSFKLTGKRVFMMAPIHHHFEKKGWPESTVVIRFWIIAIILALVGLATLKLR

SEQ ID NO: 136715 - protein, 53 aa, Unknown
  Bacterial polypetide isolated from the Sargasso Sea
VISFKLTGKRIFKMAPIHHHFEKKGWPESTVVIRFWIISIILAMIGLATLKLR

SEQ ID NO: 136716 - protein, 118 aa, Unknown
  Bacterial polypetide isolated from the Sargasso Sea
CGAIIGSCLGFLWFNAPPAKIFMGDTGSLSLGGSLGAVGIITKHEIVLAITGGLFVLEAVSVMVQVISFKLTGKRIFKMAPIHHHFEKKGWPESTVVIRFWIISIILAMIGLATLKLR

SEQ ID NO: 136717 - protein, 155 aa, Unknown
  Bacterial polypetide isolated from the Sargasso Sea
MLVALSFTLICYVVGNTVFAEYLQIPYIANVGETSIFCGSIVGSCLGFLWYNAPPAKIFMGDTGSLSLGGSLGAVSIISKHEIVLGIIGGLFVLETVSVIIQVISFKLTGKRVFMMAPLHHHFEKKGWAESTVVIRFWIISIILALIGLATLKLR

SEQ ID NO: 136718 - protein, 215 aa, Unknown
  Bacterial polypetide isolated from the Sargasso Sea
FLYLTQKNKAEISLILLFNKDWIFEMSMAAFIVFGTFVIVGSSNAVNLTDGLDGLAILPTVLIGGGLGLIAYAMGNQLIADYLFIPHLPIAGELIVFCGALIGSGIGFLWYNTYPAQVFMGDVGSLTLGAILGVLAVVLRHEIVYAIMAGVFIVETLSVMIQVTSYRLFKKRVFLMAPIHHHFELKGWAEPKIIVRFWIITLVLILIALATLKLR

SEQ ID NO: 136719 - protein, 125 aa, Unknown
  Bacterial polypetide isolated from the Sargasso Sea
AGELAVFCGSLIGAALGFLWFNAPPAKVFMGDTGSLALGSSLGSIAIICKHEILLAVIGGLFVLETLSVVIQVLIFKMTGKRVFLMAPLHHHFEKKGWPESTIVIRFWIITIVLALIGLATLRIR

SEQ ID NO: 136720 - protein, 245 aa, Unknown
  Bacterial polypetide isolated from the Sargasso Sea
DYRKVIRKDSKGLIARWKYFWQSVVALGVAFYLYSSATISAETSLLVPFFKEVFPQLGAFFIIITYFAIVGTSNAVNLTDGLDGLAIVPTILVAGAFAIFAYVTGNANFAEYLNIPHIPLTSELVIVCTAMVGAGLGFLWFNTYPAQVFMGDVGSLALGGTLGVLAVLVRQELVLIIMGGVFVMETVSVILQVGSYKLRGQRIFRMAPIHHHYELKGWPEPRVIVRFWIISIILVLVGLATLKLR

SEQ ID NO: 136721 - protein, 190 aa, Unknown
  Bacterial polypetide isolated from the Sargasso Sea
MSPFIFIFTGMFVLIGSSNAVNLTDGLDGLAILPTVLIGGALGLIAYAMGNQLIADYLFLPHLPLSGELIVFCGALIGSGIGFLWYNTYPAQVFMGDIGSLTLGAILGIIAIILRHELVFAIMAGVFVVETLSVAIQVISYKTRGKRVFLMAPIHHHYELKGWAEPKIIVRFWIVTLVLILIALATLKLR

SEQ ID NO: 136722 - protein, 229 aa, Unknown
  Bacterial polypetide isolated from the Sargasso Sea
TKENTGLKTKEKFFMQSIISIIFIFFAYEKDLINPLITVSESWEINMNIFILPISFIVLVGISNSVNLTDGLDGLAAGCSGIVFYGLGTEILMKGQQELIVFSILCYSMSGICLGFLKYNSYPAKIFMGDTGSLSIGAILGSIALLTNSVFTLSIFSGIFIIESLSVMVQVGFFKISKKLFHRGKRIFLMAPIHHHFELKGVKEQTIVENFWKINVLLVILGIVLKILL

SEQ ID NO: 136723 - protein, 138 aa, Unknown
  Bacterial polypetide isolated from the Sargasso Sea
IFANYLQIQHIPNAGELSIFCGSIVGSCLGFLWYNAPPAKIFMGDTGSLSLGGSIAAVAIIVKHEIVLAIIGGLFVLETVSVIIQVISFKLTGKRVFMMAPIHHHFEKKGWAESTVVIRFWIIAIILALVGLATLKLR

SEQ ID NO: 136724 - protein, 179 aa, Unknown
  Bacterial polypetide isolated from the Sargasso Sea
FVIIGASNAVNLTDGLDGLATVPVMLVALSFTLISYIVGNTIFSEYLQLQYIPDTGELSIFCGSIVGSCLGFLWYNAPPAKIFMGDTGSLSLGGSLAAIAIIVKHEIVLAIIGGLFVLETVSVIIQVISFKLTGKRIFKMAPIHHHFEKKGWAESTIVIRFWIIAIILALVGLATLKLR

SEQ ID NO: 136725 - protein, 230 aa, Unknown
  Bacterial polypetide isolated from the Sargasso Sea
YQKIIPQLFVAFFAAWIILENTPENLQNTLSIPFLKDSILFLGILYIPFTIVVIVGSSNAVNLTDGLDGLAIVPVMIAAGSLAVIAYLVGNINFSNYLQLNYIPGVGEITVLLGAIIGSGLGFLWFNAPPAMVFMGDTGSLSLGGVIGVTASASRHELVLVIIGGLFVLETVSVIVQILSFKLTGKRIFKMAPLHHHFEQKGWAESTIVIRFWIIAVILALVGISSLKLR

SEQ ID NO: 136726 - protein, 191 aa, Unknown
  Bacterial polypetide isolated from the Sargasso Sea
MNFGYFYFVISLFIIVGSANAVNLTDGLDGLAIVPVMIVAMTFAFIAYVTGNMFFSDYLLITYIPGTGELSVLCGALIGAALGFLWFNAPPAKVFMGDTGSLALGATIGSIAIMVKHEIVLAISGGLFVLETFSVIIQVISFKLTGKRVFMMAPLHHHFEKKGWAESTIVIRFWIITIVLALLSLATLKIR

SEQ ID NO: 136727 - protein, 122 aa, Unknown
  Bacterial polypetide isolated from the Sargasso Sea
ASIFCGAIIGSCLGFLWFNAPPAKIFMGDTGSLALGGSLGAVGIITKHEIVLAITGGIFVLEAVSVIAQVISFKLTGKRIFKMAPIHHHFEKKGWPESTVVIRFWIISIILAMIGLATLKLR

SEQ ID NO: 136728 - protein, 212 aa, Unknown
  Bacterial polypetide isolated from the Sargasso Sea
NSTINQELVNVVYIPFTKGYFINLHIFYYFFGSLVIVGCANAVNLTDGLDGLAIGPIMISALSFAFITYFTGNLIYSEYLKIPYISDTGELVIICAALIGAGLGFLWYNAPPAMVFMGDTGSLSMGGTIGAIAVATKHEIILVIIGGVFVLEALSVFAQVISFKLTGKRIFRMAPIHHHFEQKGWSESTIVIRFWIIAIILALLGLASLKLR

SEQ ID NO: 136729 - protein, 122 aa, Unknown
  Bacterial polypetide isolated from the Sargasso Sea
LSIFCGSIVGACLGFLWYNAPPAKIFMGDTGSLSLGGSLAAIAIIVKHEIVLAIIGGLFVLETVSVIIQVISFKLTGKRIFKMAPIHHHFEKKGWAESTIVIRFWIIAIILALVGLATLKLR

SEQ ID NO: 136730 - protein, 249 aa, Unknown
  Bacterial polypetide isolated from the Sargasso Sea
SLGIVGFIDDYRKVIRKDPKGLIAKWKYFWQSVIALVVATALYFTSTQAAETSLVVPFFKDVLPQLGLFYIVITYFALVGTSNAVNLTDGLDGLAIVPTILVAAALAIIAYLTGNINFSAYLHIPHLPLASELVVVCTAIVGAGLGFLWFNTYPAQVFMGDVGSLALGGALGIIAVLVRQELLLIIMGGVFVMEALSVILQVGSYKLRGQRIFRMAPIHHHYELKGWPEPRVIVRFWIISIVLVLARPC

SEQ ID NO: 136731 - protein, 51 aa, Unknown
  Bacterial polypetide isolated from the Sargasso Sea
SFKIRRKRVFKMAPIHHHFELSGWKEPKIIVRFWILTFIFVLLGLSLLKIR

SEQ ID NO: 136732 - protein, 192 aa, Unknown
  Bacterial polypetide isolated from the Sargasso Sea
IVNLGWFFIPFAVFVLFGASNAVNLTDGLDGLATVPVILVAGCFAFISYVTGNIVFSDYLQIPYIEGTGEISIFCGAIIGSCLGFLWFNAPPAKIFMGDTGSLSLGGSLGAVGIITKHEIVLAITGGLFVLEAVSVMVQVISFKLTGKRIFRMAPIHHHFEKKGWAESTVVIRFWIISIILAMIGLATLKLR

SEQ ID NO: 136733 - protein, 217 aa, Unknown
  Bacterial polypetide isolated from the Sargasso Sea
MFLYFSENLIEWFSPLNAFTYITTRGILAALTALVISFLFGPKIITALEGNKIGETIRTDGPSTHSSKGGTPTMGGLMIILSIVVSVLIWSDLSNVYNLVLIASIISFGLIGFIDDFTKLKKSKKGMSARTKLILQFIVAASSTYYLLGQGGSVLSSEVLIPFTNNIRLDLGWFFLPFAIFVIVGSSNAVNLTDGLDGLAIMPVSMIAIALGIFAYV

SEQ ID NO: 136734 - protein, 208 aa, Unknown
  Bacterial polypetide isolated from the Sargasso Sea
MFVYIAETYTNNFTFLNLFNYITFRTGGAILTSLFFSLIFGGTIIKYLSSLQPIGQPIRDDGPENHIFQKAGTPTMGGLLILTSITISFFLWSRLTNPYVWISLFACLSFGFIGFLDDYKKIYSKSTKGLKASTRIILQIFVSLLIIFLINSQVPDDLINTINIPFFKNLIIDFGIFFFIFAILIIVGSANAVNLTDGLDGLAIVPVM

SEQ ID NO: 136735 - protein, 105 aa, Unknown
  Bacterial polypetide isolated from the Sargasso Sea
FNAPPAKIFMGDTGSLSLGGSLGAVGIITKHEIVLAITGGLFVLEAVSVMVQVISFKLTGKRIFRMAPIHHHFEKKGWPESTVVIRFWIISIILAMIGLATLKLR

SEQ ID NO: 136736 - protein, 203 aa, Unknown
  Bacterial polypetide isolated from the Sargasso Sea
FTIAFPFFKNLIINFGYFYFIISLFIIVGSANAVNLTDGLDGLAIVPVMIVAMTFAFIAYVTGNIVFSDYLLISYIPGTGELSVLCGSLIGAALGFLWFNAPPAKVFMGDTGSLALGATIGSIAIMVKHEIVLAIAGGLFVLETFSVIIQVISFKLTGKRVFMMAPLHHHFEKKGWAESTIVIRFWIITIVLALLSLATLKIR

SEQ ID NO: 136737 - protein, 209 aa, Unknown
  Bacterial polypetide isolated from the Sargasso Sea
GNNDHLKNLYFPFFKNLIINLGLFFIPFAIFIIVGSSNAVNLTDGLDGLATVPVMLVALSFTLICYVTGNIVFSEYLQIPYIANVGEASIFCGAMVGSCLGFLWYNAPPAKIFMGDTGSLSLGGSLGAVSIISKHEIVLGIIGGLFVLETVSVIIQVISFKLTGKRVFMMAPLHHHFEKKGWAESTVVIRFWIIAIILALVGLATLKLR

SEQ ID NO: 136738 - protein, 96 aa, Unknown
  Bacterial polypetide isolated from the Sargasso Sea
MGDTGSLSLVGSLAAVAIIAKHEIVLAIIGGLFVLETVSVIIQVVSYKLTGKRIFKMAPIHHHFEKKGWAESTIVIRFWIIAIILALIGLATLKLR

SEQ ID NO: 136739 - protein, 308 aa, Unknown
  Bacterial polypetide isolated from the Sargasso Sea
FQSIRDDGPQSHLKTKSQTPSMRGLIIIVSILISTLLWADINNKNIWILIFVLITFGLIGFYDDYKKLKHSTSDGIKGKTKLLLQILFSGVVVFYIFQTSDHTIDLSLTIPFIKDYALFMGAFFIPWSIFVIVGSSNAVNLTDGLDGLAILPCILIAAAFVVFSYVQGNFNIANYLLIPYLPHVSETAIFASAIVGSGLGFLWYNSYPAQIFMGDVGSLSLGAILATLAIILRLEIIYAIMGGIFVIEALSVIIQVTSFKLFKKRVFKMSPIHHHFELNGWQEPKIIVRFWIITFVLVLIALASLKIR

SEQ ID NO: 136740 - protein, 252 aa, Unknown
  Bacterial polypetide isolated from the Sargasso Sea
MGLAVYFHPGIEIKEDQDYNLYENVSTNKKSLKTTIPFIKNNELDYVKIFKISKNNYNWIFYVLVIAFIIIAVSNGSNLTDGLDGLAAGTSAIVVFVLGILAWVSGNIIFSDYLNIMYLPGIGEILVFVSALLGGLIGFLWYNTFPAQVFMGDTGSLSVGGIIAVIAILVRKELMLPILCGVFLMETLSVIIQVSFFKYTKRKYGIGKRIFLMSPIHHHFQKKGLSETKIVSRFWIVSILLAILTLITLKLR

SEQ ID NO: 136741 - protein, 249 aa, Unknown
  Bacterial polypetide isolated from the Sargasso Sea
MVDDYLKVKGNRNLGLTVKQKFGLQSLAGLLAAVYIYNLGYSTQFYIFSGFGIDIGFFKWVLIVLVFVGITNAVNLTDGLDGLVAGSSSISFAGILVISFWIYRHPQYYSKFVSDSFLTVDISLLISSISGACLGFLWWNTNPAKIIMGDVGSHFIGSMFPLILISLGAEGLLVFFCFLFLVEAGSVIIQVVSFRYRKKRIFKMAPLHHHFEMKNWAETTIIVRFWIINGIFVVLGLGLFYADWVLFGN

SEQ ID NO: 136742 - protein, 55 aa, Unknown
  Bacterial polypetide isolated from the Sargasso Sea
VQVASYKLTGKRVFNMAPLHHHYELKGWPEPRVIVRFWIITFMLVLLGLALLRLR

SEQ ID NO: 136743 - protein, 118 aa, Unknown
  Bacterial polypetide isolated from the Sargasso Sea
CGSIIGACIGFLWFNAPPAKIFMGDTGSLALGGSLGAVGIITKHEIVLAITGGLFVLEAVSVIVQVLSYKITGKRIFKMAPIHHHFEKKGWAESTVVIRFWIISIILAMIGLATLKLR

SEQ ID NO: 136744 - protein, 269 aa, Unknown
  Bacterial polypetide isolated from the Sargasso Sea
IKFLSSIQPNGQPIRSDGPERHIFEKSGTPTMGGLLILASFFISVFIWAKLDNIYIWIVLFSCLSFGSIGFFDDYNKIKSRSSIGLKASTRIILQILVSFIIIVLVYNFLPSNYNTIVNFPFFKNLFFDLGIFFIPFGIILLIGSANAVNLTDGLDGLAIVPVMIVALSFGFIAYVVGNQVFANYLQIKHIIGTGELAIICGSLVGSALGFLWFNAPPAKVFMGDTGSLSMGGVLGTLALITKHEIVLAIIGGLFVLETMSVIIQVISF

SEQ ID NO: 136745 - protein, 253 aa, Unknown
  Bacterial polypetide isolated from the Sargasso Sea
FGLLGAYDDYKKIKKKNSSGISSKFKFLWQIILAIIGVLILIYFVDTPDLQKLYFPFFKNLIINLGWFFIPFYIFVIVGSSNAVNLTDGLDGLATVPVILVAGVFAFISYVTGNIVFSEYLLIPYIKGVGEVSVFCGSMIGACIGFLWFNAPPAKIFMGDTGSLALGGSLGGIGIITKHEIVLAITGGLFVLEAVSVIVQVVSYKLTGKRIFKMAPIHHHFEKKGWPESTVVIRFWIISIILAMIGLATLKLR

SEQ ID NO: 136746 - protein, 196 aa, Unknown
  Bacterial polypetide isolated from the Sargasso Sea
DLGYFYPLLVIIVISATSNAVNITDGLDGLAIGLLAICFSVFAAVSYITGRIDFSDYLNILYLPNAGELSVFSSAMVGACLGFLWFNTSPAEIFMGDTGSLSAGAALGTLAIVLKKELLLFIIGGVFVFETISVIIQVLFFRYTKLKYGKGERFFNMAPIHHHYELMGTKESKIVVRFWIAGILFALFSLTTFKIR

SEQ ID NO: 136747 - protein, 194 aa, Unknown
  Bacterial polypetide isolated from the Sargasso Sea
NLILHMGLFFIPFGLFVIIGASNAVNLTDGLDGLATVPVMLVALSFTLISYVVGNTIFSEYLQIQYIPNVGELSIFCGSIVGACLGFLWYNAPPAKIFMGDTGSLSLGGSLAAIAIIVKHEIVLAIIGGLFVLETVSVIIQVISFKLTGKRIFKMAPIHHHFEKKGWAESTIVIRFWIIAIILALVGLATLKLR

SEQ ID NO: 136748 - protein, 211 aa, Unknown
  Bacterial polypetide isolated from the Sargasso Sea
MLFELFSMLVDQFSFLNVFKYLTVRTGLSMFTAMVVVFLVGNPLISFFSSKQIHNPIREDGPSDHIIRKIGTPTMGGLIILLGVFSGVLLWGDLSNPYNWFLIYIAASFGLLGAYDDYKKIKLKSSHGISSKLKFILQIILALIGIFILYFSSDGDQINNLYLPFFKNLVINLGWFFIPFYIFILVGASNAVNLTDGLDGLATVPVMLVAA

SEQ ID NO: 136749 - protein, 296 aa, Unknown
  Bacterial polypetide isolated from the Sargasso Sea
VETGLSMFTSMFIVFLVGGPLIRYFLSKQIHDPIREDGPSEHIIKKIGTPTMGGLLILLGIFSGVLLWGDLTNPYSWFLIYISGSFGLLGAYDDYQKIKYNNSSGVSSRFKILLQIILAIIGIAILYFSNQSNELENLYFPFFKNLVINLGWFFIPFYIFVIVGSSNAVNLTDGLDGLATVPVILVAACFAFISYVSGNIIFSEYLQIPYIESVGEASVFCGSIIGACLGFLWFNAPPAKIFMGDTGSLSLGGSLGAVSIITKHEIVLAITGGLFVLEAVSVIVQVISYKLTGKRV

SEQ ID NO: 136750 - protein, 77 aa, Unknown
  Bacterial polypetide isolated from the Sargasso Sea
VKHEIVLAIVGGMFVLETLSVIVQVISFKLTGKRIFQMAPLHHHFEKKGWAESTIVIRFWIITIVLALIGLATLKIR

SEQ ID NO: 136751 - protein, 69 aa, Unknown
  Bacterial polypetide isolated from the Sargasso Sea
ITGGLFVLEAVSVMVQVISFKLTGKRIFRMAPIHHHFEKKGWPESTVVIRFWIISIILAMIGLATLKLR

SEQ ID NO: 136752 - protein, 270 aa, Unknown
  Bacterial polypetide isolated from the Sargasso Sea
MLYQFLLNFVDTFSFLNVFKYLTFRTGLSFFTSLVIVLIIGGPFIKFFSKQKILNPIRNDGPEDHIVKKIGTPTMGGLIILFGLLVSVIFWADLSNINILFCIYIAITFGLLGAYDDFKKIKYSNSSGISSKFKIISQIILAIIGVSIFVYLNDYQDLNNLYFPFFKNLIINLGWFFIPFAIFVIIGSSNAVNLTDGLDGLATVPVILVAACFAFISYVTGNIVFSNYLQIPYIEGTGEVAIFCGAIIGSCLGFLWFNAPPAKIFMGDTG

SEQ ID NO: 136753 - protein, 189 aa, Unknown
  Bacterial polypetide isolated from the Sargasso Sea
LGWFFIPFAIFVIIGSSNAVNLTDGLDGLATVPVILVAACFAFISYVTGNIVFSNYLQIPYIEGTGEVSIFCGAIIGSCLGFLWFNAPPAKIFMGDTGSLSLGGSLGAVGIITKHEIVLAITGGLFVLEAVSVMVQVISFKLTGKRIFRMAPIHHHFEKKGWPESTVVIRFWIISIILAMIGLATLKLR

SEQ ID NO: 136754 - protein, 242 aa, Unknown
  Bacterial polypetide isolated from the Sargasso Sea
PYNWLLIFITLSFGILGAFDDYKKIKNNNSRGISSKLKILIQIVLCLVSLIIFYKFIDSDIKTNLYFPFFKNLVINLGWFFVPFYLFVIVGSSNAVNLTDGLDGLATVPVILVAGCFGFISYVSGNIIFADYLLIPYIEGVGEVAVFCGAIIGASIGFLWFNAPPAKIFMGDTGSLALGGSLGAVGVTTKHEIVLAITGGLFVLEAISVIVQVISYKLTGKRIFMMAPIHHHFEKKGWAEST

SEQ ID NO: 136755 - protein, 183 aa, Unknown
  Bacterial polypetide isolated from the Sargasso Sea
PFGLFVIIGASNAVNLTDGLDGLATVPVMLVALSFTLICYVVGNTIFSEYLQIQYIPDVGELSIFCGSIVGACLGFLWYNAPPAKIFMGDTGSLSLGGSLAAIAIIVKHEIVLAIIGGLFVLETVSVIIQVVSFKLTGKRIFKMAPIHHHFEKKGWAESTIVIRFWIIAIILALVGLATLKLR

SEQ ID NO: 136756 - protein, 307 aa, Unknown
  Bacterial polypetide isolated from the Sargasso Sea
ALTALLVSLIIGPIVIKYFSNREVFQSIRDDGPQSHLKTKSQTPSMGGLIIIVSILISTLLWADINNKNIWILIFVLITFGLIGFYDDYKKFKHSTSDGIKGKTKLLLQILFSGVVVFYIFQTSVHTIDLSLTIPFIKDYALFMGAFFIPWSIFVIVGSSNAVNLTDGLDGLAILPCILIAAAFVVFSYVQGNFNIANYLLIPYLPHVSETAIFASAIVGSGLGFLWYNSYPAQIFMGDVGSLSLGAILATLAIILRLEIIYAIMGGIFVIEALSVIIQVTSFKLFKKRVFKMSPIHHHFELNGWQE

SEQ ID NO: 136757 - protein, 133 aa, Unknown
  Bacterial polypetide isolated from the Sargasso Sea
LQITYIKGVGEASIFCGAIIGSCLGFLWFNAPPAKIFMGDTGSLALGGSLGAVGIITKHEIVLAITGGLFVLEAVSVIAQVLSFKLTGKRIFKMAPIHHHFEKKGWPESTVVIRFWIISIILAMIGLATLKLR

SEQ ID NO: 136758 - protein, 187 aa, Unknown
  Bacterial polypetide isolated from the Sargasso Sea
MFFIPFAIFVIIGSSNAVNLTDGLDGLATVPVILVAACFAFISYVTGNIVFSNYLQIPYIEGTGEVAIFCGAIIGSCLGFLWFNAPPAKIFMGDTGSLSLGGSLGAVGIITKHEIVLAITGGLFVLEAVSVMVQVISFKLTGKRIFRMAPIHHHFEKKGWPESTVVIRFWIISIILAMIGLATLKLR

SEQ ID NO: 136759 - protein, 217 aa, Unknown
  Bacterial polypetide isolated from the Sargasso Sea
PVHTQVSFTRFDYPGWEIGEVLWTIWAVLLISGSANAVNLTDGLDGLAAGAGVFCFGAFGVISFWQFRYPELYDVPHALDLAVVSAAMAGACLGFLWWNSAPAQIFMGDTGSLAIGTGLATLSLATNTQLLLPIVAGLFVVETLSVIIQVAGFRLFSKRRVFKMAPLHHHFELSGWPETTVIVRFWMMSGLCTALGIGLFYGDSLRSGIVGLIAGVH

SEQ ID NO: 136760 - protein, 270 aa, Unknown
  Bacterial polypetide isolated from the Sargasso Sea
IIKKIGTPTMGGLMILLGIFSGVVLWGDFSNPYNWFLLYIAGSFGLLGAYDDYQKIKKNNSNGVSSKLKIIIQIFLALGGIFILYFYSGSNEIGNLYFPFFKNLIINLGWFFIPFYLFVIVGSSNAVNLTDGLDGLATVPVMLVAACFAFISYVTGNIVFSGYLQITYIEGVGEASIFCGAIIGSCLGFLWFNAPPAKIFMGDTGSLALGGSLGAVGIITKHEIVLAITGGLFVLEAVSVIAQVISFKLTGKRIFKMAPIHHHFEKKGWP

SEQ ID NO: 136761 - protein, 220 aa, Unknown
  Bacterial polypetide isolated from the Sargasso Sea
QIPLVKDNEFDYYFLIEWSSIPKSMTWIIFIPMIIFIITAVSNGANLTDGIDGLAAGSSSIMAITLGIFAWVSGNIIFSDYLNIMYIPNAGEIAVFVASFTGGLIGFLWFNTYPAEVFMGDTGSLTVGALISVIAIMVRKELLLPIICGIYLIEVLSVIIQVFYYKYTKKRKGVGERIFLMSPIHHHFQKKGIHESKIVSRFLIMGVLLSVLAILTLKIR

SEQ ID NO: 136762 - protein, 221 aa, Unknown
  Bacterial polypetide isolated from the Sargasso Sea
MLIWLADWLTQFDSGFNVFSYLTLRAILSTLTALLIAILIGPKMIRYLQRMQIGQTVRDDGPQSHLSKSGTPTMGGLLILAAIVVSGLLWADLTNRYVLVTLTVVVAYGIIGFVDDYRKVIRKDSKGLIARWKYFWQSVVALGVAFYLYSSATMSAETSLLVPFFKEVFPQLGAFFIIITYFAIVGTSNAVNLTDGLDGLAIVPTILVAGAFAIFAYVTGN

SEQ ID NO: 136763 - protein, 264 aa, Unknown
  Bacterial polypetide isolated from the Sargasso Sea
YVIIVLFVTICFGGIGFIDDYLKVSRQNPKGVSSKIRLLSGFLVAALAAYFIATNHPDALQNRLALPIFKNLLVDLGFLFVPFAMIVIVGSANAVNLTDGLDGLAIMPVMIAAGALGVIAYAVGRVDFTEYLDVHYVNGTGEILILCSGIFGAGLGFLWYNAPPAAVFMGDTGSLALGGALGAVAVATKHEIVLAIVGGLFVVEALSVIIQVLYFKMTGKRVFLMAPIHHHFEKKGWAEPQIVIRFWIISLILAMVGLATLKVR

SEQ ID NO: 136764 - protein, 181 aa, Unknown
  Bacterial polypetide isolated from the Sargasso Sea
AAFIIVGSSNAVNLTDGLDGLATVPVILVAGCFAFISYVTGNIVFSDYLHISYIKGVGEVSVFCGSVIGACLGFLWFNAPPAKIFMGDTGSLALGGSLGGVGIITKHEIVLAITGGLFVFEAVSVIIQVVSFKLTGKRVFKMAPIHHHYEKKGWAESTVVIRFWIISIILAMIGLATLKLR

SEQ ID NO: 136765 - protein, 305 aa, Unknown
  Bacterial polypetide isolated from the Sargasso Sea
IRNDGPKSHIINKAGTPTMGGVLIILSIFISIILWSDLSNKFIWISFFSCTSFGLIGFYDDYLKVKSNSSIGLKAKTRVILQLLICLFVVYFIQITLVTDFATSISFPFFKNLIIDFGVFYYFIAIFIIIGSANAVNLTDGLDGLAIVPVMIVAMAFAFISYVSGNLIFADYLKINYIAGSGELAVFCGAIIGSALGFLWFNAPPAKVFMGDTGSLALGGSIASCALIVKHEIVLAIVGGLFVLETLSVIIQVVSFKLTGKRIFMMAPLHHHFEKKGWAESTIVIRFWIITIILAIIGLATLKIR

SEQ ID NO: 136766 - protein, 260 aa, Unknown
  Bacterial polypetide isolated from the Sargasso Sea
WLVLFVLIAYTLLGLVDDYLKISKKNSAGVSAKKKLFWQTTIALLVTTYGYLYIPGFTYLYFPFAKNLFLDLGPWYIFFSTFIIVGCCNAVNLTDGLDGLAIGPIIISFFSYAILCYISGNLLIAKYLHFPYVTNSGELTIICAAIVGAGLGFLWYNSYPAQVFMGDVGSLPLGGVLGTIAIFSKHELLLSIIGGIFLVEALSVISQVISFKLIGKRIFRMAPLHHHFELKGWPEPKIIVRFWIISIILALIALLSLKIR

SEQ ID NO: 136767 - protein, 88 aa, Unknown
  Bacterial polypetide isolated from the Sargasso Sea
LGAILGVLAVILRHEIVYAIMAGVFIAETLSVMIQVTSYRLRQKRVFLMAPIHHHFELKGWPEPKIIVRFWIITLVLILVALATLKLR

SEQ ID NO: 136768 - protein, 180 aa, Unknown
  Bacterial polypetide isolated from the Sargasso Sea
FIFPIAFLLLVGISNSVNLTDGLDGLAAGCSGIVFYGLGTEILMKEQKELFVFSVLCYAMSGICFGFLKYNSYPAKIFMGDTGSLSIGAILGSIALLTNSVFTLSIFSGIFIVESLSVMIQVVIFKITKKLFHRGKRIFLMAPLHHHFELKGVKEQKIVGNFWKINILLIILGIVLKINL

SEQ ID NO: 136769 - protein, 255 aa, Unknown
  Bacterial polypetide isolated from the Sargasso Sea
MLFSLFSNLIEIFSFLNVFKYLTVRTGLSMFTSMIVVFLIGGPLINYFSTHQIHDPIREDGPSEHIVKKIGTPTMGGLMILLGIFSGVLLWGDFSNPYNWFLLYIAGSFGLLGGYDDYQKIKKNNSNGISSKLKIIIQIILALGGILILYFYIGSNELENLYFPFFKNLIINLGWFFIPFYLFVIVGSSNAVNLTDGLDGLATVPVILVAACFAFISYVTGNIVFSEYLQITYIEGVGEASIFCGSIIGSCLGFL

SEQ ID NO: 136770 - protein, 191 aa, Unknown
  Bacterial polypetide isolated from the Sargasso Sea
LDLGFFFIPFYAFIIVGSSNAVNLTDGLDGLATVPVILVAACFAFISYVTGNIVFSDYLHIPYIEDVGEITIFCGSIIGACLGFLWFNAPPAKIFMGDTGSLSLGGSLGAVSIITKHEIVLAITGGLFVLEAISVIVQVVSFKLTGKRVFIMAPIHHHFEKKGWAESTVVIRFWIISIILAMIGLATLKLR

SEQ ID NO: 136771 - protein, 130 aa, Unknown
  Bacterial polypetide isolated from the Sargasso Sea
TYLPGTGELMVFCGAIAGAGLGFLWFNTYPAMIFMGDVGALALGAALGIVAVMTRHEIVLFIMGGIFVLETVSVIIQVGSFKLTGKRVFRMAPIHHHFELKGWPEPRVIVRFWIITVMLVLFGLATLKLR

SEQ ID NO: 136772 - protein, 266 aa, Unknown
  Bacterial polypetide isolated from the Sargasso Sea
GTPTMGGVIIIIGIISSTLLWADLTNIYVWTLIFVSLSLGALGLLDDVLKIRFKNSRGLKSRYKFLGQIIIGLITLLILIKYSNHEYLYNLYFPFFKNLIWHMGLFFIFFGLFVIIGASNAVNLTDGLDGLATVPVMLVALSFTLISYVVGNTIFSEYLQIQYIPDVGELSIFCGSVVGACLGFLWYNAPPAKIFMGDTGSLSLGGSLAAVAIIVKHEIVLAIIGGLFVLETVSVIIQVVSFKLTGKRIFMMAPIHHHFEKKGWAE

SEQ ID NO: 136773 - protein, 263 aa, Unknown
  Bacterial polypetide isolated from the Sargasso Sea
SLHWFLIFIVGGLGILGAYDDYQKIKSGNSAGVSFRFKIIFQIIIALIGIYILTYHTNSNELKNLYFPFFKNLVVNLGWFFIPFYLFIIVGSSNAVNLTDGLDGLATVPIILVASCFAFISYVTGNIVFSEYLHIPYIQGVGEVAVFCGSIIGACIGFLWFNAPPAKIFMGDTGSLALGGSLGAVGIITKHEIVLAITGGLFVLEAISVIVQVISYKLTGKRIFKMAPIHHHFEKKGWAESTIVVRFWIISIILAMIGLATLN

SEQ ID NO: 136774 - protein, 200 aa, Unknown
  Bacterial polypetide isolated from the Sargasso Sea
NDLLNPLIKISESWEINTSIFIFPISFLVLVGISNSVNLTDGLDGLAAGCSGIVFYGLGTEILMKEQKELFVFSLLCYSMSGICLGFLKHNNYPAKIFMGDTGSLSIGAILGSIALLTNSVFTLSIFSGIFIVESLSVMIQVGIFKITKKLFYKGKRIFLMAPLHHHFELKGVKEQKIVENFWKINILLVILGIVLKINL

SEQ ID NO: 136775 - protein, 215 aa, Unknown
  Bacterial polypetide isolated from the Sargasso Sea
LLIHNYLPSNINTAINIPFFKNIFIDLGIFFFIFGIFVIVGSANAVNLTDGLDGLAIVPVMIVSLAFAFIAYVAGNINFSEYLQISYVEGSGEIAVFCGAIVGAALGFLWFNAPPAKVFMGDTGSLSLGAAMGSVSIITKHEIVLAIIGGLFVLETFSVIIQIISFKLTGKRIFQMAPLHHHFEKKGWAESTIVIRFWIITIVLALIGLATLKIR

SEQ ID NO: 136776 - protein, 121 aa, Unknown
  Bacterial polypetide isolated from the Sargasso Sea
SIFCGAIIGSCLGFLWFNAPPAKIFMGDTGSLALGGSLGAVGIITKHEIVLAITGGLFVLEAVSVIAQVISFKLTGKRIFKMAPIHHHFEKKGWPESTVVIRFWIISIILAMIGLATLKLR

SEQ ID NO: 136777 - protein, 272 aa, Unknown
  Bacterial polypetide isolated from the Sargasso Sea
FFSTQKILNPIRDDGPQDHIVKKIGTPTMGGVIILIGLLISVLCWADLSNINILFCIYIAISFGILGAFDDYKKIKHSNSSGISSKFKIIYQIILAIIGIYFYVYFVEYENITNLYFPFFKNLIINLGWFFIPFAVFVLIGSSNAVNLTDGLDGLATVPVILVAGCFAFISYVTGNIVFSDYLQIPYIEGTGEISIFCGAIIGSCLGFLWFNAPPAKIFMGDTGSLSLGGSLGAVGIITKHEIVLAITGGLFVLEAVSVMVQVISFKLTGKR

SEQ ID NO: 136778 - protein, 205 aa, Unknown
  Bacterial polypetide isolated from the Sargasso Sea
FTNNLYLPFFKNIVINLGWFFIPFYLFVIVGSSNAVNLTDGLDGLATVPVILVAGCFAFISYVSGNIIFAEYLLIPYIEGVGEVAVFCGAIIGASIGFLWFNAPPAKIFMGDTGSLALGGSLGAVGVATKHEIVLAITGGLFVLEAVSVIVQVISFKLTGKRIFMMAPIHHHFEKKGWPESTVVIRFWIISLILAMIGLATLKLR

SEQ ID NO: 136779 - protein, 277 aa, Unknown
  Bacterial polypetide isolated from the Sargasso Sea
KQITGPIRQDGPIDHIIKKSGTPTMGGLMILIGIIVSTLLWADLNNIYIWIVIFVCTSLGLLGFVDDYYKIKLKNSSGINAKLKFAGQFLISITAILALIYFTDHESISNLYFPFFKNLVFHMGLLFIPFGIFVIIGSSNAVNLTDGLDGLATVPVMLVALSFSLICYLVGNKIFANYLQIQYISNVGELSIFCGSIVGSCLGFLWYNAPPAKIFMGDTGSLSLGGSIASVAIIVKHEIVLAIIGGLFVLETVSVIIQVISFKLTGKRVFMMAPIHH

SEQ ID NO: 136780 - protein, 232 aa, Unknown
  Bacterial polypetide isolated from the Sargasso Sea
SKAGTPTMGGSLMLVAIAISTVLWADVSNRFIIIILLSTLLFGLIGFVDDLLKLTRGNSDGLSAKVKFFLQWMAALLLAFLLFFYAESSVETTLILPFFKNINYELGLIYLLTTSLVIVSTSNAVNLSDGLDGLAIMPTVMIGGALIVLAYVAGNINFSNYLALPYVRGVGEICVFCGALIGAGLGFLWFNTYPAEIFMGDVGSLSLGAALGTAAVMVRQELLLLIMGGIFV

SEQ ID NO: 136781 - protein, 274 aa, Unknown
  Bacterial polypetide isolated from the Sargasso Sea
MLYSFLTSLIDTFSFLNVFKYITFRMGLSVVTSLIIIFLIGNPLIKYFAKKQITGPIRRDGPIDHIVKKSGTPTMGGLMILIGIILSTLMWADLKNIYIWIVLFICTSLGMLGFIDDYLKIKFENSTGIKAKTKFFWQLIISLVAILSLIYFTDHETISNLYFPFFKNLVWNMGLFFIPFGIFVIIGSSNAVNLTDGLDGLATVPVMLVALSFSLICYLVGNTIFSDYLQIQYIPNVGELSIFCGSIVGSCLGFLWYNAPPAKIFMGDTGSLSL

SEQ ID NO: 136782 - protein, 96 aa, Unknown
  Bacterial polypetide isolated from the Sargasso Sea
MGDTGSLALGGSLGAVGIITKHEIVLAITGGLFVLEAVSVIVQVLSYKLTGKRVFKMAPIHHHFEKKGWPESTVVIRFWIISIILAMIGLATLKLR

SEQ ID NO: 136783 - protein, 225 aa, Unknown
  Bacterial polypetide isolated from the Sargasso Sea
MLYLINIFSDGGDFFNLFRYITFRAGGAFFTALFFGFIFGNPLINFLKKKQENGHPIRKDGPEHHILAKAGTPTMGGVLIIGAAVISSFLWARLDNPYVWLVLFVTLGFGLIGFIDDYKKIIMQNSDGLSKFIRLFFGFFIALVAAIFAMNVQSESLSGYVAVPFFKEALFNIGWFFIPFAMFVIVGSANAVNLTDGLDGLAVMPVMIASGALGIIAYAVGRVDF

SEQ ID NO: 136784 - protein, 167 aa, Unknown
  Bacterial polypetide isolated from the Sargasso Sea
TDGLDGLATVPVILVAGCFAFISYVTGNIVFSEYLQIPYIKGVGEVCVFLGAIIGSCLGFLWFNAPPAKIFMGDTGSLSLGGSLGAVGIITKHEIVLAITGGLFVLEAISVIVQVISFKITGKRIFKMAPIHHHYEKKGWPEPTVVIRFWIVAIILAMIGLATLKFR

SEQ ID NO: 136785 - protein, 145 aa, Unknown
  Bacterial polypetide isolated from the Sargasso Sea
SYVTGNVVFSEYLQITYIEGVGEASIFCGSIIGSCLGFLWFNAPPAKIFMGDTGSLALGGSLGAVGIITKHEIVLAITGGLFVLEAVSVIVQVISFKLTGKRIFKMAPIHHHFEKKGWPESTVVIRFWIISIILAMIGLATLKLR

SEQ ID NO: 136786 - protein, 203 aa, Unknown
  Bacterial polypetide isolated from the Sargasso Sea
MSLAVPIFIDVLLNLGWFYIPFAVFVIVGSANSVNLTDGLDGLAIMPVMIASGSLGIIAYAVGRVDFSNYLEVHYIAGSGEIAVFSAALIGAGLGFLWYNAPPAAVFMGDTGSLALGGALGAISVCTKHEIVLAIIGGLFVLEALSVIIQVAAYRLTGKRVFLMAPIHHHFEKLGWAEPQIVIRFWIISVILALVGLATLKLR

SEQ ID NO: 136787 - protein, 288 aa, Unknown
  Bacterial polypetide isolated from the Sargasso Sea
MGGLLILFSLTISTLLWADLGNRYIWVVLAVTIGFSIIGFLDDFLKIKKKSSDGLTSIQKIISQSIIAFISMFYLYYSAEITPEISFIVPFFKDFIIPMSPFIFISFGMFVLIGSSNAVNLTDGLDGLAILPSVLIGGALGLIAYAMGNQLIADYLYLPHLPLSGELIVFCGALIGSGIGFLWYNTYPAQLFMGDIGSLTLGAVLGIMAIILRHELVFAIMAGVFVIETLSVAIQVISFKTRGKRVFLMAPIHHHYELKGYTEPKIIVRFWIVTLVLILIALATLKLR

SEQ ID NO: 136788 - protein, 196 aa, Unknown
  Bacterial polypetide isolated from the Sargasso Sea
FKNFILHMGLFFIPFGIFVIIGSSNAVNLTDGLDGLATVPVMLVALSFSLICYLVGNTIFANYLQIQYISNVGELSIFCGSIVGSCLGFLWYNAPPAKIFMGDTGSLSLGGSIASVAIIVKHEIVLAIIGGLFVLETVSVIIQVISFKLTGKRVFMMAPIHHHFEKKGWAESTVVIRFWIIAIILALVGLATLKLR

SEQ ID NO: 136789 - protein, 73 aa, Unknown
  Bacterial polypetide isolated from the Sargasso Sea
GGVFVWEALTVIIQVSYFRYTKAFSGTGKKFFMMAPIHHHFELKGWPESKVVIRFWIIGLLLALFSLTTFKIR

SEQ ID NO: 136790 - protein, 279 aa, Unknown
  Bacterial polypetide isolated from the Sargasso Sea
MLYSLFLSLVDTFSFLNVFKYLTVRTGLAMFTSMIIVFIIGNPFINFFSSKKIHDPIRKDGPEDHIVRKIGTPTMGGVLILLGLFLSVFLWCDLTNHLVWFIIFITFSFGSIGAIDDIKKIKTKSSAGISLKIKILFQILFAFIGIFMLYILSDFSEIKNLYFPFFKNLIINLGWFFVPFYLFVIVGSSNAVNLTDGLDGLATVPVILVAACFAFISYVTGNIVFSDYLHIPYIEGAGEVTIFCGAIIGSCLGFLWFNAPPAKIFMGDTGSLALGGSLG

SEQ ID NO: 136791 - protein, 191 aa, Unknown
  Bacterial polypetide isolated from the Sargasso Sea
LNLGYLYSFFCAFVIVGAANSVNLTDGLDGLAIGPVMITALSFAFIAYFTGNIIFADYLKISYIPGTGELAIICAALIGSGLGFLWYNAPPAMVFMGDTGSLSVGGTLGAIAVATKHEIILSIIGGLFVLETISVIIQVFSFRLTGKRIFRMAPLHHHFEQKGWSESTIVIRFWIISIVLALIGLASLKLR

SEQ ID NO: 136792 - protein, 224 aa, Unknown
  Bacterial polypetide isolated from the Sargasso Sea
VIFILVSFGLIGFTDDFSKVKNNSSKGISAKIRIFLQIIVSLIFIYWITKYHHIDIKLLSLPFLKDIFINLGLFAVPFILIVILGSANAVNLTDGLDGLAIVPVMIVAATFAVICYLAGNIIFAEYLYINYLPGAGELTVLCAAIIGSALGFLWYNAPPAMVFMGDTGSLSLGAALGSISILLKQEIVLAIVGGIFVAEAISVILQVSSFKLTGKRIFKMAPLH

SEQ ID NO: 136793 - protein, 181 aa, Unknown
  Bacterial polypetide isolated from the Sargasso Sea
SMIVFVGAANAVNLTDGLDGLAIMPVMIAALALGVIAYAVGRVDFTNYLDVHYVPGTGELLIFCSALFGGGLGFLWYNAPPAAVFMGDTGALSLGGALGSIAVVTKHEIVLAIVGGLFVVEALSVIIQVAYFKATGRRVFLMAPIHHHFEKKGWAEPQIVIRFWIISLILAMIGLATLKVR

SEQ ID NO: 136794 - protein, 270 aa, Unknown
  Bacterial polypetide isolated from the Sargasso Sea
NPLINYFAKKQITGPIRQDGPIDHIIKKSGTPTMGGLMILIGIIVSTLLWSDLKNIYIWIVLFVCTSLGLLGFLDDYLKIKFKNSSGINAKLKFFGQFVIALIAILVLVYFTDHRTISNLYFPFFKNLILNMGLFFIPFGIFVIIGSSNAVNLTDGLDGLATVPVMLVALSFSLICYLVGNTIFSNYLQIQYVPNVGELSVFCGSIVGSCLGFLWYNAPPAKIFMGDTGSLSLGGSIASVAIIVKHEIVLAIVGGLFVLETASVIIQVVS

SEQ ID NO: 136795 - protein, 90 aa, Unknown
  Bacterial polypetide isolated from the Sargasso Sea
LSLGGSIAAVAIIVKHLFVLAIIGGLFVLEIVSVIIQVISFKLTGKRVFMMAPIHHHFEKKGWAESTVVIRFWIIAIILALVGLATLKLR

SEQ ID NO: 136796 - protein, 273 aa, Unknown
  Bacterial polypetide isolated from the Sargasso Sea
MLYQFLLPFKDSISVFNLFEYITFRAAIAAITALIISFIIGPWVIHILHKNHIGEEIRQAGPKSHMKKEGTPTMGGVIILMAVLLPTLLFAKVNSVLIQIIIFATIWMGIIGFLDDYLKVVKKLKRGLIARYKLAGQIILGCIVSLWIFNTPEFIEFNTKTTVPFFKNVELDFGIFYPLMVIIVITGTSNAVNLTDGLDGLLAGLLAICFTVFSAIAYISGRVDFSDYLNIIYIPGAGELAIFTSAMAGACIGYLWFNSYPADVFMGDTGSLS

SEQ ID NO: 136797 - protein, 185 aa, Unknown
  Bacterial polypetide isolated from the Sargasso Sea
MVIFSLVVIVGSSNSVNLTDGLDGLAIVPIIIVLSTFSIISYLVGNTIYADYLSVSYIKGVGEISVFCAAFVGAGLGFLWFNAPPAKIFMGDTGSLAAGASIGSISVITKNEIVLLIAGGLFVLEAVSVIVQVFSYKFTGKRVFKMAPLHHHFEQKGWSESTIVIRFWIISIILAMISLVTFKIR

SEQ ID NO: 136798 - protein, 319 aa, Unknown
  Bacterial polypetide isolated from the Sargasso Sea
LCLHWVRIQKSAFPSGQPIRNDGPDTHYYKKGTPTLGGVLILFSIILSSILWTSNFSSFNYILILTLILFGLIGFFDDLQKVKLGKGITSKIKFLCQLSATLIIYFTIKYNGFDLNQFSIPFLKNVSIELGYFYFVLILFIVIGSTNATNLTDGLDGLVTMPLIFVFLTFAVFAYVLGNMNFSDYLLVNYINGSGEIVIFCTSAIGALLGFLWFNSSPASIFMGDTGSQSLGASLAVTSILLKQEIVLAVAGGLFVIETLSVMIQVTYFRLSKGKRVFLMAPLHHHYEKKGLSEQKIVIRFWILSFLFCLLALSLLKIR

SEQ ID NO: 136799 - protein, 169 aa, Unknown
  Bacterial polypetide isolated from the Sargasso Sea
LFTDGLDGLATVPVMLVALSFTLISYVVGNTIFSDYLQIQYIPDVGELSIFCGSIVGACLGFLWYNAPPAKIFMGDTGSLSLGGSLAAIAIIVKHEIVLAIIGGLFVLETVSVIIQVISFKLTGKRIFKMAPIHHHFEKKGWAESTIVIRFWIIAIILALVGLATLKLR

SEQ ID NO: 136800 - protein, 352 aa, Unknown
  Bacterial polypetide isolated from the Sargasso Sea
MIGIIVSGGLSFLFVLVSTFLGVNYFKSRNIGQNIQEEVIHHEHKKGTPTMGGIFLILGTSFGFLASHINFWTIGRGFEVVLRRINEDVLALLIIAIAMALVGLVDDYLKVKGNRNLGLTVKQKFGLQFLAGILAAVYIYNLGYSTQLYIFSGFGIDIGFFKWILIVFVFVGITNAVNLTDGLDGLVAGSSSISFAGILVISFWIYRHPEYYSNFISDSFLTVDISLLISSLSGACLGFLWWNTNPAKIIMGDVGAHFIGAMFPLILISLGAEGLLLFFCFLFLIEAGSVIIQVISFRYRKKRIFKMAPLHHHFEMKNWAETTVIVRFWIINGIFVVLGLGLFYADWVLFGN

SEQ ID NO: 136801 - protein, 372 aa, Unknown
  Bacterial polypetide isolated from the Sargasso Sea
MFTYLTFRAVMATITALGIGLVCGPWVIRKLTQMKVGQAVRKDGPQTHLVKSGTPTMGGVLILIGIAVATLLWGDLTNRFIWIVMLVTFGFGVIGWVDDYRKVVHKDPRGMSSREKYFWQSVIGLFAAVYLAFSVSEANNVRVFDLFMAWVRSGLSMGLPARADLMLPFLKSISYPLGVWGFIVLTYFVIVGASNAVNLTDGLDGLVIMPVVLVGASLGVFAYVMGSAVYSKYLLFPHIPGAGELLIFCSAMGGAGLAFLWYNTHPAQVFMGDVGALALGGALGTVAVIVRQEIVLFIMGGIFVAETLSVMLQVSWFKYTKKRYGEGRRLLKMAPLHHHFELSGWKETQVVVRFWIITLMLCLFGLTTLKLR

SEQ ID NO: 136802 - protein, 361 aa, Unknown
  Bacterial polypetide isolated from the Sargasso Sea
MLFSLFSNLIEIFSFLNVFKYLTVRTGLSMFTSMIVVFLIGGPLINYFSSHQIHDPIREDGPSEHIVKKIGTPTMGGLMILMGIFSGVLLWGDFSNPYNWFLLYIAGSFGLLGGYDDYQKIKKNNSNGISSKLKIIIQIILALGGILILYFYSGSNELENLYFPFFKNLIINLGWFFIPFYLFVIVGSSNAVNLTDGLDGLATVPVILVAACFAFISYVTGNIVFSEYLQITYIEGVGEASIFCGSIIGSCLGFLWFNAPPAKIFMGDTGSLALGGSLGAVGIITKHEIVLAITGGLFVLEAVSVIVQVISFKLTGKRIFKMAPIHHHFEKKGWPESTVVIRFWIISIILAMIGLATLKLR

SEQ ID NO: 136803 - protein, 365 aa, Unknown
  Bacterial polypetide isolated from the Sargasso Sea
MTFRAVMATITALLIGLVCGPAVIRKLTAMKVGQAVRKDGPQTHLVKSGTPTMGGVLILLGIAVSTLLWADLTNRFIWIVMLVTFGFGVIGWVDDYRKVVYKDPRGMSSREKYFWQSVIGLFAAVYLAFSVSEASNVRVFDLFMAWVRSGLSMGLPARADLMLPFVKSISYPLGVWGFIVLTYLVIVGASNAVNLTDGLDGLVIMPVVLVGASLGVFAYVMGSSVYSKYLLFPHIAGAGELLIFCSAMGGAGLAFLWFNTHPAQMFMGDVGALALGGALGTVAVIVRQEIVLFIMGGIFVAETLSVMLQVTWFKFTKRRFGEGRRLFKMAPLHHHFELSGWKETQVVVRFWIITLMLCLFGLSTL

SEQ ID NO: 136804 - protein, 331 aa, Unknown
  Bacterial polypetide isolated from the Sargasso Sea
TALLISFMFVQKIIALLKKMQKKGQPIRSDGPQSHIIFKTGTPTMGGLLIVLAFTTSTVLWAKLDNAYIWIILGVAISFGFIGLLDDWIKVSKMTSNGLKSYQKIIPQIFIAFIAAWFISENTPQNLQNTLSIPFLKESIFFLGILYIPFTILVIVGSSNAVNLTDGLDGLAIVPVMIAASSFAIIVYLTGHLNFSSYLQISYVPGVGEIAVFLGAIIGSGLGFLWFNAPPAMVFMGDTGSLSLGGVIGVSASASRHELVLIIIGGLFVLETISVIVQIVSFKLTGKRIFRMAPLHHHFEQKGWAEPTIVIRFWIIALILALIGLSTLKLR

SEQ ID NO: 136805 - protein, 255 aa, Unknown
  Bacterial polypetide isolated from the Sargasso Sea
WVWGPLGFYDDYKKLIKKNSDGIKGRFKLFLQIIFASMMTLFLYFFMDTGSIESVFPFLKENSFYLGILFIPWSIFILVGSSNAVNLTDGLDGLAILPCILIASAFVIFSYVHGNINISSYLLIPYIEGTGETAIFAASLVGAGLGFLWFNSYPAEIFMGDCGSLSLGSSLGLLAIILKQELAFAIMSGIFVAEALSVIIQVASFKLRKGKRIFKMAPLHHHYELSGLSEPKIIMRFWIITFILVLIALATLKIR

SEQ ID NO: 136806 - protein, 245 aa, Unknown
  Bacterial polypetide isolated from the Sargasso Sea
MLVWLAEYLTQYINAFNVFSYLTFRSILGILTALMLSLYLGPKLIAKLQLLQIGQTVRDDGPQSHFSKKGTPTMGGLLILGSVLTSILLWADLANKYVWVVIFTLVSFGWIGFIDDYRKVVRKDPKGLIAKWKYFWQSLFAVAIAFFLYATAERPAETSLVVPFIKDVLPQLGFIFIALCYFVIVGTSNAVNLTDGLDGLAIVPTIMVAFAFAIIAYASGNVNFANYLNIPYLPHASELVVVCAA

SEQ ID NO: 136807 - protein, 361 aa, Unknown
  Bacterial polypetide isolated from the Sargasso Sea
MLYSLFTNLVDSYPIFNVFRYLTVRTGLSMFTSMLIVFLIGNPIINYFSSKKIHNPIRSDGPSDHIVKKIGTPTMGGVLILIGIFSGILLWSDLSNPYNWFLIFIVGGLGILGAYDDYKKIKSGNSGGVSFRFKLTSQIIIALIGIYILTYHANPTELKNLYFPFFKNLVINLGWFFIPFYLFVIVGSSNAVNLTDGLDGLATVPIILVAACFAFISYVTGNIVFSEYLHIPYIEDVGEVAVFCGSIIGACIGFLWFNAPPAKIFMGDTGSLALGGSLGAVGIITKHEIVLAITGGLFVLEAVSVIVQVISFKLTGKRIFKMAPIHHHFEKKGWAESTVVVRFWIISIILAMIGLATLKLR

SEQ ID NO: 136808 - protein, 104 aa, Unknown
  Bacterial polypetide isolated from the Sargasso Sea
NAPPAMVFMGDTGSLSLGGALGTISVITKHELVLAIIGGLFVLETVSVIVQVVSFKLTGKRIFRMAPLHHHFEKKGWAEPTVVIRFWIIAVVLALIGLSTLKLR

SEQ ID NO: 136809 - protein, 362 aa, Unknown
  Bacterial polypetide isolated from the Sargasso Sea
MLYEFLFPFAESFQFFNVFKYITFRTGGAILTALIISFILGPFLIKTLRNFQKEGQPIRMDGPSDHIIKKKGTPTMGGILILLASLGSSILWMKLDNQFVWTVLLIMVGFGSVGIIDDWIKLSKNSSSGLNGKIKLSLQILITIPAIMSIIETSPPDILSGLAIPFLKDTFINLGYFFLPFSIFVVVGSSNSVNLTDGLDGLAIVPVMIAAVCFALIAYLVGNINFSAYLQLNYVPGVGEIAIVLGALFGAGLGFLWFNAPPAEIFMGDTGSLSLGGVIGISSVATRHELVLVIIGGLFVVETISVILQVGYFKLTGKRIFLMAPLHHHFEKRGWEESTIVIRFWIIAVILALIGLSTLKLR

SEQ ID NO: 136810 - protein, 287 aa, Unknown
  Bacterial polypetide isolated from the Sargasso Sea
MGGIMILIGIFSGTLLWGNLNNSYNWFLIFIVGSLGILGAYDDYKKIKSKNSAGISFKFKIISQITIALIGIFILTYYVNSPEIKNLYFPFFKNLIINLGWFFIPFYIFIIVGSSNAVNLTDGLDGLATVPVILVAGCFAFISYVSGNVVFSNYLHIPYLEGVGEASVFCGSIIGACIGFLWFNAPPAKIFMGDTGSLALGGSLGAVGIITKHEIVLAITGGLFVLEAVSVIVQVVSFKITGKRIFKMAPIHHHFEKKGWAESTVVVRFWIISLILAMIGLATLKLR

SEQ ID NO: 136811 - protein, 360 aa, Unknown
  Bacterial polypetide isolated from the Sargasso Sea
MLLPLFEYLSEFFGPFRVVEFLSTRAILATLTSLLFSLFLGPRFINKMKDIQVGQVIREEGPKTHLSKQGTPTMGGTLILSSIILSVILWGDLENRYLWVAFLTTISFGVLGWIDDRLKIKHKSSDGLSASSKIFWQSVITIIACSFLFYSHENVEEVSLIVPFFKDISIPLGVGFIFLSYFVVLGTSNAVNLTDGLDGLAILPCVMVAAGLGVIGYLAGNIIYADFLNIPYLPGTGEMIVFCGALVGSGIGFLWFNTYPAQVFMGDVGSLALGAALGIVTVIIRHEYVLLVMGGLFVVEALSVIVQVSSYKLTGKRIFQMAPLHHHYELKGWPEPRVIVRFWIITFMLVLLGLALLRLR

SEQ ID NO: 136812 - protein, 233 aa, Unknown
  Bacterial polypetide isolated from the Sargasso Sea
MLFSLFSNLVDIFSFFNVFKYLTVRTGLSMFTSMIVVFLVGTPLINYFSSKQIHNPIRDDGPSEHIVKKIGTPTMGGLMILMGVFSGVLLWGDLSNPYNWFLIYIAGSFGLLGAYDDYQKVKKNNSSGVSSRFKIIIQIILVLIGILILYFSNVSNEIQNLYVPFFKNVVINLGWFFIPFYLFVLVGSSNAVNLTDGLDGLATVPVILVAGCFAFISYVAGNVVFSDYLQIPY

SEQ ID NO: 136813 - protein, 253 aa, Unknown
  Bacterial polypetide isolated from the Sargasso Sea
MLYNLFAPFAEDFIFFNLFRFLTFRTGGAILTAMVLSFVLGPSIIRWLKKRQHYGQPIRNDGPKSHIISKAGTPTMGGILILLSFGVSTLLWADLSNGYVWATLTVTLGFGLIGFLDDFLKVSKNSHEGVSAYTKLLLQTILSIVAVIWVVNISPDSTSLGLAVPFFKETIINLGWFFIPMAVVVIVGSSNAVNLTDGLDGLAIVPVIIAASSYALIAYLVGNVVFSSYLQIHGVPGAGELAVFCGALVGAGL

SEQ ID NO: 136814 - protein, 361 aa, Unknown
  Bacterial polypetide isolated from the Sargasso Sea
MLYSLFTNLVDSYPIFNVFRYLTVRTGLSMFTSMLIVFLIGNPIINYFSSKKIHNPIRSDGPTDHIVKKIGTPTMGGILILIGIFSGVLLWSDLSNSYNWFLIFIVGGLGALGAYDDYKKIKSGSSAGISFKFKLISQIIIALIGIYILTYYVNSAELKNLYFPFFKNLVINLSWFFIPFYLFIIVGSSNAVNLTDGLDGLATVPIILVASCFAFISYVTGNVVFSEYLHIPYIQGVGEVAVFCGSIIGACIGFLWFNAPPAKIFMGDTGSLALGGSLGAVGIITKHEIVLAITGGLFVLEAVSVIVQVVSYKLTGKRIFKMAPIHHHFEKKGWPESTVVVRFWIISIILAMIGLATLKLR

SEQ ID NO: 136815 - protein, 361 aa, Unknown
  Bacterial polypetide isolated from the Sargasso Sea
MLYQFLLNFVDTFGFLNVFKYLTFRTGLSVFTSFLIALIIGGPFIKFFSNQKIYNPIRDDGPEDHIIKKIGTPTMGGVIILLGLLVSVLCWADLSNINILFCIYITISFGLLGAYDDYKKIRFTNSSGISSKLKIVLQIILAIIGVIFYLQFVDYQDVTNLYFPFFKDLIINLGWFFIPFSVFVIIGSSNAVNLTDGLDGLATVPVILVAACFAFISYVTGNIVFSDYLNIPYIEGTGEISIFCGAIIGSCLGFLWFNAPPAKIFMGDTGSLSLGGSLGAVGIITKHEIVLAITGGLFVLEAVSVMVQVISFKLTGKRIFKMAPIHHHFEKKGWPESTIVIRFWIISIILAMVGLATLKLR

SEQ ID NO: 136816 - protein, 301 aa, Unknown
  Bacterial polypetide isolated from the Sargasso Sea
LNLLQTIRAEGPANHYKKSDTPTMGGIFMMVPFLIFLLIITITTSSPKLFLLLLTIFGFFITGFLDDFLSIKNKKNTGLKTKEKFFLQSIISIIFILLAYEKNLINPLITVSDSWGINMNIFILPISFLVLVGISNSVNLTDGLDGLAAGCSGIVFYGLGTEILMKEQQELFIFSILCYSMSGICLGFLKYNSYPAKIFMGDTGSLSIGAILGSIALLTDSVFTLSIFSGVFIIESLSVMIQVGFFKITKKLFHKGKRIFLMAPLHHHFELKGVKEQKIVENFWKINILLVILGIVLKINL

SEQ ID NO: 136817 - protein, 348 aa, Unknown
  Bacterial polypetide isolated from the Sargasso Sea
MLYLTNYLAQFESSFYVFDYITIRAILGALTSLIISMVLGPRMIAKFHSIQLNQPVRDDGPETHKEKIGTPTMGGALIIMSVSLATLMWAEINNPFIWIILFVTISFGILGYIDDYQKIIKNNSDGISASKKLFWQSLIAIIAITLLIKFNTDSNSTSLLIPYLKNTMIELGVLHLIISFFFIIGFSNAVNLTDGLDGLAIMPTVLVAGALGIFSYVTGNINFSTYLEIPYVAGAGEIFVFCAALVGAGLGFLWFNTYPAQVFMGDVGSLSIGASLGIIAVIIKQEIVLVIMGGVFVAETLSVMIQVTSFKLTGKRIFRMAPLHHHYELKGWKEPKIIVRFWIITVIL

SEQ ID NO: 136818 - protein, 219 aa, Unknown
  Bacterial polypetide isolated from the Sargasso Sea
GFSLPLPETTDLQIPFFKEWNIPLGVAGFVALTYFVIVGTSNAVNLTDGADGLAIMPAVLVGGALGIFAYVTGNAVFARYLLISYVPGAGELIVLCGAIFGAGLAFLWFNAYPAQVFMGDVGALALGAALGCIAVIVRQEIMLFIMGGVFVAETVSVMLQVSWFKYTKRRYGTGRRIFRMAPLHHHFEVGGVKESQVVVRFWIVTMVLVLFGLSSLKLR

SEQ ID NO: 136819 - protein, 360 aa, Unknown
  Bacterial polypetide isolated from the Sargasso Sea
MLLFLFDFFSESFGPLRVFEYLSFRSILATITSLLFSLLLGPLFINKMKQDQQNQIIRESGPESHLNKKGTPTMGGALILSSILISSIFWGDLENKYIWTILFIMTSFACIGWVDDRLKIKLNSSDGMSFYGKIFWQSLATLTAISYLYISSNDINQTSLIVPFFKEITIPLGLGFIALSYFVVVGTSNAVNLTDGLDGLAILPSVMVISGLAVISYASGNLFFSDYLNIPYLPGTGEIVVICGAIIGAGIGFLWYNTYPAQVFMGDVGSLALGSAIGIITVIIRHEYVLLVMGGVFVVEALSVMIQVTSFKLTGKRVFRMAPLHHHYELKGWPEPRVIVRFWIITFVLVLIGLALLKLR

SEQ ID NO: 136820 - protein, 285 aa, Unknown
  Bacterial polypetide isolated from the Sargasso Sea
MIRLLFAVTISVGISLFGTRYLIRWLTTRKIGQPIREDGPGGHITKAGTPTMGGIAVVFGGTIAYVISDLYNGIYTRSGLLVMAAILGASIVGFLDDWLKVSNERNLGLKKGTKVIGLLVVAFGFSIAMVTSTNVHTEVSFTRWDSLSIDLGPVGWVFWAVFVILAMSNAVNLTDGLDGLAAGSATLCFSALTVISFWAFRHPEIYDLDHALDLAVVAVSMLGACIGFLWWNAAPAKIFMGDTGSLAIGTALACLALATNTHLLLPIIGGIFVLETLSVIIQVLG

SEQ ID NO: 136821 - protein, 361 aa, Unknown
  Bacterial polypetide isolated from the Sargasso Sea
MLFSLFSNLVDIFSFFNVFKYLTVRTGLSMFTSMIVVFVVGNPLINYFSAKQIHNPIRDDGPSEHIVKKIGTPTMGGLMILMGVFSGVLLWGDLSNPYNWFLIYIAGSFGLLGAYDDYKKIKKNNSSGISSKFKIFIQIILALVGIFIIYFYSESSEINKLYFPFFKNLVINLGWFFVPFYLFVLVGSSNAVNLTDGLDGLATVPVMLVAACFAFISYVTGNIVFSDYLQIPYIEGVGEASIFCGSIIGACLGFLWFNAPPAKIFMGDTGSLSLGGSLGAVGIITKHEIVLAITGGLFVLEAVSVIAQVVSFKLTGKRIFKMAPIHHHFEKKGWPESTVVIRFWIISIILAMIGLATLKLR

SEQ ID NO: 136822 - protein, 325 aa, Unknown
  Bacterial polypetide isolated from the Sargasso Sea
VFIVGNPLINYFSSKQIHNPIRDDGPSEHIIKKIGTPTMGGLMILLGVFSGVLLWGDLSNPYNWFLIYIAGSFGLLGAYDDYKKIKKNNSTGLSSKFKIIIQIFLALIGILILYFSSESNEIKNLYFPFFKNFVINLGWFFIPFYLFVLVGSSNAVNLTDGLDGLATVPVILVAGCFAFISYVVGNIVFSEYLHIPYIKGVGEASVFCGSIIGACLGFLWFNAPPAKIFMGDTGSLSLGGSLGAVGIITKHEIVLAITGGLFVLEAISVIAQVISFKLTGKRIFKMAPIHHHFEKKGWAESTVVIRFWIISIILAMIGLATLKLR

SEQ ID NO: 136823 - protein, 355 aa, Unknown
  Bacterial polypetide isolated from the Sargasso Sea
MIKYLAFEYQSLFSFLNIFSYITFRAGASILTGLFFSLIFGNYIINKLSNVQPTGQPIRVDGPESHIIAKKGTPTMGGLLIILSVFVSTIIWADLQNVFVWILLLTILIFGSIGFADDYKKIKSNTSEGISSKIRIIFQIIFSFFITYLILINLDPSISKSMTFPFFKNLIIDFGIFYFLISIFIIIGSANAVNLTDGLDGLAIVPVMIVAMSFAFISYVSGNIVFSNYLLIQYIPGTGELAVFCGSLIGAALGFLWFNAPPAKVFMGDTGSLALGGSLGSIAIICKHEILLAIIGGLFVLETFSVVIQVLIFKMTGKRVFLMAPLHHHFEKKGWPESTKGIRFWIITIVLALIG

SEQ ID NO: 136824 - protein, 357 aa, Unknown
  Bacterial polypetide isolated from the Sargasso Sea
MLLPLFEYLSEFFGPFRVVEFLSTRAILATLTSLLFSLVLGPKFINKMKDIQIGQVVREEGPKTHLSKQGTPTMGGTLILSSVFLSVILWGDLENRYLWVAFLTSMAFGVLGWIDDRLKIKHKSSDGLSPLSKILWQSVIALLACTYLYLSQENIAETSLIIPFFKDISIPLGLGFILLSYFVVIGTSNAVNLTDGLDGLAILPCVMVAAGLGIIGYLAGNAIYSDFLNIPYLPGTGEMIVFCGALVGSGIGFLWFNTYPAQVFMGDVGSLSLGAALGIVTVIIRHEYVLLVMGGLFVIEALSVIVQVASFKLTGKRVFNMAPLHHHYELKGWPEPRVIVRFWINTFMLVLLGLALL

SEQ ID NO: 136825 - protein, 263 aa, Unknown
  Bacterial polypetide isolated from the Sargasso Sea
NWFLLYIAGSFGILGGYDDFQKIKKNNSNGISSKLKIIIQIILALGGIFILYFYSGSNEIENLYFPFFKNLIINLGWFFIPFYLFVIVGSSNAVNLTDGLDGLATVPVILVAACFAFISYVTGNIVFSEYLQITYIVGVGEASIFCGAIIGSCLGFLWFNAPPAKIFMGDTGSLALGGSLGAVSIITKHEIVLAITGGLFVLEAVSVIAQVISFKLTGKRIFKMAPIHHHFEKKGWPESTVVIRFWIISIILAMIGLATLKLR

SEQ ID NO: 136826 - protein, 291 aa, Unknown
  Bacterial polypetide isolated from the Sargasso Sea
MLYQFLLNFVDTFSFLNVFKYLTFRTGLSFFTSLVIVLIIGGPFIKFFSKQKILNPIRDDGPEDHIVKKIGTPTMGGLIILFGLLISVIFWADLSNINILFCIYIAITFGLLGAYDDFKKIKFSNSSGISSKFKITSQIILAIIGVSLFVYLNDYQDLNNLYFPFFKNLIVNLGWFFIPFAIFVIIGSSNAVNLTDGLDGLATVPVILVAACFAFISYVTGNIVFSNYLQIPYIEGTGEVSIFCGAIIGSCLGFLWFNAPPAKIFMGDTGSLSLGGSLGAVGIITKHEIVL

SEQ ID NO: 136827 - protein, 361 aa, Unknown
  Bacterial polypetide isolated from the Sargasso Sea
MLYNILTSYSDTYSFLNFFNFLTVRTGLAVITAMIIVFLIGDKFINFFSSKQITNPIRSDGPEDHLIKKIGTPTMGGVLILIGLFTGVFLWADLLNPYNWLLIFITLSFGILGAFDDYKKIKNNNSNGISSKLKILIQIFLCLISLIIFYKFIDSDIKTNLYFPFFKNLVINLGWFFIPFYLFVIVGSSNAVNLTDGLDGLATVPVILVAGCFGFISYVSGNVIFADYLLIPYIEGVGEVAVFCGAIIGASIGFLWFNAPPAKIFMGDTGSLALGGSLGAIGVTTKHEIVLAITGGLFVLEAISVIVQVVSFKLTGKRIFMMAPIHHHFEKKGWAESTIVIRFWIISLILAMIGLATLKLR

SEQ ID NO: 136828 - protein, 346 aa, Unknown
  Bacterial polypetide isolated from the Sargasso Sea
LNVFKYLTVRTGLSMFTSMIVVFLVGGPLINYFSSHQIHDPIREDGPSEHIVKKIGTPTMGGLMILLGIFSGVLLWGDFSNPYNWFLLYIAGSFGLLGGYDDYQKIKKNNSNGISSKLKIIIQIILALGGILILYFYSGSNEIENLYFPFFKNLIINLGWFFIPFYLFVIVGSSNAVNLTDGLDGLATVPVILVAACFAFISYVTGNIVFSEYLQITYIEGVGEASIFCGSIIGSCLGFLWFNAPPAKIFMGDTGSLALGGSLGAVGIITKHEIVLAITGGLFVLEAVSVIVQVISFKLTGKRIFKMAPIHHHFEKKGWPESTVVIRFWIISIILAMIGLATLKLR

SEQ ID NO: 136829 - protein, 361 aa, Unknown
  Bacterial polypetide isolated from the Sargasso Sea
MLYQFLLNFVDSFSFLNVFKYLTFRTGLSFFTSLIIVLIIGGTFIKFFSKQKILNPIRNDGPEDHIVKKIGTPTMGGVIILIGLLISVLFWADLSNLNVLFCLYIAISFGLLGAFDDYKKIKYSNSSGISSKLKLTFQIILAIIGVSFYVYFNDYQDLTNLYFPFFKNLIINLGWFFIPFSIFVIIGSSNAVNLTDGLDGLATVPVILVAACFAFISYVTGNIVFSNYLQIPYIEGTGEVSIFCGAIIGSCLGFLWFNAPPAKIFMGDTGSLSLGGSLGAVGIITKHEIVLAITGGLFVLEAVSVIVQVISFKLTGKRVFKMAPIHHHFEKKGWPESTVVIRFWIISIILAMIGLATLKLR

SEQ ID NO: 136830 - protein, 119 aa, Unknown
  Bacterial polypetide isolated from the Sargasso Sea
FCGSIIGACLGFLWFNAPPAKIFMGDTGSLSLGGSLGAIGIITKHEIVLAITGGLFVLEAISVIAQVISFKLTGKRIFKMAPIHHHFEKKGWPESTVVIRFWIISIILAMIGLATLKLR

SEQ ID NO: 136831 - protein, 288 aa, Unknown
  Bacterial polypetide isolated from the Sargasso Sea
MLYQFLLNFVDTFSFLNVFKYLTFRTGLSFFTSLVIVLIIGGPFIQFFSKQKFLNPIRDDGPEDHIVKKIGTPTMGGLIILFGLLVSVIFWADLSNINILFCIYIAITFGLLGAYDDFKKIRFSNSSGISSKFKITSQIILAIIGVSLFVYLNDYQDLNNLYFPFFKNLIINLGWFFIPFAILVIIGSSNAVNLTDGLDGLATVPVILVAACFAFISYVTGNIVFSNYLQIPYIEGTGEVSIFCGAIIGSCLGFLWFNAPPAKIFMGDTGSLSLGGSLGAVGIITKHE

SEQ ID NO: 136832 - protein, 303 aa, Unknown
  Bacterial polypetide isolated from the Sargasso Sea
MIGKIKTLNFSSLFFLILFSLILNSFIFNNLFISTIFLTFFFISLIATKYGLNIIKKLSLLQNIRSEVPSIHFTKKNTPTMGGLFIILPFLLLLLVISIKFDSIGILLLFFCNLGFFVIGFLDDFLSITNKKNTGLKANEKFLLQSIISILFISLASQNNYISPLITISNDWNINTNIIIFPICFITLVGLSNAVNLTDGLDGLAAGCSSIAFFGLGTEILIKGQKELIIYGLISYAMSGLCMGFLKFNKYPAKIFMGDTGSLTIGASLGSISILTNSFFTLFIISGIFIIETLSVIIQSSFF

SEQ ID NO: 136833 - protein, 332 aa, Unknown
  Bacterial polypetide isolated from the Sargasso Sea
MLFSLFSNLVDVFSFFNVFKYLTVRTGLSMFTSMIVVFLVGGPLINYFSSHQIHDPIREDGPSEHIVKKIGTPTMGGLMILLGIFSGVLLWGDFSNSYNWFLLYIAGSFGLLGGYDDYQKIKKNNSNGISSKLKIVIQIILALGGISILYLYSGSNELENLYFPFFKNLIINLGWFFIPFYLFVIVGSSNAVNLTDGLDGLATVPVILVAACFAFISYVTGNIVFSEYLQITYIKGVGEASIFCGAIIGSCLGFLWFNAPPAKIFMGDTGSLALGGSLGAVGIITKHEIVLAITGGLFVLEAVSVIAQVISFKFTGKRIFKMAPIHHHLKKK

SEQ ID NO: 136834 - protein, 352 aa, Unknown
  Bacterial polypetide isolated from the Sargasso Sea
FDFPGINLFSYLSFRAGCAILTSLVIVLIIGPKFIETMNSKQGKGQPIRVDGPKSHLFLKKGTPSMGGILILSSFFLSTLLWGDITNHFIWIVLLSGLLFGLIGYVDDRKKIKEQKSDGISSKNKFLFQALSSFVLIFLITVFSSSELIYSVSIPFINGVFFLGIILYYCFTSFVIVGTSNAVNLTDGLDGLAIVPVMIAIASFGIITYLAGNLVFSEYLGINFIPFSGELSILCCALLGSCLGFLWFNAPPAMIFMGDTGSLSLGAILASIAVITKHELVLIIIGGIFVLEAMSVIIQVFSYKVFGKRVFRMAPIHHHFEKKGWSESTIVIRFWIISFVLAIIGLATLKIR

SEQ ID NO: 136835 - protein, 360 aa, Unknown
  Bacterial polypetide isolated from the Sargasso Sea
MIDILLNFLPEKSNFINLFSYLTTRTILATLTGLMMVLLLGETFIKRIRSLQFQQSIGDRGPDSHKIKDGTPTMGGLLIIGSVILSGFLWGDLTNKYLLISIFCLFMFALIGFVDDYNKIKQKNQEGMSGISKIFWQFICACIISVILYTTAENKSEISYIVPFFKEVVLDFGVWFIFISIFIIIGSSNAVNLTDGLDGLAILPVIIITAALGVIAWASGNIIAADYLYIPHIVGTGELLVLCGAMIGAGIGFLWFNTYPAQIFMGDVGSLSMGAFIALVAIIVRHEIVFAVMAMVFVMEAMSVILQVTSFKLRKKRIFRMAPIHHHFELMGWKEPKIIVRFWILTFIFVLIGLSLLKIR

SEQ ID NO: 136836 - protein, 361 aa, Unknown
  Bacterial polypetide isolated from the Sargasso Sea
MLYSLILNLIDTYSFLNVFKYLTVRTGLAVFTSLLVVFLIGNPFINFFSAKQILNPIRDDGPDEHIVKKIGTPTMGGVLILIGLFFGIFLWGDLNNLYVWFLIYIVASFGILGAYDDYKKIKFKNSSGISFKFKIVSQIIAATFGIIVLSIYSDNADLENLYFPFFKNLIFNLGWFFIPFAVFVIVGSSNAVNLTDGLDGLATVPVILVAACFAFISYVTGNIVFSEYLQIPYIAGLGEVAVFLGAVIGSCLGFLWFNAPPAKIFMGDTGSLALGGSLGGVGIITKHEIVLAITGGLFVLEAISVIVQVISFKLTGKRIFKMAPIHHHYEKKGWPESTVVIRFWIVAIILAMIGLATLKFR

SEQ ID NO: 136837 - protein, 346 aa, Unknown
  Bacterial polypetide isolated from the Sargasso Sea
FNVFKYLTFRTGLSVITSLVVVFIIGAPLIKIFSDKMITGPIRQDGPIDHIVKKSGTPTMGGVIIIIGIIFSTILWADLTNIYVWTLVFVSLSLGGLGLLDDILKIRFKNSRGLKSRYKFGGQLIIGSIALFILINYSGHEYLYDLYFPFFKNLILHLGLFFIPFGLFVIIGASNAVNLTDGLDGLATVPVMLVALSFTLISYVVGNTIFSQYLQIQYIPDVGEISIFCGSIVGACLGFLWYNAPPAKIFMGDTGSLSLGGSLAAVAIIVKHEIVLAIIGGLFVLETVSVIIQVISFKLTGKRIFKMAPIHHHFEKKGWAEPTIVIRFWIIAIILALVGLATLKLR

SEQ ID NO: 136838 - protein, 367 aa, Unknown
  Bacterial polypetide isolated from the Sargasso Sea
MLYHFLYSLRDSFSPLNVFQYITFRSASAAILALIISFILGPAIIRKLRHYQIGEEIREHGPESHKKKRGTPTMGGIIILTAIILPTLLLADLRNSFIQIILISTIWMGLIGFLDDYLKTIKKIKSGLVAKYKLAGQISLGVIITFWIYNTGAWDNFRTVTSVPFFKDTVIDFGLLYPLIIILVVTGSSNAVNLTDGLDGLASGLLAICFTVFAAIAYISGRVDFSDYLNIIYLPGSGELTIFTAACVGACIGYLWFNAAPAEVFMGDVGSLSTGAALGTLSILLKKEFLLVIIGGVFVAEALSVILQVSYYRYTKIKYGEPKKLFLMAPFHHHFELKGYPESRIVIRFWIVGLLLALLTLATFKIR

SEQ ID NO: 136839 - protein, 359 aa, Unknown
  Bacterial polypetide isolated from the Sargasso Sea
MIYYLSELYLEYFPQLNLFQYITVRIIFAAITGLIFTLLFGPIVIKKLADYGIGEKISKYNPNTHLTKTGTPTMGGIMIILSVILSSVIWADLSNKYIIFGILIMLSFGALGFFDDYTKLKKNSKGIKAKTKFLNQVLLSLIFAILIFVNIEDINEQLLFFPFFKEIVINLSYFYIPLFILVIVSSCNSVNLTDGLDGLAITPVILVCVGLGIFTYLSGHINFANYLLIPHLPGVGELTIFIGAIVGSGLGFLWYNSYPAQIFMGDVGSLSLGAVIGYVAMATRQEIVLIIMGGIFVAETISVIIQITSIKLFNRKVFLWTPLHHHFEKKGWPEPKVVSRFWIVTFILVLVGIATLKIR

SEQ ID NO: 136840 - protein, 361 aa, Unknown
  Bacterial polypetide isolated from the Sargasso Sea
MLFELFSILVDQFSFLNVFKYLTVRTGLSMFTAMVVVFLVGNPLINFFSSKQIHNPIREDGPSDHIIRKIGTPTMGGLIILLGVFSGVLLWGDLSNPYNWFLIFIAASFGLLGAYDDYKKIKLKSSNGISSKLKFSLQIILALIGIFILYITSNSDQINNLYFPFFKNLVINLGWFFIPFYMFILVGASNAVNLTDGLDGLATVPVMLVAACFAFISYVSGNIIFSDYLQIAYIEGVGEASIFCGSIIGACLGFLWFNAPPAKIFMGDTGSLSLGGSLGAVGIITKHEIVLAITGGLFVLEAVSVIVQVISYKLTGKRIFKMAPIHHHFEKKGWPESTVVIRFWIISIILAMIGLATLKLR

SEQ ID NO: 136841 - protein, 277 aa, Unknown
  Bacterial polypetide isolated from the Sargasso Sea
MIELFGTWLMTYDSGFDVLRYLTVRTIGGTLTALMLSIFLGPTLIRFLTNIQFSQSIRGDGPESHLAKTGTPTMGGLIIIFSLIISTLLWSDFQNPYIWILLFITVSFSSIGFLDDWLKIKEKNSNGLKGKYKLILQFLFALLAMLFMLQVSPNGNEQIFILPFNKEYIFVISPFIFLLISIFVIIGSSNAVNLTDGLDGLAILPSVLIAGGLGLIAYASGNLIISDYLFIPFNPLSGELIVFCGALIGAGIGFLWYNTYPTQIFMGDLGSLTLGGI

SEQ ID NO: 136842 - protein, 352 aa, Unknown
  Bacterial polypetide isolated from the Sargasso Sea
MIAIIVSGAISFLFVILSTSIGVNYFKSRNIGQPIQEEVVFHDHKKGTPTMGGVFIILGTYAGYVLSHINFWTIGQGFKIELISINPVILNLLLFGTLMASVGLIDDLLKVRKNRNLGLRARNKIFLQILVGSFVSLYFYNLDYSSTFYFFSGFGFEVGFLKWILIVFLIVGITNSTNLTDGLDGLVAGSSSVSFGGILIIAFWIFRHPDYYINFMNNEMVGLELSTLISALAGSTLGFLWWNTNPAKIIMGDVGSHFIGAMFPIILISLGADGLIFFFCFLYIFEALSVILQVSSYKLKQKRIFKMTPIHHHFEMSNWAETTIIVRFWIINGIFIVMGLGLFYGDWVLFGN

SEQ ID NO: 136843 - protein, 286 aa, Unknown
  Bacterial polypetide isolated from the Sargasso Sea
MGGLMIILSIIVSVLIWSDLSNVYNLVLIASIISFGLIGFIDDFTKLKKSKKGMSAKTKLILQFIVAASSTYYLLGQGSSVLSSEVLIPFTNNIRLDLGWFFLPFAIFVIVGSSNAVNLTDGLDGLAIMPVSMIAIALGIFAYVTGNFNFADYLDLPFLQDAGEVFVFCCAISGAGLGFLWFNTYPAQIFMGDVGAVSLGGILGTIAVIVKQELILAIMGGVFIIETLSVVLQVGSFKLRGKRIFNMAPIHHHFELKGWAEPKVIVRFWIITVFLVLIGLSSLKIR

SEQ ID NO: 136844 - protein, 51 aa, Unknown
  Bacterial polypetide isolated from the Sargasso Sea
RLNLLGKRIFKMAPIHHHFEKKGWPESTVVIRFWIISIILAMIGLATLKLR

SEQ ID NO: 136845 - protein, 328 aa, Unknown
  Bacterial polypetide isolated from the Sargasso Sea
MLYYIFEFLETQYNLPGAGLFDYLSFRAAVSVIISLIISVVFGKRIIEYLRKRQIGENVRKLGLEGEEKKSGTPTMGGLIIIIATIIPVLLMSNLENIYIKILLISTIILGIIGFIDDYIKVFRKDKKGLKGKFKIAGQTILGIFVGIILLTSNDITIVEFSSLSDIESIENFQSNEIKSFKTTIPFFKNNELDYALISNAIFNNENMLWLILIPIIIFIVTAVSNSNNLTDGLDGLSAGTSAIIVFTLGVFAWTSGNIIFSNYLNIMYIPRVGEITIFIASLLGSLVGFLWYNTYPASIFMGDTGSLTVGGLIAVIFILIRKELMIP

SEQ ID NO: 136846 - protein, 361 aa, Unknown
  Bacterial polypetide isolated from the Sargasso Sea
MLYSLFTNLVDSYPIFNVFRYLTVRTGLSMFTSMLIVFLIGNPIINYFSSKKIHNPIRSDGPTDHIVKKIGTPTMGGILILIGIFSGVLLWSDLSNPYNWFLILIVGGLGVLGAYDDYKKIKSGSSGGVSFKFKIIFQIIIALIGIYILTYYVNSAELKNLYFPFFKNLVINLGWFFIPFYLFIIVGSSNAVNLTDGLDGLATVPVILVASCFAFISYVTGNLVFSEYLHIPYIQGVGEVAVFCGSIIGACIGFLWFNAPPAKIFMGDTGSLALGGSLGAVGIITKHEIVLAITGGLFVLEAVSVIVQVVSYKITGKRIFKMAPIHHHFEKKGWAESTVVVRFWIISIILAMIGLATLKLR

SEQ ID NO: 136847 - protein, 315 aa, Unknown
  Bacterial polypetide isolated from the Sargasso Sea
MKKKQKEGQPIREDGPETHKIKKAGTPTMGGVLIIGSLLFSTLIWCRYDISYVWIVIFVTLGFGLIGFIDDFSKLHNNNTRGISGKIRLLLGFLVAACATIWVISIQDPSLSKSLAVPIFKDVLLNLGWFYIPFSMIVIVGSANSVNLTDGLDGLAIMPVMIASGSLGIIAYAVGRVDFSNYLEVHYIAGSGEIAVFSAALIGAGLGFLWYNAPPAAVFMGDTGSLALGGALGAISVCTKHEIVLAIIGGLFVLEALSVIIQVAAYKLTGKRVFLMAPIHHHFEKLGWAEPQIVIRFWIISVILALVGLATLKLR

SEQ ID NO: 136848 - protein, 361 aa, Unknown
  Bacterial polypetide isolated from the Sargasso Sea
MLYQFLLNFVDTFSFLNVFKYLTFRTGLSFFTSLVIVLIIGGPFIKFFSKQKILNPIRDDGPEDHIVKKIGTPTMGGLIILFGLLISVIFWADLSNINILFCVYIAITFGLLGAYDDFKKIKFSNSSGISSKFKITSQIILAIIGVSLFVYLNDYQDLNNLYFPFFKNLIINLGWFFIPFAIFVIIGSSNAVNLTDGLDGLATVPVILVAACFAFISYVTGNIVFSNYLQIPYIEGTGEVAIFCGAIIGSCLGFLWFNAPPAKIFMGDTGSLSLGGSLGAVGIITKHEIVLAITGGLFVLEAVSVMVQVISFKLTGKRIFRMAPIHHHFEKKGWPESTVVIRFWIISIILAMIGLATLKLR

SEQ ID NO: 136849 - protein, 196 aa, Unknown
  Bacterial polypetide isolated from the Sargasso Sea
MLDFFLSYLPEKSSFLNLFSYLSTRTILSTLSALMIVLFFGDKFIEFIRSIQFKQKIDDRGPKSHKVKDGTPTMGGLLIIGSVLLSGLLWGDLQNKYLLISLFTIFSFGLIGFFDDYRKVKSLDSKGLSMVTKIFFQVVFAFIASSLLYYSANSTTETNYIVPFFKTVSLDLGIFFIFISVFILVGSSNAVNLTDG

SEQ ID NO: 136850 - protein, 295 aa, Unknown
  Bacterial polypetide isolated from the Sargasso Sea
MLLPLFEYLSEFFGPFRVVEFLSTRAILATLTSLLFSLILGPKFINKMKDIQVGQVIREEGPDSHLSKQGTPTMGGTLILSSIFLSVVLWGDLENRYLWVAFLTAMSFGVLGWIDDRLKIKHQSSDGLSPLNKIFWQSVITILACSYLYITQENISETSLIVPFFKDISIPLGAGFIVLSYFVVIGTSNAVNLTDGLDGLAILPCVMVAAGLGIIGYLAGNAIYSDFLNIPYLPGTGEMIVFCGALVGSGIGFLWFNTYPAQVFMGDVGSLSLGAALGIVTVIIRHEYVLLVMGG

SEQ ID NO: 136851 - protein, 317 aa, Unknown
  Bacterial polypetide isolated from the Sargasso Sea
MINHLTSKQITQSVRDDGPEAHLKKIGTPTMGGLLILLSIIFSTLCWGDISNRYILVVLTVTFLFGIIGLIDDYKKVIHNNPKGLPASYKYAAQSIVALAAAIYLYQSAALPVETQLLIPFFKDYIFDMGWLYIVLVYFVIVGSSNAVNLTDGLDGLAILPTVMVAGALAIFAYLTGHITFSGYLGIPYVPGVGEVAVFCGAMVGSGIGFLWFNTYPAQVFMGDIGALSLGAALGIVAVVTRQELVLFIMGGVFVIETLSVILQVTSYKLTGKRIFKMAPLHHHYELKGWPEPRVIVRFWIITVILILIGLASLKIR

SEQ ID NO: 136852 - protein, 191 aa, Unknown
  Bacterial polypetide isolated from the Sargasso Sea
MHMGLFFIPFGIFVIIGSSNAVNLTDGLDGLATVPVMLVALSFSLICYLVGNTIFSEYLQIQYIENVGELSIFCGSIVGSCLGFLWYNAPPAKIFMGDTGSLSLGGSIASVAIIVKHEIVLAIIGGLFVLETVSVIIQVISFKLTGKRIFMMAPIHHHFEKKGWAESTVVIRFWIIAIILALVGLATLKLR

SEQ ID NO: 136853 - protein, 184 aa, Unknown
  Bacterial polypetide isolated from the Sargasso Sea
IPFAILVIIGLSNAVNLTDGLDGLATVPVILVAACFAFISYVTGNIVFSNYLQIPYIEGTGEVSIFCGAIIGSCLGFLWFNAPPAKIFMGDTGSLSLGGSLGAVGIITKHEIVLAITGGLFVLEAVSVMVQVISFKLTGKRIFRMAPIHHHFEKKGWPESTVVIRFWIISIILAMIGLATLKLR

SEQ ID NO: 136854 - protein, 163 aa, Unknown
  Bacterial polypetide isolated from the Sargasso Sea
SSSIIVFTLGIFSWISGNIIFSDYLNIMYLPGIGEIVVFVAALLGGLIGFLWYNTYPAQIFMGDTGSLTIGGIIAVIAILVRKELILPILCGVFLIETLSVIIQVGYFKYTKKKLGFGKRIFLMTPIHHHFQKKGYSESKIVARFWIISIMLAILSLITLKIR

SEQ ID NO: 136855 - protein, 360 aa, Unknown
  Bacterial polypetide isolated from the Sargasso Sea
MLIWLADWLTQFDSGFNVFSYLTLRAILSTLTALLIAILIGPKMIRYLQRMQIGQTVRDDGPQSHLSKSGTPTMGGLLILAAIVVSGLLWADLTNRYVLVTLTVVVAYGIIGFVDDYRKVIRKDSKGLIARWKYFWQSVVALGVAFYLYSSATISAETSLLVPFFKEVFPQLGAFFIIITYFAIVGTSNAVNLTDGLDGLAIVPTILVAGAFAIFAYVTGNANFAEYLNIPHIPLTSELVIVCTAMVGAGLGFLWFNTYPAQVFMGDVGSLALGGTLGVLAVLVRQELVLIIMGGVFVMETLSVILQVGSYKLRGQRIFRMAPIHHHYELKGWPEPRVIVRFWIISIILVLVGLATLKLR

SEQ ID NO: 136856 - protein, 209 aa, Unknown
  Bacterial polypetide isolated from the Sargasso Sea
EDSAEISLILLFNKDWIFEMSMLSFILFGSFVIVGSSNAVNLTDGLDGLAILPTILIGGGLGLIAYAMGNQLIAEYLFIPHLQIAGELIVFCGALIGSGIGFLWYNSYPAEVFMGDVGSLTLGAILGVLAVILRHEIVYAIMAGVFIAETLSVMIQVTSYRLRQKRVFLMAPIHHHFELKGWPEPKIIVRFWIITLVLILVALATLKLR

SEQ ID NO: 136857 - protein, 360 aa, Unknown
  Bacterial polypetide isolated from the Sargasso Sea
MLLPVFEYLSEFFGPFRVVEFLSTRAILATLTSLLFALILGPRFINKMKDIQVGQVIRKEGPETHLSKQGTPTMGGTLILSSIFLSVLLWGDLENRYLWVAFLTTISFGVLGWIDDRLKIKHKSSDGLSASSKIFWQSVIAITACSFLFYSHENIKEVSLIVPFFKDISIPLGIGFIFLSYFVVLGTSNAVNLTDGLDGLAILPCVMVAAGLGIIGYLAGNIIYADFLNIPYLPGTGEMIVFCGALVGSGIGFLWFNTYPAQVFMGDVGSLSLGAALGIVTVIIRHEYVLLVMGGLFVVEALSVIVQVTSYKLTGKRIFQMAPLHHHYELKGWPEPRVIVRFWIITFMLVLLGLALLRLR

SEQ ID NO: 136858 - protein, 305 aa, Unknown
  Bacterial polypetide isolated from the Sargasso Sea
SIRDDGPQSHLSKAGTPTMGGLIIFTSLIISTLLWADLSNYYIWLLLLTTFLFAGIGSLDDYLKIKEKNSKGLKGKHKLIFQVSFSVLILGIYLHLSDGDNLYFILPFNKDFIFDISIVFFILFGIFVIVGSSNAVNLTDGLDGLAILPSILITGGLGLVAYAMGNQIIAEYLYVPFLPLSGELIVFAGALIGAGIGFLWYNTYPAQIFMGDVGSLTLGAILAVFAILLRQEIVFAFMAGIFILETVSVILQVASYKLFGKRIFLMAPIHHHFELKGWPEPKVIVRFWIITFLLVLFALATLKLR

SEQ ID NO: 136859 - protein, 359 aa, Unknown
  Bacterial polypetide isolated from the Sargasso Sea
MFLYFSENLIEWFSPLNAFTYITTRGILAALTALIISFLFGPKIITALQGKKIGETIRADGPSSHTLKGGTPTMGGLMIILSILISVLLWSDLNNIYNLVLIASIISFGLIGFIDDFTKLKKNKKGMSAKTKFILQFFVAASSTYYLLTQGSDVLSSELLIPFTNNIRLDLGWLFLPFAILVIVGSSNAVNLTDGLDGLAIMPVSMIAIALGIFAYVTGNFNFAEYLDLPFIQDAGEVFVFCCAISGAGLGFLWFNTYPAQVFMGDVGAVSLGGILGTISVIVKQELILAIMGGVFIMETLSVILQVGSFKLRGKRIFNMAPIHHHFELKGWAEPKVIVRFWIITVFLVLIGLSSLKIR

SEQ ID NO: 136860 - protein, 324 aa, Unknown
  Bacterial polypetide isolated from the Sargasso Sea
SSFLFGPKIIAVLQGNKIGETIRTDGPSSHSSKGGTPTMGGLMIILSIIVSVLIWSDLSNVYNLVLIVSIISFGLIGFIDDFTKLKRNKKGISAKTKLILQFIVAASSTYYLLEQGSSVLNSEVLIPFTNNIHLDLGWFFLPFAIFVIVGSSNAVNLTDGLDGLAIMPVSMIAIALGIFAYVTGNFNFAEYLNLPFLQDAGEVFVFCCAISGAGLGFLWFNTYPAQIFMGDVGAVSLGGILGTIAVIVKQELILAIMGGVFIIETLSVVLQVGSFKLRGKRIFNMAPIHHHFELKGWAEPKVIVRFWIITVFLVLIGLSSLKIR

SEQ ID NO: 136861 - protein, 80 aa, Unknown
  Bacterial polypetide isolated from the Sargasso Sea
AILLRHELVFAIMAGVFVMETLSVAIQVISFKTRGKRVFLMAPIHHHYELKGMAEPKIIVRFWIITLVLILVALATLKLR

SEQ ID NO: 136862 - protein, 62 aa, Unknown
  Bacterial polypetide isolated from the Sargasso Sea
LEAVSVIVQVISFKLTGKRIFKMAPIHHHFEKKGWPESTVVIRFWIISIILAMIGLATLKLR

SEQ ID NO: 136863 - protein, 262 aa, Unknown
  Bacterial polypetide isolated from the Sargasso Sea
MLYSLLTSLIETYSFLNVFKYITFRIGLSVVTSLTIIFLIGTPLINYFARKQITGPIRQDGPIDHIIKKSGTPTMGGLMILIGIVVSTLLWADLNNIYIWIVLFVCTSLGLLGFLDDYLKIKFKNSTGINAKLKFLWQFIISLSAIIALVYFTDHENISKLYVPFFKNLILNMGLFFIPFGIFVIIGSSNAVNLTDGLDGLATVPVMLVALSFSLICYLVGNTIFANYLQIQYVPEVGELSVFYGAIVGSCLGFLWYNAPPA

SEQ ID NO: 136864 - protein, 360 aa, Unknown
  Bacterial polypetide isolated from the Sargasso Sea
MLVYLAEYLTRFHTGFNVFSYVTFRAILGLLTALVFSLWWGPKLIERLQLMQIGQVVRNDGPESHFSKRGTPTMGGLLILAAIFISVLLWGDLGSRYVWVMLFVLGSFGMIGFIDDYRKVVRKDTKGLIARWKYILQSLAALIIAFFLYTTASNPGETQLVVPFFKDVMPQLGAVFIVLAYFTIVGSSNAVNLTDGLDGLAIMPTVMVAAAFALIAYLSGHAQFANYLHIPHLPGSGELVIVCTAIVGAGLGFLWFNTYPAQVFMGDVGSLSLGAALGAIAVLVRQEILLVIMGGVFVMETVSVILQVGSYKLRGQRIFRMAPIHHHYELKGWPEPRVIVRFWIISIFLVLLGLATLKLR

SEQ ID NO: 136865 - protein, 85 aa, Unknown
  Bacterial polypetide isolated from the Sargasso Sea
SLGAVGIITKHEIVLAITGGLFVLEAVSVMVQVISFKLTGKRIFRMAPIHHHFEKKGWPESTVVIRFWIISIILAMIGLATLKLR

SEQ ID NO: 136866 - protein, 239 aa, Unknown
  Bacterial polypetide isolated from the Sargasso Sea
MLLMLSQWLQGLSPEFGFFRVFQYLTFRAVMAAMTALLIGLVAGPRVIRILTSLKIGQPIRGYAMQSHLSKSGTPTMGGVLILLSIAISTLLWFDLSNRFVWIVLIVTLGFGAIGWVDDWRKVVNKDPEGMRSREKYFWQSVIGLMAALYLVFSISESSNAKVWELFVGWVQSGFSLDLPPKAGLQLPFFKEVSYPLGVLGFVILTYLVIVGSSNAVNLTDGLDGLAIMPVVMVGSALG

SEQ ID NO: 136867 - protein, 361 aa, Unknown
  Bacterial polypetide isolated from the Sargasso Sea
MLYQFLLNFVDTFSFLNVFKYLTFRTGLSVFTSLLIVLIIGGPFIKFFSNQKIFNPIRDDGPEDHIIKKIGTPTMGGVIILIGLLISVLCWADLSNINILFCLYIVVSFGLLGAFDDFKKIKNNNSSGISSKIKIILQIVLAVIGVTFFISYVDFQEMTNLYFPFFKNLILNLGWFFIPFSVFVIIGSSNAVNLTDGLDGLATVPVILVAACFAFISYVTGNIVFSDYLQIPYIEGTGEISIFCGAIIGSCLGFLWFNAPPAKIFMGDTGSLSLGGSLGAVGIITKHEIVLAITGGLFVLEAISVMVQVISYKLTGKRIFKMAPIHHHFEKKGWPESTVVIRFWIISIILALIGLATLKLR

SEQ ID NO: 136868 - protein, 359 aa, Unknown
  Bacterial polypetide isolated from the Sargasso Sea
MFLYFSENLIEWFSPLNAFTYITTRGILAALTALIISFLFGPKIITVLQGKKIGETIRTDGPSSHSLKGGTPTMGGIMIILSIVVSVLMWSDLSNVYNLVLIASIISFGLIGFIDDFTKLKKSKKGMSAKTKFALQLIVAASSTYYLLGQGSEVLSSEVLIPFTNNIRVDLGWLFLPFAIFVIVGSSNAVNLTDGLDGLAIMPVSMIAIALGIFAYVTGNFNFAEYLDLPFLKDAGEVFVFCCAISGAGLGFLWFNTYPAQIFMGDVGAVSLGGILGTIAVIVKQELILAIMGGVFIMETLSVILQVGSFKLRGKRIFNMAPIHHHFELKGWAEPKVIVRFWIITVFLVLIGLSSLKIR

SEQ ID NO: 136869 - protein, 358 aa, Unknown
  Bacterial polypetide isolated from the Sargasso Sea
MIGKIKKFNFKSLLLLNTFALIATSYFFNNFIFIGVFTLFFFVSLFATKNGLEIIRKLNLLQNIRPEGPSNHYKKRDTPTMGGILLIIPFLIFLLIITINLSSLKLFLLLMTIFGFFITGFLDDYLSVRNKKNTGLKTKEKFILQSIISIIFILLAYEKNLISPLITISDSWVINMNIFILPVSFLVLVGISNSVNLTDGLDGLAAGCSGIVFYGLGTEILMKGQQELFVFSILCYSMSGICLGFLKYNSYPAKLFMGDTGSLSIGAILGCIALLTNSVFTLSIFSGIFIIESLSVMIQVGYFKITKKLFHRGERIFLMAPLHHHFELSGVKEQKIVENFWKINILLVILGIVLKINL

SEQ ID NO: 136870 - protein, 273 aa, Unknown
  Bacterial polypetide isolated from the Sargasso Sea
MLLSFFEYLSQFNSGFNVFQYLTLRIVMGALTALLISLVLGPYIIFYLKHKQFYQSIRADGPKSHLDDKNTTPTMGGIIIISSVVISTILWSDLSNNYILTLLFGILGFGAIGFYDDYKKLVKRNSDGIKGRLKLSLQIIFASIITLFLYLFMDTGSIESVFPFLKDNSYYLGVLFIPWSIFILVGSSNAVNLTDGLDGLAILPCILIASAFVIFSYVHGNINISSYLLIPYIEGTGETAIFAASLVGAGLGFLWFNSYPAEIFMGDCGSLSL

SEQ ID NO: 136871 - protein, 360 aa, Unknown
  Bacterial polypetide isolated from the Sargasso Sea
MLVYLAEYLTRFHTGFNVFSYVTFRAILGLLTALMFSLWWGPKLIERLQLMQIGQVVRNDGPESHFSKRGTPTMGGLMILGAIFISVLLWGDLGSRYVWVMLFVLGSFGMIGFIDDYRKVVRKDTKGLIARWKYILQSLAALIIAFFLYTTASNPGETQLVVPFFKDVMPQLGAVFIVLAYFTIVGSSNAVNLTDGLDGLAIMPTVMVAAAFALIAYLSGHAQFANYLHIPHLPGSGELVIVCTAIVGAGLGFLWFNTYPAQVFMGDVGSLSLGAALGAIAVLVRQEILLVIMGGVFVMETVSVILQVGSYKLRGQRIFRMAPIHHHYELKGWPEPRVIVRFWIISIFLVLLGLATLKLR

SEQ ID NO: 136872 - protein, 367 aa, Unknown
  Bacterial polypetide isolated from the Sargasso Sea
MLYELLLPLKAYYSPLNLFQYITFRSASAAILALFISFLIGPWIIHKLRFHQIGEEIRSSGPESHLVKKGTPTMGGIIILGSVILPTLLFADLSNTFIQIILLSLVWMGAIGFLDDYLKVVKKFEKGLIGKYKLIGQISLGMVISYWIYNTPEYANIVSSTSIPFLKNYTIDFGLFYPLIIILVITGTSNAVNLTDGLDGLAAGLLAISFAVFSAIAYISGRVDFSEYLNIMYLPGAGELTVFTAAITGACIGYLWFNTSPAEVFMGDIGSLSTGAALGALAVLLKKELLLAIIGGVFVWEALSVMIQVTYFRWTKYKFGEGKRFFKMAPIHHHFELKGWPESRIVVRFWIIGILFALFSLTTFKIR

SEQ ID NO: 136873 - protein, 358 aa, Unknown
  Bacterial polypetide isolated from the Sargasso Sea
MAFEYQSLFSFLNIFSYITFRAGGSILTGLFFSLIFGNYIINKLSNVQPTGQPIRDDGPESHIIAKKGTPTMGGLLIILSVFVSTIIWADLQNIFIWILLSTILIFGSIGFADDYSKIKSNTSKGISSKIRIIFQIIFSFFITYLILINLDPSISKSMTFPFFKNLIIDFGIFYFLISIFIIIGSANAVNLTDGLDGLAIVPVMIVAMSFAFIAYVSGNIVFSNYLLIQYIPGTGELAVFCGSLIGAALGFLWFNAPPAKVFMGDTGSLALGGSLGSVAIICKHEILLAIIGGLFVLETLSVVIQVFIFKMTGKRVFLMAPLHHHFEKKGWPESTIVIRFWIITIVLALIGLATLRIR

SEQ ID NO: 136874 - protein, 360 aa, Unknown
  Bacterial polypetide isolated from the Sargasso Sea
MILYLIEYLNLGALNNFLNYLTVRTGLALFTSFFFILFFGPFLIKRIGSYQSIGQPIREDGPESHLVAKKGTPTMGGIIILISIVGSMILWVNPESYISWPIIFLLISFGLVGFADDFSKVKKKSSNGISAKIRIFFQIIISLIFIYWITTYNEIDIQLLSLPFLKDIFLNLGLFSIPFVILVILGSANAVNLTDGLDGLAIVPIMIVSATFAVICYLAGNMIFSNYLYINYLPGAGELTVLCAAIIGSALGFLWYNAPPAMVFMGDTGSLSLGAALGGISVLTKQEIVLAIVGGIFVAEAVSVILQVGSYKLTGKRIFKMAPLHHHFEKNGIAESKIVIRFWIIALILALIGLATLKIR

SEQ ID NO: 136875 - protein, 188 aa, Unknown
  Bacterial polypetide isolated from the Sargasso Sea
MVFYTFLYFYNFVGSSNAVNLTDGLDGLATVPIILVAGCFAFISYVTGNVVFSNYLHIPYLEGVGEASVFCGSIIGACIGFLWFNAPPAKIFMGDTGSLALGGSLGAVGIITKHEIVLAITGGLFVLEAVSVIVQVVSFKLTGKRIFKMAPIHHHFEKKGWPESTVVVRFWIISLILAMIGLATLKLR

SEQ ID NO: 136876 - protein, 358 aa, Unknown
  Bacterial polypetide isolated from the Sargasso Sea
MIGKTRSLTFTSLFFLLVISLIVNSYIFNSLLIINIFLISSLISLVITKYGFKIITRLNLLQNIRSEGPTLHFNKTNTPTMGGIFIILPFLLLLLIVNNYVDSIGILLLFFCTISFFIIGFLDDYLSIANKKNTGLKSNEKFTLQALIAILFIIFASQSNYINPLITISNNWNMDTNIVIFPICFLTLVGLSNAVNLTDGLDGLAAGCSAIVFFGLGTEIFIKDQKDLIIYGLISYAMSGLCIGFLKYNKYPAKIFMGDTGSLTIGAALGSISILTNSFFTLFIISGIFITEALSVMIQVSFFKITKKLFKKGKRIFLMTPIHHHFELKGIKEEKIVENFWKVNILLIVLGIVLKINL

SEQ ID NO: 136877 - protein, 367 aa, Unknown
  Bacterial polypetide isolated from the Sargasso Sea
MLYNLLLPFKDSFSIINLFEYITFRAGIAAIAALFISFIIGPWVIHILHKNQIGEEIRSTGPKSHMKKEGTPTMGGVIILMAVLLPTLLFSKINSVLVQIIIFATIWMGVIGFLDDYLKVIKKMKRGLIARYKLAGQISLGCIVSFWILNTPEFIDFNSKTTMPFFKNVEIDLGMLYPLMVILVITGTSNAVNLTDGLDGLLAGLLAICFTVFSAIAYITGRIDFSDYLNILYIPGAGELTIFTSAMAGACIGYLWFNSHPAEIFMGDTGSLSTGAALGTLAILLKKELLLFIIGGVFVFEALSVIIQVSYFRYTKIFKGQGEKIFKMAPIHHHFELQGWPESKVVIRFWIIGLLLALFSLTTFKIR

SEQ ID NO: 136878 - protein, 360 aa, Unknown
  Bacterial polypetide isolated from the Sargasso Sea
MLVWLAEYLTQYINAFNVFSYLTFRSILGILTALMLSLYFGPKLIAKLQQLQIGQTVRDDGPQSHFSKKGTPTMGGLLILGSVLASILLWADLGNKYVWVVIFTLISFGWIGFIDDYRKVVRKDPKGLIAKWKYFWQSLFAIVIAFFLYASAERPAETSLVVPFIKDVLPQLGFIFIALCYFVIVGTSNAVNLTDGLDGLAIVPTIMVAFAFAIIAYASGNVNFATYLNIPYLPHASELVVVCAALVGAGLGFLWFNTYPAQVFMGDVGSLALGAVLGVIAILVRQEIVLFIMGGVFVMETVSVILQVGSYKLRGQRIFRMAPIHHHYELKGWPEPRVIVRFWILSVIFVLIGLATLKLR

SEQ ID NO: 136879 - protein, 361 aa, Unknown
  Bacterial polypetide isolated from the Sargasso Sea
MLYQFLLNFVDTFGFLNVFKYLTFRTGLSVFTSLIIVLIIGGPFIRFFSNQKILNPIRDDGPEDHIIKKIGTPTMGGVIILLGLLISVLCWGDLSNINILFCIFIAVSFGLLGAFDDYKKIKHSNSSGISSKLKIILQIIIAITGVSFFVYFVDYQDITNLYFPFFKNLIVNLGWFFIPFSVFVIIGSSNAVNLTDGLDGLATVPVILVAVCFAFISYVTGNVVFSDYLQIPYIEGTGEVSIFCGAIIGSCLGFLWFNAPPAKIFMGDTGSLSLGGSLGAIGIITKHEIVLAITGGLFVLEAVSVMVQVISYKLTGKRIFKMAPIHHHFEKKGWPESTVVIRFWIISIILAMIGLATLKLR

SEQ ID NO: 136880 - protein, 361 aa, Unknown
  Bacterial polypetide isolated from the Sargasso Sea
MFEYLGTILVDIDPGFDVLRYLTVRTIGGTITALLLTIFLGPKLISWLQRMQFKQYGVERGPDSHKQKSGTPTMGGLLIISSLLISTLFWADLSNRYIWVCLFITLGFTIIGFLDDFLKIKYKDSRGISGRLKLLSQTIVSIIAVSFLYFSAEDSAEISLILLFNKDWIFEMSMLSFILFGSFVIVGSSNAVNLTDGLDGLAILPTILIGGGLGLIAYAMGNQLIAEYLFIPHLQIAGELIVFCGALIGSGIGFLWYNSYPAEVFMGDVGSLTLGAILGVLAVILRHEIVYAIMAGVFIAETLSVIIQVTSYRLRQKRVFLMAPIHHHFELKGWPEPKIIVRFWIITLVLILVALATLKLR

SEQ ID NO: 136881 - protein, 351 aa, Unknown
  Bacterial polypetide isolated from the Sargasso Sea
MQFNTDFGVLQYITVRGIFSVLTALLVSLIIGPYLIEKLQYHQIGQVVRDDGPETHFSKAGTPTMGGALILVSIAISTLLWSDLNNHYVWVLLSVTLLFGGVGWVDDYRKVFEGNSAGLSARWKYFWQSLIGFAAALFLYSTASSPIETSYIVPFFKDVIIDFGFFYVVISYFVIVGFSNAVNLTDGLDGLAILPTVMVGGALGVISYLAGHSEFSAYLNIPNVLGSGEIVIFAGALVGAGMGFLWFNTYPAQIFMGDVGALALGAALGVMAIVSRHEIVLFIMGGVFVVETASVILQVASYKLTGRRIFRMAPLHHHFELKGWPEPRVIVRFWIITVMLVLFGLATLKLR

SEQ ID NO: 136882 - protein, 159 aa, Unknown
  Bacterial polypetide isolated from the Sargasso Sea
IVPVMIVAMSFAFIAYVSGNVVFSNYLLIQYIPGTGELAVFCGSLIGAALGFLWFNAPPAKVFMGDTGSLALGGSLGSIAIICKHEILLAIIGGLFVLETLSVVIQVFIFKMTGKRVFLMAPLHHHFEKKGWPESTIVIRFWIITIVLALIGLATLRIR

SEQ ID NO: 136883 - protein, 355 aa, Unknown
  Bacterial polypetide isolated from the Sargasso Sea
MILYLVQILNFDFPGINLFTYLSFRAGCAIITSLLIVLLIGPKFIKSMLIKQGNGQPIREDGPKSHLHSKKGTPSMGGLLILSSFLISTLIWGDIFNSFMWIVILSTILFGLIGYIDDRKKIKDQNPKGISSKNKFLLQILSSFILIFLISLQSSSELVYSISIPFVNGVFFLGLILYYCFTSFVIVGTSNAVNLTDGLDGLAIVPIMIAIASFGLITYLSGNLVFSEYLGINYIPYSGELSILCCALLGSCLGFLWFNAPPAMIFMGDTGSLSLGAILGSIAVITKHELVLIVIGGIFVLEAMSVIIQVFSYRVFGKRVFKMAPIHHHFEKKGWSESTIVIRFWIISFVLAIIG

SEQ ID NO: 136884 - protein, 361 aa, Unknown
  Bacterial polypetide isolated from the Sargasso Sea
MLFSLFSSLVEIFSFLNVFKYLTVRTGLSMFTSMTVVFLVGGPLINYFSSHQIHDPIREDGPSEHIVKKIGTPTMGGLMILLGIFSGVLLWGDLSNPYNWFLIYIAGSFGLLGAYDDFQKIKKNNSNGISSKLKIIIQIVLALGGIYLLYLFGGSNELENLYFPFFKNLVINLGWFFIPFYLFVIVGSSNAVNLTDGLDGLATVPVILVAACFAFISYVTGNIVFSEYLKIVYIDGVGEASIFCGAIIGSCLGFLWFNAPPAKIFMGDTGSLALGGSLGAVGIITKHEIVLAITGGLFVLEAVSVIAQVISFKLTGRRIFKMAPIHHHFEKKGWPESTVVIRFWIISIILAMIGLATLKLR

SEQ ID NO: 136885 - protein, 344 aa, Unknown
  Bacterial polypetide isolated from the Sargasso Sea
MFEYLGTVLVSVDPGFDVLRYLTVRTIGGTVTALLLSILMGPLIINSLKSMQFEQFVRKDGPQSHYKKTGTPTMGGLLILSSLIISTLLWADLGNRYIWVVLGVTIGFSIIGFFDDYLKIKNKSPDGLSSKQKIFFQSIIALISITYLYYSAEIIPEQSFIVPFFKDLIIPMSPFVFIFIGVFVLVGSSNAVNLTDGLDGLAILPSVLIGGALGLIAYAMGNQNIADYLYLPHLPLSGELIVFCGALIGSGIGFLWYNTYPAQVFMGDIGSLSLGAILGIIAIILRHELVFAIMAGVFVMETLSVAIQVISFKTRGKRVFLMAPIHHHFELKGWAEPKIIVRFW

SEQ ID NO: 136886 - protein, 313 aa, Unknown
  Bacterial polypetide isolated from the Sargasso Sea
MLYQFLLNFVDNFGFLNVFKYLTFRTGLSFFTSLVIVLFIGGPFIKFFSNQKIFNPIRQDGPEDHIVKKIGTPTMGGIIILLGLIISVILWADLSNNNILFCLYIALSFGLLGAFDDYKKIKQSNSSGISSKLKITIQIILAIIGVGLFVHFNNYQDLNNLYFPFFKNLIINLGWFFIPFAIFVIIGSSNAVNLTDGLDGLATVPVILVAACFAFISYVTGNIVFSNYLQIPYIEGTGEVAIFCGAIIGACLGFLWFNAPPAKIFMGDTGSLSLGGSLGAVGIITKHEIVLAITGGLFVLEAVSVMVQVISFK

SEQ ID NO: 136887 - protein, 366 aa, Unknown
  Bacterial polypetide isolated from the Sargasso Sea
MQSTDSNHRPWWENGSLSASLLMLVVLMTSFAADKWITNAQLSLPLLISAVCATATAALGIPLLRRLKMGQFIREEGPKAHQSKAGTPTMGGLLVVPVGVILGSLITRDAVASQQLLSLAALTLAFMLIGGIDDWSSLTKHTNAGLTARGKLLLQAVAASTFLAIAAWQGWISSSIALPFGLELPLGLLIWPLGLFVVLAESNATNLTDGLDGLASGCGALVFTGLALQLMLRGDNGDPALAGFCMTMAGAWLGFLVHNRNPARAFMGDTGSLAMGAALSGVALLSNSLWPLLVMGGVFVAESLSVIIQVWVFKATKGPDGQGRRVFRMAPLHHHFELGGTNERSVVPAFWLVTAGLVLLGLMLRP

SEQ ID NO: 136888 - protein, 320 aa, Unknown
  Bacterial polypetide isolated from the Sargasso Sea
MLYQFLLNYVDIFSFLNVFKYITFRTGLSLFTSLIIVLLIGGPFIKFFSNNKILDPIRDDGPENHIVKKIGTPTMGGVIILFGLLVSVLLWGNLSNVSILFCIYITISFGLLGALDDYKKIKLNNSSGISFKFKLLSQIFLAIIGISFFLYFVDYQEINNLYFPFFKNLVINLGWFFIPFSVFIIIGSSNAVNLTDGLDGLATVPVILVAACFAFISYITGNIVFSDYLQIPYIEGTGEISIFCGAIIGSCLGFLWFNAPPAKIFMGDTGSLALGGSLGTIGIITKHEIVLAITGGLFVLEAVSVMVQVISFKLTGKRIF

SEQ ID NO: 136889 - protein, 367 aa, Unknown
  Bacterial polypetide isolated from the Sargasso Sea
MLYELFTPFKHLISFFNLLEYITFRAATASILALFISFIIGPWVIHILHKNQIGEEIRSTGPESHMKKRGTPTMGGVIILMAVLLPTLLLSKLDSPLVQIIVFSTVWMGFIGLIDDYLKVVKKIERGLIARYKIAGQVSLGCIISFWIFQIPEFIEFNTKTTVPFFKNVEIDFGMLYPIMVVLVITGTSNAVNLTDGLDGLLAGLLAICFTVFSAITYITGRVDYSDYLNILYIPGAGELTIFTSAMAGACIGYLWFNSHPAEIFMGDTGSLSTGAALGTLAILLKKELLLLIIGGVFVWEAISVIIQLSYFRYTKSLNGEGKRFFNMAPIHHHYELKGWPETKVVIRFWIIGLLLALFSLTTFKIR

SEQ ID NO: 136890 - protein, 338 aa, Unknown
  Bacterial polypetide isolated from the Sargasso Sea
MLFEFLTSLVEQYSFLNVFKYLTFRTGLSLMTSLIIVFLIGGPLIKFFSKMDITGPIRQDGPIDHIVKKSGTPTMGGIIIIIGMLTSTLLWADLKNIYIWSLIFISISLGTLGFIDDLLKIKYRNSIGLNSKLKFFGQFVIGLITLLIIIQFSDHEYINNIYFPFFKNLILDLGIFFIPFGLFVIIGSSNAVNLTDGLDGLATVPIMLVALSFTFISYVVGNIIFSEYLQIQYIPGVGEIAIFCGAIVGSCLGFLWYNAPPAKIFMGDTGSLSLGGSLAAVAIIVKHEIVLAIIGGLFVLETVSVIIQVISFKLTGKRVFMMAPIHHHLKKKGGRVHN

SEQ ID NO: 136891 - protein, 361 aa, Unknown
  Bacterial polypetide isolated from the Sargasso Sea
MLYQFLLNFVDTFGFLNVFKYITFRTGLSLFTSLAIVLIIGGPFIKYFSNQKILNPIRDDGPEEHIVKKIGTPTMGGVIILIGLLVSVLFWGDLTNINILFCIYIAISFGVLGAFDDFKKIKHSNSSGVSSKFKIISQIILAIIGVCFFVYYVDNQNITNLYFPFFKNLIINLGWFFIPFAVFVLIGSSNAVNLTDGLDGLATVPVILVAGCFAFISYVTGNIVFSDYLQIPYIEGTGEISIFCGAIIGSCLGFLWFNAPPAKIFMGDTGSLSLGGSLGAVGIITKHEIVLAITGGLFVLEAVSVMVQVISFKLTGKRIFRMAPIHHHFEKKGWPESTVVIRFWIISIILAMIGLATLKLR

SEQ ID NO: 136892 - protein, 352 aa, Unknown
  Bacterial polypetide isolated from the Sargasso Sea
MIGIIVAGGISFLFVIFSTSIGVNYFKTRNIGQPIREELNFHEHKKGTPTMGGVFLILGTFVGFILSHINFWTIGKGFKIELLSINPQIFYLLLIGTLMGLVGLVDDYLKVKQNRNLGLKARNKFILQTLVALIASYYFYFLDDSTIFYLFSGFGIDVGIFKWFLIVFIIVGITNAVNLTDGLDGLVAGSSAVSFGAILIIAFWIFRHPDYYSNFINPVFISVELAVLISSIAGSCLGFLWWNTNPAKIIMGDVGSQFIGSMFPLILFAIGADTLILFFCFLYIGEALSVIIQVLSFKYRGKRVFKMTPIHHHFEMSNWAETTIIVRFWIINGIVIVIGLGLFYGDWVLFGN

SEQ ID NO: 136893 - protein, 134 aa, Unknown
  Bacterial polypetide isolated from the Sargasso Sea
YLFIPFTPLSGELIVFCGALIGAGIGFLWYNTYPAQIFMGDLGSLTLGGILGTLAVLIRHEIVFAIMAGVFVMETLSVIIQVGSYKLRGKRVFLMAPIHHHFELKGWAEPKVIVRFWIITFVLVLFALATLKLR

SEQ ID NO: 136894 - protein, 364 aa, Unknown
  Bacterial polypetide isolated from the Sargasso Sea
MIPLRDYFGFLNLFEYITFRAGASAILALLISFIFGPFVVRKLINLQIGESIRDHGPDSHKEKQGTPTMGGVIIILSTIIPTILLADLNNLFIQIICLSMVWMGLVGFYDDYLKVVKKSKDGLSGRYKLLAQTILGVFISYLLINSNVYGDYTLLTFVPFLKNVSINFFYPIIYAVFIILVVSATSNAVNLTDGLDGLAAGLLAISVSVFGVIAYISGRVDFTDYLYIAYLPLASELTIFATAFFGGCLGFLWFNAKPAEIFMGDVGSLSTGAALGTLAILLKKEVLLLIVGGVFVIETLSVIIQVLYFRYTKNKYGEGKKFFLMAPIHHHFELKGWPESRVVTRFWIIGILFALMSLTTFKVR

SEQ ID NO: 136895 - protein, 231 aa, Unknown
  Bacterial polypetide isolated from the Sargasso Sea
IKKKENTGLQTKEKFFLQSVISIIFILLAYEKNLISPLITVSDSWEINMNIFILPVSFFVLVGISNSVNLTDGLDGLAAGCSGIVFYGLGTEILLKEQQELFVFSILCFAMSGICLGFLKYNIYPAKIFMGDTGSLSIGAMLGSIALLTNSVFTLSIFSGIFIIESLSVMIQVGFFKITKKLFHRGKRIFLMAPLHHHFELKGVKEQKIVENFWKINILLVILGIVLKINL

SEQ ID NO: 136896 - protein, 336 aa, Unknown
  Bacterial polypetide isolated from the Sargasso Sea
TGLSMFTSMIVVFLVGGPLINYFSSHQIHDPIREDGPSDHIVKKIGTPTMGGLMILLGIFSGVLLWGDLSNPYNWFLLYIAGSFGLLGAYDDYQKIKKNNSNGISSKLKIIFQIILALVGIFILYFYSGSNEIENLYFPFFKNLIINLGWFFIPFYLFIIVGSSNAVNLTDGLDGLATVPVILVAACFAFISYVSGNIVFSEYLQITYIEGVGESSIFCGAIIGSCLGFLWFNAPPAKIFMGDTGSLALGGSLGAVGIITKHEIVLAITGGLFVLEAVSVIAQVISFKLTGKRIFKMAPIHHHFEKKGWPESTVVIRFWIISIILAMIGLATLKLR

SEQ ID NO: 136897 - protein, 287 aa, Unknown
  Bacterial polypetide isolated from the Sargasso Sea
MGGLIIIIGIISSTLLWADLKNIYIWTLIFVSLSLGILGFFDDLLKIKLKNSRGLNSKLKFLGQLVIGSIALFILIKYSDHEYLYDLYFPFFKNLILHMGLFFIPFGLFIIIGSSNAVNLTDGLDGLATVPVMLVALSFTLICYIVGNTIFSEYLQLQYIPDVGELSIFCGSIVGSCLGFLWYNAPPAKIFMGDTGSLSLGGSLAAVAIIVKHEIVLAIIGGLFVLETVSVIIQVISFKLTGKRVFMMAPFHHHFEKKGWPESTIVIRFWIITIVLALVGLATLKIR

SEQ ID NO: 136898 - protein, 382 aa, Unknown
  Bacterial polypetide isolated from the Sargasso Sea
MLYHLFEYLDFNFDFPGSGLFSFISFRAGMAVITSLLITLVFGGRLIRFLQRKQVGESIRDLGLEGQIEKAGTPTMGGVIIIAGIIIPTLLFAKLNNVYTLLMLVSTIWLGTIGFIDDYIKVFKKNKKGLAGKFKVIGQIGVGLIVGITMYLSDDFDSLKTTIPFIKNNEFDYSWLLTWISEDFAQYAWLIFIPLVVVIVTAVSNGANITDGLDGLATGSSAIIGTTLAIFAYLSGNIVFADYLNIIYIPNSGELVIFISSFVGACIGFLWYNSYPAKVFMGDTGSLALGGIIAVFSIAIRKELLIPVFCGIFLIENLSVIIQVAYFKFTKRKYGEGKRVFLMAPIHHHFQKKGIHEAKIVSRMWIIGILLAVLSIVTLKLR

SEQ ID NO: 136899 - protein, 360 aa, Unknown
  Bacterial polypetide isolated from the Sargasso Sea
MLVWLAELLTPHFTFFNVFSYLTFRAILSIITGLVVALWMGPRLIRRLQILKFGQVIRNDGPESHLSKKGTPTMGGLMIIAAIFISVLLWCRLDNPYVWLVLFVLGAYGAIGFADDYLKVVRKNTDGLIARWKYFWQSAVALGVAVFLYATATHDGQTQLVVPFLKDVMPQLGLMFIVLTYFVIVGTSNAVNLTDGLDGLAIMPTVMVAGGFAFIAWATGNVNFANYLHIPYVPYTSELVIVCTAIVGAGLGFLWFNTYPAQVFMGDVGSLALGGALGTIAVLVRQEFLLVIMGGVFVMETVSVILQVGSYKLRGVRIFRMAPIHHHYEKKGWPEPRVIVRFWIITLMLVLLGLATLKVR

SEQ ID NO: 136900 - protein, 360 aa, Unknown
  Bacterial polypetide isolated from the Sargasso Sea
MIDFLLNFLPEKSNFLNLFSYLTTRTVLSTLTGLMMVLFLGNTFIERIRSLQFQQSIGDRGPESHKLKDGTPTMGGLLIIGSVILSGFLWGDLTNKYLLISIFCLFMFGLIGFVDDYNKVKQQNQEGMSGKSKIFWQFICACIISVVLYTTAENKMETSYIVPFFKDVVLDFGIWFIFISIFIIIGSSNAVNLTDGLDGLAILPVIIITAALGIIAWASGNVIAADYLYIPHIVGTGELLVLCGAMIGAGIGFLWFNTYPAQIFMGDVGSLSMGAFIALVAIIVRHEIVFAVMAMVFIMEAMSVILQVTSFKLRKKRIFRMAPIHHHFELMGWKEPKIIVRFWILTFIFVLIGLSLLKIR

SEQ ID NO: 136901 - protein, 256 aa, Unknown
  Bacterial polypetide isolated from the Sargasso Sea
MLFSLFSNLVDIFSFFNVFKYLTVRTGLSMFTSMIVVFIVGNPLINYFSAKQIHNPIRDDGPSEHIVKKIGTPTMGGLMILLGVFSGVLLWGDLSNPYNWFLIYIAASFGLLGAYDDYKKIKKNHSSGVSSKFKIIIQVILALIGIFIIYNFGESTELKNLYFPFFKNIVINLGWFFIPFYLFILVGSSNAVNLTDGLDGLATVPVILVAACFAFISYVTGNIVFSEYLQIPYIEGVGEASIFCGSIIGACLGFLW

SEQ ID NO: 136902 - protein, 280 aa, Unknown
  Bacterial polypetide isolated from the Sargasso Sea
PTMGGIFMIIPFLILLLIITINLDSPKLILLLLTIFGFFFTGFLDDYLSIKKKENKGLTTKEKLILQSVISIIFISLAYEKNLISPLIKISDSLGINLNVFILPVSFLVLVGISNSVNLTDGLDGLAAGCSGIVFYGLGTEILLKEQQELFIFSILCFSMSGICLGFLKYNCYPAKIFMGDTGSLSIGAILGSIALLTNSIFTLSIFSGIFIIESLSVIIQVGFFKITKKLFLRGKRIFLMAPLHHHFELKGVKEQKIVENFWKINILLVILGIVLKIYL

SEQ ID NO: 136903 - protein, 91 aa, Unknown
  Bacterial polypetide isolated from the Sargasso Sea
SLSLGGSVASVAIIAKHEIVLAIVGGLFVLETVSVIIQVISFKLTGKRVFMMAPIHHHFEKKGWAESTVVIRFWIIAIILALIGLATLKLR

SEQ ID NO: 136904 - protein, 363 aa, Unknown
  Bacterial polypetide isolated from the Sargasso Sea
MLYYILTSLIEEYSFLNIVRYLSFRSGIALITSLSIVFIFAPKIINWLKSNQKEGQPIRADGPDWHLDMKRGTPTMGGVIILGALIISTLLWADLSNIYIWIVLYITFGFGLIGFIDDYLKILKNNHKGLSGRLKLLFQILTTVIAATWIYLISDKSLQGMLAFPFLKDTTLYLGFALWCIFSTLVVVGSSNAVNLTDGLDGLAIVPIIIVAGVFGIIAYLIGNSIFSNYLNLFYIEGSGELIVLCSSLVGAGIGFLWFNAPPASVFMGDTGSLSTGAALGIISVIVKHEIVLAIVGGLFVLEAASVIVQVLSFKLTGKRIFRMAPLHHHFEKKGWSESTIVIRFWIIAVILALIGLATLKLR

SEQ ID NO: 136905 - protein, 360 aa, Unknown
  Bacterial polypetide isolated from the Sargasso Sea
MIDFLLNFLPEKSNFLNLFSYLTTRTVLSTLTGLMMVLFLGNTFIERIRSLQFQQSIGDRGPDSHKLKDGTPTMGGLLIIGSVILSGFLWGDLTNKYLLISIFCLFMFGLIGFVDDYNKVKQKNQEGMSGKSKIFWQFICACIISVVLYTTAENKMETSYIVPFFKDVVLDFGIWFIFISIFIIIGSSNAVNLTDGLDGLAILPVIIITAALGIIAWASGNVIAADYLYIPHIVGTGELLVLCGAMIGAGIGFLWFNTYPAQIFMGDVGSLSMGAFIALVAIIVRHEIVFAVMAMVFIMEAMSVILQVTSFKLRKKRIFRMAPIHHHFELMGWKEPKIIVRFWILTFIFVLIGLSLLKIR

SEQ ID NO: 136906 - protein, 359 aa, Unknown
  Bacterial polypetide isolated from the Sargasso Sea
MFLYFSENLIEWFSPLNAFTYITTRGILAALTALVISFLIGPKIIGALEGNKIGETIRTDGPSSHSSKGGTPTMGGIMIILSIVTSVVIWSDLSNVYNLVLIISIISFGLIGFIDDFTKLKKSKKGMSAKTKLILQFIIAASSTYYLLGQGSDVLSSEVLIPFTNNIRLDLGWFFLPFAIFVIVGSSNAVNLTDGLDGLAIMPVSMIAIALGIFAYVTGNFNFAEYLDLPFLEDAGEVFVFCCAISGAGLGFLWFNTYPAQIFMGDVGAVSLGGILGTIAVIVKQELILAIMGGVFIMETLSVVLQVGSFKLRGKRIFNMAPIHHHFELKGWAEPKVIVRFWIITVFLVLIGLSSLKIR

SEQ ID NO: 136907 - protein, 68 aa, Unknown
  Bacterial polypetide isolated from the Sargasso Sea
MAMVFIMEAMSVILQVTSFKLRKKRIFRMAPIHHHFELMGWKEPKIIVRFWILTFIFVLIGLSLLKIR

SEQ ID NO: 136908 - protein, 134 aa, Unknown
  Bacterial polypetide isolated from the Sargasso Sea
IYICHILKNVGEISILLSAILGSLLGFLWFNSNPAQIFMGDVGSIPLGATIGLVSIIIKQEVLLLISGGIFVIEAVSVIIQIISFRLYNTRILKMAPLHHHFEKMGYSESKIVIRFWILSIILALITIASLKIR

SEQ ID NO: 136909 - protein, 361 aa, Unknown
  Bacterial polypetide isolated from the Sargasso Sea
MLYSFLTSLVDTFSFLNVFKYITFRIGLSVVTSLTIIFLIGTPLIKYFAKKKITGPIRQDGPIDHIIKKSGTPTMGGLMILIGITVSTILWADLTNIYIWIVLFVCTSLGLLGFLDDYLKIKFKNSSGVNAKLKFFGQFIISLISILLLIYLTDHETISNLYFPFFKNLVLHMGLFFIPFGIFVIIGSSNAVNLTDGLDGLATVPVMLVALSFSLICYLVGNTIFANYLQIQYIPNVGELSIFCGSIVGSCLGFLWYNAPPAKIFMGDTGSLSLGGSIAAVAIIVKHEIVLAIIGGLFVLETVSVIIQVISFKLTGKRVFMMAPIHHHFEKKGWAESTVVIRFWIIAIILALVGLATLKLR

SEQ ID NO: 136910 - protein, 292 aa, Unknown
  Bacterial polypetide isolated from the Sargasso Sea
SGTPTMGGLMILIGIISSTIMWADLKNTYIWIVLFVCVALGLLGFLDDYLKIKFKNSSGINPKLKFLGQFLISLIAIIALIYFTEHETILNLYFPFFKNLVLNLGLFFIPFGIFVIIGSSNAVNLTDGLDGLATVPVMLVALSFSLICYLVGNTIFSNYLQIQYVPNVGELSVFCGSIVGACLGFLWYNAPPAKIFMGDTGSLSLGGSIASVAIIAKHEIVLAIIGGLFVLETASVIIQVVSFKLTGKRVFKMAPIHHHFEKKGWAESTVVIRFWIISIILALIGLATLKLR

SEQ ID NO: 136911 - protein, 367 aa, Unknown
  Bacterial polypetide isolated from the Sargasso Sea
MLYYLLYPLKDLFSPLNVFQYITFRSAIAAILALIISFILGPVIINHLRKNQIGEQIRKHGPQSHYSKEGTPTMGGLIILLAIILPTLLFADIYNPFVQILVISTIWMGLIGFIDDYLKSIKKLKKGLVAKYKLAGQIAIGLFITFWIYNTPAWDNFRTVTSIPFLKDTVVDFGLLYPLMIVLVVTATSNAVNLTDGLDGLAAGLLAISFSVFSIIAYVSGRVDFSDYLNIIYLPGAGELTIFTASCVGACLGYLWFNSSPAEIFMGDTGSLSTGSALGTLAILLKKEFLLIIIGGLFVAEAISVILQVGYYRYTKNKYGEGKKLFLMAPFHHHFELKGLPESKVVIRFWIIGLLLALLTITTFKIR

SEQ ID NO: 136912 - protein, 285 aa, Unknown
  Bacterial polypetide isolated from the Sargasso Sea
GLIILLGVFSGVLLWGDLTNSYNWFLIYIAGSFGILGAYDDYRKIKFNNSSGISLKFKIILQIILALIGILILYFSGQSNELGNLYFPFFKNLVINLGWFFIPFYLFVIVGSSNAVNLTDGLDGLATVPVMLVAACFAFISYVSGNIIFSDYLQIPYIEGVGEASIFCGSIIGACLGFLWFNAPPAKIFMGDTGSLSLGGSLGAIGIITKHEIVLAITGGLFVLEAISVIVQVISFKITGKRIFKMAPIHHHFEKKGWEESTVVIRFWIIAIILAMVGLATLKLR

SEQ ID NO: 136913 - protein, 238 aa, Unknown
  Bacterial polypetide isolated from the Sargasso Sea
KSKKGMSAKTKLILQFIVAASSTYYLLGQGSSVLSSEVLIPFTNNIRLDLGWFFLPFAIFVIVGSSNAVNLTDGLDGLAIMPVSMIAIALGIFAYVTGNFNFAEYLDLPFLQDAGEVFVFCCAISGAGLGFLWFNTYPAQIFMGDVGAVSLGGILGTIAVIVKQELILAIMGGVFIIETLSVVLQVGSFKLRGKRIFNMAPIHHHFELKGWAEPKVIVRFWIITVFLVLIGLSSLKIR

SEQ ID NO: 136914 - protein, 143 aa, Unknown
  Bacterial polypetide isolated from the Sargasso Sea
MAGNIIYSDFLNIPYLPGTGEMIVFCGALVGSGIGFLWFNTYPAQVFMGDVGSLSLGAALGIVTVIIRHEYVLLVMGGIFVVEALSVIVQICSYKLTGKRIFQMAPLHHHYELKGWPEPRVIVRFWIITFMLVLLGLALLRLR

SEQ ID NO: 136915 - protein, 176 aa, Unknown
  Bacterial polypetide isolated from the Sargasso Sea
VGSSNAVNLTDGLDGLAILPCILIAAAFVVFSYVQGNFNIANYLLIPYLPHVSETAIFASAIVGSGLGFLWYNSYPAQIFMGDVGSLSLGAILATLAIILRLEIIYAIMGGIFVIEALSVIIQVTSFKLFKKRVFKMSPIHHHFELNGWQEPKIIVRFWIITFVLVLIALASLKIR

SEQ ID NO: 136916 - protein, 221 aa, Unknown
  Bacterial polypetide isolated from the Sargasso Sea
SSFILIFLISLKSSSELVYSISIPFVNGVFFLGLILYYCFTSIVIVGTSNAVNLTDGLDGLAIVPIMIAIASFGLITYLSGNLVFSEYLGINYIPYSGELSILCCALLGSCLGFLWFNAPPAMIFMGDTGSLSLGAILGSIAVITKHELVLIVIGGIFVLEAMSVIIQVFSYRTFGKRVFKMAPIHHHFEKKGWSESTIVIRFWIISFVLAIVGLATLKIR

SEQ ID NO: 136917 - protein, 284 aa, Unknown
  Bacterial polypetide isolated from the Sargasso Sea
LILSSLIISTLLWADLGNRYIWVVLGVTIGFSIIGFFDDYLKIKNKSPDGLSSKQKIFFQSIIALISITYLYYSAEIIPEQSFIVPFFKDLIIPMSPFVFIFIGVFVLVGSSNAVNLTDGLDGLAILPSVLIGGALGLIAYAMGNQNIADYLYLPHLPLSGELIVFCGALIGSGIGFLWYNTYPAQVFMGDIGSLSLGAILGIIAIILRHELVFAIMAGVFVMETLSVAIQVISFKTRGKRVFLMAPIHHHFELKGWAEPKIIVRFWIITLVLILIALSTLKLR

SEQ ID NO: 136918 - protein, 121 aa, Unknown
  Bacterial polypetide isolated from the Sargasso Sea
SSFVCCIIGSALGFLWYNAPPAMVFMGDTGSLALGGAIGSISILIKQELVLAIVGGIFVAEAVSVILQVGSYKLTGKRIFKMAPLHHHFEQKGVPESQIVIRFWIVAVILALIGLATLKIR

SEQ ID NO: 136919 - protein, 135 aa, Unknown
  Bacterial polypetide isolated from the Sargasso Sea
NYLHIPYIEGTGEVSIFCGAIIGSCLGFLWFNAPPAKIFMGDTGSLSLGGSLGAVGIITKHEIVLAITGGLFVLEAVSVMVQVISFKLTGKRIFRMAPIHHHFEKKGWPESTVVIRFWIISIILAMIGLATLKLR

SEQ ID NO: 136920 - protein, 264 aa, Unknown
  Bacterial polypetide isolated from the Sargasso Sea
IGVVLGVTIGFALIGFFDDYLKIRKKSSDGLTSIQKIIFQSIIALISMTYLYYSAEIMPETSFIVPFFKDLILPMSPFIFIFTGMFVLIGSSNAVNLTDGLDGLAILPTVLIGGALGLIAYAMGNQLIADYLYLPHLPLSGELIVFCGALIGSGIGFLWYNTYPAQVFMGDIGSLTLGAILGIIAIILRHELVFAIMAGVFVVETLSVAIQVISYKTRGKRVFLMAPIHHHYELKGWAEPKIIVRFWIVTLVLILIALVTLKLR

SEQ ID NO: 136921 - protein, 183 aa, Unknown
  Bacterial polypetide isolated from the Sargasso Sea
MHWTISNILTLLRVALIPVIVALYLGGASGYLTAGVFLLAGLTDWADGFLARQRNEESPFGAFLDPVADKLMVSAVLVLMAADPQMREHVFSPGLFTVIVAIIIGREITISALREWMAELGRRGVVAVGWIGKVKTTLQFVAITVLLFAQAGMHKETLILGELLLFVAGALTLWSMVIYLRGA

SEQ ID NO: 136922 - protein, 184 aa, Unknown
  Bacterial polypetide isolated from the Sargasso Sea
MTNIPNLLTFFRILLIPVFVILFYLPYQWSYLAAAIVFILAAATDWFDGYLARKLNQSTAFGAFLDPVADKIMVAAALVVIVEHYNTIWVTIPAMTMIGREIIISALREWMAELGKRSSVAVSWIGKWKTMIQMVSLTGLIWQYDIWMVWLAYVLLYVATVLTFWSMFQYMKAAWGDLTYHSRF

SEQ ID NO: 136923 - protein, 188 aa, Unknown
  Bacterial polypetide isolated from the Sargasso Sea
MANLANLLTLLRVLLIPMMVLTFYMPFVWAHILAAGFFAIAAVTDWLDGLVARRMHIESPFGAFLDPVADKMIVAVALILVATEHGGALLGIPAAVIIGREIFISALREWMAELGKRASIAVSMLGKLKTALQMVALLLLLIYTPGFFSSKIILHVGFICLYLSMFLTLWSMVVYIRLAWPDLTIDHK

SEQ ID NO: 136924 - protein, 190 aa, Unknown
  Bacterial polypetide isolated from the Sargasso Sea
MRWTISNILTLLRVALIPVIVAVYLGGASGYLTAGVFLLAGLTDWADGFLARQRNEESPFGAFLDPVADKLMVSAVLVLMAADPHMRDHVFSPALFTVIVTIIIGREITISALREWMAELGRRGVVAVGWIGKVKTTLQFVAITVLLFAQAGMQKEMLILGEILLYVAGALTLWSMVIYLRGAWPSLSEE

SEQ ID NO: 136925 - protein, 182 aa, Unknown
  Bacterial polypetide isolated from the Sargasso Sea
MPFNLPIALTLFRLFLLPIFVVLFYLPYSWTPFVAAFVFWLAAITDALDGYAARKLKQLTRFGAFLDPVADKLMVITALVLLVEQYADIWLTLPALFMIGREIVISALREWMAELGKRGTVAVSWIGKYKTAAQMVAIIGLIWQYNPLMITAAFVLLYIAAVLTFWSMMSYILAAWKDLTAE

SEQ ID NO: 136926 - protein, 146 aa, Unknown
  Bacterial polypetide isolated from the Sargasso Sea
AVTDWLDGYLARRWEQGTPFGAFLDPVADKLMVAVALVLLVAEHANLWLTLAAATIIGREIVVSALREWMAELGARAHVAVSNLAKWKTAAQMLALVILLGNPPVFTFWVVLGYILLVVAAVLTLWSMLQYLLAAWPHLSTTSDKK

SEQ ID NO: 136927 - protein, 88 aa, Unknown
  Bacterial polypetide isolated from the Sargasso Sea
MIIGLGSDLCNIERIQNSLDRYGERFENRVFTEVERAKARRRPYTIAGTYAKRFAAKEAFSKAVGTGFKRGVYMKDIGVVNAPSGAPT

SEQ ID NO: 136928 - protein, 102 aa, Unknown
  Bacterial polypetide isolated from the Sargasso Sea
MKILGIGIDIIDNNRIKESIKNNKFKSRIYSSNELKLSKKTKNKVAFFSKRFAAKEAFSKALGTGFSSNLSFKDIEITNDKKGMPKYVDNKKIIKIVQKKYK

SEQ ID NO: 136929 - protein, 128 aa, Unknown
  Bacterial polypetide isolated from the Sargasso Sea
MSIIGIGVDIVKNNRLKKLIKNKLFLKRIFTYQEQKSSSTLKNKLNYYSKRFAAKEAFSKATGLGISKNLHFKNIEIKNDKKGRPSISLNPVTSKYLKKKFKVKSFKTNLSISDEKNYSVAYVIIEKL

SEQ ID NO: 136930 - protein, 108 aa, Unknown
  Bacterial polypetide isolated from the Sargasso Sea
MIYTGIDIIEIDRIVRVKNIYKERFLKKIYTLNEIKYCRNRGPQLASRFAAKEAMMKTLGTGIRGIPWKSIEVVRKRGQAPKILLHGPAKSKANELKIKYIALEFISF

SEQ ID NO: 136931 - protein, 128 aa, Unknown
  Bacterial polypetide isolated from the Sargasso Sea
MKILGIGVDIVENKRIQKSIKNPLFKKRIYSFKELKLSNAVNNKVAYFSKRFAAKEAFSKALGTGFRMNLNFKDIEVVNDKMGKPYYVKNKKITKIIQKNFKIKNFKCFLSISDEKNYSTAFAIIQTS

SEQ ID NO: 136932 - protein, 69 aa, Unknown
  Bacterial polypetide isolated from the Sargasso Sea
MKLFGIGTDIIKTSRIKSAIRKKKFLSKIFDKQEIAKCKKSLNSSNCFAKRFAAKEAFSKAMGTGITKG

SEQ ID NO: 136933 - protein, 128 aa, Unknown
  Bacterial polypetide isolated from the Sargasso Sea
MKILGIGVDIIENKRIKESIKNNKFKKRIYSINELKLSKKTKNKVAFFSKRFAAKEAFSKALGTGFSSNLNFKDIEITNDKKGMPKYVDNKKIIKIVQKKYKIKKFNSFLSISDEKDYSTAFAIIQSI

SEQ ID NO: 136934 - protein, 102 aa, Unknown
  Bacterial polypetide isolated from the Sargasso Sea
MKIHGIGIDIVKISRINQSINNKKFLKRIFNKDEIRKCDKQINKKNCYAKRFAAKEAFSKALGLGISKGISFNEIIVFNIKSGKPSIRLLGTTKKIVHKIIK

SEQ ID NO: 136935 - protein, 128 aa, Unknown
  Bacterial polypetide isolated from the Sargasso Sea
MKTLGIGVDIIDNSRIKKSISNKKFLNRIFSYSEIKFSKKINNKTNYFSKRFAAKEAFSKALGTGFRKGLNFNDISIINDRYGKPKIKINKKLNNIIKNKFKTHKVNVHLSISDEKKHSVAFVILDKK

SEQ ID NO: 136936 - protein, 120 aa, Unknown
  Bacterial polypetide isolated from the Sargasso Sea
MKIFGIGTDIVKTSRLKKLIKKKSSITRLFNKTEISKCKRIKHSQNCFAKRYAAKEAFSKALGTGISKGINFNEIVVYNEKNGKPYIKLLGETKKKVEDKIKKKEYKISLSLSDEEKYAV

SEQ ID NO: 136937 - protein, 80 aa, Unknown
  Bacterial polypetide isolated from the Sargasso Sea
FCKRFAAKEAFAKALGTGIAKGINFNEIIILNEKNGKPFIKLINKTKKNVEKKLRKKKFKISLSLTDEDNYAVAFVTLSL

SEQ ID NO: 136938 - protein, 135 aa, Unknown
  Bacterial polypetide isolated from the Sargasso Sea
MIYGIGTDICDVRRIAASLARHGDRFAEKVLADGELATWRERSARWPDRGLRYLATRFSAKEAFSKAIGLGMRMPMTWRHCEVAKLRSGQPVIVLHGALKEWFEAQGLQAHLSVTDETDYAASFCVVEKIQTKSP

SEQ ID NO: 136939 - protein, 103 aa, Unknown
  Bacterial polypetide isolated from the Sargasso Sea
MKTLGIGVDIIKNKRIRLLLNNKTFVNRTFSKNEIRFSNKIKKKVNYFAKRFAAKESLVKSLGTGFRYNISLKDIEILNDELGKPYFLKSKKIDDIIAKKFKI

SEQ ID NO: 136940 - protein, 110 aa, Unknown
  Bacterial polypetide isolated from the Sargasso Sea
MTLVHGIDIIEIDRIRKVANQYGRRFYNRIYSKFEIDYCKGNPSKLATRFAAKEAVMKALGTGVRGVSWKEIEIVRQPGKAPQVCLHGRAKKRAKALGIDEMAISLSHSD

SEQ ID NO: 136941 - protein, 128 aa, Unknown
  Bacterial polypetide isolated from the Sargasso Sea
MKILGIGVDIVENKRIQKSIKNPLFKKRIYSFKELKQSNAVSNKVAFFSKRFAAKEAFSKALGTGFRMNLNFKDIEVVNDKMGKPYYVKNKKITKIVQKNFKIKNFKFFLSISDEKNYSTAFAIIQVT

SEQ ID NO: 136942 - protein, 128 aa, Unknown
  Bacterial polypetide isolated from the Sargasso Sea
MKILGIGVDIVENKRIQKSIKNPLFKKRIYSSKELKQSNAANNKVAYFSKRFAAKEAFSKALGTGFRMNLNFKDIEVVNDKTGKPHYVKNKKITKIIQKTFKIKNFKCFLSISDEKKYSTAFAIIQTL

SEQ ID NO: 136943 - protein, 79 aa, Unknown
  Bacterial polypetide isolated from the Sargasso Sea
KRFAAKEAFSKALGTGFSMNLNFKDIEVVNDKKGKPYYVKNKKITKIVQKNFKIKNFKCFLSISDEKNYSTAFAIIQTS

SEQ ID NO: 136944 - protein, 125 aa, Unknown
  Bacterial polypetide isolated from the Sargasso Sea
MIFGIGTDIVEINRVKKMNSIEKFAQKILGNQEMDIFESIDDEKKIYFLSKQFAAKEAFSKALGTGINKSLSFKDIELLRDEKGKPFFNFNSSSSALLSSFGIVGTHVSLSDEKDNAIAFVILEK

SEQ ID NO: 136945 - protein, 93 aa, Unknown
  Bacterial polypetide isolated from the Sargasso Sea
LFSENNLDSEKVILKIAGRFAAKEAASKALGTGFKNGIKFSDFEIFNDEKGRPFINFCGKARETLDKNLKIKPFLTISNERIYAVALVTFISF

SEQ ID NO: 136946 - protein, 131 aa, Unknown
  Bacterial polypetide isolated from the Sargasso Sea
MNIFGIGTDIVNTKRIEKSIKMYGNKFKNKIFTKKEIRYCENKKNPAPFYAKRFAAKEAFTKALGTGFRKNITFKNIEISNDKYGKPFITLDSSVNIFLKKKIKKKKYFIHLSLSDDRPWAHATVIISYLK

SEQ ID NO: 136947 - protein, 121 aa, Unknown
  Bacterial polypetide isolated from the Sargasso Sea
MGTDIVNIKRIEKILSKYKKKFIDKILHSEEKKQKNITANFLSKKFAAKEAFSKALGTGIGGVINFNEIIIYNKSSGAPDIKIDKKAQKRVLKKLKVSKAKFFISISDDYPFALATVIISK

SEQ ID NO: 136948 - protein, 121 aa, Unknown
  Bacterial polypetide isolated from the Sargasso Sea
MIGNGIDIIEIDRIQEACLKWGDRFLNRIYTQQEQNYCRGRFPQLAARFAAKEAMMKSLGTGKRGLLWVEIEVVRERGRAPTIVLHGNALSIAENQNIKEIQLTISHSRNYAVASTLAIKY

SEQ ID NO: 136949 - protein, 128 aa, Unknown
  Bacterial polypetide isolated from the Sargasso Sea
MKKLGIGVDIINNSRIKNSITNKKFLSRIFSNIEITNSKKTSNKTGYFSKRFAAKEAFSKALGTGFRKGLNFNDISIVNDKHGKPFIIVNNKLKNIINKRFKTKKINVFLSISDEKNHSIAFVVLEKK

SEQ ID NO: 136950 - protein, 128 aa, Unknown
  Bacterial polypetide isolated from the Sargasso Sea
MKILGIGVDIVENKRIQKSIKNPLFKKRIYSFKELKHSNAANNKVAFFSKRFAAKEAFSKALGTGFCMNLNFKDIEVVNDKKGKPYYVKNKKITKIVQKNFKIKNFKCFLSISDEKNYSTAFAIIQTS

SEQ ID NO: 136951 - protein, 142 aa, Unknown
  Bacterial polypetide isolated from the Sargasso Sea
MIIGIGNDLIDISRVERVLDRFGDRFVRRVYTNVERAKSERRANRVESYAKRFAAKEACSKALGTGIRMGVFWRDMAVTNLNSGKPTLSLTGGAAKRLDEITPRGMIPQIDISMTDEPPLAQAIVIISALPKNSENRSITVD

SEQ ID NO: 136952 - protein, 128 aa, Unknown
  Bacterial polypetide isolated from the Sargasso Sea
MNIFGIGTDIVNIKRIKSLLKKNKNFKKRIFTKFETKICENRANKINCFAKRFAAKEALFKALGIHNKLSFLDVEIKNNISGLPNFKIKGNSLKNLKKIFKNRKFKIHLSLSDDEPWAVASVIIFLYK

SEQ ID NO: 136953 - protein, 109 aa, Unknown
  Bacterial polypetide isolated from the Sargasso Sea
FSRYGKKFAYKILNTQEMNDFLNSKHKTAFLAKRFAAKEAIGKAIGRGILNGTLLKYICIANDKNGKPFVKSINKKIINENEFDFFLSLSDEIEYAHASVIIARKRSVV

SEQ ID NO: 136954 - protein, 127 aa, Unknown
  Bacterial polypetide isolated from the Sargasso Sea
KTLGIGVDIIENSRIKKSIKNKKFLNRIFSFNELKFLKKKTNKVNFISKRFAAKEAFSKALGTGFRKGLNFNDISIINDSYGKPKIKINKKINNIIKKKFKTTKVNIHLSISDEKKHSIAFVILDKK

SEQ ID NO: 136955 - protein, 117 aa, Unknown
  Bacterial polypetide isolated from the Sargasso Sea
NIKRIKDAINKNKNFKKRIFTSFEISACEKRVNKINCFAKRFAAKEALFKAVGIPNKLQFNDVEIKNNRSGLPNFYIKGSSLKNLKKIFKNKRFKIHLSLSDDEPWAVATAIIFTNK

SEQ ID NO: 136956 - protein, 128 aa, Unknown
  Bacterial polypetide isolated from the Sargasso Sea
MLVTGIDIIEIDRIKLVFDKYGDRFLNRIYTVKEREYCRGRASQLASRFAAKEATMKALGTGVRGVGWKDIEILRQKGMAPYIKLHGRAIQRAEKMGLSDLALSLSHSKEFAIASVIGDSQKGNLIPR

SEQ ID NO: 136957 - protein, 128 aa, Unknown
  Bacterial polypetide isolated from the Sargasso Sea
MKILGIGVDIVENKRIQKSIKNPLFKKRIYSFKELKQSNTVNNKVAYFSKRFAAKEAFSKALGTGFRINLNFKDIEVVNDKMGKPYYVKNKKITKIIQKNFKIKKFKFFLSISDEKNYSTAFAIIQRS

SEQ ID NO: 136958 - protein, 129 aa, Unknown
  Bacterial polypetide isolated from the Sargasso Sea
MRIFGIGTDIVNVKRMEKSFRKNKSFKKRIFSQKEITYCDKKKNPYSFYAKRFAAKEALSKALGTGIRKGINFKDIEIYNDILGKPSIKLKGTTANFLKKKIKTKKYSIYLSLSDDLPWANATVIISYN

SEQ ID NO: 136959 - protein, 128 aa, Unknown
  Bacterial polypetide isolated from the Sargasso Sea
MKILGIGVDIVENKRIQKSIKNPLFKKRIYSYKELKQSNVVNNKVAYFSKRFAAKEAFSKALGTGFRMNLNFKDIEVVNDKMGKPYYVKNKKITKIIQKNFKIKNFKCFLSISDEKNYSTAFAIIQTS

SEQ ID NO: 136960 - protein, 85 aa, Unknown
  Bacterial polypetide isolated from the Sargasso Sea
NFSNCFAKKFAAKEAFSKALGTGISQGINFNEIIILNKKNGKPFIKLINKTKKIVEKKLIKKKYTISLSLSDEDNYAVAFVTISL

SEQ ID NO: 136961 - protein, 72 aa, Unknown
  Bacterial polypetide isolated from the Sargasso Sea
MKILGIGVDIVDNKRIQKSIKNPLFKKRIYTFKELKQSYTVNNKVGYFSKRFAAKEAFSKALGIGFRMNLIF

SEQ ID NO: 136962 - protein, 128 aa, Unknown
  Bacterial polypetide isolated from the Sargasso Sea
MKILGIGVDIVENKRIQKSIKNPLFKKRIYSFKELKQSNAVNNKVAYFSKRFAAKEAFSKALGTGFRINLNFKDIEVVNDKMGKPYYVKNKKITKIIQKNFKIKNFKCFLSISDEKNYSTAFAIIQSS

SEQ ID NO: 136963 - protein, 77 aa, Unknown
  Bacterial polypetide isolated from the Sargasso Sea
MAKQFAAKEAVSKALGTGIGKDIRFNQIEILRNSDGKPYLNHDGIITTILNDLGITKTHVSLSDEKKYVLAFVVLEI

SEQ ID NO: 136964 - protein, 129 aa, Unknown
  Bacterial polypetide isolated from the Sargasso Sea
MSIIGIGVDIINNNRLKKLIKNKTFIKKIFTNYEQKKSKTLKNKLSYFSKRFAAKEAFSKATGLGISKNLHFKNIEVKKNNKGQPSININKFTKNYLKNKFKVRSFKTNLSLSDEKNYSIAYVVIEKND

SEQ ID NO: 136965 - protein, 119 aa, Unknown
  Bacterial polypetide isolated from the Sargasso Sea
MHIGIDIIEIDRIASVLGKYPVRFLEKIFTEYEKNYCRGRPAQLAARFASKEAGMKALGTGIRGVGWREIEVQRHKSGKPYLILHGRAKKRAEKLNIKSIELSISHSKNLATAIVHMTS

SEQ ID NO: 136966 - protein, 128 aa, Unknown
  Bacterial polypetide isolated from the Sargasso Sea
MKILGIGVDIIENNRIKKSIQNNKFKTRVYSSNELKLSKNVKNKVAYFSKRFAAKEAFSKALGTGFSENLNFKDIEIVSDKKGKPKYAKNKKIIKIVQKKYKIKKFNSFLSISDEKDYSTAFAIIQSV

SEQ ID NO: 136967 - protein, 132 aa, Unknown
  Bacterial polypetide isolated from the Sargasso Sea
MIGIGSDLLDIRRIEKTISKFGDRFKNKIFTKNEIHKCEKRLNKIECYAKRFAAKEAASKALGTGFRKGVFWKDLEVVNLPSGKPTIKFHGNSLNHLNSLLPPESDPSINLTITDEYPYAQALVIISSEKNK

SEQ ID NO: 136968 - protein, 124 aa, Unknown
  Bacterial polypetide isolated from the Sargasso Sea
MPIICTGIDIIEIDRIQNVLSRYGNRFLNKIFTPDEIQYCRGRSPNLAGRFAAKEATMKALKTGARGVSWKDIEVIRASNGAPSIKLYNRALARSESLGVSSLSISFSHSRDYAVASVIASSKE

SEQ ID NO: 136969 - protein, 114 aa, Unknown
  Bacterial polypetide isolated from the Sargasso Sea
RIQNLLKKNKNFKKRIFTKFETKICEKRANKINCFAKRFAAKEALFKALGIHNKLSFLDVEVKNNVSGLPNFQIKGNSFKNLKKIFKNRKFKIHLSLSDDEPWAVASVIIFIYK

SEQ ID NO: 136970 - protein, 233 aa, Unknown
  Bacterial polypetide isolated from the Sargasso Sea
MQRLDAPLAASRAGVQIARVDFDWRLPLASPAYAALSDDERARAARFMRHEDAVRSAATRAALRDVLGTALGIAPQAVAIVVDASGRPSLDGAHRASLDFNVSHAGDHALLAWAPGGRVGVDIERCNRATDWRALTREVCAPAEAAYLDSLPLDMRAGAFMRVWCAKEALLKALGTGIVGGLSAFAVMPPRDGATPATTIVEPAAPAAGVAAFDAAWFDAAPGYAACVAWTRA

SEQ ID NO: 136971 - protein, 142 aa, Unknown
  Bacterial polypetide isolated from the Sargasso Sea
MAIYGIGTDIAQVSRIAAVLERTGGRFAEKVLGPDELRVFHARRARSEARGIAFLATRFSAKEAFSKAIGLGMHWPMTWRALQTLNHPSGEPYVVASGELADWLAARGITARVTVSDERDYAVSFVVAETDAAPAPVSRTSS

SEQ ID NO: 136972 - protein, 127 aa, Unknown
  Bacterial polypetide isolated from the Sargasso Sea
MKIYGIGTDVVNINRIKKPLKSKNFINRLFNKDEIKRCNGQLNKANCYAKRFAAKEAFSKAIGTGISRGINFDEIIVYNIKSGKPGIKLLGNTKKIVNKILNKKKINIFLSLSDDKPFAVATVVISI

SEQ ID NO: 136973 - protein, 127 aa, Unknown
  Bacterial polypetide isolated from the Sargasso Sea
MSIYGIGTDIVSVDRLKISLKKKDFIKRIFNEKEIIKCKNINRSSNCYAKRFAAKEAFAKALGTGISNGINFNEIIILNKKSGKPYINIVGQTKKILNKIFKKKKSKISLSLSDEKKYAVAFVTISI

SEQ ID NO: 136974 - protein, 105 aa, Unknown
  Bacterial polypetide isolated from the Sargasso Sea
MKLYGIGTDIVKISRIRKNIKKKSFINRLFNPNEILKCNKRKNSSNCFAKRFAAKEAFSKAFGTGISKQVNFNEIIVLNEKNGKPFIKLLHKTKINVKKNLKQKN

SEQ ID NO: 136975 - protein, 101 aa, Unknown
  Bacterial polypetide isolated from the Sargasso Sea
MDIYGVGVDIVDIKRIAKAIKKNDKFINRVFSKDEINKCHRIKNYQNCFAKRFAAKEAFSKALGTGISRGLQFKEILISSNNKGKPDLRLVGSAKGLVKKF

SEQ ID NO: 136976 - protein, 95 aa, Unknown
  Bacterial polypetide isolated from the Sargasso Sea
NEILKCKNNKNSSNCFAKRFAAKEAFSKALGTGIAKGINFNEIVILNEKNGKPFIKLLDKTKKIVDKKIKRKNYKISLSLTDEKNYAVAFVTISI

SEQ ID NO: 136977 - protein, 127 aa, Unknown
  Bacterial polypetide isolated from the Sargasso Sea
MKIFGVATDIVKTNRIQKLLKRKNVLEKLFNKEEIIKCKRIKKAENCFAKRFAAKEAFSKALGTGISKGINFNQIIVLNEKNGKPFIKLIENTKNNVEKKLKKKNYKISLSLTDEDEYAVAFVTISI

SEQ ID NO: 136978 - protein, 86 aa, Unknown
  Bacterial polypetide isolated from the Sargasso Sea
MKIFGVGTDIVKTNRIQKLLTRKNILEKLFNKEEIIKCRKIKKTANCFAKRFAAKEAFSKALGTGISKGINFNQIIVLNEKNGKPF

SEQ ID NO: 136979 - protein, 313 aa, Unknown
  Bacterial polypetide isolated from the Sargasso Sea
FDANGGSGSNTTQTIEHNVSENLDANPFTKTGYSFAGWATNSGGSVAFAEGASYTGISNATLYAQWTVNAYTITFNTNGGDAGSTASQNINYGASANLTTNGFTKTGYTFASWNTQADGLGTDINDGASYTMSSASNVTLYAKWTVNAYTITFNTNGGDAGSTASQNINYGASANLTTNGFTKTGYTFASWNTQADGLGTDINDGASYTMSSASNVTLYAKWTVNAYTITFNTNGGDAGSTASQNINYGASANLTTNGFTKTGYTFASWNTQADGLGTDINDGASYTMSSASNVTLYAKWTVNAYTITFHTNG

SEQ ID NO: 136980 - protein, 126 aa, Unknown
  Bacterial polypetide isolated from the Sargasso Sea
MISGIGIDLCDVERIRNVLKRYGDHFASRILDPVEHTEFQSLRASQRPQFLAKRFAAKEAISKALGTGIGRGFGFRDLFVRHDELGRPVVELNPENKVLSDALPCKIHLSISDDRSHAIAFCTIES

SEQ ID NO: 136981 - protein, 119 aa, Unknown
  Bacterial polypetide isolated from the Sargasso Sea
VSINRIERLFNKYQNWFIEKIFSTKERELFDKTKRIKFIANRFAAKEALVKALGTGFIKNINIKEISIINDELGKPYYEISGLTKKFIEKRLNFDKTSFNITLSDEKEYVVALATIIIN

SEQ ID NO: 136982 - protein, 127 aa, Unknown
  Bacterial polypetide isolated from the Sargasso Sea
MKIYGIGTDIANINRIKKSLKNKDFINRLFDKNEVKKCSTQINKANCYAKRFAAKEAFSKAIGTGIAKGINFNEIIVHNIKSGKPSIKLLGNTRKIVNKIFKKKKFSIFLSLSDDKPFAVATVVISI

SEQ ID NO: 136983 - protein, 130 aa, Unknown
  Bacterial polypetide isolated from the Sargasso Sea
MKIFGIGTDIINIKRMEKLLKSNNSNFKNRIFSKKEIMYCEKKNNPFSFYAKRFAAKEALSKALGTGIRKGISFKNIEILNDNLGKPSINLKGSTEIFLKKKLKTKKYSIHLSLSDDKPWAQATVIISYN

SEQ ID NO: 136984 - protein, 127 aa, Unknown
  Bacterial polypetide isolated from the Sargasso Sea
MNIFGIGTDIIQVDRIKKNLKKKGFINRIFSKKEITKCKKISNSSNCFAKRFAAKEAFSKALGTGISRGINFNEILILNKKSGKPYISLVGQTKKIFSSKVKNKKTKIALSVSDEKKYAVAFVTISI

SEQ ID NO: 136985 - protein, 127 aa, Unknown
  Bacterial polypetide isolated from the Sargasso Sea
MKIFGVGTDIVRIKRVKNSFKKRSFLSRIFNKDETLKCKKSINKFNCFAKRFAAKEAFSKALGTGISRGISFNEIVILNEKNGKPFIKLLSKTKKIVEKKFKKKNYKISLSIADEKDYAVAFVTISI

SEQ ID NO: 136986 - protein, 87 aa, Unknown
  Bacterial polypetide isolated from the Sargasso Sea
MKIYGIGTDIANINRIKKSLKNKEIINRLFNTSEVKRCNNQINKPNCFAKRFAAKEAFSKALGTGISKGINFNEIIVHNIKSRKAKY

SEQ ID NO: 136987 - protein, 127 aa, Unknown
  Bacterial polypetide isolated from the Sargasso Sea
MNFFGIGTDIVSIDRVKKSLKNKNFLKRIFNEKEIFKCKKTIKSTNCFAKRFAAKEAFSKALGTGIAKGINFNEIIVLNKKSGKPYIILVGQTKKTLSKKFKGKKSKVSLSLSDEKKYAVAFVTISL

SEQ ID NO: 136988 - protein, 127 aa, Unknown
  Bacterial polypetide isolated from the Sargasso Sea
MAIVGLGTDIVEIERITAHVARSGDKLAKRVLTEAEFAIYQQHSQPSRYLAKRFAAKEAAAKALGTGIGRGVSFQHIHIGNTPDGAPTIDFTEGAQQRLALLNGVIGHISIADEKSYAIATVILESR

SEQ ID NO: 136989 - protein, 127 aa, Unknown
  Bacterial polypetide isolated from the Sargasso Sea
MSIFGIGTDIVKVSRIKKLIINKKFLKRLFNKDEIKKCSKSKNTSSCYAKRFAAKEAFSKALGTGISKGLSFNEIIILNKNSGKPFIKLIDSTKKIVEKKLKKKKYKISLSLTDEKNYAVAFVTISI

SEQ ID NO: 136990 - protein, 126 aa, Unknown
  Bacterial polypetide isolated from the Sargasso Sea
MKIYGIGTDIANVNRIKKSLKNNIFINRIFNKKEIIKCSKQKNKASCYAKRFAAKEAFSKALGTGISKGINFNEIIVHNIKSGKPKIKLEGKTKIIVNKILKKKFDIFLSLSDDKPFAVATIVISV

SEQ ID NO: 136991 - protein, 130 aa, Unknown
  Bacterial polypetide isolated from the Sargasso Sea
MKIFGIGTDIVNIKRIDQSLKKYGITFKKKIFSEKEIAYCEKKRNPSSFYAKRFAAKEAFSKALGTGIRKGVNLKNIEILNDSNGKPLIKLKGNLANFLRKKIKAKKYYIYLSLSDDKPWAQATVIISYN

SEQ ID NO: 136992 - protein, 127 aa, Unknown
  Bacterial polypetide isolated from the Sargasso Sea
MKIFGIGTDIVKTSRIKKILSNKLIINKIFHIKEIQRCKKTYKIHNCLAKRFAAKEAFSKALGTGISRGIKFNEIVILNKKNGKPYIKLLNNTKLIVEKLLKKKKYKISLSISDESNYAVAFVTISI

SEQ ID NO: 136993 - protein, 127 aa, Unknown
  Bacterial polypetide isolated from the Sargasso Sea
MAIVGLGTDIVEIERITAHVARSGDKLAKRVLTEAEFDIYQQHSQPSRYLAKRFAAKEAAAKALGTGIGRGVSFQHIHIGNTTDGAPTIDFTEGAKQRLALLNGVIGHISIADEKSYAIATVILESR

SEQ ID NO: 136994 - protein, 72 aa, Unknown
  Bacterial polypetide isolated from the Sargasso Sea
MAIVGLGTDIIEIARIEHSLARSPRLVQRVLTESEQQILAAHGQPARYFAKRFAAKEAAAKALGTGIGRGIS

SEQ ID NO: 136995 - protein, 127 aa, Unknown
  Bacterial polypetide isolated from the Sargasso Sea
MKIHGIGTDIVKIKRIEDSIKKKSFINRLFNKKEISKCKKLKNSSNCFAKRFAAKEAFSKALGTGIAKGINFNEIVVLNEKNGKPYIRLLDKTKKNVKKRFKNKRYRISLSLTDEDKYAVAFVTISL

SEQ ID NO: 136996 - protein, 127 aa, Unknown
  Bacterial polypetide isolated from the Sargasso Sea
MKIYGIGTDVVNINRIKKSLKNKNFIARLFNANEIKKCNTQINKANCYAKRFAAKEAFSKAIGTGISRGINFDEIIVYNVKSGKPAIKLLGNTRKIVNKILNKKKINIFLSLSDDKPFAVATVVISI

SEQ ID NO: 136997 - protein, 297 aa, Unknown
  Bacterial polypetide isolated from the Sargasso Sea
RKLKNKKNILGGKGANLGEMGRLGLPVPPGFTISTNVCDIFYKNKKKLPNKIIKNIEEELKKIENKTKKKFGDLENPLLVSVRSGARVSMPGMMDTILNLGLNDKTVESLSRKTSNGRFAKDSYRRFIQMYSNVVLGVEGHLFEELIDNYKLTKGVLLDTDLDESDWDGLIKNFKELVKKEKKINFPQDVKQQLYGAINAVFLSWESQRAKTYRKLNQIPDYWGTAVNVQAMVFGNMGKDCSTGVAFTRNPSTGEKLFFGEFLINAQGEDVVAGTRTPQYITKKAKISSGSKEPSMK

SEQ ID NO: 136998 - protein, 293 aa, Unknown
  Bacterial polypetide isolated from the Sargasso Sea
MKKLVFNFRSKGAQKLKRPKNILGGKGANLSEMGRIGLPVPPGFTISTEVCDLFYKSKKKLSSKIIKEINAELKNIEKESGKKFGDLKNPLLVSVRSGARVSMPGMMDTILNLGLNDETVIALANKTSNTRFAKDSYRRFIQMYSSVVLGIESYNFEELIENYKLTKGVLLDTDLDENDWDGLINDFKNIVKEKTKKEFPQNVNQQLIGAISAVFLSWESHRSQVYRKLNQIPSNWGTAVNVQSMVFGNMGNNCATGVVFTRNPSDGSNAIFGEYLINAQGEDVVAGTRTPQN

SEQ ID NO: 136999 - protein, 127 aa, Unknown
  Bacterial polypetide isolated from the Sargasso Sea
MKKLVFNFKSKDTKKIKFPKNILGGKGANLAEMGRLGYPVPSGFTISTEVCDLFYKNNKKISPKILKNIKIEIKNIEKDSGKKFGDLKNPLLVSVRSGARISMPGMMDTILNLGLNDKTVLALAKKL

SEQ ID NO: 137000 - protein, 347 aa, Unknown
  Bacterial polypetide isolated from the Sargasso Sea
SLGGKGCNLAEMARIGLAVPPGFTVSTETCAEYHENGGELPEDAWNDMMEGLQFVETALGKKFGDAADPLLVSVRSGAAISMPGMMDTILNLGLNDDVVQGLAKRAGGRFAYDSYRRFLDMFGVVCLDIPHEKFSDALETLKQDVGAQSDSDLTEENLRDLVEIYKGVYASSDVSFPQDVFVQLRYASCAVFDSWQSERAKKYMAINKITGLRGTAVNVQAMVFGNLGDTSGTGVLFTRNPNTGEKKLYGEYLVDAQGEDVVAGIRTPSDISTMADALPDAYEELVKNTQILESHYKDMQDIEFTVQDGKLFMLQTRSGKRTGAAAVKIAVDFVEDGTVTEKEAVHM

SEQ ID NO: 137001 - protein, 335 aa, Unknown
  Bacterial polypetide isolated from the Sargasso Sea
MNNKQKIYFFSQLQTDGDQNMVDVLGGKGANIAEMCKLGLPVPPGFTLATSLCSDYLKTKSLSIGLKKNIKKNIIKTEGVLGKTFGGPSPLLLSVRSGAPVSMPGMMETILNIGLTSKTIPFMIDASGNEGFVYDSYRRLIMMYADVVMEKALGLNKSSRPIRGLMEKELELTKKVKGYKNDSYMKAKDWKILSEKYLKIVKQEFGVPFPDDHYEQLYGAVAAVFESWNGKRAKEYRRFEKISSSMGTAVNIQAMVFGNLGKDCGTGVAFTRNPSTGENVFFGEWLPNAQGEDVVAGIRTPHPIIDEKNSKESLSVVMPKAFEELNDVRKKLENH

SEQ ID NO: 137002 - protein, 219 aa, Unknown
  Bacterial polypetide isolated from the Sargasso Sea
MSKDSGKKFGDLKNPLLVSVRSGARVSMPGMMDTILNLGLNDKTVLALAKKTSNLRFAKDSYRRFIQMYSNVVLGVEAYNFEELIENYKLTKGVLLDTELDENDWDGLIKDFKNVIKEKTKKEFPQNINEQLIGAISAVFLSWQSNRAKVYRKLNQIPSDWGTAVNVQLMVFGNMGQDCATGVVFTRNPSNGRNEIYGEYLVNAQGEDVVAGTRTPQYI

SEQ ID NO: 137003 - protein, 263 aa, Unknown
  Bacterial polypetide isolated from the Sargasso Sea
LANKTKNIRFAKDSYRRFIQMYSDVVLGIEAYNFEDLIENYKLTKGVLLDTELDENDWDGLINDFKELVKNKTKKEFPQNVIEQLIGAISAVFLSWDSQRAKVYRKINHIPSNWGTAVNIQSMVFGNMGDDSATGVVFTRNPSNGINEIYGEYLINAQGEDVVAGTRTPQYITKKASKNSNGKSMEELFPKVFSELKKNLKILEKHYKDMQDVEFTVENKKLWMLQTRSGKRTAKSAVKIAVDMYKEKLISKKEAVLRVDPSS

SEQ ID NO: 137004 - protein, 272 aa, Unknown
  Bacterial polypetide isolated from the Sargasso Sea
KTLNERFAKDSYRRFIQMYGNVVLGLESHLFEEMIDNYKLTKGVLLDTELNSDDWDGLIKNFKELILEKTKKSFPQDVYEQLFGAIKAVFLSWESKRAKNYRKFNHIPHNWGTAVNIQSMVFGNMGDDCATGVAFTRNPSTGENKFFGEYLINAQGEDVVAGSRTPRYITKKAKEDAGAKDNSLEEVMPKVFKELKNIFIKLEKHYRDMQDIEFTIENNKLWMLQTRNGKRTANAAIKIAIDMVKEKLISKKEAILRVDPNTLDTLLHPNLR

SEQ ID NO: 137005 - protein, 293 aa, Unknown
  Bacterial polypetide isolated from the Sargasso Sea
MKSIYAFEEADSKNRMLLGGKGAGLSEMTRLKLPVPPGFTITTEVCNKYYENGKKLPKDVMPLVMKNIAKMEKKTNKKWNSIKNPLLVSVRSGAAISMPGMMDTILNLGLNEKTVEGFAEQTKNPRFSWDSYRRFIQLFGKVVFGVNDEKFDHVLDSAKSKQGVTDDSKLNVESLKKIVVEYKKICEEHTKRKFPDTPNEQLRLAIEAVFKSWMGERAVVYREKNGITKDIANGTAVNVVTMVFGNMGDDSATGVVFTRNGHNGKREIEGEYLTNAQGEDVVAGVRTGKNVEL

SEQ ID NO: 137006 - protein, 308 aa, Unknown
  Bacterial polypetide isolated from the Sargasso Sea
LSVRSGARVPMPGMMDTILNLGLNDKTVIALAKKTSNGRFAKDSYRRFIQMYGNVVMGVESYHFEELIENYKLTKGVLLDTDLNEEDWDGLIKDFKNTVREKSKKDFPQDVYHQLFGAISAVFLSWESNRAKVYRKLNQIPSEWGTAVNVQSMVFGNMGNDCATGVVFTRNPSDGSKDIYGEYLINAQGEDVVAGTRTPQYITKKAKKNAKAKEASMEESMPKAYKELFKILNKLEKHYKDMQDVEFTVENNKLWILQTRSGKRTSKSAVKIAVDMVREKLISKNDAILRIDPNSLDTLLHPTLDEQR

SEQ ID NO: 137007 - protein, 263 aa, Unknown
  Bacterial polypetide isolated from the Sargasso Sea
LVSVRSGARVSMPGMMDTILNLGLNDKTVFALAKKTSNMRFAHDSYRRFIQMYSNVVMGIESYNFEELIENYKLTKGVLLDTELDENDWIGLIKDFKRVVKLKTGKEFPQNVFEQLSGAISAVFLSWESNRAKVYRKLNHIPDNWGTAVNVQSMVFGNMGNDCATGVVFTRNPSDGKKEIYGEYLINAQGEDVVAGTRTPQYITKKARLESGAKQKSMEEAMLRSFTQLKKNLNILEKHYKDMQDVEFTIENNKLWMLQTRSG

SEQ ID NO: 137008 - protein, 310 aa, Unknown
  Bacterial polypetide isolated from the Sargasso Sea
MANKTSNGRFAKDSYRRFIQMYGNVVMGIESYNFEELIENYKLTKGVLLDTDLDEEDWDGLIKDFKNVVKEKTNKDFPQDVYHQLFGAISAVFLSWESKRAKIYRKLNQIPSEWGTAVNVQSMVFGNMGNDCATGVVFTRNPSNGSNDIYGEYLINAQGEDVVAGTRTPQYITKKARKEAKVDDASMEETMPEVYHELYKILKKLEKHYKDMQDVEFTVESNKLWILQTRSGKRTSKSAIKIAVDMVREKLINKNDAVLRVDPNSLDALLHPTLDERSSIKVIANGLPASPGAVSGKVVFSSEEAERLND

SEQ ID NO: 137009 - protein, 318 aa, Unknown
  Bacterial polypetide isolated from the Sargasso Sea
YLVDWSYDFCDIGIRANADTIEDARVARSFKIDGVGLCRTEHMFLASSRINLVRQMILSEDEIAKLSILEQLLQIQKNDFIELFKEMAGLPVTIRLLDPPLHEFLPNSELEISNTAKMMKIEKNQLIDRIKDLTEFNPMLGTRGVRLGVMMPELYEMQAKAIFLAALEVNKFFGTKVVPEIMIPLVSANKEVDLVKRRVERVLKEIERKDSVPLEYMLGVMVETPRAALRAGDIARSSEFLSFGTNDLTQMTYGLSRDDSNRFMKEYLEKGLYKIDPFKTLDLEGVGELLKIALQRAKNANPNIVTGLCGEHGGDPSS

SEQ ID NO: 137010 - protein, 292 aa, Unknown
  Bacterial polypetide isolated from the Sargasso Sea
PGFTISTEVCDLFYKNKKKLNKKILNEINKELKFIEKDSGKKFGDIKNPLLVSVRSGARVSMPGMMDTILNLGLNDNTVIALAKKTSNLRFANDSYRRFIQMYSNVVLGIEGYHFEDIIENYKLTKGVLLDTELDEYDWEALIKDFKNIVKEKTKKDFPQNVKEQLVGAISAVFLSWESHRAKVYRKLNQIPSSWGTAVNVQSMVFGNMGNDCATGVVFTRNPSDGSKNIYGEYLINAQGEDVVAGTRTPQHITKKARVESKETLKSMEELMPSTYKQLKKILNKLEKHYKD

SEQ ID NO: 137011 - protein, 234 aa, Unknown
  Bacterial polypetide isolated from the Sargasso Sea
MKKLIFNFNSKDIKKIKNAKNILGGKGANLAEMGRLGFPVPSGFTISTNVCDIFYDNKKKLGSKIINAIKKEIRSIEKASGKKFGNINNPLLLSVRSGARVSMPGMMDTILNLGLNDQTADALAKNSSNKRFAMDSYRRFIQMYGNVVLGIDSFNFEDLIENYKLSKGVLLDTDLNAEDWDRLIKDFKNIVKEKTTKEFPQDVYEQLFGAISAVFLSWESKRAKVYRKINQIPS

SEQ ID NO: 137012 - protein, 303 aa, Unknown
  Bacterial polypetide isolated from the Sargasso Sea
CDLFYKNNKKIDPKILKNIKAEIKNIEKDSGKKFGDLKNPLLVSVRSGARISMPGMMDTILNLGLNDKTVVALAKKTSNPRFAKDSYRRFIQMYSTVVLGVENYNFEELIENYKLTKGVLLDTDLDENDWDGLIKDFKNVVKEKTKKEFPQDVNQQLTGAIKAVFLSWQSNRAKVYRKLNQITSDWGTAVNVQLMVFGNMGEDCATGVVFTRNPSTGKNEIYGEYLINAQGEDVVAGTRTPQYITKKARIEAGLKEISMQESMPAVFKQLYKILKNLEKHYKDMQDVEFTVEKNKLWILQTRS

SEQ ID NO: 137013 - protein, 246 aa, Unknown
  Bacterial polypetide isolated from the Sargasso Sea
FRRWLVNAQGEDVVAGLRTPNPLNEETKTEGTKDLPSLESSMPDIYSELKGIRGRLEKHYNDMQDIEFTIQEGKLWMLQTRVGKRNGSAAIKMAVDMKKEGMIDKKTALLRVKPEQLDELLHPMLDSESEKGAPLLGKGLPAGPGGASGRVVFTADDAEQWHKNGEKVILIREETSPEDVHGMHAAEAILTAKGGMTSHAALVARGWGKCCIVGCSELQIDVNKKEVVIGESTISEGDWITMNGTE

SEQ ID NO: 137014 - protein, 268 aa, Unknown
  Bacterial polypetide isolated from the Sargasso Sea
MQKLVYYFGDKKTEGKADMRDLLGGKGANLAEMCNLGLPVPHGFTISTEVCTYYYDNNKTLPNELKLEIKKNINKIENFTKKKFGSNSNPLLLSVRSGSRASMPGMMDTILNLGLNNESVNGLAESTKNERFAFDSYRRFIQMYSDVVLDIDNSLFEDALEDIKIENGLSEDTDLTSQNLKDLTETYKKIVLNEIKRPFPQDPSEQLWGSISSVFSSWMNNRAITYRKLNNLPSSWGTAVNIQSMVFGNMGEDCATGVAFTRNPNNGE

SEQ ID NO: 137015 - protein, 289 aa, Unknown
  Bacterial polypetide isolated from the Sargasso Sea
KGANLAEMARLGLPVPPGFTISTELCAVFYKNKKKLTPKIFNEIKKELKKIESITKKKFGDNSNPLLVSVRSGSRVSMPGMMDTILNLGLNDKTVEALSKKTSNERFAKDSYRRFIQMYGNVVLGIESHLFEEMIDNYKLTKGVLMDTELNSEDWDGLIKNFKGLILEKTKKNFPQDVYEQLFGAIRAVFLSWESKRAKNYRKFNHIPGDWGTAVNVQSMVFGNMGDDCATGVAFTRNPSTGENKFFGEYLINAQGEDVVAGSRTPRYITKKAKEDAGAKDESMEETMP

SEQ ID NO: 137016 - protein, 282 aa, Unknown
  Bacterial polypetide isolated from the Sargasso Sea
GLPVPPGFTISTEVCDLFYKNKKKLNKKILNEINKELKFIEKDSGKKFGDIKNPLLVSVRSGARVSMPGMMDTILNLGLNDNTVTALAKKTSNLRFANDSYRRFIQMYSNVVLGIEGYHFEDIIENYKLTKGVLLDTELDEYDWEALIKDFKNIVKEKTKKDFPQNVKEQLVGAISAVFLSWESHRAKVYRKLNQIPSNWGTAVNVQSMVFGNMGNDCATGVVFTRNPSDGAKNIYGEYLINAQGEDVVAGTRTPQHITKKARVESKETLKSMEEAMPATYK

SEQ ID NO: 137017 - protein, 216 aa, Unknown
  Bacterial polypetide isolated from the Sargasso Sea
MKKLVFNFNSKESSKLINSKNLLGGKGANLAEMGKLGLPVPPGFTISTEVCELFYKNKKKLNSKIIEQISKELKNIEKKSEKKFGDLKNPLLVSVRSGARVSMPGMMDTILNLGLNDKTVIALAKKTSNMRFAKDSYRRFIQMYSNVVLGIENYYFEELIENYKLTKGVLLDTDLDENDWDGLISDFKNVVRERANKDFPQDVNLQLVGAISAVFL

SEQ ID NO: 137018 - protein, 132 aa, Unknown
  Bacterial polypetide isolated from the Sargasso Sea
MKKLIFNFSSKESLNSKKAKSILGGKGANLAEMGKLGLPVPPGFTISTEVCELFYKNKKKLNSQIIKQINLELKNIEKQTKKKFGGLTNPLLVSVRSGARVSMPGMMDTILNLGLNDNTVLALSKQTSNIRF

SEQ ID NO: 137019 - protein, 259 aa, Unknown
  Bacterial polypetide isolated from the Sargasso Sea
FYKNKKKLTPKVCSEIKKELKKIEIKTKKKFGDNKNPLLVSVRSGSRVSMPGMMDTILNLGLNDRTVEALSKKTSNERFAKDSYRRFIQMYANVVLGVESHLFEEMIGNYKLTKGVLLDTELNADDWDGLIKNFKKLISEKTKKIFPQDVYEQLFGAIKAVFLSWESKRAKIYRKLNHIPGDWGTAVNVQSMVFGNMGNDCATGVAFTRNPSTGENKFFGEYLINAQGEDVVAGSRTPRYITKKAREDAGAKEESMEEI

SEQ ID NO: 137020 - protein, 281 aa, Unknown
  Bacterial polypetide isolated from the Sargasso Sea
GLNDRTVEALSKKTSNERFAKDCYRRFIQMYANVVLGIESHLFEEMIDNFKLTKGVLMDTELNADDWDGLIKNFKFLILEKTKKDFPQDVYAQLFGAIKAVFLSWESKRAKNYRKYNHIPSDWGTAVNIQSMVFGNMGNDCATGVAFTRNPSTGENKFFGEYLINAQGEDVVAGSRTPRYITKKAKENAGAEEKSMEETMPKVFKELKSIFAKLEKHYRDMQDIEFTVENKKLWMLQTRNGKRTAKAAIKIAVDMVKEKLISKKEAILRIDPNTLDTLLHP

SEQ ID NO: 137021 - protein, 301 aa, Unknown
  Bacterial polypetide isolated from the Sargasso Sea
GTGIRQKLEHHLDSYKTENNLDGDTDLSEEDWKYVIDLFKNEIKSSFGAEFPDNAEAQLWGGIEAVFKSWNGARAISYRRIENIPEEWGTAVNVQTMVFGNTGEKSATGVAFTRNPATGENKFFGEWLTNAQGEDVVAGLRTPNPLNEDTKTEDTRHLPSLQDTMPKIYDELFEIKNRLEKHYSDMQDIEFTIQEGKLWMLQTRVGKRNGVAAIKMAVDMFNENMIDKKTAIMRVNPNQLDELLHPALDKASEDSATKLTKGLPAGPGGAKGRVVFTADDAEEWKNKGEKVILVREETSPE

SEQ ID NO: 137022 - protein, 210 aa, Unknown
  Bacterial polypetide isolated from the Sargasso Sea
MKKLIFNFSSKESLNSKKAKSILGGKGANLAEMGKLGLPVPPGFTISTEVCELFYKNKKKLNSQIIKQINLELKNIEKQTKKKFGGLTNPLLVSVRSGARVSMPGMMDTILNLGLNDNTVLALSKQTSNIRFAKDSYRRFIQMYSNVVLNIENYHFEELIENYKLTKGVLLDTELDENDWDGLIKDFKDLVIEKTKKEFPQDVKQQLIGA

SEQ ID NO: 137023 - protein, 309 aa, Unknown
  Bacterial polypetide isolated from the Sargasso Sea
FYNIYKVCEIFYRNKKKLNKNLISQIKKELKLIEKDVSKKFGDLKNPLLLSVRSGARVSMPGMMDTILNLGLNDKTVKALAIKTSNGRFAKDSYRRFIQMYGNVVMGVEGYYFEELIENYKLTKGVLLDTDLDESDWDGLIEDFKRIVREKVKKDFPQDVYEQLLGAISAVFLSWESNRAKVYRKLNQIPAEWGTAVNVQSMVFGNMGDDCATGVVFTRNPSDGSNEIYGEYLINAQGEDVVAGTRTPQYITKKARQDAKVKELSMEESMPKVFKELQKILKKLEKHYKDMQDVEFTVESNKLWMLQTR

SEQ ID NO: 137024 - protein, 118 aa, Unknown
  Bacterial polypetide isolated from the Sargasso Sea
FGTNDLTQAVFSFSREDAEGKFLPEYMEKELLETSPFQSIDVNGVGHLMKIGIKQGRDIKKDLEIGICGEHGGDPNSIKFCHSANVSYVSASPHRIPIAIVAAAQAAIEQKKTKKSKK

SEQ ID NO: 137025 - protein, 250 aa, Unknown
  Bacterial polypetide isolated from the Sargasso Sea
MVEKDWKNVIEIFKNEIRATLGSEFPDDAEAQLWGGIEAVFMSWNGARAMSYRKIESIPEEWGTAVNVQTMVFGNTGEESATGVAFTRNPATGENKFFGEWLTNAQGEDVVAGLRTPNPLNEDTKTEDTKNLPSLEDTMPEIYNELFNIKNRLEKHYSDMQDIEFTIQEGKLWMLQTRVGKRNGVAAIKMAVDMFNEGMIDKKTAIMRVNPNQLDELLHPALDKNSENSATTLTKGLPAGPGGAKGRVVF

SEQ ID NO: 137026 - protein, 304 aa, Unknown
  Bacterial polypetide isolated from the Sargasso Sea
YKNKKKLNKKILNEINKELKFIEKDSGKKFGDLKNPLLVSVRSGARVSMPGMMDTILNLGLNDNTVIALAKKTSNLRFANDSYRRFIQMYSSVVLGIEAYHFEDIIENYKLTKGVLLDTELDEYDWQALIKDFKNLVKEKTKKDFPQSVKEQLVGAISAVFLSWESHRAKVYRKLNQIPSNWGTAVNVQSMVFGNMGNDCATGVVFTRNPSDGSKNIYGEYLINAQGEDVVAGTRTPQHITKKARVESKETLKSMEEKMPKTYKQLKNILIKLEKHYKDMQDVEFTVENKKLWMLQTRSENEQL

SEQ ID NO: 137027 - protein, 294 aa, Unknown
  Bacterial polypetide isolated from the Sargasso Sea
WVEWDFQCPLGFTISTKVCEIFYKDKKKLNNKLIGQIKKELKIIENDVSKKFGDLKNPLLLSVRSGARVSMPGMMDTILNLGLNDKTVIALANKTSNGRFAKDSYRRFIQMYGNVVMGVESYHFEELIENYKLTKGVLLDTELEEEDWDGLIKDFKNTVKEKTNKDFPQDVYQQLLGAISAVFLSWESNRAKVYRKLNQIPAEWGTAVNVQSMVFGNMGNDCATGVVFTRNPSDGSNNIYGEYLINAQGEDVVAGTRTPQYITQKAKKEAKVKEASMEEAMPKVYSELAKILKK

SEQ ID NO: 137028 - protein, 172 aa, Unknown
  Bacterial polypetide isolated from the Sargasso Sea
IMVPLVGFDAELRDQVAIVRAVADEVMARAGIEVSYQVGTMIEVPRAAITADEIAQTAEFFSFGTNDLTQTTLGLSRDDMGTFFDVYRDKEIYGHNPFASIDEAGVGRLMRTAIRGGKDKRPSLKLGICGEHAGDASSIVFCEELGLDYVSCSPPRVPVARLAAAQAVLRRN

SEQ ID NO: 137029 - protein, 246 aa, Unknown
  Bacterial polypetide isolated from the Sargasso Sea
ENPLLLSVRSGARVSMPGMMDTILNLGLNDKTVKALATKTSNSRFAKDSYRRFIQMYGNVVMGVEGYHFEELIENYKLTKGVLLDTELDENDWDLLIKDFKRTVKEKANKDFPQDVYEQLFGAISAVFLSWESKRAKVYRKLNYIPAEWGTAVNIQSMVFGNMGNDCATGVVFTRNPSSGENEIYGEYLINAQGEDVVAGTRTPQYITKKARQSAKVKALSMEEYMPEVYKKLYKILKKLENHYKN

SEQ ID NO: 137030 - protein, 291 aa, Unknown
  Bacterial polypetide isolated from the Sargasso Sea
VLNVGLTSKTIPGLIKKTGNPRFVYDAYRRLITMYADVVMEKAAGIEPKDGVGIRQKLEHHLDSYKSKNGLEGDTNLSEEDWKSVIDIFKDEIKSSLGAEFPDNAEAQLWGGIEAVFKSWNGARAISYRRIENIPEEWGTAVNVQTMVFGNTGEESATGVAFTRNPATGENKFFGEWLTNAQGEDVVAGLRTPNPLNEDTKTEDTSHLPSLQDTMPEIYDELFEIKNRLEKHYSDMQDIEFTIQEGKLWMLQTRVGKRNGVAAIKMAVDMFNENMIDKKTAIMRVNPNQLD

SEQ ID NO: 137031 - protein, 180 aa, Unknown
  Bacterial polypetide isolated from the Sargasso Sea
MPKYLFSFGDKKTKKILNSKNILGGKGANLAEMARLGLPVPPGFTISTELCAVFYKNKKKLTPKIFNEIKKELKKIESITKKKFGDNSNPLLVSVRSGSRVSMPGMMDTILNLGLNDKTVEALSKKTSNERFAKDSYRRFIQMYGNVVLGMESHLFEEMIDNYKLTKGVLMDTELNSEDW

SEQ ID NO: 137032 - protein, 263 aa, Unknown
  Bacterial polypetide isolated from the Sargasso Sea
ARAVAAPEAPAVTKRVFTFGDGQADGDASMKTLLGGKGANLAEMNRIGLSVPAGFTVTTETCAAFHENGGELPAGCWDEMLEGLAFVEKCMGKKLGDASNPLLLSVRSGAAVSMPGMMDTVLNLGLNDDVAEGLAAKAGEKFAFDSYRRFLDMYGDVVMGIEHHLFEHQIDSLKKEVGVAQDNELTAEHLRELVKRYKKVYEAEGKMFPQEPLEQMRLAANAVFDSWNSDRAKKYMAINQITGLKGTAVNIQAMVFGNMGETS

SEQ ID NO: 137033 - protein, 298 aa, Unknown
  Bacterial polypetide isolated from the Sargasso Sea
MKKLVFNFKSKDIKKLKNPRNILGGKGLNLAEMGKLGMPVPPGFTISTEACDFFYKNRKKLNAKIIKEIKDELKIVEKETGKKFGDLKNPLLVSVRSGARVSMPGMMDTILNLGLNDQTVTALANKTSNLRFAKDSYRRFIQMYSNVVLGIENYNFEDLIENYKLTKGVLLDTELDENDWDGLINDFKNIVKQKTKKSFPQDVKEQLNGAISAVFLSWESHRAKVYRKLNQIPSTWGTAVNIQSMVFGNMGNDCATGVVFTRNPSDGGNYIYGEYLINAQGEDVVAGTRTPQHITKKA

SEQ ID NO: 137034 - protein, 292 aa, Unknown
  Bacterial polypetide isolated from the Sargasso Sea
MDTILNLGLNDKTVIALARKTSNERFAKDSYRRFIQMYANVVLGVESYNFEELIENYKLTKGVLLDTDLDENDWDGLIKDFKNVIKTKTKKEFPQDVYNQLIGAISAVFLSWESKRAKVYRKLNQIPSEWGTAVNVQLMVFGNMGQDCATGVVFTRNPSTGSKEIYGEYLINAQGEDVVAGTRTPQYITKKARIEANVKEKSMEESMNKVFKQLDKILKNLENHYKDMQDVEFTVENKKLWILQTRSGKRTAKSAVKIAVDMVKEKLITKKEAIIRIDPHSLDTLLHPTLNE

SEQ ID NO: 137035 - protein, 265 aa, Unknown
  Bacterial polypetide isolated from the Sargasso Sea
NLPVTIRLLDPPLHEFLPNSQQEIQRTANLMAITEQQLADRIKDLSEFNPMLGTRGVRLGVMVPEIYDMQVQAIFLAAIEVFKKYKIVVNPEIMIPLISANKEVDLVRDRIREVFSQLNKNNFVDLKYKLGVMVETPRAALRAGDIAKSCDFLSFGTNDLTQMTYGLSRDDSNRFMKEYIEKGLYSGDPFKTIDVEGVGELLKIAVQRARNTNSKIVTGLCGEHGGDPTSIHFCRSVGFEYISCSPYRVPIARLAAAQSRIRNLN

SEQ ID NO: 137036 - protein, 279 aa, Unknown
  Bacterial polypetide isolated from the Sargasso Sea
GAASGKIYFSAEDAVKAAAKGQNVILVRQATSPEDLRGMIAADGILTTEGGASSHAALVARQMGKVCVCGAHGMSIDYAKKTLSGNGVTLKEGDELSLNGFVGNVYKGNIKSSPSQVIQGLIENKAAAKRSDTYKKFMELMSWTDKLRTLGVRTNSDTPEQVQQAIKFGAEGIGLTRAEHMFFEGSRIDAVREMILADDDAGRAKALKKIKVFMKKDFIGIFKSLEGRPATIRLLDPPLHEFIGTMDADQKKDLSKKIGMSAPAITKRIHALHEENPML

SEQ ID NO: 137037 - protein, 200 aa, Unknown
  Bacterial polypetide isolated from the Sargasso Sea
RLAITTEDLYRTQTRALIAAVKKRISQGGDPKVEIMVPLVSLEEELTLVVEWIREELNNSPIRIPVGTMIETPRAALIAGALAKHIDFISFGTNDLTQMTFGFSRDDVEVTVINEYIEKELLEKSPFETLDIGGVGQLVTTGITESRKVNPSIKIGICGEHGGDPASIRFLVDAGVDYVSCSPPRIPIARLISSQILLDM

SEQ ID NO: 137038 - protein, 281 aa, Unknown
  Bacterial polypetide isolated from the Sargasso Sea
KYFTRIKKKLNKNLISQVKKELKLIEKYVFKKFGDLKNPLLLSVRSGARVSMPGMMDTILNLGLNDKTVKALAIKTSNGRFAKDSYRRFIQMYGNVVMGVESYHFEELIENYKLTKGVLLDTDLDESDWDGLIEDFKRTVRKKAKKEFPQDVYEQLLGAISAVFLSWESNRAKVYRKLNQIPAEWGTAVNVQSMVFGNMGDNCATGVVFTRNPSDGSNEIYGEYLINAQGEDVVAGTRTPQYITTKARQDAKAKELSMEESMPKVFKELQKILKKLEKHYK

SEQ ID NO: 137039 - protein, 301 aa, Unknown
  Bacterial polypetide isolated from the Sargasso Sea
FPPGFTISTKVCDLFYKNKKKLNSKIVKDIKKELKFIEKETGKKFGDLQSPLLVSVRSGARVSMPGMMDTILNLGLNDKTVLALANKTSNMRFAKDSYRRFIQMYSNVVMGVKSYHFEELIGNYKLTKGVLLDTELDENDWDGLINDFKRIVKEKTNKEFPQNVFDQLFGSISAVFLSWESNRAKVYRKLNQIPSEWGTAVNVQSMVFGNMGYDSATGVVFTRNPSDGTNEIYGEYLVNAQGEDVVAGTRTPQHITKKLRINAKTKERSMEEFMPKLFNQLKKNLLILEKYYKDMQDVELR

SEQ ID NO: 137040 - protein, 292 aa, Unknown
  Bacterial polypetide isolated from the Sargasso Sea
KVCEIYYKNNKKLNTKIIKEIRKELAVIEKESGKKFGDLKNPLLVSVRSGARVSMPGMMDTILNLGLNDKTVLALANKTSNRRFAKDSYRRFIQMYSSVVMGIDNYNFEELIENYKLTKGVLLDTELDENDWDGLINDFKEVVLKKTKKEFPQNVFEQLFGAISAVFLSWNSNRAKVYRKLNRIPSDWGTAVNVQSMVFGNMGNNCATGVVFTRNPSDGNNEIYGEYLINAQGEDVVAGTRTPQYITKKARINSLSKVKSLEETMPKVFNQLKKILNKLEKHYKDMQDVEFT

SEQ ID NO: 137041 - protein, 236 aa, Unknown
  Bacterial polypetide isolated from the Sargasso Sea
PKIFKQLKKILKSLEKYYKDMQDVEFTIENGKLWILQTRSGKRTAKSAIKIAVDMVKEKLITKKDALLRIDPGSLDNLLHPSLDEKAEMNIIANGLPASPGASSGKVVFSSDEAERLNSMMQDTILVRVETSPEDINGMHAAKGILTSRGGMTSHAAVVARGMGRPCVSGSSEIEIDYNKKIFKVNNKIVKEGEIITIDGSSGRVILGEVKTIKPDVSGDFLTVMKWADKYRKLKI

SEQ ID NO: 137042 - protein, 149 aa, Unknown
  Bacterial polypetide isolated from the Sargasso Sea
MSRTQWVYRFGGGDSEGAAEMRNLLGGKGANLAEMSSLGLPVPPGFTITTEVCTAYYDNDWNYPDDLSGQVDAALAFIEETGGAKFGDPDNPLLVSVRSGARASMPGMMDTVLNLGLNDATVEGLAANSGDARFAWDSYRRFIQMFGDV

SEQ ID NO: 137043 - protein, 296 aa, Unknown
  Bacterial polypetide isolated from the Sargasso Sea
MHVDSGKAPAYFPRSGFPANFERDLMAKAKKYVYHFSKSKTDGNGSMKALLGGKGANLAEMSSIGVPVPAGFTITTEVCTYYYDNGKKYPKTLDAEIEANITKVEKAMGKKFGDLENPLLLSVRSGARESMPGMMDTILNLGINDEVVEALAKKTGNAKFAWDSYRRFLQMYGSVVMEVEAEAGEHHDPYEVILDKAKAKAKVEDDSGLKENDLREVVAAFKALIKKRSGQNFPEDPREQLKGAVTAVFNSWQNDRAIVYRQKYGISAAWGTAVNVQAMVFGNTGKKSGTGVAFTR

SEQ ID NO: 137044 - protein, 292 aa, Unknown
  Bacterial polypetide isolated from the Sargasso Sea
VAGLRTPNPLNEDTKTEDTSHLPSLQDTMPEIYDELFEIKNRLEQHYSDMQDIEFTIQEGKLWMLQTRVGKRNGVAAIKMAVDMFNENMIDKKTAIKRVNPNQLDELLHPTLDKASEDSATILTKGLPAGPGGAKGRVVFTADDAEEWKDKGEKVILIREETSPEDVHGMHAAEAILTARGGMTSHAALVARGWGKCCIVGCNEVNISIQDKQLSVGDVVVKEGDWITMNGTIGVVYLGQLDLIPADPDRNVEYKELMKWADEIRKLKIRTNAESPEDAKQAIKFGAEGIGL

SEQ ID NO: 137045 - protein, 162 aa, Unknown
  Bacterial polypetide isolated from the Sargasso Sea
QGLPVTVRLLDPPLHEFLPKSEKEISEVADVVGADKKEVVSRIEELHEQNPMLGHRGCRLGISFPEIYEMQCRAIFEALSDLKKKKQKTAIPEIMIPLVSTEAEIKIMKDLVIKTAKKVQDENKIKIAFFVGTMIELPRAAIKAHDIAKHAEFFSFGTNDLT

SEQ ID NO: 137046 - protein, 138 aa, Unknown
  Bacterial polypetide isolated from the Sargasso Sea
MKKLIFNFKSKEFKKLKEPKNILGGKGANLAEMGRLGLPVPPGFTISTNACSLFYENKRKLNRKLIKEINKEVKLIEKDTKKKFGDLKNPLLISVRSGARVSMPGMMDTILNLGLNDKTVSALAKKTSNARFAKDSYR

SEQ ID NO: 137047 - protein, 286 aa, Unknown
  Bacterial polypetide isolated from the Sargasso Sea
KIKNSRNILGGKGSNLAEMARLGLPVPPGFTISTEMCEVFYKGKKKLTPKIFKEIKKELKKVELKTKKKFGDNTNPLLVSVRSGSRVSMPGMMDTILNLGLNDKTVQALSKKTSNERFAKDSYRRFIQMYGNVVLGVESHLFEDLIDNYKLTKGVLLDTELNSDDWDGLIKNFKELISEKTSKNFPQDVYDQLFGAIKAVFLSWESKRAKTYRKFNHIPADWGTAVNVQSMVFGNMGDDCATGVAFTRNPSTGENKFFGEYLINAQGEDVVAGSRTPKIYNKKIKR

SEQ ID NO: 137048 - protein, 197 aa, Unknown
  Bacterial polypetide isolated from the Sargasso Sea
MPKYLFSFGDKKTKKILNSKNILGGKGANLAEMARLGLPVPPGFTISTELCAVFYKNKKKLTPKIFNEIKKELKKIESITKKKFGDNSNPLLVSVRSGSRVSMPGMMDTILNLGLNDKTVEALSKKTSNERFAKDSYRRFIQMYGNVVLGIESHLFEEMIDNYKLTKGVLMDTELNSEDWDGLIKNFKGLILEKTKK

SEQ ID NO: 137049 - protein, 252 aa, Unknown
  Bacterial polypetide isolated from the Sargasso Sea
MGLPVPPGFTFSTNVCEIFYKDKKKLNSKLINQIKKEIKTIEKDVSKKFGDLKNPLLLSVRSGARVSMPGMMDTILNLGLNDKTVVALANKTSNGRFAKDSYRRFIQMYGNVVMGVESYNFEELIENYKLTKGVLLDTDLDEEDWDGLINDFKNVVKEKTNKDFPQNVYHQLFGAISAVFLSWESKRAKIYRKLNQIPSEWGTAVNVQSMVFGNMGNDCATGVAFTRNPSNGSNDIYGEYLINAQGEDVVAG

SEQ ID NO: 137050 - protein, 271 aa, Unknown
  Bacterial polypetide isolated from the Sargasso Sea
IKEINEELKNIEKKSKKKFGDLKNPLLVSVRSGARVSMPGMMDTILNLGLNDKTLIALAKNTSNMRFAKDSYRRFIQMYSNVVLGIENYHFEELIENYKLTKGVLLDTDLDADDWGGLIKDFKNVVREKTKKDFPQDVKQQLFGAISAVFLSWESNRAKVYRKLNQIPSNWGTAVNIQSMVFGNMGDNCATGVVFTRNPSDGSKEIYGEYLINAQGEDVVAGTRTPQHITKKARIKSKEKLLSMEETMPSIYIQLKKILLKLEKHYKDMQD

SEQ ID NO: 137051 - protein, 304 aa, Unknown
  Bacterial polypetide isolated from the Sargasso Sea
KIIEKESKKKFGDLENPLLVSVRSGARVSMPGMMDTILNLGLNDKTVVALAKKSSNLRFAKDSYRRFIQMYSNVVLGVESYNFEELIENYKLTKGVLLDTDLDAQDWDGLIKDFKRIIREKTKKEFPQDVFQQLLGAVSAVFLSWESNRANIYRRLNQIPSHWGTAVNVQSMVFGNMGEDCATGVVFTRNPSDGKNEIYGEYLINAQGEDVVAGTRTPQYITKKARKKSGSNGKSMEETMPDVFKELKKNLKILEKHYKDMQDVEFTVENKKLWMLQTRSGKRTAKSSVKIAVEMVKEKLIQKK

SEQ ID NO: 137052 - protein, 270 aa, Unknown
  Bacterial polypetide isolated from the Sargasso Sea
RRFIQMYSDVVMGVDHGLFEDALENMKMQRGVFEDTELTGVDLQALVEVFKNIVHEELDEVFPQNPWHQLWGAIGAVFTSWMNARAITYRRLNNIPAAWGTAVNVQGMVFGNMGNDCATGVAFTRDPSTGENSFYGEFLFNAQGEDVVAGIRTPLPLTKAARINADGDVQSMEEAMPEVFKQLDAVRKTLESHYRDMQDLEFTVQQGVLYILQTRSGKRTAEAALRMAVEMADEGLISRDEALCRIDSNALDQLLHPTLDPHAERVVLTR

SEQ ID NO: 137053 - protein, 284 aa, Unknown
  Bacterial polypetide isolated from the Sargasso Sea
FTISTEVCEIFYKNKKRLNQNLISQIKKELKLIEKDVSKKFGDLKNPLLLSVRSGARVSMPGMMDTILNLGLNDKTVKALAIKTSNGRFAKDSYRRFIQMYGNVVMGVDSYYFEELIENYKLTKGVLLDTDLDENDWDGLIKDFKRTIREKAKRDFPQDVYKQLLGAISAVFLSWESNRAKVYRKLNQIPAEWGTAVNVQSMVFGNMGDDCATGVVFTRNPSDGSNEIYGEYLINAQGEDVVAGTRTPQYITKKARRDAKVKELSMEESMPKVYRELQKILKKL

SEQ ID NO: 137054 - protein, 271 aa, Unknown
  Bacterial polypetide isolated from the Sargasso Sea
MPRYIFSFGDKKTKKVSNSRNTLGGKGANLAEMARLGLPVPPGFTISTQMCEIFYKNKKKLSPKVCSEIKKELKKIETKTKKKFGHNTNPLLVSVRSGSRVSMPGMMDTILNLGLNDKTVDALSKKTSNERFAKDSYRRFIQMYGNVVMGIKNHLFEEMIDNYKLTKGVLSDTELNSEDWDGLIKNFKNLISEKTKKNFPQDVYEQLFGAIRAVFLSWESKRAKTYRKLNHIPGNWGTAVNVQSMVFGNMGNDCATGVAFTRNPSTGENKF

SEQ ID NO: 137055 - protein, 246 aa, Unknown
  Bacterial polypetide isolated from the Sargasso Sea
FAKDSYRRFIQMYGNVVMGVENYFFEELLDNYKLTKGVLLDTELGPDDWDGLIKNFKNLIFEKTKKNFPQDVYQQLFGAVRAVFLSWESKRAKTYRKLNHIPGEWGTAVNIQSMVFGNMGNDCATGVAFTRNPSTGENRFFGEYLINAQGEDVVAGSRTPRYITKKAREDAGAKEKSMEETMPVVFKELKSVFIKLEKHYRDMQDIEFTVENKKLWMLQTRSGKRTAKAGIKIAVDMVKEKLISKK

SEQ ID NO: 137056 - protein, 243 aa, Unknown
  Bacterial polypetide isolated from the Sargasso Sea
KLTKGVLLDTDLNANDWDGLVKDFKKLIKEKSKKEFPQDVYEQLTGAIYAVFLSWQSNRAKIYRKLNYIPSDWGTAVNIQSMVFGNMGDDCATGVVFTRNPSNGVNEIYGEYLINAQGEDVVAGTRTPQYITKKARKESDSNDKSMEESMPKVFKQLKTILRTLEKHYKDMQDVEFTVENQKLWILQTRSGKRTAKSAVKIAVDMFKEKLISKKEAVLRIDPNSLDSLLHPTLDEKSGNKCDR

SEQ ID NO: 137057 - protein, 155 aa, Unknown
  Bacterial polypetide isolated from the Sargasso Sea
MKKLIFNFNSKQSKKLKNSKNILGGKGANLAEMRRLGLPVPPGFTISTDACHLFYQNKKKLNLKIIKEINKQLLLIEKETKKKFGDLKNPLLVSVRSGARVSMPGMMDTILNLGLNDQTVIALANKTSNVRFAKDSYRRFIQMYSNVVLGIESYN

SEQ ID NO: 137058 - protein, 227 aa, Unknown
  Bacterial polypetide isolated from the Sargasso Sea
MHVNEILMRLSESNPMLGHRGVRLGLSYPEIYEMQVEAIFRAVHLVFENDNFKVTPEVMIPLVMNSNELSEMKDILKKKIKKIEKELNYNFDYTIGTMIELPSAALSSSEIAKDADFFSFGTNDLTQTTLGLSRDDASKFLGEYVEKQIFDIDPFVSIDPSTVGRLVELSSNDGKKANKSLKIGVCGEHAGDPTSIFYLNTLNIDYISCSPFRIPAARLAAAQSETK

SEQ ID NO: 137059 - protein, 225 aa, Unknown
  Bacterial polypetide isolated from the Sargasso Sea
MPKYLFSFGDKKTKKILNSKNILGGKGANLAEMARLGLPVPPGFTISTELCAVFYKNKKKLTPKIFNEIKKELKKIESITKKKFGDNSNPLLVSVRSGSRVSMPGMMDTILNLGLNDKTVEALSKKTSNERFAKDSYRRFIQMYGNVVLGIESHLFEEIIDNYKLTKGVLMDTELNSEDWDGLIKNFKGLIFEKTKKNFPQDVYEQLFGAIKAVFLSWESKRAKN

SEQ ID NO: 137060 - protein, 212 aa, Unknown
  Bacterial polypetide isolated from the Sargasso Sea
MKKASKKTNLQSKKPSPKRYVFAFGRETDGNARMRELLGGKGANLAEMASIGLPVPPGFTISTEVCNYFYNHGKTYPKQLLKDVKNGVQEIEAQLGKNFGASENPLLVSVRSGARDSMPGMMDTILNLGLNDQTVEGLSRSSGNPRFAWDCYRRFIQMYGDVVMGVQARNEEEEEPFHKELEKLKISLGISADTELTTENLKTLVTRYKALI

SEQ ID NO: 137061 - protein, 263 aa, Unknown
  Bacterial polypetide isolated from the Sargasso Sea
EACDVFYKNRKKLNVKINKEINDELKIIEKETGKKFGDLKNPLLVSVRSGARVSMPGMMDTILNLGLNDQTVTALASKTSNLRFAKDSYRRFIQMYSNVVLGIENYNFEDLIENYKLTKGVLLDTDLDQEDWDGLINDFKNIVKEKTKKDFPQDVKEQLNGAISAVFLSWESNRAKVYRKLNQIPSNWGTAVNIQSMVFGNMGNDCATGVVFTRNPSDGSNYIYGEYLINAQGEDVVAGTRTPQHITKKARLEAKENLLSLEE

SEQ ID NO: 137062 - protein, 258 aa, Unknown
  Bacterial polypetide isolated from the Sargasso Sea
YNFKSKDVKKLKNPKNILGGKGANLAEMGRLGLPVPHGFTISTEACHLFYENKKRLNSKIIKEINKELILIEKETKKKFGDLKNPLLVSVRSGARVSMPGMMDTILNLGLNDKTVIALANKTSNMRFAKDSYRRFIQMYSNVVLGVESYNFEELIENYKLTRGVLLDTELDENDWDNLIKDFKNLVREKTKKWFPQNVKEQLIGAISAVFLSWESHRAKVYKKLNQIPSDWGTAVNVQSMVFGNMGDDCATGVVFTRN

SEQ ID NO: 137063 - protein, 307 aa, Unknown
  Bacterial polypetide isolated from the Sargasso Sea
TTEVCTHYYNNKLVFPETLNDQTIIALNNIESIMKLGFGDRKNPLLVSVRSGARQSMPGMMETVLNIGLTSNTIPGLIEKTSNPRFVYDAYRRLITMYADVVMEKASGLEPEDGHGIRHKLEKIFDDYKQNKGLINDTDLSGDQLQDIADSFKHEIKSTLGQEFPDDPYDQLWGGIEAVFKSWNGARAKSYRQIENIPGEWGTAVNIQAMVFGNMGDDSATGVAFTRNPATGDNKFYGEWLVNAQGEDVVAGLRTPNPLNEATKTDDTKSLLSLETSSPELYQELHGIRNKLENHYLDMQDIEFTIQ

SEQ ID NO: 137064 - protein, 110 aa, Unknown
  Bacterial polypetide isolated from the Sargasso Sea
LCKILKKLEKHYKDMQDVEFTVENKKLWMLQTRSGKRTAKSAVKITVDMVKEKLISKKEAVLRIDPHSLDTLLHPTLDEKSTINVIANGLPASPGAASGKLYSLLKKQKG

SEQ ID NO: 137065 - protein, 305 aa, Unknown
  Bacterial polypetide isolated from the Sargasso Sea
KIQVKNFGDLNNPLLVSVRSGARISMPGMMDTILNLGLNDKTVIALAKKTLNPRFAKDSYRRFIQMYANVVLGVENYNFEELIENYKLTKGVLLDTELDESDWDGLIKDFKNVVKDITKKEFPQNVDEQLIGAIKAVFLSWQSNRAKVYRKINQIPSEWGTAVNVQLMVFGNMGKDCATGVVFTRNPSTGNKEIYGEYLINAQGEDVVAGTRTPQYITKKARIKDGLKESSMQELMPTVFNQLYKILKNLEKYYKDMQDVEFTVEKNKLWILQTRSGKRTAKSAVQIAVDMVKEKLISKKLLFIE

SEQ ID NO: 137066 - protein, 260 aa, Unknown
  Bacterial polypetide isolated from the Sargasso Sea
RFAKDSYRRFIQMYSNVVLGIENYNFEELIENYKLTKGVLLDTDLDASDWDGLIKDFKNIIKEKTKKEFPQNVNDQLIGAISAVFLSWQSNRAKVYRKLNQIPSDWGTAVNVQSMVFGNMGDDCATGVVFTRNPSDGSKNIYGEYLINAQGEDVVAGTRTPQYITTKAKNSAKANLPSMEETMPNAFKKLKKILKKLENHYKDMQDVEFTIEKNKLWMLQTRSGKRTAKSAVKIAVDMVQKNLISKKEAVLRVEPNSLDT

SEQ ID NO: 137067 - protein, 188 aa, Unknown
  Bacterial polypetide isolated from the Sargasso Sea
MKKLTLNFNSKESKKIKNPKNLLGGKGANLAEMGRMGLPVPPGFTISTKVCEIFYKDKKKLNKNLISQIKKELKIIEKDVSKKFGDLKNPLLLSVRSGARVSMPGMMDTILNLGLNDKTVKALATKTLNGRFAKDSYRRFIQMYGNVVMGVQGHHFEELIENYKLTKGVLLDTDLDESDWDGLIEDLK

SEQ ID NO: 137068 - protein, 299 aa, Unknown
  Bacterial polypetide isolated from the Sargasso Sea
MNKLILNFKSKDSKKIKNPKNFLGGKGANLSEMGRMGLPVPPGFTISTKVCEIFYQNKKKLNLKLINQIKKELIVIEKNVSKKFGDLENPLLLSVRSGARVSMPGMMDTILNLGLNDKTVNALAKKTSNGRFAKDSYRRFIQMYGNVVMGVESYHFEELIENYKLTKGVLLDTDLDEEDWDGLIKDFKNTVKEKSKMDFPQDVYQQLFGAISAVFLSWESNRAKIYRKLNQIPSEWGTAVNVQSMVFGNMGNDCATGVVFTRNPSDGSNDIYGEYLINAQGEDVVAGTRTPQYITQKAK

SEQ ID NO: 137069 - protein, 261 aa, Unknown
  Bacterial polypetide isolated from the Sargasso Sea
MGRMGLPVPPGFTISTKVCEIFYKDKKKLNSKLINQIKKEIKKIEKDVSKKFGDLKNPLLLSVRSGARVSMPGMMDTILNLGLNDKTVVALANKTSNGRFAKDSYRRFIQMYGNVVMGVESYNFEELIENYKLTKGVLLDTDLDEEDWDGLINDFKNLVKEKTSKDFPQDVYHQLFGAISAVFLSWESKRAKVYRKLNQIPSEWGTAVNVQSMVFGNMGNDCATGVVFTRNPSDGSNDIYGEYLINAQGEDVVAGTRTPQY

SEQ ID NO: 137070 - protein, 299 aa, Unknown
  Bacterial polypetide isolated from the Sargasso Sea
MDTILNLGLNDKTVKALASKTSNGRFAKDSYRRFIQMYGNVVMGVEGYHFEELIENYKLTKGVLLDTDLDENDWDGLIEDFKRTVKEKANRDFPQDVHEQLLGAISAVFLSWDSKRAKIYRKLNHIPAEWGTAVNIQSMVFGNMGDDCATGVVFTRNPSDGENEIYGEYLINAQGEDVVAGTRTPQYITKKARQNANVKAPSMEESMPKVYIQLYKILKKLEKHYKDMQDVEFTVENKNLWMLQTRSGKRTAKSAVKIAVDMVKEKLISKKEAVLRIDPHSLDTLLHPTLDEKSTINCN

SEQ ID NO: 137071 - protein, 198 aa, Unknown
  Bacterial polypetide isolated from the Sargasso Sea
MAKWVYTFGDKEAEGSASMKDLLGGKGANLAEMSNLGLAVPPGFTITTEVCDNYYNNNKEYPSELSNQVLSAIKHIEIITGSEFGNKSNPLLVSVRSGAKASMPGMMDTVLNLGLNDETVEGLASSSENDKFAWDSYRRFIQMYGDVVMGIPHYKFEKFLEDMKLSKGVENDSGLDSSDLKRLVKEYKELVKIETKEN

SEQ ID NO: 137072 - protein, 555 aa, Unknown
  Bacterial polypetide isolated from the Sargasso Sea
MSSKLIYEFSQKKTDGDKTMSDLLGGKGANLAEMSNLGINVPPGFTVTTEVCNYFIENKSFPENFDKELSASIKKLEDYSGKVFGTSENPLLLSVRSGGRISMPGMMDSILNIGLNDDNVIHLSKVFNDERFALDSYRRLIQMYGNVVLDIDHKRFEAVLENKKRIDNLNSDADFNSDHLRWIIDAYKNTVERFSDGPFPQDPEEQLKASIQAVFNSWLNRRAITYRKINNIPDHWGTGATIQTMVFGNLNDNSGTGVAFTRFPSTGKNELYGEYLMNAQGEDVVAGLRTPFPITKHEKNTDPSLSEENPKLHAEIREIATKLESHYKEVQDIEFTIEDKKLYVLQTRTAKRTAQASVKIAVDMHSEKIVSKKEAINMVDADSITTILHPQFVEDQDKEIFERGLNASPGAAFGEIVFDADKAEEEANKGRNVILVRDETSPEDIHGMFSSVAILTTKGGMTSHAAVVARGMGKPCIVGAENLVIDYSTKTISSKEKVLEEGDLISIDGSTGEIYIGELELEAPKLSEEFNTLMDWCNEHKKLEIRANAETEIDT

SEQ ID NO: 137073 - protein, 330 aa, Unknown
  Bacterial polypetide isolated from the Sargasso Sea
MKPFSGHSGACMRKPVWLFSEGSHKRRDLLGNKGANLCEMTSLGMPVPFGFIITTQTHLEYQRLRQRIPEGTMEEVKAPLLKMEIRQGAEFGNPVNPLLVSVRSGASVSMPGMMDTLLNLGINDEIVEGLAKLTTNPRFAYDTYRRLLQLYGAVVGGKGIHPYTQILKDYCQQHGLEEHADLDVGELKEIVGLFKKIHLPPDNPWTQLENAIGAVFSSWNNPRSQTYRRLNDIPDSIGTAVIIQAMVFGNMGQNSGSGIAFTRNPSTGEKKFFGEYLMNAEGEDIASGRRTSRSLDEFKEESPILYNQLFQLQKTLEEHLPGHAGSGIHH

SEQ ID NO: 137074 - protein, 343 aa, Unknown
  Bacterial polypetide isolated from the Sargasso Sea
MNNKLIYQFSSTKTEGDRSMVDLLGGKGANLAEMSSLGINVPPGFTVTTEVCNYFIENKSFPDKFDKELETALTNLEKLTEKKFNDDKTPLLLSVRSGGKVSMPGMMDSILNIGINDKNVDSLASNFNDERFALDSYRRLIQMYGNVVLEIEMDRFEAIIDNKKRIDGVENDNDFDSEQLSWIIDAFKTTVERFGGNPFPQDPIIQLKLSIEAVFKSWLNKRAVTYRKINNIPNNLGTATTVQSMVFGNLNESSGTGVAFTRFPYTGKNKLYGEYLMNAQGEDVVAGIRTPFLIGKHEKNTQPSLEEENPALFNDIKFIGDKLETHYKDAQDIEFSIEDGELF

SEQ ID NO: 137075 - protein, 338 aa, Unknown
  Bacterial polypetide isolated from the Sargasso Sea
MNKLILNFKSKDSKKIKNPRNFLGGKGLNLYEMERIGLPVPPGFTISTKVCEIFYKNKKKLNSKLISQIKKQLKIIEKDVSKKFGDLKNPLLLSVRSGARISMPGMMDTILNLGLNDKTVIALANKTSNGRFAKDSYRRFIQMYGNVVMGVESYCFEELIENYKLTKGVLLDTELNEEDWDGLIKDFKNTIKEKTNNFFPQDVYQQLFGAISSVFLSWESNRSKVYRKLNQIPSDWGTAVNVQSMVFGNMGDDCATGVVFTRNPSNGLNNIYGEYLINAQGEDVVAGTRTPQYITKKAKKEAKVKELSMEEAMPKVYKEKFKILKKLEKHYKDMQDVE

SEQ ID NO: 137076 - protein, 325 aa, Unknown
  Bacterial polypetide isolated from the Sargasso Sea
MKKLILNFKSKDSKKIKIPKNFLGGKGANLSEMGRMGLPVPPGFTISTKVCDLFYKDKKKLNKNIITSIKKELKAVEKEVSKKFGDLKNPLLLSVRSGARVSMPGMMDTILNLGLNDKTVKALASKTSNGRFAKDSYRRFIQMYGNVVMGVEGYHFEELIENYKLTKGVLLDTDLDENDWDGLIEDFKRKVKEKANRDFPQDVNEQLLGAISSVFLSWDSKRAKIYRKLNHIPAEWGTAVNVQSMVFGNMGDDCATGVVFTRNPSDGENEIYGEYLINAQGEDVVAGTRTPQYITKKARQNAKVKASSMEESMPKVYKQLYKILK

SEQ ID NO: 137077 - protein, 354 aa, Unknown
  Bacterial polypetide isolated from the Sargasso Sea
MTKLILNFNSKHSKSIKNPKNFLGGKGANLSEMGRMGLPVPPGFTISTKVCEIFYKDNKRLNNKLISQIKKELKIIEKEVSKKFGDLKNPLLLSVRSGARVSMPGMMDTILNLGLNDKTVNALALRTSNGRFAKDSYRRFIQMYGNVVMGVESYHFEELIENYKLTKGVLLDTDLDENDWNGLIEDFKRTVKEKTKKEFPQDVFQQLFGAISAVFLSWESNRAKVYRKLNQIPAEWGTAVNVQSMVFGNMGDDCATGVVFTRNPSDGSNEIYGEYLINAQGEDVVAGTRTPQYITRKARKNAKVEESSMEESFPKVFKQLKNILKKLEKHYKDMQDVEFTVENNKLWMLQTRSG

SEQ ID NO: 137078 - protein, 348 aa, Unknown
  Bacterial polypetide isolated from the Sargasso Sea
MNKLILNFKSKDSKKIENPKNFLGGKGANLSEMGRMGLPVPPGFTISTKVCEIFYKDKKKLNSKLISQIKKEIKTIEKDVSKKFGDLKNPLLLSVRSGARVSMPGMMDTILNLGLNDKTVVGLANKTSNGRFAKDSYRRFIQMYGNVVMGVESYNFEELIENYKLTKGVLMDTDLDEEDWDGLINDFKNVIKEKTSKDFPQDVFHQLFGAISAVFLSWESKRAKVYRKLNQIPSEWGTAVNVQSMVFGNMGNDCATGVVFTRNPSDGSNDIYGEYLINAQGEDVVAGTRTPQHITKKARKEAKVDDASMEESMPEVYHELYKILKKLEKHYKDMQDVEFTVESNKLWI

SEQ ID NO: 137079 - protein, 138 aa, Unknown
  Bacterial polypetide isolated from the Sargasso Sea
MRKPVWLFSEGSLKRRDLLGNKGANLCEMTSLGMPVPFGFIITTQTHLEYQRLRQRIPEGTMEEVKAALLKMEIRQGAEFGNPVNPLLVSVRSGASVSMPGMMDTLLNLFFHRIGIDYVSCSPHLVPIARLTTAKASI

SEQ ID NO: 137080 - protein, 332 aa, Unknown
  Bacterial polypetide isolated from the Sargasso Sea
MKKFVFNFNSKESKKLKNSKNILGGKGANLVEMGKLGLPVPPGFTISTEVCELFYKNNKKLNSKIIKEISKELKNIEKKSEKKFGDLINPLLVSVRSGARVSMPGMMDTILNLGLNDKTVIALSKKTSNMRFAKDSYRRFIQMYSNVVLGIENYHFEELIENYKLTKGVFLDTDLDENDWDGLIKDFKNIVRKKTKKDFPQDVKQQLIGAISAVFLSWESHRSKVYRKLNQIPSNWGTAVNVQSMVFGNMGDNCATGVVFTRNPSDGSKEIYGEYLINAQGEDVVAGTRTPQHITKKSRIKSKEKLLSMEESMTSVYSKLKKILLKLEKHYK

SEQ ID NO: 137081 - protein, 337 aa, Unknown
  Bacterial polypetide isolated from the Sargasso Sea
MKKLVFNFTSKETKNIKNPKNILGGKGANLAEMGRMGFPVPSGFTISTEACDLFYKNKKKIKKNILKQIKKEIKKIEVQTGKKFGDSTNPLLVSVRSGARTSMPGMMDTILNLGLNDKTVKALAKKTSNGRFANDSYRRFIQMYANVVMGVENYHFEELIENYKLTKGVLLDTELDVEDWSGLIKDFKNVVKEKTNKNFPQDINEQLIGAISAVFLSWESNRAKVYRKLNQIPSEWGTAVNVQSMVFGNMGNDCATGVVFTRNPSTGKKEIYGEYLINAQGEDVVSGTRTPQYITKKGRENAGSKDSSMEESMPKVFKQLDKILKTLEKYYKDMQDV

SEQ ID NO: 137082 - protein, 410 aa, Unknown
  Bacterial polypetide isolated from the Sargasso Sea
MKKLILNFNSKDTKKIKNPKNFLGGKGANLSEMGRMGLPVPPGFTISTKVCEFFFKNKKKLDKKIINQIKNELKIIEKSVSKKFGDLKNPLLLSVRSGARVSMPGMMDTILNLGLNDKTVKALASKTSNGRFAKDSYRRFIQMYGNVVMGIESYHFEELIENYKLTKGVLLDTDLDEHDWDGLIEDFKRMVKEKAKKDFPQDVYEQLLSAISSVFLSWESNRAKVYRKLNQIPSEWGTAVNVQSMVFGNMGEDCATGVVFTRNPSDGLNEIYGEYLINAQGEDVVAGTRTPQYITKKARQKAKSTAFSMEEAMPKVYRELYKILKKLEIYYKDMQDVEFTVENKKLWMLQTRSGKRTAKSAIKIAADMVKEKLISKKEAILRIDPNSLDSLLHPTLDENSLINVIAPWST

SEQ ID NO: 137083 - protein, 314 aa, Unknown
  Bacterial polypetide isolated from the Sargasso Sea
MEGKGKNLAEMGRLGLPVPPGFTISTEVCHLFYKNKKKLNSNIIKEINKELTLIEKEAKKKFGDLKNPLLVSVRSGARVSMPGMMDTILNLGLNDHTVIALAKKTSNMRFAKDSYRRFIQMFSTVVLGVESYFFEELIDNYKLTKGVLLDTELDEHDWDNLIKDFKILVREKTKKEFPQDVKNQLIGAICSVFLSWESHRAKVYRKINHIPSDWGTAVNVQSMVFGNMGDDCATGVVFTRNPSDGAKDIYGEYLINAQGEDVVAGTRTPQHITKKARTNSKDKKPSMEEAMPAVYKKLKNILLKLEKYYKDMQD

SEQ ID NO: 137084 - protein, 536 aa, Unknown
  Bacterial polypetide isolated from the Sargasso Sea
MVKNKPVYAFEEADSKKRMLLGGKGAGLSEMTRLKLPVPPGFTITTEVCNKYYDNGRKLPKDVMPAVMKNIVKMEKKTGKKWNSTKNPLLVSVRSGAAISMPGMMDTILNLGLNEKTVEGFAVQTKNPRFSWDSYRRFIQLFGKVVFGVNDEKFDHVLDSAKSKQGVTDDSKLNVESLKKIVKEYKKICENHTKRKFPDTPNEQLGLAIEAVFKSWMGERAVVYREKNGITKDIANGTAVNVVTMVFGNMGDDSATGVVFTRNGHNGKREIEGEYLTNAQGEDVVAGVRTGKNVELLKKEMPKSHKELSNACEKLEKHFREPQDIEFTIEQGKFYLLQTRTAKMSAGALVKTSVDMVKEKLIDRNRSLTRIPAQQLEALLHRTMDESKVKDHKQLAKGIAASPGAASGIAVFDVKKAIELGEAGKKVILIRKETKPEDVPAFFSAEGILTSLGGKSSHAAIVSRGMGKPCIVGCAELKINYENNTCTANGITVKENEMISIDGSIGTVLIGEVPTVEPKVTKDFKQFLAGHKIQNN

SEQ ID NO: 137085 - protein, 207 aa, Unknown
  Bacterial polypetide isolated from the Sargasso Sea
GILYPEITEMQTRAIFEAAAQVQKSKKRIKVNPEIMIPLVGFQEELADQLTIVHRVAKEVMKARKVRINYIVGTMIEVPRAAITADEIAKEADFFSFGTNDLTQTTLGLSRDDMGLFYDEYQRKEIYHKNPFASLDKTGVGKLVNYAAHKGRQTKPGLKLGICGEHAGDPSSIDFCHKAGLNYVSCSPPRVPVARLAAAQAKLRDKK

SEQ ID NO: 137086 - protein, 252 aa, Unknown
  Bacterial polypetide isolated from the Sargasso Sea
MVFNFKSKITKKFKFPKNILGGKGANLAEMGRLGFPVPSGFTISTNACEAFYKNNKKLDKKVLIEIKKELSQIEKEIGKKFGNTIDPLLLSVRSGARVSMPGMMDTILNLGLNDITVEALAKKTKNNRFAKDSYRRFIQMYSSVVLNIESYKFEDLIENYKLTKGVLLDTDLETSDWEALIRDFKNVVKQETKKDFPQNVEDQLINAVSSVFLSWESSRAKTYRKINRIPSDWGNAVNVQSMVLEIWEINVQ

SEQ ID NO: 137087 - protein, 336 aa, Unknown
  Bacterial polypetide isolated from the Sargasso Sea
MKKLIFNFSSKESLNPKKAKSILGGKGANLAEMGKLGLPVPPGFTISTEVCELFYKNKKKLNSKIIKQINLELKNIEKQTKKKFGGLTNPLLVSVRSGARVSMPGMMDTILNLGLNDNTVLALSKQTSNIRFAKDSYRRFIQMYSNVVLNIENYHFEELIENYKLTKGVLLDTELDENDWDGLIKDFKDLVIEKTKKEFPQDVKQQLIGAISSVFLSWESHRAKVYRKLNQIPSDWGTAVNVQSMVFGNMGNNSATGVVFTRNPSDGSNEIFGEYLINAQGEDVVAGTRTPQHITRKARLNSKEKLLSMEESMPSIYKDLKKILFRLEKHYRDMQD

SEQ ID NO: 137088 - protein, 316 aa, Unknown
  Bacterial polypetide isolated from the Sargasso Sea
MYGNVVLGIESHLFEEMIDNYKLTKGVLLDTELNSEDWDGLIKNFKELISEKTKKSFPQDVNEQLFGAIKAVFLSWNSKRAKTYRKFNHIPDEWGTAVNIQSMVFGNMGDDCATGVAFTRNPSTGENSFFGEYLINAQGEDVVAGSRTPRYITKKAKLDAGAKEASMEETMPKVFKELKGVFLKLEKHYRDMQDIEFTVENNKLWMLQTRSGKRTAKAAIKIAVDMVKEKLISKKEAILRIDPNTLDTLLHPTLDEKVEKKVIAKGLPASPGAASGKVVFNADDAESMNNQKEDTILVRVETSPEDIHGMHAAKGI

SEQ ID NO: 137089 - protein, 305 aa, Unknown
  Bacterial polypetide isolated from the Sargasso Sea
GVLLDTDLDESDWDGLIINFKELVKKEKKINFPQDVKEQLLGAINAVFLSWDSQRAKTYRKLNQIPDHWGTAVNVQAMVFGNMGDDCSTGVAFTRNPSTGENSFFGEFLINAQGEDVVAGTRTPQYITKKAKKDSGSKAPSMEEAMPKVYKELTNVFLKLERHYKDMQDIEFTVENNKLWMLQTRSGKRTAKAAIKIAVDMVKEKLISKKEAIKRIDPNTLDTLLHPTLDEKVEKEVIASGLPASPGAASGKVVFTADEAEKLNGMMQDTILVRLETSPEDIHGMHAAKGILTARGGMTSHAAVV

SEQ ID NO: 137090 - protein, 288 aa, Unknown
  Bacterial polypetide isolated from the Sargasso Sea
VGDVIIKEGDWITMNGTTGVVYLNQLDLIPADPDRNEEYKELMTWADEIRKLKIRTNAESPEDAKQAIKFGAEGIGLCRTEHMFFDETRILAMRKMILADNDDDRRDAVMGLLPFQKEDFKGTLEAMEGKPVTIRLLDPPLHEFITLDNEQIKELADSIGIDSSIVSQRISSLHELNPMLGHRGCRLGIAYPVITEMQASAILEAAAELTKDGLNVLPEIMIPLVGTVKEYIDQERIVRKVASEVESKYDIKLNYLVGTMIELPRACLTADEIAEHAEFFSFGNNDLT

SEQ ID NO: 137091 - protein, 316 aa, Unknown
  Bacterial polypetide isolated from the Sargasso Sea
KNKKKINKNLISQIKKELKLIEKDVSKKFGDLKNPLLLSVRSGARVSMPGMMDTILNLGLNDKTVKALAIKTSNGRFAKDSYRRFIQMYGNVVMGVEGYHFEELIENYKLTKGVLLDTDLDESDWDGLIEDFKRTVREKTKKDFPQDVHEQLLGAISAVFLSWESNRAKVYRKINQIPAEWGTAVNVQSMVFGNMGDDCATGVVFTRNPSDGSNEIYGEYLINAQGEDVVAGTRTPQYITKKARRDAKVKELSMEESMPKVFKELQKILKKLEIHYKDMQDVEFTVENSKLWMLQTRSGKRTAKSAVKIAVDMVKK

SEQ ID NO: 137092 - protein, 123 aa, Unknown
  Bacterial polypetide isolated from the Sargasso Sea
IKAKEIAKHAEFFSFGTNDLTQTTFGISRDDSGKFLNDYIDNKIFSIDPFVSIDEGVEDLIEIAVSKGKKQNKNIKLGICGEHGGDPKSIFFCSKVGLNYVSCSPYRVPIARLTAAQAEINQN

SEQ ID NO: 137093 - protein, 224 aa, Unknown
  Bacterial polypetide isolated from the Sargasso Sea
RVADLIETNPMLGHRGCRLAITYPEIPEMQAKAIFEACVEIYSTKKQIICPEIMVPLVSTKRELDIVKDVIDRAAKEVMAKSGINLNYTVGTMIELPRAALRSAEIAEAADFFSYGTNDLTQTTFGISRDDSSKFLQEYVEKSILEKDPFVSIDSDGVGELIELSSKRGRSTKSDIKLGICGEHGGDPNSIAFCALNKLDYVSCSPYRVPIARLSAAQAEVKKS

SEQ ID NO: 137094 - protein, 117 aa, Unknown
  Bacterial polypetide isolated from the Sargasso Sea
AKHAEFFSFGTNDLTQTTFGISRDDSGKFLNDYIENKIFDIDPFVSIDDGVGDLIEIAVSKGKKQNKKIKLGICGEHGGDPKSIDFCSKTGLNYVSCSPYRVPIARLAAAQAELKKD

SEQ ID NO: 137095 - protein, 340 aa, Unknown
  Bacterial polypetide isolated from the Sargasso Sea
SVKISVDMVSEGLISKEESLNLIDPTRINELMLPKFSDEEEDLSLKCKAYIDSGLNASPGAAVGKIVFDPTEAVEMKNLGEKVILVRDETSPDDIHGMHASTGVLTAKGGATSHAAVVARGMGKPCITGCDSLHIDQQNKRCTIGNQTFQLYDIISIDGSSGEIFTGTMKTITPSPSDTKELSTILEWADSTRKLGIWANADTPEDASKAIELGAEGIGLCRTEHMFFGEERLPWVQQLIMSTSSISTNGNNQQNKYQESILKMLEFQIQDFYEILKVMDNKPVVIRLIDPPLHEFLPSYEKLIDQIYEEKMNNNQGELLDQLEDILAIVKDIKESNPML

SEQ ID NO: 137096 - protein, 295 aa, Unknown
  Bacterial polypetide isolated from the Sargasso Sea
LNHIPSEWGTAVNVQSMVFGNMGNDCATGVVFTRNPSDGSNNIYGEYLINAQGEDVVAGTRTPQYITKKAKREAKVEALSMEESMPKVYLQLHKILKKLEAHYKDMQDVEFTVENEKLWILQTRSGKRTAKSAVKLAVDMVKEKLITKKEAILRIDPNSLDTLLHPTLDEKSSIKIIANGLPASPGAASGKVVFTSEEAERLNNMMQDVILVRVETSPEDIQGMHAAKGILTARGGMTSHAAVVARGMGRPCVSGSSEIDIDYEKKIFKTATVEIKEGDIITIDGSSGRIILGSV

SEQ ID NO: 137097 - protein, 302 aa, Unknown
  Bacterial polypetide isolated from the Sargasso Sea
QGEAAILVRIETSPEDISGIHDSAGVMTVRGGMTSHAAVIARGLGLPCVVGVNSVSINLSEKTLTSQDGRKFLEGEKITLDGTTGQVLGGSAEMVQPVISGAFSKLMDWADKYRTIGVRANADSPQEALLAKNFGADGIGLCRTEHMFFEKQKLLVMREMILADTDKTRNESLKKLLPMQRDDFIKFFQIMDGMPVTIRLLDPPLHEFLPHSEEEMMILAKSMNLSLKKIVDRSREIQEFNPMLGKRGVRLGVTLPEIYDMQVRAIFEAVSYVNGKSSYTVVPEIMIPLVSTNREVELIKSR

SEQ ID NO: 137098 - protein, 294 aa, Unknown
  Bacterial polypetide isolated from the Sargasso Sea
NNKRCMLDTELNSDDWDGLIKNFKNLILEKTNKNFPQDVYEQLFGAIKAVFLSWESKRAKTYRKFNHIPGDWGTAVNVQSMVFGNMGDDCATGVAFTRNPSTGENKFFGEYLINAQGEDVVAGSRTPRYITKQAKENAGAKEESMEEAMPKIFKELKNVFMKLEKHYRDMQDIEFTVENNKLWMLQTRSGKRTAKAAIKIAVDMVKEKLISKKEAILRIDPNTLDTLLHPTLDEKVEKKVIAKGLPASPGAASGKVVFSADEAEKMNNQKEDTILVRVETSPEDIHGMHAAKGI

SEQ ID NO: 137099 - protein, 272 aa, Unknown
  Bacterial polypetide isolated from the Sargasso Sea
MDWCNEFKRLEIRANAETTIDTAKALEFGAEGIGLCRTEHMFFEGERILPMREMIMSDSKQGRKRALKKLIKYQISDFESLFKLLNEKPITVRLLDPPMHEFLPKSDLEISQLANEIGVSPMHVNEILMRLSESNPMLGHRGVRLGLSYPEIYEMQVEAIFRAVHLVFENDNFKVTPEVMIPLVMNSNELSEMKDILKKKIKKIEKELNYNFDYTIGTMIELPSAALSSSEIAKDADFFSFGNNDLTQTTLGLSRDDASKFLGEYVEKQFLI

SEQ ID NO: 137100 - protein, 269 aa, Unknown
  Bacterial polypetide isolated from the Sargasso Sea
DFPQDVNEQLLGAISAVFLSWDSKRAKIYRKLNHIPAEWGTAVNVQSMVFGNMGDDCATGVVFTRNPSDGENEIYGEYLINAQGEDVVAGTRTPQYITKKARKDSKAKALSMEESMPKVYKQLHKILKKLEKHYKDMQDVEFTVENKKLWMLQTRSGKRTAKSAVKIAVDMVKEKLISKKEAVLRIDPHSLDTLLHPTLDEKSSINVIANGLPASPGAASGKVVFTSEEAERLTSMMQDTILVRVETSPEDIQGMHAAKGILTARGGMT

SEQ ID NO: 137101 - protein, 310 aa, Unknown
  Bacterial polypetide isolated from the Sargasso Sea
TILNLGLNDNTVIALAKKTSNLRFANDSYRRFIQMYSNVVMGIEGYHFEDIIENYKLTKGVLLDTELDEYDWKALIKDFKNIVKEKTKKDFPQNVKEQLVGAISAVFLSWESNRAKVYRKLNHIPSNWGTAVNVQSMVFGNMGNDCATGVVFTRNPSDGSKNIYGEYLINAQGEDVVAGTRTPQHITKKARVESKETLKSMEEAMPATYKQLKNILTKLEKHYKDMQDVEFTVENKKLWLLQTRSGKRTAKSAVKIAVDMVKEKLITKKDAILRIEPNSLDTLLHPTLDEKANLEVIGSGLPASPGAASE

SEQ ID NO: 137102 - protein, 224 aa, Unknown
  Bacterial polypetide isolated from the Sargasso Sea
KSRTEELHEHNPMLGHRGCRLGISFPEIYEMQCRAIFEALVECKKKKLKSTMPEIMIPLVSTEAEIKIMKDLVIRVAKKVQDENNTKISFLVGTMIELPRAAIKAKDIAKHAEFFSFGTNDLTQTTFGISRDDSGKFLNDYIENKIFDIDPFVSIDEGVGDLIEIATLKGRKQNKKIKLGICGEHGGDPKSINFCSKTGLNYVSCSPYRVPVARLAAAQAELKK

SEQ ID NO: 137103 - protein, 323 aa, Unknown
  Bacterial polypetide isolated from the Sargasso Sea
VVMGVESHLFEKLIDNYKLTKGVLTDTELSSEDWDGLIKNFKNLIIDKTNKSFPQDVYEQLFGAIKAVFLSWESKRAKTYRKLNHIPGHWGTAVNVQSMVFGNMGDNCATGVAFTRNPSTGENKFFGEYLINAQGEDVVAGSRTPRYITKKAKENAGATEASMEETMPKVFNELKNVFVKLEKHYRDMQDIEFTVENKKLWMLQTRNGKRTAKAAIKIAVDMVKEKLISKKEAILRIDPNTLDTLLHPTLDEKIEKKVIAKGLPASPGAASGKVVFTADEAERMNIQKEDTILVRVETSPEDIHGMHAAKGILTSRGGMTSHA

SEQ ID NO: 137104 - protein, 166 aa, Unknown
  Bacterial polypetide isolated from the Sargasso Sea
VSTEAEIKIMKDLVIKTAKKVQEESGSKIEFLVGTMIELPRAAIKAKDIAKHAEFFSFGTNDLTQTTFGISRDDSGKFLNDYIDNKIFKVDPFVSIDDGVKDLVEIGVKKGKKQNKKIKLGICGEHGGDPKSIDFCSKVGLDYVSCSPYRVPIAKLAAAQAELKKE

SEQ ID NO: 137105 - protein, 170 aa, Unknown
  Bacterial polypetide isolated from the Sargasso Sea
GIPLVSTDTELKILRNIVDKIAEEKEKENKIKLNYIVGTMIELPRAALQAKQISKYADFFSFGTNDLTQTTLGISRDDSGKFLNDYIDSKIYDVDPFVSIDQSGVGELVEMASIRGRKTNKKIKLGICGEHGGDPKSIKFCSKKGLNYVSCSPFRVPVARLAAAQAELTK

SEQ ID NO: 137106 - protein, 173 aa, Unknown
  Bacterial polypetide isolated from the Sargasso Sea
PEIMIPLVSTEDELGIMRKLVNRVADQLQQENKVKINYFVGTMIELPRAALRAAPISKYADFFSFGTNDLTQTTFGISRDDSGKFLNDYIDHKIFDEDPFVSIDKDGVGELVRIASQRGKKQNKKLKLGICGEHGGDPRSIEFCSKNGLNYVSCSPFRVPIARLAAAQAELRR

SEQ ID NO: 137107 - protein, 297 aa, Unknown
  Bacterial polypetide isolated from the Sargasso Sea
TETSPEDINGMNVSSGILTTRGGMTSHAAVVARGMGKPCISGAGDLRVDLTSKSLLWVGGQLIEGDTITIDGATGSVYLDEVATSEPQLTGDFSRLMNWADQYRTLGVRTNAETPEDALIAKKFGAEGIGLSRTEHMFFDPKRIIHMREMILASDTDTRRKALEKLLPYQCDDFYKLFKIMEGLPVTIRLLDPPLNEFLPSTENELKEVAEAAGAKLKDLQLRKIELDEVNPMLGHRGCRLGITFPEVYEMQARAIFLAAARLIEIKEKVNLEIMIPLIVDKPGIRYLERISEKVAR

SEQ ID NO: 137108 - protein, 260 aa, Unknown
  Bacterial polypetide isolated from the Sargasso Sea
MFFDEERILSVREMILSKTKEDRAKALDKLLPHQKKDFTEIFRIMNGLPVTVRLLDPPLHEFLPRTNKEIGELAEIVNLTVKEVETRIEELHEQNPMLGHRGCRLAISFPEIYEMQCRAIFEALCELKKNKIKSAFPEIMIPLVSTEAEIKIMKDLVKRIASMVQKENKLKIDFMVGTMIELPRAAIKAKEIAKHAEFFSFGTNDLTQTTFGISRDDSGKFLNDYLENKIFSIDPFVSIDEGVSDLFEIAVAKGKNQNKK

SEQ ID NO: 137109 - protein, 308 aa, Unknown
  Bacterial polypetide isolated from the Sargasso Sea
LQKTSNDRFAKDSYRRFIQMYANVVLNIESYNFEELIENYKLTKGVLLDTELDASDWNGLIKDFKNIVKEKTKKEFPQDVSEQLTGAISSVFLSWESKRAKVYRKLNQIPSYWGTAVNVQSMVFGNMGADCATGVVFTRNPSNGIKEIYGEYLINAQGEDVVAGTRTPQYITKRARKESGSKEDSMEESMPKVFQQLIKILRTLEKHYKDMQDVEFTVENQKLWILQTRSGKRTAKSAVKIAADMVKEKLISKKEAVLRIDPNSLDTLLHPTLDEKSNIKVIAKGLPASPGATSGKVVFSSDEAERLN

SEQ ID NO: 137110 - protein, 238 aa, Unknown
  Bacterial polypetide isolated from the Sargasso Sea
AKKKKKLLDRVEELHEFNPMLGLRGCRLGITMPEITKMQARAIFEAAIIVSKRKIKVYPEIMVPLVGMVSEIKFQKDIINKIAKEVLGKKKINYLVGTMIEVPRAAAVADQIAKEAEFFSFGTNDLTQTVFAYSRDDSVKFINAYMETKVDIDGKTTEILERDPFTSIDVRGVGEFMKIGLERGRSTRKNLKIGICGEHGGDPASIEFCHQIGLDYVSCSPFRVPIARLAAARIALKS

SEQ ID NO: 137111 - protein, 303 aa, Unknown
  Bacterial polypetide isolated from the Sargasso Sea
MIFIGEYLINAQGEDVVAGTRTPQYITRKARKEAKVDDVSMEESMPEVYHELYKILKKLEKHYKDMQDVEFTVESGKLWILQTRSGKRTSKSAVKIAVDMVKEKLITKNDAVLRVDPNSLDTLLHPTLDEKSSTKVIANGLPASPGAVSGKVVFTSEEAERLNDMMQDTILVRIETSPEDIQGMHAAKGILTSRGGMTSHAAVVARGMGRPCVSGSSEIEINYDKKVFKTSLAEVKEGETITIDGSTGRIILGTVPTIKPEISGDFSKLMSWADKIRKLKVRTNSETPLDTKTARDFGAEGIG

SEQ ID NO: 137112 - protein, 183 aa, Unknown
  Bacterial polypetide isolated from the Sargasso Sea
TKKIKSVLPEIMIPLVSTEAEINIMRNLVNRVAKKVQKDKNFKIDYLVGTMIELPRAAIKAEDIAKHADFFSFGTNDLTQTTFGISRDDSGKFLNDYIENKIFEVDPFVSIDEGVGDLIKLASINGKKQNSKIKLGICGEHGGDPKSINFCSKIGLNYVSCSPYRVPIARLAAAQANLIKKIK

SEQ ID NO: 137113 - protein, 294 aa, Unknown
  Bacterial polypetide isolated from the Sargasso Sea
IGLFRIEHMFYGEGSEEPLFHLQEMIMANSQEERRVALDSLFPFMKNDIKETLRAMKGLPVTIRLMDPPLHEFIPHDAKRQKKLANALGINAKELERRSEALKESNPMMGHRGVRLGITHPEITEMQARAILEAAAELTAENVKTFPEIMIPLTGMETEYNHQEKIVREVAAKIEGLDNYMVGTMMEIPRASLVANRIAETAEFFSFGTNDLTQMTFGFSRDDTGGFMPAYLELELLPEDPFASLDEGVCELVKMGIEKGRNTKPNLKVGICGEHGGEPKSVHFCHNVGMDYVS

SEQ ID NO: 137114 - protein, 184 aa, Unknown
  Bacterial polypetide isolated from the Sargasso Sea
ELKKQKVKAAFVEIMIPLVSTESELKILRALVNKIANEIEKENKLKLEYMVGTMIELPRAALQAKSISKHADFFSFGTNDLTQTTFGISRDDSGKFLNDYIDNKIFDVDPFVSIDQNGVGELVQIASSRGRKTNKNIKLGICGEHGGDPKSIEFCSRTGLNYVSCSPFRVPVARLAAAQAELRK

SEQ ID NO: 137115 - protein, 292 aa, Unknown
  Bacterial polypetide isolated from the Sargasso Sea
VFGNMGNDCATGVVFTRSPSDGNNEIYGEYLINAQGEDVVAGSRTPQYITKKTEKKSSSKKNSMEEIMPKVFNQLKKILKTLEKHYKDMQDVEFTVENSKLWILQTRSGKRTPKSAIKIAADMVKEKLITKKEAILRINPNSLESLLHPTLDEKSEFNVIAKGLPASPGAASGKVVFNSEEAERLNNMMQDTILVRVETSPEDIHGMHAAKGILTSRGGMTSHAAVVARGMGRPCVSGSSEINIDYEKKLFKTNKHEIKEGDTITIDGSTGRIIIGKVKTVKPEISGDFSKF

SEQ ID NO: 137116 - protein, 293 aa, Unknown
  Bacterial polypetide isolated from the Sargasso Sea
PAAVVARGMGRPCVSGTSDIEIDYDNKNFKTKDHVIKEGELITIDGSTGRIIVGEVKTAKPEISGDFSIIMNWADKIRKLKVRTNSETPMDSKVARDFGAEGIGLCRTEHMFFDEERILSVRQMILSKSKEDRATALDKLLPHQKKDFFEIFKIMQGLPVTVRLLDPPLHEFLPKSSREIEDVANSLNLAKNEIQLRIAELHEQNPMLGHRGCRLGISFPEIYEMQCRAIFQALIELKKNKIRSAFPEIMVPLVSTEAEIKIMKDLVIKTARKVQNENKIKINFLVGTMIELP

SEQ ID NO: 137117 - protein, 136 aa, Unknown
  Bacterial polypetide isolated from the Sargasso Sea
HNDEIPRAAIKAQDIAKHAEFFSFGTNDLTQTTFGISRDDSGKFLSDYLENKIFSIDPFISIDDGVKDLIRMAVLAGKKKNKKIKLGICGEHGGDPKSINFCSTIGLDYVSCSPYRVPIARLAAAQAELKKKRQNK

SEQ ID NO: 137118 - protein, 263 aa, Unknown
  Bacterial polypetide isolated from the Sargasso Sea
MLDTDLDESDWDGLIEDFKRTVREKTKKDFPQDVHEQLLGAISAVFLSWESNRAKVYRKLNQIPAEWGTAVNVQSMVFGNMGDDCATGVVFTRNPSDGLNEIYGEYLINAQGEDVVAGTRTPQYITKKARRDAKVKELSMEESMPKVFIELQKILKKLETHYKDMQDVEFTVENSKLWMLQTRSGKRTAKSAVKIAVDMVKEKLISKKEAVLRIDPNSLDTLLHPTLDEKSSINIIANGLPASPGAASGKVVFTSEEAERLTA

SEQ ID NO: 137119 - protein, 239 aa, Unknown
  Bacterial polypetide isolated from the Sargasso Sea
VEDVSNSLKLTKNEIEARITELHEQNPMLGHRGCRLGISYPEIYEMQCRAIFEALIELKRKKIKSAFPEIMIPLVSTEAEIKIMKDLVIGIAKKVQNDNKTKINFLVGTMIELPRAALKANDIAKHAEFFSFGTNDLTQTTFGISRDDSGKFLNDYIENKIFDIDPFVSIDDGVGDLIQIAFQKGKKQNKKIKLGICGEHGGDPKSIHLCSKIGLNYVSCSPYRVPIARLAAAQAEILK

SEQ ID NO: 137120 - protein, 179 aa, Unknown
  Bacterial polypetide isolated from the Sargasso Sea
NKIKSAFPEIMIPLVSTEAEIQIMKDLVKRIANMVQKENKLKIDFMVGTMIELPRAAIKAKEIAKHAEFFSFGTNDLTQTTFGISRDDSGKFLNDYLENKIFSIDPFISIDEGVSDLVEIAVEKGKSQNKKIKLGICGEHGGDPKSISFCAKAGLNYVSCSPYRVPIARLAAAQAELKK

SEQ ID NO: 137121 - protein, 244 aa, Unknown
  Bacterial polypetide isolated from the Sargasso Sea
MTSHAAVVARGMGRPCVSGSGEINIDYDTKEFVAGDLTIKEGDIITIDGGSGKVMKGLVPTVKPDISGYFSTLMKWADQFRKLKIRTNAETPKDTKTARNFGAEGIGLCRTEHMFFDEERILSVRQMILSKNLDDRKIALTKLLPYQKNDFKEIFKIMKSLPVTVRLLDPPLHEFLPKTDKDMEEVARSLNLGAKEIKNRVVELHELNPMLGHRGCRLGISFPEIYEMQCRAIFTALVECKKKG

SEQ ID NO: 137122 - protein, 205 aa, Unknown
  Bacterial polypetide isolated from the Sargasso Sea
VAGTRTPQHITKKARIKSKEKLLSMEESMPAIYRQLKKILFKLEKHYKDMQDVEFTVENKKLWMLQTRSGKRTAKSAVKIATEMVKEKLISKKEAVLRIEPNSLDALLHPTLDEKSNIKVIAKGLPASPGAASGKAVFSSDEAQRLSEMMQSTILVRVETSPEDIHGMHAAKGILTARGGMTSHAAVVARGMGRPCISGSTEIEI

SEQ ID NO: 137123 - protein, 121 aa, Unknown
  Bacterial polypetide isolated from the Sargasso Sea
AKDIAKHAEFFSFGTNDLTQTTFGISRDDSGKFLNDYIENKIFEIDPFVSIDEGVGDLIKIATYKGRKQNKKIKLGICGEHGGDPKSIEFCAKTGLDYVSCSPYRVPVARLAAAQAQLKKN

SEQ ID NO: 137124 - protein, 248 aa, Unknown
  Bacterial polypetide isolated from the Sargasso Sea
KSALEIDDISKSLNLSIKDIEGRIEEQHEQNPMLGHRGCRLGISFPEIYEMQIRAIFEALVECKKKKIKSTMPEIMIPLVSTEAEIKIMKDLVINVARKVQNENKMKIKFLVGTMIELPRAAIKANDIAKYAEFFSFGTNDLTQTTFGISRDDSGKFLNDYIENKIFDIDPFISIDDGVGDLIKIAATRGKKQNKKIKLGICGEHGGDPKSIEFCSKVGLDYVSCSPYRVPVARLAAAQANLKNIVAR

SEQ ID NO: 137125 - protein, 225 aa, Unknown
  Bacterial polypetide isolated from the Sargasso Sea
ESRIDELHEQNPMLGHRGCRLGISFPEIYEMQCRAIFEALAELKKEKIKSAFPEIMIPLVSTEAEIKIMKDLVIRIASEVQKEHKLKIEFMVGTMIELPRAAIKAKDIAKHAEFFSFGTNDLTQTTFGISRDDSGKFLNDYLDNKIFSIDPFISIDDGVGDLIKIAVEKGKSQNKNIKLGICGEHGGDPNSILFCSKAGLNYVSCSPYRVPVARLAAAQAELKNK

SEQ ID NO: 137126 - protein, 226 aa, Unknown
  Bacterial polypetide isolated from the Sargasso Sea
KDRIAELHEENPMLGHRGCRLGISFPEIYEMQCRAIFESTVELKKEKIKSSFIEIMIPLVSTESELKILRQLVNKIAKEIESKNKIKLDFIVGTMIELPRAALQAKSISKHADFFSFGTNDLTQTTFGISRDDSGKFLNDYIDNKIFDVDPFVSIDENGVGELVEIASKRGRKVNKKIKLGICGEHGGDPKSIEFCSKTGLDYVSCSPFRVPIARLAAAQAELNKQ

SEQ ID NO: 137127 - protein, 225 aa, Unknown
  Bacterial polypetide isolated from the Sargasso Sea
GVRANADTPQEAALAQSFGVDGIGLCRTEHMFFEQDRLIVMREMILAKSEAARKNALRRLLPMQREDFIKLFRIMLGSPVTIRLLDPPLHEFLPHSEDEMRLIAASMNVPLSDVVERSKDLKEFNPMLGKRGVRLGVTMPEIYEMQAQAIFEASMEINNGCEDTVTPEIMIPLVSVTREVELIKNRIKNVAKNIESVSNSLIKYKLGVVVETPRAALRAGDISAS

SEQ ID NO: 137128 - protein, 164 aa, Unknown
  Bacterial polypetide isolated from the Sargasso Sea
WTVTEYVDQEKIVRKVASEVESKYDMKLNYLVGTMIELPRACLTADEIAEHAEFFSFGTNDLTQTTYGFSRDDIGSFLPEYLDRNILPGDPFQSLDVKGVGKLVSMAVKYGRDINSNLKIGICGEHGGDPKSIHFCKQNGLDYVSCSPFRVPIARLSAAQAEIS

SEQ ID NO: 137129 - protein, 137 aa, Unknown
  Bacterial polypetide isolated from the Sargasso Sea
LVGTMIELPRAAIKADDIAKHAEFFSFGTNDLTQTTFGISRDDSGKFLNDYIDNKIFTIDPFVSIDDGVKDLVEIAVSKGKKQNKKIKLGICGEHGGDPKSIKFCSKAGLNYVSCSPYRVPIARLAAAQAELLKNKN

SEQ ID NO: 137130 - protein, 225 aa, Unknown
  Bacterial polypetide isolated from the Sargasso Sea
IFKTSSIEIKEGDLITIDGSTGRVIQGEVPKIKPEISGDFSKLMRWADSFRKLKIRTNSETSLDTKTARDFGAEGIGLCRTEHMFFDEERILSVREMILSKTKEDRNKALKKLLPHQKNDFIEIFKIMRSLPVTVRLLDPPLHEFLPRTEKEISEVANKLKLPIKEVESRISELHEQNPMLGHRGCRLGISFPEIYEMQCRAIFEALADLKKEKIKSAFPEDNDT

SEQ ID NO: 137131 - protein, 176 aa, Unknown
  Bacterial polypetide isolated from the Sargasso Sea
FPEIMIPLVSTETEIKLMKDLVINIAKKVQKENKTKIEFLVGTMIELPRAAIKADDIAKHAEFFSFGTNDLTQTTFGISRDDSGKFLNDYIDNKIFTIDPFVSIDDGVKDLVEIAVSKGKEQNKKIKLGICGEHGGDPKSIKFCSKAGLNYVSCSPYRVPIARLAAAQAELLKNKK

SEQ ID NO: 137132 - protein, 203 aa, Unknown
  Bacterial polypetide isolated from the Sargasso Sea
LSDIYEMQCRAIFEALSELKKNKQRFAFPEIMIPLVSTEAEIKIMKDLVIRIAGQVEKENKIKVDYLVGTMIELPRAAVKAKDIAKHAEFFSFGTNDLTQTTFGISRDDSGKFLNDYINNKIFTIDPFVSIDEGVEELIEIAVSKGKRQNKHIKLGICGEHGGDPKSIAFCSEVGLNYVSCSPYRVPIARLAAAQAELKKKKI

SEQ ID NO: 137133 - protein, 212 aa, Unknown
  Bacterial polypetide isolated from the Sargasso Sea
MLGHRGCRLGISFPEIYEMQCEAIFKALSELKKNKQKFAFPEIMIPLVSTEAEIKIMKDLVINTARKVQKENKVKIEFLVGTMIELPRAAIKAKDIAKHAEFFSFGTNDLTQTTFGISRDDSGKFLNDYIENKIFSIDPFISIDEGVEDLVEIAVTKGKKQNKKIKLGICGEHGGDPKSIYFCSKIGLNYVSCSPYRVPIARLAAAQAEINK

SEQ ID NO: 137134 - protein, 188 aa, Unknown
  Bacterial polypetide isolated from the Sargasso Sea
EALSELKKNKQKFAFPEIMIPLVSTEEEIKIMKDLVISVAGQVEKENKIKVDYLVGTMIELPRAALKAKDIAKHAEFFSFGTNDLTQTTFGISRDDSGKFLNDYIDNKIFSIDPFISIDEGVKDLIEIAVIKGKKQNKKIKLGICGEHGGDPKSIHFCSRAGLNYVSCSPYRVPIARLAAAQAELKKN

SEQ ID NO: 137135 - protein, 274 aa, Unknown
  Bacterial polypetide isolated from the Sargasso Sea
NEFNTLMAWCDDFKKLSIRANAETINDTAKSLEFGADGIGLCRTEHMFFESERILPMREMIMANNKQGRKRALNKIIDFQINDFVEIFKLLKDKPITVRLLDPPMHEFLPKSDIEISELANSLRVSPAYVSEVLSRISESNPMLGHRGVRLGLSYPEIYEMQVEAIFKATYQIHQKEKIIIKPEIMIPLIMNASEFTKMKKIITKKIKSLKKESDFNFDYQLGTMIELPSAALNSSEIGEHADFFSYGTNDLTQTTLGLSRDDASKFLNEYVEK

SEQ ID NO: 137136 - protein, 268 aa, Unknown
  Bacterial polypetide isolated from the Sargasso Sea
MVVGDRTWNEGDWISLDGTAGEVLEGKVALQPAQVNEGPFAKILEWASEFRTMGVRTNADTPKDAAKALEFGAEGIGLCRTEHMFFEGDRIDAVREMMLAENLEDRKAGLRKILPYQRADFAGLFTVMEGRPVTIRLLDPPMHEFMPHDREAQDALAPKMGKTGDWIRSRVHALEESNPMLGHRGVRLGISYPEIYETQVEAIFEAACDVADEAEEARDIDGWRDRFHCDLEVEVMIPLVGKVKELSLMKERCVAVADAVLERRERLG

SEQ ID NO: 137137 - protein, 253 aa, Unknown
  Bacterial polypetide isolated from the Sargasso Sea
SPSEFLPTKQSEMEELAALLKLPVEDIERRVDSLREQNPMLGHRGVRLAMTFPEIYDIQVQAIIEAACTLSEQNVTVYPEIMIPLVGLAEELRIARERVVMVAESVIKEKGIEIEYSIGTMIELPRACVVADEIAQYADFFSFGTNDLTQTTLGLSRDDASKFLPSYIDNRILANDPFVRLETEGVGKLITLGIERGKLQKPDLKIGICGEHGGDPVSINFFEQEHFDYISCSPYRVPIARLAAAQAKLANDN

SEQ ID NO: 137138 - protein, 280 aa, Unknown
  Bacterial polypetide isolated from the Sargasso Sea
MKVIWDGLIEDFKRTVREKAKKDFPQDVHEQLLGAISAVFLSWESNRAKVYRKLNQIPAEWGTAVNVQSMVFGNMGDDCATGVVFTRNPSDGSNEIYGEYLINAQGEDVVAGTRTPQYITKKARIDAKVKELSMEESLPKVFKELQKILKKLEMHYKDMQDVEFTVENSKLWMLQTRSGKRTAKSAVKIAVDMVKEKLISKKEAVLRIDPNSLDTLLHPTLDEKSSINVIANGLPASPGAASGKVVFTSEEAERLTAMMQDTILVRVETSPEDIQGMHAA

SEQ ID NO: 137139 - protein, 114 aa, Unknown
  Bacterial polypetide isolated from the Sargasso Sea
ADFFSFGTNDLTQTTLGISRDDSGKFLNDYLDNKIFEVDPFVSIDQNGVGELVEIATSRGRRTNKNIKLGICGEHGGDPKSIDFCSRTGLNYVSCSPFRVPVARLAAAQAEINK

SEQ ID NO: 137140 - protein, 202 aa, Unknown
  Bacterial polypetide isolated from the Sargasso Sea
IYEMQCRAIFEALSELKLKKLNSAFPEIMIPLVSTEAEIKIMKDLVVRVAKEVQKNKGVKIDYLVGTMIELPRAALKAKEIAKHADFFSFGTNDLTQTTFGLSRDDSGKFLNDYIENKIFSVDPFVSIDDGVGDLVELAVEKGKKQNKKIKLGICGEHGGDPKSIKFCANTGLDYVSCSPYRVPVARLAAAQAELSKKKLNF

SEQ ID NO: 137141 - protein, 288 aa, Unknown
  Bacterial polypetide isolated from the Sargasso Sea
MSWESKRAKVYRKLNHIPSEWGTAVNVQSMVFGNMGDDCATGVVFTRNPSNGMNEIYGEYLINAQGEDVVAGTRTPQHITKKAREDAKEALLSMEETMPKVYKNLKNILIKLEKHYKDMQDVEFTVENNKLWMLQTRSGKRTAKSSVKIAVDMEREKLITKKEAVLRVQPNSLDTLLHPTLDETANLEVIAKGLPASPGAASGKVVFTSDEAERLNGMMQNTILVRVETSPEDINGMHAAKGILTARGGMTSHAAVVARGMGRPCVSGSSEIEIDYQNKIFKTKNNEI

SEQ ID NO: 137142 - protein, 175 aa, Unknown
  Bacterial polypetide isolated from the Sargasso Sea
VPEIMIPLVSTEAEIKIMKDLVIKVAKQVQNENKSKIEFLVGTMIELPRAALKAKELAKHAEFFSFGTNDLTQTTFGISRDDSGKFLNDYIENKIFDIDPFISIDDGVGDLIEIATLRGKKQNKKIKLGICGEHGGDPKSIEFCSKVGLDYVSCSPYRVPVARLSAAQAQLKKSS

SEQ ID NO: 137143 - protein, 295 aa, Unknown
  Bacterial polypetide isolated from the Sargasso Sea
RVDAHIPSEWGTAVNVQSMVFGNMGDDCATGVVFTRNPSNGINEIYGEYLINAQGEDVVAGTRTPQHITKKARKVAKETLLSMEESMPRVYKNLEKILIKLEKHYKDMQDVEFTVENNKLWMLQTRSGKRTAKSSVKIAVDMEREKLITKKEAVLRVQPNSLDTLLHPTLDETANLEVIAKGLPASPGAASGKVVFTSDEAERLNGMMQNTILVRVETSPEDINGMHAAKGILTARGGMTSHAAVVARGMGRPCVSGSSEIEIDYQNKIFKTKNNEIKEGDLITIDGSTGRIIKG

SEQ ID NO: 137144 - protein, 212 aa, Unknown
  Bacterial polypetide isolated from the Sargasso Sea
GAASGKVVFTAEDAERMKNQNEDTILVRVETSPEDIHGMHAAKGILTARGGMTSHAAVVARGMGRPCVSGSGEINIDYETKEFKVDDLTIKEGDVITIDGGTGKVMEGLVPTVKPDISGYFSTIMNWADEFRKLKIRTNAETPQDTQMARNFGAEGIGLCRTEHMFFDDERILSVRQMILSRHLDDRKIALEKLLPHQKNDFKKIFKIMKGL

SEQ ID NO: 137145 - protein, 199 aa, Unknown
  Bacterial polypetide isolated from the Sargasso Sea
ESNRAKIYRKLNQIPSEWGTAVNVQSMVFGNMGNDCATGVVFTRNPSDGSNDIYGEYLINAQGEDVVAGTRTPQYITNKAKKNAKVKEASMEQSMPKVYKELYKILKKLEKHYKDMQDVEFTVENNKLWILQTRSGKRTSKSAVKIAVDMVKENLILKKDAILRIDPNSLDTLLHPTLDEKSKIETIATGLPASPGAAS

SEQ ID NO: 137146 - protein, 267 aa, Unknown
  Bacterial polypetide isolated from the Sargasso Sea
YEKKLFKTKEHEIKEGDIITIDGSTGRIILGEVKTVKPEISGDFSKLMRWADSFRKLKIRTNSETPIDTKNAREFGAEGIGLCRTEHMFFEEERILYVRQMILSKSKTDRDEVLDKLLPHQKNDFIEIFKIMNGLPVTVRLLDPPLHEFLPKNENEIKDIAKSLELPTKEVEIRISELHEQNPMLGHRGCRLGISFPEIYEMQCRAIFEALSECKNKKYKSILPEIMIPLVSTEAEIKIMKNLVIRVASEVEKEKNIKLNFLVGTMI

SEQ ID NO: 137147 - protein, 235 aa, Unknown
  Bacterial polypetide isolated from the Sargasso Sea
ELANNIGIDSSIVNQRISSLHELNPMLGHRGCRLGIAYPVITEMQARAILEAAAELTNDGLNVLPEIMIPLVGTVTEYVDQEKIVRKVASEVESKYDIKLNYLVGTMIELPRACLTADEIAEHAEFFSFGTNDLTQTTYGFSRDDIGSFLPEYLDRNILPGDPFQSLDVKGVGKLVSMAVKYGRDVNPSIKIGICGEHGGDPNSIHFCKNNGLDYVSCSPYRVPIARLSAAQAEL

SEQ ID NO: 137148 - protein, 225 aa, Unknown
  Bacterial polypetide isolated from the Sargasso Sea
NESRISELHEQNPMLGHRGCRLGISFPEIYEMQCRAIFEALTDLKTKKIKSAFPEIMIPLVSTEAEIKIMKDLVIRTAKKVQEENKIKIKFLVGTMIELPRAAIKAKDIAKHAEFFSFGTNDLTQTAFGISRDDSGKFLNDYIENKIFDIDPFISIDEGVGDLIKIASDKGRKQNKNIKLGICGEHGGDPKSIYFCSDAGLDYVSCSPYRVPVARLAAAQAQLKK

SEQ ID NO: 137149 - protein, 302 aa, Unknown
  Bacterial polypetide isolated from the Sargasso Sea
RVETSPEDIHGMHAAKGILTARGGMTSHAAVVARGMGRPCVSGSGEINIDYETKEFKVGDLSIKEGEVITIDGGTGRVMKGLVPTVKPEISGYFSTIMKWADEFRKLKIRTNAETPQDTKMARNFGAEGVGLCRTEHMFFDDERILSVRQMILSKSLDDRKIALEKLLPHQKNDFKEIFKIMKGLPVTVRLLDPPLHEFLPKTDKDMEEVARSLNLGIKEIKNRVAELHELNPMLGHRGCRLGISFPEIYEMQCRAIFSALIECKKENIKSVIPEIMIPLVSTEDELGIMRKLVNRVADQLQ

SEQ ID NO: 137150 - protein, 223 aa, Unknown
  Bacterial polypetide isolated from the Sargasso Sea
RIAELHEENPMLGHRGCRLAISFPEIYEMQCRAIFEAIVELKKQKVKAAFVEIMIPLVSTESELKILRALVNKIAKEIEKENKFKLEYMVGTMIELPRAALQAKSISKHADFFSFGTNDLTQTTFGISRDDSGKFLNDYIDNKIFDVDPFVSIDQNGVGELVEIASSRGRKTNKNIKLGICGEHGGDPKSIEFCSRTGLNYVSCSPFRVPVARLAAAQAELTK

SEQ ID NO: 137151 - protein, 301 aa, Unknown
  Bacterial polypetide isolated from the Sargasso Sea
ISAVFLSWESKRARVYRKLNQIPSEWGTAVNVQSMVFGNMGNDCATGVVFTRNPSDGSNDIYGEYLINAQGEDVVAGTRTPQYITKKARKEAKVDDASMEESMPKVYHELYKILKKLEKHYKDMQDVEFTVESNKLWILQTRSGKRTSKSAVKIAVDMVREKLINKNDAVLRVDPNSLDTLLHPTLDEKSSIKVIANGLPASPGAVSGKVVFSSEEAERLNDMMQDTILVRVETSPEDIQGMHAAKGILTSRGGMTSHAAVVARGNGKTLCSGSSGIEIITIKKSLKHPRLRSKKVKQLLL

SEQ ID NO: 137152 - protein, 244 aa, Unknown
  Bacterial polypetide isolated from the Sargasso Sea
EQIKKMGELAEIVNLTVKEVETRIEELHEQNPMLGHRGCRLAISFPEIYEMQCRAIFEALCELKKNKIKSAFPEIMIPLVSTEAEIKIMKDLVKRIASMVQKENKLKIDFMVGTMIELPRAAIKAKEIAKHAEFFSFGTNDLTQTTFGISRDDSGKFLNDYLENKIFSIDPFVSIDEGVSDLVEIAVAKGKSQNKKIKLGICGEHGGDPKSISFCAKVGLNYVSCSPYRVPVARLAAAQAELKK

SEQ ID NO: 137153 - protein, 296 aa, Unknown
  Bacterial polypetide isolated from the Sargasso Sea
VVAGTRTPQYITKKARRDAKVKELSMEESMPKVFKELQKILKKLETHYKDMQDVEFTVENSKLWMLQTRSGKRTAKSAVKIAVDMVKEKLISKKEAVLRIDPNSLDTLLHPTLDEKSSINVIANGLPASPGAASGKVVFTSEEAERLTAMMQDTILVRVETSPEDIQGMHAAKGILTARGGMTSHAAVVARGMGRPCVSGSSEIDINYENKSFKTSSMEIKEGDVITIDGSTGRIIAGSVSTVKPEISGDFSKLMSWADSFRKLKVRTNSETPKDTKAAKDLEQKVLASVELNICF

SEQ ID NO: 137154 - protein, 237 aa, Unknown
  Bacterial polypetide isolated from the Sargasso Sea
MIAGSGKRYLHGFFLPNSQGNDAIMGLRTPHMLSELQNSKEKQSSRSLENLNSRCFKKIKMIVEESEKKLGDLFEFEFTIENNKLFVLDAVKAERSPRASVAVAVDLALRGAISKEEAVLRVNPDNLIEFLHPQIDPNSERDVFGNGLPASPGAACGKIVFSSFAANQLSAKGEAAILVRVETTPEDIRGMHASVGVLTERGGMTSHAAVVARGLGLPCVVGAHNLTMNLLDKTVAT

SEQ ID NO: 137155 - protein, 209 aa, Unknown
  Bacterial polypetide isolated from the Sargasso Sea
QGKRTAKSAVKIAVDMVKENLISKKEAVLRVEPNSLHTLLHPTLDEKSNIEIIAKGLPASPGAASGKVVFTSDDAERLKALMQNTILVRVETSPEDIHGMHAANGILTARGGMTSHAAVVARGMGRPCVSGSSEIEIDYEKKLFKVQDREIKEGDLITIDGSTGRIILGEVKTVKPEISGEFSKLMNWADNYRKLKIRTNSETPVDSKT

SEQ ID NO: 137156 - protein, 217 aa, Unknown
  Bacterial polypetide isolated from the Sargasso Sea
YKILKKLEKHYKDMQDVEFTVENNKLWILQTRSGKRTSKSAVKIAVDMVREKLISKNEAVLRIDPNSLDTLLHPTLDEKSSIEVIANGLPASPGAASGKVVFSSEEAERLNDMMQDTILVRVETSPEDIQGMHAAKGILTARGGMTSHAAVVARGMGRPCVSGSSEIDINYDQKIFKTSSTEVKEGDTITIDGSTGRIILGTVPTVKPEISGDFSKL

SEQ ID NO: 137157 - protein, 277 aa, Unknown
  Bacterial polypetide isolated from the Sargasso Sea
SYRRFIQMFSNVVMGVEGHLFEEMIDNFKLTKGVLQDTEIDASDWDGLIENFKKLVKDKTGKNFPQDVNEQLIEAINSVFRSWDSQRAKTYRKLNRIPDEWGTAVNVQAMVFGNMGNDCATGVAFTRNPSTGENSFFGEYLINAQGEDVVAGTRTPHYITKKSKRESSSKELSMQEAMPKAYKELEKVFIKLEKHYRDMQDIEFTVENGKLWMLQTRSGKRTAKAGIKIAVDMVKEKLISRKEAILRIDPNTIDTLLHPTLDDKVKKEVIASGLPAS

SEQ ID NO: 137158 - protein, 179 aa, Unknown
  Bacterial polypetide isolated from the Sargasso Sea
IKSIIPEIMIPLVSTEAEIKIMKDLVIKVAKEVENKTKTKLNFLVGTMIELPRAAIKADDISRHAEFFSFGTNDLTQTTFGISRDDSGKFLNDYIDNKIFDVDPFVSIDDGVGDLIEMATKKGRKINKKIKLGICGEHGGDPKSIDFCARAGLDYVSCSPYRVPIARLAAAQAQLKKIN

SEQ ID NO: 137159 - protein, 217 aa, Unknown
  Bacterial polypetide isolated from the Sargasso Sea
NPMLGHRGCRLGISFPEIYEMQCEAIFEALADCKRKKIKLVIPEIMIPLVSTAAEIQILRNLVDKTAEKIQKARSVKIKYYVGTMIELPRAALRAKDIAKFADFFSFGTNDLTQTTFGISRDDSGKFLNDYVENKIFNNDPFVSIDERGVGELIKIATERGRLQKKSLKLGICGEHGGDPASVEFCEKIKLNYVSCSPYRVPIARLAAAQAYLKKKK

SEQ ID NO: 137160 - protein, 151 aa, Unknown
  Bacterial polypetide isolated from the Sargasso Sea
NQIQKAHSIKIKYYVGTMIELPRAAIRAKDIARHADFFSFGTNDLTQTTFGISRDDSGKFLNDYVENKIFNKDPFVSIDERGVGELIKIATARGRLEKKSLKLGICGEHGGDPASIEFCENAKLNYVSCSPYRVPIARLAAAQAYLKKKLL

SEQ ID NO: 137161 - protein, 311 aa, Unknown
  Bacterial polypetide isolated from the Sargasso Sea
LFENYKLTKGVLQDTELEEDDWDGLIQNFKDIVKEKTKKNFPQDVNEQLRGAIGAVFLSWNSKRAKTYRKINYIPDHWGTAVNIQAMVFGNMGENCATGVAFTRNPSTGNKEIFGEYLINAQGEDVVAGTRTPQHLSKKSRDKSNSEKISLEESMPKIFKQLKKIFSQLEKKYRDMQDIEFTVENNNLWMLQTRSGKRTAKAAIKIAVDMVNEKLITNKEAILRIDPNILDTLLHPTLDEKAEKKVIATGLPASPGAASGKVTFSADEAERLKEQMQDSILVRVETSPEDINGMHAAKRYSYSSWRYDKSC

SEQ ID NO: 137162 - protein, 156 aa, Unknown
  Bacterial polypetide isolated from the Sargasso Sea
MKDLVIRVAKEVQKEYKTKVDFLVGTMIELPRAAIKAQDIAKHAEFFSFGTNDLTQTTFGISRDDSSKFLNDYIENKIFDIDPFISIDEGVGELIEIASNKGRKQNKKIKLGICGEHGGDPKSIHFCSKTGLHYVSCSPYRVPVARLAAAQAELKK

SEQ ID NO: 137163 - protein, 251 aa, Unknown
  Bacterial polypetide isolated from the Sargasso Sea
EFLPKSDKEISEVANVIGSDKKDIKARIEELHEQNPMLGHRGCRLGISFPEIYEMQCTAIFEALAELKKSKQKFAFPEIMIPLVSTEAEIKIMKDLVISIARKVQKENKTKIEFLVGTMIELPRAAIKADDIAKHAEFFSFGTNDLTQTTFGISRDDSGKFLNDYIDNKIFTIDPFVSIDDGVKDLVKIAVSKGKKQNKKIKLGICGEHGGDPMSIKFCSKVGLNYVSCSPYRVPIARLSAAQAALLKNKD

SEQ ID NO: 137164 - protein, 288 aa, Unknown
  Bacterial polypetide isolated from the Sargasso Sea
NAETPSDAKRALDFGAEGIGLFRIEHMFYGEGSEEPLFHLQEMIMANNQGERKAALDSLFPFMKNDIRETLRAMKGLPVTIRLMDPPLHEFIPHDSKRQKKLADSLGINAEELERRSDALKESNPMMGHRGVRLGITHPEITEMQARAILEAAAELTAENVKTFPEIMIPLTGMETEYNHQEKIVREVASKIDGLDNYMVGTMMEIPRASIVADRIAETAEFFSFGTNDLTQMTFGFSRDDTGGFMPSYLEQDLLPEDPFASLDEGVCELVKMGIEKGRKTKPNLKVG

SEQ ID NO: 137165 - protein, 288 aa, Unknown
  Bacterial polypetide isolated from the Sargasso Sea
IPAQQLEALLHRTMDESKIKEHKQLAKGIAASPGAASGIAIFDVKKAIELGESGKKVILIRKETKPEDVPAFFSSEGILTSLGGKSSHAAIVSRGMGKPCIVGCSELKINYDNNTCTANGITVKENEMISIDGSVGTVFIGEVPTVEPKVTKDFQTILSWAQSTKQLGIRANADTPDAAKLARQYGAQGIGLCRTERMFNETDRIGLFVEMIMAQSENERNQVLKKLQELQKSDFIGILKAMEGYKVTIRLLDPPLHEFLPNPEELKEKMTKENDNSEKTKRVLDRAR

SEQ ID NO: 137166 - protein, 193 aa, Unknown
  Bacterial polypetide isolated from the Sargasso Sea
QIRAIFEALVECKKRKIKSTMPEIMIPLVSTEAEIKIMKDLVINVARKVQNENKTKIKFLVGTMIELPRAAIKAKDIAKYAEFFSFGTNDLTQTTFGISRDDSGKFLNDYIENKIFDIDPFISIDDGVGDLIEIAVTRGKKQNKKIKLGICGEHGGDPKSIEFCSKVGLDYVSCSPYRVPIARLAAAQAQLKK

SEQ ID NO: 137167 - protein, 230 aa, Unknown
  Bacterial polypetide isolated from the Sargasso Sea
INAQGEDVVAGTRTPQYITKKARKEAKVDDASMEESMPEVYHELYKILKKLEKHYKDMQDVEFTVESNKLWILQTRSGKRTSKSAVKIAVDMVREKLINKNDAVLRVDPNSLDTLLHPTLDERSSIKVIANGLPASPGAVSGKVVFSSEEAERLNDMMQDTILVRVETSPEDIQGMHAAKGILTSRGGMTSHAAVVARGMGRPCVSGSSEIEINYDKKIFKTSSVEIKEG

SEQ ID NO: 137168 - protein, 125 aa, Unknown
  Bacterial polypetide isolated from the Sargasso Sea
AAIKAKDIAKHAEFFSFGTNDLTQTTFGISRDDSGKFLNDYIENKIFDIDPFVSIDEGVGDLIKIATDKGRKQNKKIKLGICGEHGGDPKSIEFCAKTGLDYVSCSPYRVPVARLAAAQAQLKKN

SEQ ID NO: 137169 - protein, 255 aa, Unknown
  Bacterial polypetide isolated from the Sargasso Sea
VEIKEGDIITIDGSTGRIILGEVPTVKPEISGDFSKLMVWADNYRKLKVRTNSETPLDTKTARDFGAEGIGLCRTEHMFFDEDRILSVREMILSKTIEDRSQALAKLLPHQKNDFIEIFKIMNGLPVTVRLLDPPLHEFLPKNAKEIKSVSDALELSTNEVELRIGELHEHNPMLGHRGCRLGISFPEIYEMQCRAIFEALVECKKKKYKSIIPEIMIPLVSTEAEIEIMKNLVNRIANKVQKENKIKIDYLVGT

SEQ ID NO: 137170 - protein, 267 aa, Unknown
  Bacterial polypetide isolated from the Sargasso Sea
DWDGLIKDFKNVVKAKTKKEFPQDVNEQLTGAVAAVFLSWQSNRAKVYRKINQIPSDWGTAVNVQSMVFGNMGQDCATGVVFTRNPSTGKNEIYGEYLINAQGEDVVAGTRTPQYITKKARDEAKSKEESMEEFMPNVFKQLNKILKSLEKYYKDMQDVEFTVENNTLWILQTRSGKRTAKSAVKIAVDMVKEKLISKKNAITRIDPHSLDTLLHPTLDEKSKINVIAKGLPASPGAASGKVVFSSDEAERLNEMMQDTILVRLETS

SEQ ID NO: 137171 - protein, 158 aa, Unknown
  Bacterial polypetide isolated from the Sargasso Sea
EIMKNLVDKVADQVKVENKTKIDYLVGTMIELPRAAIKAEDIARHADFFSFGTNDLTQTTFGISRDDSGKFLNDYIENKIFDVDPFISIDDGVGDLIEIATLKGKKQNKKLKLGICGEHGGDPKSINFCSSTGLNYVSCSPYRVPVARLAAAQAQLKK

SEQ ID NO: 137172 - protein, 182 aa, Unknown
  Bacterial polypetide isolated from the Sargasso Sea
KRGIKSAFPEIMIPLVSTEAEIKLMKDLVISTASKVQKKHKLKIEFLVGTMIELPRAALKAKEISKHAEFFSFGTNDLTQTTFGISRDDSGKFLNDYLENKIFSIDPFVSIDEGVSDLVEIAVERGKKNNKNLKLGICGEHGGDPKSIEFCARVGLNYVSCSPYRVPVARLAAAQAEIKKNI

SEQ ID NO: 137173 - protein, 273 aa, Unknown
  Bacterial polypetide isolated from the Sargasso Sea
LRRDVVAGTRTPRYITEVAKRESNSKEQSMEKLFPTIFKELKKKLKTLEKHYRDMQDVEFTVENKELWILQTRSGKRTAKSAVKIASDMFKENLITKKEAILRIDPNSLDTLLHPTLDENIKFKVIGKGLPASPGAASGKVVFTSEEAVRLNEMMQDTILVRIETSPEDIHGMHSAKGILTARGGMTSHAAVVARGMGRPCVSGSSDIEIDYINKTFKTKDQEVKEGDIITIDGSSGKIILGEVKTVKPEISGDFSKIMKWSDEIRKLKIRTN

SEQ ID NO: 137174 - protein, 310 aa, Unknown
  Bacterial polypetide isolated from the Sargasso Sea
MYLKKFGDLKNPLLLSVRSGARVSMPGMMDTILNLGLNDKTVIALSNKTSNGRFAKDSYRRFIQMYANVVMGVESYHFEELIENYKLTKGVLLDTELDEQDWDGLIKDFKDTVKEKTKRDFPQNVYEQLFGAISAVFLSWESNRAKVYRKLNQIPAEWGTAVNVQSMVFGNMGNDCATGVVFTRNPSDGFNDIYGEYLINAQGEDVVAGTRTPQYITKKARKESKAKELSMEESMPKVYSELFKILRKLEKHYKDMQDVEFTVENKKLWILQTRSGKRTSKSAVKIAVDMVKEKLIFKNEAVLRVNPYSL

SEQ ID NO: 137175 - protein, 160 aa, Unknown
  Bacterial polypetide isolated from the Sargasso Sea
MKKLVIKVAREVQNESKTKIKFLVGTMIELPRAAIKAKDIAKHAEFFSFGTNDLTQTTFGISRDDSGKFLNDYIENKIFDIDPFISIDDGVGDLIKIATNKGKKQNKKIKLGICGEHGGDPKSIEFCAKVGLDYVSCSPYRVPVARLAAAQAQLKKGIKI

SEQ ID NO: 137176 - protein, 238 aa, Unknown
  Bacterial polypetide isolated from the Sargasso Sea
DVEFTVENSKLWMLQTRSGKRTAKSAVKIAVDMVKEKLITKKEAVLRVDPNTLDTLLHPTLDETKEVKTIAKGLPASPGATSGKVVFSSDEAERLNGMMQDTILVRVETSPEDIHGMHAAKGILTARGGMTSHAAVVARGMGRPCVSGSSEIDINYEQKIFRTSSNVEVKEGDVITIDGSTGRVILDKVPTLKPEISGDFSKLMSWADSYRKLKVRTNSETPLDTKTAREFGAEGIGL

SEQ ID NO: 137177 - protein, 267 aa, Unknown
  Bacterial polypetide isolated from the Sargasso Sea
FDEERILSVREMILSKTKEDRSIALKKLLPHQKKDFIEIFKIMSGLPVTVRLLDPPLHEFLPRTDKEINEVANIVNLPVKEVESRIDELHEQNPMLGHRGCRLGISFPEIYEMQCRAIFEALAELKKEKIKSAFPEIMIPLVSTEAEIKIMKDLVIRIANEVQKEHKLKIEFMVGTMIELPRAAIKAKDIAKHAEFFSFGTNDLTQTTFGISRDDSGKFLNDYIDNKIFSIDPFISIDDGVGDLIKIAIEKGKSQNKNIKLGICGEH

SEQ ID NO: 137178 - protein, 212 aa, Unknown
  Bacterial polypetide isolated from the Sargasso Sea
MNLTPWLGHRGCRLGISFPEIYEMQCRAIFSALIECKKENIKSIIPEIMIPLVSTEDELGIMRKLVNRVADQLQKENKVKINYFVGTMIELPRAALRAAPISKYADFFSFGTNDLTQTTFGISRDDSGKFLNDYIDHKIFDEDPFVSIDKDGVGELIKIASQRGKKQNKKLKLGICGEHGGDPRSIEFCSKNGLNYVSCSPFRVPIARLAAA

SEQ ID NO: 137179 - protein, 322 aa, Unknown
  Bacterial polypetide isolated from the Sargasso Sea
VEGHLFEEMIDNFKLTKGVLQDTEIDASDWDGLIENFKKLVKKKTGNNFPQDVNEQLIQAVSSVFRSWESQRAKTYRKLNRIPDEWGTAVNVQAMVFGNMGNDCATGVAFTRNPSTGENSFFGEYLINAQGEDVVAGTRTPQYITKKSKNESGSKEPSMEEAMPKAYKELEKVFLKLEKHYRDMQDIEFTVENNKLWMLQTRSGKRTAKAGIKIAVDMVKEKLISRKEALLRIDPNTIDTLLHPTLDNKVKKEVVASGLPASPGAASGKVVFDADEAEKLNNMMQDTILVRLETSPEDIHGMHAAKGILNCRGGMTKSCCCS

SEQ ID NO: 137180 - protein, 309 aa, Unknown
  Bacterial polypetide isolated from the Sargasso Sea
QYFYHGESNRAKVYRKLNQIPSNWGTAVNVQSMVFGNMGENCATGVVFTRNPSDGRKEVYGEYLINAQGEDVVAGTRTPQHITKKSRVKSKEKLPSMEESMPSIFRQLKKILIKLEKHYKDMQDVEFTVENKKLWMLQTRTGKRTAKSAIKIATDMVKEKLISKKDAILRIEPKSLDTLLHPALDEKSSVEVIAKGLPASPGAATGKVVFSSDEAQRLNEMMQNVILVRTETSPEDIHGMHAAKGILTARGGMTSHAAVVARGMGRPCVSGSNEIEIDYGKKLFKTKNREIKEGEKITIDGSTGRIILG

SEQ ID NO: 137181 - protein, 172 aa, Unknown
  Bacterial polypetide isolated from the Sargasso Sea
IMIPLVSTEAEIKIMKDLVIRVAKEVENKTKTKLNFLVGTMIELPRAAIKADDISKHAEFFSFGTNDLTQTTFGISRDDSGKFLNDYIDNKIFDIDPFVSIDDGVGDLIEMATIKGRKINKKIKLGICGEHGGDPKSIDFCARAGLDYVSCSPYRVPIARLAAAQAQLKKIN

SEQ ID NO: 137182 - protein, 304 aa, Unknown
  Bacterial polypetide isolated from the Sargasso Sea
RLTLMREMIFAHNREERRAVLERLLPMQRSDFFELFTLMKGLPVCIRLFDLPLHEFLPNDREGMHDLAEALDLPLSSVMSRVETLAEYNPMLGMRGVRVGVTVPEIYEMQARAIFEATAEASKNGAIVVPEIMIPLVSAKREVELVRTRIDGVAALVRAETGIEFDYSLGIMVETPRAALRADDIASNSAFLSFGTNDLTQMTYGLSRDDAGRFMSDYVYQGVFPEDPFHTLDIDGVGELLKMGVTRARGVKSDIVLSICGEHGGSPESIDFCRQIGMDYVSCSPFRVPVAKLAAAQLAIKDRY

SEQ ID NO: 137183 - protein, 200 aa, Unknown
  Bacterial polypetide isolated from the Sargasso Sea
EGDIITIDGSTGRIIEGSVATVKPEISGDFSKLMSWADSYRKLKIRTNSETPKDTKTAKDFGAEGIGLCRTEHMFFDEERILSVREMILSKTKEDRAKALNKLLPHQKKDFSEIFKIMNGLPVTVRLLDPPLHEFLPRTNKEICELAEIVNLTVKEVETRIEELHEQNPMLGHRGCRLAISFPEIYEMQCRAIFEALCEL

SEQ ID NO: 137184 - protein, 199 aa, Unknown
  Bacterial polypetide isolated from the Sargasso Sea
EIYEMQCRAIFEALVECKNKKYKSILPEIMIPLVSTEAEIKIMKDLVIRVAKQVQDENKLKINFLVGTMIELPRAAIKAKDIAKHAEFFSFGTNDLTQTTFGISRDDSGKFLNDYIENKIFDVDPFVSIDEGVGNLIELATIGGKKQNEYIKLGICGEHGGDPKSIDFCSKTGLDYVSCSPYRVPVARLAAAQAQLKKS

SEQ ID NO: 137185 - protein, 131 aa, Unknown
  Bacterial polypetide isolated from the Sargasso Sea
MIELPRAALQAKSISKHADFFSFGTNDLTQTTLGISRDDSGKFLNDYIDNKIFEIDPFVSIDQSGVGELVELASTRGRKVNKKLKLGICGEHGGDPKSIEFCSRTGLNYVSCSPFRVPIARLAAAQAELRR

SEQ ID NO: 137186 - protein, 319 aa, Unknown
  Bacterial polypetide isolated from the Sargasso Sea
GAASGKVVFTSEEAERLSAMMQDTILVRVETSPEDIQGMHAAKGILTARGGMTSHAAVIARGMGRPCVSGSSEIDINYENKCFKTSSMEIKEGDIITIDGSTGRIIAGSVSTVKPEISGDFSKLMSWADSFRKLKVRTNSETPKDTKTAKDFGAEGIGLCRTEHMFFDEERILSVREMILSKTKEDRATALEKLLPHQKKDFIDIFKIMSGLPVTVRLLDPPLHEFLPRTIKEINEVANTVNLPVKEVESRIEELHEQNPMLGHRGCRLGISFPEIYEMQCRAIFEALAELKKSKIKSAFPEIMIPLVSTEAEIKIRKI

SEQ ID NO: 137187 - protein, 255 aa, Unknown
  Bacterial polypetide isolated from the Sargasso Sea
LDEKDWEGLINDFKKVVKDKTNKNFPQNVYDQLLGAICAVFLSWESNRAKVYRKLNQIPSEWGTAVNVQSMVFGNMGSDSATGVVFTRNPSDGTNEIYGEYLINAQGEDVVAGTRTPQYITKKAKKDANAKEDSMEESMPIVFKQLDKILKVLEKHYKDMQDVEFTVENKRLWMLQTRSGKRTAKSAVKIAVDMVKEKLISKKEAVLRVDPNSLDTLLHPTLDEKSSINIIASGLPASPGAASGKVVFSSDEAER

SEQ ID NO: 137188 - protein, 289 aa, Unknown
  Bacterial polypetide isolated from the Sargasso Sea
AVVARGMGRPCVSGSSEIDINYENKSFKTSSMEIKEGDIITIDGSTGRIIEGSVATVKPEISGDFSKLMSWADSYRKLKIRTNSETPKDTKTAKDFGAEGIGLCRTEHMFFDEERILSVREMILSKTKEDRAKALDKLLPHQKKDFTEIFKIMNGLPVTVRLLDPPLHEFLPRTNKEIGELAEIVNLTVKEVETRIEELHEQNPMLGHRGCRLAISFPEIYEMQCRAIFEALCELKKNKIKSAFPEIMIPLVSTEAEIKIMKDLVKRIASMVQKENKLKIDFMVGTMIE

SEQ ID NO: 137189 - protein, 307 aa, Unknown
  Bacterial polypetide isolated from the Sargasso Sea
MSQRKWVYKFGGGGGEGASDMKNLLGGKGANLAEMSSLGLPVPPGFTITTELCAAYYDAGESYPDALSGQVDAALEFVEETVCAKFGDSENPMLVSVRSGARVSMPGMMDTVLNLGLNNATVMGLAAKSGDSRFAWDSYRRFIQMYGDVVLGVDHDNFEEIIDNQKMMNGAALDTDLDADDWKAVVSGFMERVEDETGKPFPQEPRDQLWGAITAVFGSWQNDRANTYRRLHNIPESWGTAVNVQAMVFGNMGDDCATGVAFTRDPSDGRHTFYGEILGNAQGEDVVAGIRTPPHLDISGKKEHGSD

SEQ ID NO: 137190 - protein, 238 aa, Unknown
  Bacterial polypetide isolated from the Sargasso Sea
FFDEKRIISVRQMILSKTLEDRKEAIAKLLPYQKNDFIEIFKIMNGLPVTVRLLDPPLHEFLPKTDKDIDAIAKELNLSQNDIKSRITELHEQNPMLGHRGCRLGISFPEIYQMQCQAIFEALAECKKKKIKLVIPEIMIPLVSTAAEIQILRSLVDNMAKKIQKQHSIKIKYFVGTMIELPRAAIRAKDIAKYADFFSFGTNDLTQTTFGISRDDSGKFLNDYVENKIFTKDPFVSI

SEQ ID NO: 137191 - protein, 279 aa, Unknown
  Bacterial polypetide isolated from the Sargasso Sea
RGMGRPCVSGSSEIKINYANKIFKTNSIEIKEGDLITIDGSTGRIIQGEVPRIKPEISGDFSKLMSWADSFRKLKVRTNSETLLDTKTARDFGAEGIGLCRTEHMFFDQERILSVREMILSKTKEDRDKALEKLLPHQKNDFIEIFKIMSNLPVTVRLLDPPLHEFLPRTEKETNEVAKKLKLSIKEVESRISELHEQNPMLGHRGCRLGISFPEIYEMQCRAIFEALTDLKKKKIKSAFPEIMIPLVSTEAEIKIMKDLVIRTAKKVQDENKIKIKFL

SEQ ID NO: 137192 - protein, 257 aa, Unknown
  Bacterial polypetide isolated from the Sargasso Sea
MGVEGHLFEEMIDNFKLTKGVLQDTEIDASDWDGLIENFKKLVKEKTGKNFPQDVNEQLIEAVSSVFRSWESQRAKTYRKLNRIPNEWGTAVNVQAMVFGNMGSDCATGVAFTRNPSTGENSFFGEYLINAQGEDVVAGTRTPQYITKKSKIESGSKELSMQEAMPKAYKELEKVFIKLEKHYRDMQDIEFTVENKKLWMLQTRSGKRTAKAGIKIAVDMVKEKLISKKEAVLRIDPNTIDTLLHPTLDDKVKKEIV

SEQ ID NO: 137193 - protein, 201 aa, Unknown
  Bacterial polypetide isolated from the Sargasso Sea
SFPEIYEMQCKAIFEALAYLKKSKIKSAFPEIMIPLVSTEAEIKIMKDLVIRTASNVQNKYKLKIEFLVGTMIELPRAAIKAKEIAKHAEFFSFGTNDLTQTTFGISRDDSGKFLNDYLENKIFSVDPFVSIDEGVSDLVEIAVHKGKSQNNKLKLGICGEHGGDPRSILFCAKVGLNYVSCSPFRVPVARLAAAQAELLK

SEQ ID NO: 137194 - protein, 171 aa, Unknown
  Bacterial polypetide isolated from the Sargasso Sea
DEKVEKKVIAKGLPASPGAASGKVVFTADEAERMKNQKEDTILVRVETSPEDIHGMHAAKGILTARGGMTSHAAVVARGMGRPCVSGSGEINIDYEAKQFKVGDLTVKEGDIITIDGGSGKVMSGLVPTVKPDISGYFSTLMKWADQFRKLKIRTNAETPQDTRTARNFGA

SEQ ID NO: 137195 - protein, 117 aa, Unknown
  Bacterial polypetide isolated from the Sargasso Sea
MEPEGIGLCRTEHMFFDDERILSVRQMILSKHLDDRKIALDKLLPYQKNDFKEIFEIMKGLPVTVRLLDPPLHEFLPKTEKDMEEVARSLNLGVREIKNRVSELHELNPMLGHRGCR

SEQ ID NO: 137196 - protein, 287 aa, Unknown
  Bacterial polypetide isolated from the Sargasso Sea
HAHLLGGKGANLAEMSGIGLPVPPGFTISTDVCTYFYDNNHTYPDTLDAEVRAAIAKIEAETGSAFADSKNPLLVSVRSGARASMPGMMDTVLNLGLNDETAAGLAKHATDSRFAYDSYRRFIQMYSDVVMDVDHGLFEDALEDMKRERGLTNDSDLTGDDMIALVAIYKDIVMDEMDTPFPQDPWVQLWGAVGAVFTSWTNTRAATYRRLNNIPAAWGTAVNVQAMVFGNMGDDCATGVAFTRDPSTGENSFYGEFLVNAQGEDVVAGIRTPLPLTIKESEKSGSS

SEQ ID NO: 137197 - protein, 268 aa, Unknown
  Bacterial polypetide isolated from the Sargasso Sea
CVSGSSEIDINYENKSFKTSSMEIKEGDIITIDGSTGRIIEGSVATVKPGISGDFSKLMSWADSYRKLKIRTNSETPKDTKTAKDFGAEGIGLCRTEHMFFDEERILSVREMILSKTKEDRAKALNKLLPHQKKDFTEIFKIMNGLPVTVRLLDPPLHEFLPRTNKEIGELAEIVNLTVKEVETRIEELHEQNPMLGHRGCRLAISFPEIYEMQCRAIFEALCELKKNKIKSAFPEIMIPLVSTEAEIKIMKDLVKRIASMIQKENKL

SEQ ID NO: 137198 - protein, 209 aa, Unknown
  Bacterial polypetide isolated from the Sargasso Sea
LPIGYHLSGNLSDAGTGYFEASAAIAQKTGDVPSPEIMVPLAATAREISLCKQEIDAVATEVMAETGVSISYLVGTMVELPRSSICAAELAEEAEFFSFGTNDLTQTALGISRDDAGSFLHYYADADIYSVDPFVSIDREGVGFLVDIGVKRGRATRPDIKLGICGEHGGDAQSIYFFEEVGLDYVSCSPFRVPAARLAAAQAAIKNSV

SEQ ID NO: 137199 - protein, 312 aa, Unknown
  Bacterial polypetide isolated from the Sargasso Sea
KGEQIILVREETSPEDVHGMHAAEAILTARGGMTSHAALVARGWGKCCIVGCNEINISVSDKQLSVGDVIIKEGDWITMNGTTGVAYLGQLDLIPADPDRNEEYKELMTWADEIRKLKIRTNAESPEDAKQAIKFGAEGIGLCRTEHMFFDETRILAMRKMILADNDDDRRDAVMGLLPFQKEDFKGTLEAMEGKPVTIRLLDPPLHEFITLDNEQIKELADSIGIDSSIVSQRISSLHELNPMLGHRGCRLGIAYPVITEMQASAILEAAAELTKDSLNVLPEIMIPLVGTVTEYIDQEKIVRKVASEVES

SEQ ID NO: 137200 - protein, 137 aa, Unknown
  Bacterial polypetide isolated from the Sargasso Sea
TMIELPRAALKAKDIAKHAEFFSFGTNDLTQTTFGISRDDSGKFLNDYIENKIFDIDPFISIDDGVGDLIKIATEKGRKQNKKIKLGICGEHGGDPKSIYFCAKSGLDYVSCSPYRVPVARLAAAQAQLKKKKNNHR

SEQ ID NO: 137201 - protein, 277 aa, Unknown
  Bacterial polypetide isolated from the Sargasso Sea
AETLSINYSEKTISSKEKTLEEGDLISLDGSAGEIYIGELKLEPPTLSQEFNTLMDWCNEFKRLEIRANAETTIDTAKALEFGAEGIGLCRTEHMFFEGERILPMREMIMSDSKQGRKRALKKLINYQISDFESLFKLLNEKPITVRLLDPPMHEFLPKSDLEISQLANEIGVSPMHVNEILMRLSESNPMLGHRGVRLGLSYPEIYEMQVEAIFRAVHLVFENDNFKVTPEVMIPLVMNSNELSEMKDILKKKIKKIEKELNYNLDYTIGTMIELP

SEQ ID NO: 137202 - protein, 223 aa, Unknown
  Bacterial polypetide isolated from the Sargasso Sea
IEELHEQNPMLGHRGCRLGISFPEIYEMQCLAIFEALSDLKKNKQKSAFPEIMIPLVSTEAEIKIMKDLVIRTARNVEKDKKIKLNFLVGTMIELPRAAIKAQDIAKHAEFFSFGTNDLTQTTFGISRDDSGKFLNDYLENKIFTIDPFISIDEGVKDLIKIAVLNGKKNNKKIKLGICGEHGGDPVSIDFCSNTGLDYISCSPYRVPIARLAAAQSELKRVK

SEQ ID NO: 137203 - protein, 284 aa, Unknown
  Bacterial polypetide isolated from the Sargasso Sea
VVAGTRTPQYITKKARRNAKVKELSMEESMPKVFKELQNILKKLEIHYKDMQDVEFTVENSKLWMLQTRSGKRTAKSAVKIAVDMVKEKLISKKEAVLRIDPNSLDTLLHPTLNEKSSINVIANGLPASPGAASGKVVFTSEQAERLTAMMQDTILVRVETSPEDIQGMHAAKGILTARGGMTSHAAVVARGMGRPCVSGSSEIDINYENKSFKTSSMEIKEGDVITIDGSTGRIIAGSVSTVKPEISGDFSKLMSWADNFRKLKVRTNSETPKDTKTAKDFGA

SEQ ID NO: 137204 - protein, 118 aa, Unknown
  Bacterial polypetide isolated from the Sargasso Sea
IAKHAEFFSFGTNDLTQTTFGISRDDSGKFLNDYIENKIFEVDPFVSIDDGVGDLIELAAKKGKKQNKKIKLGICGEHGGDPKSINFCSKTGLDYVSCSPYRVPVAILAAAQAELKNK

SEQ ID NO: 137205 - protein, 185 aa, Unknown
  Bacterial polypetide isolated from the Sargasso Sea
IECKKEKIQSVIPEIMIPLVSTEDEIGIMRKLVDEVAKKVQKENKIKLEYFVGTMIELPRAALRAAPISKYADFFSFGTNDLTQTTYGISRDDSGKFLNDYLDHKIFDTDPFVSIDKDGVGELVKIATERGRKNNRKLKLGICGEHGGDPKSIEFCSKAGLNYVSCSPFRVPIARLAAAQAELRK

SEQ ID NO: 137206 - protein, 145 aa, Unknown
  Bacterial polypetide isolated from the Sargasso Sea
KMKTKQKLNYLVGTMMNLPRAAIRAKDIAKHADFFSFGTNDLTQTTFGISRDDAGKFLNDYIENKIFEVDPFISIDKGVGELIELATEKGKKQNKKIKLGICGEHGGDPKSIFFCSKIGLNYVSCSPYRVPVARLSAAQAAILKD

SEQ ID NO: 137207 - protein, 292 aa, Unknown
  Bacterial polypetide isolated from the Sargasso Sea
GGQTSHAAVVARGMGKPCVVGCTEIHVDYGRQLFYAGDTVVRKGDWITIDGGTGDVMEGKVEMLAPDPEQGAMSTLLSWADEHARLAVRANADNGADASRARELGAVGIGLCRTEHMFFQPDALRAMRRMILAEDPHARQRALTDILPVQRSMFTEIFHAMDGLPVTIRLLDPPLHEFLPKSEDDIGAVAEDLGIRTDALRSRIEQLEEANPMLGHRGVRVGITAPEVYRMQVRAIFEAACEAQKAGAVVFPEVMIPLVAMPAELERTREEATDVAEAVLAEFDTTLDYTVG

SEQ ID NO: 137208 - protein, 269 aa, Unknown
  Bacterial polypetide isolated from the Sargasso Sea
DFKNTVKEKTKKDFPQNVKEQLVGAISAVFLSWESNRAKVYRKLNQIPSHWGTAVNVQSMVFGNMGNDCATGVVFTRNPSDGSKNIYGEYLINAQGEDVVAGTRTPQHITKKARVESKETLKSMEETMPETYKQLKNILNKLEKHYKDMQDVEFTVENKKLWMLQTRSGKRTAKSAVKIAVDMVKEKLITKKDAILRIEPSSLDTLLHPTLDEKVNLEVIGLGLPASPGAASGKVVFTSEEAERLNSMMQSTILVRVETSPEDIHGMHA

SEQ ID NO: 137209 - protein, 261 aa, Unknown
  Bacterial polypetide isolated from the Sargasso Sea
MEGKPVTIRLLDPPLHEFITLDNEQIKELANNIGIDSSIVSQRISSLHELNPMLGHRGCRLGIAYPVITEMQASAILEATAELTKDGLTVLPEIMIPLVGTVTEYVDQEKIVRKVASEVESKYNMKLNYLVGTMIELPRACLTADEIAEHAEFFSFGTNDLTQTTYGFSRDDIGSFLPEYLDRNILPGDPFQSLDVKGVGKLVSMAVKYGRNINSNLKIGICGEHGGDPKSIHFCKQNGLDYVSCSPFRVPIARLSAAQAE

SEQ ID NO: 137210 - protein, 173 aa, Unknown
  Bacterial polypetide isolated from the Sargasso Sea
VEIMIPLVSTESELKILRALVNKIAKEIEKEKKLKLEYMVGTMIELPRAALQAKSISKHADFFSFGTNDLTQTTFGISRDDSGKFLNDYIDNKIFDIDPFVSIDQNGVGELVEIASSRGRKTNKNIKLGICGEHGGDPKSIEFCSKTGLNYVSCSPFRVPVARLAAAQAELSK

SEQ ID NO: 137211 - protein, 161 aa, Unknown
  Bacterial polypetide isolated from the Sargasso Sea
AEIKIIKELVIKVAREVQNENKTKIKFLVGTMIELPRAAIKAKDIAKHAEFFSFGTNDLTQTTFGISRDDSGKFLNDYIKNKIFDVDPFISIDEGVGNLVELAVINGKKQNKNIKLGICGEHGGDPKSIEFCSKAGLDYVSCSPYRVPIARLAAAQAQLKK

SEQ ID NO: 137212 - protein, 149 aa, Unknown
  Bacterial polypetide isolated from the Sargasso Sea
KFKKKIKTKIEFLVGTMIELPRAAIKAEDIAKHAEFFSFGTNDLTQTTFGISRDDSGKFLNDYIDNKIFTIDPFVSIDDGVKDLVEIAVAKGKKQNKKIKLGICGEHGGDPKSIKFCSKAGLNYVSCSPYRVPIARLAAAQAELSKNKN

SEQ ID NO: 137213 - protein, 270 aa, Unknown
  Bacterial polypetide isolated from the Sargasso Sea
KDFKNTVKEKAKKEFPQNVYEQLLGAISAVFLSWESNRAKVYRKLNQIPSEWGTAVNVQSMVFGNMGNDCATGVVFTRNPSDGSNDIYGEYLINAQGEDVVAGTRTPQYITMKAKKRSKFKGLSMEESMPKVYQELLKILKKLENHYKDMQDVEFTVENKKLWILQTRSGKRTSKSAVKIAVDMVKEKLISKNEAVLRIDPNSLDTLLHPTLDGKSSIDLIAKGLPASPGAASGKVVFTSEEAERLNDMMQDTILVRIETSPEDIQGMHA

SEQ ID NO: 137214 - protein, 268 aa, Unknown
  Bacterial polypetide isolated from the Sargasso Sea
YYENKIFKTSSIDLKEGDIITIDGSTGRIIEGSVATVKPEISGDFSKLMSWADSYRKLNIRTNSETPKDTKTAKEFGAEGIGLCRTEHMFFDEDRILSVREMILSKTKEDRAKALEKLLPHQKKDFKEIFKIMNGLPVTVRLLDPPLHEFLPRKNKEISELADAINLSLDEVETRIEELHEQNPMLGHRGCRLAISFPEIYEMQCRAIFEALCELKKNKIRSAFPEIMIPLVSTEAEIKIMKDLVRRTASIVQRENKIKIDFMVGTMI

SEQ ID NO: 137215 - protein, 106 aa, Unknown
  Bacterial polypetide isolated from the Sargasso Sea
MIKFLSWADEIRKLGVRANADYPRDAQRAREYGAEGIGLCRTEHMFFEAERMLKVQTQHFHILSEIDSALAEIRVKQDYLEQVEALRELNPMLGTRGVRLGIIISE

SEQ ID NO: 137216 - protein, 201 aa, Unknown
  Bacterial polypetide isolated from the Sargasso Sea
MKGLVPTVQPEISGYFSKIMKWADEFRKLKVRTNAETEADSKTARDFGAEGIGLCRTEHMFFDEERILSVRQMILSKSIEDRNHALTKLLPHQKDDFKKIFKIMSGLPVTVRLLDPPLHEFLPKAEKDIEEVARSLNLSSKEIKDRIGELHEENPMLGHRGCRLGISFPEIYEMQCEAIFNALVELKKEKIKTAFVEIMIP

SEQ ID NO: 137217 - protein, 286 aa, Unknown
  Bacterial polypetide isolated from the Sargasso Sea
VFSASEAQACAARGEACILVRRETSPEDIRGMNAAAGVLTERGGMTSHAAVIGRGIGLPCVVGVSEINFNPSNKAFSISDGRAFKQGDLITIDGTLGQVLGGTPKMIEAVLDDSLKLMLEWAEEAGDIKVRANADTPSEAKTAQNFNAHGIGLCRTEHMFFEADRLTLMQEMIFAHNREERRAVLERLLPMQRSDFFELFTLMKGLPVCIRLFDLPLHEFLPNDREGMLDLAEALDLPLSNVMSRVETLAEYNPMLGMRGVRVGVTVPEIYEMQARAILKQPLKQV

SEQ ID NO: 137218 - protein, 164 aa, Unknown
  Bacterial polypetide isolated from the Sargasso Sea
GFNLKEFLNQKKIVLEAKNKIIGKSGLKINLKIGTMIEVPRACLVAEDIAKEADFFSFGTNDLTQTTFGFSRDDTGTFFPHYFNEEILLVDPFEEIDRKGVGKLMKMAVKDAQAVKNNISIGICGEHGGEPKSIEFCKILGLDYVSCSPYRVPIARLAAAQVEI

SEQ ID NO: 137219 - protein, 184 aa, Unknown
  Bacterial polypetide isolated from the Sargasso Sea
VECKKKKYKSILPEIMIPLVSTEAEIRIMKDLVIRVAREVQDTNNTKINFLVGTMIELPRAAIKAKEIAKHAEFFSFGTNDLTQTTFGISRDDSAKFLNDYIENKIFDIDPFISIDDGVGDLIEIASIRGKKQNKKIKLGICGEHGGDPKSIHFCSKTGLDYVSCSPYRVPVARLAAAQAELKK

SEQ ID NO: 137220 - protein, 184 aa, Unknown
  Bacterial polypetide isolated from the Sargasso Sea
TELKKKKMKMAFPEIMLPLVSTEVEIKIMKDLVTRIAKEVQSNNNIKIDYLVGTMIELPRAAIKAKEIAKHADFFSFGTNDLTQTTFGISRDDSGKFLNDYIENKIFDIDPFISIDEGVGDLIQIASERGRKQNKLIKLGICGEHGGDPKSIHFCSKAGLNYVSCSPYRVPVARLAAAQAQLKK

SEQ ID NO: 137221 - protein, 207 aa, Unknown
  Bacterial polypetide isolated from the Sargasso Sea
NQIPAEWGTAVNVQSMVFGNMGDDCATGVVFTRNPSDGSKEIYGEYLINAQGEDVVAGTRTPQYITKKARKTAKVEEPSMEESLPKVFNELKKILKKLEKHYKDMQDVEFTVENNKLWMLQTRSGKRTAKSAVKIAVDMVKEKLISKKEAVLRIDPNSLDTLLHPTLDENSTINVIANGLPASPGAASGKVVFTSEEAERLTSMMQD

SEQ ID NO: 137222 - protein, 312 aa, Unknown
  Bacterial polypetide isolated from the Sargasso Sea
MCFGSGKYKFEELIENYKLTKGVLLDTDLDENDWDGLIKDFKDVIKEKTKKEFPQDVNQQLIGAISAVFLSWQSNRAKVYRKLNQIPSDWGTAVNVQLMVFGNMGQDSATGVVFTRNPSSGSNEIYGEYLINAQGEDVVAGTRTPQYITKKARIEAKDRKNSMEESMNNVFKQLEKILKKLEKYYKDMQDVEFTVENKKLWILQTRSGKRTAKSAVKIAVDMVKEKLISKKEAIKRIDPHSLDTLLHPTLDERTNINVIAKGLPASPGAASGKVVFSSDEAERLNEMMQDTILVRIETSPEDIHGIHAAKGI

SEQ ID NO: 137223 - protein, 207 aa, Unknown
  Bacterial polypetide isolated from the Sargasso Sea
CRLGISFPEIYEMQCEAIFEALSDLKRYKQKSALPEIMIPLVSTEAEIKILKDLVIKTARKVQNKNKIKIQFLVGTMIELPRAAIKAKDIAKHAEFFSFGTNDLTQTTFGISRDDSGKFLNDYIDNKIFSIDPFVSIDDGVEDLIEIAVEKGKKQNKNIKLGICGEHGGDPKSIYFCSKAGLNYVSCSPYRVPIARLAAAQAELKKK

SEQ ID NO: 137224 - protein, 172 aa, Unknown
  Bacterial polypetide isolated from the Sargasso Sea
MIPLVSTEAEIKIMKDLVINTARKVQKENKTKIEFLVGTMIELPRAAIKADDIAKHAEFFSFGTNDLTQTTFGISRDDSGKFLNDYIDNKIFTIDPFVSIDDGVKDLVEIAVSKGKKQNKKIKLGICGEHGGDPKSIKFCSNAGLNYVSCSPYRVPIARLAAAQAELTKNKN

SEQ ID NO: 137225 - protein, 222 aa, Unknown
  Bacterial polypetide isolated from the Sargasso Sea
MVFGNMGDNCSTGVAFTRNPSTGENSFFGEFLINAQGEDVVAGTRTPQYITKKAKQASGSKDPSMEEAMPKVYKELAKVFLKLERHYKDMQDIEFTVENNKLWMLQTRSGKRTAKAAIKIAVDMVKEKLISKKEAIKRIDPNTLDTLLHPTLDEKVEKEVIASGLPASPGAASGKVVFTADEAEKLNGMMQDTILVRLETSPEDIHGMHAAKGILTARGGMT

SEQ ID NO: 137226 - protein, 244 aa, Unknown
  Bacterial polypetide isolated from the Sargasso Sea
TPQYITKKARIEAKAKESSLEESMPTVFKQLDKILKNLERHYKDMQDVEFTVENNKLWILQTRSGKRTTKSAVKIAVDMVKEKLISKKDAVMRIDPHSLDKLLHPTLDEKGKINIIAKGLPASPGAATGKVVFSSDEAQRLNEMMQDTILVRVETSPEDIHGMHAAKGILTSRGGMTSHAAVVARGMGRPCVSGSSEIDINYDRKIFKTASIEIKEGDLITIDGSTGRIIQGEVPKLKPEISGY

SEQ ID NO: 137227 - protein, 168 aa, Unknown
  Bacterial polypetide isolated from the Sargasso Sea
PLVSTESELKILRSLVNKIAKEIEKENKLKLEYMVRTMIELPRAALQAKAISKHADFFSFGTNDLTQTTFGISRDDSGKFLNDYIDNKIFDVDPFVSIDQNGVGELVELASSRGRKTNKNIKLGICGEHGGDPRSIEFCSTTGLNYVSCSPFTVPVARLAAAQAELSK

SEQ ID NO: 137228 - protein, 213 aa, Unknown
  Bacterial polypetide isolated from the Sargasso Sea
MLGHRGCRLGISFPEIYEMQCRAIFTALIECKKEKIQSVIPEIMIPLVSTEDEIGIMRKLVDEVAKKVQKENKIKLEYFVGTMIELPRAALRAAPISKYADFFSFGTNDLTQTTYGISRDDSGKFLNDYLDHKIFDTDPFVSIDKDGVGELVKIATERGRKNNRKLKLGICGEHGGDPKSIEFCSKAGLNYVSCSPFRVPIARLAAAQAELSK

SEQ ID NO: 137229 - protein, 213 aa, Unknown
  Bacterial polypetide isolated from the Sargasso Sea
MLGHRGCRLGISFPEIYEMQCRAIFEALSELKKKKIKTAFPEIMIPLVSTESEIKIMRDLVVRVANQVQKFNDIKIDYLVGTMIELPRAAIKAKEIAKHADFFSFGTNDLTQTTFGISRDDSGKFLNDYIENKIFSIDPFISIDDGVGELIQIASEKGKKQNKSIKLGICGEHGGDPKSIHFCSNVGLNYVSCSPYRVPVARLAAAQAQIKKN

SEQ ID NO: 137230 - protein, 214 aa, Unknown
  Bacterial polypetide isolated from the Sargasso Sea
MLGHRGCRLGISFPEIYEMQCRAIFEALAELKNEKIKSAFPEIMIPLVSTEAEIKIMKDLVIRIASEVQKEHKLKIDFMVGTMIELPRAAIKAKDIAKHAEFFSFGTNDLTQTTFGISRDDSGKFLNDYLDNKIFSIDPFISIDEGVGDLIKIAVERGKSQNKKIKLGICGEHGGDPSSILFCSKAGLNYVSCSPYRVPVARLAAAQAELKTNS

SEQ ID NO: 137231 - protein, 196 aa, Unknown
  Bacterial polypetide isolated from the Sargasso Sea
YEMQCRAIFEALCELKKNKIKSAFPEIMIPLVSTEAEIRIMKDLVKRVASLVQKENKLKIEFMVGTMIELPRAAIKAKEIAKHAEFFSFGTNDLTQTTFGISRDDSGKFLNDYLENKIFSIDPFVSIDEGVSELVEIAVAKGKSQNKKIKLGICGEHGGDPKSISFCAKAGLNYVSCSPYRVPVARLAAAQAELKK

SEQ ID NO: 137232 - protein, 207 aa, Unknown
  Bacterial polypetide isolated from the Sargasso Sea
GCRLGISFPEIYEMQCTAIFDALVECKKLKKKSIIPEIMIPLVSTEAEIKIMKDLVIRVAKEVENKTKIKFNFLVGTMIELPRAAIKADDISRHAEFFSFGTNDLTQTTFGISRDDSGKFLNDYIENKIFDVDPFVSIDDGVGDLIEIATKKGRKNNKKIKLGICGEHGGDPKSIDFCARAGLDYVSCSPYRVPVARLAAAQAQLKK

SEQ ID NO: 137233 - protein, 195 aa, Unknown
  Bacterial polypetide isolated from the Sargasso Sea
SPEDIQGMHAAKGILTARGGMTSHAAVVARGMGRPCVSGSSEIDINYENKSFKTSSMEIKEGEIITIDGSTGRIIQGSVATVKPEISGDFSKLMMWADNFRKLNIRTNSETPKDTKTAKDFGAEGIGLCRTEHMFFDEERILSVREMILSKTIEDRSIALNKLLPHQKKDFIEIFKIMSRLPVTVRLLDPPLHEF

SEQ ID NO: 137234 - protein, 251 aa, Unknown
  Bacterial polypetide isolated from the Sargasso Sea
TGIVVFSASEAQACAARGEACILVRRETSPEDIRGMHAAAGVLTERGGMTSHAAVIGRGIGLPCVVGVSEINFNSNNKSFSISDGRAFLQGDLITIDGTLGQVLGGTPKMIEAALDDSLKLMLEWAEEAGDIKVRANADTPSEAKTAQNFNAHGIGLCRTEHMFFDADRLTLMREMIFAHNRDERRAVLERLLPMQRSDFFELFNLMKGLPVCIRLFDLPLHEFLPNDREGMHDLAEALDLPLSNVMSRVE

SEQ ID NO: 137235 - protein, 284 aa, Unknown
  Bacterial polypetide isolated from the Sargasso Sea
CRTEHMFFDADRLTLMREMIFAHNRDERRAVLDRLLPMQRSDFFELFTLMKGLPVCIRLFDLPLHEFLPNDREGMHDLAEALDMPLSNVMSRVETLAEYNPMLGMRGVRVGVTVPEIYEMQARAIFEATAEASKNGTPVVPEIMIPLVSAKREVELVRSRIDGVASMVRAETGVQFDYRLGIMVETPRAALRADDIALNSAFLSFGTNDLTQMTYGLSRDDAGRFMSDYVQQGVFPEDPFHTLDIDGVGELLKMGVTRARGVKSDIVLSICGENGGSPESIDFC

SEQ ID NO: 137236 - protein, 183 aa, Unknown
  Bacterial polypetide isolated from the Sargasso Sea
CKKQKIQSTMPEIMIPLVSTEAEIKIMKDLVIRVAKKVQDANKIKIDFLVGTMIELPRAAIKAKDIARHAEFFSFGTNDLTQTTFGISRDDSGKFLNDYIENKIFDIDPFVSIDDGVGDLIKIATDKGRKQNKKIKLGICGEHGGDPKSIEFCAKTGLDYVSCSPYRVPVARLAAAQAEIKKN

SEQ ID NO: 137237 - protein, 146 aa, Unknown
  Bacterial polypetide isolated from the Sargasso Sea
VQDENKIKIDFLVGTMIELPRAAIKAKDIAKHAEFFSFGTNDLTQTTFGISRDDSGKFLNDYIENKIFDIDPFVSIDEGVGDLIKIATDKGRKQNKKIKLGICGEHGGDPKSIEFCAKTGLDYVSCSPYRVPVARLAAAQAQLKKN

SEQ ID NO: 137238 - protein, 188 aa, Unknown
  Bacterial polypetide isolated from the Sargasso Sea
FEALIECKNKKIKSIIPEIMIPLVSTEAEIEIMKNLVDKVADQVRAENKTKIDYLVGTMIELPRAAIKAEDIARHADFFSFGTNDLTQTTFGISRDDSGKFLNDYIENKIFDVDPFISIDDGVGDLIEIATLKGRKQNKKLKLGICGEHGGDPKSINFCSSTGLNYVSCSPYRVPVARLAAAQAQLKK

SEQ ID NO: 137239 - protein, 282 aa, Unknown
  Bacterial polypetide isolated from the Sargasso Sea
MEVGGDIIEEGDWISLDGTLGEVYLGQLPKVVPDIKNPGLIKLLSWADEIRKLGVWANADYPRDAQRAREYGAEGIGLCRTEHMFFEADRMPIVQAMIMARHVLERKESLDQLLLLQREDFARLFRAMDGHPVIIRLIDPPLHEFLPSYDELVQGLADLKVRTQHFHTLSEIDSALAEIRVKQDYLEQVEALRELNPMLGTRGVRLGILIPELTQMQVRAIFEAACICSKDGVNVQPEVMIPLTSHVNELKIQQSQLEEVAREVMKEQDLGVKYKFGTMIEL

SEQ ID NO: 137240 - protein, 240 aa, Unknown
  Bacterial polypetide isolated from the Sargasso Sea
EKKINFPQDVKEQLFGAISAVFLSWESQRAKTYRKLNQIPDHWGTAVNVQAMVFGNMGNDCSTGVAFTRNPSTGENSFFGEFLINAQGEDVVAGTRTPQHITKKSRKDSGSKDLSMEEAMPKIYQELTKIFKKLEKNYRDMQDIEFTVENNKLWMLQTRSGKRTAKAAIKIAVDMVKEKLISKKEAILRVDPNTLDTLLHPTLDEKFKKEVMATGLPASPGAASGKVVFSADDAEKLNSM

SEQ ID NO: 137241 - protein, 114 aa, Unknown
  Bacterial polypetide isolated from the Sargasso Sea
HAEFFSFGTNDLTQTTFGISRDDSGKFLNDYIENKIFDVDPFVSIDDGVGELIEFAAEKGKKQNKKIKLGICGEHGGDPKSINFCSKTGLDYVSCSPYRVPVAILAAAQAELKK

SEQ ID NO: 137242 - protein, 210 aa, Unknown
  Bacterial polypetide isolated from the Sargasso Sea
KARQDAKVKELSMEESMPKVFKELQKILKQLERHYKDMQDVEFTVESNKLWMLQTRSGKRTAKSAVKIAVDMVKEKLISKKEAVLRIDPNSLDTLLHPTLDEKSPINVIANGLPASPGAASGKVVFTSEEAERLTAMMQDTILVRVETSPEDIQGMHAAKGILTARGGMTSHAAVVARGMGRPCVSGSSEIDINYENKSFKTSSMEIKEG

SEQ ID NO: 137243 - protein, 248 aa, Unknown
  Bacterial polypetide isolated from the Sargasso Sea
MLKGEDVVAGSRTPRYITKKAKEEAGAKDESMEETMPRVFKELKSIFVKLEKHYRDMQDIEFTVENNKLWMLQTRNGKRTAKAAIKIAVDMVKEKLISKKEAILRIDPNTLDTLLHPTLDEKVNKEVIAKGLPASPGAASGKVVFSADEAEKMNNQKEDTILVRVETSPEDIHGMHAAKGILTARGGMTSHAAVVARGMGRPCVSGSGEINIDYETKEFKVGDLSIKEGEVITIDGGTGRVMKGLVPT

SEQ ID NO: 137244 - protein, 292 aa, Unknown
  Bacterial polypetide isolated from the Sargasso Sea
YRRFIQMYANVVMGIESHLFEEMIDNYKLTKGVLSDTELNSEDWDGLIKNFKNLILEKTKKNFPQDVYVQLFEAIKAVFLSWESKRAKTYRKLNHIPGNWGTAVNVQSMVFGNMGNDCATGVAFTRNPSTGENKFFGEYLINAQGEDVVAGSRTPRHITKKAKEDAGAKEVSMEEKMPKVFKELKNIFIKLEKHYRDMQDIEFTVENNKLWMLQTRNGKRTAKAAIKISVDMVKEKLISKKEAILRIDPNTLDTLLHPTLDESVEKKVIAKGLPASPGAASGKVVFTADEAE

SEQ ID NO: 137245 - protein, 156 aa, Unknown
  Bacterial polypetide isolated from the Sargasso Sea
LVDKIAHEIQKINSMKIKYYVGTMIELPRAAIRAKDIAKYADFFSFGTNDLTQTTFGISRDDSGKFLNDYVENKIFNKDPFVSIDERGVGELIKIATERGRLEKRFLKLGICGEHGGDPASIEFCEKAKLNYVSCSPYRVPIARLAAAQAYLKKRK

SEQ ID NO: 137246 - protein, 310 aa, Unknown
  Bacterial polypetide isolated from the Sargasso Sea
MTSHAALVARGWGKCCIVGCSAIQINTQDREVKIGNTKLEEGDWITMNGTSGNIYNDQLDLIPADPDTHPEYKELMVWADETRKMKIRTNAESPEDAAQAIKFGAEGIGLCRTEHMFFDESRILAIRKMIFADNETSRRDAVMELLPFQKEDFKGILEAMEGKPVTIRLLDPPLHEFMTLTEEQQNELAKSLNVEINAVKNRISALHELNPMLGHRGCRLGIAYPEITEMQVTAILEATAELTQAGKSVLPEIMIPLVGTVSEYTDQEKIVREVADKINNDYKIELKYLVGTMIELPRACLTADEIAKHA

SEQ ID NO: 137247 - protein, 236 aa, Unknown
  Bacterial polypetide isolated from the Sargasso Sea
KKILLRLEKHYRDMQDVEFTVENKKLWMLQTRSGKRTAKSAIKIATDMVKEKLISKKEAVLRIEPNSLDSLLHPTLDEKSNIEVIAKGLPASPGAASGKVVFSSDEAQRLNDMMQNTILVRVETSPEDIHGMHAAKGILTARGGMTSHAAVVARGMGRPCVSGSSEIEIDYENNLFKSNGYAIKEGDLITIDGSTGRIILGEVKTVKPEISGDFSKLMSWADSFRKLKIRTNSETP

SEQ ID NO: 137248 - protein, 260 aa, Unknown
  Bacterial polypetide isolated from the Sargasso Sea
MFFDEERILSVREMILSKTKEDRSNALKKLLPYQKKDFIEIFKIMKGLPVTVRLLDPPLHEFLPKNNNEINDVAVSLNIPIKELEIRISELHEQNPMLGHRGCRLAISFPEIYEMQSTAIFEALVECKKQKIQSTMPEIMIPLVSTEAEIKIMKDLVIRVAKKVQDENKIKIDFLVGTMIELPRAAIKAKDIAKHAEFFSFGTNDLTQTTFGISRDDSGKFLNDYIDNRIFDIDPFVSIDDGVGDLIKIATDKGREQNKK

SEQ ID NO: 137249 - protein, 257 aa, Unknown
  Bacterial polypetide isolated from the Sargasso Sea
FTRNPSDGLNEIYGEYLINAQGEDVVAGTRTPQYITKKARLQAKVKASSMEEIMPNVYKQLYKILKKLEKHYKDMQDVEFTVENKKLWMLQTRSGKRTAKSAVKIAVDMVKEKLISKKEAVLRINPNSLDTLLHPTLDEKSSINVIANGLPASPGAVSGKVVFTSEEAERLNGMMQDTILVRVETSPEDIQGMHAAKGILTARGGMTSHAAVVARGMGRPCVSGSSEIDINYEKKSFKTSSIEVKEGEIITIDGSTG

SEQ ID NO: 137250 - protein, 271 aa, Unknown
  Bacterial polypetide isolated from the Sargasso Sea
SGARVSMPGMMDTILNLGLNDKTVLALAKKTSNMRFANDSYRRFIQMYSNVVLGIENYHFEELIENYKLTKGVLLDTDLDAKDWEGLIKDFKNIVKKKTKKDFPQDVNQQLIGAISSVFLSWESNRAKVYRKLNQIPSSWGTAVNVQSMVFGNMGENCATGVVFTRNPSDGSKEIYGEYLINAQGEDVVAGTRTPQHITKKSRTKSKEKLLSMEEAMPSIYNKLKKILLKLEKHYKDMQDVEFTVENKKLWLLQTRAGKRTAKSAVKIATE

SEQ ID NO: 137251 - protein, 166 aa, Unknown
  Bacterial polypetide isolated from the Sargasso Sea
MAAEIQILRNLVIKTAEEIKKKYSVKIKYYIGTMIELPRAAIRAKDIAKYADFFSFGTNDLTQTTFGISRDDSGKFLNDYVENKIFNKDPFISIDERGVGELIKVATERGRSEKKSLKLGICGEHGGDPASIDFCEKAKLNYVSCSPYRVPVARLAAAQAYLKKKK

SEQ ID NO: 137252 - protein, 227 aa, Unknown
  Bacterial polypetide isolated from the Sargasso Sea
MKLDGRITELHEQNPMLGHRGCRLGISFPEIYEMQCRAIFEALIELKRKKIKFAFPEIMIPLVSTEAEIKILKELVIATAKKVQNDNKTKIDFLVGTMIELPRAALKADDIAKHAEFFSFGTNDLTQTTFGLSRDDSGKFLNDYLENKIFDTDPFVSIDEGVRDLIDIATKKGKKQNKKIKLGICGEHGGDPKSIYLCSKIGLNYVSCSPYRVPIARLAAAQAELKK

SEQ ID NO: 137253 - protein, 183 aa, Unknown
  Bacterial polypetide isolated from the Sargasso Sea
KNKQKFAFPEIMIPLVSTEAEIKIMKDLVINTARKVQKENKTKIEFLVGTMIELPRAAIKADDIAKHAEFFSFGTNDLTQTTFGISRDDSGKFLNDYIDNKIFTIDPFVSIDDGVKDLVEIAVSKGKKQNKKIKLGICGEHGGDPKSIKFCSKAGLNYVSCSPYRVPIARLAAAQAELLKNKN

SEQ ID NO: 137254 - protein, 275 aa, Unknown
  Bacterial polypetide isolated from the Sargasso Sea
SFPRKDFYKIFKKMDGLPVTVRLLDPPLHEFINIHGKEMKKLASDMNLPLKNVEERVESLKEANPMLGHRGCRLGISYPEVTAMQARAIIGAAAKLKKEGNNPKVELMIPLVSNLEEFLNQKEIVLAVKNEILEKDDLKINFKIGTMIEVPRACLVAEEIAEVADFFSFGTNDLTQTTFGFSRDDTGTFFPHYFDEEIMLADPFEQIDRKGVGKLMEIAVRDAKASRNKISLGICGEHGGEPNSIEFCKILGLDYVSCSPYRVPIARLAAAQVEL

SEQ ID NO: 137255 - protein, 263 aa, Unknown
  Bacterial polypetide isolated from the Sargasso Sea
EWGTAVNVQSMVFGNMGDDCATGVVFTRNPSDGKNEIYGEYLINAQGEDVVAGTRTPQYITKKARKNANEILPSMEESMPSVYKNLKNILIKLEKHYKDMQDVEFTVENMKLWMLQTRSGKRTAKSSVKIAVDMEREKLITKKEAVLRVQPNSLDTLLHPTLDEKANLNVIAKGLPASPGAACGKVVFTSDEAERLNGMMQNTILVRVETSPEDIHGMHAAKGILTARGGMTSHAAVVARGMGRPCVSGSSEIEIDYQKKIFK

SEQ ID NO: 137256 - protein, 173 aa, Unknown
  Bacterial polypetide isolated from the Sargasso Sea
IPEIMIPLVSTEAEIKIIKDLVINVARKVQNENKTKIKFLVGTMIELPRAAIKAKDIAKYAEFFSFGTNDLTQTTFGISRDDSGKFLSDYIENKIFDIDPFVSIDDGVGDLMEIAVTKGKKQNKKIKLGICGEHGGDPKSIEFCSKIGLDYVSCSPYRVPIARLAAAQAQLKK

SEQ ID NO: 137257 - protein, 221 aa, Unknown
  Bacterial polypetide isolated from the Sargasso Sea
SELHEQNPMLGHRGCRLAISFPEIYEMQCTAIFEALVECKKQKIQSTMPEIMIPLVSTEAEIKIMKDLVIRVAKKVQDANKIKIDFLVGTMIELPRAAIKAKDIAKHAEFFSFGTNDLTQTTFGISRDDSGKFLNDYIENKIFDIDPFVSIDDGVGDLIKIATDKGRKQNKKIKLGICGEHGGDPKSIEFCAKTGLDYVSCSPYRVPVARLAAAQAQIKKI

SEQ ID NO: 137258 - protein, 172 aa, Unknown
  Bacterial polypetide isolated from the Sargasso Sea
EIMIPLVSTDSELKILRALVNKIAKEIEKANKLKLNFIIGTMIELPRAALQAKSISKHADFFSFGTNDLTQTTLGISRDDSGKFLNDYIDNKIFDVDPFVSIDQNGVGELVEIASSRGRKVNKKIKLGICGEHGGDPKSIEFCSRTGLDYVSCSPFRVPVARLAAAQAELRR

SEQ ID NO: 137259 - protein, 255 aa, Unknown
  Bacterial polypetide isolated from the Sargasso Sea
IRNETSPEDIHGMHASQGILTAKGGMTSHAALVARGWGKCCIVGCSRIIIDVENKSVNINGTILKEGDWISLNGSTGNIYQGKINLINPNLKKNKIFSDFMKLCDKHRTIKIRTNVDTPEDAQQALDFQCEGIGLCRTEHMFFDPDRISAMREMILSKNEKYRKQALMKLLPYQKQDFYNLLKVMSGLPVTIRLLDPPLHEFLPQTEEQILHLASEMGITSKTIYDRIDALHELNPMLGHRGCRLGIVYPEITIM

SEQ ID NO: 137260 - protein, 202 aa, Unknown
  Bacterial polypetide isolated from the Sargasso Sea
SFPEIYEMQCRAIFEALIDCKKRKLKSTMPEIMIPLVSTEAEIKIMKDLVIRVAKKVQDENNTKVSFLVGTMIELPRAAIKAKDIAKHAEFFSFGTNDLTQTTFGISRDDSGKFLNDYIENKIFDIDPFISIDDGVGDLIEIATLKGKKQNKNIKLGICGEHGGDPKSINFCSKTGLNYVSCSPYRVPVARLAAAQAELIKK

SEQ ID NO: 137261 - protein, 177 aa, Unknown
  Bacterial polypetide isolated from the Sargasso Sea
MPEIMIPLISTEAEIKIMKDLVIRVARKVQKDNKVNLDYLVGTMIELPRAAIKAKDIAKHAEFFSFGTNDLTQTTFGISRDDSGKFLNDYLENKIFDIDPFISIDDGVADLIKMASFKGKKQNQKLKLGICGEHGGDPKSIEFCAKTGLDYVSCSPYRVPIARLAAAQAEIKKNINF

SEQ ID NO: 137262 - protein, 246 aa, Unknown
  Bacterial polypetide isolated from the Sargasso Sea
PRTEKEINEVAGTVNLPVKEVVSRIEELHEQNPMLGHRGCRLGISFPEIYEMQCKAIFEALAYLKKNKIKSAFPEIMIPLVSTEAEIKIMKDLVTRIASRVQQENKLKIEFLVGTMIELPRAAIKAKEIAKHAEFFSFGTNDLTQTTFGISRDDSGKFLNDYLENKIFSVDPFVSIDEGVSDLLEIAVEKGREQNKKLKLGICGEHGGDPHSISFCSNAGLNYVSCSPYRVPIARLAAAQAELKKN

SEQ ID NO: 137263 - protein, 245 aa, Unknown
  Bacterial polypetide isolated from the Sargasso Sea
EAVLRVEPEHLEQFLFPIFNPEDKKKFDIMTRGLAASPGAASGRVALDAQTAVELGKKGKRVVLVTQETSPDDIHGMAAAHGLLTARGGRTSHAAVVGRQMGKVCVVGAEEIKVNIKDRNFSVGNKIIKEGDYISIDGFEGKVFSGDIPVVASEVIQVMQGNMREIASERYNIFSTILKWADSFRTLDIRTNADVPSDAATAIKFGAEGIGLCRTEHMFFAEDRIKIMQEMILSKSEKERIKHLN

SEQ ID NO: 137264 - protein, 269 aa, Unknown
  Bacterial polypetide isolated from the Sargasso Sea
RFLLHWGTAVNVQSMVFGNMGEDCATGVVFTRNPSDGKNEIYGEYLINAQGEDVVAGTRTPQYITKKARKKSGSNGKSMEETMPDVFKELKKNLKILEKHYKDMQDVEFTVENKKLWMLQTRSGKRTAKSSVKIAVEMVKEKLISKKEAILRVDPGSLDSLLHPTLDEKSDIKVIAKGLPASPGAASGKVVFSSDEAERLNSMMQDTILVRIETSPEDIHGMHAAKGILTSRGGMTSHAAVVARGMGRPCVSGSSEIDINYENKTFKTS

SEQ ID NO: 137265 - protein, 276 aa, Unknown
  Bacterial polypetide isolated from the Sargasso Sea
KYILGGKGANLAEMGKLGFPVPPGFTISTLACELFYKNKKKLNSALTNQIKAELKIIENDTGKKFGDVKNPLLVSVRSGARVSMPGMMDTILNLGLNDQTVIALANKTKNIRFAKDSYRRFIQMYSDVVLGVKAYNFEDLIENYKLTKGVLLDTDLDENDWDGLINDFKELVKNKTKKEFPQNVIEQLIGAISAVFLSWDSHRAKVYRKINQIPSNWGTAVNIQSMVFGNMGNDSATGVVFTRNPSNGINEVYGEYLVNAQGEDVVAGTRTPQYIT

SEQ ID NO: 137266 - protein, 202 aa, Unknown
  Bacterial polypetide isolated from the Sargasso Sea
ISFPEIYEMQCKAIFEALVYLKKNKIKSAFPEIMIPLVSTETEIKIMKDLVIRTASYVQKEHKLKIEFLVGTMIELPRAAIKAKEIAKHAEFFSFGTNDLTQTTFGISRDDSGKFLNDYLENKIFSVDPFVSIDEGVSDLVEIAVEKGRKQNKNLKLGICGEHGGDPHSISFCSKAGLNYVSCSPYRVPIARLAAAQAEIKK

SEQ ID NO: 137267 - protein, 275 aa, Unknown
  Bacterial polypetide isolated from the Sargasso Sea
LDTELNSDDWDGLIVNFKNLIFEKTKKKFPQDVFIQLFGAISAVFLSWESKRAKTYRKLNHIPSDWGTAVNVQSMVFGNMGNDCATGVGFTRNPSTGENKFFGEYLINAQGEDVVAGSRTPRYITKKAKEESGAKEDSMEEKMPKVFKELKHVFIKLEKHYRDMQDIEFTVENNKLWMLQTRNGKRTANAAIKIAVDMVKEKLISKKEAILRIDANTLDTLLHPTLDEKADKQVIAKGLPASPGAASGKVVFTADEAERMNNQKEDTILVRVETS

SEQ ID NO: 137268 - protein, 285 aa, Unknown
  Bacterial polypetide isolated from the Sargasso Sea
VVFTRNPSDGSNEIFGEYLINAQGEDVVAGTRTPQHITKKARLNSKEKLLSMEESMPSIYKDLKKILLRLEKHYRDMQDVEFTVENKKLWMLQTRSGKRTAKSAIKIATDMVKEKLISKKEAVLRIEPNTLDSLLHPTLDEKSNIELIAKGLPASPGAASGKVVFSSDEAQRLNDMMQNTILVRVETSPEDIHGMHAAKGILTARGGMTSHAAVVARGMGRPCVSGSSEIEIDYENNLFKSNGYEIKEGDSITIDGSTGRIILGEVKTVKPEISGDFSKLMSWAE

SEQ ID NO: 137269 - protein, 230 aa, Unknown
  Bacterial polypetide isolated from the Sargasso Sea
YITKKARKNAKVKEPSMEESLPKVFKELKKILKKLEKHYKDMQDVEFTVENNKLWMLQTRSGKRTAKSAVKIAVDMVKEKLISKKQAVLRIDPNSLDTLLHPTLDEKSAINVIANGLPASPGAASGKVVFTSEEAERLTSMMQDTILVRVETSPEDIQGMHAAKGILTARGGMTSHAAVVARGMGRPCVSGSSEIDINYEMKTFKTSSMEIKEGDIITIDGSTGRIISGS

SEQ ID NO: 137270 - protein, 291 aa, Unknown
  Bacterial polypetide isolated from the Sargasso Sea
LNYRFAKDSYRRFIQMYANVVLNIENYNFEELIENYKLTKGVLLDTELDASDWDGLINDFKNLIKEKTKIEFPQDVNEQLIGAISAVFLSWESKRAKVYRKLNQIPSDWGTAVNVQSMVFGNMGEDCATGVVFTRNPSNGKNEIYGEYLINAQGEDVVAGTRTPQYITKKARKATGSKESSMEESLPKVFQKLKKLLKTLEKHYKDMQDVEFTVENKKLWILQTRSGKRTAKSAVKIAFDMVREKLISKKEALLRIDPNSLDTLLHPTLDEKSKIMVIAKGLPASPGATSG

SEQ ID NO: 137271 - protein, 282 aa, Unknown
  Bacterial polypetide isolated from the Sargasso Sea
SVRSGARVSMPGMMDTILNLGLNDKTVVALANKTSNGRFAKDSYRRFIQMYGNVVMGVESYNFEELIENYKLTKGVLLDTDLDEEDWDGLTNDFKNVVKEKTGKDFPQDVYHQLFGAISAVFLSWESKRAKVYRKLNQIPSEWGTAVNVQSMVFGNMGNDCATGVVFTRNPSNGSNDIYGEYLINAQGEDVVAGTRTPQYITKKARKVAKVKDLSMEESMPEAYQELYKILKKLEKHYKDMQDVEFTVESKKLWILQTRSGKRTSKSAVKIAVDMVGEKVNQ

SEQ ID NO: 137272 - protein, 169 aa, Unknown
  Bacterial polypetide isolated from the Sargasso Sea
PTLDEKSKINVIAKGLPASPGAASGKVVFSSHEAERLNEMMQDTILVRVETSPEDIHGMHAAKGILTSRGGMTSHAAVVARGMGRPCVSGSSEIDINYEKKIFRTKFIEIKEGDLITIDGSTGRIIQGEVPKIKPEISGDFSKLMSWADSFRKLKIRTNSETSLDTKTA

SEQ ID NO: 137273 - protein, 300 aa, Unknown
  Bacterial polypetide isolated from the Sargasso Sea
YKEVYRKHVGKPFPQDPKTQLEAAIEAVFKSWMGDKAVSYRRIEGIVGLNGTGVNVQTMVFGNTGDDSGTGVAFTRDPSTGKNEFYGEFLVNAQGEDVVAGIRTPEPVARMAKWDAKAHKELLKVRTKLEKHYRDVQDIEFTIERGKLYMLQTRNGKRTGAAAVKFAADMVKERLISKKEAVMRVSPDHVTQLLLPSFPTSAKKGAKALTVGLPASPGAAVGAPAFTAEEAVERAKQGEQVILVRKETSPEDVDGMHMAAGILTSTGGMTSHAAVVARGWGKCCVAGAGAVQIDAAKRRF

SEQ ID NO: 137274 - protein, 316 aa, Unknown
  Bacterial polypetide isolated from the Sargasso Sea
KNLISQNIKELKLIEKDVSKKFGDLKNPLLLSVRSGARVSMPGMMDTILNLGLNDKTVQALAIKTLNGRFAKDSYRRFIQMYGNVVMGVESYHFEELIENYKLTKGVLLDTDLDESDWDGLIEDFKRTVKEKAKKDFPQDVYEQLLGAISAVFLSWESNRAKIYRKLNQIPVEWGTAVNVQSMVFGNMGDDCATGVVFTRNPSDGLNEIYGEYLINAQGEDVVAGTRTPQYITKKARQDAKEKELSMEESMPKVFKELKKILKKLEKHYKDMQDVEFTVESNKLWMLQTRSGKRTAKSAVKIAVDMVKEKLIQKKR

SEQ ID NO: 137275 - protein, 157 aa, Unknown
  Bacterial polypetide isolated from the Sargasso Sea
VLSIEPNSLDSLLHPTLDEKSKIEVIAKGLPASPGAASGKVVFSSDEAESLNAMMQNTILVRVETSPEDIHGMHAAKGILTARGGMTSHAAVVARGMGRPCVSGSSEIEIDYVNKSFKTKDHEIKEGDLITIDGSTGRIILGEVKTVKPEISRDFSN

SEQ ID NO: 137276 - protein, 145 aa, Unknown
  Bacterial polypetide isolated from the Sargasso Sea
VQNENNIKIKFLVGTMIELPRAAIKAEDIAKHAEFFSFGTNDLTQTTFGISRDDSSKFLNDYIENKIFDIDPFISIDDGVGDLIKIAAFKGKKQNSKIKLGICGEHGGDPKSIEFCSKAGLDYVSCSPYRVPVARLAAAQAQLKK

SEQ ID NO: 137277 - protein, 378 aa, Unknown
  Bacterial polypetide isolated from the Sargasso Sea
MGLPVPPGFTISTKVCEIFYEDKKKLNNILISQIKKELKIIEKDVSKKFGDLKNPLLLSVRSGARVSMPGMMDTILNLGLNDKTVNALALKTSNGRFAKDSYRRFIQMYGNVVMGVESYHFEELIENYKLTKGVLLDTDLDENDWDGLIEDFKRTVKEKTKKEFPQDVFQQLFGAISAVFLSWESNRAKVYRKLNQIPAEWGTAVNVQSMVFGNMGDDCATGVVFTRNPSDGSNEIYGEYLINAQGEDVVAGTRTPQYITKKARKNAKVEEPSMEESLPKVFKELKKILKKLEKHYKDMQDVEFTVENNKLWMLQTRSGKRTAKSAVKIAVDMVMEKLISKKEAVLRIDPNSLDTLLHPTLDEKSLINVIANGLPASP

SEQ ID NO: 137278 - protein, 137 aa, Unknown
  Bacterial polypetide isolated from the Sargasso Sea
IKFLVGTMIELPRAAIKAKDIAKHAEFFSFGTNDLTQTAFGISRDDSGKFLNDYIENKIFDIDPFISIDEGVGDLIKIASERGRKQNKNIKLGICGEHGGDPKSIYFCSGAGLDYVSCSPYRVPVARLAAAQAQLKK

SEQ ID NO: 137279 - protein, 152 aa, Unknown
  Bacterial polypetide isolated from the Sargasso Sea
RTAKKVQNQNKTKIKFLVGTMIELPRAAIKATDIAKHAEFFSFGTNDLTQTTFGISRDDSGKFLNDYIENKIFDIDPFISIDEGVGDLIKIASEKGRKQNKNIKLGICGEHGGDPKSIFFCSEVGLDYVSCSPYRVPVARLAAAQAQLKNNL

SEQ ID NO: 137280 - protein, 168 aa, Unknown
  Bacterial polypetide isolated from the Sargasso Sea
VGHVNEFKIVREFILEVASEVLKKENVNLDFEIGTMIELPRAALTADEIANEADFFSFGTNDLTQTAFGFSRDDSGSFLRQYVDLELLDHDPFVSIDQEGLGQLVQIAFEKGRKVKPKIHMGVCGEHGGDPASIGFFSRLGFDYVSCSPYRVPTAILSAAQAVIKKNP

SEQ ID NO: 137281 - protein, 120 aa, Unknown
  Bacterial polypetide isolated from the Sargasso Sea
ANEIADKAEFFSFGTNDLTQTTYGFSRDDIGGFLPEYLERGILEHDPFQSLDQTGVGQLVQMGVEKGREVRSDLKIGICGEHGGDPESISFCNRIGLDYVSCSPFRVPIARLSAAQAELK

SEQ ID NO: 137282 - protein, 424 aa, Unknown
  Bacterial polypetide isolated from the Sargasso Sea
MNKLILNFKSKDSKKIKDPKNFLGGKGANLSEMGRMGLPVPPGFTISTKVCEIFYKDKKKLNSKLISQIKKEIKIIEKEVSKKFGDLKNPLLLSVRSGARVSMPGMMDTILNLGLNDETVVALANKTSNGRFAKDSYRRFIQMYGNVVMGVESYNFEELIENYKLTKGVLLDTDLDEEDWDGLINDFKNVVKEKTSKDFPQDVYHQLFGAISAVFLSWESKRARVYRKLNQIPSEWGTAVNVQSMVFGNMGNDCATGVVFTRNPSDGSNDIYGEYLINAQGEDVVAGTRTPQYITKKARKEAKVDDVSMEESMPEVYHELYKILKKLEKHYKDMQDVEFTVESNKLWILQTRSGKRTSKSAVKIAVDMVREKLINKNDAVLRVDPNSLDTLLHPTLDERSSIKVIANGLPASPGAVSGKVVFSS

SEQ ID NO: 137283 - protein, 272 aa, Unknown
  Bacterial polypetide isolated from the Sargasso Sea
YKVTIRLLDPPLHEFLPNPEELKDKMNKENDKSAKTQRVLDRARELAEINPMMGHRGVRVAITYPEIYRMQITAVFEAAAELAKKKVNAKPQIMIPQVGSLAELNYIKSIYDDVKKQIEQKYKKKFKINFGTMLEVVRACLTSDELADTAEFFSFGTNDLTQAVFSFSREDAEGKFLPEYMEKELLETSPFQSIDVNGVGHLMKIGIKQGRDIKKDLEIGICGEHGGDPNSIKFCHSADVSYVSASPHRIPIAIVAAAQASIEQKKTRKLKK

SEQ ID NO: 137284 - protein, 488 aa, Unknown
  Bacterial polypetide isolated from the Sargasso Sea
MNLGLNEKTVEGFAQQTKNPRFSWDSYRRFIQLFGKVVFGVNDEKFDHVLDSAKSKQGVTDDSKLNVESLKKIVAEYKKICENHTKRKFPDTPNEQLGLAIEAVFKSWMGERAVVYREKNGITKDIANGTAVNVVTMVFGNMGDDSATGVVFTRNGHNGKREIEGEYLTNAQGEDVVAGVRTGKNVELLKKEMPKSHKELSSACAKLEKHFREPQDIEFTIEQGKFYLLQTRTAKMSAGALVKTSVDMVKEKLIDKNKALTRIPAQQLEALLHRTMDESKIKDHKQLAKGIAASPGAASGIAIFDVKKAIELGEAGKKVILIRKETKPEDVPAFFSAEGILTSLGGKSSHAAIVSRGMGKPCIVGCAELKINYDNNTCTANGITVKENEMVSIDGSVGTVFIGQVPTVEPKVTKDFQTILSWAQSTKQLGIRANADTPDAAKLARQYGAQGIGLCRTERMFNETDRIGLFVEMIMAQSQDERNKVLKK

SEQ ID NO: 137285 - protein, 181 aa, Unknown
  Bacterial polypetide isolated from the Sargasso Sea
LIKENVEVAPEVMIPLVGTYKEYEHQEGLVRKIAEEVRSESGENFSYLVGTMIELPRAALTANEIADKAEFFSFGTNDLTQTTYGFSRDDIGGFLPEYLERGILEHDPFQSLDQNGVGQLVQMGVEKGREVRGDLKIGICGEHGGDPESISFCNRIGLDYVSCSPFRVPIARLSAAQAELE

SEQ ID NO: 137286 - protein, 213 aa, Unknown
  Bacterial polypetide isolated from the Sargasso Sea
MLGHRGCRLGISFPEIYEMQCRAIFTALIECKKEKIQSIIPEIMIPLVSTEDELGIMRKLVNRVADELQKEHKVKINYFVGTMIELPRAALRAAPISKYADFFSFGTNDLTQTTFGISRDDSGKFLDDYIDHKIFDNDPFVSIDRDGVGELVKIASQRGKKQNKKLKLGICGEHGGDPKSIEFCSKAGLNYVSCSPFRVPIARLAAAQAELRR

SEQ ID NO: 137287 - protein, 158 aa, Unknown
  Bacterial polypetide isolated from the Sargasso Sea
LVIKIAKEVQKENKTKIEFSVGTMIELPRAAIKAKEIAKHAEFFSFGTNDLTQTTFGISRDDSGKFLNDYIENKIFTVDPFVSIDDGVKDLVEIAVEKGKKQNKKIKLGICGEHGGDPDSILFCSKIGLNYVSCSPYRVPIARLAAAQAELKKYKSRS

SEQ ID NO: 137288 - protein, 127 aa, Unknown
  Bacterial polypetide isolated from the Sargasso Sea
ELPRACLTADEIAEHAEFFSFGTNDLTQTTYGFSRDDIGSFLPEYLDRNILPGDPFQSLDVKGVGKLVSMAVKFGRDVNPSIKIGICGEHGGDPNSIHFCKNNGLDYVSCSPYRVPIARLSAAQAEL

SEQ ID NO: 137289 - protein, 231 aa, Unknown
  Bacterial polypetide isolated from the Sargasso Sea
LGVKEIKNRVAELHELNPMLGHRGCRLGISFPEIYEMQCKAIFSALIECKKDNIKSIIPEIMVPLVSTEDELGIMRKLVNRVADQLQQENKVKINYFVGTMIELPRAALRAAPISKYADFFSFGTNDLTQTTFGISRDDSGKFLNDYIDHKIFDEDPFVSIDKDGVGELVKIASQRGKKQNKKLKLGICGEHGGDPRSIEFCSKNGLNYVSCSPFRVPIARLAAAQAELRR

SEQ ID NO: 137290 - protein, 507 aa, Unknown
  Bacterial polypetide isolated from the Sargasso Sea
MNNKQKIYFFSQLQTDGDQNMVNILGGKGANIAEMCKLGLPVPPGFTLSTSLCSDYLKSKSLSIVLKNNIKKNISKTEGVIGKMFGGSNPLLLSVRSGAPVSMPGMMETILNIGLTSKTIPHMIKMSKNESFVYDSYRRLIMMYADVVMEKALRLNKSNRSIRELMEKELDSAKKYKGYKNDSNMKAKDWKALSNKYLRMVEKEFGIPFPDDHYEQLYGAIAAVFESWNGKRAKEYRNFEKISSSMGTAVNVQAMVFGNLGKDCGTGVAFTRNPSTGENVFFGEWLPNAQGEDVVAGIRTPHPVAGNSKNSLSVAMPKAFKELEGVRKTLENHFDDMQDIEFTIQEKKLWMLQTRRGKRTGIAAIKIATDMVKEKLITKEVAVSRVRPHQIYESLLKNIDPKDVENSLPISLGLPAGPGASCGVAVFTAEKAEELGKKNKKVILVREETSPEDIHGMHYSEGILTSRGGLTSHAALVARGWGKSCVVGCQDLTIDKSHTFAKIGNKK

SEQ ID NO: 137291 - protein, 258 aa, Unknown
  Bacterial polypetide isolated from the Sargasso Sea
FLPNPEELKDKMNKENDKSKKTQRVLDRARELAEINPMMGHRGVRVAITYPEIYKMQITAVFEAAAELAKKKVNAKPQIMIPQVGSLAELNYIKSIYDDVKKEMEQKYKKKFKINFGTMLEVVRACLTSDELADTAEFFSFGTNDLTQAVFSFSREDAEGKFLPEYMEKELLETSPFQSIDVNGVGHLMKIGIRQGRDIKKDLEIGICGEHGGDPNSIKFCHSANVSYVSASPHRIPIAIVAAAQAAIEQKKTKKSKK

SEQ ID NO: 137292 - protein, 163 aa, Unknown
  Bacterial polypetide isolated from the Sargasso Sea
ESELKILRALVNKIAKEIEKENKLKLEYMVGTMIELPRAALQAKSISKHADFFSFGTNDLTQTTFGISRDDSGKFLNDYIDNKIFDIDPFVSIDQNGVGELVEIASSRGRKTNKNIKLGICGEHGGDPKSIEFCSRTGLNYVSCSPYRVPVARLAAAQAELSK

SEQ ID NO: 137293 - protein, 531 aa, Unknown
  Bacterial polypetide isolated from the Sargasso Sea
KLPDGLSEEIIAYVQNLENLSQKNFAKSESPLLLSVRSGGMISMPGMMDSILNIGLNDQNVQSLAKAFNDERFALDSYRRLIQMYSNVVLGVEMDRFEAVIANKKRIDNVISDADFNAKQLDWIINAYKNTVERFTNSPFPQDPHEQLLGAIEAVFSSWQNKRAITYRKINNIPDSLGTGATVQTMVFGNLNDKSATGVAFTRNPSNGTKELYGEYLINAQGEDVVAGIRTPHPIRNIGTSELESLELKFPDAFQEIKGIASKLENHFKEVQDIEFTIENEKVYLLQTRKAKRTAEASIKIAIELHKEGITTKEESLTMVDANNITNVLHPQFVESQEKLLFSKALNASPGAAVGEIVFDADKAEKEANRGRDVILVRDETSPEDIHGMHSSVGILTTKGGMTSHAAVVARGMGKPCVVGAEGLNIDVENKTVGNGEDLLSEGDIISIDGSLGEVYIGELETEPPKPSDEFNTLMEWCNEYKKLAIRANSETVIDTKKSLEFGAEGIGLCRTEHMFFEGERIIPMREMIMS

SEQ ID NO: 137294 - protein, 254 aa, Unknown
  Bacterial polypetide isolated from the Sargasso Sea
DPPLHEFMTLTEEQQNELAKSLNVEIGAVKNRISALHELNPMLGHRGCRLGIAYPEITEMQVTAILEATAELTQAGKSVLPEIMIPLVGTVSEYTDQEKIVRKVADRINNEYKIELKYLVGTMIELPRACLTADEIAEHAEFFSFGTNDLTQTTFGFSRDDIGSFLPEYLERNILPEDPFQSLDTNGVGKLVTMAVKYGRGVNDSLKIGICGEHGGDPASILFCKENGLDYVSCSPFRVPIARLAAAQAELNNN

SEQ ID NO: 137295 - protein, 213 aa, Unknown
  Bacterial polypetide isolated from the Sargasso Sea
MLGHRGCRLGISFPEIYEMQCEAIFEALVELKKEKTKAAFVEIMIPLVSTDTELKILRALVKRIAKKIDLKNKTKLDYIVGTMIELPRAALQAKSISKHADFFSFGTNDLTQTTYGISRDDSGKFLNDYIDNKIFEIDPFVSIDQSGVGELVELASARGRKVNKKLKLGICGEHGGDPKSIEFCSRTGLNYVSCSPFRVPVARLAAAQAELRR

SEQ ID NO: 137296 - protein, 211 aa, Unknown
  Bacterial polypetide isolated from the Sargasso Sea
LRADQLLSWADEIRKLGVWANPDYPRDAQRAREYGAEGIGLCRTEHMFFEAERMPIVQAMIMARHVLERKESLDQLLTLQREDFAGLFRAMYGHPVIIRLIDPPLHEFLPSYDELVQGLADLKVRTQHFHTLSEIDSALTEIRVKQDYLEQVEALRELNPMLGTRGVRLGILIPELNLDAGPGDLRSRLRLLQRRGQRPARSDDSPDLSCQ

SEQ ID NO: 137297 - protein, 170 aa, Unknown
  Bacterial polypetide isolated from the Sargasso Sea
MIPLVSTEAEIKIMKDLVIRVAKKVQDENKIKLDFLVGTMIELPRAAIKAKDIAKHAEFFSFGTNDLTQTTFGISRDDSGKFLNDYIENKIFDIDPFVSIDDGVGDLIKIATDKGRKQNKKIKLGICGEHGGDPKSIEFCAKTGLDYVSCSPYRVPVARLAAAQAQIRKN

SEQ ID NO: 137298 - protein, 401 aa, Unknown
  Bacterial polypetide isolated from the Sargasso Sea
MSKYLFSFGDKKTKKIKNSRNILGGKGSNLAEMARLGLPVPPGFTISTEMCEVFYNNKKKLTPKIFGEIKKELKKVELKTKKKFGDNTNPLLVSVRSGSRVSMPGMMDTILNLGLNDKTVEGLSKKTSNERFAKDSYRRFIQMYGNVVLGVESHLFEELIDNYKLTKGVLLDTELNSEDWNGLIKNFKELILDKSKKNFPQDVYEQLFGAIKAVFLSWESKRAKTYRKFNHIPGDWGTAVNVQSMVFGNMGDDCATGVGFTRNPSTGENKFFGEYLINAQGEDVVAGSRTPRYITKKAKEDSGAKEDSMEEIMPTVFKELKDVFIKLEKHYRDMQDIEFTVENNKLWMLQTRSGKRTAKAAIKIAVDMVKEKLISKKEAILRIDPNTLDTLLHPTLDEKVK

SEQ ID NO: 137299 - protein, 118 aa, Unknown
  Bacterial polypetide isolated from the Sargasso Sea
ISKHADFFSFGTNDLTQTTFGISRDDSGKFLNDYIDNKIFDVDPFVSIDQNGVGELVEIASSRGRKTNKNIKLGICGEHGGDPRSIKFCSRTGLNYVSCSPFRVPVARLAAAQAELSK

SEQ ID NO: 137300 - protein, 210 aa, Unknown
  Bacterial polypetide isolated from the Sargasso Sea
DIEDVDWLFLFPEIYEMQCRAIFEALIECKNKKIKSIIPEIMIPLVSTEAEIEIMKNLVDKVADQVKTENKTKIDYLVGTMIELPRAAIKAKDIARHADFFSFGTNDLTQTTFGISRDDSGKFLNDYIENKIFDVDPFISIDDGVGDLIEIATLKGRKQNKKLKLGICGEHGGDPKSINFCSSTGLNYVSCSPYRVPVARLAAAQAQLKK

SEQ ID NO: 137301 - protein, 453 aa, Unknown
  Bacterial polypetide isolated from the Sargasso Sea
GMMETILNIGLTSKTIPHMIEASGNEGFVYDSYRRLIMMYADVVMEKALMLNKSSRPIRELMEKELGSIKKTKGYKNDSNMNAKDWKALSEKYLKIVKREFGVPFPDDHYQQLYGAVAAVFESWNGKRAKEYRSFEKISSSMGTAVSIQAMVFGNLGKDCGTGVAFTRNPSTGENVFFGEWLPNAQGEDVVAGIRTPHPIIDGKKSKKSLSVAMPKAFEELNDVRKKLENHFDDMQDIEFTVQENKLWMLQTRTGKRTGIAAIKIATDMVKEQLITREVAVGRVHPLQIYESLLKNIVAEDLNNNLPVSFGLPAGPGASCGAAVFSAEKAEALGKKGKKVILVREETSPEDIHGMHYSEGILTSRGGLTSHAALVARGWGKSCIVGCQDLTIDKNLRFAKIADKKINEGDQITLNGSSGDIYLGELELFQNPLDNTGPLSLLLSWADKIRRLK

SEQ ID NO: 137302 - protein, 146 aa, Unknown
  Bacterial polypetide isolated from the Sargasso Sea
IELKNKTKLNYIVGTMIELPRAALQAKSISKHADFFSFGTNDLTQTTFGVSRDDSGKFLNDYIDNKIFEIDPFVSIDQSGVGELVELASSRGRKVNKKLKLGICGEHGGDPKSIEFCSRTGLNYVSCSPFRVPVARLAAAQAELRR

SEQ ID NO: 137303 - protein, 222 aa, Unknown
  Bacterial polypetide isolated from the Sargasso Sea
MFNETDRIGLFVEMIMAESQEERNKVLKKLQELQKSDFIGILKAMEGYKVTIRLLDPPLHEFLPNPEELKDKMNKENDKSKKTQRVLDRARELAEINPMMGHRGVRVAITYPEIYKMQITAVFEAAAELVKKKVNAKPQIMIPQVGSLAELNYIKSIYDDVKKEMEQKYKKKFKINFGTMLEVVRACLTSDELADTAEFFSFGTNDLTQAVFSFSREDAEGK

SEQ ID NO: 137304 - protein, 174 aa, Unknown
  Bacterial polypetide isolated from the Sargasso Sea
NPKVELMIPLVSNLKEFLNQKNIVLEAKNKALGKSGLKINLKIGTMIEVPRACLVAEEIAKEADFFSFGTNDLTQTTFGFSRDDTGTFFPHYFDEEILLVDPFEEIDRKGVGKLMELAIRDARAVKNKISIGICGEHGGEPKSIEFCKILGLDYVSCSPYRVPIARLAAAQVEL

SEQ ID NO: 137305 - protein, 521 aa, Unknown
  Bacterial polypetide isolated from the Sargasso Sea
MKSVYYFGDREADGKAEMKNLLGGKGANLAEMTNLGIPVPPGLTITTEVCTYYYDNSNNFPDDLENQVKDAIGKIESVMGKAFGDPKHPLLLSVRSGARMSMPGMMETVLNVGLTSKTIPGLIEKTNNTRFVYDAYRRLIMMYSDVVMEKAAGLEPKEGLGIRHQLETILDDYKTKNGYKSDIDLSGDDWQKVANDFKIRIKDVLGREFPDDHYEQLWGGIKAVFQSWNGKRAISYRKIENIPEEWGTAVNVQAMVFGNTGDQSATGVAFTRNPATGQNNFYGEWLQNAQGEDVVAGIRTPQPLNQSTKTEESKHLESLEEFLPDIYNKLDLIRQKLEQHYNDMQDIEFTIEEGRLWMLQTRTGKRTGPAAIKMAVDMVDEKMISKKDAIMRVTPDQIDELLHPKLHIEDEEKTTILARGLPAGPGGGVGQVVFSADDAEKWHKDGKSIILVREETSPEDVHGMHVSEAILTAKGGMTSHAALVARGWGKCCIVGCASLNIDFVKKEMTVDNQTVKEGDWI

SEQ ID NO: 137306 - protein, 387 aa, Unknown
  Bacterial polypetide isolated from the Sargasso Sea
MQKLVYYFGDRQTEGKAEMRDLLGGKGANLAEMCNLGLPVPHGFTISTEVCTYYYNNNKSLPEKLKLEIKKNIKKIENFTKMKFGSNSNPLLLSVRSGSRASMPGMMDTILNLGLNNEAVNGLAQSTKNERFAFDSYRRFIQMYSDVVLEIDNSLFEDALEDIKIENGYSEDTELTPQNLKDLTETYKKIVLNELNRPFPQDPSEQLWGAISAVFSSWMNNRAITYRKLNNLPSSWGTAVNIQSMVFGNMGEDCATGVAFTRNPNNGENIFYGEYLINAQGEDVVAGIRTPYPLSKDTEDDFTTDKSLEVKMPKIYDELLECRSVLEKHYGDMQDIEFTVQDNKLFLLQTRNGKRTAEAAIKIAVDMVHEGKINTNDALIRVEPEKV

SEQ ID NO: 137307 - protein, 315 aa, Unknown
  Bacterial polypetide isolated from the Sargasso Sea
MICRDIEFTIQEGKLWMLQTRVGKRNGSAAIKMAVDMKKEGMIDKKTALLRIKPEQLDELLHPMLDLESEKSAPLLGKGLPAGPGGASGRVVFTADDAEQWHKNGEKVILIREETSPEDVHGMHAAEAILTAKGGMTSHAALVARGWGKCCIVGCSELQIDVNKKEVVIGESTISEGDWITMNGTEGKIYSGAVELIDADPDTHPEYKELMVWADEVRQLKIRTNAESPNDAKQAIKFGAEGIGLCRTEHMFFDEARILAIRKMIFADNEQDRRNAVMELLPYQKEDFMGILKAMEGMPVTIRLLDPPLHEFMSL

SEQ ID NO: 137308 - protein, 212 aa, Unknown
  Bacterial polypetide isolated from the Sargasso Sea
MLGHRGCRLGISFPEIYEMQCRAIFEALIDCKKNNIKSTMPEIMIPLVSTEAEIKIMKDLVIRVARKVQNENKTSIRFLVGTMIELPRAAIKSKEIAKHAEFFSFGTNDLTQTTFGISRDDSGKFLNDYIENKIFDIDPFVSIDEGVGDLIKIATEKGRKQNKRIKLGICGEHGGDPKSIHFCAKTGLDYVSCSPYRVPIAKLAAAQAELKK

SEQ ID NO: 137309 - protein, 531 aa, Unknown
  Bacterial polypetide isolated from the Sargasso Sea
QAAVRVAVTLAEDGIISRNEAIMRVEPRAISELLHRQIDPEAERDVLGSGVAASPGAATGKIVFSAEAAQSHASRGIDCILVRRETSPEDVRGMHASVGVVTERGGITSHAAVIGRGIGLPCVVGVKDIRFQVKRKSLICSNGRQLKEGDEITIDGTSGDILFGSPKMVEAALDDAFQTLLEWTDEVSDMTVRANADTPQDALTARKFNAQGIGLCRTEHMFFESDRLNVMREMIFSKSAEDRRLVLERLLPMQRKDFIELFEIMKDLPVCIRLFDPPLHEFLPSDREGMHDLAEALGLPLSDVVRRVETMGEYNPMLGMRGVRLGVTVPEIYEMQARAIFEAIVQVSKEGISVVPEIMIPLVSAKREVELVKKRVASVASQVGLETSAEVNYKLGVMVETPRAALRASDIAMNSEFLSFGTNDLTQMAYGLSRDDAGKFMSQYVQQGVFQEDPFHILDPEGVGELVKLGADRARSIKPNITLSICGEHGGNPESIAFSHQLGFHYVSCSPYRVPVAKLAAAQVAISTQIS

SEQ ID NO: 137310 - protein, 280 aa, Unknown
  Bacterial polypetide isolated from the Sargasso Sea
MELLPYQKEDFMGILQAMEGKPVTIRLLDPPLHEFMTLSEEQQQELANNLGVDVSIVKNRISMLHELNPMLGHRGCRLGIAYPEITEMQVTAILEATAELTQKGKSIMPEIMIPLVGTVSEYVDQEKIVRTVAKTTNDKYGIELNYLVGTMIELPRACLTADEIAKHAEFFSFGTNDLTQTTFGFSRDDIGSFLPDYLERNILPEDPFQSLDTNGVGKLVSMAVEYGRGVNTNLKIGICGEHGGDPASILFCKENGLDYVSCSPFRVPIARLAAAQAELR

SEQ ID NO: 137311 - protein, 265 aa, Unknown
  Bacterial polypetide isolated from the Sargasso Sea
GLPVTIRLLDPPLHEFLPNNEKDMISLSTTTGISLEKIKEQSLKLHEANPMLGHRGCRLAVSYPEICEMQSKAIFEAAVNIQKKINQKVNVEIMIPLASTSKEIDVCKEIIDKVASTITIKMKEKIDYLVGTMIELPRAALCADQLASSADFFSFGTNDLTQTTFGISRDDIGNFLNKYLEDGIFQNDPFISIDKEAVGSLLKIGIKKGKETNKFLKLGVCGEHGGDPNSIDFFEEIGLDYISASPFRIPIARLAAAQSIIKKKN

SEQ ID NO: 137312 - protein, 210 aa, Unknown
  Bacterial polypetide isolated from the Sargasso Sea
GCRLGISFPEIYEMQCRAIFEALADLKKNKQKFAFPEIMIPLVSTEAEIKIMKDLVINTARKVQKENKTKIEFLVGTMIELPRAAIKADDIAKHAEFFSFGTNDLTQTTFGISRDDSGKFLNDYIDNKIFTIDPFVSIDDGVKDLVEIAVSKGKKQNKKIKLGICGEHGGDPKSIKFCSKAGLNYVSCSPYRVPIARLAAAQAELTKNKN

SEQ ID NO: 137313 - protein, 261 aa, Unknown
  Bacterial polypetide isolated from the Sargasso Sea
SGKVVFSSDEAERLNGMMQNTILVRVETSPEDINGMHAAKGILTSRGGMTSHAAVVARGMGRPCVSGSSEIDIDYEKKLFKTKNLEIKEGDIITLDGSTGRIILGEVKTIKPEISGDFSKVMNWADSYRKLKIRTNSETPLDSKTAREFGAEGIGLCRTEHMFFDEERILSVREMILSKSKEDRNKALDKLLPHQKNDFIEIFKIMNGLPVTVRLLDPPLHEFLPKNENEIEIVAKSLNLSVKEVGSRINELHEQNPMLGH

SEQ ID NO: 137314 - protein, 305 aa, Unknown
  Bacterial polypetide isolated from the Sargasso Sea
SINYSEKTISSKEKTLEEGDLISLDGSAGEIYIGELKLEPPKLSEEFNTLMDWCNEFKRLEIRANAETTIDTAKALEFGAEGIGLCRTEHMFFEGERILPMREMIMSDSKQGRKRALKKLINYQISDFESLFKLLNEKPITVRLLDPPMHEFLPKSDLEISQLANEIGVSPMHVNEILMRLSESNPMLGHRGVRLGLSYPEIYEMQVEAIFRAVHLVFKNDNFKVTPEVMIPLVMNSNELSEMKDILKKKIKKIEKELNYNFDYTIGTMIELPSAALSSSEIAKDADFFSFGTNDLTQTTLGLFR

SEQ ID NO: 137315 - protein, 281 aa, Unknown
  Bacterial polypetide isolated from the Sargasso Sea
MNGTKGYLYNAKLELVPANPDSHSEYKILMSWADEFRKLKIRTNAESPSDAAQAINFGAEGIGLCRTEHMFFDEKRIIAMRKMILADNNEDKRSAIMELLPFQKDDFKGILKAMEGKPVTIRLLDPPLHEFITLDNKQISELALKLNIEERSISKRISSLHELNPMLGHRGCRLGIAFPDITEMQARAILEASVELINEGVSVFPEIMIPLVGTVTEYIDQAKIVKKTANEIEKESGKTLKYLIGTMIELPRACLTANEIAQHAEFFSFGTNDLTQTTYGF

SEQ ID NO: 137316 - protein, 332 aa, Unknown
  Bacterial polypetide isolated from the Sargasso Sea
RGRMTSHAAVVPRGMGRPCVSGSSEIDISYENKSFKTSSMVIKEGDVITIDGSTGKIIAGSVSTVKPEISGDFSKLMSWADNFRKLKVRTNSETPKDTKTAKDFGAEGIGLCRTEHMFFDEERILSVREMILSKTKEDRAIALQKLLPHQRKDFIDIFKIMSGLPVTVRLLDPPLHEFLPRTEKEINEVAIIVNLPVKEIESRIEELHEQNPMLGHRGCRLGISFPEIYEMQCKAIFEALVYLKKNKIKSAFPEIMIPLVSTEAEIKIMKELVIRTASQVQQENKLKIEFLVGTMIELPRAAIKAKEIAKHAEFFSFGTNDLTQTTFWISRD

SEQ ID NO: 137317 - protein, 337 aa, Unknown
  Bacterial polypetide isolated from the Sargasso Sea
NYKLTKGVLLDTDLDENDWDGLIEDFKRTVKEKANRDFPQDVHEQLLGAICAVFLSWDSKRAKVYRKLNHIPAEWGTAVNVQSMVFGNMGDDCATGVVFTRNPSDGENEIYGEYLINAQGEDVVAGTRTPQYITKKARQNAKVKASSMEESMPKVYKQLYKILKKLEKHYKDMQDVEFTVENKKLWMLQTRSGKRTAKSAVKIAVDMVKEKLISKKEAVLRIDPHSLDTLLHPTLDEKSSINVIANGLPASPGAASGKVVFTSEEAERLTSMMQDTILVRVETSPEDIQGMHAAKGILTARGGMTSHAAVVARGMGRPCVSGSSEIDINYKNKSFKT

SEQ ID NO: 137318 - protein, 276 aa, Unknown
  Bacterial polypetide isolated from the Sargasso Sea
MFGAISAVFLSWESNRAKIYRKLNHIPSEWGTAVNVQSMVFGNMGNDCATGVVFTRNPSDGSNNVYGEYLINAQGEDVVAGTRTPQYITKRARKAANAKDLSMEESMSNVYRQLKQILKKLENHYKDMQDVEFTVENGKLWILQTRSGKRTSKSAVKIAVDMVKEKLISKKQAILRIDPNSLDTLLHPTLDEKSEIKVIANGLPASPGAASGKVVFTSEEAERLNDMMQDTILVRIETSPEDIKGMHAAKGILTARGGMTSHAAVVARGMGRPCVS

SEQ ID NO: 137319 - protein, 308 aa, Unknown
  Bacterial polypetide isolated from the Sargasso Sea
EHMFFDETRILAMRKMILADNDEDRRDAVMGLLPFQKEDFKGTLEAMEGKPVTIRLLDPPLHEFITLDDEQIKELANNIGIDRSIVNQRISSLHELNPMLGHRGCRLGIAYPVITEMQARAILEAAAELTNDGLNVLPEIMIPLVGTVTEYIDQEKIVRKVASEVKSKYDMKLNYLVGTMIELPRACLTADEIAEHAEFFSFGTNDLTQTTYGFSRDDIGSFLPEYLDRNILPGDPFQSLDVKGVGKLVSMAVKYGRDINPSIKIGICGEHGGDPSSIHFCKNNGLDYVSCSPYRVPIARLSAAQAEL

SEQ ID NO: 137320 - protein, 282 aa, Unknown
  Bacterial polypetide isolated from the Sargasso Sea
VKEQLLGAVNAVFLSWDSQRAKTYRKLNQIPDHWGTAVNVQAMVFGNMGNNCSTGVAFTRNPSTGDNSFFGEFLINAQGEDVVAGTRTPQSITKKAKQESGSKDPSMEEAMPKVYKELEKVFLKLENHYKDMQDIEFTVENNKLWMLQTRSGKRTAKASIKIAVDMVKEKLISKKEAIKRIDPKTLDTLLHPTLDDKVKKEIIASGLPASPGAASGKVVFTADEAEKLNGMMQDTILVRLETSPEDIHGMHAAKGILTARGGMTSHAAVVARGMGRPCVSGS

SEQ ID NO: 137321 - protein, 284 aa, Unknown
  Bacterial polypetide isolated from the Sargasso Sea
KVVFTSDEAERLNSIMQNTILVRIETSPEDIHGMHAAKGILTARGGMTSHAAVVARGMGRPCVSGSSEIEIDYKNKIFKTKYGEIKEGDLITIDGSTGRIILGEVKTVKPEISGDFSKLMKWADSFRKLKVRTNSETPLDSKVAREFGAEGIGLCRTEHMFFDEERILSVREMILSKTSEDRENALKKLLPHQKKDFIEIFKIMSGLPVTVRLLDPPLHEFLPKNENEIIEVSKSLNIPIQDTRGRINELHEHNPMLGHRGCRLGISFPEIYEMQCKAIFEALV

SEQ ID NO: 137322 - protein, 309 aa, Unknown
  Bacterial polypetide isolated from the Sargasso Sea
HSKAGDIIIKEGDIITIDVGSGKVMKGLVPTVQPEISGYFSTIMKWADEFRKLKVRTNAETEVDSKTAREFGAEGIGLCRTEHMFFDEERILSVRQMILSKSKDDRNSALDKLLPHQKEDFKKIFKVMSGLPVTVRLLDPPLHEFLPKADKDIEEVARSLNLSAKEVKDRIAELHEENPMLGHRGCRLGISFPEIYEMQCRAIFEAIIELKKQKVKAAFVEIMIPLVSTESELKILRALVNKIAREIEKENKLKLEYMVGTMIELPRAALQARSISKHADFFSFGTNDLTQTTLGISRDDSGKFLNELY

SEQ ID NO: 137323 - protein, 246 aa, Unknown
  Bacterial polypetide isolated from the Sargasso Sea
CGNDCSTGVVFTRNPSDGSKDIYGEYLINAQGEDVVAGTRTPQYITKKAKKEAKVKEASMEESMPKIYSELNKILKKLEKHYKDMQDVEFTVENNKLWILQTRAGKRTSKSAVKIAVDMVKEKLISKNEAVLRIDPNFLDTLLHPTLDEKSSIKVIANGLPASPGAASGKVVFTSEEAERLNDMMQDTILVRLETSPEDIQGMHAAKGILTARGGMTSHAAVVARGMGRPCVSGSSEIDINYDQKI

SEQ ID NO: 137324 - protein, 271 aa, Unknown
  Bacterial polypetide isolated from the Sargasso Sea
IEIFKIMKGLPVTVRLLDPPLHEFLPKSNNEINDVAVSLNIPVNELKVRISELHEQNPMLGHRGCRLAISFPEIYEMQCKAIFEALVECKKKKIQSTMPEIMIPLVSTEAEIKIMKDLVIRVAKKVQDENKIKIDFLVGTMIELPRAAIKAKDIAKHAEFFSFGTNDLTQTTFGISRDDSGKFLNDYIENKIFDIDPFISIDDGVGDLIKIATDNGRKQNKKIKLGICGEHGGDPKSIEFCANTGLDYVSCSPYRVPVARLAAAQAQLKKN

SEQ ID NO: 137325 - protein, 286 aa, Unknown
  Bacterial polypetide isolated from the Sargasso Sea
MVKEKLISKKQAILRIDPNSLDTLLHPTLDEKSSLEIIANGLPASPGAACGKVVFTSEEAERLSNMMQDVILVRVETSPEDIQGMHAAKGILTARGGMTSHAAVVARGMGRPCVSGSSEIDIDYEKKTFKTASKEIKEGDIITIDGSSGKIIWGSVPTVKPEISGDFSKLMSWADNIRKLKVRTNAETPLDTKVARDFGAEGIGLCRTEHMFFDEERIISVREMILSKTKEDRLKALMKLLPHQKKDFVKIFKIMHGLPVTVRLLDPPLHEFLPKSEKEISEVAEV

SEQ ID NO: 137326 - protein, 219 aa, Unknown
  Bacterial polypetide isolated from the Sargasso Sea
KIISKKEAILRINPNSLDSLLHPTLDENSKINVIAKGLPASPGAASGKVVFTSEEAERLNSMMQDTILVRVETSPEDIHGMHAAKGILTSRGGMTSHAAVVARGMGRPCVSGSSEIDIDYEKKIFKTNHHQIKEGDIITIDGSSGRVIIGEVKTLKPEISGDFSRVMMWADSYRKLKIRTNSETPLDSKTARQFGAEGIGLCRTEHMFFDEGRILQLEK

SEQ ID NO: 137327 - protein, 278 aa, Unknown
  Bacterial polypetide isolated from the Sargasso Sea
MEEVMPKVYTQLKKILKLLERHYKDMQDVEFTVENSKLWMLQTRSGKRTAKSAVKIAVDMVKEKLITKKEAVLRVDPNTLDTLLHPTLDETKEVKTIAKGLPASPGATSGKVVFSSDEAERLNGMMQDTILVRVETSPEDIHGMHAAKGILTARGGMTSHAAVVARGMGRPCVSGSSEIDINYDQKIFRTSSNVEVKEGDIITIDGSTGRVILDKVPTLKPEISGDFSKLMSWADSYRKLKVRTNSETPLDTKTAREFGAEGIGLCRTEHMFFDEDRI

SEQ ID NO: 137328 - protein, 252 aa, Unknown
  Bacterial polypetide isolated from the Sargasso Sea
MVFGNMGQDCATGVVFTRNPSTGKNEIYGEYLINAQGEDVVAGTRTPQHITKKARVEARKKERSMEETMPTVFKKLYKILKNLEKHYKDMQDVEFTVEKNKLWILQTRSGKRTAKSAVKIAVDMVKKRLISKKIAITRIDPHSLDTLLHPTLDERSKINVIAKGLPASPGAASGKVVFSSDEAERLNEMMQDTILVRVETSPEDIHGMHAAKGILTSRGGMTSHAAVVARGMGRPCVSGSSEININYDKKIF

SEQ ID NO: 137329 - protein, 300 aa, Unknown
  Bacterial polypetide isolated from the Sargasso Sea
VSGSSEIEIDYENKLFKTKYIEVNEGDLITIDGSTGRIILGEVKTIKPEISGEFSNLMKWADGFRKLKVRTNSETPLDSKIAREFGAEGIGLCRTEHMFFDEERILSVREMILSKLKEDRAKALNKLLPYQRKDFIEIFKIMNGMPVTVRLLDPPLHEFLPKSESEINIVAKSLNLTTKDVLARISELHEQNPMLGHRGCRLGISFPDIYEMQTRAIFEALVECKKKKIKSTMPEIMIPLVSTEAEIKIMKDLVIKIAREVQNENKTKIKFLIGTMIELPRAAIKAKDIAKHAEFFSFGN

SEQ ID NO: 137330 - protein, 261 aa, Unknown
  Bacterial polypetide isolated from the Sargasso Sea
PVTVRLLDPPLHEFLPKTDKDMEEVARSLNLGAKEIKNRVAELHELNPMLGHRGCRLGISFPEIYEMQCRAIFTALIECKKEKVQSIIPEIMIPLVSTEDELGIMRKLVNQVAEKIQKEHKVKINYFVGTMIELPRAALRAAPISKYADFFSFGTNDLTQTTFGISRDDSGKFLNDYIDHKIFEDDPFVSIDKDGVGELVKIASQRGKKQNKKLKLGICGEHGGDPRSIEFCSKAGLNYVSCSPFRVPIARLAAAQAELRR

SEQ ID NO: 137331 - protein, 267 aa, Unknown
  Bacterial polypetide isolated from the Sargasso Sea
GLPASPGAASGKVVFTADEAEKLNGMMQDTILVRLETSPEDIHGMHAAKGILTARGGMTSHAAVVARGMGRPCVSGSSEITIDYELKQFKAGDETIKEGDVITIDGGSGKVMKGLVPTVQPEISGYFSTIMKWADEFRKLKVRTNAETEADSKTAREFGAEGIGLCRTEHMFFDEERILSVRQMILSKSREDRDSALGKLLPHQKEDFKKIFKVMSGLPVTVRLLDPPLHEFLPKAEKDIEEVARSLNLSAKEVKERIAELHEENPM

SEQ ID NO: 137332 - protein, 272 aa, Unknown
  Bacterial polypetide isolated from the Sargasso Sea
LISKKEAVLRIDPNSLDSLLHPTLDETSKINVIAKGLPASPGAASGKVVFSSDEAERLNGMMQNTILVRIETSPEDIHGMHAAKGILTARGGMTSHAAVVARGMGRPCVSGSSEIDIDYEKKLFKTKVYEVKEGDIITLDGSTGRIILGEVKTVKPEISGDFSKIMGWADSFRELKIRTNSETPLDSKIAREFGAEGIGLCRTEHMFFEEERILSVRQMILSKSKEDRNVALSKLLPHQKKDFIEIFKIMGGLPVTVRLLDPPLHEFLPKNE

SEQ ID NO: 137333 - protein, 335 aa, Unknown
  Bacterial polypetide isolated from the Sargasso Sea
NAETPQDTKMAINFGAEGIGLCRTEHMFFDDERILSVRQMILSKNLDDRKTALDKLLPHQKKDFKEIFKIMKGLPVTVRLLDPPLHEFLPKSDKDMEEVARSLNLGVKEIKNRVEELHELNPMLGHRGCRLGISFPEIYEMQCRAIFSALIECKKEKIDSIIPEIMIPLVSTEDELGLMRKLVNKVADELQAEHKIKINYFVGTMIELPRAALRAAHISKYADFFSFGTNDLTQTTFGISRDDSGKFLNDYIDHKIFEEDPFVSIDKDGVGELVKIATERGKKQNKKLKLGICGEHGGDPRSIEFCSKAGLNYVSCSPFRVPIARLAAAQAELRR

SEQ ID NO: 137334 - protein, 318 aa, Unknown
  Bacterial polypetide isolated from the Sargasso Sea
SAVKIAVEMVKEKLISKKDAIMRIDPHSLDTLLHPTLDEKSNIEVIAKGLPASPGAATGKVVFSSDEAERLNEMMQDTILVRVETSPEDIHGMHAAKGILTSRGGMTSHAAVVARGMGRPCVSGSSEIDINYDNKSFKTKLMEIKEGDLITIDGSTGRIIKGEVPKIKPEISGDFSKLMSWADNYRKLKVRTNSETSLDTKTARDFGAEGIGLCRTEHMFFDEERILSVRQMILSKTKEDRDKALAKLLPHQKNDFIEIFKIMRNLPVTVRLLDPPLHEFLPRTEKEINEVAEKLKLSTKEVASRITELHEQNPMLGH

SEQ ID NO: 137335 - protein, 252 aa, Unknown
  Bacterial polypetide isolated from the Sargasso Sea
RLNNMMQNTILVRVETSPEDINGMHASKGILTSRGGMTSHAAVVARGMGRPCVSGSSEINIDYNNKTFKTKELEVKAGEIITIDGSTGRIILGEVKTIKPEVSGDFSTIMRWSDKFRKLKIRTNSETPIDSKTAREFGAEGIGLCRTEHMFFDEERILSVRQMILSKSKEDRSKALAKLLPHQKKDFTEIFSIMNGLPVTVRLLDPPLHEFLPNNEKEILDVSKVLNLPTKEVKARIDELHEHNPMLGHRGC

SEQ ID NO: 137336 - protein, 259 aa, Unknown
  Bacterial polypetide isolated from the Sargasso Sea
LINAQGEDVVAGTRTPQYITKKARRDAKVKELSMEESMPKVFKELQKILKRLEIHYKDMQDVEFTVENSKLWMLQTRSGKRTAKSAVKIAVDMVKEKLISKKEAVLRIDPNSLDTLLHPTLDEKSSINVIANGLPASPGAASGKVVFTSEEAERLTAMMQDTILVRVETSPEDIQGMHAAKGILTARGGMTSHAAVVARGMGRPCVSGSSEIDINYENRSFKTSSMEIKEGDVITIDGSTGRIIAGSVSTVKPEISGDF

SEQ ID NO: 137337 - protein, 260 aa, Unknown
  Bacterial polypetide isolated from the Sargasso Sea
IMKGLPVTVRLLDPPLHEFLPKTNKDMEEVARSLNSGVKEIKNRVAELHELNPMLGHRGCRLGISFPEIYEMQCRAIFSALIECKKEKIQSIIPEIMIPLVSTEDELGIIRKLVNRVADELQKEHKVKINYFVGTMIELPRAALRAAPISKYADFFSFGTNDLTQTTFGISRDDSGKFLNDYLEHKIFDTDPFVSIDRDGVGELVKIASQRGKKQNKKLKLGICGEHGGDPKSIEFCSKAGLNYVSCSPFRVPIARLAAA

SEQ ID NO: 137338 - protein, 293 aa, Unknown
  Bacterial polypetide isolated from the Sargasso Sea
MDEKSNINVIAKGLPASPGATSGKVVFSSNEAERLNGMMQNTILVRIETSPEDINGMHAAKGILTSRGGMTSHAAVVARGMGRPCVSGSSEIEINYEKKLFKTKGYEIKEGDIITIDGSTGRIILGEVKTVKPEISGDFSKLMSWADSFRKLKIRTNSETPTDTKNAREFGAEGIGLCRTEHMFFEEERILYVRQMILSKSKADRDEALTKLLPHQKNDFIKIFKIMSGLPVTVRLLDPPLHEFLPKNENEIKDIAKSLELSIKEIEIRIRELHEQNPMLGHRGCRLGISFPE

SEQ ID NO: 137339 - protein, 304 aa, Unknown
  Bacterial polypetide isolated from the Sargasso Sea
MQESMPKIFRQLKKILKHLEKHYKDMQDVEFTVENKKLWILQTRSGKRTAKSAVKIAVDMVKEKLISKKDAVKRIDPHSLDSLLHPTLDEKSQINVIAKGLPASPGAATGKVVFSSDEAERLNEMMQDTILVRVETSPEDIHGMHAAKGILTSRGGMTSHAAVVARGMGRPCVSGSSEIDINYDRKIFKTTSVEIKEGDLVTIDGSTGRIIQGEVPKVKPEISGDFSKLMSWADNFRKLKVRTNSETPLDTKTARDFGAEGIGLCRTEHMFFDEERILSVREMILSKTTEDRNKALNKLLPHQK

SEQ ID NO: 137340 - protein, 297 aa, Unknown
  Bacterial polypetide isolated from the Sargasso Sea
PQYITSKARQNAKVKAPSMEESMPKVYRQLYKILKKLEKHYKDMQDVEFTVENKKLWMLQTRSGKRTAKSAVKIAVDMVKEKLISKKEAVLRIDPNSLDTLLHPTLDENSSINVIANGLPASPGAASGKVVFTSEEAERLTSMMQDTILVRVETSPEDIQGMHAAKGILTARGGMTSHAAVVARGMGRPCVSGSSEIDINYENKSFKTSSIEIKEGDIITIDGSSGRIIKGSVATVKPEISGDFSKLMSWADNYRKLNIRTNSETPKDTKTAKDFGAEGIGLCRTEHMFFDEERILS

SEQ ID NO: 137341 - protein, 239 aa, Unknown
  Bacterial polypetide isolated from the Sargasso Sea
FRKLKIRTNSETPKDTKTAKDFGAEGIGLCRTEHMFFDEERILSVREMILSKTKEDRAKALDKLLPHQKKDFIEIFKIMSGLPVNVRLLDPPLHEFLPRTDKEINEVANVVNLSVKEVESRIDELHEQNPMLGHRGCRLGISYPEIYEMQCRAIFEALAELKKNKIKSAFPEIMIPLVSTEAEIEIMKRLVINIAKEVQKQKKIKIEFLVGTMIELPRAAIKAKEIAKHAEFFSFGTND

SEQ ID NO: 137342 - protein, 303 aa, Unknown
  Bacterial polypetide isolated from the Sargasso Sea
LVRVETSPEDIHGMHAAKGILTARGGMTSHAAVVARGMGRPCVSGSSEIEVDYENKIFKTKNNIVKEGDIITIDGSTGRIIVGEVKTVKPEISGDFSKLMNWADKVRKLRVRTNSETPIDSKVARDFGAEGIGLCRTEHMFFDEERILSVRQMILSKSKEDRGIALDKLLPHQKNDFLEIFKIMQGLPVTVRLLDPPLHEFLPKREKDIEDVANSLKLTKNEIEVRINELHEQNPMLGHRGCRLGISFPEIYEMQCRAIFEALIELKKKNIKSAFPEIMIPLVSTEAEIKIMKDLVISTASKV

SEQ ID NO: 137343 - protein, 284 aa, Unknown
  Bacterial polypetide isolated from the Sargasso Sea
RTEHMFFDEERILSVREMILSKTKEDRSIALKKLLPHQKKDFIEIFKIMSGLPVTVRLLDPPLHEFLPRTDKEINEVANVVNLPVKEVVSRIDELHEQNPMLGHRGCRLGISFPEIYEMQCRAIFEALAELKKEKIKSAFPEIMIPLVSTEAEIKIMKELVIRIVGEVQREHKLKIEFMVGTMIELPRAAIKAKDIAKHAEFFSFGTNDLTQTTFGISRDDSGKFLNDYLDNKIFSIDPFISIDEGVGDLIKIAVEKGKSQNKNIKLGICGEHGGDPKSISFVK

SEQ ID NO: 137344 - protein, 277 aa, Unknown
  Bacterial polypetide isolated from the Sargasso Sea
KEAILRIDPNTIDTLLHPTLDNKVKKEIIASGLPASPGAASGKVVFTADEAEKLNSMMQDTILVRLETSPEDIHGMHAAKGILTARGGMTSHAAVVARGMGRPCVSGSSEITIDYENKQFKAGDEIIKEGDVITIDGGSGKVMKGLVPTVKPEISGYFSTIMKWADEFRKLKIRTNAETEQDSKTARDFGAEGIGLCRTEHMFFDEDRILSVRQMILSKSNEDRNHALSKLLPYQKDDFKKIFKVMSGLPVTVRLLDPPLHEFLPKAEKDIDEVARS

SEQ ID NO: 137345 - protein, 274 aa, Unknown
  Bacterial polypetide isolated from the Sargasso Sea
NQIPSDWGTAVNVQMMVFGNMGQDCATGVVFTRNPSTGRDEIYGEYLINAQGEDVVAGTRTPQYVSKKARIKAGIKENSMEETMPTVFNQLYRILKNLEKHYKDMQDVEFTVEKNKLWILQTRSGKRTAKSAVKIAVDMVKEKLISKKTAITRIDPNSLDTLLHPTLDERSKINVIAKGLPASPGAASGKVVFSSDEAERLNEMMQDTILVRVETSPEDIHGMHSAKGILTSRGGMTSHAAVVARGMGRPCVSGSSEIDINYDKKIFKTKSIEV

SEQ ID NO: 137346 - protein, 287 aa, Unknown
  Bacterial polypetide isolated from the Sargasso Sea
KLNNMMQDTILVRLETSPEDIHGMHAAKGILTARGGMTSHAAVVARGMGRPCVSGSSEITIDYENKQFKAGNEIIKEGDIITIDGGSGKVMKGLVPTVQPEISGYFSTIMRWADEYRKLKIRTNAETEQDSNTAKEFGAEGIGLCRTEHMFFDEDRILSVRQMILSKSHEDRNHALSKLLPYQKDDFKKIFNVMSGLPVTVRLLDPPLHEFLPKSDKDIDEVARSLNLASREVKERIDELHEENPMLGHRGCRLGISFPQIYEMQCKAIFEAISDLKKEKIKSAIVR

SEQ ID NO: 137347 - protein, 257 aa, Unknown
  Bacterial polypetide isolated from the Sargasso Sea
MQDTILVRVETSPEDIQGMHAAKGILTARGGMTSHAAVVARGMGRPCVSGSSEIDINYENKSFKTSSMEIKEGDIITIDGSTGRIIAGSVSTVKPEITGDFSKLMSWADSFRKLKVRTNSETPKDTKIAKDFGAEGIGLCRTEHMFFDEERILSVREMILSKTKEDRAIALEKLLPHQRKDFNDIFKIMSGLPVTVRLLDPPLHEFLPRTEKEINEVANTVNLPVKEVLSRIEELHEQNPMLGHRGCRLGISFPEIY

SEQ ID NO: 137348 - protein, 286 aa, Unknown
  Bacterial polypetide isolated from the Sargasso Sea
KDCQLHLGAASGKVVFTSEEAVRLNEMMQDTILVRIETSPEDIHGMHSAKGILTARGGMTSHAAVVARGMGRPCVSGSSDIEIDYANKIFKSKDQEVREGDIITIDGSSGKIILGKVKTVKPEISGNFLKIMKWSDEIRKLKIRANAETPSDSKTARDFGAEGIGLCRTEHMFFDQDRILSVREMILSKTKKDRNKALLKILPLQKNDFTEIFKIMNGLPVTVRLLDPPLHEFLPKNEKEINNVSISLKMPIQEVKNRVAELHEQNPMLGHRGCRLGISFPEIYEM

SEQ ID NO: 137349 - protein, 311 aa, Unknown
  Bacterial polypetide isolated from the Sargasso Sea
NDALIRVDPESLNQLLHPTLDNNAKSDFLIRGMPASPGAVSGKIVLESEDAVKLSAAGESVILVRLETSPEDIAGMHAASGILTSRGGMTSHAAVVARGMGRACITGANELRIDFENKIIFFGEKKIQSGTEITIDGSSGNVYLGQVPTVYPEMSKSFVTLMKWADKLRRLKVRTNAETPNDAKTAIKFGAEGIGLCRTEHMFFDKNRINVMRQMILAEDSNERKNALDKLLPMQRKDFEDLFLIMKGLPVTIRLLDPPLHEFLPNNEKDMISLSSTTGISLEKIKEQSLKLHEANPMLGHRGCRLAVSTQ

SEQ ID NO: 137350 - protein, 273 aa, Unknown
  Bacterial polypetide isolated from the Sargasso Sea
CQHLLGAASGKVVFSSDEVQRLNEMMQNTILVRVETSPEDIHGMHAAKGILTARGGMTSHAAVVARGMGRPCVSGSSEIEIDYENNLFKANGNEIKEGDLITIDGSTGRIILGEVKTVKPEISGDFSKLMSWADSFRKLKIRTNSETPLDSKIARDFGAEGIGLCRTEHMFFDEDRILSVREMILSKSKEDRAKALEKLLPHQKNDFIEIFKIMNGLPVTVRLLDPPLHEFLPKSASEINDISKSLNLSIKEIENRIEEQHEQNPMLGHRGCR

SEQ ID NO: 137351 - protein, 276 aa, Unknown
  Bacterial polypetide isolated from the Sargasso Sea
QKEDFKKIFKVMSGLPVTVRLLDPPLHEFLPKADKDVEEVARSLNLSAKEVKDRITELHEENPMLGHRGCRLGISFPEIYEMQCRAIFEAIIELKKQKVKAAFVEIMIPLVSTDSELKILRALVNKIAKEKENENKLKLEYMVGTMIELPRAALQAKSISKHADFFSFGTNDLTQTTFGISRDDSGKFFNDYIDNKIFDVDPFVSIDQNGVGELVEIASSRGRKTNKNIKLGICGEHGGDPKSIEFCSRTGLNYVSCSPFRVPVARLAAAQAELSK

SEQ ID NO: 137352 - protein, 253 aa, Unknown
  Bacterial polypetide isolated from the Sargasso Sea
PPLHEFLPRTEKEINEVANIVNLPVKEVESRIEELHEQNPMLGHRGCRLGISFPEIYEMQCKAIFEALAHLKKSKIKSAFPEIMIPLVSTETEIKIMKDLVIRTASQVQKEHKLKIEFLVGTMIELPRAAIKAKEIAKHAEFFSFGTNDLTQTTFGISRDDSGKFLNDYLENKIFSVDPFVSIDEGVSDLVRIAVEKGLKQNKKLKLGICGEHGGDPNSISFCAKVGLNYVSCSPYRVPVARLAAAQAELKIK

SEQ ID NO: 137353 - protein, 279 aa, Unknown
  Bacterial polypetide isolated from the Sargasso Sea
QLNFGAEGIGLCRTEHMFFDETRILAMRKMILSDNDDDRREAVMGLLPFQKEDFKETLKAMAGKPVTIRLLDPPLHEFITLEDDQINDLAKNIGIDSSIVSQRIASLHELNPMLGHRGCRLGIAYPEITEMQVSAILEATAELIKDGLNVFPEIMIPLVGTVTEYIDQEKIVREVAKKVEEKYSIKLNYLVGTMIELPRACLTADEIAKHAEFFSFGTNDLTQTTYGFSRDDIGSFLPQYLDRNILPGDPFQSLDVKGVGKLVTMAVEYGRKVNPSIKI

SEQ ID NO: 137354 - protein, 289 aa, Unknown
  Bacterial polypetide isolated from the Sargasso Sea
MVFGNMGNDCATGVLFTRNPSNGKNEIYGEYLINAQGEDVVAGTRTPNYITKKAHKDSSLKGKSMEEFMPKTFSMLKKILNILEKKYKDMQDVEFTIENNKLWILQTRSGKRTAKSAVKIAVDMVKQKLISKKEAVLRVDPNSLDTLLHPTLNENSNIDVIAKGLPASPGAASGKVVFSSEEAERLNNMMQNTILVRIETSPEDIHGMHAAKGILTSRGGMTSHAAVVARGMGRPCVSGSSEIDIDYEKKLFKTKKGEIKEGDIITIDGSTGRIIVGEVETVKPEISGD

SEQ ID NO: 137355 - protein, 270 aa, Unknown
  Bacterial polypetide isolated from the Sargasso Sea
IASGLPASPGAASGKVFFSAEEAEKLNGMMENTILVRVETSPEDIHGMHAAKGILTSRGGMTSHAAVVARGMGRPCVSGSSEITIDYETKQFKAGEITVKEGDIITIDGGSGKVMLGTVPTVQPEISGYFSTIMKWADQFRKLKIRTNAETAKDTKIAREFGAEGIGLCRTEHMFFDEERILSVRQMILSKSIDDRSNALEKLLPHQKNDFKEIFKTMYGLPVTVRLLDPPLHEFLPKSDKDMEEVARSLNLGAKEIKDRIAELHEQNPM

SEQ ID NO: 137356 - protein, 302 aa, Unknown
  Bacterial polypetide isolated from the Sargasso Sea
KSNIKVIGKGLPASPGAVSGKVVFSSNEAERLNGMMQNTILVRVETSPEDIHGMHAAKGILTSRGGMTSHAAVVARGMGRPCVSGSSEIDINYEKKIFKASKVEIKEGDIITIDGSTGRIILGEVPTVKPEISGDFSKLMGWADNYRKLKVRTNSETPLDTKTARDFGAEGIGLCRTEHMFFDEDRILSVREMILSKTKEDRSKALAKLLPHQKNDFIEIFKIMNGLPVTVRLLDPPLHEFLPKNEKEIKSVSDALELSTNEVESRIAELHEHNPMLGHRGCRLGISFPEIYEMQCRAILKR

SEQ ID NO: 137357 - protein, 289 aa, Unknown
  Bacterial polypetide isolated from the Sargasso Sea
KDMQDVEFTVENSKLWILQTRSGKRTSKSAVKIAVDMVKENLISKNDAILRIDPNSLDTLLHPTLDEKSKIEVIATGLPASPGAASGKVVFSSEEAERLNAMMQDVILVRVETSPEDIQGMHAAKGILTARGGMTSHAAVVARGMGRPCVSGSSEIDISYDQKTFKTPLAEVKEGDIITIDGSTGRIILGKVPTVKPEISGDFSKLMSWADNFRKLKIRTNSETPLDTKTARDFGAEGIGLCRTEHMFFDEERILSVREMILSKTKEDRSKALQKLLPHQKKDFIEIFK

SEQ ID NO: 137358 - protein, 320 aa, Unknown
  Bacterial polypetide isolated from the Sargasso Sea
DFKRNGKRKNKKKNFHKNVFQQLFGAISAVFLSWESNRAKVYRKLNQIPPEWGTAVNVQSMVFGNMGDDCATGVVFTRNPSDGSNEIYGEYLINAQGEDVVAGTRTPQYITKKARKNVKVEDLSMEESLPKVFKELKKILKKLEKYYKDMQDVEFTVENNKLWMLQTRSGKRTAKSAVKIAVDMVKEKLISKKEAVLRIDPNSLDTLLHPTLDEKSTINVIANGLPASPGAASGRVVFTSEEAERLTSMMQDTILVRVETSPEDIQGMHAAKGILTARGGMTSHAAVVARGMGRPCVSGSSEIDINYEMKTFKTSSMEIK

SEQ ID NO: 137359 - protein, 283 aa, Unknown
  Bacterial polypetide isolated from the Sargasso Sea
ILSVRDMILSKTKEDRAKALDKLLPHQKKDFIEIFKIMSGLPVTVRLLDPPLHEFLPRTSKEINEVANVVGLSVKEVESRIEELHEQNPMLGHRGCRLGISFPEIYEMQCRAIFEALAELKNKKIKSAFPEIMIPLVSTEAEIKIMKDLVKKIASEVQKQNKIKIEFMVGTMIELPRAAIKAKEIAKHAEFFSFGTNDLTQTTFGISRDDSGKFLNDYLDNKIFSIDPFVSIDDGVADLVEIAVGKGKSQNKKLKLGICGEHGGDPKSIEFCSRTGLNYVSCS

SEQ ID NO: 137360 - protein, 291 aa, Unknown
  Bacterial polypetide isolated from the Sargasso Sea
TPQYIQKKARAASGSKETSMEESMPKVFKRLEKILISLESHYKDMQDVEFTVENNKLWILQTRSGKRTAKSAVKIAVDMVKEKLISKKDAILRVDPSSLDSLLHPTLDENTKINVIAKGLPASPGAASGKVVFTSDEAERLDGLMQNTILVRVETSPEDIHGMHAAKGILTARGGMTSHAAVVARGMGRPCVSGSSEIEIDYEKKVFKTKNNQIKEGDIITIDGSTGRIILGEVKTVKPEISGDFSKLMGWADNLRKLKIRTNSETPLDSKTAREFGAEGIGLCRTEHMFF

SEQ ID NO: 137361 - protein, 284 aa, Unknown
  Bacterial polypetide isolated from the Sargasso Sea
VIANGLPASPGAASGKVVFSSEEAERLNDMMQEVILVRLETSPEDIQGMHAAKGILTARGGMTSHAAVVARGMGRPCVSGSSEIDINYERKIFKTSSKEVKEGDIITIDGSTGRIILGSVPTVKPEISGDFSKLMSWADDIRKLKVRTNSETPLDTKTARDFGAEGIGLCRTEHMFFDEERILSVREMILSKTQEDRAKALRKLLPHQKKDFIEIFKIMHGLPVTVRLLDPPLHEFLPKSQKEILEVANVVGTNVKEVESRIEELHEQNPMLGHRGCRLGDFIS

SEQ ID NO: 137362 - protein, 273 aa, Unknown
  Bacterial polypetide isolated from the Sargasso Sea
AMVFGNMGNDCATGVVFTRNPSDGSKNIYGEYLINAQGEDVVAGTRTPQHITKKARVESKETLKSMEEAMPKTYKQLKNILNRLEKHYKDMQDVEFTVEKKKLWMLQTRSGKRTAKSAVKIAVDMVKEKLITKKDAILRIEPSSLDTLLHPTLDEKENLEVIGSGLPASPGAASGKVVFTSEEAERLNSMMQSTILVRVETSPEDIHGMHAAKGILTSRGGMTSHAAVVARGMGRPCVSGSSEIEIDYESKLFKTNNKVIKEGEIITIDGSTR

SEQ ID NO: 137363 - protein, 275 aa, Unknown
  Bacterial polypetide isolated from the Sargasso Sea
VPLYIPEMSKNFEELMKWADSSRRLKVRANAETPNDAKIALKFGAEGIGLCRTEHMFFDEERINVMRQMILAENITERKSALDKLLPMQMKDFEEIFSIMNDLPVTIRLLDPPLHEFLPSSEKDLLSFSKTTGIDIEKVRTQSLRLHESNPMLGHRGCRLAISYPEICEMQSKAIFEAAINIQKKSKEFVNIEIMIPLASTSAELGFCKDIINTVASSIIKKHATQLNYQIGTMIELPRAALCADDLASSADFFSFGTNDLTQTALGISRDDIGS

SEQ ID NO: 137364 - protein, 321 aa, Unknown
  Bacterial polypetide isolated from the Sargasso Sea
KVYKELAKVFIKLEKHYKYMQDIEFTVENNKLWMLQTRSGKRTAKAAIKIAVDMVKEKLISKKEAIKRIDPNTLDTLLHPTLDEKVQKEVIALGLPASPGAASGKVVFTADEAEKLNGMMQDTILVRLETSPEDIHGMHAAKGILTARGGMTSHAAVVARGMGRPCVSGSSEITIDYELKQFKAGDVIIKEGDIITIDGGSGKVMKGLVPTVQPEISGYFSTIMKWADEFRKLKVRTNAETEADSKTAREFGAEGIGLCRTEHMFFDEERILSVRQMILSKSKEDRNSALDKLLPYQKEDFKKIFKVMSGLPVTVRLLDPP

SEQ ID NO: 137365 - protein, 297 aa, Unknown
  Bacterial polypetide isolated from the Sargasso Sea
FRKLKVRTNSETPKDTKTAKDFGAEGIGLCRTEHMFFDEERILSVREMILSKTKQDRAIALEKLLPHQRKDFIDIFKIMSGLPVTVRLLDPPLHEFLPRTEKEINEVANIVNLPVKEIKSRIEELHEQNPMLGHRGCRLGISFPEIYEMQCKAIFEALVYHKKSKIKSAFPEIMIPLVSTEAEIKIMKDLVIRTASRVQEEHKLKIEFLVGTMIELPRAALKAKEIAKHAEFFSFGTNDLTQTTFGISRDDSGKFLNDYLENKIFSVDPFVSIDEGVSDLVEIAVEKGRKQNKNLKL

SEQ ID NO: 137366 - protein, 276 aa, Unknown
  Bacterial polypetide isolated from the Sargasso Sea
LPHQKKDFIEIFKIMNGLPVTVRLLDPPLHEFLPKSATEISDVSKSLNLSIKEVEGRIEELHEQNPMLGHRGCRLGISFPEIYEMQIRAIFEALVECKKRKIKSTMPEIMIPLVSTEAEIKIMKDLVINVARKVQNENKTKIKFLVGTMIELPRAALKAKDIAKHAEFFSFGTNDLTQTTFGISRDDSGKFLNDYIENKIFDIDPFISIDDGVGDLIEIAATKGKKQNKKIKLGICGEHGGDPKSIEFCSKAGLDYVSCSPYRVPVARLAAAQAQL

SEQ ID NO: 137367 - protein, 298 aa, Unknown
  Bacterial polypetide isolated from the Sargasso Sea
VREMILSRTIEDRSNALKKLLPHQKKDFIEIFKIMKGLPVTVRLLDPPLHEFLPKSNNEINDVAVSLNIPVKELEVRISELHEQNPMLGHRGCRLAISFPEIYEMQCNAIFEALVECKKQKIQSTMPEIMIPLVSTEAEIKIMKDLVIRVAKKVQDANKIKIDFLVGTMIELPRAAIKAKDIARHAEFFSFGTNDLTQTTFGISRDDSGKFLNDYIENKIFDIDPFVSIDDGVGDLIKIATDKGRKQNKKIKLGICGEHGGDPKSIEFCAKTGLDYVSCSPYRVPVARLAAAQAQIRK

SEQ ID NO: 137368 - protein, 308 aa, Unknown
  Bacterial polypetide isolated from the Sargasso Sea
LGEVSTIKPEISGDFSKLMSWADKFRKLKIRTNSETPADTKTARDFGAEGIGLCRTEHMFFDEERILSVREMILSKTKEDRNKALNKLLPHQKKDFTEIFKIMSGLPVTVRLLDPPLHEFLPKNEKEIQDVSRVLDLSEKEILSRIDELHEHNPMLGHRGCRLGISFPEIYEMQCKAIFEALVQCKKNKYKSIIPEIMIPLVSTEAEIKIMKNLVNSVAKKVQNENKMKIDYLVGTMIELPRAAIKAGEIAKHADFFSFGTNDLTQTTFGISRDDSGKFLNDYIENKIFDVDPFISIDEGVGELIEIA

SEQ ID NO: 137369 - protein, 306 aa, Unknown
  Bacterial polypetide isolated from the Sargasso Sea
ITKKDAILRIEPSSLDSLLHPTLDEKANLEVIGSGLPASPGAASGKVVFTSEEAERLNSMMQSTILVRIETSPEDIHGMHAAKGILTSRGGMTSHAAVVARGMGRPCVSGSSEIEIDYENKLFKTNNKVIKEGEIITIDGSTGRIIIGEVKTVKPEMSGDFSKIMSWSDDFRKLKIRTNSETPLDSKTAREFGAEGIGLCRTEHMFFDEERISSVREMILSKTIEDRSNALKKLLPHQKKDFIEIFKIMKGLPVTVRLLDPPLHEFLPKSKNEINDVAVSLNIPIKELEVRISELHEQNPMLGHRG

SEQ ID NO: 137370 - protein, 246 aa, Unknown
  Bacterial polypetide isolated from the Sargasso Sea
SGKVVFTSEEAERLTSMMQDTILVRVETSPEDIQGMHAAKGILTARGGMTSHAAVVARGMGRPCVSGSSEIDINYEMKTFKTSSMEIKEGDIITIDGSSGRIISGSVATVKPEISGDFSKIMTWADSFRKLNIRTNSETPKDTKTAKDFGAEGIGLCRTEHMFFDEERILSVREMILSKTKEDRSIALKKLLPHQKKDFIEIFKIMSGLPVTVRLLDPPLHEFLPRTDKEINEVANIVNLPVKEVE

SEQ ID NO: 137371 - protein, 282 aa, Unknown
  Bacterial polypetide isolated from the Sargasso Sea
ARRLQKLFAIMRGLPVTIRLLDPPLHEFLPGKDEELHEVANAAGTEFDEVRARVAALHETNPMLGLRGCRLAIMYPEIYEMQCRAIFEAAAEVSEETGDSVMTEIMIPLVASKQEFEILRTLVSAIAAEVEEEKKASLDYLIGTMIELPRAALRAGEIAETAEFFSFGTNDLTQTTFGLSRDDSGTFLDPYIENGIFINDPFVTIDQDGVGELVKIAIDRGREVRERLKLGICGEHGGDPESIKFCQLVGLDYVSCSPYRVPVARLACAQASINKQKIITTV

SEQ ID NO: 137372 - protein, 249 aa, Unknown
  Bacterial polypetide isolated from the Sargasso Sea
LDESKEIKTIAKGLPASPGATSGKVVFTSDEAERLNGMMQDTILVRVETSPEDIHGMHAAKGILTARGGMTSHAAVVARGMGRPCVSGSSEIDINYDEKLFKTSSNVEIKEGDIITIDGSTGRVISGEVPTIKPEISGDFSKLMNWADKFRKLKVRTNSETPLDTKTARDFGAEGIGLCRTEHMFFDEDRILSVREMILSKTIDDRNKALAKLLPHQKKDFTEIFEIMSGLPVTVRLLDHLYMSSYLKR

SEQ ID NO: 137373 - protein, 313 aa, Unknown
  Bacterial polypetide isolated from the Sargasso Sea
AQGSDLPAMEEVMPAVFGQLNEVRLNLEKHYRDMQDIEFTVQQDKLWMLQTRSGKRTAKAALKIACDMVAEGLITKEEAVSRVDPESLDQLLHPTLDPYPPRDLLTRGLPASPGAASGKVVFSADEAEAEAAKGEAVILVRIETSPEDIHGMHAAQGILTSRGGMTSHAAVVARGMGRPCVSGTGDLHIDYARQKMTVMGREIAAGDTLTIDGGSGEVMAGEVPTLQPEVSGDFGTLMGWVDDIRKLRVRTNAETPLDAKTAVDFGAEGIGLCRTEHMFFDADRIIAVREMILANDTAGRRAALEKILPMQRQ

SEQ ID NO: 137374 - protein, 250 aa, Unknown
  Bacterial polypetide isolated from the Sargasso Sea
TAKSAVKIAVDMVKEKLISKKEAVLRIDPNSLDTLLHPTLDEKSSINVIANGLPASPGAASGKVVFTSEEAERLTAMMQDTILVRVETSPEDIQGMHAAKGILTARGGMTSHAAVVARGMGRPCVSGSSEIDINYENKSFKTSSMEIKEGDIITLDGSTGRIIAGSVSTVKPEISGDFSRIMSWADSFRKLKVRTNSETPKDTKTAKDFGAEGIGLCRTEHMFFDEERILSVREMILSKTKEDRAMALEK

SEQ ID NO: 137375 - protein, 312 aa, Unknown
  Bacterial polypetide isolated from the Sargasso Sea
SKVYRKLNQIPSEWGTAVNVQSMVFGNMGNNCATGVVFTRNPSDGSNNIYGEYLINAQGEDVVAGTRTPQYITKKAKKDAKVSDPSMEESMPKVYSELNKILKKLESHYKDMQDVEFTVENNKLWILQTRSGKRTSKSAVKIAVDMVREKLITKDEAVLRIDPNSLDTLLHPTLDEKSSIQVIANGLPASPGAASGKVVFTSEEAERLSNMMQDTILVRVETSPEDIQGMHAAKGILTARGGMTSHAAVVARGMGRPCVSGSSEIDIQYDKKIFKTSSIEIKEGDTITIDGSTGRIILGTVPTVKPEISGDF

SEQ ID NO: 137376 - protein, 270 aa, Unknown
  Bacterial polypetide isolated from the Sargasso Sea
LCRTEHMFFDEERILSVREMILSKTKENRAIALAKLLPHQKKDFIDIFKIMGGLPVTVRLLDPPLHEFLPRTEKEINEVANIVNLSVKEIESRIEELHEQNPMLGHRGCRLGISFPEIYEMQCKAIFEALAYLKKIKIKSAFPEIMIPLVSTEAEIKIMKELVIRTASQVQQEHKLNIEFLVGTMIELPRAAIKAKEIAKHAEFFSFGTNDLTQTTFGISRDDSGKFLNDYIENKIFNIDPFISIDDGVKDLIEMAVSKGKKQNKKIKLG

SEQ ID NO: 137377 - protein, 257 aa, Unknown
  Bacterial polypetide isolated from the Sargasso Sea
SEKVVFSSDEAERLNGMMQDTILVRVETSPEDIHGMHAAKGILTARGGMTSHAAVVARGMGRPCVSGSSEIDINYQSKNFKTKNLEVKEGDIITIDGSTGRIILGEVPTVKPEISGNFSKLMKWVDKFRKLKVRTNSETPLDTKTARDFGAEGIGLCRTEHMFFDEERILSVREMILSKTKEDRDKALAKLLPHQKKDFVEIFKIMNGLPVTVRLLDPPLHEFLPKNENEIQDVSNSLKLSVKEVQSRIDELHEHNP

SEQ ID NO: 137378 - protein, 274 aa, Unknown
  Bacterial polypetide isolated from the Sargasso Sea
MVFGNMGEDCSTGVAFTRNPSTGEKAFFGEYLINAQGEDVVAGTRTPQHITKKAKKDSGSKTLSMEETMPKVYQQLKLIFLKLEKHYRDMQDIEFTVENNKLWMLQTRSGKRTAKAAIKIAVDMVKENLISKKEAILRIDPNTLETLLHPTLDEKVEKKIIASGLPASPGAASGKVVFSAEEAERLNAMMENTILVRVETSPEDIHGMHAAKGILTSRGGMTSHAAVVARGMGRPCVSGSSEINIDYETRQFKAGEAIVKEGDVITIDGGSGKV

SEQ ID NO: 137379 - protein, 275 aa, Unknown
  Bacterial polypetide isolated from the Sargasso Sea
KEDFKKIFKVMSGLPVTVRLLDPPLHEFLPKADKDIEEVARSLNLSAKEVKDRISELHEENPMLGHRGCRLGISFPEIYEMQCRAIFEAIVELKKQKIKAAFVEIMIPLVSTDSELKILRALVNKIAKEIEKENKLKLEYMVGTMIELPRAALQAKSISKHADFFSFGTNDLTQTTLGISRDDSGKFLNDYIDNKIFEVDPFVSIDQNGVGELVEIASSRGRKTNKNIKLGICGEHGGDPKSIEFCSRTGLNYVSCSPFRVPVARLAAAQAELSK

SEQ ID NO: 137380 - protein, 257 aa, Unknown
  Bacterial polypetide isolated from the Sargasso Sea
VRLLDPPLHEFLPKNSNEINDVAQSLNLNTKDIEARINELHEHNPMLGHRGCRLGISFPEIYEMQCRAIFEALIECKNKKYKSITPEIMIPLVSTEAEIKIMKDLVIRVAKEVQNEKKVKLDFLVGTMIELPRAAIKAQDIAKHAEFFSFGTNDLTQTTFGISRDDSGKFLNDYIENKIFDIDPFVSIDDGVGDLIEIAVKKGKKHNKKIKLGICGEHGGDPKSIYFCSKTGLDYVSCSPYRVPVARLAAAQAQLKK

SEQ ID NO: 137381 - protein, 306 aa, Unknown
  Bacterial polypetide isolated from the Sargasso Sea
MSWADKFRKLKIRTNSETPLDTKIAREFGAEGIGLCRTEHMFFDEERILSVREMILSKTKEDRHKALSKLLPHQKNDFIEIFKIMNGLPVTVRLLDPPLHEFLPKNENEINDVSESLKLSVKEIESRISELHEHNPMLGHRGCRLGISFPEIYEMQCRAIFEALIECKNKKIKSILPEIMIPLVSTESEIRIMKNLVINTARKVQEQNKVKINFLVGTMIELPRAALKAKEIAKHAEFFSFGTNDLTQTTFGISRDDSGKFLNDYIENKIFDIDPFISIDEGVGDLIEIATINGKKQNKKIKLGIC

SEQ ID NO: 137382 - protein, 310 aa, Unknown
  Bacterial polypetide isolated from the Sargasso Sea
MGRPCVSGSSEIEIDYEKKIFKTKNNQIKEGDIITIDGSTGRIILGEVKTVKPEISGDFSKLMGWADNLRKLKIRTNSETPLDSKTAREFGAEGIGLCRTEHMFFDEERILSVRQMILSKSTEDRADALSKLLPHQRNDFVEIFKIMNGLPVTVRLLDPPLHEFLPKSETEISDVAKSLNLSAKDVEARIQELHEQNPMLGHRGCRLGISFPEIYEMQCRAIFEALIECKKRKLKPIMPEIMIPLVSTEAEIKIMKDLVIRVASKVQKDNKAKIKFLVGTMIELPRAAIKANHIAKHAEFFSFGTNDLTQ

SEQ ID NO: 137383 - protein, 303 aa, Unknown
  Bacterial polypetide isolated from the Sargasso Sea
MVNEKLISKKEAVLRIDPNSLDTLLHPTLDEKSSIKVIANGLPASPGAASGKVVFTSEEAERLTAMMQDTILVRVETSPEDIQGMYAAKGILTARGGMTSHAAVVARGMGRPCVSGSSEIDINYENKSFKTSFMEIKEGDVITIDGSTGRIIAGSVSTVKPEISSDFSKLMSWADDFRKLKVRTNSETPKDTKIAKDFGAEGIGLCRTEHMFFDEERILSVREMILSKTKEDRAIALEKLLPHQRKDFIDIFKIMNGLPVTVRLLDPPLHEFLPSTEKEINEVANTVNLSAKDVISRIEELHE

SEQ ID NO: 137384 - protein, 282 aa, Unknown
  Bacterial polypetide isolated from the Sargasso Sea
LCRTEHMFFDEERILSVREMILSKTKEDRNKALEKLLPHQKNDFIEIFKIMSNLPVTVRLLDPPLHEFLPKTEKEINEIANKLKLSLKEIRGRINELHEQNPMLGHRGCRLGISFPEIYEMQCRAIFEALSELEKKKIKAAFPEIMIPLVSTEAEIKIMKNLVIRTAKKVQNQNKTKIKFLVGTMIELPRAAIKATDIAKHAEFFSFGTNDLTQTTFGISRDDSGKFLNDYIENKIFDIDPFISIDEGVGDLIKIASEKGRKQNKNIKLGICGEHGGDPKSI

SEQ ID NO: 137385 - protein, 296 aa, Unknown
  Bacterial polypetide isolated from the Sargasso Sea
IYRKLNQIPSEWGTAVNIQSMVFGNMGNDCATGVVFTRNPSDGSNDIYGEYLINAQGEDVVAGTRTPQHITKKARKEAQTKDLSMEDSMPKVYKQLEKILKKLENHYKDMQDVEFTVENNILWILQTRSGKRTSKSAVKIAVDMVKEKLITKKQAVLRVDPNSLDTLLHPTLDEKSEIKVIANGLPASPGAASGKVVFTSEEAERLTGMLQDTILVRIETSPEDIQGMHAAKGILTARGGMTSHAAVVARGMGRPCVSGSSEIDINYEKKTFKTSSMEVKEGEIITIDGSTGRIIS

SEQ ID NO: 137386 - protein, 283 aa, Unknown
  Bacterial polypetide isolated from the Sargasso Sea
YRAKVYRKLNQIPSSWGTAVNIQSMVFGNMGDDCATGVVFTRNPSDGSKEIYGEYLINAQGEDVVAGTRTPQHITKKSRIKSKEKLLSMEESMPSTYTKLKKILLKLEKHYKDMQDVEFTVENKKLWILQTRSGKRTAKSAVKIATDMVKEKLISKKLAVLRVEPNSLDTLLHPTLDEKSSIEVIAKGLPASPGAASGKVVFSSDEAQRLNDMMQNTILVRVETSPEDIHGMHAAKGILTARGGMTSHAAVVARGMGRPCVSGSSDIEIDYENNLFKANGYEI

SEQ ID NO: 137387 - protein, 218 aa, Unknown
  Bacterial polypetide isolated from the Sargasso Sea
RVETSPEDIQGMHAAKGILTARGGMTSHAAVVARGMGRPCVSGSSEIDISYENKSFKTSSMEIKEGDIITIDGSTGRIIAGSVSTVKPEISGDFSKLMSWADDFRKLKVRTNSETPKDTKTAKDFGAEGIGLCRTEHMFFDEERILSVREMILSKSKEDRSIALEKLLPYQRKDFIDIFKIMSGLPVTVRLLDPPLHEFLPRTEKEINEVANIVNLPN

SEQ ID NO: 137388 - protein, 288 aa, Unknown
  Bacterial polypetide isolated from the Sargasso Sea
SQIIKEGDIITIDGGSGKVMLGTVPTVKPEISGYFSTIMRWADQFRKLKVRTNAETANDTKIAREFGAEGIGLCRTEHMFFDEERILSVRQMILSKSIDDRNNALDKLLPHQKNDFKEIFKTMHGLPVTVRLLDPPLHEFLPKSDKDIEEVARSLNLGAKEIKDRIAELHEQNPMLGHRGCRLGISFPEIYEMQCKAIFEALVECKKEKSKSAIAEIMIPLVSTDLELKILRDLVNRVAKHVQEQHKVKIDYIVGTMIELPRAALQAKAISKYADFFSFGTNDFNTNS

SEQ ID NO: 137389 - protein, 296 aa, Unknown
  Bacterial polypetide isolated from the Sargasso Sea
MILSKSKDDRNSALDKLLPHQKEDFKKIFRVMSGLPVTVRLLDPPLHEFLPKADKDIEEVARSLNLSAKEVKDRISELHEENPMLGHRGCRLGISFPEIYEMQCRAIFESIVELKKQKVKAAFVEIMIPLVSTESELKILRDLVNKIANEIEKENKSKLEYMVGTMIELPRAALQAKSISKHADFFSFGTNDLTQTTFGISRDDSGKFLNDYIDNKIFDVDPFVSIDQNGVGELVEIASSRGRKTNKNIKLGICGEHGGDPKSIEFCSRTGLNYVSCSPYRVPVARLAAAQAELTK

SEQ ID NO: 137390 - protein, 293 aa, Unknown
  Bacterial polypetide isolated from the Sargasso Sea
LDTLLHPTLDETVKKNVIASGLPASPGAASGKVVFSADEAERLNGLMQNTILVRVETSPEDIHGMHAAKGILTARGGMTSHAAVVARGMGRPCVSGSSEITIDYDQKIFKTGDEIIKEGEIITIDGSSGKVMKGLVPTVQPEISGYFSKIMGWADEFRKLKVRTNAETENDSKTAREFGAEGIGLCRTEHMFFDEERILSVRQMILSKSKEDRDSALQKLLPYQKNDFKKIFKIMSGLPVTVRLLDPPLHEFLPKAVNDIEEVARSLNLASKEIKERISELHEENPMLGHRGV

SEQ ID NO: 137391 - protein, 288 aa, Unknown
  Bacterial polypetide isolated from the Sargasso Sea
QTRSGKRTAKSAVKIAVDMVKEKLISKKEAVLRIDPNSLDTLLHPTLDEKSSINVIAHGLPASPGAASGKVVFTSEEAERLAGMMQDTILVRVETSPEDIQGMHAAKGILTARGGMTSHAAVVARGMGRPCVSGSSEIDINYENKVFKTPSLEIKEGEIITIDGSTGRIISGNIETVKPEISGDFSKLMSWADKFRKLKIRTNSETPKDTKTAKDFGAEGIGLCRTEHMFFDEERILSVREMILSKTKDDRAKALDKLLPHQKEDFMQIFKIMSGLPVTVRLLDPPTT

SEQ ID NO: 137392 - protein, 272 aa, Unknown
  Bacterial polypetide isolated from the Sargasso Sea
AEGIGLCRTEHMFFDEERILSVRQMILSKSKIDRDTALSKLLPYQKKDFIEIFKIMKGLPVTVRLLDPPLHEFLPKNKNEIELVANSLNLSVNEVEIRIQELHEQNPMLGHRGCRLAISFPEIYEMQCKAIFEALVECKKNKIKSIIPEIMIPLVSTEAEIKIMKDLVIKVAKQVQKNYNIRLNFLVGTMIELPRAALKAKDIAKHAEFFSFGTNDLTQTTFGISRDDSAKFLNDYIENKIFEIDPFISIDEGVGNLVEIATQNGRKQNNKI

SEQ ID NO: 137393 - protein, 289 aa, Unknown
  Bacterial polypetide isolated from the Sargasso Sea
ANGLPASPGAASGKVVFTSEEAERLTAMMQDTILVRVETSPEDIQGMHAAKGILTARGGMTSHAAVVARGMGRPCVSGSSEIDINYENKSFKTSAMEIKEGDVITIDGSTGRIIAGSVSTVKPEISGDFSKLMSWADSFRKLKVRTNSETPKDTKTAKDFGAEGIGLCRTEHMFFDEERILSVREMILSKTKEDRAIALQKLLPHQRKDFIDIFKIMSGLPVTVRLLDPPLHEFLPRTEKEINEVANTINLPVKEVESRIEELHEQNPMLGHRGCRLGISFPEIYEMQC

SEQ ID NO: 137394 - protein, 282 aa, Unknown
  Bacterial polypetide isolated from the Sargasso Sea
MDTQTARDFGAEGIGLCRTEHMFFDEERILSVREMILSKTQEDRSRALEKLLPHQKKDFIEIFKIMQGLPVTVRLLDPPLHEFLPKSEKEISEVAKVVGTDIKEVESRIEELHEQNPMLGHRGCRLGISFPEIYEMQCRAIFEALIELKKNKQKSALPEIMIPLVSTEAEIKIMKDLVINIAKKVQNENKIKIEFLVGTMIELPRAAIKAKDIAKHAEFFSFGTNDLTQTTFGISRDDSGKFLNDYIDNKIFITDPFVSIDDGVKDLVEIAVEKGKKQNRKI

SEQ ID NO: 137395 - protein, 296 aa, Unknown
  Bacterial polypetide isolated from the Sargasso Sea
MVPRIGLCRTEHMFFDGNRIDLMRQMILAADVEERRAALKKLLPFQKKDFQGLFRAMEGRPVTIRLLDPPLHEFLPNDDTRRAELAQKLNVSTEYIIERIKALHEENPMLGCRGCRLGVLHPEITEMQVRAIFEAAVSLRKSKRPVIVKPEIMVPLVGFDAELRDQVTIVRAVADEVLTKTGIEIPYQVGTMIEVPRAAITADEIAQTAEFFSFGTNDLTQTTLGLSRDDMGSFFDVYRDKEIYGHNPFASIDEAGVGRLMRTAIRGGKDKRPSLKLSICGEHAGDASSIAFCEEL

SEQ ID NO: 137396 - protein, 287 aa, Unknown
  Bacterial polypetide isolated from the Sargasso Sea
DRDKALAKLLPHQRNDFVEIFKIMNGLPVTVRLLDPPLHEFLPKNKDEINDVAKSLNLNIKEIEGRISELHEQNPMLGHRGCRLGISFPEIYEMQCRAIFEALVECKNKKYKSIIPEIMIPLVSTEEEIKIMKNLVIRVASKVQNEKKSKLDFLVGTMIELPRAAIKAKDIAKHAEFFSFGTNDLTQTTFGISRDDSGKFLNDYIENKIFDIDPFISIDDGVGDLIEIAVIKGKKQNKKIKLGICGEHGGDPKSINFCSKIGLDYVSCSPYRVPIARLAAAQAQLSK

SEQ ID NO: 137397 - protein, 304 aa, Unknown
  Bacterial polypetide isolated from the Sargasso Sea
SADSDVKRVLEGKLRPTNSYTFSLFETVMKWADRQRSLKIRTNADTPAMAKQAVSFGAEGIGLCRTEHMFFDGDRINFMRQMILAVDEVQRRSALKKLLPFQKKDFVGLFKEMNGRPVTIRLLDPPLHEFLPQDDVVRRQLAEKLGVPFDFVIDRIKSLHEENPMLGCRGCRLGILYPEITEMQTRAIFEAAAQVQKSKKRIKVNPEIMIPLVGFQEELADQLSIVHRVAKEVMKARKVRINYIVGTMIEVPRAAITADEIAKEADFFSFGTNDLTQTTLGLSRDDMGLFYDEYQRKEIYHKNP

SEQ ID NO: 137398 - protein, 285 aa, Unknown
  Bacterial polypetide isolated from the Sargasso Sea
KSSVKIAVDMVKEKIISKKQAILRIDPNTLETLLHPSLDEKSELNVIAKGLPASPGAASGKVVFSSDEAERLSDVMQNTILVRIETSPDDIHGMHAAKGILTARGGMTSHAAVVARGMGRPCVSGSSEIDIDYKNKLFKTKNYEIKEGDVITIDGSTGRIILGKVKTIKPEISNDFSKVLNWADSLRKLKIRTNSETPLDSKIAREFGAEGIGLCRTEHMFFEEERILSVRQMILSKSKEDRDKALDKLLPHQKKDFVEIFKIMNGLPKTVRLLDPPLHEFLPKK

SEQ ID NO: 137399 - protein, 270 aa, Unknown
  Bacterial polypetide isolated from the Sargasso Sea
RNFKIMKGLPVTVRLLDPPLHEFLPKTDKDIEEVARSLNLGVKEIKNRVAELHELNPMLGHRGCRLGISFPEIYEMQCKAIFTALIECKKEKIQSIIPEIMIPLVSTEDELGIMRKLVNRVANELQKEHKIKINYFVGTMIELPRAALRAAPISRYADFFSFGTNDLTQTTFGISRDDSGKFLNDYLENKIFDGDPFVSIDRDGVGELVKIASERGKKQNKKLKLGICGEHGGDPRSIDFCSKVGLNYVSCSPFRVPIARLAAAQAELRR

SEQ ID NO: 137400 - protein, 257 aa, Unknown
  Bacterial polypetide isolated from the Sargasso Sea
DRAKALKKLLPHQRKDFIEIFKIMHGLPVTVRLLDPPLHEFLPKSSKEISEVANVVGVDVKEVESRIEELHEQNPMLGHRGCRLGISFPEIYEMQCRAIFEALSELKKNNQKSAFPEIMIPLVSTEAEIKIMKDLVIRVAGKVEKENKLKVSYLVGTMIELPRAAIKAKDIAKHAEFFSFGTNDLTQTTFGISRDDSGKFLNDYIENKIFSIDPFVSIDQGVEDLIEIAVDRGKKQNKKIKLGICGEHGGDPKSIHF

SEQ ID NO: 137401 - protein, 286 aa, Unknown
  Bacterial polypetide isolated from the Sargasso Sea
KTAREFGAEGIGLCRTEHMFFDEERILSVRQMILSRSVEDRNHALLKLLPHQKDDFKKIFKVMSGLPVTVRLLDPPLHEFLPKAEKDIEEVARSLNLSSKEIKDRIAELHEENPMLGHRGCRLGISFPEIYEMQCEAIFEALVELKKEKTKAAFVEIMIPLVSTDTELKILRALVKRIAKKIELKNKTKLDYIVGTMIELPRAALQAKSISKHADFFSFGTNDLTQTTLGISRDDSGKFLSDYIDNKIFDIDPFVSIDQSGVGELVELASARGRKANKKLKLGICG

SEQ ID NO: 137402 - protein, 271 aa, Unknown
  Bacterial polypetide isolated from the Sargasso Sea
QKNDFIEIFKIMSNLPVTVRLLDPPLHEFLPRTEKEINELANELKLSIKEIKGRINELHEQNPMLGHRGCRLGISFPEIYEMQCRAIFEALSELEKKKIKSAFPEIMIPLVSTEAEIKIMKDLVIRTAKKVQSQNKTKIKFLVGTMIELPRAAIKANDIAKHAEFFSFGTNDLTQTTFGISRDDSGKFLNDYIENKIFDIDPFISIDEGVGDLIKIASEKGRKQNKNIKLGICGEHGGDPASIHFCSQVGLDYVSCSPYRVPVARLAAAQA

SEQ ID NO: 137403 - protein, 282 aa, Unknown
  Bacterial polypetide isolated from the Sargasso Sea
MDEKSSIEVIASGLPASPGAASGKVVFTSEEAERLNDMMQDTILVRVETSPEDIQGMHAAKGILTARGGMTSHAAVVARGMGRPCVSGSSEIDINYEKKVFKTLSVEVKEGDIITIDGSTGRIILGNVPTVKPEISGDFSKLMGWADDIRKLKVRTNSETPLDTKIARDFGAEGIGLCRTEHMFFDEERILSVREMILSKTQEDRAKALKKLLPHQKKDFMKIFEIMHGLPVTVRLLDPPLHEFLPKSKKEITEVANAIGINVKEVESRIEELHEQNPMLGH

SEQ ID NO: 137404 - protein, 245 aa, Unknown
  Bacterial polypetide isolated from the Sargasso Sea
PTLDEKSFIKVIANGLPASPGAASGKVVFTSEEAERLNDMMQDTILVRIETSPEDIQGMHAAKGILTARGGMTSHAAVVARGMGRPCVSGSSEIDINYDLKTFKTSSIEVKEGDTITIDGSTGRIILGTVPTVKPEISGDFSKLMSWADGIRKLKVRTNSETPLDTKIARDFGAEGIGLCRTEHMFFDEERILSVREMILSKTPEDRAIALKKLLPHQKKDFMEIFKIMHGLPVTVRLLDPPLHE

SEQ ID NO: 137405 - protein, 249 aa, Unknown
  Bacterial polypetide isolated from the Sargasso Sea
PNTLDTLLHPTLDEKVKKEIIASGLPASPGAASGKVVFTADEAERLNGMMQDTILVRLETSPEDIHGMHAAKGILTARGGMTSHAAVVARGMGRPCVSGSSEITIDYETKKFKAGNEIIKEGDIITIDGGSGKVMKGLVPTVQPEISGYFSTIMKWADEFRKLKVRTNAETEADSKTAREFGAEGIGLCRTEHMFFDEERILSVRQMILSKSIEDRNHALLKLLPHQKDDFKKIFKVMSGLPVTVRLLD

SEQ ID NO: 137406 - protein, 266 aa, Unknown
  Bacterial polypetide isolated from the Sargasso Sea
TPEEAERLNDMMQDTILVRVETSPEDIQGMHAAKGILTARGGMTSHAAVVARGMGRPCVSGSSEIDINYEKKFFKTSSCEVKEGDIITIDGSTGRIILGSVPTVKPEISGDFSKLMKWADNIRKLKVRTNSETPIDTKNAREFGAEGIGLCRTEHMFFDEERILSVREMILSKTQEDRANALKKLLPHQKKDFIDIFKIMHGLPVTVRLLDPPLHEFLPKSKKEVSEVANIIGLDESEVESRIDELHEQNPMLGHRGCRLGISFPE

SEQ ID NO: 137407 - protein, 279 aa, Unknown
  Bacterial polypetide isolated from the Sargasso Sea
GKRTAKSAVKIAVDTVKEKLISKKEAVLRIDPNSLDTLLHPTLDEKSSINVIANGLPASPGAASGKVVFTSEEAERLTAMMQDTILVRVETSPEDIQGMHAAKGILTARGGMTSHAAVVARGMGRPCVSGSSEIDINYENKSFKTSSMEIKEGDVITIDGSTGRIIAGSVSTVKPEISGDFSKLMSWADSFRKLKVRTNSETPKDTKTAKDFGAEGIGLCRTEHMFFDEERILSVREMILSKTKEDRAIALQKLLPHQRKDFIDIFKIMYGLPVTVRLL

SEQ ID NO: 137408 - protein, 315 aa, Unknown
  Bacterial polypetide isolated from the Sargasso Sea
TIDGSTGRIISGSVATVKPDISGDFSKIMTWADNFRKLNIRTNSETPKDTKTAKDFGAEGIGLCRTEHMFFDEERILSVREMILSKTEEDRSIALKKLLPHQKKDFKEIFKIMSGLPVTVRLLDPPLHEFLPRTDKEINEVANIVNLPVKEVENRINELHEQNPMLGHRGCRLGISFPEIYEMQCRAIFEALTELKKEKIRSAFPEIMIPLVSTEAEIKIMKELVIRIASEVQKEHKLKVDFMVGTMIELPRAAIKAKDIAKHAEFFSFGTNDLTQTTFGISRDDSGKFLNDYIDNKIFSIDPFISIDDGVGDLI

SEQ ID NO: 137409 - protein, 280 aa, Unknown
  Bacterial polypetide isolated from the Sargasso Sea
YQKNDFIEIFKIMNGLPVTVRLLDPPLHEFLPKTKKDIDDIAKELNISHNDIKSRITELHEQNPMLGHRGCRLGISFPEIYQMQCKAIFEALAECKKKKLKLVIPEIMIPLVSTAAEIKIIRNLVDKTAMEIQKEHSIKIKYYVGTMIELPRAALRAKDIAKYADFFSFGTNDLTQTTFGISRDDSGKFLNDYVDNKIFNKDPFISIDERGVGELIKIATERGRLQKKSIKLGICGEHGGDPSSIEFCEKAKLNYVSCSPYRVPIARLAAAQAYKKKKSV

SEQ ID NO: 137410 - protein, 237 aa, Unknown
  Bacterial polypetide isolated from the Sargasso Sea
GLPASPGAASGKVVFTSEEAERLTAMMQDTILVRVETSPEDIQGMHAAKGILTARGGMTSHAAVVARGMGRPCVSGSSEIDINYENKSFKTSSVEIKEGDIITIDGSTGRIIAGGVSTVKPEISGDFSKLMSWADSFRKLKVRTNSETPKDTKTAKDFGAEGIGLCRTEHMFFDEERILSVREMILSKTKEDRAIALEKLLPHQRKDFINIFKIMSGLPVTVRLLDPPLHEFLPRTK

SEQ ID NO: 137411 - protein, 314 aa, Unknown
  Bacterial polypetide isolated from the Sargasso Sea
FYGEWLQNAQGEDVVAGIRTPHPLNEATKEEESKHLESLEEFLPDVYGQLDEIRIKLENHYNDMQDIEFTIEEGRLWMLQTRTGKRTGGAAIQMAVDMVSDNMISKEEAIMRVTPDQIDELLHPRLNIEEEKKAVSLTRGLPAGPGGAVGQVVFTADDAENWHKKGNNIVLVREETSPEDVHGMHVAEAILTAKGGMTSHAALVARGWGKCCIVGCSAINIDFEKKQMTIDNETIKEGDWISMNGSTGTVYPGQVNLESADPQSNRSYKDLISWADEFRTLKIRTNADSPQDAFQAIEFGAEGIGLCRTEHMFF

SEQ ID NO: 137412 - protein, 287 aa, Unknown
  Bacterial polypetide isolated from the Sargasso Sea
FTENPSDGSNNIYGEYLINAQGEDVVAGTRTPQYITTKAKKDANVKEASMEESMPKVYLELFKILKKLEKYYKDMQDVEFTVENKKLWILQTRSGKRTSKSAVKIAVDMVKEKLISKNDAVLRIDPNSLDTLLHPTLDEKSSIEVIANGLPASPGAASGRVVFTSEEAERLNDMMQDTILVRVETSPEDIQGMHAAKGILTARGGMTSHAAVVARGMGRPCVSGSSEIDINYEKKIFKTSLIEIKEGDVITIDGSTGRIILGKVPTVKPEISGDFSKLMEWADKVRK

SEQ ID NO: 137413 - protein, 272 aa, Unknown
  Bacterial polypetide isolated from the Sargasso Sea
ETPLDSKIAREFGAEGIGLCRTEHMFFEEERILSVRQMILSKSSEDRNIALSKLLPHQKKDFIEIFKIMGGLPVTVRLLDPPLHEFLPKNESEITDVSKSLNLSIKEVDSRIKELHEQNPMLGHRGCRLGISFPEIYEMQCRAIFEALVECKYKKFKSILPEIMIPLVSTEAEIKIMKDLVIKIAKKVQDENKIKIDFLVGTMIELPRAAIKAKDIAKHAEFFSFGTNDLTQTTFGISRDDSGKFLNDYIENKIFDVDPFISIDDGVGDLIK

SEQ ID NO: 137414 - protein, 318 aa, Unknown
  Bacterial polypetide isolated from the Sargasso Sea
AAKGILTARGGMTSHAAVVARGMGRPCVSGSSEITIDYELKQFKAGDVIIKEGDIITIDGGSGKVMKGLVPTVQPEISGYFSTIMKWADKFRKLKVRTNAETEADSKTAKEFGAEGIGLCRTEHMFFDEERILSVRQMILSKSKEDRNSALDKLLPHQKKDFKKIFKVMSGLPVTIRLLDPPLHEFLPKVDKDIEEVARSLNLSAKEVKDRIAELHEENPMLGHRGCRLGISFPEIYEMQCRAIFEAIVELKKQKVKAAFVEIMIPLVSTESELKILRALVNKIAKEIEKENKLKLDYLVGTMIELPRAALQAKSISK

SEQ ID NO: 137415 - protein, 331 aa, Unknown
  Bacterial polypetide isolated from the Sargasso Sea
WRISYYRSRGGCSSRTKDPQNYITKKANKDSNSKGKSMEEAMPKVYFQLKKILKLLEKYYKDMQDVEFTVENSKLWMLQTRSGKRTAKSAVKIAVDMVKEKLITKKEAVLRVDPNALDTLLHPTLDETKEIKTIAKGLPASPGATSGKVVFSSDEAERLNGMMQDTILVRVETSPEDIHGMHAAKGILTARGGMTSHAAVVARGMGRPCVSGSSEIDINYEQKIFRTSSNVEVKEGDVITIDGSTGRVILDKVPTLKPEISGDFSKLMSWADSYRKLKVRTNSETPLDTKTAREFGAEGIGLCRTEHMFFDEDRILSVREMILSKTMRTEI

SEQ ID NO: 137416 - protein, 322 aa, Unknown
  Bacterial polypetide isolated from the Sargasso Sea
SPEDIHGMNAAKGILTARGGMTSHAAVVARGMGRPCVSGSSEITIDYETKQFKAGNEIIKEGDIITIDGGSGKVIKGSVPTVQPEISGYFSTIMKWADEFRKLRVRTNAETEADSKTAREFGAEGIGLCRTEHMFFDEERILSVRQMILSKSAEDRNHALLKLLPHQRNDFKRIFKVMSGLPVTVRLLDPPLHEFLPKAEKDIEEVARSLNLSSKEIKDRISELHEENPMLGHRGCRLGISFPEIYEMQCEAIFESLVELKKEKIKAAFVEIMIPLVSTEAELKILRALVKRIAKKIELKNKTKLDFIVGTMIELPRAALQA

SEQ ID NO: 137417 - protein, 277 aa, Unknown
  Bacterial polypetide isolated from the Sargasso Sea
YQRKDFVDIFKIMSGLPVTVRLLDPPLHEFLPRTEREVNEVANIVKLPVKEVESRIEELHEQNPMLGHRGCRLGISFPEIYEMQCKAIFEALVHLKKNKIQSAFPEIMIPLVSTEAEIKIMKDLVNRTAGQVQKEHKLKIEFLVGTMIELPRAAIKAKEIARHAEFFSFGTNDLTQTTFGISRDDSGKFLNDYLENKIFSIDPFVSIDEGVSDLVEIAVEKGRKQNKKLKLGICGEHGGDPHSISFCSKAGLNYVSCSPYRVPVARLAAAQAEIKKK

SEQ ID NO: 137418 - protein, 284 aa, Unknown
  Bacterial polypetide isolated from the Sargasso Sea
AETEVDSKTAREFGAEGIGLCRTEHMFFDEERILSVRQMILSKSKEDRNSALEKLLPHQKEDFKKIFKVMSGLPVTVRLLDPPLHEFLPKTDKDIEEVARSFNLSAKEVNDRIAELHEENPMLGHRGCRLGISFPEIYEMQCRAIFEAIVELKKQKVKAAFIEIMIPLVSTESELKILRTLVNKIAKEIEKENKLKLEYMVGTMIELPRAALQAKSISKHADFFSFGTNDLTQTTFGISRDDSGKFLNDYIDNKIFDVDPFVSIDQNGVGELVEIASSRGRKTN

SEQ ID NO: 137419 - protein, 247 aa, Unknown
  Bacterial polypetide isolated from the Sargasso Sea
HGLPVTVRLLDPPLHEFLPKSDKEISEVANVVGTDIKEVQSRIEELHEQNPMLGHRGCRLGISFPEIYEMQCRAIFEALVDLKKNKHKSAFPEIMIPLVSTEAEIKIMKNLVINTAKKVQDENKTKIEFLVGTMIELPRAAIKAKDIAKHAEFFSFGTNDLTQTTFGISRDDSGKFLNDYIDNKIFSIDPFISIDEGVEDLIKIAVEKGKKQNKKIKLGICGEHGGDPKSIHFCSKAGLHYVSCSPY

SEQ ID NO: 137420 - protein, 273 aa, Unknown
  Bacterial polypetide isolated from the Sargasso Sea
GKGLPASPGAASGKVAFSSEEAERLNAMMQNTILVRVETSPEDINGMHAANGILTSRGGMTSHAAVVARGMGRPCVSGCSEIDIDYEKKTFKIKNLEVQEGDVITIDGSSGRIILGDVETIKPEISGEFSKIMKWADSFRKLKIRTNAETIMDTKTAREFGAEGIGLCRTEHMFFDEERIIFVRQMILSKSKNDRNKALSKLLPHQKNDFVEIFKIMNGLPVTVRLLDPPLHEFLPKNENEINEVAKSLKLSFKEVEGRISELHEQNPMLGHR

SEQ ID NO: 137421 - protein, 285 aa, Unknown
  Bacterial polypetide isolated from the Sargasso Sea
KPDAILRIDPISLDQLLHPALDPEAPRLVIAQGLPASPGAAVGRVVFTADQAEDMAAKGESVILVRAETSPEDIHGMHAAKGIVTSRGGMTSHAAVVARGMGRPCITGASALKIDSVNRIISIDGKTITEQDIITVDGSRGEILKGEIGTIPPDLTGDFGTLMNWADSYRQLRIRANAETPKDSLVSLGFGAEGIGLCRTEHMFFESDRIIAMREMILAHTLEERRTAIQKLLPMQREDFLELFRIMEGRPITIRLLDPPLHEFLPRSESEISELAESTGVTQEL

SEQ ID NO: 137422 - protein, 256 aa, Unknown
  Bacterial polypetide isolated from the Sargasso Sea
DFGAEGIGLCRTEHMFFDEERILSVRQMILSKSKKDRAIALSKLLPHQRNDFIEIFKIMSGLPVTVRLLDPPLHEFLPKSEKEILDVSKSLNLSFEEVEGRIDELHEQNPMLGHRGCRLGISFPEIYEMQIRAIFEALVECKKRKIKSTTPEIMIPLVSTEAEIKIMKELVIKVAREVQNENKTKINFLVGTMIELPRAAIKAKDIAKHAEFFSFGTNDLTQTTFGISRDDSGKFLNDYIENKIFDIDPFISIDDE

SEQ ID NO: 137423 - protein, 238 aa, Unknown
  Bacterial polypetide isolated from the Sargasso Sea
ILVRVETSPEDIHGMHAAKGILTARGGMTSHAAVVARGMGRPCVSGSSEIEIDYEKKLFKVQDREIKEGDLITIDGSTGRIILGAVKTVKPEISGEFSKLMNWADSFRKLRIRTNSETPLDSKIARDFGAEGIGLCRTEHMFFEEERILSVREMILSKNKDDRLSALSKLLPHQKKDFIEIFKIMNGLPVTVRLLDPPLHEFLPRTDKEIGEVSSSLNIPINELKGRITELHEQNPML

SEQ ID NO: 137424 - protein, 281 aa, Unknown
  Bacterial polypetide isolated from the Sargasso Sea
LQTRSGKRTSKSAVKIAVDMVKEKLISKKQAIMRIEPSSLDTLLHPTLDEKSKIEVIANGLPASPGAASGRVVFSSDEAERLNDMMQNTILVRIETSPEDIHGMHVAKGILTSRGGMTSHAAVVARGMGRPCVSGSSEIEIDYGKKIFNTKNYEIKEGDVITIDGSTGRIILGEVKTIKPEMSGDFSKVMSWADNYRKLKIRTNSETPADSKIAREFGAEGIGLCRTEHMFFDEERILSVRQMILSKSRENRDNALLKLLPHQRNDFIEIFKIMSGFPSYS

SEQ ID NO: 137425 - protein, 278 aa, Unknown
  Bacterial polypetide isolated from the Sargasso Sea
PNTLDTLLHPTLDEKAEKKIIASGLPASPGAASGKVTFSADEAERMKEQMQETILVRVETSPEDINGMHAAKGILTARGGMTSHAAVVARGMGKPCVSGSSEIKIDYENKLFKSGNNTIKEGETITIDGGSGKVMLGKVPTVKPDISGDFSKMMHWADQFRKLKVRSNSETPADTKIARDFGAEGIGLCRTEHMFFDEKRIISVRQMILSKTLDDRKTALAKLLPYQKNDFVEIFKIMNGFPVTVRLLDPPLHEFLPKTEKDVDDIAKELNISHNDIK

SEQ ID NO: 137426 - protein, 285 aa, Unknown
  Bacterial polypetide isolated from the Sargasso Sea
ILSVREMILSKTKEDRSIALEKLLPYQKKDFIDIFKIMSGLPVTVRLLDPPLHEFLPRTEKEINEVANVVNLPVKEVESRIEELHEQNPMLGHRGCRLGISFPEIYEMQCKAIFEALASIKKSKIKSALPEIMIPLVSTEAEIKIMKDLVIRIAIQVQKEHKLKIEFLVGTMIELPRAAIKAKEIAKHAEFFSFGTNDLTQTTFGISRDDSGKFLNDYLENKIFSVDPFVSIDEGVSDLVEIAVEKGRKENKKLKFGICGEHGGDPKSITFCSKAGLDYVSCSPY

SEQ ID NO: 137427 - protein, 272 aa, Unknown
  Bacterial polypetide isolated from the Sargasso Sea
TPLDSKTAREFGAEGIGLCRTEHMFFEEERILSVREMILSKTIEDRSNALKKLLPHQKKDFIEIFKIMKGLPVTVRLLDPPLHEFLPKSNNEINDVAVSLNIPIKELEVRISELHEQNPMLGHRGCRLAISFPEIYEMQCTAIFEALVECKKQKIQSTMPEIMIPLVSTEAEIKIMKDLVIRVAKKVQDENKIKIDFLVGTMIELPRAAIKAKDIAKHAEFFSFGTNDLTQTTFGISRDDSGKFLNDYIENKIFDIDPFVSIDDGVGDLIKI

SEQ ID NO: 137428 - protein, 317 aa, Unknown
  Bacterial polypetide isolated from the Sargasso Sea
GEDVVAGTRTPQYITKKAKIESGSKELSMEEVMPKVYQQLAKVFIKLEKHYRDMQDIEFTVENKKLWMLQTRSGKRTAKAAIKIAVDMVKEKLISKKEAILRIDPNTLDTLLHPTLDEKVKKEIIATGLPASPGAASGKVVFTADEAERLNAMMQDTILVRLETSPEDIHGMHAAKGILTARGGMTSHAAVVARGMGRPCVSGSSEITIDYETKQFKAGNEIVKEGDIITIDGGTGKVMKGLVPTVQPEISGYFSTIMKWADEFRKLRVRTNAETEADSKTAIKFGAEGIGLCRTEHMFFDEERILSVRQMILSRSI

SEQ ID NO: 137429 - protein, 306 aa, Unknown
  Bacterial polypetide isolated from the Sargasso Sea
KVNQWEEAMPKVYVQLKKILKLLEKFYKDMQDVEFTVENSKLWMLQTRSGKRTAKSAVKIAVDMVKEKLITKKEAVLRVDPNTLDTLLHPTLDETKEVKTIAKGLPASPGATSGKVVFSSDEAERLNGMMQDTILVRVETSPEDIHGMHAAKGILTARGGMTSHAAVVARGMGRPCVSGSSEIDINYEQKIFRTSSNVEVKEGDVITIDGSTGRVILDKVPTLKPEISGDFSKLMSWADSYRKLKVRTNSETPLDTKTAREFGAEGIGLCRTEHMFFDEDRILSVREMILSKTIEDRNKALAKLLP

SEQ ID NO: 137430 - protein, 298 aa, Unknown
  Bacterial polypetide isolated from the Sargasso Sea
NKLFKTNNRVIKEGELITIDGSTGRIIIGEVKTVKPEISGDFSKIMSWSDDFRKLKIRTNSETPLDSKTAREFGAEGIGLCRTEHMFFDEERILSVRKMILSKTREDRSNALKKLLPHQKNDFIEIFKIMKGLPVTVRLLDPPLHEFLPKSNNEINDVAVSLNIPVNELKVRISELHEQNPMLGHRGCRLAISFPEIYEMQCTAIFEALVECKKQKIESTMPEIMIPLVSTEAEIKIMKDLVIRIAKKVQDENKIKIDFLVGTMIELPRAAIKAKDIAKHAEFFSFGTNDLTQTTFGI

SEQ ID NO: 137431 - protein, 280 aa, Unknown
  Bacterial polypetide isolated from the Sargasso Sea
VESKETLKSMEEAMPATYKKLKNILTKLEKHYKDMQDVEFTVENKKLWMLQTRSGKRTAKSAVKIAVDMVKEKLITKKDAILRIEPSSLDSLLHPTLDEKANLEVIGSGLPASPGAASGKVVFTSEEAERLSSMMQSTILVRVETSPEDIHGMHAAKGILTSRGGMTSHAAVVARGMGRPCVSGSSEIEIDYENKLFKTKNKVIKEGEIITIDGSTGRIIIGEVKTVKPEISGDFSKIMNWSDDFRKLKIRTNSETPMDSKTAREFGAEGIGLCRTEHMF

SEQ ID NO: 137432 - protein, 264 aa, Unknown
  Bacterial polypetide isolated from the Sargasso Sea
LLHPTLDEKSSINVIANGLPASPGAASGKVVFSSEDAERLTAMMQDTILVRVETSPEDIQGMHAAKGILTARGGMTSHAAVVARGMGRPCVSGSSEIDINYENKSFKTSSMEIKEGDVITIDGSTGRIIAGSVSTVKPEISGDFSKLMSWADSFRKLKVRTNSETPKDTKIAKDFGAEGIGLCRTEHMFFDEERILSVREMILSKTKEDRATALKKLLPHQRKDFIDIFKIMSGLPVTVRLLDPPLHEFLPRTEKEINEVASIV

SEQ ID NO: 137433 - protein, 292 aa, Unknown
  Bacterial polypetide isolated from the Sargasso Sea
SSLDTLLHPTLDEKSNLEVIALGLPASPGAASGKVVFTSEEAERLNSMMQSTILVRVETSPEDIHGMHAAKGILTSRGGMTSHAAVVARGMGRPCVSGSSEIEIDYENKLFKTKNKVIKEGELITIDGSTGRVIIGEVKTVKPEISGYFSKIMSWSDDFRKLKIRSNSETPLDSKTAREFGAEGIGLCRTEHMFFDEERILSVREMILSKTIEDRSNALKKLLPHQKKDFIEIFKIMRGLPVTVRLLDPPLHEFLPKSNNEINDVAVSLNIPVKELEVRISELHEQNPMLGH

SEQ ID NO: 137434 - protein, 268 aa, Unknown
  Bacterial polypetide isolated from the Sargasso Sea
SVKIAVDMEREKLITKKEAVLRVQPNSLDTLLHPTLDETANLEVIAKGLPASPGAASGKVVFTSDEAERLNGMMQNTILVRVETSPEDINGMHAAKGILTARGGMTSHAAVVARGMGRPCVSGSSEIEIDYQNKIFKTKNYEIKEGDLITIDGSTGRIIKGEVKTVKPEISGDFSKLMSWADKFRKLKIRTNSETPLDSKTAREFGAEGIGLCRTEHMFFDEERILSVREMILSKSKEDRASALKKLLPFQKKDFIDIFKIMNGLPVT

SEQ ID NO: 137435 - protein, 274 aa, Unknown
  Bacterial polypetide isolated from the Sargasso Sea
KDFIEIFKIMNGLPVTVRLLDPPLHEFLPKSFSEIEDVAKSLNLSTKEVEVRIGELHEQNPMLGHRGCRLGISYPEIYAMQTRAIFEALVECKKRKIKSTMPEIMIPLVSTEAEIRIMKDLVIKVAREVQKENKIKIKFLVGTMIELPRAAIKAQDIAKHAEFFSFGTNDLTQTTFGISRDDSGKFLNDYIENKIFDIDPFISIDEGVGDLIKIAAAKGKKQNIKIKLGICGEHGGDPKSIEFCSKAGLDYISCSPYRVPVARLAAAQAQLKKH

SEQ ID NO: 137436 - protein, 285 aa, Unknown
  Bacterial polypetide isolated from the Sargasso Sea
GIGLCRTEHMFFDEERILSVREMILSKTLDDRSKALQKILPHQKKDFMDIFKIMHGLPVTIRLLDPPLHEFLPKSDKEISEVASVIGSDKKEIEKRIEELHEQNPMLGHRGCRLGISFPEIYEMQCRAIFEALADLKKSKQKFAFPEIMIPLVSTEAEIKIMKNLVINTARKVQKENKTKIEFLVGTMIELPRAAIKADDIAKHAEFFSFGTNDLTQTTFGISRDDSGKFLNDYIDNKIFTIDPFVSIDDGVKDLVQIAVYKGKKQNKKIKLGICGEHGGDPKSI

SEQ ID NO: 137437 - protein, 286 aa, Unknown
  Bacterial polypetide isolated from the Sargasso Sea
LCRTEHMFFDEERILSVREMILSKTKDDRSIALKKLLPHQKRDFKEIFKIMSGLPVTVRLLDPPLHEFLPRTDKEINEVANVVNLPVKEVESRIDELHEQNPMLGHRGCRLGISFPEIYEMQCRAIFEALAELKKEKIKSAFPEIMIPLVSTEAEIKIMKDLVIRIASEVQKEHKLKIEFMVGTMIELPRAAIKAKDIAKHAEFFSFGTNDLTQTTFGISRDDSGKFLNDYLDNNIFSIDPFISIDDGVGDLIKIAVKKGKSQNKNLKLGICGEHGGDPKSISFCS

SEQ ID NO: 137438 - protein, 256 aa, Unknown
  Bacterial polypetide isolated from the Sargasso Sea
KTAKDFGAEGIGLCRTEHMFFDEERILSVREMILSKTKEDRAKALNKLLPHQKKDFTEIFKIMNGLPVTVRLLDPPLHEFLPRTNKEIGELAEIVNLTVKEVETRIEELHEQNPMLGHRGCRLAISFPEIYEMQCRAIFEALCELKKNKIKSAFPEIMIPLVSTEAEIKIMKDLVINIAGEVQKQNKIKIEFMVGTMIELPRAAIKAKEIAKHAEFFSFGTNDLTQTTFWISRDDCGNFLTTIWIIKYSHLIHLYL

SEQ ID NO: 137439 - protein, 289 aa, Unknown
  Bacterial polypetide isolated from the Sargasso Sea
SGSSEIDVNYEKKIFKTSEFEIKEGDIITIDGSTGRIILGEVETVKPEISGDFSKLMKWADDFRKLKIRTNSETPTDTKTARDFGAEGIGLCRTEHMFFDEDRILSVREMILSKTIEDRAKALEKLLPHQKNDFIEIFKIMNGLPVTVRLLDPPLHEFLPKNEKEIKDVSKALELSTNEIVSRIAELHEHNPMLGHRGCRLGISFPEIYEMQCKAIFEALVECKKKKYKSIIPEIMIPLVSTEAEIEIMKNLVIRVANKIQKENKIKINYLVGTMIELPRAALKAKDIS

SEQ ID NO: 137440 - protein, 312 aa, Unknown
  Bacterial polypetide isolated from the Sargasso Sea
MKGLVPTVQPEISGYFSKIMQWADEFRKLKIRTNAETEKDSKTARDFGAEGIGLCRTEHMFFDEDRILSVRQMILSKSNDDRNHALSKLLPYQKDDFKKIFKVMSGLPVTVRLLDPPLHEFLPKSEKDVDEVARSLNLASKEVKERISELHEENPMLGHRGCRLGISFPEIYEMQCKAIFEAISELKKEKIKSAIVEIMIPLVSTELEIKIMRDLVNKVAREIQDKNKLKLDYIVGTMIELPRAALQAKNISKHADFFSFGTNDLTQTTFGISRDDSGKFLNDYINNKIFDVDPFVSIDQNGVGELVEIASE

SEQ ID NO: 137441 - protein, 277 aa, Unknown
  Bacterial polypetide isolated from the Sargasso Sea
ASGKVVFSSDESQRLNDMMQNTILVRVETSPEDIHGMHAAKGILTARGGMTSHAAVVARGMGRPCVSGSSEIEIDYENNLFKANGYEIKAGEIITVDGSTGRIILGEVKTVKPQISNDFSQLMSWADSFKKLKVRTNSETPLDSKIARDFGAEGIGLCRTEHMFFDEERILSVREMILSKSQEDRASALNKLLPYQKKDFIEIFKIMNGLPVTVRLLDPPLHEFLPKNTKEISDVSKSLNLSIKEVEGRIDELHEQNPMLGHRGCRLGISFPEIYQM

SEQ ID NO: 137442 - protein, 318 aa, Unknown
  Bacterial polypetide isolated from the Sargasso Sea
KEARSKDKSMEESMPKVFKQLDKILKTLENYYKDMQDVEFTVENQKLWILQTRSGKRTAKSSVKIAVDMVKEKLISKKQAVLRIDSNGLDTLLHPTLDEKSNINVIAKGLPASPGAASGKVVFSSDEAERLNGMMQNTILVRVETSPEDIHGMHAAKGILTSRGGMTSHAAVVARGMGRPCVSGSSEIEIDYQNKIFKTKEHKIEEGDIVTIDGSTGRIILGEVKTIKPEISGDFSKVMNWADSFRKLKIRTNSETPIDSKTAREFGAEGIGLCRTEHMFFDEERILSVRQMILSKSKDDRNAALSKLLPHQKNDFIE

SEQ ID NO: 137443 - protein, 247 aa, Unknown
  Bacterial polypetide isolated from the Sargasso Sea
ILVRIETSPEDINGMHAAKGILTARGGMTSHAAVVARGMGKPCVSGSSEIKIDYEKKEFKSGEHTIKEGQVITIDGGSGKVMLGKVPTVKPDISGDFSKVMIWADKIRKLKVRTNSETPADTKIARDFGAEGIGLCRTEHMFFDEKRIISVRQMILSKTLNDRKSALEKLLPYQKNDFFEIFKIMNGLPVTVRLLDPPLHEFLPKTDKDISDIARELNISNDDIKSRIAELHEQNPMLGHRGCRLGI

SEQ ID NO: 137444 - protein, 270 aa, Unknown
  Bacterial polypetide isolated from the Sargasso Sea
KMNNQKEDTILVRVETSPEDIHGMHAAKGILTARGGMTSHAAVVARGMGRPCVSGSGEINIDYETKEFKVGDLSIKEGEVITIDGGTGRVMKGLVPTVKPDISGYFSTIMKWADEFRKLKIRTNAETPQDTKMARNFGAEGIGLCRTEHMFFDDERILSVRQMILSKSLDDRKIALEKLLPHQKNDFKEIFKIMKGLPVTVRLLDPPLHEFLPKTDKDMEEVARSLNLGVKEIKNRVAELHELNPMLGHRGCRLGISFPEIYEMQCRAIF

SEQ ID NO: 137445 - protein, 321 aa, Unknown
  Bacterial polypetide isolated from the Sargasso Sea
ARGGMTSHAAVVARGMGRPCVSGSGEINIDYELKEFKVGEVVIKEGDIITIDGGTGRVMKGLVPTVKPDISGYFSTIMKWSDEFRKIKIRTNAETPQDTKMARNFGAEGIGLCRTEHMFFDDERILSVRQMILSKHLDGRKAALDKLLPHQKNDFKEIFKIMKGLPVTVRLLDPPLHEFLPKSEKDMEEVARSLNSGVKEIKNRVTELHELNPMLGHRGCRLGISFPEIYEMQCRAIFTALIECKKEKIESIIPEIMIPLVSTEDELGLMRKLVNRVADELQKEHKVKINYFVGTMIELPRAALRAAPISKYADFFSFGTN

SEQ ID NO: 137446 - protein, 290 aa, Unknown
  Bacterial polypetide isolated from the Sargasso Sea
SKEFKTGDLTIKEGDIITIDGGSGKVMEGLVPTVKPDISGYFSTVMKWADEFRKLKIRTNAETPQDTKMARNFGAEGIGLCRTEHMFFDEERILSVRQMILSRHLDDRKIALDKLLPHQKNDFKEIFKIMKGLPVTVRLLDPPLHEFLPKTDKDMEEVARSLNSGIKEIKNRVAELHELNPMLGHRGCRLGISFPEIYEMQCRAIFTALIECKKDKVQSIIPEIMIPLVSTEDELGIMRKLVNRIADELQKEHKVKINYFVGTMIELPRAALRAAPISKYADFFSFGTMI

SEQ ID NO: 137447 - protein, 303 aa, Unknown
  Bacterial polypetide isolated from the Sargasso Sea
CKGILTARGGMTSHAAVVARGMGRPCVSGSSEIEIDYEKKLFKVQNREIKEGDLITIDGSTGRIILGEVKTVKPEISGEFSKLMNWADNYRKLKIRTNSETPLDSKIARDFGAEGIGLCRTEHMFFDEERILSVREMILSKTKDDRLLALSKLLPHQKKDFIDIFKIMGGLPVTVRLLDPPLHEFLPRTDKEISEVASSLNIPIKELKVRITELHEQNPMLGHRGCRLGISFPEIYEMQCRAIFEALVQCKKQKVKSIIPEIMIPLVSTEAEIKIMKDLVIRIAKEVETEKKMKLNFLVGTMI

SEQ ID NO: 137448 - protein, 281 aa, Unknown
  Bacterial polypetide isolated from the Sargasso Sea
SGKVVFTSEDAERLTSMMQDTILVRVETSPEDIQGMHAAKGILTARGGMTSHAAVVARGMGRPCVSGSSEIDINYENKSFKTSSMEIKEGDIITIDGSTGRIIEGRVATVKPEISGDFSKLMSWADSYRKLNIRTNSETPKDTKTAKDFGAEGIGLCRTEHMFFDEERILSVREMILSKTKEDRSKALDKLLPYQKKDFTEIFKIMNGLPVTVRLLDPPLHEFLPRTIKEISELAEVVNLSAKEVETRIEELHEQNPMLGHRGCRLAISFPEIYEMQCRAI

SEQ ID NO: 137449 - protein, 271 aa, Unknown
  Bacterial polypetide isolated from the Sargasso Sea
ARGMGRPCVSGSSEIDINYDQRIFKTSSIEVKEGDIITIDGSSGRIILGTVPTVKPEISGDFSKLMSWADNIRKLKIRTNSETPQDTKTARDFGAEGIGLCRTEHMFFNEKRILSVREMILSKTQEDRARALEKLLPHQKKDFIEIFKIMHGLPVTVRLLDPPLHEFLPKSQKEINEVAEIIGVDKKDIASRIEELHEQNPMLGHRGCRLGISFPEIYEMQCRAIFEALSDLRRNKQKSALPEIMIPLVSTEAEIKIMKDLVINTARKVQN

SEQ ID NO: 137450 - protein, 238 aa, Unknown
  Bacterial polypetide isolated from the Sargasso Sea
LTNVEKLKVRTNSETPVDTKIARDFGAEGIGLCRTEHMFFDEKRIISVREMILSNTIEDRKKALEKLLPYQKGDFFEIFKIMNGLPVTVRLLDPPLHEFLPKTDKDVDDIAKELNISHQDIKSRIIELHEQNPMLGHRGCRLGISFPEIYEMQCQAIFEALAECKKKRIKLVIPEIMIPLVSTAAEIQILRNLVDNTAKKIQKAHSIKIKYYVGTMIELPRAALRAKDIAKHADFFSF

SEQ ID NO: 137451 - protein, 292 aa, Unknown
  Bacterial polypetide isolated from the Sargasso Sea
INSKKDAVLRIEPNSLETLLHPTLDEKSNIEVIAKGLPASPGAASGKVVFSSDEAQRLDDMMQNTILVRVETSPEDIHGMHAAKGILTARGGMTSHAAVVARGMGRPCVSGSSEIEIDYENNLFKSNGYEIKEGDLITIDGSTGRIILGEVKTVKPEISGDFSKLMSWADGFRKLKIRTNSETPLDSKIARDFGAEGIGLCRTEHMFFDEDRILSVREMILSKSKEDRAKALEKLLPHQKNDFIEIFKIMNGLPVTVRLLDPPLHEFLPKSASEINDISKSLNLSIKEMKQE

SEQ ID NO: 137452 - protein, 315 aa, Unknown
  Bacterial polypetide isolated from the Sargasso Sea
RNPSDGLNEIYGEYLINAQGEDVVAGTRTPQYITKKARQDAKVKELSMEESMPKVFKELQKILKKLEMHYKDMQDVEFTVESNKLWMLQTRSGKRTAKSAVKIAVDMVKEKLISKKEAVLRVDPNSLDTLLHPTLNEKSSINVIANGLPASPGAASGKVVFTSEEAERLTAMMQDTILVRVETSPEDIQGMHAAKGILTARGGMTSHAAVVARGMGRPCVSGSSEIDINYENKSFKTSTMEINEGDVITIDGSTGRIIAGGVSTVKPEISGDFSKLMSWADNFRKLKVRTNSETPKDTKTAKDFGAEGMDYAELN

SEQ ID NO: 137453 - protein, 292 aa, Unknown
  Bacterial polypetide isolated from the Sargasso Sea
LVRVETSPEDIHGMHAAKGILTSRGGMTSHAAVVARGMGRPCVSGSSEIDINYEKKIFKTKSIEIKEGDLITIDGSTGKIIQGEVPKIKPEISGDFSKLMSWADSFRKLKVRTNSETSLDTKTARDFGAEGIGLCRTEHMFFDEERILSVREMILSKTTEDRNKALEKLLPHQKNDFIEIFKIMSGLPVTVRLLDPPLHEFLPRTEKEIIEVSNKLKLPIKEVQSRISELHEQNPMLGHRGCRLGISFPEIYEMQCRAIFEALTDLKSKKIKSAFPEIMIPLVSTEAEIKIM

SEQ ID NO: 137454 - protein, 293 aa, Unknown
  Bacterial polypetide isolated from the Sargasso Sea
MVEKNNLWMLQTRSGKRTAKAAIKIAVDMVKEKLISKKEALLRIDPNTLDTLLHPTLDEKVKKEIIASGLPASPGAASGKVVFTADEAEKLSEMMQDTILVRLETSPEDIHGMHAAKGILTARGGMTSHAAVVARGMGRPCVSGSSEIIIDYELKQFKAGDTTIKEGEIITIDGGSGKVMKGLVPTVQPEISGYFSTIMKWSDEFRKLKVRTNAETEADSKTAIEFGAEGIGLCRTEHMFFDEERILSVRQMILSKSKDDRNSALDKLLPYQKQRFKKIFRIMKRVASDSKIA

SEQ ID NO: 137455 - protein, 306 aa, Unknown
  Bacterial polypetide isolated from the Sargasso Sea
LDTKTARDFGAEGIGLCRTEHMFFDEDRILSVREMILSKTIDDRNKALAKLLPHQKKDFTEIFEIMSGLPVTVRLLDPPLHEFLPKNDKEISDLSNVTGLHVNEIKSRTEELHEHNPMLGHRGCRLGISFPEIYEMQCRAIFEALIDCKKRKLKSTMPEIMIPLVSTEAEIKIMKDLVIRVAKKVQNEHKTKVNFLVGTMIELPRAAIKAKDIAKHAEFFSFGTNDLTQTTFGISRDDSGKFLNDYIENKIFDIDPFISIDDGVGDLIEIATLKGKKQNKNIKLGICGEHGGDPKSINFCSQDWIK

SEQ ID NO: 137456 - protein, 304 aa, Unknown
  Bacterial polypetide isolated from the Sargasso Sea
ASPGAVSGKVVFSSNEAERLNGMMQNTILVRIETSPEDIHGMHAAKGILTSRGGMTSHAAVVARGMGRPCVSGSSEIDINYEKKIFKASKVEIKEGDIITIDGSTGRIILGEVPTVKPEISGDFSKLMGWADNYRKLKVRTNSETPLDTKTARDFGAEGIGLCRTEHMFFDEDRILSVREMILSKTKEDRSKALTKILPHQKNDFIEIFKIMNGLPVTVRLLDPPLHEFLPKNEKEIKSVSDALDISTNEVESRITELHEHNPMLGHRGCRLGISFPEIYEMQCRAIFEALVECKNKKYKSIIQ

SEQ ID NO: 137457 - protein, 326 aa, Unknown
  Bacterial polypetide isolated from the Sargasso Sea
MKYTGEYLINAQGEDVVAGTRTPQYITKKARQNAKVKELSMEESMPKVFKELQKILKKLEIHYKDMQDVEFTVENSKLWMLQTRSGKRTAKSAVKIAVDMVKEKLISKKKAVLRIDPNSLDTLLHPTLDEKSSINVIANGLPASPGAASGKVVFTSEEAERLTAMMQDTILVRVETSPEDIQGMHAAKGILTARGGMTSHAAVVARGMGRPCVSGSSEIDINYENKSFKTSSMEIKEGDIITIDGSTGRIIAGSVSTVKPEISGDFSKLMSWADSFRKLKVRTNSETLKDTKIAKNFGAEGIGLCRTEHMFFDEERILSVREMILS

SEQ ID NO: 137458 - protein, 298 aa, Unknown
  Bacterial polypetide isolated from the Sargasso Sea
FENMGENCATGVAFTRNPSTGENRFFGEYLINAQGEDVVAGSRTPRYITKKAKEEAGAKDKSMEETMPKVFQELKKVFVKLEKHYRDMQDIEFTVENHKLWMLQTRNGKRTAKAAIKIAVDMVKEKLISKKEAILRIDPDTLDTLLHPTLDEKVEKKVIAKGLPASPGAASGKVVFTADDAEKMNNQKEDTILVRVETSPEDIHGMHAAKGILTARGGMTSHAAVVARGMGRPCVSGSGEINIDYESKEFKTGDLIVKEGDIITIDGGSGKVMKGQVPTVKPDISGYFSTNNEMGRSV

SEQ ID NO: 137459 - protein, 310 aa, Unknown
  Bacterial polypetide isolated from the Sargasso Sea
CVSGSSEITIDYELKQFKAGDVIIKEGDIVTIDGGSGKVMKGLVPTVQPEISGYFSTIMKWADEFRKLKVRTNAETEADSKTAREFGAEGIGLCRTEHMFFDEERILSVRQMILSKSKEDRNSALDKLLPHQKKDFKKIFKIMSGLPVTVRLLDPPLHEFLPKADKDIEEVARSLNLSAKEVKDRISELHEENPMLGHRGCRLGISFPEIYEMQCRAIFEAIVELKKQKVKAAFVEIMIPLVSTESELKILRALVNKIAKEIEKENKLKLEYMVGTMIELPRAALPAKSISKHADFFSFGTNDLTQTTFG

SEQ ID NO: 137460 - protein, 286 aa, Unknown
  Bacterial polypetide isolated from the Sargasso Sea
FDDDRILSVREMILSKTKEDRSKALAKLLPHQKKDFIEIFKIMNGLPVTVRLLDPPLHEFLPKNEKEIKSVSDALELSTIEVESRITELHEHNPMLGHRGCRLGISFPEIYEMQCRAIFEALVECKNKKYKSIIPEIMIPLVSTEAEIEIMKNLVNRVANKVQKENKIKIDYLVGTMIELPRAALKAKDIAKHADFFSFGTNDLTQTTFGISRDDSGKFLNDYIENKIFDVDPFISIDEGVGDLIEIATQKGKKQNKKIKLGICGEHGGDPKSINFCSKTGLDYVS

SEQ ID NO: 137461 - protein, 319 aa, Unknown
  Bacterial polypetide isolated from the Sargasso Sea
DTDLDENDWDGLIEDFKRTVKEKANRDFPQDVNEQLLGAISAVFLSWDSKRAKVYRKLNHIPADWGTAVNVQSMVFGNMGDDCATGVVFTRNPSDGENEIYGEYLINAQGEDVVAGTRTPQYITKKARQNAKVKAPSMEESMPKVYKQLHKILKKLEKHYKDMQDVEFTVENKKLWMLQTRSGKRTAKSAVKIAVEMVKEKLISKKEAVLRIDPHSLDTLLHPTLDEKSTTNVIANGLPASPGAASGKVVFTSEEAERLTSMMQDTILVRVETSPEDIQGMHAAKGILTARGGMTSHAAVVARGMGRPCVSGSSEIDIN

SEQ ID NO: 137462 - protein, 277 aa, Unknown
  Bacterial polypetide isolated from the Sargasso Sea
KVFIQLTKILKILEKHYKDMQDVEFTVENQKLWILQTRSGKRTARSAVKIAIDMEKEKLISKKQAILSIEPNSLDTLLHSTLDENSSIEVIAKGLPASPGAASGKAVFSSDEAERLNGMMQDTILVRIETSPEDIHGMHAAKAILTSRGGMTSHAAVVARGMGRPCVSGSSEIEIDYENKLFKTKNFIVKEGDIITIDGSTGRVILGKVKTVKPEISGDFLKLMNWADQFRKLKIRTNSETPLDTKIARDFGAEGIGLCRTEHMFFDEEKDFISKRN

SEQ ID NO: 137463 - protein, 290 aa, Unknown
  Bacterial polypetide isolated from the Sargasso Sea
SEDDRAKALEKLLPHQRKDFIEIFKIMNGLPVTVRLLDPPLHEFLPKNNKEIDDVARSLNLNIKEIETRINELHEQNPMLGHRGCRLGISFPEIYEMQCRAIFEALAECKNKKYKSILPEIMIPLVSTEAEIKIMKDLVIRVAGKVQREKKVKLNFLVGTMIELPRAALKAKEIAKHAEFFSFGTNDLTQTTFGISRDDSGKFLNDYIENKIFDIDPFISIDDGVGDLIQIASTKGKKQNKKLKLGICGEHGGDPKSINFCSNIGLDYVSCSPYRVPIARLAAAQSQIKK

SEQ ID NO: 137464 - protein, 291 aa, Unknown
  Bacterial polypetide isolated from the Sargasso Sea
MDGLIQNFKDIVKKKTNKNFPQDVNEQLWGAIKAVFLSWNSKRAKTYRKINHIPEHWGTAINVQSMIFGNMGDDCATGVAFTRNPSTGKKEIFGEYLINAQGEDVVAGTRTPENIFSMNKSMPKIFAQLKKIFKQLETKYRDMQDIEFTVENNKLWMLQTRSGKRTAKAAIKIAVDMVKEKLITNKEAILRIDPNTLDTLLHPTLNEKAEKKVIASGLPASPGAASGKVTFSADEAERLKEQMQDTILVRIETSPEDINGMHAAKGILTARGGMTSHAAVVARGMGKPCVS

SEQ ID NO: 137465 - protein, 284 aa, Unknown
  Bacterial polypetide isolated from the Sargasso Sea
VRLETSPEDIHGMHAAKGILTARGGMTSHAAVVARGMGRPCVSGSSEITIDYEAKQFKAGDVIIKEGDIITIDGGSGNVMKGLVPTVQPEISGYFSTIMNWADEFRKLKVRTNAETEADSITAREFGAEGIGLCRTEHMFFDEERILSVRQMILSRSKEDRNSALEKLLPFQKEDFKKIFRIMSKLPVTVRLLDPPLHEFLPKADKDIDEVARSLNLSSKEIKERISELHEENPMLGHRGCRLGISFPEIYEMQCRAIFEAIVEIKKSKAKPAIVEIMIPLVST

SEQ ID NO: 137466 - protein, 278 aa, Unknown
  Bacterial polypetide isolated from the Sargasso Sea
FKAGDILIKEGDIITIDGGSGKVMKGRVPTVQPEISGYFSTIMKWADQYRKLKVRTNAETEKDSKTARDFGAEGIGLCRTEHMFFDEERILSVRQMILSKSIEDRKSALEKILPYQREDFKKIFKVMSGLPVTVRLLDPPLHEFLPKAEKDIDEVARSLNLSSKEIKDRISELHEENPMLGHRGCRLGISFPEIYEMQCKAIFESIIELKKEKIKSAEVEVMIPLVSTDLELKILRDLVTKIASQIEKENQIKLRYTVGTMIELPRAALQARSISKYA

SEQ ID NO: 137467 - protein, 306 aa, Unknown
  Bacterial polypetide isolated from the Sargasso Sea
RTAKSAVKIAVDMVKEKLISKKEAVLRIDPDTLDTLLHPTLDEKSSINVIANGLPASPGAASGKVVFTSEEAERLTGMMQDTILVRVETSPEDIQGMHAAKGILTARGGMTSHAAVVARGMGRPCVSGSSEIDINYENKSFKTASLEIKEGEIITIDGSTGRIISGSVATVKPEISGDFSKLMSWADSFRKLNIRTNSETPKDTKTAKDFGAEGIGLCRTEHMFFDEERILSVREMILSKTKEDRAIALEKLLPHQKKDFVEIFKIMNGLPVTVRLLDPPLHEFLPRTSKEIDEVANVVGLSTKEV

SEQ ID NO: 137468 - protein, 294 aa, Unknown
  Bacterial polypetide isolated from the Sargasso Sea
MFFDEERILSVRQMILSKSKEDRNSALDKLLPYQKEDFKKIFKIMSGLPVTVRLLDPPLHEFLPKADKDIQEVARSLNLPAKEVKDRISELHEENPMLGHRGCRLGISFPEIYEMQCRAIFEAIVELKKQKVKAAFVEIMIPLVSTESELKILRALVNKIASEIEKEKKLKLEYMVGTMIELPRAALQAKSISKHADFFSFGTNDLTQTTFGISRDDSGKFLNDYIDNKIFDVDPFVSIDQNGVGELVEIASSRGRKTNKNIKLGICGEHGGDPKSIEFCSRTGLNYVSCSPFR

SEQ ID NO: 137469 - protein, 288 aa, Unknown
  Bacterial polypetide isolated from the Sargasso Sea
CVSGSSEIDINYENKSFKTSSIEIKEGDIITIDGSTGRIIEGSVATVKPEISGDFSKLMSWADSYRKLKIRTNSETPKDTKTAKDFGAEGIGLCRTEHMFFDEERILSVREMILSKTKEDRAKALDKLLPHQKKDFTEIFRIMNGLPVTVRLLDPPLHEFLPRTNKEIGELAEIVNLTVKEVETRIEELHEQNPMLGHRGCRLAISFPEIYEMQCRAIFEALCELKKNKIKSAFPEIMIPLVSTEAEIKIMKDLVKRIASLVQKENKLKIDFMVGTMIELPRAAIKAK

SEQ ID NO: 137470 - protein, 271 aa, Unknown
  Bacterial polypetide isolated from the Sargasso Sea
IDIFKIMSGLPVTVRLLDPPLHEFLPRTEKEINEVASIVNLPIKEVESRIEELHEQNPMLGHRGCRLGISFPEIYEMQCKAIFEALVYLKKNKIKSAFPEIMIPLVSTEAEIKIMKELVIRTASQVQQENKLKIEFLVGTMIELPRAAIKAKEIAKHAEFFSFGTNDLTQTTFGISRDDSGKFLNDYIENKIFSVDPFVSIDEGVSDLVEIAVEKGRKQNKNLKLGICGEHGGDPHSISFCSNVGLNYVSCSPYRVPVARLAAAQAEIKKN

SEQ ID NO: 137471 - protein, 265 aa, Unknown
  Bacterial polypetide isolated from the Sargasso Sea
KEDRAKALAKLLPHQKKDFIEIFKIMEGLPVTVRLLDPPLHEFLPVSDKEILEVADVVGVDIKEVKSRISELHEQNPMLGHRGCRLGISYPEIYEMQCRAIFEALVELKNKKIKAAFPEIMIPLVSTEAEIKIMKNLVQNTAIKVQKENAIILDYLVGTMIELPRAAIKAKEIAKHAEFFSFGTNDLTQTTFGISRDDSGKFLNDYIDNKIFSIDPFVSIDEGVEDLIKIAVSKGKKQNKNIKLGICGEHGGDPKSINFCSKVGL

SEQ ID NO: 137472 - protein, 257 aa, Unknown
  Bacterial polypetide isolated from the Sargasso Sea
SKTARKFGAEGIGLCRTEHMFFDEERILSVRQMILSRSIEDRNHALSKLLPHQKDDFKKIFKVMSGLPVTVRLLDPPLHEFLPKADKDMEEVARSLNLSSKEIKDRIAELHEENPMLGHRGCRLGISFPEIYEMQCEAIFEALVELNKEKIKAAFVEIMIPLVSTDTELKILRTLVKKIAKKIELKNKTKLDYIVGTMIELPRAALQAKSISKYADFFSFGTNDLTQTTLGISRDDSGKFLNDYIDNKIFEIDPFVS

SEQ ID NO: 137473 - protein, 309 aa, Unknown
  Bacterial polypetide isolated from the Sargasso Sea
LMKWADKLRRLKVRTNAETPNDAKTAIKFGAEGIGLCRTEHMFFDEDRINVMRQMILAEDSNERENALDKLLPMQRKDFEDLFLIMKGLPVTIRLLDPPLHEFLPNNEKDMISLSTTTGISLEKIKEQSLKLHEANPMLGHRGCRLAVSYPEICEMQSKAIFEAAVNIQKRINQKVNVEIMIPLASTSKEIDVCKEIIDKVASTITIKMKEKIDYLVGTMIELPRAALCADQLASSADFFSFGTNDLTQTTFGISRDDIGNFLNKYLEDGIFQNDPFISIDKEAVGSLLKIGIKKGKETNKFLKLGVCG

SEQ ID NO: 137474 - protein, 250 aa, Unknown
  Bacterial polypetide isolated from the Sargasso Sea
LGSVPTVKPEISGDFSKLMSWADNIRKLKVRTNSETPLDTKIARDFGAEGIGLCRTEHMFFDEERILSVREMILSKTQDDRAKALLKLLPHQKKDFMQIFKIMHGLPVTVRLLDPPLHEFLPRSEKEISEVANVVGADLNEVKSRIDELHEQNPMLGHRGCRLGISFPEIYEMQCRAIFEALSELKKNKQKFAFPEIMIPLVSTESEIKIMKDLVIRIAGQVERENKIKVDYLVGTMIELPRAAIKAKDL

SEQ ID NO: 137475 - protein, 285 aa, Unknown
  Bacterial polypetide isolated from the Sargasso Sea
KALLKLLPHQKNDFIEIFKIMSGLPVTVRLLDPPLHEFLPKTEKEVNEVANLFKLSKKDIEARVNELHEQNPMLGHRGCRLGISFPEIYEMQCRAIFEALTDLKKNKIKSAFPEIMIPLVSTELEIKIMKELVIKIAEEVQKNNNIKINYLVGTMIELPRAAIKAKDIAKHADFFSFGTNDLTQTTFGISRDDSGKFLNDYIENKIFEIDPFISIDEGVGDLIKIACEKGKKQKKSIKLGICGEHGGDPKSIYFCSKAGLDYVSCSPYRVPVARLAAAQAFFKKS

SEQ ID NO: 137476 - protein, 297 aa, Unknown
  Bacterial polypetide isolated from the Sargasso Sea
MEETMPGVFQQLCDIREILEKHYRDMQDIEFTVQKNNLYMLQTRSGKRTAGAAIRIAVEMEKEGLIDKVEAVCRVDPAALDQLLHPRLDPNAVREVLAKGLPASPGAASGQVYFSADEVEAAASRGEKTILVRVETSPEDIHGMHAAQGILTARGGMTSHAAVVARGMGRPCVVGAGELVIDYPKKVMLAGNVTIAAGEKITIDGAAGQIIRGEVATIQPELSGDFATLMSWADKIRTLGVHANADTPEDARTAREFGAEGIGLCRTEHMFFEAERIVAMREMILAQDEVGRRAALA

SEQ ID NO: 137477 - protein, 277 aa, Unknown
  Bacterial polypetide isolated from the Sargasso Sea
NVFKQLCKILKNLEKYYKDMQDIEFTVEKNKLWILQTRSGKRTAKSAVKIAVEMVKEKLISKKNAVTRIDPHSLDTLLHPTLDEKSKINIIAKGLPASPGAATGKVVFSSDEAERLNEMMQDTILVRVETSPEDIHGMHAAKGILTSRGGMTSHAAVVARGMGRPCVSGSTEIDINYERKIFKTKSLEIKEGDLITIDGSTGRIIQGEVPKIKPEISGDFSKLMKWADKFRKLKVRTNSETSLDTKTARDFGAEGIGLCRTEHMFFDEERILSVREM

SEQ ID NO: 137478 - protein, 293 aa, Unknown
  Bacterial polypetide isolated from the Sargasso Sea
KKVIAKGLPASPGAASGKVVFTADEAEKMKNQKEDTILVRVETSPEDIHGMHAAKGILTARGGMTSHAAVVARGMGRPCVSGSGEINIDQENKEFKVGDLTIKEGEIITIDGGTGKVMQGLVPTVKPDISGYFSTIMKWSDQFRKLKIRTNSETPQDTKMARNFGAEGIGLCRTEHMFFDDERILSVRQMIVSKDLDDRKVALDKLLPHQKNDFKEIFKIMKGLPVTVRLLDPPLHEFLPKSEKDMEELARSLNSGVKEIKNRVAELHELNPMLGHRGCRLGISFPEIYEMQC

SEQ ID NO: 137479 - protein, 292 aa, Unknown
  Bacterial polypetide isolated from the Sargasso Sea
QEDRAKALKKLLPHQKDDFVQIFKIMQGLPVTVRLLDPPLHEFLPKSDKEIFEVADVVGVDKKELISRIDELHEQNPMLGHRGCRLGISYPEIYEMQCRAIFEALSDLKRKKQKSALPEIMIPLVSTETEIKIMKDLVINTARKVQNENKVKIEFLVGTMIELPRAAIKAKDIAKHAEFFSFGTNDLTQTTFGISRDDSGKFLNDYIDNKIFNIDPFVSIDEGVKDLIEIAVERGKKQNKKIKLGICGEHGGDPESIRFCSNIGLNYVSCSPYRVPIARLAAAQAELKKKLL

SEQ ID NO: 137480 - protein, 257 aa, Unknown
  Bacterial polypetide isolated from the Sargasso Sea
MMQDTILVRVETSPEDIHGMHAAKGILTARGGMTSHAAVVARGMGRPCVSGSSEIDINYEQKIFRTSSNVEVKEGDVITIDGSTGRVILDKVPTIKPEISGDFSKLMSWADSYRKLKVRTNSETPLDTKTAREFGAEGIGLCRTEHMFFDEDRILSVREMILSKTIEDRNNALAKLLPHQKNDFIQIFEIMNGLPVTVRLLDPPLHEFLPKNDKEIGDLSSVTGLNANEIRSRTEELHEHNPMLGHRGCRLGISFPE

SEQ ID NO: 137481 - protein, 256 aa, Unknown
  Bacterial polypetide isolated from the Sargasso Sea
IHGMHAAKGILTARGGMTSHAAVVARGMGRPCVSGSSEITIDYELKQFKAGEIIVKEGDIITIDGGSGKVMKGLVPTVQPEISGYFSTIMKWADEFRKLKVRTNAETEVDSKTAREFGAEGIGLCRTEHMFFNEERILSVRQMILSKSKDDRNSALDKLLPHQKEDFKKIFKVMSGLPVTVRLLDPPLHEFLPKAEKDIEEVARSLNLSAKEVKDRIAELHEENPMLGHRGCRLGISFPEIYEMQCKAIFEAIVEL

SEQ ID NO: 137482 - protein, 290 aa, Unknown
  Bacterial polypetide isolated from the Sargasso Sea
GVVFTRNPSDGKKEIYGEYLINAQGEDVVAGTRTPQHITKKAKKFARQNLPSLEESMPSIFYQLKTILLKLEKYYKDMQDVEFTIENKKLWILQTRSGKRTAKSAVKIAVDMVSEKLITKKEAVLRIEPDTLDTLLHPTLDEKADIEVIGKGLPASPGAASGKVVFDSDEAERLNNMMQNTILVRIETSPEDIHGMHAAKGILTARGGMTSHAAVVARGMGRPCVSGSSEIEIDYKNKLFKTNDKEIKEGDLITIDGSTGRIIVGEVKTVKPEISGNFSKLMNWADSFRK

SEQ ID NO: 137483 - protein, 265 aa, Unknown
  Bacterial polypetide isolated from the Sargasso Sea
DGSTGRIIAGSVSTVKPEISGDFSKLMSWADKFRKLKVRTNSETPKDTKTAKDFGAEGIGLCRTEHMFFDEERILSVREMILSKTKEDRLIALEKLLPHQRKDFIDIFKIMSGLPVTVRLLDPPLHEFLPRTEKEINEIANIVNLPVKEIESRIQELHEQNPMLGHRGCRLGISFPEIYEMQCKAIFEALANLKKSKIKSAFPEIMIPLVSTEAEIKIMKDLVIRTASQVQQKHKLKIEFLVGTMIELPRAAIKAKEIAKHAEFF

SEQ ID NO: 137484 - protein, 299 aa, Unknown
  Bacterial polypetide isolated from the Sargasso Sea
MSWSDKYRKLKIRTNSETPLDTKTARDFGAEGIGLCRTEHMFFDEERILSVRQMILSKSRSDRDKALSKLLPHQKKDFIEIFKIMNGLPVTVRLLDPPLHEFLPKNENEISYVAKSLDLPVKEVEDRIRELHEHNPMLGHRGCRLGISFPEIYEMQCRAIFEALVECKNKKIKSILPEIMIPLVSTEAEIKIMKDLVIKVAKQVQNENKAKIKFLVGTMIELPRAAIKAQDIAKHAEFFSFGTNDLTQTTFGISRDDSGKFLNDYIENKIFDIDPFISIDDGVGDLIDIATAKGRNKNK

SEQ ID NO: 137485 - protein, 288 aa, Unknown
  Bacterial polypetide isolated from the Sargasso Sea
MVFGNMGDDCATGVVFTRNPSDGIKDIYGEYLINAQGEDVVAGTRTPQHITKKARINSKQKQLSMEEAMPSVYKKLNGILLKLEKYYKDMQDVEFTVENKILWMLQTRSGKRTAKSAVKIAVDMVKEKLISKKEAVLRLNPNSLDTLLHPTLDDDEKINVIANGLPASPGAASGKVVFNSDEAERLNGMMQNTILVRVETSPEDIHGMHAAKGILTARGGMTSHAAVVARGMGRPCVSGSSEIEIDYENKIFKTKNNIVKEGDLITIDGSTGRIILGEVKTIKPENIW

SEQ ID NO: 137486 - protein, 317 aa, Unknown
  Bacterial polypetide isolated from the Sargasso Sea
VRTNSETPNDTKTAKDFGAEGIGLCRTEHMFFDEERILSVREMILSKTKEDRAIALEKLLPHQKKDFIEIFKIMSGLPVTVRLLDPPLHEFLPRTNKEINEVASMVKLPVKEVESRIEELHEQNPMLGHRGCRLGISFPEIYEMQCRAIFEALAELKKSKTKSAFPEIMIPLVSTEAEIKLMKELVIRTASEVQNESKVKVKFLVGTMIELPRAAIKAKEIAKHAEFFSFGTNDLTQTTFGISRDDSGKFLNDYLENKIFSTDPFVSIDEGVSDLIEIAVEKGRKQNSKLKLGICGEHGGDPQSIFFCSTAGLNYVS

SEQ ID NO: 137487 - protein, 264 aa, Unknown
  Bacterial polypetide isolated from the Sargasso Sea
TILSWAQNTKQLGIRANADTPDAAKLARQYGAQGIGLCRTERMFNESDRIGLFVEMIMAESQEERNKVLKKLQELQKSDFIGILKAMEGYKVTIRLLDPPLHEFLPNPEELKDKMNKENDKSKKTQRVLDRARELAEINPMMGHRGVRVAITYPEIYKMQITAVFEAAAELAKKKVNAKPQIMIPQVGSLAELNYIKSIYDDVKKEIEQKYKKKFKINFGTMLEVVRACLTSDELADTAEFFSFGTNDLTQAVFSFSREDAEGK

SEQ ID NO: 137488 - protein, 301 aa, Unknown
  Bacterial polypetide isolated from the Sargasso Sea
MNWSDDFRKLKIRTNSETPMDSKTAREFGAEGIGLCRTEHMFFDEERILSVREMILSKTIEDRSNALKKLLPHQKKDFIEIFKIMKGLPVTVRLLDPPLHEFLPKSSIEINDVAVSLNIPVKELEVRISELHEQNPMLGHRGCRLAISFPEIYEMQCTAIFEALVECKKQKIESTMPEIMIPLVSTEAEIKIMKDLVIRVAKKVQDVNKIKIDFLVGTMIELPRAAIKAKDIAKHAEFFSFGTNDLTQTTFGISRDDSGKFLNDYINNKIFDIDPFVSIDDGVGDLIKIATDKGRKQNKKI

SEQ ID NO: 137489 - protein, 253 aa, Unknown
  Bacterial polypetide isolated from the Sargasso Sea
FGEFLINAQGEDVVAGTRTPQYITKKAKKDSGSKDPSMEEAMPKVYKELAKVFLKLERHYKDMQDIEFTVENNKLWMLQTRSGKRTAKAAIKIAVDMVKEKLISKKEAVTRIDPNTLDTLLHPTLDEKAEKEIIASGLPASPGAASGKVVFTADEAEKLNGMMQDTILVRLETSPEDIHGMHAAKGILTARGGMTSHAAVVARGMGRPCVSGSSEITIDYELKQFKAGNITIKEGDIITIDGGSGKVMKGLVP

SEQ ID NO: 137490 - protein, 325 aa, Unknown
  Bacterial polypetide isolated from the Sargasso Sea
LDTLLHPTLDEKSSINVIANGLPASPGAASGKVVFTSEEAERLTAIMQDTILVRVETSPEDIQGMHAAKGILTARGGMTSHAAVVARGMGRPCVSGSSEIDINYENKSFKTSSMEIKAGDIITIDGSTGRIIAGNVSTVKPEISGDFSKLMSWADNFRKLKVRTNSETPKDTKTAKDFGAEGIGLCRTEHMFFDEERILSVREMILSKTKEDRSIALQKLLPHQRKDFIDIFKIMSGLPVTVRLLDPPLHEFLPRTEKEINEIANIVNLSVKEVESRIEELHEQNPMLGHRGCRLGISFPEIYEMQCRAIFESLAHLKKSKIKSA

SEQ ID NO: 137491 - protein, 294 aa, Unknown
  Bacterial polypetide isolated from the Sargasso Sea
DKARKLKIRTNSETPYDSKIAREFGAEGIGLCRTEHMFFDEERILSVRQMILSKSKEDRDKALEKLLPHQKNDFIQIFKIMSGLPVTVRLLDPPLHEFLPKNKSEIDDVAKSLSLSNEEVQTRIDELHEQNPMLGHRGCRLGISFPEIYEMQCKAIFEALIECKNQKIKPIMPEIMIPLVSTEAEIRIMKELVIRIAAEIQNKNRTKIKFLVGTMIELPRAALKAKDIAKHAEFFSFGTNDLTQTTFGISRDDSGKFLNDYIENKIFDIDPFISIDDGVGDLIQFAASNGKKQK

SEQ ID NO: 137492 - protein, 264 aa, Unknown
  Bacterial polypetide isolated from the Sargasso Sea
MSGLPVTIRLLDPPLHEFLPKNEKEISDISKSLNLSIKEIEGRINELHEQNPMLGHRGCRLGISFPEIYKMQIRAIFEALVECKKNKIKSIMPEIMIPLVSTEVEIKIMKDLVIKVAREVQNENKTKIKFLVGTMIELPRAAIKAKDIAKYAEFFSFGTNDLTQTTFGISRDDSSKFLNDYIENKIFDIDPFISIDDGVGDLIEMAVTRGKKQNKKIKLGICGEHGGDPRSIEFCAKVGLDYVSCSPYRVPVARLAAAQAQLKK

SEQ ID NO: 137493 - protein, 292 aa, Unknown
  Bacterial polypetide isolated from the Sargasso Sea
MGDDCATGVVFTRNPSDGENEIYGEYLINAQGEDVVAGTRTPQYITKKARQNAKVKASSMEESMPKVYKQLYKILKKLEKHYKDMQDVEFTVENKKLWMLQTRSGKRTAKSAVKIAVDMVKEKLISKKEAVLRIDPHSLDTLLHPTLDEKSTINVIANGLPASPGAASGKVVFTSEEAERLTSMMQDTILVRVETSPEDIQGMHAAKGILTARGGMTSHAAVVARGMGRPCVSGSSEIDINYENKSFKTSSMEIKEGDIITIDGSTGRIIEGSVATVKPEISGDFSKINVLG

SEQ ID NO: 137494 - protein, 718 aa, Unknown
  Bacterial polypetide isolated from the Sargasso Sea
VLLDTDLETSDWEALIRDFKNVVKQETKKDFPQNVEDQLINAVSSVFLSWESNRAKTYRKINRIPSDWGTAVNVQSMVFGNMGDKCATGVTFTRDPSNGNNEIYGEYLVNAQGEDVVAGTRTPQYITKRSRLKSNNKGMSLEENMPKIFKQLKKILKSLEKYYKDMQDVEFTIENGKLWILQTRSGKRTARSAIKIAVDMVKEKLITKKDALLRIDPGSLDNLLHPSLDEKAEMIIIANGLPASPGASSGKVVFSSDEAERLNSMMQDTILVRVETSPEDINGMHAAKGILTSRGGMTSHAAVVARGMGRPCVSGSSEIEIDYNKKVFKANNRTVKEGEIITIDGSSGRVILGEVKTIKPDISGDFLKVMKWADKYRKLKIRTNSETPSDTKTAREFGAEGIGLCRTEHMFFDEDRILSVRQMILSKSKNDRDLALSKLLPYQKKDFIEIFKIMKGLPVTVRLLDPPLHEFLPKTKEEIVGVANSLNISYKEVDQRIQELHEQNPMLGHRGCRLAISFPEIYEMQCKAIFEALVECKKNNIKSIIPEIMIPLVSTEAEIKIMKNLVIKIAREIEDKTKVKINFLVGTMIELPRAAIKAKEIAKHAEFFSFGTNDLTQTTFGISRDDSGKFLNDYIENKIFEVDPFVSIDDGVGDLIEFAAKKGKKQNKKIKLGICGEHGGDPKSINFCSKTGLDYVSCSPYRVPVAILAAAQAELKNK

SEQ ID NO: 137495 - protein, 405 aa, Unknown
  Bacterial polypetide isolated from the Sargasso Sea
SGSSEIEIDYENKLFKTKNKVIKEGELITIDGSTGRIIIGEVKTVKPEISGDFSKIMSWSDDFRKLKIRTNSETPLDSKTAREFGAEGIGLCRTEHMFFDEERILSVREMILSKTIEDRSNALKKLLPHQKKDFIEIFKIMRGLPVTVRLLDPPLHEFLPKSNNEINDVAVSLNIPVKELEVRISELHEQNPMLGHRGCRLAISFPEIYEMQCTAIFEALVECKKQKIQSTMPEIMIPLVSTEAEIKIMKDLVIRVAKKVQDENKIKIEFLVGTMIELPRAAIKAKDIAKHAEFFSFGTNDLTQTTFGISRDDSGKFLNDYIENKIFDIDPFVSIDDGVGDLIKIATDKGRKQNKKIKLGICGEHGGDPKSIEFCAKTGLDYVSCSPYRVPVARLAAAQAQIKKN

SEQ ID NO: 137496 - protein, 884 aa, Unknown
  Bacterial polypetide isolated from the Sargasso Sea
MKKFIFNFKSREVKKIKFPKNILGGKGTNLSEMGRMGLPVPPGFTISTEVCELFYKNNKKLNSKVLKEINKEIKIIEKDTGKKFGDFNNPLLVSVRSGARVSMPGMMDTILNLGLNDKTVISLAKSTSNLRFARDSYRRFIQMYSNVVLGIENHNFEELIENYKLTKGVLLDTDLDENDWDGLIKDFKKIIKEKTKKEFPQNVNDQLIGAISAVFLSWESHRAKIYRKLNHIPSNWGTAVNVQSMVFGNMGEDCATGVVFTRNPSDGSNNIYGEYLINAQGEDVVAGTRTPQHITKKAKNSAKSNLASMEETMPVVFKQLKNILKKLENHYKDMQDVEFTVEKKKLWMLQTRSGKRTAKSAVKIAVDMVKEKLISKKEAVLRIEPSSLDTLLHPTLDEKENINVIAKGLPASPGAASGKVVFTSEEAERLNGMMQSTILVRVETSPEDIHGMHAAKGILTARGGMTSHAAVVARGMGRPCVSGSSEIEIDYVNKLFKTKTKEIKEGDLITIDGSTGRIIFGEIKTVKPEISGDFSKLMVWADNFRKLKIRTNSETPADSKTAREFGAEGIGLCRTEHMFFDEERILSVREMILSKSKEDRAVALAKLLPHQKKDFIDIFKIMNGLPVTVRLLDPPLHEFLPKSTKEINEVASSLNTPIKELELRISELHEQNPMLGHRGCRLGISFPEIYEMQCRAIFEALIDCKKNKIKSTMPEIMIPLVSTEAEIKIMKDLVIKVAKLVQKENNINIDFLVGTMIELPRAAIKANDLAKHAEFFSFGTNDLTQTTFGISRDDSGKFLNDYIENKIFEIDPFVSIDDGVGDLIKIATKKGKKQNKKIKLGICGEHGGDPKSIHFCVETGLDYVSCSPYRVPIARLAAAQAQIK

SEQ ID NO: 137497 - protein, 409 aa, Unknown
  Bacterial polypetide isolated from the Sargasso Sea
LGYPVPSGFTISTEVCDLFYKNNRKITPNILNQIKAEIKNIEKDSGKKFGDLKNPLLVSVRSGARVSMPGMMDTILNLGLNDKTTLALAQKTSNLRFAKDSYRRFIQMYSNVVLGVENYNFEELIENYKLTKGVLLDNELDENDWDGLIKDFKNVVKEKTKKEFPQDVNEQLIGAISAVFLSWQSNRAKVYRKLNQISSDWGTAVNVQLMVFGNMGQDCATGVVFTRNPATGSNEIYGEYLINAQGEDVVAGTRTPQHITKNARIEAKVKEESMEESMPKVFKQLIKILKNLEKYYTDMQDVEFTVENNKLWILQTRSGKRTAKSAVKIAVDMVKEKLISKKNAIMRIDPHSLDKLLHPTLDEKSKINVIAKGLPASPGAASGKVVFSSDEAERLNDMMQDTILVRVET

SEQ ID NO: 137498 - protein, 429 aa, Unknown
  Bacterial polypetide isolated from the Sargasso Sea
RILTSRGGMTSHAAVVARGMGRPCVSGSSEINIDYEKKLFKTNQIQIAEGEIITIDGSTGRIILGEVKTVKPEISGDFSKLMKWADNFRKLKIRTNSETPIDTKTARDFGAEGIGLCRTEHMFFDEDRIMSVREMILSKTTNDRSKALAKLLPHQKKDFIELFKIMNGLPVTVRLLDPPLHEFLPKNEKEIKDVSDALGLRISEIESRIGELHEHNPMLGHRGCRLAISFPEIYEMQCRAIFEALIECKNKKIKSIIPEIMIPLVSTEAEIEIMKNLVDRVAQQVNKENKTKIDYLVGTMIELPRAAIKAKDIAKHADFFSFGTNDLTQTTFGISRDDSGKFLNDYIENKIFNIDPFVSIDEGVGDLIEIATIRGRKQNKKLKLGICGEHGGDPKSINFCSSAGLNYVSCSPYRVPIARLAAAQAQIKK

SEQ ID NO: 137499 - protein, 300 aa, Unknown
  Bacterial polypetide isolated from the Sargasso Sea
MENLLLKRGDIITIDGGTGRVMKGLVPTVKPDISGYFSTIMKWADEFRKLKVRTNAETPQDTKMARNFGAEGIGLCRTEHMFFDDERILSVRQMILSKHLDDRKTALDKLLPHQKKDFKEIFKIMKGLPVTVRLLDPPLHEFLPKTEKDMEEVARSLNLGVKEIKNRVTELHELNPMLGHRGCRLGISFPEIYEMQCKAIFTALIECKKEKIQSIIPEIMIPLVSTEDELGLMRKLVNKVADELQRQHKTKINYYVGTMIELPRAALRAAPISKYADFFSFGTNDLTQTTFGISRDDSGK

SEQ ID NO: 137500 - protein, 269 aa, Unknown
  Bacterial polypetide isolated from the Sargasso Sea
IFKIMSGLPVTVRLLDPPLHEFLPRTDKEINEVANIVNLSVKEVESRIDELHEQNPMLGHRGCRLGISFPEIYEMQCRAIFEALAELKKEKIKSAFPEIMIPLVSTEAEIKIMKDLVIRIASEVQKEHKLKIEFMVGTMIELPRAAIKAKDIAKHAEFFSFGTNDLTQTTFGISRDDSGKFLNDYLDNKIFSIDPFISIDDGVRDLIKIAVEKGKSQNKNIKLGICGEHGGDPNSILFCSKAGLNYVSCSPYRVPVARLAAAQAELKNK

SEQ ID NO: 137501 - protein, 882 aa, Unknown
  Bacterial polypetide isolated from the Sargasso Sea
MNKWVYNFGAGNAEGDASHKNLLGGKGANLAEMNNIGIPVPPGLTITTEVCNYYYDNSQEYPKELDDQLNVALKNIEKITGMLFGDPKRPLLLSVRSGARASMPGMMDTVLNLGLNDDTVEGLATESGDERFAYDSYRRFIQMYGDVVLEIDSLEFEEIIENQKEIDHITLDTEVTAQSWKVICKNFKDLVKEKTGNVFPQEPVKQLWGAISAVFNSWMNQRAITYRKLNDIPQSWGTAVNVQAMVFGNMGEDCCTGVAFTRNPSTGENSYYGEYLINAQGEDVVAGIRTPQNLTIKEKEEQNSDALSMEESIPQIYQELVSIFEKLEAHYLDMQDIEFTVQKNKLWILQTRSGKRTTTAAVKIAVEMQKKGLISKEIAVSRIDALGLDQLLHPTLDPKAEKLIIARGLPASPGAASGKVVFNSEEAVEMSKNGEEVILVRMETSPEDIHGMHAAKGILTSRGGMTSHAAVVARGMGRACVAGAGDILIDHENNMFSVGDVTVHSGEVITIDGSLGEVIKGDVPTIMPELSKDFSELMEWADQIRSLKIRSNAETPIDVKTALEFGAEGIGLCRTEHMFFDNERILAVREMIFSDSEKDRRKALEKIFPMQKNDFVEIFKLMKELPVTIRLLDPPLHEFLPKEEEELKELANMLNKDMSYVRSRSLQLEEQNPMLGHRGCRLGVTFPEIYEMQVKSIFESSIEVSKSINIEIKPEIMIPLIISEKEFIYFKKLVENTAMNIKEKYGDTPKYLLGTMVELPRAALNAESIASHADFFSFGTNDLTQTTLGISRDDCAKFLPDYIENNIFDNDPFISIDESGVGKLVSNAVKDGLKTNKEIKLGICGEHGGDPKSIDFFHNIGLDYVSCSPYRVPIARLAAAQA

SEQ ID NO: 137502 - protein, 458 aa, Unknown
  Bacterial polypetide isolated from the Sargasso Sea
MNKLILNFKSKDTQKIKDPKNFLGGKGANLSEMGRMGLPVPPGFTISTKVCEVFYKDKKKLNSKLISQIKKELKVIEKDVSKKFGDLKNPLLLSVRSGARVSMPGMMDTILNLGLNDKTVIALTNKTSNGRFAKDSYRRFIQMYGNVVMGVEGYHFEELIENYKLTKGVLLDTDLDEDDWDGLIKDFKNVVKEKTNKEFPQDVNQQLLGAISAVFLSWESKRAKVYRKLNQIPSEWGTAVNVQSMVFGNMGNDCATGVVFTRNPSDGSNDIYGEYLINAQGEDVVAGTRTPQYITKKAKKEAKVKEASMEESMPKVYSELFKILKKLEKHYKDMQDVEFTVESNKLWILQTRSGKRTSKSAVKIAVDMVKEKLISKNQAILRIDPNSLDTLLHPTLDEKSSIQVIANGLPASPGAASGKVVFSSEEAQRLNDMMQDTILVRVETSPEDIQGMHAAKGI

SEQ ID NO: 137503 - protein, 539 aa, Unknown
  Bacterial polypetide isolated from the Sargasso Sea
MKKLVFNFNSKEVKKIRQKNNILGGKGANLVEMGNLGFPVPSGFTISTEACELFYKNNKKIVSPLLNQIKKEIKIIENQSGKKFGHLDNPLLVSVRSGARVSMPGMMDTILNLGLNDKTTEALAKKTKNTRFAKDSYRRFIQMYGNVVMGVENYNFEELIENYKLTKGVLLDTDLNADDWDGLIKDFKNIIKEKSNKFFPQNVNDQLKGAISAVFLSWQSKRAKTYRKINNIPSEWGTAVNIQCMVFGNMGNDCATGVVFTRNPSNGTDEVYGEYLINAQGEDVVAGTRTPQYITKKARKNSSSKTKSMEESMPKIFKKLNKILKTLEKHYRDMQDVEFTVENQKLWILQTRSGKRTVKSAVKIAVDMVREKLISKKEAVLRINPNTLDSLLHPTLDEKSKIQVIAKGLPASPGAASGKVVFTSDEAERLNDMMQNTILVRVETSPEDIHGMHAAKGILTSRGGMTSHAAVVARGMGRPCVSGSSEIEIDYENNLFKANGREIKEGQIITIDGSTGRIILGEVKTVKPEMSGDFSKLMS

SEQ ID NO: 137504 - protein, 586 aa, Unknown
  Bacterial polypetide isolated from the Sargasso Sea
MQTRKKVPCEENMPQIFKELKKILKILEKHYKDMQDVEFTVENQKLWILQTRSGKRTAKSSVKIAVDMVKEKIISKKQAILRIDPNTLETLLHPSLDEKSELNVIAKGLPASPGAASGKVVFSSEEAERLSGVMQNTILVRIETSPDDIHGMHAAKGILTARGGMTSHAAVVARGMGRPCVSGSSEIDIDYENKLFKTKNYEIKEGDVITIDGSTGRIILGKVKTIKPEISSDFSKVLNWADSLRKLKIRTNSETPLDSKIAREFGAEGIGLCRTEHMFFEEERILSVRQMILSKSKQDRDKALAKLLPHQRSDFVEIFKIMNGLPVTVRLLDPPLHEFLPKNDIEINDVAKSLNLSTEEVRVRTGELHEHNPMLGHRGCRLGISFPEIYEMQCKAIFEALVECKSKKLKSIMPEIMIPLVSTEAEIKIMKDLVIRVARQVQDENKVKINFLVGTMIELPRAALKAKDIAKHAEFFSFGTNDLTQTTFGISRDDSGKFLSDYLENKIFDIDPFISIDEGVGDLIEIATLRGKKQNKKIKLGICGEHGGDPKSIHFCSKTGLDYVSCSPYRVPVARLSAAQAEIKKN

SEQ ID NO: 137505 - protein, 889 aa, Unknown
  Bacterial polypetide isolated from the Sargasso Sea
MKYVYFFGDGKADGKADDKNMLGGKGANLAEMTSLKIPVPPGFTLTTNLCMDYLNDGVYPDELENEVQNAIEKVESIMDQKFGDPENPLLVSIRSGARQSMPGMMETVLNVGLTDKTIPGLIKKTDNPRFVYDAYRRLITMYSDVVMEKSEGVDPEPGQGIREQLEEIMDHMKRERGVIDDTELSADDLKELCSQFKKKVNETLGSEFPDDPSLQLWGGISAVFKSWSGKRAVNYRRIENIPNEWGTAVNVQTMVFGNMGENSATGVAFTRNPATGENVFYGEWLINAQGEDVVAGIRTPYPLNSSTKTAETNELPGLDQSMPEVYNQLDSIRLKLENHYRDMQDIEFTIQNGKLWMLQTRVGKRNGGAAIRIACEMQSENLISSDEAILRVSPDQLDEIMHSMVDPSSEKEAELLAKGLPAGPGGGVGQVVFSADTAEEWAKKGLDVILVRNETSPEDVHGMHAAKAILTAKGGMTSHAALVARGWGKCCIVGCSILQINYTDNQMLINDEIIKEGDWLTLNGSTGKVYKGQLSLIEPDLSSNKYYGILMEMTNSVKRLGIRANAESPNDAKQAREFGAKGIGLCRTEHMFFDPERILAVREMIIATEVSKRREAIMKLLPFQREDFKGILEAMSPYPVTIRLLDPPLHEFMTLNDEQKNELAKELSISLDALENRIRGLEELNPMLGHRGCRLGIAYPEITEMQSRAIFEATAELIKENVEVAPEVMIPLVGTYKEYEHQEALVRKIAEEVRSESGENFSYLVGTMIELPRAALTANEIADKAEFFSFGTNDLTQTTYGFSRDDIGGFLPEYLERGILEHDPFQSLDQTGVGQLVQMGVEKGREVRSDLKIGICGEHGGDPESISFCNRIGLDYVSCSPFRVPIARL

SEQ ID NO: 137506 - protein, 549 aa, Unknown
  Bacterial polypetide isolated from the Sargasso Sea
ETMPKVFKQLKKILSTLEKHYKDMQDVEFTVECKKLWMLQTRSGKRTAKSSVKIAVDMVKEKLISKKDAILRIDPNSLDTLLHPTLDEKSDINVIAKGLPASPGAVSGKVVFSSEDAERLNGMMQNSILVRVETSPEDIHGMHAAKGILTSRGGMTSHAAVVARGMGRPCVSGSSEISIDYENKLFKAGKIEVTEGEVITIDGSTGRIILGEVQTVKPEISGDFSKLMGWADNFRKLKVRANSETPIDTKTARDFGAEGIGLCRTEHMFFDEDRIMSVREMILSKNTSDRNKALAKLLPHQKKDFIELFKIMNGLPVTVRLLDPPLHEFLPKNEKEIKDVSDALELTLTEIESRIVELHEHNPMLGHRGCRLAISFPEIYEMQCRAIFEALIVCKNKKIKSIIPEIMIPLVSTEAEIEIMKNLVDRVADQVKKEHKTKIDYLVGTMIELPRAAIKARDIAKHADFFSFGTNDLTQTTFGISRDDSGKFLNDYIENKIFDIDPFISIDEGVGDLIEIATIKGRKQNKKLKLGICGEHGGDPKSIDFCSTM

SEQ ID NO: 137507 - protein, 881 aa, Unknown
  Bacterial polypetide isolated from the Sargasso Sea
MNKKLIYQFSSTKTEGDKSMLDLLGGKGANLAEMSTLGINVPPGFTVTTEVCNYFIENKSFPDKFDSELEKALANLEKITKKKFNDDKTPLLLSVRSGGKVSMPGMMDSILNIGINDKNVDALASNFNDERFALDSYRRLIQMYANVVLEIDMDRFEAIIDNKKRIDGVEKDNDFDSEQLSWIIDAFKTTVERFAGNPFPQDPVIQLKGAIEAVFKSWLNKRAVAYRKINNIPNNWGTGTTIQSMVFGNLNESSGTGVAFTRFPSTGKNKLYGEYLMNAQGEDVVAGTRTPYPIGKHEKNTQPSLEEENPALFNEIKSIGDKLETHYKDAQDIEFTIEDGELFILQTRNAKRTAQASVKIAVDMHNEKILSKQEAINMIDADQITSVLHPQFVDSASKKLFEKGLNASPGAAVGEIVFDPEKAEIEAARGKKVILVRDETSPEDISGMFASVGILTTKGGMTSHAAVVARGMGKPCIVGAENLKIDKDERKISNDQITIEEGDLISLDGSTGEIFLGEVELESPKLTDEFNILMAWCDDFKKLSIRANAETINDTTKSLEFGADGIGLCRTEHMFFEGERILPMREMIMANNKQGRKRALNKIIDFQINDFVEIFKLLKDKPITVRLLDPPMHEFLPKSDIEISELANSLRVSPAYVSEVLSRISESNPMLGHRGVRLGLSYPEIYKMQVEAIFKASYEIHQKEKIRIKPEIMIPLIMNASEFTKMKKIITKKIESLKKETDFNFEYFIGTMIELPSAALNSSEIGEHADFFSYGTNDLTQTTLGLSRDDASKFLNEYVEKNIFDVDPFITIDENTVGNLVASSVVAGKKVNKDIKIGVCGEHAGDPKSIKFLNTLDIDYISCSPFRIPTARLAAAQAEIS

SEQ ID NO: 137508 - protein, 787 aa, Unknown
  Bacterial polypetide isolated from the Sargasso Sea
MKKNVFYFGNKKSDGSGKMKDVLGGKGAGLAEMTEIGINVPPGFTISTNVCGIFYKNKKRTPLDISKEIKTNLLKLEKMTKKGLGDTKNPLLVSVRSGAMFSMPGMMDTILNLGLNDKTVIGLAKKTKNPRFAWDAYRRFIQMFSDVVLNVDKDLFENILEAHKKKKKVVHDIDLNESALKSLVLEYKKLVKTKTKKAFPQDPLEQLDKAIDAVFLSWNNKRAIFYRKKYDIPDDIGTAVTVQSMVFGNMGNDCGTGVGFTRDPLSGEKELFAEYLLNAQGEDVVAGIRTPKHIKAMKREMGNVHNQIVNTAKILERHFKDMQDFEFTIENEILYLLQTRSGKRSGIAAAKIACDMVKESLITKKEAISRVEPEHLEQFLFPIFDPDDKKKFNVLTKGLGASPGAATGRVALDAQTAVELSKLGKRVVLVTKETSPDDIHGMSAAAGLLTARGGRTSHAAVVGRQMGKVCVVGAEEIKVDLDNRTFSVLDEVIQEGDYISIDGFEGKVYKGDIPVVASEVIQVMQGNMKELASERYLIFSTILKWADSFKRLKIRTNADVPSDAEVAIKFGAEGIGLCRTEHMFFAQDRIKIMQDMILSTDIKDRVKHLDKLQKMQKDDFIGLFTAMKGFPCTIRLLDPPLHEFLPRREDLMLEVKELEILKDDKKKLDEKRHLLERVEELHEFNPMLGLRGCRLGITMPEITSMQAKAIFEAAIEVSKKGIKVVPEIMIPLVGMVTEFKIQKDIINKVAKETLGKKKITYLVGTMIEVPRATTVADQIAKEAEFFS

SEQ ID NO: 137509 - protein, 886 aa, Unknown
  Bacterial polypetide isolated from the Sargasso Sea
MPKYLFSFGDKKTKKILNSKNILGGKGANLAEMARLGLPVPPGFTISTELCAVFYKNKKKLTPKIFNEIKKELKKIESITKKKFGDNSNPLLVSVRSGSRVSMPGMMDTILNLGLNDKTVEALSKKTSNERFAKDSYRRFIQMYGNVVLGIESHLFEEIIDNYKLTKGVLMDTELNSEDWDGLIKNFKGLIFEKTKKNFPQDVYEQLFGAIKAVFLSWESKRAKNYRKFNHIPGDWGTAVNVQSMVFGNMGDDCATGVAFTRNPSTGENKFFGEYLINAQGEDVVAGSRTPRYITKKAKEEAGAKEESMEETMPRVFKELKSIFVKLEKHYRDMQDIEFTVENNKLWMLQTRNGKRTAKAAIKIAVDMVKEKLISKKEAILRIDPNTLDTLLHPTLDEKVNKEVIAKGLPASPGAASGKVVFSADEAEKMNNQKEDTILVRVETSPEDIHGMHAAKGILTARGGMTSHAAVVARGMGRPCVSGSGEINIDYETKEFKVGDLSIKEGEVITIDGGTGRVMKGLVPTVKPDISGYFSTIMKWSDEFRKLKIRTNAETPQDTKMARNFGAEGIGLCRTEHMFFDDERILSVRQMILSKSLDDRKIALEKLLPHQKNDFKEIFKIMKGLPVTVRLLDPPLHEFLPKTDKDMEEVARSLNLGVKEIKNRVAELHELNPMLGHRGCRLGISFPEIYEMQCRAIFSALIECKKENIKSIIPEIMIPLVSTEDELGIMRKLVNRVADQLQKENKVKINYFVGTMIELPRAALRAAPISKYADFFSFGTNDLTQTTFGISRDDSGKFLNDYIDHKIFDEDPFVSIDKDGVGELVKIASQRGKKQNKKLKLGICGEHGGDPRSIEFCSKNGLNYVSCSPFRVPIARLAAAQAELRR

SEQ ID NO: 137510 - protein, 869 aa, Unknown
  Bacterial polypetide isolated from the Sargasso Sea
MPKNILGGKGANLSEMGRMGLPVPPGFTISTEVCELFYKNKKKLDKKILNEINKELKSVEKDSRKKFGDIKNPLLVSVRSGARVSMPGMMDTILNLGLNDNTVIALAKKTSNLRFANDSYRRFIQMYSNVVLGVEGYHFEDIIENYKLTKGVLLDTELDEYDWEALIKDFKNIVKEKTKKEFPQSVKEQLVGAISAVFLSWESNRAKVYRKLNHIPSNWGTAVNVQSMVFGNMGNDCATGVVFTRNPSDGSKNIYGEYLINAQGEDVVAGTRTPQHITKKARVESKETLKSMEEAMPATYKQLKNILTKLEKHYKDMQDVEFTVENKKLWMLQTRSGKRTAKSAVKIAVDMVKEKLITKKDAILRIDPSSLDTLLHPTLDDKANLEVIGSGLPASPGAASGKVVFTSEEAERLNSMLQSTILVRVETSPEDIHGMHAAKGILTSRGGMTSHAAVVARGMGRPCVSGSSEIEIDYENKLFKANNKVIKEGQVITIDGSTGRIIFGEVKTVKPEISGDFSKIMSWSDDFRKLKIRTNSETPLDSKTAREFGAEGIGLCRTEHMFFDEERILSVREMILSKTIEDRSNALKKLLPHQKKDFIEIFRIMKGLPVTVRLLDPPLHEFLPKSKNEINDVAVSLNIPVKELEVRISELHEQNPMLGHRGCRLAISFPEIYEMQCTAIFEALVECKKRKIQSTMPEIMIPLVSTETEIKIMKDLVIRVAKKVQDEHKVKINFLVGTMIELPRAAIKAKDIAKHAEFFSFGINDLTQTTFGISRDDSGKFLNDYIENKIFDIDPFVSIDDGVGDLIKIATDKGRKQNKKIKLGICGEHGGDPKSIEFCAKTGLDYVSCSPYRVPIARLAAAQAQIKKN

SEQ ID NO: 137511 - protein, 619 aa, Unknown
  Bacterial polypetide isolated from the Sargasso Sea
SKRAKVYRKLNQIPSEWGTAVNVQSMVFGNMGNDCATGVVFTRNPSDGSNDIYGEYLINAQGEDVVAGTRTPQYITKKARKEAKVGDASMEESMPEVYHELYKILKKLEKHYKDMQDVEFTVESNKLWILQTRSGKRTSKSAVKIAVDMVREKLINKNDAVLRVDPNSLDTLLHPTLDERSSIKVIANGLPASPGAVSGKVVFSSEEAERLNDMLQDTILVRVETSPEDIQGMHAAKGILTSRGGMTSHAAVVARGMGRPCVSGSSEIEINYDKKVFKTSSAEIKEGETITIDGSTGRIILGTVPTIKPEISGDFSKLMSWADKIRKLKVRTNSETPLDTKTARDFGAEGIGLCRTEHMFFDEERILSVREMILSKTLDDRSNALKKILPHQKKDFMEIFKIMHGLPVTVRLLDPPLHEFLPKSDKEISEVANVVGSDKKDIESRIEELHEQNPMLGHRGCRLGISFPEIYEMQCRAIFEALADLKKNKQKFAFPEIMIPLVSTEAEIKIMKDLVINTARKVQKENKTKIEFLVGTMIELPRAAIKANDIAKHAEFFSFGTNDLTQTTFGISRDDSGKFLNDYIDNKIFTIDPFVSIDDGVKDLVEIAVSKGKTQNKKI

SEQ ID NO: 137512 - protein, 881 aa, Unknown
  Bacterial polypetide isolated from the Sargasso Sea
MSNKLIFQFSNKKTDGDQAMSDLLGSKGANLAEMSKIGINVPPGFTITTEVCNYFIENKEMPKNFDKELEASLKKLEEYSGKKFGISDNPLLLSVRSGGKISMPGMMDSILNIGLNDENVEHLSKVFNDEKFALDSYRRLIQMYGNVVLGIEHTRFEAVLNNKKRIDNIDSDSDFNPQQLKWIIDAYKNTVERFSNSPFPQDPHEQLTGSIEAVFKSWLNKRAATYRKINNIPDTLGTGATIQTMVFGNLNEKSGTGVAFTRFPSTGKNELYGEYLMNAQGEDVVAGLRTPFPIGKHEKNKELSLEEENPKLFKDIKDIANKLENHYKEVQDIEFTIENDILYLLQTRKAKRTAQASVKIAVDMHKEKKVTKKEALNMVDADSITAILHPQFIDEQKKKIFGKGLNASPGAAFGEIVFDADKAEEEANKGRNVILVRDETSPEDIHGMFSSVAILTTKGGMTSHAAVVARGMGKPCIVGAETLSINYSEKTISSKEKTLEEGDLISLDGSAGEIYIGELKLEPPTLSEEFNTLMDWCNEFKRLEIRANAETTIDTAKALEFGAEGIGLCRTEHMFFEGERILPMREMIMSDSKQGRKRALKKLINYQISDFESLFKLLNEKPITVRLLDPPMHEFLPKSDLEISQLANEIGVSPMHVNEILMRLSESNPMLGHRGVRLGLSYPEIYEMQVEAIFRAVHLVFENDNFKVTPEVMIPLVMNSNELSEMKDILKKKIKKIEKELNYNFDYTIGTMIELPSAALSSSEIAKDADFFSFGTNDLTQTTLGLSRDDASKFLGEYVEKQIFDIDPFVSIDPSTVGRLVELSSNDGKKANKSLKIGVCGEHAGDPTSIFYLNTLNIDYISCSPFRIPAARLAAAQSETK

SEQ ID NO: 137513 - protein, 515 aa, Unknown
  Bacterial polypetide isolated from the Sargasso Sea
KKYLGGKGANLSEMGRMGLPVPPGFTISTEVCDLFYKNKKQLKPKIINEINRELKNIEKDSGKKFGDLKNPLLLSVRSGARVSMPGMMDTILNLGLNDKTVIALANKTSNMRFAKDSYRRFIQMYANVVMGVESYNFEELIENYKLTKGVLLDTDLGEDDWDGLIKDFKNIVKEKTKKNFPQNINEQLLGAISAVFLSWESNRAKVYRKLNHIPSEWGTAVNVQSMVFGNMGVDCATGVVFTRNPSNGINEIYGEYLINAQGEDVVAGTRTPQHITKKARKDAKETLLSMEESMPRVYKNLKNILIKLEKHYKDMQDVEFTVENNKLWMLQTRSGKRTAKSSVKIAVDMEREKLITKKEAVLRVQPNSLDTLLHPTLDETANLEVIAKGLPASPGAASGKVVFTSDEAERLNGMMQNTILVRVETSPEDINGMHAAKGILTARGGMTSHAAVVARGMGRPCVSGSSEIEIDYQNKIFKTKNYEIKEGDLITIDGSTGRIIKGEVKTVKPEISGDF

SEQ ID NO: 137514 - protein, 311 aa, Unknown
  Bacterial polypetide isolated from the Sargasso Sea
DINYENKSFKTSSMEIKEGDIITIDGSTGRIIEGSVATVKPEISGDFSKLMSWADSYRKLKIRTNSETPKDTKTAKDFGAEGIGLCRTEHMFFDEERILSVREMILSKTKEDRAKALNKLLPHQKKDFTEIFKIMSGLPVTVRLLDPPLHEFLPRTNKEIGELAEIVNLTVKEVETRIEELHEQNPMLGHRGCRLAISFPEIYEMQCRAIFEALCELKKNKIKSAFPEIMIPLVSTEAEIKIMKDLVKRIANMVQKENKLKIDFMVGTMIELPRAAIKAKEIAKHAEFFSFGTNDLTQTTFGISRDDSGKF

SEQ ID NO: 137515 - protein, 407 aa, Unknown
  Bacterial polypetide isolated from the Sargasso Sea
CVSGSSEIDINYEKKSFKTSTIEIKEGDLITIDGSTGRIIAGSVSTVKPEISGDFSKLMSWADNFRKLKVRTNSETPKDTKTAKDFGAEGIGLCRTEHMFFDDERILSVREMILSKTKEDRAKALQKLLPHQRKDFIEIFKIMSGLPVTVRLLDPPLHEFLPRTEKEINEVASIVNLPIKEVKSRIEELHEQNPMLGHRGCRLGISFPEIYEMQCKAIFEALAYLKKNKIKSAFPEIMIPLVSTEAEIKIMKELVIRTASQVQQENKLKIEFLVGTMIELPRAAIKAKEIAKHAEFFSFGTNDLTQTTFGISRDDSGKFLNDYLENKIFSVDPFVSIDEGVSDLVEIAVEKGRKQNKNLKLGICGEHGGDPHSISFCSKAGLNYVSCSPYRVPVARLAAAQAEIKKN

SEQ ID NO: 137516 - protein, 561 aa, Unknown
  Bacterial polypetide isolated from the Sargasso Sea
MKKFIFNFNSKNVKKIKFPKNILGGKGSNLSEMGRMGLPVPPGFTISTEVCDLFFKSKKKLNSRILKEINKELKIIERDSGKKFGDLKNPLLVSVRSGARVSMPGMMDTILNLGLNDKTVISLAKSTSNMRFAKDSYRRFIQMYSNVVLGIENYNFEELIENYKLTKGVLLDTDLDVSDWDGLIKDFKNIIKEKTKKEFPQNVNDQLIGAISAVFLSWESHRAKVYRKLNQIPSEWGTAVNVQSMVFGNMGKDCSTGVVFTRNPSDGSNEIYGEYLINAQGEDVVAGTRTPQYITNKAKINAKTKLPSMEEAMPSAFKKLKKILTKLENHYRDMQDVEFTIEKNKLWMLQTRSGKRTAKAAVKIAVDMVKEKLISKKEAVLRIEPNSLDSLLHPTLDEKETLNIIAKGLPASPGAASGKVVFTSDEAERLSGMMQNTILVRIETSPEDIHGMHAAKGILTARGGMTSHAAVVARGMGRPCVSGSSEIEIDYSKKIFKTKSKEIKEGDIITIDGSTGRIIFGEVKTVKPEISGDFSKLMKWADNFRKLKIRTNSETPLDSKI

SEQ ID NO: 137517 - protein, 254 aa, Unknown
  Bacterial polypetide isolated from the Sargasso Sea
PPLHEFLPKNESEIQEVSNSLELSVKEVQSRIDELHEHNPMLGHRGCRLGISFPEIYEMQCKAIFEALIECKKKKYKSIIPEIMVPLVSTEAEIKIMKNLVSRVANEVQRTNKVKINYLVGTMIELPRAALKAKDIAKHADFFSFGTNDLTQTTFGISRDDSGKFLNDYIENKIFEIDPFISIDKVVGELIEIAVIKGRKQNKKIKLGICGEHGGDPKSIFFCAKTGLNYVSCSPYRVPVARLAAAQAQINGKS

SEQ ID NO: 137518 - protein, 424 aa, Unknown
  Bacterial polypetide isolated from the Sargasso Sea
MTSHAAVVARGMGRPCVSGSSEIDINYENKSFKTSSMEIKEGDVITIDGSTGRIIAGSVSTVKPEISGDFSKLMSWADSFRKLKVRTNSETPKDTKTAKDFGAEGIGLCRTEHMFFDEERILSVREMILSKTKEDRSIALQKLLPHQRKDFIDIFKIMSGLPVTVRLLDPPLHEFLPRTEKEINEVASIVNLPVKEVESRIEELHEQNPMLGHRGCRLGISFPEIYEMQCKAIFEALAYLKKNKIKSAFPEIMIPLVSTEAEIKIMKELVIRTASQVQQENKLKIEFLVGTMIELPRAAIKAKEIAKHAEFFSFGTNDLTQTTFGISRDDSGKFLNDYLENKIFSVDPFVSIDEGVSDLVEIAVEKGRKQNKNLKLGICGEHGGDPHSISFCSKAGLNYVSCSPYRVPVARLAAAQAEIKKKLN

SEQ ID NO: 137519 - protein, 337 aa, Unknown
  Bacterial polypetide isolated from the Sargasso Sea
KGILTARGGMTSHAAVVARGMGRPCVSGSSEIDINYEKKTFKTSSVEIKEGEIITIDGSTGRIISGRVATLKPEISGDFSKLMSWADNYRKLNIRTNSETPKDTKIAKDFGAEGIGLCRTEHMFFDEERILSVREMILSKTKEGRAKALEKLLPHQKKDFMEIFKIMSGMPVTVRLLDPPLHEFLPRSDKEINEVAKVIGTPIKEIESRIEELHEQNPMLGHRGCRLGISFPEIYEMQCRAIFEALADLKKNKIKFAFPEIMIPLVSTEAEIKIMKNLVINVAREVQKQYKLKIEFLVGTMIELPRAAIKAKEIAKHAEFFSFGTNGLNTNYFCISR

SEQ ID NO: 137520 - protein, 499 aa, Unknown
  Bacterial polypetide isolated from the Sargasso Sea
PNSLDTLLHLTLDEKSSINVIAHGLPASPGAASGKVVFTSEEAERLTAMMQDTILVRVETSPEDIQGMHAAKGILTARGGMTSHAAVVARGMGRPCVSGSSEIDINYENKLFKTSSMEIKEGDIITIDGSTGRVIAGSISTVKPEISGDFSKLMSWADSFRKLNVRTNSETPKDTKTAKDFGAEGIGLCRTEHMFFDEERILSVREMILSKTKEDRAIALEKLLPHQKKDFIDIFKIMSGLPVTVRLLDPPLHEFLPSTNKEINEVANIVNIPVNEVMSRIEELHEQNPMLGHRGCRLGISFPEIYEMQCRAIFEALAELKKNKIKSAFPEIMIPLVSTEAEIRIMKDLVIRTASQVQKEYKLKIEFLVGTMIELPRAAIKAKEIAKHAEFFSFGTNDLTQTTFGISRDDSGKFLNDYLENKIFSVDPFVSIDEGVSDLVQIAVEKGREQNKNLKLGICGEHGGDPNSIFFCSKVGLNYVSCSPYRVPIARLAAAQAEL

SEQ ID NO: 137521 - protein, 801 aa, Unknown
  Bacterial polypetide isolated from the Sargasso Sea
GARQSMPGMMETVLNIGLTSKTIPGLIKKTGNPRFVYDAYRRLITMYADVVMEKAAGIEPKDGVGIRQKLEHHLDSYKSENGLKGDTDLSEEDWKNVIDIFKNEIKSSLGAEFPDDADAQLWGGIEAVFKSWNGARAISYRRIENIPEEWGTAVNVQTMVFGNTGEESATGVAFTRNPATGENKFFGEWLTNAQGEDVVAGLRTPNPLNEDTKTEDTSHLPSLQDTMPEIYDELFEIKNRLEKHYSDMQDIEFTIQEGKLWMLQTRVGKRNGVAAIKMAVDMFNENMIDKKTAIMRVNPNQLDELLHPALDKASENSATKLTKGLPAGPGGAKGRVVFTADDAEEWKNKGEKVILVREETSPEDVHGMHAAEAILTARGGMTSHAALVARGWGKCCIVGCNEINISVENKQLSVGDVVVKEGDWITMNGTIGVVYLGQLDLIPADPDRNEEYKELMTWADEIRKLKIRTNAESPEDAKQAIKFGAEGIGLCRTEHMFFDETRILAMRKMILADNDEDRRDAVMGLLPFQKEDFKGTLEAMEGKPVTIRLLDPPLHEFITLDDEQIKELANNIGIDSSIVNQRISSLHELNPMLGHRGCRLGIAYPVITEMQARAILEAAAELTKNGLNVLPEIMIPLVGTVTEYVDQEKIVRKVASEVESKYDMKLNYLVGTMIELPRACLTADEIAEHAEFFSFGTNDLTQTTYGFSRDDIGSFLPEYLDSNILPGDPFQSLDVKGVGKLVSMAVKYGRDVNPSIKIGICGEHGGDPNSIHFCKNNGLDYVSCSPYRVPIARLSAAQAEL

SEQ ID NO: 137522 - protein, 277 aa, Unknown
  Bacterial polypetide isolated from the Sargasso Sea
HQKNDFKEIFKIMKGLPVTVRLLDPPLHEFLPKTDKDMEEVARSLNSGIKEIKNRVAELHELNPMLGHRGCRLGISFPEIYEMQCRAIFTALIECKKEKIQSVIPEIMIPLVSTEDELGIMRKLVNRVADEVQKEKKIKINYFVGTMIELPRAALRAAPISKYADFFSFGTNDLTQTTFGISRDDSGKFLNDYIDHKIFEDDPFVSIDKDGVGELVKIASERGKKHNKKLKLGICGEHGGDPRSIEFCSKAGLNYVSCSPFRVPIARLAAAQAELRR

SEQ ID NO: 137523 - protein, 633 aa, Unknown
  Bacterial polypetide isolated from the Sargasso Sea
MCTGVVFTRNPSDGAKNIYGEYLINAQGEDVVAGTRTPQHITKKARVESKETLKSMEEAMPKTYKQLKNILVKLEKYYKDMQDVEFTVENKKLWMLQTRSGKRTAKSAVKIAVDMVKEKLITKKDAILRIEPSSLDTLLHPTLDEKVNLDVIGTGLPASPGAASGKVVFTSEEAERLNSMMQSTILVRVETSPEDIHGMHAAKGILTSRGGMTSHAAVVARGMGRPCVSGSSEIEIDYKNKLFKTNNRVIKEGEIITIDGSTGRIIIGEVKTVKPEISGDFSKIMSWSDDFRKLKIRTNSETPLDSKTAREFGAEGIGLCRTEHMFFEEERILSVREMILSKTIEDRSNALKKLLPHQKKDFIEIFKIMKGLPVTVRLLDPPLHEFLPKNNNEINDVAVSLNIPIKELEIRISELHEQNPMLGHRGCRLAISFPEIYEMQSTAIFEALVECKKQKIQSTMPEIMIPLVSTEAEIKIMKDLVIRVAKKVQDENKIKIDFLVGTMIELPRAAIKAKDIAKHAEFFSFGTNDLTQTTFGISRDDSGKFLNDYIENKIFDIDPFVSIDDGVGDLIKIATGKGRKQNKKIKLGICGEHGGDPKSIEFCAKTGLDYVSCSPYRVPVARLAAAQAQIKKN

SEQ ID NO: 137524 - protein, 399 aa, Unknown
  Bacterial polypetide isolated from the Sargasso Sea
IDNYKLTKGVLQDTELNSEDWDGLIKNFKKLIKEKTNKSFPQNVYEQLFGAISAVFLSWESKRAKTYRKLNHIPDEWGTAVNIQSMVFGNMGNDCATGVAFTRNPSTGENKFFGEYLINAQGEDVVAGSRTPRYITKRAREDAGAKERSMEETMPKVFQELKNIFLKLEKHYKDMQDIEFTVENKKLWMLQTRNGKRTAKAAIKIAVDMVKEKLISKKEAILRIDANTLDTLLHPTLDDRAEKKVIAKGLPASPGAASGKVVFTADEAERMSNQKEDTILVRLETSPEDIHGMHAAKGILTARGGMTSHAAVVARGMGRPCVSGSAEINIDYESKEFKVGDLVIKEGDTITIDGGSGRVMKGIVPTVKPDISGYFSTIMKWSDDFRKLKIRTNSETPKD

SEQ ID NO: 137525 - protein, 325 aa, Unknown
  Bacterial polypetide isolated from the Sargasso Sea
DFGAEGIGLCRTEHMFFDEERILSVREMILSKTLYDRSNALKKILPHQKKDFIEIFKIMHGLPVTVRLLDPPLHEFLPKSDKEISEVANVVGSDKKDIESRIEELHEQNPMLGHRGCRLGISFPEIYEMQCRAIFEALADLKKNKQKFAFPEIMIPLVSTETEIKIMKDLVINTARKVQKENKTKIEFLVGTMIELPRAAIKADDIAKHAEFFSFGTNDLTQTTFGISRDDSGKFLNDYIDNKIFAIDPFVSIDDGVKDLVEIAVSKGKKQNKKIKLGICGEHGGDPKSIKFCSKAGLNYVSCSPYRVPIARLAAAQAELTKNKN

SEQ ID NO: 137526 - protein, 459 aa, Unknown
  Bacterial polypetide isolated from the Sargasso Sea
FQTILSWAQSTKQLGIRANADTPDAAKLARQYGAQGIGLCRTERMFNEADRIGLFVEMIMAQSENERNQVLKKLQELQKSDFIGILKAMEGYKVTIRLLDPPLHEFLPNPEELKEKMTKENDNSEKTKRVLDRARELAEINPMMGHRGVRVAITYPEIYRMQITAVFEAAAELAKKKVNAKPQIMIPQVGSLAELNYIKSIYDDVKKQMQQKYKMKFKINFGTMLEVVRACLTSDELADTAEFFSFGTNDLTQAVFSFSREDAEGKFLPEYMEKELLETSPFQSIDVNGVGHLMKIGIKQGRDMKKDLEIGICGEHGGDPNSIKFCHSADVSYVSASPHRIPIAIVAAAQASIEQKKSKSKRRNNFILPSIRNNPSEITIYVGSNLYCTWKLIVVWQQCASIVNKILKIMILINQDNCLTALSKRLESMENVLQVPNDDEALDYFSNTKLGEASRMGSK

SEQ ID NO: 137527 - protein, 428 aa, Unknown
  Bacterial polypetide isolated from the Sargasso Sea
NYKLTKGVLLDTELDEYDWQALIKDFKNIVKEKTKKDFPQNVNEQLIGAISAVFLSWESHRAKVYRKLNQIPSNWGTAVNVQAMVFGNMGNDCATGVVFTRNPSDGSKNIYGEYLINAQGEDVVAGTRTPQHITKKARVESKETLKSMEEAMPKTYNQLKNILIKLEKHYKDMQDVEFTVENKKLWMLQTRSGKRTAKSAVKIAVDMVNEKLITKKDAILRIEPSSLDTLLHPTLDEKANLEVIGSGLPASPGAASGKVVFTSEEAERLNSMMQSTILVRIETSPEDIHGMHAAKGILTSRGGMTSHAAVVARGMGRPCVSGSSEIEIDYENKLFKTNNKVIKEGEIITIDGSTGRIIIGEIKTVKPEISGDFSKIMSWSDDFRKLKIRTNSETPLDSKTAREFGAEGIGLSRTEHMFFEEERILSVR

SEQ ID NO: 137528 - protein, 413 aa, Unknown
  Bacterial polypetide isolated from the Sargasso Sea
ARGMGRPCVSGSSEIEIDYQNKIFKTKNYEIKEGDLITIDGSTGRIIKGEVKTVKPEISGDFSKLMSWADKFRKLKIRTNSETPLDSKTAREFGAEGIGLCRTEHMFFDEERILSVREMILSKSKEDRASALKKLLPFQKKDFIDIFKIMNGLPVTVRLLDPPLHEFLPKNQKEISDVADALNIKSSELEGRITELHEQNPMLGHRGCRLGISFPEIYEMQCTAIFHALVECKKLKIKSIIPEIMIPLVSTEAEIKIMKDLVIRVAKEVENKTKTKLNFLVGTMIELPRAAIKADDISRHAEFFSFGTNDLTQTTFGISRDDSGKFLNDYIDNKIFNVDPFVSIDEGVGDLIEIATKKGRKINKKIKLGICGEHGGDPKSIEFCARAGLDYVSCSPYRVPIARLAAAQAQLKK

SEQ ID NO: 137529 - protein, 451 aa, Unknown
  Bacterial polypetide isolated from the Sargasso Sea
KVKKKVIAKGLPASPGAASGKVVFTADEAEKMSNQKEDTILVRLETSPEDIHGMHAAKGILTARGGMTSHAAVVARGMGRPCVSGSAEINIDYESKEFKVGDLVIKEGDTITIDGGSGKVMEGIVPTVKPDISGYFSTIMKWADDFRKLKIRTNSETPQDTKIARSFGAEGIGLCRTEHMFFEEERILSVRQMIVSKDLDGRRIALEKLLPYQKNDFKEIFKIMKGLPVTVRLLDPPLHEFLPKTDKDMEDLARSLNLGVKEIKDRVAELHELNPMLGHRGCRLGISFPEIYEMQCRAIFTALIECKKEKIQSVIPEIMIPLVSTEDEIGIMRKLVDEVAKKVQKENKIKLEYFVGTMIELPRAALRAAPISKYADFFSFGTNDLTQTTYGISRDDSGKFLNDYLDHKIFDTDPFVSIDKDGVGELVKIATERGRKNNRKLKLGICGEPWW

SEQ ID NO: 137530 - protein, 593 aa, Unknown
  Bacterial polypetide isolated from the Sargasso Sea
DEWGTAVNVQAMVFGNMGSDCATGVAFTRNPSTGENSFFGEYLINAQGEDVVAGTRTPQYITKKSKKESGSKELSMQEAMPQAYKELEKVFIKLEKHYRDMQDIEFTVENNKLWMLQTRSGKRTAKAGIKIAVDMVKEKLISRKEAILRIDPNTIDTLLHPTLDDKVEKEIIASGLPASPGAASGKVVFTADEAEKLNNMMQDTILVRLETSPEDIHGMHAAKGILTARGGMTSHAAVVARGMGRPCVSGSSEITIDYENKQFKAGNEIIKEGEIITIDGGSGKVMKGLVPTVKPEISGYFSTIMKWADGFRKLKIRTNAETENDSKTARDFGAEGIGLCRTEHMFFDEDRILSVRQMILSRSNDDRSHALSKLLPYQKEDFKKIFKVMSGLPVTVRLLDPPLHEFLPKADKDVDEVARSLNLASKEIRDRISELHEENPMLGHRGCRLGISFPEIYEMQCRAIFEAIIELKKEKIKSAFVEIMIPLVSIESELKIMRSLVNRVAKEIETKNKVKLDYTVGTMIELPRAALQAKNISKHADFFSFGTNDLTQTTFGISRDDSGKFLNDYIDNKIFDVDPFVSIDQNGVGELVE

SEQ ID NO: 137531 - protein, 449 aa, Unknown
  Bacterial polypetide isolated from the Sargasso Sea
EKHYKDMQDVEFTVENKKLWMLQTRSGKRTAKSAVKIAVDMVKEKLISRKEAILRIDPNSLDTLLHPTLDEKSEINVIAKGLPASPGAVSGKVVFSSEEAERLNGMMQNTILVRVETSPEDIHGMHAAKGILTSRGGMTSHAAVVARGMGRPCVSGSSEINIDYENKLFKTDQIQVTEGEIITIDGSSGRIILGEVQTVKPEISGDFSKLMSWADSYRKLKVRTNSETPIDTKTARDFGAEGIGLCRTEHMFFDEDRIMSVREMILSKTTNDRNKALAKLLPHQKKDFTEIFKIMNGLPVTVRLLDPPLHEFLPKNEKEIKDVSDALGLTVTEIESRIGELHEHNPMLGHRGCRLAISFPEIYEMQCRAIFEALIECKNMKIKSIIPEIMIPLVSTEAEIEIMKNLVDKVADQVKAENKTKIDYLVGTMIELPRAAIKAKDIAKHADFF

SEQ ID NO: 137532 - protein, 285 aa, Unknown
  Bacterial polypetide isolated from the Sargasso Sea
IALEKLMPHQKNDFKEIFKTMYGLPVTVRLLDPPLHEFLPKSEKDVEEVARSLNLGAKEIRDRIAELHEQNPMLGHRGCRLGISFPEIYEMQCKAIFEALVECKKEKSKSAIAEIMIPLVSTDLELKILRDLVNRVAKDVQNKNKVKIEYIVGTMIELPRAALQAKAISKYADFFSFGTNDLTQTTLGISRDDSGKFLNDYVDHKIFNKDPFVSIDEDGVGELVEIASNRGRKQNKKLKLGICGEHGGDPKSIEFCSKLGLNYVSCSPFRVPVARLAAAQAQLRR

SEQ ID NO: 137533 - protein, 433 aa, Unknown
  Bacterial polypetide isolated from the Sargasso Sea
AAAKGILTARGGMTSHAAVVARGMGRPCVSGSSEIDINYENKSFKTSSMEIKEGDIITIDGSTGRIIEGSVATVKPEISGDFSKLMSWADSYRKLKIRTNSETPKDTKTAKDFGAEGIGLCRTEHMFFDEERILSVREMILSKTKEDRAKALDKLLPHQKKDFTEIFKIMNGLPVTVRLLDPPLHEFLPRTNKEIGELAEIVNLTVKEVETRIEELHEQNPMLGHRGCRLAISFPEIYEMQCRAIFEALCELKKNKIKSAFPEIMIPLVSTEAEIKIMKDLVKRIASMVQEENKLKIDFMVGTMIELPRAAIKAKEIAKHAEFFSFGTNDLTQTTFGISRDDSGKFLNDYIENKIFSIDPFVSIDEGVSDLVEIAVAKGKSQNKKIKLGICGEHGGDPKSISFCAKVGLNYVSCSPYRVPVARLAAAQAELKK

SEQ ID NO: 137534 - protein, 886 aa, Unknown
  Bacterial polypetide isolated from the Sargasso Sea
MVKVVFSFDDKSAKKLKNKKNILGGKGANLGEMGRLGLPVPPGFTITTDVCDLFYKNKKKLPNKVIQNIELELKNIEKKTKKKFGDLKNPLLVSVRSGARISMPGMMDTILNLGLNDKTVESLKKKTSNGRFAKDSYRRFIQMYSNVVLGVEGHLFEELIDNYKLTKGVLLDTDLDESDWDGLITNFKDLVKKEKKIIFPQDVKEQLLGAINAVFLSWDSQRAKTYRKLNQIPDHWGTAVNVQAMVFGNMGINCSTGVAFTRNPSTGENSFFGEFLINAQGEDVVAGTRTPQYITTKAKKESGSKYPSMEEAMPKVYKELAKVFLKLERHYKDMQDIEFTVENNKLWMLQTRSGKRTAKAAIKIAVDMVKEKLISKKEAIKRIDPNTLDTLLHPTLDDKVEKEVIASGLPASPGAASGKVVFTADEAEKLNGMMQDTILVRLETSPEDIHGMHAAKGILTARGGMTSHAAVVARGMGRPCVSGSSEITIDYELKQFKAGDVIIKEGDIVTIDGGSGKVMKGLVPTVQPEISGYFSTIMKWADEFRKLKVRTNAETEADSKTAREFGAEGIGLCRTEHMFFDEERILSVRQMILSKSKEDRNSALDKLLPYQKEDFKKIFKIMSGLPVTVRLLDPPLHEFLPKADKDIEEVARSLNLSAKEVKDRIAELHEENPMLGHRGCRLGISFPEIYEMQCRAIFEAIVELKKQKVKAAFVEIMIPLVSTESELKILRALVNKIAKEIEKENKLKLEYMVGTMIELPRAALQAKSISKHADFFSFGTNDLTQTTFGISRDDSGKFLNDYIDNKIFDVDPFVSIDQNGVGELVEIASSRGRKTNKNIKLGICGEHGGDPKSIEFCSRTGLNYVSCSPFRVPVARLAAAQAELSK

SEQ ID NO: 137535 - protein, 271 aa, Unknown
  Bacterial polypetide isolated from the Sargasso Sea
IDIFKIMSGLPVTVRLLDPPLHEFLPRTNKEISEVANTINLPVKEVESRIEELHEQNPMLGHRGCRLGISFPEIYEMQCRAIFEALAELKKSKIKSAFPEIMIPLVSTEAEIKIMKDLVVRTASLVQKEYKLKIEFLVGTMIELPRAAIKAKEIAKHAEFFSFGTNDLTQTTFGISRDDSGKFLNDYLENKIFSVDPFVSIDEGVEDLIKIAVEKGKSQNKKLKLGICGEHGGDPHSISFCAKAGLNYVSCSPYRVPVARLAAAQAELKKK

SEQ ID NO: 137536 - protein, 782 aa, Unknown
  Bacterial polypetide isolated from the Sargasso Sea
MSEMTRLKLPVPPGFTITTEVCNKYYDNGRKLPKDVMPAVMKNIVKMEKKTGKKWNSTKNPLLVSVRSGAAISMPGMMDTILNLGLNEKTVEGFAVQTKNPRFSWDSYRRFIQLFGKVVFGVNDEKFDHVLDSAKSKQGVTDDSKLNVESLKKIVKEYKKICENHTKRKFPDTPNEQLGLAIEAVFKSWMGERAVVYREKNGITKDIANGTAVNVVTMVFGNMGDDSATGVVFTRNGHNGKREIEGEYLTNAQGEDVVAGVRTGKNVELLKKEMPKSHKELSNACEKLEKHFREPQDIEFTIEQGKFYLLQTRTAKMSAGALVKTSVDMVKEKLIDKNRSLTRIPAQQLEALLHRTMDESKVKDHKQLAKGIAASPGAASGIAIFDVKKAIELGEAGKKVILIRKETKPEDVPAFFSAEGILTSLGGKSSHAAIVSRGMGKPCIVGCAELKINYENNTCTANGITVKENEMISIDGSIGTVLIGEVPTVEPKVTKDFQTILSWAQNTKQLGIRANADTPDAAKLARQYGAQGIGLCRTERMFNESDRIGLFVEMIMAESQEERNKVLKKLQELQKSDFIGILKAMEGYKVTIRLLDPPLHEFLPNPEELKDKMNKENDKSKKTQRVLDRARELAEINPMMGHRGVRVAITYPEIYKMQITAVFEAAAELSKKKVNAKPQIMIPQVGSLAELNYIKSIYDDVKKEIERKYKKKFKINFGTMLEVVRACLTSDELADTAEFFSFGTNDLTQAVFSFSREDAEGKFLPEIYGKRAPRDQSIPINR

SEQ ID NO: 137537 - protein, 478 aa, Unknown
  Bacterial polypetide isolated from the Sargasso Sea
LPASPGAASGKVVFTSEEAERLNSMMQSTILVRVETSPEDIHGMHAAKGILTSRGGMTSHAAVVARGMGRPCVSGSSEIEIDYENKLLKTNNRIIKEGEIITIDGSTGRIIIGEVKTVQPEISGDFSKIMSWSDDFRKLKIRTNSETPIDSKNAREFGAEGIGLCRTEHMFFDEERILSVREMILSKTIEDRSNALKKLLPHQKKDFIEIFKIMKGLPVTVRLLDPPLHEFLPKSNNEINDVAVSLNIPIKELEIRISELHEQNPMLGHRGCRLAISFPEIYEMQCTAIFEALVECKKQKIQSTMPEIMIPLVSTEAEIKLMKDLVIRVAKKVQDENKIKIDFLVGTMIELPRAAIKAKDIAKHAEFFSFGTNDLTQTTFGISRDDSGKFLNDYIENKIFDIDPFVSIDDGVGDLIKIATDKGRKQNKKIKLGICGEHGGDPKSIEFCAKTGLDYVSCSPYRVPVARLAAAQEQIKKN

SEQ ID NO: 137538 - protein, 455 aa, Unknown
  Bacterial polypetide isolated from the Sargasso Sea
MMQNTILVRVETSPEDIHGMHAAKGILTARGGMTSHAAVVARGMGRPCVSGSSELEIDYENNLFKSNGYEIKEGDLITIDGSTGRIILGEVKTVKPEISGDFSKLMSWADSFRKLKIRTNSETPLDSKIARDFGAEGIGLCRTEHMFFDEDRILSVREMILSKSKEDRAKALEKLLPHQKNDFIEIFKIMNGLPVTVRLLDPPLHEFLPKSATEINDISKSLNLSIKEIEGRIEELHEQNPMLGHRGCRLGISFPEIYEMQIRAIFEALVECKKRKIKSTMPEIMIPLVSTEAEIKIMKELVINIARKVQNENKTKIKFLVGTMIELPRAAIKAKEIAKYAEFFSFGTNDLTQTTFGISRDDSGKFLNDYIENKIFDIDPFISIDDGVGDLIEIAVTRGKKQNKKIKLGICGEHGGDPKSIEFCSKVGLDYVSCSPYRVPVARLAAAQAQLKKII

SEQ ID NO: 137539 - protein, 635 aa, Unknown
  Bacterial polypetide isolated from the Sargasso Sea
GDNCATGVVFTRNPSDGSKEIYGEYLINAQGEDVVAGTRTPQHITKKARIKSKEKLTSMEESMPLIFRHLKKILLKLEKHYKDMQDVEFTVENKKLWILQTRSGKRTAKSAVKIATDMVKEKLISKKDALLRIEPNSLDTLLHPTIDEKSNIEVIAKGLPASPGAASGKVVFSSDEAERLNDMMQNTILVRVETSPEDIHGMHAAKGILTARGGMTSHAAVVARGMGRPCVSGSSEIEIDYEKKLFKTNGYEIKEGDLITIDGSTGRIILGEVKTVKPEISGDFSKLMSWADNFRKLKVRTNSETPLDTKIARDFGAEGIGLCRTEHMFFEEERILSVREMILSKSKEDRASALRKLLPHQKNDFIEIFKIMKGLPVTVRLLDPPLHEFLPKSSTEVAYVSKSLNLSIKEVEGRIDELHEQNPMLGHRGCRLGISFPEIYEMQTRAIFEALVECKKRKIKSTMPEIMIPLVSTESEIKIMKELVIKVARDVQNESKTKIKFLVGTMIELPRAAIKAKDIAKHAEFFSFGTNDLTQTTFGISRDDSGKFLNDYLENKIFDIDPFISIDDGVGDLILIAATKGKKQNKKIKLGICGEHGGDPKSIEFCSKAGLDYVSCSPYRVPIARLAAAQAQLKK

SEQ ID NO: 137540 - protein, 559 aa, Unknown
  Bacterial polypetide isolated from the Sargasso Sea
LEKHYKDMQDVEFTVENKKLWMLQTRSGKRTAKSAVKIAVDMVKENLISKKEAVLRVEPNSLDTLLHPTLDEKSNIEIITKGLPASPGAASGKVVFTSDDAERLNASMQNAILVRVETSPEDIHGMHAAKGILTARGGMTSHAAVVARGMGRPCVSGSSEIEIDYEKKLFKVQDREIKEGDLITIDGSTGRIILGEVKTVKPEISGEFSKLMNWADNYRKLKIRTNSETPVDSKTARDFGAEGIGLCRTEHMFFDEERILSVREMILSKTKDDRLLALSKLLPYQKKDFIDIFKIMNGLPVTVRLLDPPLHEFLPRTDKEIGEVASSLNIPIKELKVRITELHEQNPMLGHRGCRLGISFPEIYEMQCRAIFEALVQCKKQKVKSIIPEIMIPLVSTEAEIKIMKDLVIRTAKQVESEKKIKLNFLVGTMIELPRAAIKANDIAKHAEFFSFGTNDLTQTTFGISRDDSGKFLNDYIENKIFDIDPFVSIDEGVGDLIEIASEKGRMQNKKIKLGICGEHGGDPKSIELCAKIGLNYVSCSPYRVPVARLAAAQAQLKK

SEQ ID NO: 137541 - protein, 305 aa, Unknown
  Bacterial polypetide isolated from the Sargasso Sea
LFGAIKAVFLSWESKRAKTYRKFNHIPSEWGTAVNVQSMVFGNMGNDCATGVAFTRNPSTGENKFFGEYLINAQGEDVVAGSRTPRYITKYAKENAGSKDESMEETMPKVFKELKNVFIKLEKHYRDMQDIEFTVENNKLWMLQTRSGKRTAKAAIKIAVDMVKEKLISKKEAILRIDPNTLDTLLHPTLDEKVKKEVIAKGLPASPGAASGKVVFSADEAENMNNQKEDTILVRVETSPEDIHGMHAAKGILTARGGMTSHAAVVARGMGRPCVSGSGEINIDYESKEFKVGELTIKEGGYYYY

SEQ ID NO: 137542 - protein, 314 aa, Unknown
  Bacterial polypetide isolated from the Sargasso Sea
IMQEMILATSLKDRVIHLDKLLQMQKKDFIGLFTAMDGLPCTIRLLDPPLHEFLPKREDLMLEIKEMEINGAPSKELKEKRDLLERVEELHEFNPMLGLRGCRLGITMPEITRMQARAIFEAALVVSKKRIRVNPEIMVPLVGMVSEIKFQKDIILQVAKEVLGKKKLNYMVGTMIEVPRATAVADEIAKEAEFFSFGTNDLTQTVFAYSRDDSGKFINTYMDTKVELSGKTVEILERDPFTSIDIDGVGEFMKLGLERGKSTRKNLKVGICGEHGGDPNSIDFCHKIGLDYVSCSPFRVPIARLAAARIALKD

SEQ ID NO: 137543 - protein, 698 aa, Unknown
  Bacterial polypetide isolated from the Sargasso Sea
MKKLILNFNSKDSKKIKNPKNFLGGKGANLSEMGRMGLPVPPGFTISTKVCEIFYKDKKRLNKSLISQIKKELKLIEKDVSKKFGDLKNPLLLSVRSGARVSMPGMMDTILNLGLNDKTVKALAIKTSNGRFAKDSYRRFIQMYGNVVMGVEGYHFEELIENYKLTKGVLLDTDLDESDWDGLIEDFKRTVREKTKKDFPQDVYEQLLGAISAVFLSWESNRAKVYRKLNQIPAEWGTAVNVQSMVFGNMGDDCATGVVFTRNPSDGSNEIYGEYLINAQGEDVVAGTRTPQYITKKARRDAKVKELSMEESMPKVFNELKKILKKLEMHFKDMQDVEFTVESNKLWMLQTRSGKRTAKSAVKIAVEMVKEKLISKKEAVLRIDPNSLDTLLHPTLDEKSSINVIANGLPASPGAASGKVVFTSEEAERLTAMMQDTILVRVETSPEDIQGMHAAKGILTARGGMTSHAAVVARGMGRPCVSGSSEIDINYENKSFKTSSMEIKEGDVITIDGSTGRIIDGSVSTVKPEISGDFSKLMSWSDSFRKLKVRTNSETPKDTQTAKDFGAEGIGLCRTEHMFFDEERILSVREMILSKTKEDRAIALQKLLPYQRKDFIDIFKIMSGLPVTVRLLDPPLHEFLPRTKKEINEVANIVNLPVKEVESRIEELHEQNPMLGHRGCRLGISFPEIYEMQCKANI

SEQ ID NO: 137544 - protein, 408 aa, Unknown
  Bacterial polypetide isolated from the Sargasso Sea
MTKFVYSFGQNSTDGNAEMRDLLGGKGANLAEMSSIGIPVPPGFTITTDVCSYYNDNSNNFPKELEKQVWEAIASIEEQIGSKFGDPENPLLVSVRSGARASMPGMMDTVLNLGLNDKTVSGLASQSGDERFAYDSYRRFIQMYGDVVLGVEHYNFEEMLADHKQGKGVSMDTELTVSDLKQIVSAYSEIVEKHIGKPFPEDPTEQLWGAIAAVFGSWMNERAKVYRGLHNIPDDWGTAVNVQSMVFGNMGSSSGTGVCFTRNPSNGHNVFYGEFLINAQGEDVVAGIRTPQPLTNAEKNSSNNELPSLEEVMPKIFAELCEVRKSLENHYRDMQDIEFTIQRDKLWILQTRNGKRTARAGLSIAVDLAESGLISTEEAINRIDPIALDQLLHPTLDPNAPRNVLGRG

SEQ ID NO: 137545 - protein, 437 aa, Unknown
  Bacterial polypetide isolated from the Sargasso Sea
HPGFTISTEVCDLFYKNKKKLNKKILHEINKELKFIEKDTGKKFGDIKNPLLVSVRSGARVSMPGMMDTILNLGLNDNTVIALAKKTSNLRFANDSYRRFIQMYSNVVLGIEGYHFEDIIENYKLTKGVLLDTELDEYDWEALIKDFKNIVKEKTNKDFPQNVKEQLVGAISAVFLSWESHRAKVYRKLNQIPSNWGTAVNVQSMVFGNMGNHSATGVVFTRNPSDGAKNIYGEYLINAQGEDVVAGTRTPQHITKKARVESKETLKSMEEAMPATYKQLKNILNKLEKHYKDMQDVEFTVENKKLWMLQTRSGKRTAKSAVKIAVDMVKEKLITKKDAILRIEPSSLDTLLHPTLDEKAKLEVIGSGLPASPGAASGKVVFTSEEAERLNSMMQSTILVRVETSPEDIHGMHAAKGILTSRGGMTSHAAVVARGMG

SEQ ID NO: 137546 - protein, 576 aa, Unknown
  Bacterial polypetide isolated from the Sargasso Sea
MSKLIFGFGDKKAKKIPNSRNILGGKGSNLAEMARLGLPVPPGFTISTKMCEIFYKNNKKLNKKIKIEIKKELKKIEAKTRKKFGDNNNPLLISVRSGSRVSMPGMMDTILNLGLNDKTVEALSKKTENDRFAKDSYRRFIQMYANVVMGVETYHFEEMIDNYKLTKGVLQDTELNSEDWEGLINNFKKLIKEKTNKNFPQDVNEQLFGAINAVFLSWESKRARTYRKLNQIPGDWGTAVNVQSMVFGNMGDDCATGVAFTRNPSTGENKFFGEYLINAQGEDVVAGSRTPRYITKRAREKAGVKEKSMEETMPKVFSELKKIFLKLEKHYKDMQDIEFTVENKKLWMLQTRNGKRTANAALKIAVDMVKEKLITKKDAILRIDPNTLDTLLHPTLDDKVEKKIIAKGLPASPGAASGKVVFTADEAERMQNQKEDTILVRVETSPEDIHGMHASKGILTARGGMTSHAAVVARGMGRPCVSGSAEINIDYESKEFKVGDLVIKEGDTITIDGGSGRVMQGVIPTVKPDISGYFSTIMKWADDFRKLKIRTNSETPQDTKVARSFGAEGIGLCRTE

SEQ ID NO: 137547 - protein, 569 aa, Unknown
  Bacterial polypetide isolated from the Sargasso Sea
LFGAISAVFLSWESKRAKVYRKLNQIPSNWGTAVNVQSMVFGNMGNDCATGVVFTRSPSDGTNYIYGEYLINAQGEDVVAGTRTPQYISKKSCKDISSEKKSMERLMPNTFKQLKKILNKLEKYYRDMQDVEFTVENNKLWMLQTRSGKRTAKSAVKIAVDMVKEKLITKKEAVLRIDPNLLDNLLHPTLNEKKEINVIASGLPASPGAASGKVVFSSEEAERLNNMMQDTILVRIETSPEDIHGMHASKGILTSRGGMTSHAAVVARGMGRPCVSGSSEIDINYEEKIFRTSNIEVKEGDIITIDGSTGRIILGEVETIKPEISGSFSTLMSWADKFRKLKIRSNSETPLDTKIARDFGAEGIGLCRTEHMFFDEERILSVREMILSKTKEDRNKALQKLLPHQKKDFIEIFEIMGGLPVTVRLLDPPLHEFLPKSEKEIEDVSYALRISQKEVISRIDELHEHNPMLGHRGCRLGISFPEIYEMQCKAIFEALIECKNNKKKLILPEIMIPLVSTEEEINIMKDLVNRVAKKIQDENKVKNNYLVGTMIELPRAALKARDIAKHADF

SEQ ID NO: 137548 - protein, 401 aa, Unknown
  Bacterial polypetide isolated from the Sargasso Sea
QAILRMTPNGLDALLHPTLDEKSNIDVIAKGLPASPGAASGKVVFSSDEAERLNGMMQNTILVRVETSPEDIHGMHAAKGILTCRGGMTSHAAVVARGMGRPCVSGSSEIEIDYQNKIFKTKGHEVKEGDVITIDGSTGRIILGEVKTIKPEISGDFSKVMRWADGYRKLKIRTNSETPMDSKTAREFGAEGIGLCRTEHMFFDEERILLVRQMILSKSSDDRSIALSKLLPHQKKDFIEIFKIMNGLPVTVRLLDPPLHEFLPKNNVEIGDVAKSLNLTVQDIQLRISELHEHNPMLGHRGCRLGISYPEIYEMQCKAIFEALVECKKKKYKSILPEIMIPLVSTEAEIRIMKDLVIRVAREVQNKNNTKINFLVGTMIELPRAAIKAKEIAKHAEFFSL

SEQ ID NO: 137549 - protein, 427 aa, Unknown
  Bacterial polypetide isolated from the Sargasso Sea
SADTEIDASDWDGLIENFKKLIKEKTGKNFPQDVNEQLIEAISSVFRSWESQRAKTYRKLNRIPDEWGTAVNVQAMVFGNMGSDCATGVAFTRNPSTGENSFFGEYLINAQGEDVVAGTRTPQYITKKSKKESGSKELSMQEAMPNAYKELEKVFIKLEKHYRDMQDIEFTVENNKLWMLQTRSGKRTAKAGIKIAVDMVKEKLISRKEAILRIDPNTIDTLLHPTLDDKVKKEIIASGLPASPGAASGKVVFTADEAEKLNNMMQDTILVRLETSPEDIHGMHAAKGILTARGGMTSHAAVVARGMGRPCVSGSSEITIDYENKQFKAGNEIIKEGEIITIDGGSGKVMKGLVPTVKPEISGYFSTIMKWADGFRKLKIRTNAETEQDSKTAIDFGAEGIGLCRTEHMFFDEDRILSVRQMILSRS

SEQ ID NO: 137550 - protein, 486 aa, Unknown
  Bacterial polypetide isolated from the Sargasso Sea
EKHYRDMQDIEFTVENNKLWMLQTRSGKRTAKAGIKIAVDMVKEKLISRKEAILRIDPNTIDTLLHPTLDDKVKKEVVASGLPASPGAASGKVVFTADEAEKLNNMMQDTILVRLETSPEDIHGMHAAKGILTARGGMTSHAAVVARGMGRPCVSGSSEITIDYDNKQFKAGNEIIKEGDIITIDGGSGKVMKGLVPTVKPEISGYFSTIMKWADEFRKLKIRTNAETEQDSKTAIDFGAEGIGLCRTEHMFFDEDRILSVRQMILSRSNEDRNHALSKLLPYQKEDFKKIFKVMSGLPVTVRLLDPPLHEFLPKADKDVDEVARSLNLASKEIRDRIAELHEENPMLGHRGCRLGISFPEIYEMQCRAIFEAIIELKKEKIKSAFVEIMIPLVSTESELRIMRSLVNRVAHQIEKQNKAKLNYIVGTMIELPRAALQAKNISKHADFFSFGTNDLTQTTFGISRDDSGKFLNDYIDNKIFDIDPL

SEQ ID NO: 137551 - protein, 797 aa, Unknown
  Bacterial polypetide isolated from the Sargasso Sea
CSCAKGANLSEMGRMGLPVPPGFTISTVVCNLFYKNEKKLNKKILNEINKELKLIEKDSGKKFGDIKNPLLVSVRSGARVSMPGMMDTILNLGLNDSTVIALAKKTSNLRFANDSYRRFIQMYSNVVLGIEAYHFEDIIENYKLTKGVLLDTELDEYDWEALIKDFKNIVKEKTKKDFPQNVKEQLVGAISAVFLSWESNRAKVYRKLNQIPSHWGTAVNVQSMVFGNMGNDCATGVVFTRNPSDGSKNIYGEYLINAQGEDVVAGTRTPQHITKKARVESKETLKSMEETMPETYKQLKNILNKLEKHYKDMQDVEFTVENKKLWMLQTRSGKRTAKSAVKIAVDMVKEKLITKKDAILRIEPSSLDTLLHPTLDEKANLEVIGLGLPASPGAASGKVVFTSEEAERLNSVMQSTILVRVETSPEDIHGMHAAKGILTSRGGMTSHAAVVARGMGRPCVSGSSEIEIDYENKLFKTKNKVIKEGELITIDGSTGRIIIGEIKTVKPEISGDFSKIMSWSDDFRKLKIRTNSETPLDSKTAREFGAEGIGLCRTEHMFFDEERILSVREMILSKTIEDRSNALKKLLPHQKKDFIEIFKIMRGLPVTVRLLDPPLHEFLPKSNNEINDVAVSLNIPVKELEVRISELHEQNPMLGHRGCRLAISFPEIYEMQCTAIFEALVECKKQRIQSTMPEIMIPLVSTEAEIKIMKELVIRVAKKVQDENRIKIDFLVGTMIELPRAAIKAKEIAKHAEFFSFGTNDLTQTTFGISRDDSGKFLNDYIENKIFDIDPFISIDD

SEQ ID NO: 137552 - protein, 475 aa, Unknown
  Bacterial polypetide isolated from the Sargasso Sea
SKRAKTYRKLNQIPGDWGTAVNVQSMVFGNMGNDCATGVAFTRNPSTGENKFFGEYLINAQGEDVVAGSRTPRYITKKARKDAGAKESSMEETMPKVFKELKNIFIKLEKHYKDMQDIEFTVENNKLWMLQTRNGKRTAKAAIKIAVDMVKEKLISKKEAILRIDPNTLDSLLHPTLDDKVEKKVIAKGLPASPGAASGKVVFTADEAERMKNQKEDTILVRLETSPEDIHGMHAAKGILTARGGMTSHAAVVARGMGRPCVSGSAEINIDYESREFKVGDLVIKEGDTITIDGGSGKVMQGIVPTVKPDISGYFSTIMKWSDDFRKLKIRTNSETPKDTKMARNFGAEGIGLCRTEHMFFEEERILSVRQMIVSKDLDGRKVALEKLLPHQKNDFKEIFKIMRGLPVTVRLLDPPLHEFLPKTDKDMEALARSLNLGVKEIKDRVAELHELNPMLGHRGCRLGISFPEIYEMQC

SEQ ID NO: 137553 - protein, 886 aa, Unknown
  Bacterial polypetide isolated from the Sargasso Sea
MSKFIFSFGDKKTKKISNSRNILGGKGSNLAEMARLGLPVPPGFTISTEMCEIFYRNKKKLSPKTCMEIKKELKKIEAKTKKKFGDNINPLLISVRSGSRVSMPGMMDTILNLGLNDKTVDALSKKTSNKRFAKDSYRRFIQMYANVVMGVESHLFEELIDNYKLTKGVLSDTELSFEDWDGLIKNFKNLISDKTNKNFPQDVYEQLFGAIKAVFLSWESKRAKTYRKLNHIPGHWGTAVNVQSMVFGNMGDNCATGVAFTRNPATGENKFFGEYLINAQGEDVVAGSRTPRYITKKAKENAGATEASMEETMPKVFKELKNIFVKLEKHYRDMQDIEFTVENKKLWMLQTRNGKRTAKAAIKIAVDMVKEKLISKKEAILRIDPNTLDTLLHPTLDEKIEKKIIAKGLPASPGAASGKVVFTADEAERMNTQKEDTILVRVETSPEDIHGMHAAKGILTSRGGMTSHAAVVARGMGRPCVSGSGEINIDYDAKEFKAGDLTIREGDVITIDGASGKVMEGLVPTVKPDISGYFSTIMKWSDEFRKLKIRTNAETPQDTKMARNFGAEGIGLCRTEHMFFDDERILSVRQMILSRHLDDRKIALDKLLPYQKNDFKEIFKIMKGLPVTVRLLDPPLHEFLPKTDKDMEEVARSLNLGVKEIKNRVAELHELNPMLGHRGCRLGISFPEIYEMQCRAIFTALIECKKEKIQSIIPEIMIPLVSTEDELGIMRKLVNRVAQEVQREHKVKINYFVGTMIELPRAALRAAPISKYADFFSFGTNDLTQTTFGISRDDSGKFLNDYLEHKIFDGDPFVSIDRDGVGELVKIASQRGKKQNKKLKLGICGEHGGDPRSIEFCSKAGLNYVSCSPFRVPIARLAAAQAALRR

SEQ ID NO: 137554 - protein, 531 aa, Unknown
  Bacterial polypetide isolated from the Sargasso Sea
RSEKSVKAVVQLAVDMVSNRFITKREALMKVDPLALTDYLHPQIVETEDLKVISKAVSASPGAATGKIVFNSNLALELTSSGESVILVMTETGPEDVKGMQVSKGVLTVRGGMTSHAALIARGLGIPCVVGAVDLRINLVDKKLYLKAGQTLSEGEEITINGTTGDIIEGECETKAPELTGAFSDLLSWADDNRSLKVRANADTPKDAALAKKFNVDGIGLCRTEHMFFKKERLLIMQEMIFAEDKEQRFSSLDKLLPIQRKDFIQLFEVMSGQPVAIRLLDPPLHEFLPKDTEQLSILAKKIGVEFKYISRRSRELKEVNPMLGHRGVRLGITMPEIYQMQVRAIFEATSHVLKSGTGLVIPEIMFPLVSANKEIQLLSKMIREIAEEVYVNHGVEFSYKIGAMIETPRAALRAGEIAESTDFISFGTNDLTQMTYGLSRDDSGKFLNEYINAEVFNEDPFLSLDQVGVGELIRLASTRGKKSNKNLSVALCGEHGGDPKSIFYCKMLGLNYVSCSPFRVPIARLAAAQA

SEQ ID NO: 137555 - protein, 339 aa, Unknown
  Bacterial polypetide isolated from the Sargasso Sea
QLLGAISAVFLSWESKRAKVYRKLNQIPSEWGTAVNVQSMVFGNMGNDCATGVVFTRNPSNGSNDIYGEYLINAQGEDVVAGTRTPQYITKKAKKEAKVKESSMEESMPKVYSELFKILKKLETHYKDMQDVEFTVENNKLWILQTRSGKRTSKSAVKIAVDMVKEKLITKNQAILRIDPNSLDTLLHPTLDEKSSIQVIANGLPASPGAASGKVVFSSEEAQRLNDMMQDVILVRVETSPEDIQGMHAAKGILTARGGMTSHAAVVARGMGRPCVSGSSEIDINYEQKIFKTSSTEVKEGDIITIDGSTGRIIIGDVPTVKPEISGDFSKLMSWADNV

SEQ ID NO: 137556 - protein, 314 aa, Unknown
  Bacterial polypetide isolated from the Sargasso Sea
LCRTEHMFFDEERILSVREMILSKTQEDRARALQKLLPHQKKDFIEIFKIMHGLPVTVRLLDPPLHEFLPKSNKEISEVANVVGTNVKELESRIEELHEQNPMLGHRGCRLGISFPEIYEMQCRAIFEALSDLKKKKLKFAFPEIMIPLVSTEAEIKIMKDLVINTAKKVQKEKNVKIEFLVGTMIELPRAAIKAKDIAKHAEFFSFGTNDLTQTTFGISRDDSGKFLNDYIDNKIFSIDPFISIDEGVKDLVKIAVEKGQKQNKKIKLGICGEHGGDPESIYFCSKVGLNYVSCSPYRVPIARLAAAQAEIKK

SEQ ID NO: 137557 - protein, 594 aa, Unknown
  Bacterial polypetide isolated from the Sargasso Sea
NAIRGDWGTAVNVQSMVFGNMGNDCATGVAFTRNPSTGENKFFGEYLINAQGEDVVAGSRTPRYITKRAREKAGVNEKSMEETMPKVFSELKKIFLKLEKHYKDMQDIEFTVENKKLWMLQTRNGKRTANAAIKIAVDMVKEKLITKKDAIIKIDPNTLDTLLHPTLDEKVEKKVIAKGLPASPGAASGKVVFTADEAERMSNQKEDTILVRLETSPEDIHGMHAAKGILTARGGMTSHAAVVARGMGRPCVSGSAEINIDYESKEFKVGDLVIKEGDTITIDGGSGRVMEGIVPTVKPDISGYFSTIMKWSDDFRKLKIRTNSETPKDTKMARNFGAEGIGLCRTEHMFFEEERILSVRQMIVSKDLDGRKIALEKLLPHQKNDFKEIFKIMKGLPVTVRLLDPPLHEFLPKTDKDMEDLARSLNLGVKEIKDRVAELHELNPMLGHRGCRLGISFPEIYEMQCKAIFTALIECKKEKIQSVIPEIMIPLVSTEDELGIMRKLVDEVAKKVQKENNLKLEYFVGTMIELPRAALRAAPISKYADFFSFGTNDLTQTTYGISRDDSGKFLNDYLDHKIFDTDPFVSIDKDGVGE

SEQ ID NO: 137558 - protein, 462 aa, Unknown
  Bacterial polypetide isolated from the Sargasso Sea
DIAEQWAKKGLDVILVRNETSPEDVHGMHAAKAILTAKGGMTSHAALVARGWGKCCIVGCSALQINYSESEMRIDDKIIKEGDWLTLNGSTGKIYNGQLNLIEPDLSSNKYYGILMDMTDSVKRLGIRANAESPDDAKQARDFGAKGIGLCRTEHMFFDPERILAVREMIIATEVSKRREAIMKLLPFQREDFKGILAAMSPYPVTIRLLDPPLHEFMTLNSQQKDELAKELDISLEALENRVRGLEELNPMLGHRGCRLGIAYPEITEMQSRAIFEATAELMKDKIEVAPEVMIPLVGTYKEYEHQEEIVRKVAEEVREESGENFSYLVGTMIELPRAALTANEIADKAEFFSFGTNDLTQTTYGFSRDDIGGFLPEYLEKGILDHDPFQSLDQTGVGQLVQMGVEKGREVRNDLKIGICGEHGGDPESISFCNRIGLDYVSCSPFRVPIARLSAAQAELK

SEQ ID NO: 137559 - protein, 456 aa, Unknown
  Bacterial polypetide isolated from the Sargasso Sea
DCATGVVFTRNPSDGLNEVYGEYLINAQGEDVVAGTRTPQYITKKARQDAKVKELSMEESMPKVFKELQKILAKLEKHYKDMQDVEFTVENNKLWMLQTRSGKRTAKSAIKIAVDMVKEKLISKKEAVLRIDPNSLDTMLHPTLDEKSSINVIAKGLPASPGAASGKVVFTSEEAERLTAMMQDTILVRVETSPEDIQGMHAAKGILTARGGMTSHAAVVARGMGRPCVSGSSEIDINYENKSFKTSSMVIKEGDIITIDGSTGRIIAGNVSTVKPEISGDFSKLMSWADSFRKLKVRTNSETPKDTKIAKDFGAEGIGLCRTEHMFFDEERILSVREMILSKTKEDRAIALEKLLPHQKKDFIEIFKIMNGLPVTVRLLDPPLHEFLPRTNKEINEVARIFNLPVKEVESRIEELHEQNPMLGHRGCRLGISFPEIYEMQCRAIFEALAELKKIK

SEQ ID NO: 137560 - protein, 13 aa, Unknown
  Bacterial polypetide isolated from the Sargasso Sea
WATERDIKINASE

SEQ ID NO: 137561 - protein, 13 aa, Unknown
  Bacterial polypetide isolated from the Sargasso Sea
WATERDIKINASE

SEQ ID NO: 137562 - protein, 13 aa, Unknown
  Bacterial polypetide isolated from the Sargasso Sea
WATERDIKINASE

SEQ ID NO: 137563 - protein, 13 aa, Unknown
  Bacterial polypetide isolated from the Sargasso Sea
WATERDIKINASE

SEQ ID NO: 137564 - protein, 13 aa, Unknown
  Bacterial polypetide isolated from the Sargasso Sea
WATERDIKINASE

SEQ ID NO: 137565 - protein, 13 aa, Unknown
  Bacterial polypetide isolated from the Sargasso Sea
WATERDIKINASE

SEQ ID NO: 137566 - protein, 13 aa, Unknown
  Bacterial polypetide isolated from the Sargasso Sea
WATERDIKINASE

SEQ ID NO: 137567 - protein, 13 aa, Unknown
  Bacterial polypetide isolated from the Sargasso Sea
WATERDIKINASE

SEQ ID NO: 137568 - protein, 723 aa, Unknown
  Bacterial polypetide isolated from the Sargasso Sea
MEAWAVQEYVLWYQELGMHDVGRVGGKNASLGEMISNLANAGVQVPGGFATTAEAFNEFLEQSGLEARIHEVLDSLDVDDVNALTEAGKNIRQWIIDTPFQGKLEEEIKTAFVTLQGDAGEEASFAVRSSATAEDMPDASFAGQQETFLNVKGYEAVLVAIKHVFASLFNDRAISYRVHQGYDHKGVALSAGIQRMVRSDIASSGVMFTIDTESGFEDVVFITSSFGLGEMVVQGAVNPDEFYVHKPTLDKGLPAIVRRNLGSKLTKMVYSDDEAHGKQVSIVDIDAADSKTFSLTDDEVMELAKQAQIIENHYKRPMDIEWAKDGADGKLYIVQARPETVRSREDSQSIERFQLKGQSNIVCEGRAIGHKIGAGVAKVLDSIEEMDKIQAGDVLVTDMTDPDWEPIMKKASAIVTNRGGRTCHAAIIARELGIPAVVGCGNATDTIKNGDKITVSCAEGDTGFIYGDELEFDVVTSRIDAMPDLPLKVMMNVGNPDRAFDFARLPNAGVGLARLEFIINRMIGVHPKALLNFDSQPEELKEEISDMIAGYESPTEYYIEKLVEGISTIGAAFSPEKVIVRMSDFKSNEYFNLVGGYQYEPDEENPMLGFRGASRYISEDFRDCFALECEAIKRVRNKMGLTNVEIMIPFVRTLEEGRQVIELLEEQGLKKGENGLRVIMMCELPSNALLADKFLDIFDGFSIGSNDLTQLTLGLDRDSGLIA

SEQ ID NO: 137569 - protein, 751 aa, Unknown
  Bacterial polypetide isolated from the Sargasso Sea
PGGFATTAYAFNQFLEQSGLNERIYQVLDGLNVDDVNALAKAGAQIRQWVIDTPFQTEFEHAIQTSYQQLQHGCAEDVSFAVRSSATAEDMPDASFAGQQETFLNVRGYAQVIEAIKHVFASLFNDRAISYRVHQGYDHRGVALSAGVQRMVRSDLSASGVMFSIDTESGFEDVVFVTSSYGLGEMVVQGAVNPDEFYVHKPTVMAGRPAVVRRNLGSKLLQMVYSKDLTHGKQVVVEDVPVANRQKFSLTDAEVQELAKQAIIIEKHYGRAMDIEWAKDGQDGKLYIVQARPETVRSREDSNEMERFQLQGTAPIVVEGRAIGHKIGSGKAKVLASIADMDQIQPGDVLVTDMTDPDWEPIMKRASAIVTNRGGRTCHAAIIARELGIPAVVGCGDATKKIKNGQDVTVSCAEGDTGFVYDGILGFDVMTSRVDQMPALKMKIMMNVGNPERAFSFAKLPHAGIGLARLEFIINRMIGVHPKALLNFDAQSDELKATISQMMAGYSSPVEFYVGKLTEGISTLAAAFSPERVIVRMSDFKSNEYANLIGGQQYEPHEENPMIGFRGASRYISADFRDCFAMECEALKRVRNEMGFTNVEVMIPFVRTLEEAKAVIELLEAHGLKRGENGLKVIMMCELPSNCLLAEEFLEYFDGFSIGSNDLTQLTLGLDRDSGLIAHLFDERNPAIKKLLSMAIQTAKAKGKYVGICGQGPSDHEDFAAWLMDQGIDSVSLNPDTVLETWLYLAEKYGQ

SEQ ID NO: 137570 - protein, 456 aa, Unknown
  Bacterial polypetide isolated from the Sargasso Sea
VRSREDSNEMERFQLQGTAPIVVEGRAIGHKIGSGKAKVLASIADMDQIQPGDVLVTDMTDPDWEPIMKRASAIVTNRGGRTCHAAIIARELGIPAVVGCGDATKKIKNGQDVTVSCAEGDTGFVYEGILGFDVMTSRVDQMPALKMKIMMNVGNPERAFSFAKLPHAGIGLARLEFIINRMIGVHPKALLNFDAQTDELKATISQMMAGYSSPVEFYVGKLVEGISTLAAAFSPERVIVRMSDFKSNEYANLVGGRQYEPHEENPMIGFRGASRYISEDFRDCFAMECEALKRVRNEMGFTNVEVMIPFVRTLEEAKAVIELLEAHGLKRGDNGLKVIMMCELPSNCLLAEEFLEYFDGFSIGSNDLTQLTLGLDRDSGLIAHLFDERNPAIKKLLSMAIQTAKAKGKYVGICGQGPSDHEDFAAWLMDQCIDSVSLNPDTVLETWLYLAEKYGQ

SEQ ID NO: 137571 - protein, 13 aa, Unknown
  Bacterial polypetide isolated from the Sargasso Sea
WATERDIKINASE

SEQ ID NO: 137572 - protein, 13 aa, Unknown
  Bacterial polypetide isolated from the Sargasso Sea
WATERDIKINASE

SEQ ID NO: 137573 - protein, 13 aa, Unknown
  Bacterial polypetide isolated from the Sargasso Sea
WATERDIKINASE

SEQ ID NO: 137574 - protein, 13 aa, Unknown
  Bacterial polypetide isolated from the Sargasso Sea
WATERDIKINASE

SEQ ID NO: 137575 - protein, 13 aa, Unknown
  Bacterial polypetide isolated from the Sargasso Sea
WATERDIKINASE

SEQ ID NO: 137576 - protein, 13 aa, Unknown
  Bacterial polypetide isolated from the Sargasso Sea
WATERDIKINASE

SEQ ID NO: 137577 - protein, 13 aa, Unknown
  Bacterial polypetide isolated from the Sargasso Sea
WATERDIKINASE

SEQ ID NO: 137578 - protein, 13 aa, Unknown
  Bacterial polypetide isolated from the Sargasso Sea
WATERDIKINASE

SEQ ID NO: 137579 - protein, 13 aa, Unknown
  Bacterial polypetide isolated from the Sargasso Sea
WATERDIKINASE

SEQ ID NO: 137580 - protein, 13 aa, Unknown
  Bacterial polypetide isolated from the Sargasso Sea
WATERDIKINASE

SEQ ID NO: 137581 - protein, 13 aa, Unknown
  Bacterial polypetide isolated from the Sargasso Sea
WATERDIKINASE

SEQ ID NO: 137582 - protein, 13 aa, Unknown
  Bacterial polypetide isolated from the Sargasso Sea
WATERDIKINASE

SEQ ID NO: 137583 - protein, 13 aa, Unknown
  Bacterial polypetide isolated from the Sargasso Sea
WATERDIKINASE

SEQ ID NO: 137584 - protein, 13 aa, Unknown
  Bacterial polypetide isolated from the Sargasso Sea
WATERDIKINASE

SEQ ID NO: 137585 - protein, 13 aa, Unknown
  Bacterial polypetide isolated from the Sargasso Sea
WATERDIKINASE

SEQ ID NO: 137586 - protein, 13 aa, Unknown
  Bacterial polypetide isolated from the Sargasso Sea
WATERDIKINASE

SEQ ID NO: 137587 - protein, 13 aa, Unknown
  Bacterial polypetide isolated from the Sargasso Sea
WATERDIKINASE

SEQ ID NO: 137588 - protein, 13 aa, Unknown
  Bacterial polypetide isolated from the Sargasso Sea
WATERDIKINASE

SEQ ID NO: 137589 - protein, 13 aa, Unknown
  Bacterial polypetide isolated from the Sargasso Sea
WATERDIKINASE

SEQ ID NO: 137590 - protein, 13 aa, Unknown
  Bacterial polypetide isolated from the Sargasso Sea
WATERDIKINASE

SEQ ID NO: 137591 - protein, 13 aa, Unknown
  Bacterial polypetide isolated from the Sargasso Sea
WATERDIKINASE

SEQ ID NO: 137592 - protein, 13 aa, Unknown
  Bacterial polypetide isolated from the Sargasso Sea
WATERDIKINASE

SEQ ID NO: 137593 - protein, 13 aa, Unknown
  Bacterial polypetide isolated from the Sargasso Sea
WATERDIKINASE

SEQ ID NO: 137594 - protein, 13 aa, Unknown
  Bacterial polypetide isolated from the Sargasso Sea
WATERDIKINASE

SEQ ID NO: 137595 - protein, 209 aa, Unknown
  Bacterial polypetide isolated from the Sargasso Sea
MGGHSIDDKEPKYGFSVTGIIKDNPLLNNSISDKDSLYITKPLGIGIIATAIKKDIASEEEILEATNTMVGLNKEALRFAKDHNANALTDITGFGLLGHLSEMIRDTKLSAEINSEKIPVINGVKELLGKDIYPSGSQRNFASVKDKLIYKIEDEKIKLFCDAQTSGGLLISLPSNSAINPKEVKQTYGIDIWEIGEINTKYNEKINII

SEQ ID NO: 137596 - protein, 178 aa, Unknown
  Bacterial polypetide isolated from the Sargasso Sea
AEIGDALVLTKPLGTGIIATAIKKGLASASAIDAAIDMMTTLNKQSAETLKEFNVNAVTDVTGFGLLGHLKEMCDGSQVSAEIQFSQLIFLPSVMDYANSGIIPGGTKRNLDYLNRYVSFDKRISNTEKLLTADAQTSGGLLVSLPIEEAKLFIQKMNGSSFIIGRIKEKNSFLIKVK

SEQ ID NO: 137597 - protein, 183 aa, Unknown
  Bacterial polypetide isolated from the Sargasso Sea
DIYAMGGKPLFALNILGFPVNDFPKEIVSKILQGGADKASEAGISIVGGHSIDDKEPKYGLVVTGEVLKDDLIQNKGAKPGDVLLLTKPLGTGIISTGIKKEKANPDSIKQAEDSMATLNKLAGSILSKFSVNAATDVTGFGLLGHAAEMCKSSNVSFEINYNDIKFFSGVNELAKQDIVPGG

SEQ ID NO: 137598 - protein, 230 aa, Unknown
  Bacterial polypetide isolated from the Sargasso Sea
WSESANNGGWVVAGGHTVDGPEPMYGMSLVGEIDENAALTNSGGREGQALVLTKPLGTGLLATALKRSEPEAIQDGGRLQQIYTAGVREMTRLNAAAAEAALQAEASAATDVTGFGLLGHLHELVSASGLSAFIESEVVPRLPDVADLVDEGFVAGGTERNLDYLEPHLSGGSPTDRLIMCDAQTSGGLLFSCDPAAAMEAVTELRNGGHMAAVIGGLESGTPGQITLRN

SEQ ID NO: 137599 - protein, 275 aa, Unknown
  Bacterial polypetide isolated from the Sargasso Sea
GVIDIGNEIRVFQTVDFFTPILDNPFDWGKVAAANALSDIYAMGGTPISSLQLVSWPREDLSFEILSEVLKGGLEIMQSAGCNIIGGHSIDDKEPKYGFAVTGIINDVIYKKRNLQVGDKLFLTKPLGSGIISSAIKKNIASEKAVSEVTEVMTTLNDKALEAAKELNANAITDVTGFGLLGHLIEMIGDSEVTVNIYSDNVPVIEHAKEYFNNGVYPSGSKRNFDSAKENIIYSDDQESFVKILSDAQTSGGLLISAPNDNSIDLDDISDRLGS

SEQ ID NO: 137600 - protein, 237 aa, Unknown
  Bacterial polypetide isolated from the Sargasso Sea
MQTNQLTHILAGALLAHSQAGVRVVGGHTSEGGSLSVGFAITGFTDKLPAEIILNKDEDLRIILTKPLGIGVIMAAQMQMRVNANSVDDAIATMYQSNRQAADIFMQNNIIAATDVTGFGLARHAQNLAVRAGISGCAIDLDALPLLAGVTRLFDAGIKSSLHEQNQLAVTIHDDKTQYESRRAVLFDPQTSGGLLGVFRLKDAENALSALVKTGHKAAAIGQLDRQFVGIKLTNGR

SEQ ID NO: 137601 - protein, 176 aa, Unknown
  Bacterial polypetide isolated from the Sargasso Sea
MTDTPTPTSSSPRLTSLSHGGGCGCKIAPGLLADLLKRSAPLPFFPDLLVGNDTADDAAVYKLNDEQAIVATTDFFMPIVDDPFDFGRIAATNALSDVYAMGGKPIMALAIVGMPINVLPHDVIAAVLKGGESVCAEAGIPLAGGHSIDSVEPIYGLVAIGVVDPRRVKRNAGARA

SEQ ID NO: 137602 - protein, 151 aa, Unknown
  Bacterial polypetide isolated from the Sargasso Sea
SQLSIDTAVEVMSMLNKNAVDKLDGLDVNAVTDITGFGLLGHLKEICENSNVSSEINFNDIEFLPEVIELAESGIMAGGTRRNLEYAKEFVQFDHHLGNLKQLLSADAQTSGGLLISLPRKDAESYVEKMGTSSRIIGQIVDKSSFFIKVN

SEQ ID NO: 137603 - protein, 252 aa, Unknown
  Bacterial polypetide isolated from the Sargasso Sea
AKPLFVLNLVGFPRHLLTEGILDEIIRGASAVTSSVGVPTLGGHSIDDAEPKYGLVAIGEVDPTLMVTNASAGAGDALVLTKPIGSGVIATAIKNGEAPENVIKSAVGFMTQLNADAANVMVTNGVTAATDVTGFGLLGHLRGLMRASKASAKLNANAVPVLPGAKMLAEAGHVPGGSKRNLADLASDVHFSPSVDEVTKILLSDAQTSGGLLMSVPQEILKDVENGLEKTSCTAAVIGRVVQGQAGTIEVI

SEQ ID NO: 137604 - protein, 185 aa, Unknown
  Bacterial polypetide isolated from the Sargasso Sea
IVQSVDFFSPIVDDPYQFGQIAAANALSDIYAMGAKPLFALNIVGFPINELPKEVLSSILKGGSDKAEEAGIPIVGGHTIDDKEPKYGLVVTGEVKKSRLIKNSGAQEGDALVLTKPLGSGIISTAIKNEIASKEMINDVTNCMSTLNAFAGELMHEFSVNASTDITGFGLLGHLYEMCKASKVT

SEQ ID NO: 137605 - protein, 152 aa, Unknown
  Bacterial polypetide isolated from the Sargasso Sea
KDEDSQIAVNAMCQLNSIGAKIAKIKGVNALTDVTGFGLAGHLLEVCQGAKLTAKLNLDAVPLLPRALDYLAQGCIPGGTHRNYDSYGEHLPTLTDHQKAILCDPQTSGGLLVAVSSEAEAELVALLNAHQIEPICIGSLETPTSTANVVLC

SEQ ID NO: 137606 - protein, 289 aa, Unknown
  Bacterial polypetide isolated from the Sargasso Sea
KAIIQTVDFFTPIVDDPFSFGEIAAANSLSDIYAMGGKPLFALNIVAFPKNLNKDILVNILKGGESKCSEAKIPILGGHSIYDDEPKYGLVVTGEIKPNEIISNDNAKIDESIVLTKPIGTGIISTAIKKDVINKKNMDLAISIMKNLNSKSSELMKKYNASAATDVTGYGLVGHLIEMAKGSKLTAKIKFNKINFIDGVKNLVEKNIVPNGTKRNLEFYKSSMIYKSKLTHNDKLLLCDSQTSGGLLISIPKKNVSSFINECNKSSLYNAVEIGYFTNLNENKFLIIE

SEQ ID NO: 137607 - protein, 186 aa, Unknown
  Bacterial polypetide isolated from the Sargasso Sea
GMMPGDRLILTKALGTGTLFAADMQQKAKGRWIQDALKSMLLSNRVAASLVYEHGATACTDITGFGLLGHMVEMIRPSEVDVDIHMDRLPILDGAEETVEMGILSSLQPANIRLRRAIRNREDAVQSNRFPLMFDPQTSGGLLASVPAAQADTCVEALHAAGFMAAAVVGEVKPESEHLEPVMLLN

SEQ ID NO: 137608 - protein, 308 aa, Unknown
  Bacterial polypetide isolated from the Sargasso Sea
AAVWRLDDNRSLVVTADFITPVVDDARTWGRVAAANAVSDVYAMGGRPLLALNLVGWNSEELSTELLGDVLLGAQDVADAGGFVIAGGHTVDDPEPKFGLAVVGEADPDRLLTNAGFRAGDVLVLTKPLGVGVITTAIKRGDAPAEVVDAAVASMTRLNDEAARVALAVGATGATDVTGFGLLGHLGRAMAESSVDGVVEVSMVPLLPGTRELAESGAVPGGSRRNLAWAEDLLDRGLDRGDHGELEALLMADAQTSGGLVFGVSSNRIDEAMAALLATGHTAAVIGHVLSPAEELSADSGTARLRLT

SEQ ID NO: 137609 - protein, 205 aa, Unknown
  Bacterial polypetide isolated from the Sargasso Sea
IDDKEPKYGFAVTGIVNEKIYTKTNIKNGDKLFLTKPLGSGIIATAIKKGVADEEAINQVTNVMTTLNDAGLEVAKHLNANAITDVTGFGLLGHLSEMLIDEKLSANLIFDKVPIIEFAKNYFHSGIYPSGSQRNFDSVKDFISFEDQDEALLLADAQTSGGLLISAPAETDIDLIEIEKIYGVFLKEIGNITDRYNQKINIISS

SEQ ID NO: 137610 - protein, 304 aa, Unknown
  Bacterial polypetide isolated from the Sargasso Sea
VVLGFEGADDAPAIKINDGKLLVQTVDFFTPVVDNPYDFGQISAANSLSDIYAMGADPLFALNIAGFPIKDLPKSMLTEILQGGADKANEAGIPIVGGHSIDDKEPKYGLVVTGEIHEKKMWKNSGAQPGDYVVLTKPLGTGVIATAIKKGRVSDKSINAAVTCMSMLNKNAANGLKELNVHAATDVTGFGLLGHLAEICKGSNVSAEIYFSELDFLPSVLKLAESGIIPGGTKRNFEYLKSDIIFNPKLNSIEQLLTCDAQTSGGLLVTLPPEDAETYVSSICSDAKIIGHISDKKSTLIKVT

SEQ ID NO: 137611 - protein, 227 aa, Unknown
  Bacterial polypetide isolated from the Sargasso Sea
EKIQSRLISELLSGATQEFNSHNIKLNGGHTSEGEELQVGFCISGIRPKSFKSKAPKVGDKLILTKPLGTGVILAANMRLKINPIEYKNTIETMLNSNLNAANIIRNESISAITDVTGFGLARHTLNLTKPFGANLSIKDIPVLSGALEHLSNNIHSSLAFSNKKAINFTSKISRQDHIIFDPQTSGGLLVSVNKVKANQVLEKLKKSNHHASIIGEVIEKYEIILN

SEQ ID NO: 137612 - protein, 652 aa, Unknown
  Bacterial polypetide isolated from the Sargasso Sea
ETYDRSQTEIDLLNLCKFSNSRLVIDKVIGLDLDEKLVILENRAPIIFDTLSINSGGEPNLGYIKGANEFSIPIKPISKLVKIIDVIKEKIKKLNGISISVVGGGAGGIELALALTQYLKTKQNIKEFKVNLISKGQYLAKAKNKISQNTILSFLKNNNINVILNEEVIEFGESFIKTSKGTIINSKFNFLVTPISAPTWISETGLRLDNSGFIRVNKFLQTSNENIFASGDVSSFENKNLPKAGVYAVRQGPILYKNLRAKILNYSLTSFKPQNSFLSLIGNGKDEAIFSWKGISFKSKFAWMLKRYIDESFMKKYNHLNLMKMESIQPHPKLISKENKGDPALEKIRCLGCGAKAPWTSLNNGINSVVDNLNSKSNKLNNVTITSDATIIEVPSGNNLVQSVDLISAIVNDPYTLSRIAAIHAISDVLSASATPMNAEAIFILPPGLQKIQSRLISELLNGASYEFNSHNIKLNGGHTSEGEELQVGFCISGIRPKSFKSKEPKVGDKLILTKPLGTGVILAANMRLKINPIEYKNTIETMLNSNLNAANIIRNENISAITDVTGFGLARHTLNLTKPFGANLSIKDIPVLSGALEHLSNNICSSLAFSNKKAINFTSRISKQDHIIFDPQTSGGLLVSVNKIKANQVLE

SEQ ID NO: 137613 - protein, 144 aa, Unknown
  Bacterial polypetide isolated from the Sargasso Sea
MATLNKLAGSILSKFSVNAATDVTGFGLLGHAAEMCKSSNVSFEINYNDIKFFSGVNELAKQDIVPSGSKRNLSYAKQYTNFSDSISQIERLMVADAQTSGGLLISLPKDNVNNFLEYYNSKSTIPAFQIGSVNARKKSLITIS

SEQ ID NO: 137614 - protein, 228 aa, Unknown
  Bacterial polypetide isolated from the Sargasso Sea
AREVIRGGRAVCDEAGIPLAGGHSIDAPEPIFGLAVTGLVSKANMKRNDTATAGCKLYLTKPLGIGILTTAEKKAKLRDADVGLARDWMCTLNKPGSRFGKLAGVRAMTDVTGFGLLGHLVEMADGSGLSTRVEFARVPRLASVEHYLEQGCVPGGTLRNFDSYGDKIAPLPELAKLLLCDPQTSGGLLIAVAPEGEAEFLAVSAELGLSLAPIGEMVERQRYAVEVL

SEQ ID NO: 137615 - protein, 225 aa, Unknown
  Bacterial polypetide isolated from the Sargasso Sea
MSDSPVTLPESIKLTEYSHGAGCGCKISPKVLSTILASQLPVFTDPNLLVGNQSRDDAAVYKLNDEIGIISTTDFFMPIVDDPFTFGRIAATNAISDIYAMGGTPIMAIAILGWPINKLPAEIAQQVVDGGRQACMEAGIMLAGGHSIDAPEPIFGLAVTGQIALSDLKQNDTAKAGDRLYLTKPIGIGILTTAQKQKKLHDEDSLIAVNAMCQTHSIGTKIAKN

SEQ ID NO: 137616 - protein, 177 aa, Unknown
  Bacterial polypetide isolated from the Sargasso Sea
MRSEDIRLTQYSHGAGCGCKIAPDVLSRILAEADGGAPANAFPSLLVGHQSRDDAAAVILDEDRAVLSTTDFFMPIVDDPYDFGRIAATNAISDIYAMGGTPQLAIAILGWPIEKLAPEIANQVVQGGRDVCAQLGFPLAGGHSIDAPEPIFGLAVTGTKARAHLKQNDAACAHDLL

SEQ ID NO: 137617 - protein, 288 aa, Unknown
  Bacterial polypetide isolated from the Sargasso Sea
GPDDLTQVLGKVVQKKDSRVIVGYDNSDDAAVIRLQGDKFIIQTVDFFTPIVDDPYMFGQIAAANSISDIYAMGGKPLFALNILGFPVNDFPKDIVSQILQGGADKASEAGISIVGGHSIDDREPKYGLVVTGEVLKDDLIQNKGAKPGDVLLLTKPLGTGIISTGIKKEKANPDSIKQAEDSMATLNKLAGSILSKFSVNAATDVTGFGLLGHAAEMCKSSNVSFEINYNDIKFFSGVNELAKQDIVPGGSKRNLSYAKQFTNFADSISHIERLMVADAQTSGGLLI

SEQ ID NO: 137618 - protein, 291 aa, Unknown
  Bacterial polypetide isolated from the Sargasso Sea
RRSERSCWPTTGDDAAVYRITDDRALVVTADFFTPIVDDPYDFGRIAATNALSDIYAMGAKPLFVLNLLGFPRHLLTEGILDEIIRGASAVTSSVGVPTLGGHSIDDNEPKYGLVAIGEVDPTQMVTNASARVGDALVLTKPIGSGVIATAIKSGEAPEKVIKSAVDFMTQLNADAASVMVSYGVTAATDVTGFGLLGHLRGLMRASKTSAKLNADAVPVLPGAKMLAEAGHIPGGSKRNLADLASDVHFSPSIDEVTKILLADAQTSGGLLMSVPEERLKDVGDGLAKTS

SEQ ID NO: 137619 - protein, 270 aa, Unknown
  Bacterial polypetide isolated from the Sargasso Sea
VIVGYDNSDDAAVIRLQGDKFIIQTVDFFTPIVDDPYMFGQIAAANSISDIYAMGGKPLFALNILGFPVNDFPKDIVSQILQGGADKASEAGISIVGGHSIDDREPKYGLVVTGEVLKDDLIQNKGAKPGDVLLLTKPLGTGIISTGIKKEKANPDSIKQAEDSMATLNKLAGSILSKFSVNAATDVTGFGLLGHAAEMCKSSNVSFEINYNDIKFFSGVNELAKQDIVPGGSKRNLSYAKQFTNFADSISQIERLMVADAQTSGGLLIS

SEQ ID NO: 137620 - protein, 217 aa, Unknown
  Bacterial polypetide isolated from the Sargasso Sea
MKSEGIRLTQYSHGAGCGCKIAPDVLSRILAETDGGASNATFPSLLVGHQSRDDAAAVILDEDRAVLSTTDFFMPIVDDPYDFGRIAATNAISDIYAMGGTPQLAIAILGWPIDTLAPEVANQVVQGGRDVCAQLGFPLAGGHSIDAPEPIFGLAVTGTVARAHLKQNDAACADDLLILTKPLGIGIHTTAEKQGKLQTAHRGLATELMCQSNQVGA

SEQ ID NO: 137621 - protein, 208 aa, Unknown
  Bacterial polypetide isolated from the Sargasso Sea
GGHSIDAPEPIFGLAVTGLVAKRNMKRNDTATAGCKLYLTKPLGIGILTTAEKKAKLRDADIGLARDWMCTLNKPGSRFGKLAGVRAMTDVTGFGLLGHLVEMADGSGLSARVEFARVPRLASVEHYLEQGCVPGGTLRNFDSYGDKIAPLPELAKLLLCDPQTSGGLLIAVAPEGEAEFLAVAAELGLDLAPIGEMVERQRYAVEVL

SEQ ID NO: 137622 - protein, 297 aa, Unknown
  Bacterial polypetide isolated from the Sargasso Sea
MSSIRLTQYSHGAGCGCKISPKVLDTILKSQIPGFDDPTLVVGNSSKDDAAVVDIGNGQGIVSTTDFFMPIVDDPFTFGRIAATNAISDIYAMGGKPIVAIAILGWPINTLAPEVAQQVIDGGRQVCHEAGISLAGGHSIDAPEPIFGLAVTGIVPLNAIKQNDTAKVGDTLYLTKPLGIGILTTAQKKGKLKPEHEQLAPNAMCTLNKIGQRFAELPGVHAMTDVTGFGLAGHLLEMCEGSGVSARLNFKALPLLDEVDYYLSEGCVPGGTLRNFDSYGDKLDAMDDRTRNILCDP

SEQ ID NO: 137623 - protein, 241 aa, Unknown
  Bacterial polypetide isolated from the Sargasso Sea
LGWPVSKLPPELAQQVLEGARQTCKAAGIMLAGGHSIDAPEPIFGLAVNGRVSIEQLKRNDTAKAGDRLYLTKPLGVGILTTAQKQKKLLPEHAILARDTMVQLNRIGADIAKIDGIHAMTDVTGFGLLGHLLEMCEGSGLYAELDSHAVPVLPFVPDYIAKGCIPGGSGRNFASYGGKVSPLSSEQQALLCDPQTSGGLLVAVSPQAEAAFIHLAVAYDLALQPIGELKARGRGHRIRVR

SEQ ID NO: 137624 - protein, 352 aa, Unknown
  Bacterial polypetide isolated from the Sargasso Sea
MSNCAVSPTDSIKLTEYSHGAGCGCKISPKVLTTILASQLPVFTDPNLLVGNQSRDDAAVYKLNDEIGIISTTDFFMPIVDDPFTFGRIAATNAISDIYAMGGTPMMAIAILGWPINKLPAEIAQQVVDGGRQACMEAGIMLAGGHSIDAPEPIFGLAVTGQIALTDLKQNDTAKTGDRLYLTKPIGIGILTTAQKQKKLKDEDSHIAVNAMCQLNSVGAKIAKIKGVNALTDVTGFGLAGHLLEMCQGAKLTAKLTLDAVPLLPRALDYLAQGCVPGGTHRNYDSYGEHLPTLTDYQKAILCDPQTSGGLLVAVSNEAEAELVALLNAHQIEPICIGSLETPTSTANVVLC

SEQ ID NO: 137625 - protein, 352 aa, Unknown
  Bacterial polypetide isolated from the Sargasso Sea
MSNSAVSSADSIKLTEYSHGAGCGCKISPKVLTTILASQLPVFTDPNLLVGNQSRDDAAVYKLNDEIGIISTTDFFMPIVDDPFTFGRIAATNAISDIYAMGGTPMMAIAILGWPVNKLPAEIAQQVVDGGRQACMEAGIMLAGGHSIDAPEPIFGLAVTGQIALTDLKQNDTAKAGDRLYLTKPIGIGILTTAQKQKKLKDEDSQIAVNAMCQLNSIGAKIAKIKGVNALTDVTGFGLAGHLLEVCQGAKLTAKLNLDAVPLLPRALDYLAQGCIPGGTHRNYDSYGEHLPTLTDHQKAILCDPQTSGGLLVAVSSEAEAELVALLHAHQIEPICIGSLETPTSTANVVLC

SEQ ID NO: 137626 - protein, 214 aa, Unknown
  Bacterial polypetide isolated from the Sargasso Sea
MSDTFAIKLTEYSHGAGCGCKISPQVLDKILQSSLTFSDPGLLVGNSSKDDAAAYALGDGTAILSTTDFFMPIVDDAFDFGRIAATNAISDIYAMGGKPLLAIAILGWPVNRLPPELAQQVLEGARHTCKDAGIVLAGGHSIDTPEPIFGLAVTGRVDINYLKRNNTAKAGDRLYLTKPLGIGILTTAQKQKKLQHNHSDIARDTMVQLNRMAP

SEQ ID NO: 137627 - protein, 345 aa, Unknown
  Bacterial polypetide isolated from the Sargasso Sea
MSSIRLTQYSHGAGCGCKISPKVLDTILKSQIPGFDDPTLVVGNSSKDDAAVVDIGNGQGIVSTTDFFMPIVDDPFTFGRIAATNAISDIYAMGGKPIVAIAILGWPINTLAPEVAQQVIDGGRQVCHEAGISLAGGHSIDAPEPIFGLAVTGIVPLNAIKQNDTAKVGDTLYLTKPLGIGILTTAQKKGKLKPEHEQLAPNAMCTLNKIGQRFAELPGVHAMTDVTGFGLAGHLLEMCEGSGVSARLDFKALPLLDEVDYYLSEGCVPGGTLRNFDSYGDKLDAMDDRTRNILCDPQTSGGLLVAVGKESEAELLAIAAQAGLTLSPIGQLQARTGNQFIEVVQ

SEQ ID NO: 137628 - protein, 354 aa, Unknown
  Bacterial polypetide isolated from the Sargasso Sea
MTEATQAQPAVPRLTSLSHGGGCGCKIAPGVLSELLKRATPPALFPDLLVGTETSDDAAVYRLNDEQAIVATTDFFMPIVDDPFDFGRIAATNALSDVYAMGGKPILALALVGMPINVLPHETIAAVLRGGESVCADAGIPVAGGHSIDSVEPIYGLAAIGVVHPSRVKRNAAARAGDVLVLGKPLGVGVLSAALKKNQLDADGYAQMVATTTKLNRPGAELAALPGVHALTDVTGFGLLGHTLELARGAHLTARVHYASLPWLAGVEAFVADGVFTGASGRNWAAYGADVQLAATLPPVAQALLTDPQTSGGLLVACAPEAVDDVLACFRADGFDRAGVIGEMVDGPARVDVA

SEQ ID NO: 137629 - protein, 124 aa, Unknown
  Bacterial polypetide isolated from the Sargasso Sea
MTIKSSQELVENALQEIKTLSVDDALKLVQEDKCNLVDIRDIRELDKEGRIHNSAHIPRGMLEFWMDPQSAYFKNGKIDMKKEIVLFCAGGLRSALATKSLKDMGYKNVSHIDGGFSSMKNKGF

SEQ ID NO: 137630 - protein, 314 aa, Unknown
  Bacterial polypetide isolated from the Sargasso Sea
ADLTQKDKMFEPRTDGQVLGINYDSLEMVWYLSEEKMGSIMELIEKLREEGEGTAREIKKLCGKLVDIRDLVEGAKYYLAHLIMAANVFTEKEDMEKMVQVEEWLEKDLCFFSMVLPVYSRRTELQDPDKRAMAGSPKAYTDAAGGSRTNVGRGVGILVENKIWTYVPWGRRINEGWRAYDGKSLAHKMSAWELVGPLLVVSCTGNVLSGKQVEIFVDNDGSVRMWNKGWTTKCDLCNTILLAIHQISAALDIEVFVSGIARCSTFEADAADALSKCDLERFWRLAPGAEVVPREVPGALLRWLENPVAGQEAR

SEQ ID NO: 137631 - protein, 97 aa, Unknown
  Bacterial polypetide isolated from the Sargasso Sea
ALEQIEQHKAVVVDIRDEQSYASGHIAGSFHLTNGSLNQFMQQTDFETPVVVVCYHGNSSQGAAQYLAQQGFETVFSMDGGFEAWRSQLPFVTESHD

SEQ ID NO: 137632 - protein, 109 aa, Unknown
  Bacterial polypetide isolated from the Sargasso Sea
MSEFKRISPQQAQELRTQGAVVVDIRDPQSFANGHISGSRHLDNHSLHDFISHADLDAPLIVSCYHGNSSQSAAAYLVGQGFSEVYSLDGGFELWRATYPSETAQSSEE

SEQ ID NO: 137633 - protein, 103 aa, Unknown
  Bacterial polypetide isolated from the Sargasso Sea
MTTFSHISVNDVANFEGNVTIVDIRDPQSFANGHMPNAAPLNNDNFGTFIDQTPKDIPVVVVCYHGVSSQQAAQVIAQQGFETVYSMDGGFEAWRQANPVVTE

SEQ ID NO: 137634 - protein, 108 aa, Unknown
  Bacterial polypetide isolated from the Sargasso Sea
MDQFECINVEEAHQKLHQGSAVLVDIRDPQSYAMGHAPQAFHLTNDTLGSFMREHDFDTAVLVMCYHGNSSKGAAQYLLQQGYDAVYSVDGGFDAWHRHFPAEVAYGL

SEQ ID NO: 137635 - protein, 103 aa, Unknown
  Bacterial polypetide isolated from the Sargasso Sea
MTTFSHISVNDVANFQGDVTIVDIRDPQSFANGHMPNAAQLNNDNFAAFIDQTPKDIPVVVVCYHGVSSQQAAQVIAQQGFETVYSMDGGFEAWRLANPVVTA

SEQ ID NO: 137636 - protein, 107 aa, Unknown
  Bacterial polypetide isolated from the Sargasso Sea
MDQFAHISAHDAHQKLAAGAARLVDIRDPQSFETAHAVGAFHLTNGTLVRFMNEVDFDTPVIVMCYHGNSSQGAAQYLLQQGYDEVYSLDGGFEAWRREFPIQAGDA

SEQ ID NO: 137637 - protein, 253 aa, Unknown
  Bacterial polypetide isolated from the Sargasso Sea
YRPAETDHQNNLSGEVRTDWVLDEVRSLFDLSFNDLLFKAQNIHRVWFNPNKVQMSTLLSIKTGGCPEDCGYCSQSVKFDTGLDASALMKVEEVLKAARQAKDGGATRFCMGAAWRNPKDRDMEAICAMIEGVKSLGMESCATLGMLTAQQAEELKAAGLDYYNHNIDTSRRYYKEIISTRTMDDRIETLNYVRSAGLNVCCGGIVGMGESRDDRIDMLHALATMALHPQSVPINMLVRVEGTPLGESNNLDS

SEQ ID NO: 137638 - protein, 197 aa, Unknown
  Bacterial polypetide isolated from the Sargasso Sea
MANATFSAPQPIQIHRPVPAPAVQGEWSVEAIQALLDKPLMDLLFEAQTVHRQHWPAGDIELATLLSVKTGGCPENCGYCPQAAEFDTGVKAEKLMEVDEVVRAAQAAKNAGATRFCMGAAWRAPKDRDIEKVSALIGAVKGLGLQTCATLGMLESHQAQALKDAGLDYYNHNLDTAPEYYTDVVSTRAYQDRLDTL

SEQ ID NO: 137639 - protein, 265 aa, Unknown
  Bacterial polypetide isolated from the Sargasso Sea
VLTGPQAARYQTGLQREKLMNVNDVLKQAKQAKKEGSSRFCMGAAFREVKDNQDFEDILSMVSGVKELGMEACCTLGMVTEAQAKRLKEAGLTAYNHNLDTSEEHYKKVISTRGYSDRLNTIANVAKAGISVCCGGIIGLGEGPEDRLKLIETLANLETPPESIPINTLVPVKGTPLEKQEPVDIFDWIKIIAITRIAIPKARIRLSAGRLDLSKEGQAFAFMAGANSIFAGEKLLTTGNPVWEEDNKLLEKLNIKSPKAVLEPA

SEQ ID NO: 137640 - protein, 221 aa, Unknown
  Bacterial polypetide isolated from the Sargasso Sea
AAWRAPKDRDIEKMNVLISAVKGLGLQTCATLGMLQPHQAKALHDAGLDYYNHNLDTAPEYYQDVVSTRQYQDRLDTLAAVRNAGISVCCGGIIGMGETEVHRAGLIAQLANMEPYPESVPINSLVRVPGTPLADSEPVDPLDFVRVIAVARITMPQARVRLSAGRQQLGEAVQTLCFMAGANSIFYGDKLLVTGNPDADADRQLLHKLGLHGLQTQTSAA

SEQ ID NO: 137641 - protein, 215 aa, Unknown
  Bacterial polypetide isolated from the Sargasso Sea
MGVVRHDWTNEEVEALYNRPLLDLVYDAASVHRANHDPRQVQQCTLLSIKTGGCPETCNYCAQSSSWKEDTGLKAEKLMGADDVLAAAKRAKEAGSTRFCMGTAWRGPSQVGKGQFERVLGMVSEVRDMGMEVCATLGMLNHEQARQLREAGLTAYNHNVDTSPEFYPKVTTSRNYEDRLNTIAAVREAGISVCCGGILGLGEEEKDRASMLRVL

SEQ ID NO: 137642 - protein, 180 aa, Unknown
  Bacterial polypetide isolated from the Sargasso Sea
ESGLDFYNHNLDTSEKFYSKIISTREYQERIDTINNVRQTGMSVCCGGIIGMGETREHRAELIANLSDLNPYPESVPINHLIPVKGTPLEKQQGVDPIEFVKTIAISRIMMPKSRVRLSAGRQELGKSIQAMCFIAGANSIFIGDKLLTTANPETHDDLKLLAELGLKPKINSISSETNC

SEQ ID NO: 137643 - protein, 314 aa, Unknown
  Bacterial polypetide isolated from the Sargasso Sea
MNKKIANWSLEDIEALYHLPFNDLIYKAQTIHRENHDPNKIQVSTLMSIKTGGCPEDCKYCSQSIKYNTEVEIEKLLSVEDVVAQARAAKDSGASRFCMGAAWRNLNDSNLSKIKDMVKAVKNLNLETCLTLGMLKKEQAESLKECGLDYYNHNLDSSEEYYSKVVSTRTYRDRLDTLSYVRDAGIKVCTGGILGLGEENIDRLKLIEVLCNMEEQPESVPMNKLVKIEGTPYSDNENVDNFDFIKVIAIARITMPKTYVRLSAGRDTMNDEMQALCFFAGANSIFYGDELLTTKNSSINHDKNLLDKLRIKTI

SEQ ID NO: 137644 - protein, 149 aa, Unknown
  Bacterial polypetide isolated from the Sargasso Sea
MSQLQVRHDWKREEIEALFALPMNDLLFKAHSIHREVYDPNEVQISRLLSIKTGACPEDCKYCPQSARYDTGLEKERLLAMETVLTEARSAKAAGASRFCMGAAWRNPKDKDMPYLKQMVQEVKALGMETCMTLGMLSAEQANELADAG

SEQ ID NO: 137645 - protein, 137 aa, Unknown
  Bacterial polypetide isolated from the Sargasso Sea
MNEIRNNWTLEEVSDLFKKDLNYLLFNAHTLHKKYHNENEVQMCTLLSIKTGGCPEDCGYCSQSIHSDQPMEPTKLMSLEEVKQKALDAKENGSMRFCMGAAWRKPSNKNLERVIEMIKVVKSTGLEACVTLGMLTK

SEQ ID NO: 137646 - protein, 243 aa, Unknown
  Bacterial polypetide isolated from the Sargasso Sea
GGCPEDCGYCSQSASAESDVKAEKLMDVQAVLAAAAEAKAAGSQRFCMGAAWRSPKERDMDKVVAMVEGVKAMGLETCMTLGMLDAPQAQRLAEAGLDYYNHNIDTSPENYANVITTRCFEDRLETLSNVREAGISVCCGGIVGMGETRGDRVGFVHALATLPRHPESVPVNALVPVKGTVLGDMLADTPLARIDDIEFVRTVAVARITMPMSMVRLSAGRESMSAATQALCFMAGANSIFIR

SEQ ID NO: 137647 - protein, 238 aa, Unknown
  Bacterial polypetide isolated from the Sargasso Sea
LTQSNLKKVKEMVREVKSLGLETCVTLGMLTGSQAKELKDVGLDYYNHNLDTSEEYYKKVVTTRTYQDRLNTLQHVRDAGVKVCSGGILGLGEENIDRIKLIQVLANLETQPESVPINRLVRVEGTPYYENNDVDEFDFIRVIALARIAMPKSYVRLSAGRDTMNDHMQSLCFLAGANSIFYGEELLTTKNSTIKHDQDLLRKLKIKTMSLDNLSNDSEDINIKENKLENINIAIKNI

SEQ ID NO: 137648 - protein, 193 aa, Unknown
  Bacterial polypetide isolated from the Sargasso Sea
KDTGLETCMTLGMLTKEQSEKLKDAGLDYYNHNIDSSEEFYSKIITTRKFQDRLDTLKNVQDSGLNVCSGGIVGMGETREDRAKMLIILANMKKHPGSVPINMLVRVKGTPLEDAKTVDEFEFVRTIAAARIMMPKSTVRLSAGREQMNEQTQSLAFLAGANSIFYGDKLLTTSNPEAIADKKLFTKLGIESC

SEQ ID NO: 137649 - protein, 139 aa, Unknown
  Bacterial polypetide isolated from the Sargasso Sea
TISNVQSAGMKVCCGGIVGIGEKESDRIDFLKTLANLNPQPESVPINMLVKVKGTPLADSPEVDPIEFVRTIAVARLLLPNSYVRLSAGRSEMSDELQALCFYAGANSIFYGEELLTTENPAFLKDQELFEKLGLRASK

SEQ ID NO: 137650 - protein, 220 aa, Unknown
  Bacterial polypetide isolated from the Sargasso Sea
CMGAAWRKPSNKNLERVIEMIKVVKSTGLEACVTLGMLTKQQASMLSDAGLDYYNHNIDTSENYYKEIITTRTFQDRIDTLDNVREAGVKVCSGGIIGMGESSEDRLSFLIALSNLEKHPESVPINTLVPIKGTKLFNSAGVDEIDFIKIICLARIMMPKSYVRLSAGRESMPKSMQALCFFAGANSIFYGEELLTTPNNPVEKDKKLLNDLGISLQSSN

SEQ ID NO: 137651 - protein, 264 aa, Unknown
  Bacterial polypetide isolated from the Sargasso Sea
CPEDCGYCSQSIHSDQPMEPTKLMSLEEVKQKALDAKENGSMRFCMGAAWRKPSNKNLERVIEMIKVVKSTGLEACVTLGMLTKQQASMLSDAGLDYYNHNIDTSENYYKEIIKTRTFQDRIDTLDNVREAGVKVCSGGIIGMGESSEDRLSFLIALSNLEKHPESVPINTLVPIKGTKLFNSAGVDEIDFIKIICLARIMMPKSYVRLSAGRESMSKSMQALCFFAGANSIFYGEELLTTPNNPVEKDKKLLNDLGISLQSSN

SEQ ID NO: 137652 - protein, 348 aa, Unknown
  Bacterial polypetide isolated from the Sargasso Sea
MSAVLPLRHNWTLAEVNALFALPFNDLVFQAQTVHRQFFKPNEVQISTLLSIKTGACAEDCKYCPQSGHYNTGLERERLLEVEKVLTQAKAAKDKGASRFCMGAAWSNPKQRDMPFLMEMVKGVKEMGLETCMTLGKLDAGQAQELKQAGLDYYNHNLDTSPEFYGEIITTRTYQDRLDTLQHVRDAGMKVCCGGIVGMGESANDRSALLMQLANLPEHPQSVPINMLVKVQGTPMENVEDLDGFEFIRTIAVARIMMPQSHVRLSAGRSRMNEQMQALCFLSGANSIFYGDKLLTTENPEADADMLLFAKLGINPEQRHDVSDEAHEAALADAIKEQNTPSLFHSAV

SEQ ID NO: 137653 - protein, 237 aa, Unknown
  Bacterial polypetide isolated from the Sargasso Sea
MGVVYNDWTKREVEDLYARPLLDLVHDAAKTHRMHHDARQVQQCTLLSIKTGGCPETCNYCAQSSSWKGETKLKAEKLMGVEEVLEAAKRAKDAGSTRFCMGTAWRGPSQVGAGQFERVLEMTKEVRDMGMEVCATLGMLTPEQAVKLKDAGLTAYNHNLDTSPEYYDKVTSSRKYEDRLNTIAAVREAGISVCCGGILGLGEEESDRASLMTVLATLPEHPESVPINALVPVDGTP

SEQ ID NO: 137654 - protein, 315 aa, Unknown
  Bacterial polypetide isolated from the Sargasso Sea
MSDEVKKKWGLDELETIYDSPFNDLIWNSHNIHRKYHDPNAVQISTLMSIKTGGCPEDCKYCSQSIKYDTSLSLEKFLSVDEVREQAIIAKNNGASRFCMGAAWRNLKDSNLQKITDMIKEVKKLGMESCVTLGMITDVQAQALKSAGLDYYNHNLDTSREYYEKVVTTRTYQDRLDTLQNIRDAGIKVCCGGILGLGEEKIDRIKLIHVLANLEEHPESVPINQLVKVQGTPYFDNTNVDEFDFIRTIALARIAMPKSMVRLSAGRDSMNDQMQALCFFAGANSIFYGEELLTTKNADVNHDRVLLKKLKINPS

SEQ ID NO: 137655 - protein, 287 aa, Unknown
  Bacterial polypetide isolated from the Sargasso Sea
SIKTGACPEDCKYCPQSARYKTGLESERLMEVEQVLESARQAKNAGSTRFCMGAAWKNPNDRDMPYLEQMVKGVKALGLESCMTLGTLTDSQAQRLAGAGLDYYNHNLDTSPEFYGNIITTRTYQERLDTLDKVRDAGIKVCSGGIVGLGETEKDRAGLLLQLANLPTPPESVPINMLVKVKGTPLADNDDVDAFDFIRTIAVARIMMPTSYVRLSAGREQMNEQTQAMCFMAGANSIFYGCKLLTTPNPEEDKDLQLFRKLGLNPQQTAVLEGDNEQQQRLNRRCS

SEQ ID NO: 137656 - protein, 188 aa, Unknown
  Bacterial polypetide isolated from the Sargasso Sea
TRTYQDRLDTLEHVRGAGMKVCSGGIVGMGEQAKDRAGLLMALANLPRHPESVPINMLVKVKGTPLENQENLDPFEFIRTIAVARIMMPASHVRLSAGREKMNEQMQAMCFMAGANSIFYGCKLLTTPNPDENSDMQLFKRLGIRPAQRAQKPDQVQEEELLAEVSRQSEPAEMFYDATRPRAGAARS

SEQ ID NO: 137657 - protein, 249 aa, Unknown
  Bacterial polypetide isolated from the Sargasso Sea
ANFNPNEVQISTLLSIKTGACPEDCKYCPQSGHYKTDLERERLIEVEKVVEQARLAKQKGATRFCMGAAWSDPKDRDMPYISKMVKEVKELGLETCMTLGKLTNEKAHELSSAGLDYYNHNLDTSPEYYEQIISTRTFEDRLNTIDHVRDAGMKVCSGGIVGMGEQAADRYGLLMQLANLPQQPESVPINMLVKVKGTPLENVDDLDHFEFIRTIATARIMMPHSYVRLSAGRNAMNEQMQSMCFFAGA

SEQ ID NO: 137658 - protein, 224 aa, Unknown
  Bacterial polypetide isolated from the Sargasso Sea
MSATAAIATRHDWSLAEVRALFEQPFNDLLFQAQSVHRQHFDPNRVQVSTLLSIKTGACPEDCKYCPQSGHYNTGLDKEKLMEVQKVLEAAAEAKAIGSTRFCMGAAWKHPSAKDMPYVLEMVKGVKKLGLETCMTLGRLDQEQTQALAEAGLDYYNHNLDTSPEFYGNIITTRTYGERLQTLAYVREAGMKICSGGILGMGESVDDRAGLLIQLANLPEHPES

SEQ ID NO: 137659 - protein, 362 aa, Unknown
  Bacterial polypetide isolated from the Sargasso Sea
MNAVTAGAHALRHDWTLAEVQALFALPFNDLLFQAQTVHRAHFDPNEVQVSTLLSIKTGACPEDCKYCPQSARYHTGLEAERLMEVEKVLERAREAKANGSSRFCMGAAWRNPKEKDMPYILRMIEEVRGLGMETCMTLGMLTADQAARLGAAGLDYYNHNLDTSPEFYGDIITTRTYQDRLDTLEHVRGAGMKVCSGGIVGMGEQAKDRAGLLMALANLPRHPESVPINMLVKVKGTPLENQENLDPFEFIRTIAVARIMMPASHVRLSAGREKMNEQMQAMCFMAGANSIFYGCKLLTTPNPDENSDMQLFKRLGIRPAQRAQKPDQVQEEELLAEVSRQSEPAEMFYDATRPRAGAARS

SEQ ID NO: 137660 - protein, 350 aa, Unknown
  Bacterial polypetide isolated from the Sargasso Sea
MSQLQVRHDWKREEIEALFALPMNDLLFKAHSIHREVYDPNEVQISRLLSIKTGACPEDCKYCPQSARYDTGLEKERLLAMETVLTEARSAKAAGASRFCMGAAWRNPKDKDMPYLKQMVQEVKALGMETCMTLGMLSAEQANELADAGLDYYNHNLDTSPEYYGDVITTRTYQNRLDTLSHVRASGMKVCSGGIVGMGEKATDRAGLLQQLANLPQHPDSVPINMLVKVAGTPFEKLDDLDPLEFVRTIAVARILMPKSRVRLSAGRENMTDELQAMCFFAGANSIFYGCKLLTTPNPEESDDMGLFRRLGLRPEQGAAATIDDEQAVLAKAAAHQDKASAPFYDAAAL

SEQ ID NO: 137661 - protein, 350 aa, Unknown
  Bacterial polypetide isolated from the Sargasso Sea
MSQLQVRHDWKREEIEALFALPMNDLLFKAHSIHREVYDPNEVQISRLLSIKTGACPEDCKYCPQSARYDTGLEKERLLAMETVLTEARSAKAAGASRFCMGAAWRNPKDKDMPYLKQMVQEVKALGMETCMTLGMLSAEQANELADAGLDYYNHNLDTSPEYYGDVITTRTYQNRLDTLSHVRASGMKVCSGGIVGMGEKATDRAGLLQQLANLPQHPDSVPINMLVKVAGTPFEKLDDLDPLEFVRTIAVARILMPKSRVRLSAGRENMTDELQAMCFFAGANSIFYGCKLLTTPNPEESDDMGLFRRLGLRPEQGAAATIDDEQAVLAKAAAHQDKAASQFYDAAAL

SEQ ID NO: 137662 - protein, 151 aa, Unknown
  Bacterial polypetide isolated from the Sargasso Sea
MLSTPILLDYQSSTPCSKDVVDSMKPFWSEIFSNPASKSNLAGINASAILEASREKIEQSLFLKNKKVIFTSGATESNNLALLGFARNFYKETGNYGHIITLKTEHKAVLEPLNQLKKEGFMVTEINPEKDGLISLEQFKKNIREDTFLVS

SEQ ID NO: 137663 - protein, 230 aa, Unknown
  Bacterial polypetide isolated from the Sargasso Sea
MRTYLDYNSTAPLRSEAKQAMIEAMNVLGNPSSVHLEGRAAKNLIENARLKIAEAIGAVGADIIFTSGATESAALALSGRNIMCSRVEHEAVSSWCRTKLSTDRNGMVDIDKPEYSALQVANSETGIIQKSVKGIWLSDMTQAFGKVPLAYNWYGCDCAMISAHKIGGPKGIGALILKRGTDLAALIKGGGQEMGRRSGTENVLGIAGFGAAAEAAQKDLVKGEWEKISE

SEQ ID NO: 137664 - protein, 231 aa, Unknown
  Bacterial polypetide isolated from the Sargasso Sea
QRKFVDEFNALKQGGHGHVTVGAITGSAAHVLVASVVEIQRLRPLLVIKILEQSSDQLIAWLAERKIDLMIGRFTTEDQRSQFHYEHLSAEPLHVVGGQHHPLRGATDLSLTELAHWPWILYPASTAVRKVSDDLFGGAGLALTAGVVETPSFLFALELMNTTHMMSLQPAALIQKYVDRGLLSRIPVELPDRMPSYGLITRLGEPPTPSAQAFIDVLRETAGVAPDVLGE

SEQ ID NO: 137665 - protein, 261 aa, Unknown
  Bacterial polypetide isolated from the Sargasso Sea
MDINRPIYLDNQSTTPVDPRVIKEIVPYYNEKFGNEGSQTHLYGWEAKESVDIAKEHIAKLINCNMDEIYFTSGATESINITLKGSAYSEKNKKKHIITFATEHKATLDVCENLESDGYTVTYIPVNKDGKINLTTIENSITEETFLITVLHANNEIGNIYPIDEIGIVCKNYDILFHVDAAQSIGKIELDMSNSNIDFLSFSSHKMYGPKGIGGLYIRNKNPKINLKPLIHGGGQQNGIRPGTMAIQNIVGLGRHAKFKT

SEQ ID NO: 137666 - protein, 162 aa, Unknown
  Bacterial polypetide isolated from the Sargasso Sea
MKPIYLDCNATTPIEDEVRDIMTRYLASEYGNAGSRTHVFGQEANKAVEDARRQVAEVVSAEKDELIFTSGATESNNIAILGLQKFAIESGKNHIISSSIEHKAVLEPLEYLSKNGFEITLVDVDESGVVDPKNIEAAIEKNTLMVSLMHVNNEPGDHSTDR

SEQ ID NO: 137667 - protein, 306 aa, Unknown
  Bacterial polypetide isolated from the Sargasso Sea
MKQPKNHWGNPSSPHWAGRDAKILLEESRNSLAKSLGVEPREIIFTSGGSESNNAVLRQLTLVSEKQHLITSKIEHPSVLETCRIIAKQPNISLTELPVDSSGLIDPESLQDVILSQTSLISLMTANNETGCLQPIEELCKIARENEIMFHSDMVQATGKIKFNLNESGIDFASITSHKIGGPRGIGLLYARQGTNFESLLTGGKQERVRRAGTENVTLAVGFAKALEWYLENQNRLQKQNTHFREKVLDKIGSIDGFFKNTNLDNSLSHTLNFGFSGISAESLLISLDMDRIAVSTGSACSSGAM

SEQ ID NO: 137668 - protein, 184 aa, Unknown
  Bacterial polypetide isolated from the Sargasso Sea
MKLPIYLDYNATTPVDSRVLEEMIPYFSESFGNAASRNHSFGWQVEKVVESSRELIGKSIGADGKEIIFTSGATESDNIAILGVAEFYKNKGKHIITSLIEHKAVIDPCHALEQKGYEITFLEVDKFGCIDLNQLADSIREDTILVSLMAGNNEIGTINPIEKIGRITRDKGVLFHTDATQGVG

SEQ ID NO: 137669 - protein, 143 aa, Unknown
  Bacterial polypetide isolated from the Sargasso Sea
MLSTPILLDYQSSTPCSKDVVDSMQPFWSEIFSNPASKSNLAGINASAILEASREKIEQNLFLKNKKVIFTSGATESNNLALLGFARNYCRKTGNYGHIITLKTEHKAVLEPLNQLKKEGFMVTEINPEEDGLNFRRKDSKKI

SEQ ID NO: 137670 - protein, 184 aa, Unknown
  Bacterial polypetide isolated from the Sargasso Sea
MKNNDYLYLDHAASTPMRKTAIAEYVNAESFGFANSSGGHKLSRDSKNLLEDSREKIASLLDVAPGEIIFTSGGTEADNWTIKSLFSSNKLEENLVTSNIEHEAVLASAEWVSSLGHEVSYAKSNNVGLVEKDEFLNHVNKKTIVASLMWGNNETGVIQPISQISKAIKSANESTLFHSDVFKE

SEQ ID NO: 137671 - protein, 116 aa, Unknown
  Bacterial polypetide isolated from the Sargasso Sea
MPVYLDNNATTPLRKAARTEMLGAMGPPANPSSVHGFGRNARLLVESARESVATLAGCHQANVVFTSGGTESNNLVLAQYDHVITSAIEHDSVRHAHDRCQVIAVDQNGIIDLDQL

SEQ ID NO: 137672 - protein, 301 aa, Unknown
  Bacterial polypetide isolated from the Sargasso Sea
KPNQIIFTSGGTEANNHVLWSRLGQKNNHVVTDEIEHPAVLKVLQNLSSIGLEHDLVSVDDKGCVSINEIELAISEKTGLVSVMLANNEVGTIQPIQKIVEIANKQEVLVHTDAVQCLGKMLINVVELDIDFLSLSAHKFYGPKGIGILFVKDCSVLSSFIIGANQENALRAGTENIASIAGMGLAAELATLELENHIQHLTELETQFKIGLTSFFKDAIFNGDPKNKLPGLISVSFPGFRSDILMTKLDRANMAVSSGSACGSGNIKPSDILSAMGIDEETNISTLRISFGTSNTCVEVD

SEQ ID NO: 137673 - protein, 161 aa, Unknown
  Bacterial polypetide isolated from the Sargasso Sea
LFVSNTIKNTLRPLMSGGGQEQNLRSGTLSPALCVGIGEACKDLNKNIEKYSKHFKNIKSVLLSELNKSKIPFNINGSIEKRIPNNLNISIKGKVAEQLFNFMPHIALSSGSACTSGTIERSHVLSAMKLDNNRIDGSFRISAGRDTTKEEVKQLIKSLNK

SEQ ID NO: 137674 - protein, 245 aa, Unknown
  Bacterial polypetide isolated from the Sargasso Sea
MKINEDFKKEIANLTLYNELPIKGLNKSVIEDNFKQMITRGSIDYKGGKVSGATYSKNEDLDNMLTILFKYFNKSNPLHTNIYPAVRKMENECISVMLKLFNGDENTCGVFTSGGTESILMACKTYRDLGRKKGISNPEIIVSNTVHCAFNKACKYFNINLVSIPCLYNGEFDIKKLKKKINGNTILIVGSTPSYNLGIIDPIDKLNTIALKYKIPLHLDACIGAFLINFSEYNYGFSLSGVTSI

SEQ ID NO: 137675 - protein, 197 aa, Unknown
  Bacterial polypetide isolated from the Sargasso Sea
MSIYLDYNATTPLRDEVKKEMLDILGPPLNASSVHSFGRQAKTHLENARTAISNFVNANSDQIIFTSGGTEANSMIMQIFKRPLISSIEHVAVIASSKNPNFIDVDSNGLVKIDDLEFKIKKFNPDIISIMWANNETGVIQPIKDIVKIAKKYKVYIHCDAVQALGKIDIDFRASGLNSLAISSHKIGGPVGVGALL

SEQ ID NO: 137676 - protein, 132 aa, Unknown
  Bacterial polypetide isolated from the Sargasso Sea
MTTYLDFNATTPVLPEVADLIYKLMVEEYGNAGSRTHSFGATAKQAVEKARKQLADVVNADKSEVIFTSGATESNNIAILGLKEYAEKNNKKHIITTAIEHKAVLEPIENLVSHGFEVTYIKPDQSGVIDVE

SEQ ID NO: 137677 - protein, 291 aa, Unknown
  Bacterial polypetide isolated from the Sargasso Sea
MQKRIYLDWNASSPLSKNAFLAMKSTFENFANPSSSHYEGRAAKKAIEKARDKIAEIIGLNTRFNIIFTSGATESAAMVLHHKNLNCAPIEHECVKVWSCSNLVVNENGKVMVDDPPNSTLQSANSETGIIQQLPNGIYFTDAAQAFGKIFTDFSKFDFQFSSISSHKIGGPKGIGALIVKDINELNSFIKGGGQEFGKRSGTENLMNIQGFAKSIEDRIFEINSGKWDKIKSNRDYLEEMILNESYETLIVGKKVNRLPNTSFFITPGWKNDLQVATLDLEGFSVSSGMA

SEQ ID NO: 137678 - protein, 226 aa, Unknown
  Bacterial polypetide isolated from the Sargasso Sea
NEIGTVQPISELASIASEHNIPFHSDTVQALGKIPLLVNELNCDFLSFSAHKFYGPKGVGFLYKKKLKEIKSLTIGGSQESGYRAGTENISGIVGLAVATKLIRENLPKRIDHLKHLEKRFKENLNNINSKIFYNGHPEIRVPGLISMTIPGYRSDIMMAKLDRENLEVSSGSACGSGSIKPSKVLREIGHKDDINVCTLRISFGRDNSSEDIDRLANAMISIINE

SEQ ID NO: 137679 - protein, 196 aa, Unknown
  Bacterial polypetide isolated from the Sargasso Sea
MDIYLDHAASTPVREEVIQAMLPWLSNHPGNPSGSHRLAREARRAIDDARDNVAALLDAEPGDVIFTSGGTESDNLAIDGVLGAKGGRAICSAVEHPAVLEPVRDSGGIIAPTDATGRIDFENLSFLLDSIADISLVSIMMVNNETGVINDIDMIADLITEKSPESFIHTDAVQATSWLDVAELSKKAHLISLQGT

SEQ ID NO: 137680 - protein, 63 aa, Unknown
  Bacterial polypetide isolated from the Sargasso Sea
MHPKNTPILFGQGGAESEFLNDFTSGRLHHTWLITGPKGIGKATLAYRIDRFVLSKERITEPR

SEQ ID NO: 137681 - protein, 303 aa, Unknown
  Bacterial polypetide isolated from the Sargasso Sea
MPLRSEAKQAMIEAMSVVGNPSSVHLEGRAAKNLIENARLKIAEAIGAVGADIIFTSGATESAALALSGRNIMCSRVEHEAVSSWCSARLLTDRNGMVDIHKPEHSALQVANSETGIMQESVKGIWLSDMTQAFGKIPLAYNWYGCDCAMISAHKIGGPKGIGALVLKRGTDLASLIKGGGQEMGRRSGTENVLGIVGFGAAAEAAQKDLVNGEWEKISEFRMILENMIEEFSDVPILVGKDSKRLPNTSCFITPGWKGETQVMQMDLEGIAVSSGSACSSGKVKPSDVLKELGYSEREASCA

SEQ ID NO: 137682 - protein, 293 aa, Unknown
  Bacterial polypetide isolated from the Sargasso Sea
MKNQDYLYLDHAASTPMRKSALDKYIEAESFGFANSSGGHKLSRNSKNLLEDSREIIAELLDSAPSEIVFTSGGTEADNWTIKSLFDSKQPNNNLVTSNIEHEAVLASAEWISSNGFQTKYAKSDENGFVTKDEFIKQIDDETKVASLMWGNNETGVIQPIKDISKELKSINSSTLFHSDVVQGIISDNVDFHRNGIESAAISAHKIGGPKGVGAMFVNNKFKLPSFLHGGKQELERRAGTVDVPGIAAFATALQEQQRRFDEEVGLMNDERSIFEDKLKNALSVEIIGESMK

SEQ ID NO: 137683 - protein, 237 aa, Unknown
  Bacterial polypetide isolated from the Sargasso Sea
TSSPLAFDHQATTPCAADVVRAMAPYWSEQWGNPSSRQNRLGLTASAAVNLARRTLAEALAVKPEQIVFTSGATEANNIALLGRARRCGAPGHVISVRSEHHAVLDPLAQLQREGFRITLLQPGSDGLITPDQLLHALRPDTLLVSVMAANNEIGVLQPLKAFSALCRPRGITLHSDAAQAFGHIPFHPDALGLDLVSLSAHKLYGPKGIGALVVGVGVELDPLQWGGGQEHGLRPG

SEQ ID NO: 137684 - protein, 260 aa, Unknown
  Bacterial polypetide isolated from the Sargasso Sea
MRAYLDYNSTMPLRSEVKQAMIEAMNVVGNPSSVHLEGRAAKNLIENARLKIAEAIGAVGADIIFTSGATESAALALSGRNIMCSRVEHQAVNSWCSAKLPTNRYGMVDIDKPEHSALQVANSETGIIQESVKGIWLSDMTQAFGKIPLAFNWYGCECAMISAHKIGGPKGIGALILKRGTDLAALIKGGGQEMGRRSGTENVLGIVGFGAAAEAAQKDLVNGEWEKISEFRMILENMIEEFSDLPILVGKDSKRLPNTT

SEQ ID NO: 137685 - protein, 158 aa, Unknown
  Bacterial polypetide isolated from the Sargasso Sea
MLSTPILLDYQSSTPCSKDVVDSMKPFWSEIFSNPSSKSNLAGINASAILEASREKIEENLFLNNKKVIFTSGATESNNLALLGFARNYHKKTGNYGHIITLKTEHKAVLEPVNQLKKEGFMVTEITPERDGIISEEQFKKNIREDTFMVSVMMANNE

SEQ ID NO: 137686 - protein, 318 aa, Unknown
  Bacterial polypetide isolated from the Sargasso Sea
TTQLDKRVLEEMIPFMVQNYGNPSSIHKHGREVKASVENSRNKIADILDVTPGEIFFTSGGTEADNTFLINAIYSRKIKIAITSKIEHHAVLHTLEDLERRNIIKILYVDIDSKGHIDYDHLEKLISSNPKSIVSLMHGNNEIGNITEIERVAEMCTKNDSIFHSDTVQTIGHFNINLSSKNIHSIVGSAHKFHGPKGIGFMYINNKIKIPPYIIGGSQERNMRGGTENVSGIIGLSKALEITIEEKDKTKKHIENLKFNMIDMLKKNIKNLIFNGDCDNLKKSLYHVLSLSIPKIEDKQMFLFNLDINKISVSAGSA

SEQ ID NO: 137687 - protein, 113 aa, Unknown
  Bacterial polypetide isolated from the Sargasso Sea
TKILRDYFYKNLKKNIKNIFINGHTVKRLPANLNISIPGINSEKLINNLKKTVISSGSACTSNNIEASYVLSGMGLSKEVVNSSIRIGIGRYTTKKDINNAIKDITDTVKKLR

SEQ ID NO: 137688 - protein, 258 aa, Unknown
  Bacterial polypetide isolated from the Sargasso Sea
TPLLPQAREAWLDASAVAGNPSSLHASGRAARRIVEQARESIADDLRTRPSAVVFTSGGTESDNLAVKGLWWARRARLGVADAIVAASAIEHHAVLDPVEWLGKHEGADVRWIPVDASGRVEVDFIDHLLSSAAERTALLSVMWANNEVGTVQPVREIAAACRSAGVPFHTDAVQALGQIPLDLSEVGATAVTISGHKVGGPFGIGALVVDPYENLVAVSHGGGQERDIRSGTFDAPAAAAFAVAVHLAVEEQAARAA

SEQ ID NO: 137689 - protein, 259 aa, Unknown
  Bacterial polypetide isolated from the Sargasso Sea
QLVFTSGATEANNLALLGHARARGSGHLISVATEHHAVLDPLQQLQREGFSVTLLTPGPEGLITPEQLRQAITPETQLVSVMAANNEIGVLQPLTALAAVCRDHGVTLHSDAAQAFGHIPLEPDAMGVDLLSLSAHKLYGPKGVGALVIRDGITLQPLQWGGGQQAGLRAGTLPTALIVGFAAAVQLAMQDREQRQQRLAALRDQLWADLQRKIPGVRMNGALAPRLAHNLNITLPGVSGSRLQRALKPQLSCSSGSAC

SEQ ID NO: 137690 - protein, 185 aa, Unknown
  Bacterial polypetide isolated from the Sargasso Sea
MLSTPILLDYQSSTPCSKDVVDSMKPFWSEIFSNPASKSNLAGINASAILEASREKIEQNLFLKNKKVIFTSGATESNNLALLGFARNFYKKTGNYGHIITLKTEHKAVLEPLNQLKKEGFMVTEINPEKDGLISEEKFKKNIREDTFLVSVMLANNEIGVIQPVEAISKICKSRGITFHSDFAQ

SEQ ID NO: 137691 - protein, 61 aa, Unknown
  Bacterial polypetide isolated from the Sargasso Sea
MKSKAIYFDYAATTPVDPRVAKKMHECLLLDGNFGNPASRSHEFGWKAEEVVEKARLQVAE

SEQ ID NO: 137692 - protein, 180 aa, Unknown
  Bacterial polypetide isolated from the Sargasso Sea
MECERIYFDYNASSLIRKEAFNLLEEINFSYGNPSSVHEEGRSMRDLIETSRANVAKSINTNEKNVIFTSGGTEAIDIALNQNPGRIIINSTEHIAVFEAAKDTGSKIEILEVDYNGIVDLDNLETMLSKGPALVCIMFANNETGVIQPIEKISEIVRKYNSYLFCDAVQAYGKIKINFD

SEQ ID NO: 137693 - protein, 256 aa, Unknown
  Bacterial polypetide isolated from the Sargasso Sea
VQPETCFISVMAANNETGTVQPFRELARIARERQVPFHSDCVQYAGKCELDLESSGLNYATLTAHKLGGPKGIGLLYIREGSPFSPLITGGGQERSLRAGTENVAMACAFAECFEWFCSNRSELESRWLALRKKLLDSLEDVEHGFVLGTPDESLPNTLNLGFQGISAESLLICLDLDGIAVSSGSACSSGAMEASHVLLAMGYSHEQAKSSLRISMGWNTSEEDIEALLRQLIHHVKRLTPISGKSDSNIQIPEP

SEQ ID NO: 137694 - protein, 316 aa, Unknown
  Bacterial polypetide isolated from the Sargasso Sea
MNVYFDNAATTKVRDEVIDDISNVLKDCFGNPSSTHSFGRSAKSYIETSRKSIAKIINCDPAEIIFNSGGTESDNSILKCVVKDLGIKHIISSKIEHHAVTHTLNDLELQGVNVHYVKLSKNGNIDIDNLEHLLSFNDEPKLVTLMYINNEIGNILDIKSVSDLCQKYNSLFHTDAVQAVGHYKIDLKSIKIDFLSSAGHKFHGPKGVGFTYINKLTKIKSFICGGPQERGLRAGTESVHNIVGMTKALEIADRNMEQEAKYVLSIKEYMIKSLRKLFPDIHFNGESGDIQKSTYTILNVCFSISNDKAAMLDFYL

SEQ ID NO: 137695 - protein, 230 aa, Unknown
  Bacterial polypetide isolated from the Sargasso Sea
MVFRQLLFRKDPGHLLVSSVEHPSVLETAKWLTRKNNLSLGILPVDQSGKVLEASMEVAAQPETCLISVMAANNETGTVQPFRELARIARERQVPFHSDCVQYAGKCELDLESSGLNYATLTAHKLGGPKGIGLLYIREGSPFSPLITGGGQERSLRAGTENVAMACAFAECFEWFCSNRSKLESRWLVLRKKLLDSLKDVEHCFVLGAPDDSLPNTLNLGFEGISAESL

SEQ ID NO: 137696 - protein, 155 aa, Unknown
  Bacterial polypetide isolated from the Sargasso Sea
MKLPIYLDYNATTPVDPKVMDAMVPYFTESYGNAASRNHSFGWQVEKVVDDSRELIGKLIGAGGKEIVFTSGATESNNLAILGVAEFYKKKGKHIISSPIEHKAVIDPCHALEQNGYEITFLDVDKHGCIDLKQLEESIRQDTILVSLMAGNNEI

SEQ ID NO: 137697 - protein, 225 aa, Unknown
  Bacterial polypetide isolated from the Sargasso Sea
PMKEISNICKKNNVWLHTDAAQAVGNIDVKVNDLGIDLMSISSHKLYGPKGIGCLFVRRRPRIRLLPQIDGGGQERLLRSGTLPTPLIVGFSEAMYKANINLNNNIIKLKFLRDRLHNHFIEFDKNIKLNGTDITKNRLPNNLNYFVNGVNALELTESLGNYVAFSTGSACSTGNIEPSYVLSSIGLKKEEALSSFRISVGLESTKEDIDKAAKIICNKISLLRK

SEQ ID NO: 137698 - protein, 256 aa, Unknown
  Bacterial polypetide isolated from the Sargasso Sea
GIMISNDIESAIKQNTKLISIMYVNNEIGSVNPIGNIVEVAKKNNIKVHTDAVQIIGKQPLDIKKIDVDFLSIAAHKYYGPKGIGALFVKSGNILDSVLQGGGQEKNLRPGTENISGIVGMGLATQIAIQNVVENSKKILDLENAFINALNEKKINYKLNGKCRIPGILNITFPAILGQTLVMKLDLNGVAVSFGSACSSGTPKPSEVLLNLGLTSDEALRTIRISIGKFHTDNDIYDLVSMLNEILCNEYEKDTA

SEQ ID NO: 137699 - protein, 231 aa, Unknown
  Bacterial polypetide isolated from the Sargasso Sea
EIGIIQPMKEISNICKKNNVWLHTDAAQAVGNIDVKVNDLGVDLMSISSHKLYGPKGIGCLFVRRRPRIRLLPQIDGGGQERLLRSGTLPTPLIVGFSEAMYKANINLNKNIIKLKFLRDRLHNHFIEFDKNIKLNGTDINKNRLPNNLNYFVNGVNALELTESLGNYVAFSTGSACSTGNIEPSYVLSSIGLKKEEALSSFRISVGLESTQEDIDKAAKIICNKISLLRK

SEQ ID NO: 137700 - protein, 158 aa, Unknown
  Bacterial polypetide isolated from the Sargasso Sea
MLSTPILLDYQSSTPCSKDVVDSMKPFWSEIFSNPASKSNLAGINASAILEASREKIEKSLFLKNKKVIFTSGATESNNLALLGFARNFYKKTGNYGHIITLKTEHKAVLEPLNQLKKEGFMVTEINPEKDGLISEEQFKKNIREDTFLVSVMLQITK

SEQ ID NO: 137701 - protein, 80 aa, Unknown
  Bacterial polypetide isolated from the Sargasso Sea
LNISIKGKVAEQLFNFLPNFALSSGSACTSGTIERSHVLSALTNDESRIDGSFRISTGRDTTKEEIKKLIKTLINVIKVK

SEQ ID NO: 137702 - protein, 209 aa, Unknown
  Bacterial polypetide isolated from the Sargasso Sea
MNVYFDNAATTKIRDEVIDNMSNVLKDCFGNPSSTHSYGRSAKSYIETSRKSIAKILNCDPGEIIFNSGGTESDNSILKCAVKDLGVKHIISSKIEHHAITHTLEELKIQGVNVNYVKLSENGNVDIDNLEYLLSSNDEPKLVTLMYINNEIGNILDVKYVSDLCQKYNSFFHTDAVQAVGHYKIDLKSINIDFLSSAAHKFHGPKGVG

SEQ ID NO: 137703 - protein, 258 aa, Unknown
  Bacterial polypetide isolated from the Sargasso Sea
CNKDGQVDINEFLDKCNKDTAIASLMYANNETGVVQQIEKIAKEVKIKNSDILFHSDVVQAVSSEKLDFHKLGIDSAAVSGHKIGGPKGIGIMFLSSKYKLPNYFHGGKQELEKRAGTVNVSGVAGLAAALKEHQDNFDNEKKRILQEREIFENELKNALEIKIVGEKIDRLCHISNIQFKSVNSETLMVALDLKGLGVSRGSACASGAQKPSHVLVAMNVPDIDVNSHLRFSFGWNTKEGDGKYASEIVINTVKEIL

SEQ ID NO: 137704 - protein, 83 aa, Unknown
  Bacterial polypetide isolated from the Sargasso Sea
VSSGSACTSASLEPSYVLRALGVGDDLAHSSIRVGMGRFTTVEEVDYAAEKMIVAVKRLREMSPLYEMVKDGVDLSTVQWTSH

SEQ ID NO: 137705 - protein, 149 aa, Unknown
  Bacterial polypetide isolated from the Sargasso Sea
MHCVRWGASVAAAPIYLDHQATTPCDPAVVEAMAPWWSDGFANPSSRSHRPGLEAAAQLTLARERLACCLTVPADAVVFTSGATEANNLAIKGLCEARLTRGRHIVTVATEHRAVLDPCRYLQSLGFELTVLPVQSDGLLDLYALAAAL

SEQ ID NO: 137706 - protein, 289 aa, Unknown
  Bacterial polypetide isolated from the Sargasso Sea
MIYLDHNATTPLLPQVKETLKELFGGEYGNPSSPYHTGRRARDLLEESRHRLAELLGAKPSELIFTSGGSEGNNMVLRQLLFREDPGHLLVSSVEHPSVLETAKWLTRKNNLSLGILPVDQSGKVPEASMEAAVQPETCLISAMAANNETGTVQPFRELAQIARERQVPFHSDCVQYAGKCELDLESSGLNYATLTAHKLGGPKGIGLLYIREGSPFSPLITGGGQERSLRAGTENVAMACAFAECFEWFCSNRSELESRWLGLRKKLLDSLEEVEHCFVLGTPDESLP

SEQ ID NO: 137707 - protein, 245 aa, Unknown
  Bacterial polypetide isolated from the Sargasso Sea
MTERIYLDYNATARIRPEVISTMAETMASVGNASSVHSAGRAARKAVETARKQVSALVGAQPDQVIFTSGGTEADNQAMAGTDPERTLVCAIEHPAVLDASPTAKRFPVDASGVADLAALDRLLSETPEPQLVALMLANNETGVLQPVREAAKIVHKYGARLHCDAVQAVAKIPVDFQALGTDTMAMTGHKFGGPQGIGALIVRDRDTVDCLMRGGGQENGLRGGTESVALIAALGTAAGIALDR

SEQ ID NO: 137708 - protein, 382 aa, Unknown
  Bacterial polypetide isolated from the Sargasso Sea
MDNNIYLDHNATSPLLPEAQTAMNNASGRSIGNPSSPHWAGRDAKILLEESRESLAKSLGAEPREIIFTSGGSESNNAVLRQLILASGEQHLITSTIEHPSVLETCRILAKQPNISLTELPVDTSGLINPESLKNEILSQTTLISLMAANNETGCMQPIGELCKIAREHEISFHTDMVQTSGKIKLDLNKSGIDFASVTSHKIGGPRGIGLLYARQGTSFESLVTGGKQERVRRAGTENVTLAVGFAKALEWYLKNQDRLQKQNTHFRKKVLDKISNIDGFFQNTNLDQSLQHTLNFGFSGISAESLLISLDLDGVAVSTGSACSSGAMEESHVLMAMGRSRAEAKSSLRVSWGWSTKEDEIDYFLEKITHHIQRLRHKQLN

SEQ ID NO: 137709 - protein, 292 aa, Unknown
  Bacterial polypetide isolated from the Sargasso Sea
MLYFDHAATTPVHPEVIKKMDQVSKRDFGNPSSVYSSGRAAKSVVELARNEIANMIGAKPSEIYFTGSGTESNNIVLWSLLYQEKKHVITSAIEHPAVLKVLDELSFFGISYDILPVDSTGLVNPSDLKSVIRKDTALVSIMYVNNEVGTIQPIEDLIDIAKSFSIPFHSDCVQAVGKLPISINTIEADYMSFSAHKFYGPKGIGFLYKKEGNHLKPLIIGGSQESNLRAGTENISGIAGLGVAAQLVNTNLNDRIKHLLQLEDYFKTKLTNQHPEIIFHGNHSKHVPGLCS

SEQ ID NO: 137710 - protein, 385 aa, Unknown
  Bacterial polypetide isolated from the Sargasso Sea
MSRRPVAFDFQATTPCSAQVVEAMAPYWSEEWGNPSSRQHRLGLTASAAVNLARRQIADALAITPQRLVFTSGATEANNLALLGHARALGSGHLISVATEHHAVLDPLHQLQREGFAVTLLQPRADGLIDPQQLRAAITPDTRLVSVMAANNEIGVLQPLAELASVCRDHGIALHSDAAQAFGHIPLEPDALGVDLLSLSAHKLYGPKGIGALVIREGLGLQPLQWGGGQEAGLRAGTLPTALIVGFAKAAQLAMADREERQQRLAGLRDQLWEGVQQRLPGVLLNGALQPRLPHNLNVTLPGVSGSHLHRALKPQLSCSSGSACSNGAPSHVLQAIGRSRAEAEASLRLSLGRDTTADDVHQAVIAVGEAVAAAQRRSTYVQLD

SEQ ID NO: 137711 - protein, 267 aa, Unknown
  Bacterial polypetide isolated from the Sargasso Sea
MGFNVNFVSCDGEGVTNIDEFKKSINANTLIASVMYANNETGVVQPIQEMSKIVKDINPNALFHSDVVQAVATKKLNFHNLGIESAAISGHKIGGPKGIGVMFLKTGYKIPSFLHGGKQELERRAGTVNVSGVAGLAAALKEQQNNLEKDVELIENEKTIFENNLKENIELRVVGENVERLCHISNIQFKDINSETLMVALDLNGMGVSRGSACASGAQKPSHVLEAMKVDEQVINNHLRFSFGWNTQKGDGEKCAEIVEKTIKELS

SEQ ID NO: 137712 - protein, 378 aa, Unknown
  Bacterial polypetide isolated from the Sargasso Sea
MNVYFDNAATTQVRDEVINQISDILKDCFGNPSSTHSFGRTAKSYIESSRKKISEILNCEPSEIIFNSGGTESDNSLLRCSVKDLGIKTIISSKIEHHAITHTLDELKKEGVEVKYVDLDDKGEINYNHLEELLSEDSNQKLVTLMYINNEIGNILDVDKVSGLCKNNNSLFHTDAVQAVGHYEINLEETKIDFLSAAAHKFHGPKGVGFSFIRKTSRLSPFICGGPQERGLRAGTESVHNIVGMTKALEVSCDKINQESKYIRSIKEYAINEIKSIFPKIHFNGLSGNLDKSTYTILNVCFPLDSEKGSMLDFHLDLNGIACSKGSACQSGSSSGSHVLNEIQTDELKKYPSVRFSFSHYNTKKEVDYLIETIKSLS

SEQ ID NO: 137713 - protein, 370 aa, Unknown
  Bacterial polypetide isolated from the Sargasso Sea
ATTPIDPSVLSLMSELNQKMYGNPSSVYDLGRNAKNIIEIARRQFAESINCEPKEIIFTGGGSEANNIVLWNMLHQKRNHVITSSIEHPAILLVLKELEKLGVTHTIIPVDNNGNVNPDDIKNNITPDTGLITIMMANNEVGTIEPIEDIAIIAKDHDILFHSDAIQVLGKLPVDVKKLNVDMMSFSAHKFYGPKGVGALFLKNGVNIKPMIIGGSQEKKMRAGTENVSGIAGLGLAAEIARKSTNEVCSHLVKLENHFRNRILEINHDIIFNGNLKNNLPGLINLTIPNISSDLLLIHLDKQGIAISNGSACSSGTISPSPILKAMGVSDKNNLESIRISAGKHNTIDEVDKLLDSIASSIMTIRKNSS

SEQ ID NO: 137714 - protein, 276 aa, Unknown
  Bacterial polypetide isolated from the Sargasso Sea
MDACAATPLAEGLGQRMLDYQQQAWANPSSLHPAGLAAAELLERSRQRLLELLDCPNGQVVFTSGGTEADNLALFGICRSQPPGRLLISAFEHAAIGRSAEQLRAEGWQVEILPVDSHGRIDLEALEGLLVPPTRLVSVAWASSELGVLQPIKAISCLCQRAGVPLHSDAVQVVGQLPAAQLLPLPVDLLSISAHKFQGPRGVGALVMPEPKALQPQLLGGGQESGLRSGTESPWLVAAMVDALGDRLNQQPQLAEAMAELRDDLWQQLAAVKASS

SEQ ID NO: 137715 - protein, 107 aa, Unknown
  Bacterial polypetide isolated from the Sargasso Sea
MPIYLDYCSTTPVNQRVSDLMQRLFVEDFGNSGSRTHLHGAKAKQEVSLARNQIAEVLTCEPLEVVFTSGATESNNMAILGLEEYGNKENKKHIITTSIEHKAVIEP

SEQ ID NO: 137716 - protein, 181 aa, Unknown
  Bacterial polypetide isolated from the Sargasso Sea
MKLPIYLDYNATTPVDPKVVDAMVPYFTESYGNAASRNHSFGWQVEKVVDDSRELIGKLIGAGGKEIVFTSGATESNNLAILGVAEFYKKKGKHIISSPIEHKAVIDPCHALEQNGYEITFLDVDKHGCIDLKQLEESIRQDTILVSLMAGNNEIGTLNPIREIGQITRNKEVFSTLMQHN

SEQ ID NO: 137717 - protein, 364 aa, Unknown
  Bacterial polypetide isolated from the Sargasso Sea
MERNTAIHPAPTSPWRRARDLLEESRHRLAELLGAKPSELIFTSGGSEGNNMVLRQLLFWEDPGHLLVSSVEHPSVLETAKWLTRKNNLSLGILPVDQSGKVPEASMEVAAQPKTCFISVMAANNETGTVQPFRELARIARERQVPFHSDCVQYAGKCELDLESSGLNYATLTAHKLGGPKGIGLLYIREGSPFSPLITGGGQERSLRAGTENVAMACAFAECFEWFCSNRSELESRWLGLRKKLLDSLEAVEHCFVLGTPDESLPNTLNLGFQGISAESLLICLDLDEIAVSSGSACSSGAMEASHVLLAMGYSHEQAKSSLRISMGWNTSEEDIEELSRQLIHHVKRLTPISGKSDSNIQIP

SEQ ID NO: 137718 - protein, 383 aa, Unknown
  Bacterial polypetide isolated from the Sargasso Sea
MDGAATMPTDPEVIESMLACLNNKELFANPSSVHASGRDAMHKIEKARDQISTLINANKEDLIFTSGATESNNLAIIGSAKFRANHGKHLITMTTEHKAVSGPFDYLEEEGFEVTRLRPGTDGLLDTKQLKKAIREDTQLVSIMHINNEIGAIQNIFEIASVCEGQGVLFHCDAAQSVGKISIDLKKLPIDLLSISAHKFYGPQGIGALFIREAHKVKLLPITHGGEQEMWVRPGTLPLHQIIGFGIAAKLAMTRMREDLILMEDLSNHFFEKIRNLPDIFLNGSDKSRYPGIVNIRAPGVNGESLLLLLEPLCVAQGSACNSKNSEPSHVLRELGLNDHEIQSSIRFSFTRDTTRDDVDFALEKYISAVNQLRKNYPNNINE

SEQ ID NO: 137719 - protein, 382 aa, Unknown
  Bacterial polypetide isolated from the Sargasso Sea
MDNNIYLDHNATSPLLPEAQTAMNDAAGKSIGNPSSPHWAGRDAKILLEESRNSLATSLGAEPREIIFTSGGSESNNAVLRQLIVASGEQHLITSTIEHPSVLETCRILAKQPNISLTELPVDSSGLISPESLKDEILSQTTLISLMAANNETGCMQPIRELCQIAREHEISFHTDMVQTTGKVKLDLNKSGIDFASVTSHKIGGPRGIGLLYARQGTSFESLVTGGKQERVRRAGTENVTLAVGFAKALEWYLENQERLQKQNTHFREKVLDKISNIDGFFQNTNLDQSLHHTLNFGFSGISAESLLISLDLDGVAVSTGSACSSGAMEESHVLLAMGRSRAEAKSSLRVSWGWSTNEDEIDYFLDKLTHHVHRLSNKQLN

SEQ ID NO: 137720 - protein, 736 aa, Unknown
  Bacterial polypetide isolated from the Sargasso Sea
MDNNATTPVLACAAQAVQHTMQQCFGNPSSSHSTGIKAKVELETTRQLARQLVGAGSGDIVFTSGATEGIQSSIFSALLHARMSGKTGPAYTLLYGATEHKAVPQSLEHWNHVLQLGARIKAIPVDQHGVLDFEFIRTELPNTLLICTMAANNETGVKQDLVALQQLIRSVAPQVLWMVDCVQALGKMPLQLEHMTIDYAPFSGHKLYAPKGIGFLYVREGTPYQPLLAGGGQESGLRSGTENLPGIAALKAIFQQLKLKEDSVFQSEPQLWAYREQLLSALRRVFPDLVLNSDKPYIVPTTINFSVPGFASKDIMDLFDAAGIRVSSGSACSSKIPTSFVLNAMGLPLWRSQGAIRLSFGPAMTVGECQQACQAILALKTVVNSCCLVLSDASSTELQPVTGLVQLKHEDLCSYLLVSADTSEVIIIDAVLPLASRIAQLVQGHQFKVRAILDTHVHKDHPSARPELATLLADLLDKVPTDVLGWPLAAPLLQMGAYQLESLATPGHSPEAVTIVVRQHHQQKFAFVGDFILPGGTGRLDLPGGDTKAFRLSLRALDQKLESHTLLLSSHDYAQRFFTRWDLMLQEQPVLQQVLHTEATPELWLSDLQRQTQWLQQQAGHFCGVVEVCASDATAVIDKHQIAALIQQHPNLQIWDVREPHEQAAGALSVYLPDLVCKEVPLSALVQQVTEQQTATPQPLLLVCRSGNRSLLAAKVLNRAGFDLVFNLKGGVALLA

SEQ ID NO: 137721 - protein, 134 aa, Unknown
  Bacterial polypetide isolated from the Sargasso Sea
MQKPATRPQEIYLDNNATTAVLSCAAEAVQHTMQQCFGNPSSSHSTGIKAKVELETTRQLARQLIGAGSGDIVFTSGATEGIQSSIFSALLHARLEGKTGPAFSLLYGATEHKAVPQSLNTGIMYYSWAPLLKL

SEQ ID NO: 137722 - protein, 255 aa, Unknown
  Bacterial polypetide isolated from the Sargasso Sea
VDSTGLVNPSDLKSLIRKDTALVSIMYVNNEVGTIQPIEDLIDIAKSFSIPFHSDCVQAVGKLPISINTIEADYMSFSAHKFYGPKGIGFLYKKEGNHLKPLIIGGSQESNLRAGTENISGIAGLGVAAQLVNTNLNDRIKHLLQLEDYFKTKLTDQHPEIIFHGNHSKHVPGLCSIAIPNHKNEAVLAKLDRKGIEVSNGSACSSGVVGLSPILSAMGIKDLANQSTIRISFGRENTIADVSKLIESLSEILND

SEQ ID NO: 137723 - protein, 81 aa, Unknown
  Bacterial polypetide isolated from the Sargasso Sea
MKLPIYLDYAATTPVDPRVAEKMFQYMTMDGIFGNPASRSHRYGWQAEEAVDVARSQVADLINADHREIVFTSGCNRIKTT

SEQ ID NO: 137724 - protein, 203 aa, Unknown
  Bacterial polypetide isolated from the Sargasso Sea
LSSDFAQCLGYIELDNLLSDVNMITMSSHKIYGPKGIGLLLIDEEINLEPLIVGGGQEYGFRSGTLPLPLVVGFAKAIEIAVFNQKNNAEKLLLYRNNLLEGLLGNNSGLLINGSIEKRLPQNLNLTVLDLNGAKFHKLLKSKIICSSGSACSNGEPSHVLLALGRSFKEAESSIRLSIGLSTNSKEIKEAIHILTNTVKSLR

SEQ ID NO: 137725 - protein, 334 aa, Unknown
  Bacterial polypetide isolated from the Sargasso Sea
REAVAGLINANPGEILWTSGATESNNMAIVGFHQFQYKGQSMRFLSSHMEHKSVIESMHSIKDLGSNVCFIQPNEHGRIDIETFVNQMEKDVIYVSCMHVNNETGLINDIEEIGKYCRKNEIIFHVDAAQSIGKIPIDVKGMCIDLMSMSAHKVYGPKGVGALYINKDTVGRIKSIILGGGQERGMRSGTLPTHQIAGMAAAYNLSKERMDDDYKHIKQCRDVFLKTISNIDGWKLNGADKYSYPGIISICFPDLYSESLIYAMEDFAISRGSACSSDHDEPSHVLKSMGLLDHEINGTIRISFGRNTTLNQAESAASELMKAVSHLRNLKGGN

SEQ ID NO: 137726 - protein, 216 aa, Unknown
  Bacterial polypetide isolated from the Sargasso Sea
NEIVFHVDAAQSIGKIPIDVDEMCIDLMSMSAHKVYGPKGVGALYINKKSVGRVKSIIVGGGQERGMRSGTLPTHQIVGMATAYKVSKQRIHEDLEHITQCQNSFLKRLSNLDDWKINGSKDHSYPGILSICFPDLYSESLIYAMEDFAISRGSACSSDHDEPSHVLKSMGLADYEINGTIRISFGRTTSIRQAELAASELIKAVLHLRKLKRGYQ

SEQ ID NO: 137727 - protein, 143 aa, Unknown
  Bacterial polypetide isolated from the Sargasso Sea
MASEAERLIGLRQRLLDRLNSELDYIFLNGHPTERLPNNLNVSFGYVEGESLMMGVNELAVSSGSACTSASLEPSYVLRALGVGDDLAHSSIRIGMGRFTTIAEIDYAADKIIAAVKRLREMSPLYEMVKEGVDLTTVQWTSH

SEQ ID NO: 137728 - protein, 94 aa, Unknown
  Bacterial polypetide isolated from the Sargasso Sea
MSDKIFLDYQSTTPVSKEVLEKMIPFFSENFGNPHSNNHEFGIMANNVVEEARGNVANLINAQKSEIIFTSGATESNNFAIKSIANNFFEKDCQ

SEQ ID NO: 137729 - protein, 100 aa, Unknown
  Bacterial polypetide isolated from the Sargasso Sea
FAYVEGDHLIMALKDIAVSSGSACTSASLEPSYVLRALGRKDELASSSIRFSFGRFTTEEDVDYTLSLINHAVDRLRELSPLWEMYLDGIDLDTVEWQTH

SEQ ID NO: 137730 - protein, 304 aa, Unknown
  Bacterial polypetide isolated from the Sargasso Sea
MIYLDNAASTPTDESIISKMMPYFHQKYANPHSTTHIEGLNASKDIEHYRQIIGEYFDVEADCVVFTSGATEANNLAIIGAMKAAIKSNSNRKKVLCSSIEHKCVLESIMSSKEYGFSYEFIPVKENGKIDLDNFKRMIDEEILLVSAMATNNETGIDLQIEEIGELCKEKDILFHTDAAQALHHKKISMAELAIDFCSISAHKIYGPKGIGALICNHESIKKLQPLMLGGYQEAGLRSGTMPTHLVVGLGEAIKLLDMNKDTYLKNMINLKDKFIDLLKASNLNFSINSLEAEHPGLLNLYLK

SEQ ID NO: 137731 - protein, 103 aa, Unknown
  Bacterial polypetide isolated from the Sargasso Sea
AQTYGKIDLDVNSMNIDLLSASAHKIYGPKGVGFLYARKKNKEINLFPLISGGGQEFGMRSGTTPVPLIVGLAEASKISFNQLLKEQKRIKSLRDNFLNRIIQ

SEQ ID NO: 137732 - protein, 259 aa, Unknown
  Bacterial polypetide isolated from the Sargasso Sea
ISSILNVSPQEIIFTSGGTESDNMLLRSAVEDLNIKTIISTKIEHHAILHALDYLEKKNVSIVYLPVDKNGEFKYQDLEKALSLDNSKKLVSLMHVNNEIGNKIDLEYISKICQSSEVLLHTDAVQSIGHYEVDLTKLKVDFLSAAAHKFHGPKGIGFSFVRKNSGLNPFILGGSQERGLRAGTESVHNIVGMSKALELAYENLEEESKYIRNLKNYAISKINEFIPESHFNGNCDKDEKSAYNLINVNLPISSEKKDL

SEQ ID NO: 137733 - protein, 105 aa, Unknown
  Bacterial polypetide isolated from the Sargasso Sea
MIYLDNHSTTPVDKRVLKKMLPYFSIKYNNPHSQVTSHNKNIIKEINIARSNIAKLIGAEKDEIIFTSGATESNNLAIKGLKNQILRGRNHFITLNTEHKCILEG

SEQ ID NO: 137734 - protein, 77 aa, Unknown
  Bacterial polypetide isolated from the Sargasso Sea
SACTSASWKPSYVLRALGRKDELAHSSIRFSFGRYTTEKDVKETALLVKSSVERLREISPLWEMYQDGVDLDKIEWA

SEQ ID NO: 137735 - protein, 203 aa, Unknown
  Bacterial polypetide isolated from the Sargasso Sea
MSTRSTIYLDYASTTPVDPRVASKMMEFLTPDGQFGNPASRSHRFGWKADEAVEEARSHVANLVNCDPREIVWTSGATEADNLAIKGVARFYKSKGNHVITSKIEHKAVLDPCRQLEREGFEVTYLDPNDKGVIDPEDVKSAIKDTTILISIMHINNELGTVNNISKIGEIARERSIFFHVDAAQSTGKTLIELEKMQIDLMS

SEQ ID NO: 137736 - protein, 214 aa, Unknown
  Bacterial polypetide isolated from the Sargasso Sea
MLSTPILLDYQSSTPCSKDVVDSMKPFWSEIFSNPSGKSNLAGINASAILETSRERIEQNLFLKNKKVIFTSGATESNNLALLGFARNFYKKTGNYGHIITLKTEHKAVLEPLNQLKKEGFMVTEINPEKDGLISEEKFKKNIREDTFMVSVMLANNEIGVIQPIKNISNICKSRGITFHSDFAQCLGYIELDNLLLDVNMITMSSHKIYGPKG

SEQ ID NO: 137737 - protein, 129 aa, Unknown
  Bacterial polypetide isolated from the Sargasso Sea
LLDRLNSELDYIFLYGHPTERLPNNLNVSFGYVEGESLMMGVNELAVSSGSACTSASLEPSYVLRALGVGDDLAHSSIRIGMGRFTTVEEIDYTAEKMISAVKRLREMSPLYEMVKDGVDLSTVQWTSH

SEQ ID NO: 137738 - protein, 227 aa, Unknown
  Bacterial polypetide isolated from the Sargasso Sea
SICLDAGVLFLVDACQSFSKLNINVRDMNINLLAATGHKIYGPKGIGFLYVSQKSPKIKLKMQIDGGGHERGFRSGTLPVSQIVGLGKAVQISDKEKEKENKRLEVLRDKLHLAISDSHPEIILNGSNSKRLPHNLNLCFPGLNAESIIMKMRGVACSTGSACSSANLKPSHVMKAIGRDNELAHSAIRFSLGRFNSESDIVKAIDIINNAISLLKKRRENRNKRIS

SEQ ID NO: 137739 - protein, 307 aa, Unknown
  Bacterial polypetide isolated from the Sargasso Sea
TSLQAQNHYEIIFTSGATESINLCLSGLAHTYRKQKNHVISFATEHAATLMCLENLAKNGFEITILPVQASGHIDYDLLSQHIKPTTLMISAVHVNNEIGVIHNPAQLSAIASRHGVLLHLDCAQTIGKAPLDLQSSAPDFVSLSAHKVYGPKGIGALLRRKQLKRKLTPLLFGQTLYNLYRPGTLPTPLIVGMQSAFALAQNEFADRIDTVHTLHELFVKHLPDTVTWHGDRKSRVPHNINVSLPLSASTDDIRELCDTFTLSQASSCSNHTSSHVLRAIGVEQASMQRALRISLSHTTRQSDARN

SEQ ID NO: 137740 - protein, 310 aa, Unknown
  Bacterial polypetide isolated from the Sargasso Sea
ATTPIHPEVAEKLDYINREHYANPSSIYNQGRKAKSLIENARKQVADAIGAKSDQIFFTSGGTEANNQVLWNSIENDKKHIIASSIEHPAVIRVINKIRSFGITASLASVDEDGTVDIDSILKLVNDDTGLVSIMLANNEVGTIQPIKEIAKKITQLNIPFHTDAVQALGKIPVDVASLGIDYLSLSAHKFYGPKGIGALYIKNKKTLKSLIIGGEQEFGLRGGTENIAGIIGMGIAAEIAAKDIDSCYSHLKHLEDYFLAKLHSISSNFIRNGKFINCLPGLISISFKGHRSDVLMAKLDRKTLQSQMG

SEQ ID NO: 137741 - protein, 152 aa, Unknown
  Bacterial polypetide isolated from the Sargasso Sea
KAIELAMEEISSEAERQIGLRQHLYKRLTDELDYVFLNGHPTERLPNNLNISFGYVEGESLMMGISEIAVSSGSACTSASLEPSYVLRSMGVGDDLAHSSVRFGFGRYTTMEEVNYAAEKVIGAVKRLREMSPLYEMVQEGVDLSKVTWTSH

SEQ ID NO: 137742 - protein, 105 aa, Unknown
  Bacterial polypetide isolated from the Sargasso Sea
MSTQSTIYLDYASTTPVDPIVASKMMEFLTPEGEFGNPASRSHRFGWKADEAVEEARSHVANLVNCDPREIVWTSGATEADNLAIKGVARFYKSKGNHIITSKIE

SEQ ID NO: 137743 - protein, 136 aa, Unknown
  Bacterial polypetide isolated from the Sargasso Sea
MNTYYFDYASTTPVDSLVVDKMKECLSVDGAFGNSGSRSHVFGWKAEELVEEARGNVANLINCDPREIIWTSGATESDNLAIKGAAYFYSDKGKHIITSKIEHKAVLDVCRQLESESYEVTYLEPNNDGIITPESV

SEQ ID NO: 137744 - protein, 244 aa, Unknown
  Bacterial polypetide isolated from the Sargasso Sea
MTLYLDYNASAPIISDVVDIMNESIGIIGNPSSVHASGRAARKAIEDSREIISETIDSNPQNIIFTSGATEANTLALNCSKAMQTFISSIEHDSVLKQNINAKLIPVTSEGIIDIEFLESNLRKSTEDNIFVSVMAVNNETGIIQPLEDISRICKENNAILHVDAVQAIGRIDISMTKLNIDLLTISSHKIGGPKGIGCLAISDKVYTVLSPIIMGGGQERGFRGGTEAVNQIIGFGAAAKYAQ

SEQ ID NO: 137745 - protein, 273 aa, Unknown
  Bacterial polypetide isolated from the Sargasso Sea
VLEPLNKLKKEGFVVTEINPEKDGLISEEQFKKNIREDTFLVSVMLANNEIGVIQPVENISKICKSRGITFHSDFAQCLGYIEIDNLLSDVNMITMSSHKIYGPKGIGLLLIDEEINLEPLIFGGGQEYGHRSGTLPLPLVVGFTKAIEIAVFNQKNNAEKLSLNRNNLLEGLLENNSGLLINGSIEKRLPHNLNLTVLDLNGAKFHKLLKSKIICSSGSACSNGEPSHVLLALGRSFKEAESSIRLSIGLSTNSKDIKQAIHILTNTIRSLR

SEQ ID NO: 137746 - protein, 146 aa, Unknown
  Bacterial polypetide isolated from the Sargasso Sea
IEEMASEAERLTGLRQRLLDRLNSELDYIFLNGHPTERLPNNLNVSFGYVEGESLMMGVNELAVSSGSACTSASLEPSYVLRALGVGDDLAHSSIRIGMGRFTTIEEVDYAAEKMITAVKRLREMSPLYEMVKDGVDLSTVQWTSH

SEQ ID NO: 137747 - protein, 110 aa, Unknown
  Bacterial polypetide isolated from the Sargasso Sea
MSIYLDCNATTPTEPEVVEKIKQYLTTDFGNEGSHTHSYGSTAKKAVQEARDQIVDLVNASRNEIIFTSGATESNNIAILGLKDFGIENNKKHIITSSIEHKAVLEPIDE

SEQ ID NO: 137748 - protein, 80 aa, Unknown
  Bacterial polypetide isolated from the Sargasso Sea
GSACTSASLEPSYVLRLLGLKDELAHSSIRFAIGRFTTEEEVEYTINLVRDSVEKLRTLSPLWDMYKDGVDMDSIEWAEG

SEQ ID NO: 137749 - protein, 167 aa, Unknown
  Bacterial polypetide isolated from the Sargasso Sea
MQIYFDNAATSPLRKEVIESINKVLLETYGNPSSNHSFGRKAKTLIENSRKIIASELNVSPQEIIFTSGGTESDNMLLRSAVEDLDVKTIITTKIEHHAILHALDYLEKKNISIVYLPVDKNGEFKYKDLENALSFDDSKKLVSLMHVNNEIGNMIDLEYVSKICQS

SEQ ID NO: 137750 - protein, 150 aa, Unknown
  Bacterial polypetide isolated from the Sargasso Sea
MIYLDNHSTTKVDNRVFKKMIPYFIEKFNNPHSQNTIHNRDIIKQISNARSQIAKLIGAKKEEIIFTSGATESNNLAIKGLKNHVLRGKNHFISLNTEHKCVLEALRKLEIEGAKVTILKVKKNGLIDPLDIQKSIQKNTLLVTIMMANN

SEQ ID NO: 137751 - protein, 231 aa, Unknown
  Bacterial polypetide isolated from the Sargasso Sea
VNNEIGNILDINKVSDLCRNYNSLFHTDAVQAVGHFKIDLKETQIDFLSAAGHKFHGPKGVGFSFIRKTSRLSPFICGGPQERGLRAGTESVHNIVGMTKALEVSYEKINEETKYITSIKEYAINELKSIFPKIHFNGLSGNLEKSTYTILNVCFPLDSEKGSMLDFHLDLNGIACSKGSACQSGSTNGSHVLNEIQTDELKKYPSVRFSFSHYNTKKEVDFLIETIKNLS

SEQ ID NO: 137752 - protein, 171 aa, Unknown
  Bacterial polypetide isolated from the Sargasso Sea
MSIYLDCNATTPIEPEVVEKINNYLTKDFGNEGSHTHEYGSVAKKAVQEARDNIGGLIDASRNEIIFTSGATESNNIAILGLKDFGEKNNKKHIITTSIEHKAVLEPIEELKKIGFDVDILKVDQSGRINPKDLKDKLKKDTLLISVMSVNNETGVIQPIKEICDLIKDHD

SEQ ID NO: 137753 - protein, 264 aa, Unknown
  Bacterial polypetide isolated from the Sargasso Sea
KEGFMVTEINPEKDGLISEERFKNNIREDTFMVSVMLANNEIGVIQPLENISKICKARGITFHSDFAQCLGYIELDNLLSDVNMITISSHKIYGPKGIGLLLIDAEINLEPLIVGGGQEYGLRSGTLPLPLVVGFAKAIEIAVFNQKNNAEKLLLHRNNLLEGLLEKNSGLLINGSIEKRLPHNLNLTVLDLNGANFHKLLKPRIICSSGSACSNGEPSHVLLALGRSFKEAESSIRLSIGLSTNSKDIKQAIHILTNTIKSLR

SEQ ID NO: 137754 - protein, 217 aa, Unknown
  Bacterial polypetide isolated from the Sargasso Sea
MHQISEICRSREIILHSDYAQCLGFIELDSLDSLANMLTISSHKIYGPKGVGLLLIDRDIELQPLILGGGQEFGFRSGTLPLPLIVGFTKAIEIAVLNQKKNIKKFLFHRDTLLKGLLINNSGLEVNGSMIERLPHNLNLTVLHVNGAKFHKKLKSKIICSSGSACSNGEPSHVLQAIGRSFKEAEASLRLSIGLMTTKEDIEKSIQIITDTIKSLR

SEQ ID NO: 137755 - protein, 320 aa, Unknown
  Bacterial polypetide isolated from the Sargasso Sea
DSREKIAGLFNAAPGEIIFTSGGTEADNWTIKSLFESKKPDDNLVTSNIEHEAVLASAEWVSINGYQTKYAKSDENGFVSKDEFLNQIDDNTKVASLMWGNNETGVIQPVKDVSKEIKSVNSSTLFHSDVVQGIISDSIDFHRNGIESAAISAHKIGGPKGVGAMFINNKYKLPSFLHGGKQELERRAGTVDVPGIAAFATALEEQQSRFDEEVGLMKNERTIFEEKLKNSLNIEIVGDSMNRLPHISNVQFKNLNSEVLLIQLDLNGLGVSRGSACASGAQKPSHVLEAMNINPKFINSHLRFSFGWTTKAGDGSKAAE

SEQ ID NO: 137756 - protein, 66 aa, Unknown
  Bacterial polypetide isolated from the Sargasso Sea
MTNEINLPIYMDYASTTPVDPRVAQKISDHLTLDGNFGNPASRSHKFGWKAEEAVEEARSHVANLV

SEQ ID NO: 137757 - protein, 297 aa, Unknown
  Bacterial polypetide isolated from the Sargasso Sea
EIYLDNNATTPVLPVAAQAAMHTMQRGFGNPSSSHATGIKAKAELESTRALARQLIGASTGDIVFTSGATEGIQTSIVSALMAARERGLTGAKTLLLYGATEHKAVPESLKHWNKVLQLDATVMAIPVNQHGVLDYDFIRANLASAVMICTMAANNETGVKQDLAALEQLIRSVNPTVYWMVDCVQALGKMALNIAQTSIDYAPFSGHKLYAPKGIGFLYVRRGAPYQPFIAGGGQESGLRSGTENLPGIAALHAVFSELAKKQGSVFQAEAVLWQYRQQLISALKQVFPALELNSS

SEQ ID NO: 137758 - protein, 81 aa, Unknown
  Bacterial polypetide isolated from the Sargasso Sea
MLKKIYLDYQATTPVSKEILEKMIPYFSDNFGNPHSNNHSYGRSASEAVEEARENIANLINSNKEEIIFTSGATESNNFAI

SEQ ID NO: 137759 - protein, 285 aa, Unknown
  Bacterial polypetide isolated from the Sargasso Sea
KSRSIIENARNQVANSISANPEQIIFTSGGTESNNHVLWSLLNNHHRHVVSNKIEHPAILKVLHFLSQHGLKYDLVGVLSDGIVSVEKIEKAILPDTSLISLMLANNEIGTIQPIKDVVEIAKKYNVLVHTDAVQCLGKMEVNVLDLGVDFLSLSAHKFYGPKGIGILYAKDPKKLSSFIIGGGQERGLRAGTESISAIAGMGLAAEHCVESLSGKRELLIKLEKRLKSGINKFYKKAIYNGNQSKKLPGLINISFPKNQSNIIMAKLDRDGIAISNGPACGSGD

SEQ ID NO: 137760 - protein, 304 aa, Unknown
  Bacterial polypetide isolated from the Sargasso Sea
TTPLRDEVKKEMLNVMGPPLNASSVHSFGRQAKTHLENARTSISNFVNANSDQIIFTSGGTEANSMIMQIFKRPLISSIEHDAVIASSKNPNFIDVDSNGLVEIDDLEVKIKKFNPDIISVMWANNETGVIQPIRDIVKIAKKYKVYIHCDAVQALGKIDIDFKASGLNSLAISSHKIGGPVGVGALIVNDPYNLNPIIFGGGQERGHRSGTENLIGIVGFGSAARKIFLDNTEINNIMSLQKKFEKLIKSKLPNIKIFGENVPRLPNTTCVYMPHMNADAQVIAMDLEGFSVSAGSACSSGKV

SEQ ID NO: 137761 - protein, 117 aa, Unknown
  Bacterial polypetide isolated from the Sargasso Sea
MKNINNIYFDYQATTPVDPRVLEKMLPYFSDIYGNPHSRNHSYGWFAEEAVEMARENVAKIIGANPKEIIFTSGATESNNLAIKGLAEFYGDKKDHIITCVTEHKCVLESCKYLSEK

SEQ ID NO: 137762 - protein, 256 aa, Unknown
  Bacterial polypetide isolated from the Sargasso Sea
MDNHATTRVDPDVVESMIPWFTDNYGNAGSGTHAMGIEARDAVEAARQRVAQSVGATPREIVFTSGATESINLAMVGAVSRQSMKQCVVPETEHAAVLDVADQLERQGLSVCRLPVATKESKAPGSLDLDRLDEMVWSGPALVSVMFANNEIGLVHPISDIADIVHAHGALLHVDCAQAIGNCSLDVTALGADLASFSAHKCHGPKGVGALYVRRQERNVRIDPQVYGGGQERGIRSGTLNVPGKVGMGRACELAG

SEQ ID NO: 137763 - protein, 183 aa, Unknown
  Bacterial polypetide isolated from the Sargasso Sea
MDYAATTPVDRRVAKLMSGFLDFDGSFGNPASRTHIYGWQAEEAVENARVQVAKIINADPREIIWTSGATESDNLAIKGVAQLSDKKHIITSKIEHKAVLDTCHFLEEQGFEITFLTPDSSGCCSAQQVQEAVNEDTFLVSLMHVNNELGAINDIFKIGEVCRKNGLLFHVDAAQSFGQLAID

SEQ ID NO: 137764 - protein, 381 aa, Unknown
  Bacterial polypetide isolated from the Sargasso Sea
MKNKDYLYLDHAASTPMRKAAITEYVNAESFGFANSSGGHKLSRDSKNLLEDSREKIASLLDVAPGEIIFTSGGTEADNWTIKSLFSSTKLDENLVTSNIEHEAVLASAEWVSSLGHKVNYAKSNNEGLVEEDEFLDHVNEKTIVASLMWGNNETGVIQPISQISKALKSANESTLFHSDVVQGIISENINFHNSGIESAAISAHKIGGPKGVGAMFINNKYKLPSFLHGGKQELERRAGTVDVPGIASFAAALEEQQNKFDEEVGMMKEEREIFEDKLKNSLEVVIVGDSINRLPHISNIQFADINSEVLLIELDLNGLGVSRGSACASGAQKPSHVLEAMNVDEKFINNHLRFSFGWSNQKGDGSKAADIVIKAVQGMK

SEQ ID NO: 137765 - protein, 271 aa, Unknown
  Bacterial polypetide isolated from the Sargasso Sea
MTTYLDFASTTPMAPEVIEKMHAVMKEDSFGNPSSLDHEFGLAANKIVERSRAEVADLINANPDEILWTSGATESNNLAIVGFHQFQYKNQAMSFFTSHLEHKSVIECMDSIEALGSKVSFIKPNEKGRIDLKTLSDQVDEDAVFVSCMHVNNETGIINDIEKIGKYCRENEIVFHVDAAQSIGKIPIDVDDMCIDLMSMSAHKVYGPKGVGALYINKKSIGRVKSIIVGGGQERGMRSGTLPTHQIVGMATAYKLSKQRMHEDLEHITQC

SEQ ID NO: 137766 - protein, 385 aa, Unknown
  Bacterial polypetide isolated from the Sargasso Sea
MKTYLDFASTTPMASEVIEKMHAVMSEASYGNPSSLDHQFGLSANKIVEESRESVASLINANPDEILWTSGATESNNMAIVGFHQFQYKGQSMRFLSSHLEHKSVIESMHSIKDLGSNVCFIQPNEHGRIDIETFVNQMEEDVIYVSCMHVNNETGLINDIKEIGKYCRKNEIIFHVDAAQSIGKIPIDVRDMCIDLMSMSAHKVYGPKGVGALYINKDTVGRIKSIILGGGQERGMRSGTLPTHQIAGMAKAYDLSKERMDDDHKHIKQCRDIFIKTISNIDGWKLNGTDKDAYPGIVSICFPDLYSESLIYAMEDFAISRGSACSSDHDEPSHVLKSMGLLDHEINGTIRISFGRNTTLNEAESAASELIKAVSHLRNLKGEN

SEQ ID NO: 137767 - protein, 338 aa, Unknown
  Bacterial polypetide isolated from the Sargasso Sea
RNSKNLLEDSREVISELFNSAPGEIIFTSGGTEADNWTIKSLFDSKITNSNLVTSNIEHEAVLASAEWVSSNGFQTKYAKSDENGFVTKDEFINQIDDETIVASLMWGNNETGVIQPIKDISKELKSTNSSTLFHSDVVQGIISDNVDFHKNGIESAAISAHKIGGPKGVGAMFINSKYKLPSFLHGGKQELERRAGTVDVPGIAAFATALQEQQTRFDEEVGLMNNERLIFEDKLKNSLNVQIIGESMNRLPHISNIQFKDINSEVLLIQLDLNGLGVSRGSACASGAQKPSHVLEAMNVDSKFINNHLRFSFGWTTQAGDGNKAAEIVIKSVKEIN

SEQ ID NO: 137768 - protein, 71 aa, Unknown
  Bacterial polypetide isolated from the Sargasso Sea
EPSYVLRALGRPDELAHSSIRFSFGRFTTPEEVKMVAETTKRVVGQLKELSPLWDMHLDGVDLEKVEWAPH

SEQ ID NO: 137769 - protein, 381 aa, Unknown
  Bacterial polypetide isolated from the Sargasso Sea
MKNKDYLYLDHAASTPMRKSAITEYVNAESFGFANSSGGHKLSRDSKNLLEDSREKIASLLEVAPGEIIFTSGGTEADNWTIKSLFGATISDENLVTSNIEHEAVLASAEWVSSLGHNVNYAKANKKGIVEEDEFLSHVNEKTIVASLMWGNNETGVIQPIKKLSKSIKSINSTTLFHSDVVQGIISENINFHNSGIESAAISAHKIGGPKGVGAMFINSKYKLPSFLHGGKQELERRAGTVDVPGIASFAAALEEQQNKFDDEVGMMKEERDIFENKLKNSLEVVIVGDSIERLPHISNIQFADINSEVLLIELDLNGLGVSRGSACASGAQKPSHVLKAMNVDEKFINNHLRFSFGWSNQKGDGSKAADIVIKAAQGMK

SEQ ID NO: 137770 - protein, 371 aa, Unknown
  Bacterial polypetide isolated from the Sargasso Sea
MTLYLDYNASAPIISDVVDIMNESIGIIGNPSSIHASGRAARKAIEDSREIISETIDSNPQNIIFTSGATEANTLALNCSKAMQTFISSIEHDSVLKQNINAKLIPVTSEGIIDIEFLESNLRKSSEDNIFVSVMAVNNETGIIQPLEDISRICKENNAILHVDAVQAIGRIDISMDKLNIDLLTISSHKIGGPKGIGCLAVSDKVYTVLSPIIMGGGQERGFRGGTEAVNQIIGFGAAAKYAQKFSLSSTLTSRDLLEKNVLSMIPDSIIIGKNSPRVSNTSLIAFKNISAESLVIALDIEGYEVSSGSACSSGKIAASHVLRAMGINESLVKGAIRISLCRSLNKSEILSFCTILKRVINQLLRKKKII

SEQ ID NO: 137771 - protein, 62 aa, Unknown
  Bacterial polypetide isolated from the Sargasso Sea
GLKDELAHSSIRFGIGRFTNEEEVEYTIELVRDSVEKLRKLSPLWDMYKDGVDLDSVEWMAT

SEQ ID NO: 137772 - protein, 356 aa, Unknown
  Bacterial polypetide isolated from the Sargasso Sea
MKKSEYLYLDHAATTPMREVAIKAFIDAEHEGFANSSGGHNLSRKAKNILEESRETISSIFEVAPNEIIFTSGGTEADNWSIKSLFNKETDSNANLVTSSIEHEAVLASAEWIKDNDFTVTFAECLETGELDKNNFLNAINKNTIVASAMWANNETGIIQPIKELTKEVKKINSDTLFHSDVVQAVVSAKQNFHSEGIQSAAISAHKVGGPKGVGAMFLSNEFKLPSMLHGGKQELERRAGTVNVAGVASFAAALQEQQNNFDDEIAIMMNEKSEFEEIVKNNFKVKIIGENEKRLAHISNIQFEKVNSEVLMVDLDLNGLGVSRGSACASGAQRPSHVLEAMGIKKEYINNPLEI

SEQ ID NO: 137773 - protein, 383 aa, Unknown
  Bacterial polypetide isolated from the Sargasso Sea
MKKIYFDNAATTQISNEVIAVISDVMKNNFGNPSSTHSFGRSSKSLLELSRKYIAEKLNVLPSEIIFTSGGTESNNMIIKSAVESLGVKRIISTKIEHKAVLNSVETISKNKKLSLDFLDVDENGNPDKNQLKELLENSDETTLVSLMHINNEIGTMIDLNEYGKLCESNNAFFHSDTVQTIGHYNLDLSKTKIDFITCSAHKFHGPKGVGFIYVKNGTNLLPLIEGGSQERGLRGGTESIHNIAGLKKAFESSYNSLEKDSKNVYKIKEHFTNSIKKSIPNSKINGNFSKNNSSYAILNICLPISVEKKTLLNFKLDLAGIACSGGSACQSGSQRPSHVLSEIQTENDIKKISLRFSFSKFNTIDEVDYVVDFLKKFVDENC

SEQ ID NO: 137774 - protein, 338 aa, Unknown
  Bacterial polypetide isolated from the Sargasso Sea
ERSRAEVADLINANPDEILWTSGATESNNLAIVGFHQFQYKNQAMSFFTSHLEHKSVIECMDSIEALGSKVSFIKPNEKGRIDLKTLSDQVDEDAVFVSCMHVNNETGIINDIEKIGKYCRENEIVFHVDAAQSIGKIPIDVDDMCIDLMSMSAHKVYGPKGVGALYINKKSIGRVKSIIVGGGQERGMRSGTLPTHQIVGMATAYKLSKQRMHEDLEHITQCQNSFLKKLSNLDDWKINGSKEHSYPGILSICFPDLYSESLIYAMEDFAISRGSACSSDHDEPSHVLKSMGLVDDEINGTIRISFGRTTSIEQAELAASELINAVLHLRKLKGGSQ

SEQ ID NO: 137775 - protein, 372 aa, Unknown
  Bacterial polypetide isolated from the Sargasso Sea
MKLSEKFKKSIYLDYNATTPLRPESRIAMIDVLGNPGNPSSVHAMGRQAKSAIECARSQIADFVGASPENVIFTSGGTEADILALKGSGPSQILISSIEHDAVLAAVPEASRIMVSEDGLVNLNHLRTLLKETTKPSLISVMWANNETGAIQPIEEITALASDVDALVHVDGVQALGKIPIDFSNSGIDMLSVSAHKIGGPTGVGALMIRDSLPVKPLLVGGGQERGRRSGTENLSGIVGFGAAAKACKTQPGENLEVTQLRDMFEKTILEKALGAKIIAQGVARLGNTSAIFMPGLNAETQVMAFDLAGIAVSAGAACSSGKVKQSHVLKAMNLPDELINNTIRISFGWQNTHEDVDQLIEVWLKLYKESN

SEQ ID NO: 137776 - protein, 382 aa, Unknown
  Bacterial polypetide isolated from the Sargasso Sea
MKKSEYLYLDHAATTPMREIAIKAFIDAEHEGFANSSGGHNLSRKAKNILEESREIISSIFEVAPNEIIFTSGGTEADNWSIKSLFNKGIESNSNLVTSSIEHEAVLASAEWIKDNDFPVTFAECLNTGELDKNSFLNAVNENTIVASAMWANNETGIIQPIKELTKEVKKINSNTLFHSDVVQAVVSAKLNFHSEGIQSAAISAHKVGGPKGVGAMFISNEFKLPSMLHGGKQELERRAGTVNVAGVASFAAALQEQQNNFDDEISIMMNEKSEFEEIVKNNFKVKIIGENEKRLAHISNIQFEKVNSEVLMVDLDLNGLGVSRGSACASGAQRPSHVLEAMGIKKEYINNHLRFSFGWSTGLGEGKKAAEILLNSLEKIS

SEQ ID NO: 137777 - protein, 163 aa, Unknown
  Bacterial polypetide isolated from the Sargasso Sea
MKPLYFDYASTTPVDQRVIEKMKSCLSIDGNFGNPGSRSHAFGWQAEELVEEARINVAELLNCDPREIIWTSGATESDNLAIKGAAYFYKDKGKHIITSKIEHKAVLDTCRQLESEGFEVTYLETNDKGLVSLESVENNLRDDTSLVSLMHINNEIGVLNDIE

SEQ ID NO: 137778 - protein, 160 aa, Unknown
  Bacterial polypetide isolated from the Sargasso Sea
MQLPIYLDYASTTPADPRVVKKMQECLSLDGNFGNPASRSHAFGWKAEEATEEARQHVADLVNCDPREIVWTSGATESDNLAIKGAARFYKTKGNHIITSKIEHKAVLDSCRQLEREGFDITYLDPDSNGIISPDLVKESLTDKTILVSLMHINNEIGVV

SEQ ID NO: 137779 - protein, 306 aa, Unknown
  Bacterial polypetide isolated from the Sargasso Sea
MNHPIYMDYAATTPIDGRVAKLMSRYMDIEGVFGNPASRTHEFGWQAEEAVENARVQVAKVLNADPREIVWTSGATESDNLAIKGLAEKTDKNHIITSEIEHKAVLDTCHFLEEKGFNVTYLQPDAKGCCSADQVERALTDETFIVSLMHVNNELGAINDIAKIGKLCSNRDVVFHVDAAQSFGKIPIDVRAMGIDMISISAHKIYGPKGIGVLFVNRESNIGLQPMIHGGGHEFGMRSGTLATHQIVGIGEAAELMYLEGRKDFDAHLRFREILFSNLNQIPDIQINSDLEKSIPSIINVSFADV

SEQ ID NO: 137780 - protein, 274 aa, Unknown
  Bacterial polypetide isolated from the Sargasso Sea
DLKQLEASIREDTVLVSLMAGNNEIGTLNPLKEIGQMTRERGVLFHCDATQGVGKIPIDVEAMNIDLLSMTAHKIYGPKGIGALYVRRKKPRVRITPIMFGGGHERGFRSGTLNVPGIVGFGKAIELAMEEISSEAERQIGLRQHLYKRLTDELDYVFLNGHPTERLPNNLNLSFGYVEGESLMMGISEIAVSSGSACTSASLEPSYVLRSMGVGDDLAHSSVRFGFGRYTTMEEVNYAADKVIGAVKRLREMSPLYEMVQEGVDLSKVTWTSH

SEQ ID NO: 137781 - protein, 131 aa, Unknown
  Bacterial polypetide isolated from the Sargasso Sea
MSTQSTIYLDYASTTPVDPRVASKMMEFLTPEGEFGNPASRSHRFGWKADEAVEEARSHVANLVNCDPREVVWTSGATEADNLAIKGVARFYKSKGNHIITSKIEHKAVLDPCRQLEREGFEVTYLDPDDK

SEQ ID NO: 137782 - protein, 161 aa, Unknown
  Bacterial polypetide isolated from the Sargasso Sea
MSTQSTIYLDYASTTPVDPRVASKMMEFLTPEGEFGNPASRSHRFGWKADEAVEKARSHVANLVNCDPREIVWTSGATEADNLAIKGVARFYKSKGNHIITSKIEHKAVLDPCRQLEREGFEVTYLDPDEKGIISPSAVKSAIKDTTILVSIMHINNELGT

SEQ ID NO: 137783 - protein, 293 aa, Unknown
  Bacterial polypetide isolated from the Sargasso Sea
RVASKMMEFLTPEGEFGNPASRSHRFGWKADEAVEQARSHVANLVNCDPREVVWTSGATEADNLAIKGVARFYKSKGNHIITSKIEHKAVLDPCRQLEREGFEVTYLDPDDKGVISPEAVKAAIKDSTVLVSIMHINNELGTVNDISKIGDVTRDKGIFFHVDAAQSTGKVNIDLEKMSVDLMSFSAHKTYGPKGVGALYVRRKPRVRLEALIHGGGHERGMRSGTLATHQIVGMGEAFRLASKEMEEDHKKISKYHERFLDKVKEIDHVYINGDLNNKVPKYFKCKALFLLK

SEQ ID NO: 137784 - protein, 129 aa, Unknown
  Bacterial polypetide isolated from the Sargasso Sea
MKLPIYLDYAATTPVDPRVAEKMFQYMTMDGIFGNPASRSHRYGWQAEEAVDVARSQVADLINADHREIVFTSGATESNNLAIKGVAHFYNKKGKHIITSKTEHKAVLDTCRQLEREGFEVTYLEPDAN

SEQ ID NO: 137785 - protein, 222 aa, Unknown
  Bacterial polypetide isolated from the Sargasso Sea
MSTQSTIYLDYASTTPVDPRVASKMMEFLTPDGEFGNPASRSHRFGWKADEAVEEARSHVSGLVNCDPREIVWTSGATEADNLAIKGVARFYKSKGNHIITSKIEHKAVLDPCRQLEREGFEVTYLDPNEKGVITPDVIKSAIQENTILVSIMHINNELGTVNDIEKIGNITRDNGILFHVDAAQSTGKINIDLKNLNVDLMSFSAHKTYGPKGIGALYVRR

SEQ ID NO: 137786 - protein, 257 aa, Unknown
  Bacterial polypetide isolated from the Sargasso Sea
ISIMHINNELGTINDLSGIGKIAREKGIFFHVDAAQSTGKIDIDLSSLPVDLMSFSAHKTYGPKGIGALFVRRKPRVRIEAQIHGGGHERGMRSGTLPTHQIVGMGEAFRIAKEEMNNDKKRIQSLHDKFYKSISNIEEIYVNGDIENKVSNILNISFAYVEGESLIMALKDIAVSSGSACTSASLEPSYVLRALGRKDELASSSIRFSFGRFTTEEDVDYTLNLINHAVDRLRELSPLWEMYLDGIDLDTVDWQTH

SEQ ID NO: 137787 - protein, 156 aa, Unknown
  Bacterial polypetide isolated from the Sargasso Sea
MSIPIYLDYSSTTPVDKRVASKMADCLTLDGAFGNPASRSHSFGWDSDQLVKNARKHVADLIKCDTREIIWTSGATESNNLAIKGAAHFYKSKGNHLITLTTEHKAVLDTMRQLESEGFSVTYLNPEPNGLVDLNKLKSAITDQTLLISIMHVNNE

SEQ ID NO: 137788 - protein, 282 aa, Unknown
  Bacterial polypetide isolated from the Sargasso Sea
MDYASTTPVDPRVATKMMEFLTPDGEFGNPASRSHKFGWKADEAVEQSRSHVANLVNCDPREIVWTSGATEADNLAIKGVARFYKSRGNHIITSKIEHKAVLDPCRQLEREGFEVTYLDPDDKGVISPNQVKSAIKDSTVLVSIMHINNELGTINDIERIGEITRDNGIFFHVDAAQSTGKIQIDLQKMPVDLMSFSAHKTYGPKGVGALYVRRKPRVRLEALIHGGGHERGMRSGTLATHQIVGMGEAFRIAKEEMNEDHGKVIKFHQKFLEKVKRIDHVY

SEQ ID NO: 137789 - protein, 275 aa, Unknown
  Bacterial polypetide isolated from the Sargasso Sea
ENDCQIITVTTEHKCVLESCHTLDQEGLKVHYLNVNDDGLVDLNELENLLKQKKSLVSIMHANNETGVLQPIKEIGKLCKKYNSIFHSDVAQSLGTQKVDVEEMCIDSLSISAHKIYGPKGIGALYISNEIKNSLRPLISGGGQEMNLRSGTLSPALCVGLGEACKDLTINREKYFQHFKELKSKLLSELVLSKLDFVINGSNEKRIPNNLNISIKGKVADQLFNFLPNFALSSGSACTSGTIERSHVLTAMRYDESRVDGSFRISTGRDTTKDD

SEQ ID NO: 137790 - protein, 255 aa, Unknown
  Bacterial polypetide isolated from the Sargasso Sea
MSTQSTIYLDYASTTPVDPIVASKMMEFLTSDGEFGNPASRSHRFGWKADEAVEEARSHVANLVNCDPREIVWTSGATEADNLAIKGVARFYKSKGNHIVTSKIEHKAVLDPCRQLEREGFEVTYLDPDEKGIISASAVKNAIKDTTVLVSIMHVNNELGTVNDIAKIGDITRKNGSFFHVDAAQSTGKVKIDLEKMPIDLMSFSAHKTYGPKGIGALYVRRKPRVRLEALIHGGGHERGMRSGTLATHQIVGMG

SEQ ID NO: 137791 - protein, 292 aa, Unknown
  Bacterial polypetide isolated from the Sargasso Sea
FEVTYLEPDDGGIISPEDIKSALKENTILVSIMHINNELGTINNINEIGKIVKNKGAFFHVDAAQSTGKVNIDLKDAPIDLMSFSAHKTYGPKGIGALYVRRKPRVRIEALLHGGGHERGMRSGTLATHQIVGMGEAFRLAKLEMKKDHEKVSKFHKKFLDDVGKIEHVYINGDVKNKVPNILNVSFNFVEGESLIMGLKDIAVSSGSACTSASLEPSYVLRALGRKDELAHSSIRFSFGRFTNDDEVQRTLQLLNNVVERLRELSPLWEMHLDGIDLDTVEWTAHKFWEEC

SEQ ID NO: 137792 - protein, 218 aa, Unknown
  Bacterial polypetide isolated from the Sargasso Sea
MKLPIYLDYNATSPVDSRVLEEMLPFFTESFGNAASRNHSFGWQVEEVVENARDSIGNAIGADGKEIIFTSGATESNNIAIFGVAEFYKNKGKHIITNLIEHKAVIDPCNALEQKGYDITFLEVDKYGCIDLAQLADSIREDTILVSLMAGNNEIGTLNPIKEIGEITRENGVLFHTDATQGVGKIPIDVEEMNIDLLSMTAHKMYGPKGIGALYVRR

SEQ ID NO: 137793 - protein, 303 aa, Unknown
  Bacterial polypetide isolated from the Sargasso Sea
YMDIEGVFGNPASRTHEFGWQAEEAVENARVQVAKVLNADPREIVWTSGATESDNLAIKGLAEKTDKNHIITSKIEHKAVLDTCHFLEEKGFNVTYLQPDSKGCCSADQVERALTDETFIVSLMHVNNELGAINDIANIGKLCSNRDVVFHVDAAQSFGKIPIDVRVLGIDMISISAHKIYGPKGIGVLFVNRESNISLQPMIHGGGHEFGMRSGTLATHQIVGIGEAAELMYLEGRKDFDAHLRFREILFSSLNQIPDIKINSDLEKSIPSIINVSFADVNGETLMSALDNVALSSVQLQLR

SEQ ID NO: 137794 - protein, 232 aa, Unknown
  Bacterial polypetide isolated from the Sargasso Sea
IGEVTRAAGIVFHVDAAQSAGKVEIDLDKMKVDLLSLSAHKMYGPKGIGALFVRRKPRIRLEAQIHGGGHERGMRSGTLATHQIVGMGEAAEIAMAEMVSESKRLASLRERFWSGIKDVEAVQVNGDYHQRLPGVLNVSFNFVEGESLIMSLKDLAISSGSACTSASLEPSYVLRALGLSDELAHSSLRFSFGRFTTEEDVDLALGQLLNSVEKLRELSPLWDMYKDGIDLD

SEQ ID NO: 137795 - protein, 280 aa, Unknown
  Bacterial polypetide isolated from the Sargasso Sea
KRRKRIITAQTEHKCVIETCKRLEASGYELIFLPVKETGLLDFEALDASVNEDTLIVSIMAAHNEIGVLQEITAIGELCKKRGALFHTDAAQAIGKIPLDVQAMNIDLMSISGHKIYGPKGIGALYIRRRPRVRINPLIDGGGQERGLRSGTLSTPLCVGLGEACEIANQNLSHEPARLLELRQRLYEGIISAIPTTLLHGHIQQRLPGNLNISFPGIGSDQIMSAIPEIAFSSGSACTSNSIEPSYVIKALGAPDDAAQGAIRFGLGRFNTPDEIDYSH

SEQ ID NO: 137796 - protein, 102 aa, Unknown
  Bacterial polypetide isolated from the Sargasso Sea
MKTKAIYFDYAATTPVDPRVAKKMHECLLLDGNFGNPASRSHEFGWKAEEVVEKARLQVADLINADSREIVWTSGATESDNLAIKGAAKFYKDRGNHIITSK

SEQ ID NO: 137797 - protein, 285 aa, Unknown
  Bacterial polypetide isolated from the Sargasso Sea
MSSYLEPNEGGLISPEAVLNAIREDTVLISIMHINNELGTINDLSGIGKIAREKGIFFHVDAAQSTGKIDIDLSSLPVDLMSFSAHKTYGPKGIGALFVRRKPRVRIEAQIHGGGHERGMRSGTLPTHQIVGMGEAFRIAKEEMNNDKKRIQSLHDKFYKSISNIEEIYVNGDIENKVSNILNISFAYVEGESLIMALKDIAVSSGSACTSASLEPSYVLRALGRKDELASSSIRFSFGRFTTEEDVDYTLNLINHAVDRLRELSPLWEMYLDGIDLDTVDWQTH

SEQ ID NO: 137798 - protein, 295 aa, Unknown
  Bacterial polypetide isolated from the Sargasso Sea
VYFDYASTTPVDRRVAEKMHECLLLDGNFGNPASRSHEFGWKADEAVEKARLHVANLVKADSREIVWTSGATESDNLAIKGAARFYKDRGNHIITSKIEHKAVLDPCRQLEREGFEITYLDPDENGVISLENIQKHVKDSTILLSIMHINNEIGAVNDIEAIGKFTRENNIIFHVDAAQSTGKLHIDLSKLDVDLMSFSGHKTYGPKGIGALYVRRKPRIRLEALIHGGGHERGFRSGTLPTHQIVGMGEAFRIAEKEMEKDNKKIATLADLFWKEVSGIEEIYLNGSFKNKIPN

SEQ ID NO: 137799 - protein, 210 aa, Unknown
  Bacterial polypetide isolated from the Sargasso Sea
MDTKYLFKRNNVWWVKLAVPSVLRAELGYDLRKSTGQSDIEKAIAARENIITELKKKFISKSENKEFTNEDLNNKVTYLDYASTTPVDNRVVEKMKDCLTIDGAFGNAGSRSHSYGWKAEELIEEARLNVAKLVNCDPREIVFTSGATESDNLAIKGAAHFYKNKGKHIVTSKIEHKAVLDTCRQLEKEGFEVTYLETDEFGNISPKQVL

SEQ ID NO: 137800 - protein, 152 aa, Unknown
  Bacterial polypetide isolated from the Sargasso Sea
MSARIKDQKAKLSIPIYLDYSATTPVDERVAKKMSDCLTKEGTFGNPASRSHPYGWDSEKLIDEARSNVANLLGADKREIIWTSGATESDNLAIKGAAYFYKEKGNHLITLSTEHKAVLDTMRFLESEGFEVTYLDPKDNGLLDLNDLKKAI

SEQ ID NO: 137801 - protein, 159 aa, Unknown
  Bacterial polypetide isolated from the Sargasso Sea
MKTPIYLDYASTTPIDKRVADKMFEYMTMDGMYGNPASRSHSFGWDADAAVSESRKHIADLINADPREIVWTSGATESDNLAIKGAAHFYKKKGKHIITVKTEHKAVLDACRQLEREGFEVTYIEPKSDGLLDLNKLEAEIRDDTVLISVMHVNNEIGV

SEQ ID NO: 137802 - protein, 97 aa, Unknown
  Bacterial polypetide isolated from the Sargasso Sea
VEGESLLMSLKDIAVSSGSACTSASLEPSYVLRALGRNDELAHSSIRFSFGRFTTEEEVDYAAQKVCEAVNKLRELSPLWDMYKDGVDISKIEWAAH

SEQ ID NO: 137803 - protein, 75 aa, Unknown
  Bacterial polypetide isolated from the Sargasso Sea
MNGCHKNKVPNITNVSFAYIEGESLIMALKDVAVSSGSACTSASLEPSYVLRALGRADELAHSSIRFSFGRFTTE

SEQ ID NO: 137804 - protein, 89 aa, Unknown
  Bacterial polypetide isolated from the Sargasso Sea
ALKDVAVSSGSACTSASLEPSYVLRALGRPDELAHSSIRFSFGRFTTPEEVKMVAETTKRVVGQLRELSPLWDMHLDGVDLEKVEWAPH

SEQ ID NO: 137805 - protein, 296 aa, Unknown
  Bacterial polypetide isolated from the Sargasso Sea
HPYGWDSEKLIDEARVNVANLLGADKREIIWTSGATESDNLAIKGAAYFYKEKGNHLITLSTEHKAVLDTMRFLESEGFEVTYLDPKENGLLDIEELKKAIKSTTTVISIMHVNNEIGVIQDLESIGKICRENKIVFHVDAAQSPGKVDIDVNKFNIDLCALSAHKAYGPKGIGALYVRRKPRIRIQPQMHGGGHERGFRSGTLPTHQIVGMGEAFKYAKLEMEADNKKIKKLRDMLWNGLKDMEEIYLNGDLDQRIPGNLNVSFNFVEGESLIMAIKDIAVSSGSACTSASLEPS

SEQ ID NO: 137806 - protein, 287 aa, Unknown
  Bacterial polypetide isolated from the Sargasso Sea
NFGNPASRSHAFGWKAEEATEEARQHVADLVNCDPREIVWTSGATESDNLAIKGAARFYKTKGDHIITSKIEHKAVLDSCRQLEREGFQVTYLDPDSNGIISPDLVKEHLTDKTILVSLMHINNEIGVVNDIESIGKITREAGVIFHVDAAQSTGKLQIDLSTLEVDLMSFSAHKTYGPKGIGAMYARRKPRVRLEAQIHGGGHERGMRSGTLATHQIVGMGEAFRIAKLDMEEDNKRIESLRNKFWDAIKDMEEVYLNGDELSRAPGFLNVSFNYVEGESLIMALK

SEQ ID NO: 137807 - protein, 284 aa, Unknown
  Bacterial polypetide isolated from the Sargasso Sea
LVNCDPREIVWTSGATESDNLAIKGAARFYKIKGNHIITSKIEHKAVLDSCRQLEREGFDVTYLDPDSNGIISPNLVKESITDKTILVSLMHINNEIGVVNDIKAIGEITREAGIIFHVDAAQSTGKLPIDLSELKVDLMSFSAHKTYGPKGIGALYASRKPRVRLEAQIHGGGHERGMRSGTLATHQIVGMGEAFRIAKLDMDEDNKRIENLRNKFWNAIKDMEEVYLNGDEISRAPGFLNVSFNYVEGESLIMALKDIAVSSGSACTSASLEPSYVLRALGL

SEQ ID NO: 137808 - protein, 169 aa, Unknown
  Bacterial polypetide isolated from the Sargasso Sea
MKLPIYLDYAATTPVDPRVAEKMFQYMTMDGIFGNPASRSHRYGWQAEEAVDVARSQVADLINADHREIVFTSGATESNNLAIKGVAHFYNKKGKHIITSKTEHKAVLDTCRQLEREGFEVTYLEPDANGIIPMERLEAAMRDDTILVSIMHVNNEIGVIHDVDAIGEL

SEQ ID NO: 137809 - protein, 275 aa, Unknown
  Bacterial polypetide isolated from the Sargasso Sea
MLSTPILLDYQSSTPCSKDVVDSMKPFWREIFSNPASKSNLAGINASAILEASREKIEQNLFLQNKKVIFTSGATESNNLALLGFARNFYKKTGNFGHIITLKTEHKAVLEPLNQLKKEGFMVTEIIPEKDGLISEEQFKKNIREDTFLVSVMLANNEIGVIQPIENFSKICKSRGITFHSDFAQCLGYIELDNLLSDVNMITMSSHKIYGPKGIGLLLIDEEINLEPLIVGGGQEYGLRSGTLPLPLVVGFAKAIEMAVFNQKNNAEKLLLHRN

SEQ ID NO: 137810 - protein, 303 aa, Unknown
  Bacterial polypetide isolated from the Sargasso Sea
MVKPIYLDNQATTPIDPEVMDAMLPYFKEKFGNSSSVHHSYGSESNEAVEKARTILASTINAQTREIIFTSGATESINLAIKGVAGNYEQKYHIITQATEHSAVLDTYRAIEKKGWEITILPVKSNGMVEPNLVRDAIQSDTVLVSVMHANNEIGTIQPLKKIGDICKRNKILFFVDACQSFGKLNIDVREMNIDLLAATAHKLYGPKGIGFLYARQTNPRVNLEMQIDGGGHERGFRSGTLPVPLIVGFGKAIDISLKTMKTEYQFLRKLRDLLYDGIVSQHSDIILNGSFENGLPNNLNLC

SEQ ID NO: 137811 - protein, 203 aa, Unknown
  Bacterial polypetide isolated from the Sargasso Sea
SGATEADNLAIKGVARFYKSKGNHIITSKIEHKAVLDPCRQLEREGFEVTYLDPDDKGVISPEAVKAAIKDSTILVSIMHINNELGTVNDISKIGDVTRDKGIFFHVDAAQSTGKVNIDLEKMSVDLMSFSAHKTYGPKGIGALYVRRKPRVRLEALIHGGGHERGMRSGTLATHQIVGMGEAFRLANKEMEEDHKKISKYHE

SEQ ID NO: 137812 - protein, 300 aa, Unknown
  Bacterial polypetide isolated from the Sargasso Sea
QIAKICSVDISEIIFTSGATESNNIALFGLLEHAKKLGKTHIISTMIEHKAILDPLKEIENRGFEVTLVKPESSGHIDVRKIIKSINSNTFLISCMHANNETGSINDISLIGKLAKEIDSEIFIHSDCAQTFAKTNLDFTDPTIDMISFSGHKFFGPKGIGGLVTRKRNGISLPIKPIMYGGGQERGLRPGTQPVHLIAGIGLAAELAFLDRQNWTEKCLKIKDQALKTFDSEGTTIYGGVGSETLPNTLFISFGTHAESVIICLKDIAEIATGSACTSESYSPSHVLTAMGIDEDQAKK

SEQ ID NO: 137813 - protein, 315 aa, Unknown
  Bacterial polypetide isolated from the Sargasso Sea
MKPFWSEIFSNPANKSNLAGINASAILEASREKIEQSLFLKNKKVIFTSGATESNNLALLGFARNFYKKTGNYGHIITLKTEHKAVLEPLNQLKKEGFMVTEINPEKDGLISEEQFKKNIREDTFLVSVMLANNEIGVIQPLENISKICKSRGITLHSDFAQCLGYIELDNLLSDVNMITISSHKIYGPKGIGLLLIDEEINLEPLIVGGGQEYGLRSGTLPLPLVVGFAKAIEIAVLNQKNNAEKLLFYRNNLLEGLLKNNSGLLINGSIEKRLPHNLNLTVLDLNGAKFHKLLKSKIICSTGSACSSGEPSHV

SEQ ID NO: 137814 - protein, 287 aa, Unknown
  Bacterial polypetide isolated from the Sargasso Sea
SSATHQHGWYANGAIKRARKQVARAINCEESEIIFTSGATEGINQAIRAIYQLYYKKGNHIVVSKTEHKAVLDTILELEKKGAEVTYLDVNSEGLINPSDFSKALKTNTILATVMWVNNETGVIQNIKELSEKAHEKNIPFLCDGTQAIGKVPVNMQENKIGVLPISAHKFYGPKGVGALYIRRKKPRITIGPLITGGGQENKLRAGTLNTPGIVGLGEAIELAIDKLEENTKRLKFIKKEFKDFFLNYNAIFNESKENTSNHILNITLPGIKANNLLKKTRHLSYS

SEQ ID NO: 137815 - protein, 158 aa, Unknown
  Bacterial polypetide isolated from the Sargasso Sea
MSTQSTIYLDYASTTPVDPRVASKMMEFLTPEGEFGNPASRSHRFGWKADEAVEQARSHVANLVNCDPREIVWTSGATEADNLAIKGVARFYKSKGNHIITSKIEHKAVLDPCRQLEREGFEVTYLDPDEKGVISPSAVKSAIKDTTVLVSLCILIMR

SEQ ID NO: 137816 - protein, 44 aa, Unknown
  Bacterial polypetide isolated from the Sargasso Sea
NKGAAHFYNKKGKHIITSKTEHKAVLDTCRQLEREGFEVTYLEP

SEQ ID NO: 137817 - protein, 213 aa, Unknown
  Bacterial polypetide isolated from the Sargasso Sea
DHREIVFTSGATESSNLAIKGIAHFYHKKGKHIITSKTEHKATLDTCRQLEREGYDVTYLEPEANGIIPMERLEAAMRDDTILVSIMHVNNEIGVVHDINAIGELCRSKGVFFHMDAAQSAGKLPIDVQTTKVDLISISGHKMYGPKGIGALYVRRKPRIRLESQMHGGGHERGMRSGTLATHQIVGLGEAAAVAKQDMAEDGARITRLRDKL

SEQ ID NO: 137818 - protein, 275 aa, Unknown
  Bacterial polypetide isolated from the Sargasso Sea
GLTTPAMVQAALREDTILVSVMHANNEIGVVNDIAGIGQICRAAGALLHVDAAQGAGKVPLDMETMKVDLLSMSAHKMYGPKGVGALYVRRKPRVRIEAQMHGGGHERGMRSGTLATHQLVGFGEAARIAKAEMADEAARLSALRHRFWDAINDIPEVHINGDRDQRLPGALNVSFAFVEGESLIMSLRDLAISSGSACTSASLEPSYVLRALGLNDELAHSSLRFSFGRFTTDAEVDHAAQSVRHAVEKLRELSPLWDMYQDGVDLNTIEWAAH

SEQ ID NO: 137819 - protein, 273 aa, Unknown
  Bacterial polypetide isolated from the Sargasso Sea
MVLNSNIYLDYQSTTPVDSKVIEAMEPYLNIHFANPHSTEHVMGKFVSDSIEESRIKISKLINCESREIVFTSGATESNNIAIKGAARFYKDKNKNEIITINTEHKCVIESFHSLIKEGFKVVILPVENNGILDINKLINAISKKTLLVSVMALNNEIGVIQPLEKIGKLCKEKNILFHSDCAQAGGKIKVDVNKFNLDLLSLSSHKMYGPKGIGCLYVRRKPRVRLDPLFSGGFQENGIRSGTLPSHLCVGFGEAASIAIKNMSSDNLKIKN

SEQ ID NO: 137820 - protein, 230 aa, Unknown
  Bacterial polypetide isolated from the Sargasso Sea
MSANNETGVMQSIEEIGKLCKKYNAIFHSDIAQSIGTQDIDVKKMNLDVCSISAHKIYGPKGIGALYISNNIKNTLRPLISGGGQEKNLRSGTLSPALCVGLGEACKDLIKNKKKYDQHFKELKSFLLSELIKSKLEFDINGDVQKRIPNNLNISIKNTISEQLFNFMPHIALSSGSACTSGTIERSHVLTAMNLDDARIDGSFRISFGRQTTKDEIAELINSINKIYEN

SEQ ID NO: 137821 - protein, 164 aa, Unknown
  Bacterial polypetide isolated from the Sargasso Sea
MKLPIYLDYAATTPVDPRVAEKMFQYMTMDGIFGNPASRSHRYGWQAEEAVDVARSQVADLINADHREIVFTSGATESNNLAIKGVAHFYNKKGKHIITSKTEHKAVLDTCRQLEREGFEVTYLEPDANGIIPMERLEAAMRDDTILVSIMHVNNEIGVIHDVD

SEQ ID NO: 137822 - protein, 258 aa, Unknown
  Bacterial polypetide isolated from the Sargasso Sea
QSTIYLDYASTTPVDPRVATKMMEFLTPEGEFGNPASRSHRFGWKADEAVEEARSHVANLVNCDPREIVWTSGATEADNLAIKGVARFYKSKGNHIITSKIEHKAVLDPCRQLEREGFEVTYLDPDEKGVVSPSAIKSAIKDSTVLVSIMHINNELGTLNDIAKIGEITRKYGAFFHVDAAQSTGKVEIDLEKMPIDLMSFSAHKTYGPKGIGALYVRRKPRVRLEALIHGGGHERGMRSGTLATHQIVGMGEAFRIA

SEQ ID NO: 137823 - protein, 210 aa, Unknown
  Bacterial polypetide isolated from the Sargasso Sea
IDLLSMTAHKFYGPKGIGALYVRRKKPRVRLSPIMFGGGHERGMRSGTLNVPGIVGFAKALELSVEEMASEAERLTGLRQRLLDRLNSELDYIFLNGHPTERLPNNLNVSFGYVEGESLMMGVNELAVSSGSACTSASLEPSYVLRALGVGDDLAHSSIRVGMGRFTTVEEVDYTAEKMIDAVKRLREMSPLYEMVKDGVDLSTVKWTSH

SEQ ID NO: 137824 - protein, 255 aa, Unknown
  Bacterial polypetide isolated from the Sargasso Sea
SEIFSNPSSKSNLGGINASAILEVSREKIQEYLFLQKKKVIFTSGATESNNLALLGFARNYYKKTEKYGHIITLKTEHKAVLEPLDQLKKEGFHVTEILPNKDGLISEEKFVSCIREDTFLVSIMMANNEIGVIQPLKKISEICGSRDITLHSDYAQCLGFLELDSLDSVANMLTISSHKIYGPKGVGLLLIDRDIELQPLILGGGQEFGLRSGTLPLPLIVGFTKAIQIAVLNQKKNAEKLIFHRDKLLKGLLV

SEQ ID NO: 137825 - protein, 301 aa, Unknown
  Bacterial polypetide isolated from the Sargasso Sea
WWKADEAVEEARNNLATLIGCDPREIIWTSGATESDNLAIKGSARFYKNKGNHLITSKIEHKAVLDPFRQLEDEGFEVTYLEPNSSGEITVEQVSQAVNEKTILVSLMHMNNELGTITDIDSIGELTRSKGIIFHVDAAQSIGKIPVNMSSNKIDLLSISAHKFYGPKGVGALFVRRKPRVRLEPLFHGGGHERGFRSGTLATHQIVGLGEAARIAHQQMDDDLRKLENLKRIFWEEVQDIEEIYVNGDSKNKFPGILNISFNFVEGESLIMALKSIAVSSGSACTSASLEPSYVLRALAE

SEQ ID NO: 137826 - protein, 133 aa, Unknown
  Bacterial polypetide isolated from the Sargasso Sea
MKLPIYLDYSATTPVDPRVAQKMADCLLVDGNFGNPASRSHVFGWKAEEAVENGRRQVAELINADPREIVWTSGATESDNLALKGVAHFYQTKGKHIITSKIEHKAVLDTARQLEREGFESHYLEPGEDGIVT

SEQ ID NO: 137827 - protein, 231 aa, Unknown
  Bacterial polypetide isolated from the Sargasso Sea
FCNPASRSHKFAGQAEEAVEIARAQIAELVNADPREIVFTSGATESNNLAIKGAAQFYHKKGKHLITAKTEHKAVLDAMRALEREGFEVTYLDVEANGLVDLNKLEAAIRPDTTVISIMFVNNEIGVIQDIAAIGELCRSKGIIFHVDAAQATGKVDIDLETLKVDLMSFSGHKTYGPKGIGALYVRRKPRIRLEAQTHGGGHERGMRSGTLATHQIVAMGEAFRIAKEEM

SEQ ID NO: 137828 - protein, 224 aa, Unknown
  Bacterial polypetide isolated from the Sargasso Sea
NGLLDLEKLKSAITEQTLLVSIMHVNNEIGVIQDLERIGALLRERKILFHVDAAQSPGKVEIDVDKFNVDLLSLSAHKVYGPKGIGALYVRRKPRVRLESQMHGGGHERGFRSGTLPTHQIVGMGEAFKIAREEMEDDNKRIKKLRDKFWNQLKDVEEIYLNGDLENRIPGNLNISFNYVEGESLIMAIKDIAVSSGSACTSASLEPSYVLRALGRDDELAHSS

SEQ ID NO: 137829 - protein, 271 aa, Unknown
  Bacterial polypetide isolated from the Sargasso Sea
FFTEIYGNAASRNHSFGWTAEEGISKARNIIGEAIGATGKEIVFTSGATESDNMAVLGVAEFYHEKGKHIITSPIEHKAVVDPCQALEQKGYEITFLDVDEYGRIDLKQLEASIREDTVLVSLMAGNNEIGTLNPLTEIGQMTRERGVLFHCDATQGVGKIPIDVEAMNIDLLSMTAHKIYGPKGIGALYVRRKKPRVRITPIMFGGGHERGFRSGTLNVPGIVGFGKAIELAMEEISSEAERQIGLRQHLYKRLTDELDYVFLNGHPTER

SEQ ID NO: 137830 - protein, 278 aa, Unknown
  Bacterial polypetide isolated from the Sargasso Sea
MSTQSTIYLDYASTTPVDPRVATKMMEFLTPEGEFGNPASRSHRFGWKADEAVEEARSHVANLVNCDPREIVWTSGATEADNLAIKGVARFYKSKGNHIITSKIEHKAVLDPCRQLEREGFEVTYLDPDEKGVVSPSAIKSAIKDSTVLVSIMHINNELGTLNDIAKIGEITREYGAFFHVDAAQSTGKVEIDLEKMPIDLMSFSAHKTYGPKGIGALYVRRKPRVRLEALIHGGGHERGMRSGTLATHQIVGMGEAFRIANKEMKKDHKKISKYHEK

SEQ ID NO: 137831 - protein, 88 aa, Unknown
  Bacterial polypetide isolated from the Sargasso Sea
EKFLEKVKEIDHVYINGVLNNKVPNILNVSFNFVEGESLIMGLKDLAVSSGSACTSASLEPSYVLRALGRKDELAHSSIRFSFGRFTS

SEQ ID NO: 137832 - protein, 289 aa, Unknown
  Bacterial polypetide isolated from the Sargasso Sea
TREIIWTSGATESDNLAIKGAARFYKTKGNHIITSKIEHKAVLDPCRQLEREGFEVTYLEPDQNGVISVDQIETAITDKTILVSIMHVNNELGSVNDIEAIGKLTRSKNIIFHVDAAQSTGKVDIDLSKLEVDLMSFTAGKTYGPKGIGALYVSRKPRVRLEALIHGGGHERGFRSGTLATHQIVGMGEAFKIAKEEMKDDNKKIAKLSKTFWKKISSIPEIFLNGSLDNKVPNIINVSFAYIEGESLIMALKDVAVSSGSACTSASLEPSYVLRALGRADELAHSSIR

SEQ ID NO: 137833 - protein, 99 aa, Unknown
  Bacterial polypetide isolated from the Sargasso Sea
NFVEGESLIMGLKDIAVSSGSACTSASLEPSYVLRALGRKDELAHSSIRFSFGRFTSDDDVNNTLDILGNVVHRLRELSPLWEMHLDGIDLDTVEWNAH

SEQ ID NO: 137834 - protein, 199 aa, Unknown
  Bacterial polypetide isolated from the Sargasso Sea
YGPKGIGALYVRRKKPRVRLSPIMFGGGHERGMRSGTLNVPGIVGFAKALELSVEEMASEAERLTGLRQRLLDRLNSELDYIFLNGHPSERLPNNLNVSFGYVEGESLMMGVNELAVSSGSACTSASLEPSYVLRALGVGDDLAHSSIRVGMGRFTTIEEVDYAAEKMIAAVKRLREMSPLYEMVKDGVDLSTVQWTSH

SEQ ID NO: 137835 - protein, 216 aa, Unknown
  Bacterial polypetide isolated from the Sargasso Sea
MNLPIYMDYASTTPVDPRVAKKISDHLTLDGNFGNPASRSHKFGWKAEEAVEEARSHVANLVNCDPREIVWTSGATEADNLAIKGIANFYKKNGRHIITSKIEHKAVLDPCRQLERDGFEVTYLEPNEGGLISPEAVLNAIREDTVLISIMHINNELGTINDLSGIGKIAREKGIFFHVDAAQSTGKIDIDLSSLPVDLMSFSAHKTYGPKGNWSF

SEQ ID NO: 137836 - protein, 292 aa, Unknown
  Bacterial polypetide isolated from the Sargasso Sea
ASRSHSFGWQADEAVELARSHVANLVNCDPREIVWTSGATEADNLAIKGIANFYKTKGKHIITSKIEHKAVLDPCRQLERHGFDVTYLEPNEGGVITPEAVKEAIREDTILVSIMHINNELGTINDIASIGELTRDNGIFFHVDAAQSTGKVNIDLSTLKVDLMSFSAHKTYGPKGVGALFVRRKPRVRIEAQIHGGGHERGMRSGTLATHQIVGMGEAFRLAKEEMKSDSEKVTEFHEYFLEEVKKIDEIYINGDIQNKVPNILNVSFNFIEGESLIMGLKDIAVSSRFSM

SEQ ID NO: 137837 - protein, 141 aa, Unknown
  Bacterial polypetide isolated from the Sargasso Sea
MGKAEVINVPIYLDYLSTTPVDPRVVEAMTQCLSMDGVFGNPASRSHQYGWKAEEAIENARCQVAELINADPREIVWTSGATESDNLAIKGAAHFYQRKGKHIITSKIEHKAVLDTCRQLEREGFEVTYLEPNADGLTTPE

SEQ ID NO: 137838 - protein, 267 aa, Unknown
  Bacterial polypetide isolated from the Sargasso Sea
MQLPIYLDYASTTPADPRVVKKMQECLSLDGNFGNPASRSHAFGWKAEEATEEARQHVADLVNCDPREIVWTSGATESDNLAIKGAARFYKTKGNHIITSKIEHKAVLDSCRQLEREGFDITYLDPDSNGMISPDLVKESLTDKTILVSLMHINNEIGVVNDIKAIGEITREAGIIFHVDAAQSTGKLPIDLSELEVDLMSFSAHKTYGPKGIGALYASRKPRVRLEAQIHGGGHERGMRSGTLATHQIVGMGEAFRIARLDMDEDN

SEQ ID NO: 137839 - protein, 267 aa, Unknown
  Bacterial polypetide isolated from the Sargasso Sea
VANAINAEASEIIFTSSGSEANNLVLWDVIQRRGQHVIISSIEHPSVFETVNALKSLGLSVSEIGVDHFGRVRVHDIEDKIKNETALVAIMTANNETGTIQPINEVAALCRERGIHFHTDAVQALGKIKVDFTENYTSTASFSAHKVYGPKGVGVLYIRKGNKLHPLVYGGSQEKSLRAGTENVPGIVGFGLACELITENINEHSSRVENLRNMMVNRIISEFPSGIINGHPEKHLPGVLSVVLPKIDAQTLLIKLDLDGFAVSTGA

SEQ ID NO: 137840 - protein, 227 aa, Unknown
  Bacterial polypetide isolated from the Sargasso Sea
MSTKVTLPIYMDYASTTPVDPRVAKKISDHLTLDGNFGNPASRSHKFGWKAEESVEEARSHVANLVGCDPREIVWTSGATEADNLAIKGIANFYKSKGKHIITSKIEHKAVLDPCRQLERDGFEVTYLEPNEGGLITVEAILDAIREDTILISIMHINNELGTINDLESIGKIAREKGIFFHVDAAQSTGKVPIDLSTLPVDLMSFSAHKTYGPKGVGALLSEENHA

SEQ ID NO: 137841 - protein, 192 aa, Unknown
  Bacterial polypetide isolated from the Sargasso Sea
MSARIKDKKAKLSIPIYLDYSATTPVDERVAKKMSDCLTKEGTFGNPASRSHPYGWDSEKLIDEARSNVANLLGADKREIIWTSGATESDNLAIKGAAYFYKEKGNHLITLSTEHKAVLDTMRFLESEGFEVTYLDPKDNGLLDLDELKKAIRPTTTVISIMHVNNEIGVIQDLESIGKICRENKIVFHVDA

SEQ ID NO: 137842 - protein, 221 aa, Unknown
  Bacterial polypetide isolated from the Sargasso Sea
MKQPIYLDYAATTPVDPAVAEKMVACLTMDGNFANPASRSHVYGWKAEEAAENARRQVADLVGADPREIVWTSGATESNNLAIKGMAHALSARGRHLITSTIEHKAVLDCFKQLEQEGFEVTWLQADASGVITPEQLRSALREDTALVSLMHVNNEIGTINDIRALGEVAQGAGAVFHVDAAQSTGKLPIDLKNMPVDLMSFSAHKTYGPKGVGALFVRRG

SEQ ID NO: 137843 - protein, 282 aa, Unknown
  Bacterial polypetide isolated from the Sargasso Sea
MHECLLLDGNFGNPASRSHEFGWKAEEVVEKARLQVADLINADSREIVWTSGATESDNLAIKGAAKFYKDRGNHIITSKIEHKAVLDPCRQLEREGFEVTYLDPNEDGIVTVEQLKKHVKENTILISLMHINNELGSINDIEKIGNFAREKNIIFHVDAAQSIGKVDINLSKLNVDLMSFSAHKCYGPKGMGALYIRRKPRVRLEALIHGGGHERGFRSGTLATHQIVGMGEAFNLAKKEMAKDNKKIKKLSELFWNEISDIEEIVLNGNKKNKVANITNVS

SEQ ID NO: 137844 - protein, 133 aa, Unknown
  Bacterial polypetide isolated from the Sargasso Sea
EFHEYFLEEVKKIDEIYINGDIKNKVPNILNVSFNFIEGESLIMGLKDIAVSSGSACTSASLEPSYVLRALGRKDELAHSSIRFSFGRFTSKDDVRNTLKLLSNVVERLRELSPLWEMHLDGIDLDTVEWQAH

SEQ ID NO: 137845 - protein, 234 aa, Unknown
  Bacterial polypetide isolated from the Sargasso Sea
MSTQSTIYLDYASTTPVDPRVASKMMEFLTPEGEFGNPASRSHRFGWKADEAVEEARSHVANLVNCDPREIVWTSGATEADNLAIKGVARFYKSKGNHIITSKIEHKAVLDPCRQLEREGFEVTYLDPNDKGVITPEAVKAAIKDSTVLVSIMHINNELGTVNDISQIGDITRDKGIFFHVDAAQSTGKVNIDLEKMSVDLMSFSAHKTYGPKGVGALYVRRKPRVRLEALIHG

SEQ ID NO: 137846 - protein, 278 aa, Unknown
  Bacterial polypetide isolated from the Sargasso Sea
DDKSVISPEAVKAAIKDSTVLVSIMHINNELGTVNDISKIGDVTRDKGIFFHVDAAQSTGKVNIDLEKMSVDLMSFSAHKTYGPKGVGALYVRRKPRVRLEALIHGGGHERGMRSGTLATHQIVGMGEAFRLASKEMEEDHKKISKYHEKFLDKVNEIDHVYINGDLNNKVPNILNVSFNFVEGESLIMGLKDIAVSSGSACTSASLEPSYVLRALGRKDELAHSSIRFSFGRFTSDDDVNNTLDILGNVVHRLRELSPLWEMHLDGIDLDTVEWNAH

SEQ ID NO: 137847 - protein, 312 aa, Unknown
  Bacterial polypetide isolated from the Sargasso Sea
KNHIITCVTEHKCVLESCRHLDGKGFEVTYLPVGSDGLIDLKELEDSITDKTLLVSIMGVHNEIGIIQPLEQIGQICRNNNVFFHTDCAQAIGKIPLDVEKMNIDLMSISGHKIYAPKGVGALYIRRKPRVRISSMISGGGQERGMRSGTLSPALCVGLGEACNIYLKEMEKEHKMLSNFKKIMLDGIRSSCKDVFLNGSEEKRVPGNLNLSFAYVEGESLMMGIKNLAVSSGSACTSASLEPSYVLKALGVEEELAHTSLRIGFGRFTTENDVRYATETIVNEVKRLRELSPLWEMAQEGVDISKIKWAHH

SEQ ID NO: 137848 - protein, 341 aa, Unknown
  Bacterial polypetide isolated from the Sargasso Sea
MKESIYFDYASTTPVDPRVAKKMFAYMSKDGHFGNPASRSHAYGWKADEAVEKARTQVANLVNADPREIVWTSGATESDNLALKGAAMFYKTKGKHIITSKIEHKAVLDPCRQLEREGFEVTYLDPDLNGEVTLENIRKHVRKDTILISIMHINNELGAVNDIKKIGDFTRKEGIIFHVDAAQSTGKLKIDLNKLNVDLMSFSAHKTYGPKGVGALYVRRKPRIRLEALIHGGGHERGFRAGTLATHQVVGMGEAFALAQKEMDKDNKKIKDLSDKFWKEISSIEEIFLNGCQKNKVPNITNVSFAYIEGESLIMALKDVAVSSGSACTSASLEPSYVLRA

SEQ ID NO: 137849 - protein, 295 aa, Unknown
  Bacterial polypetide isolated from the Sargasso Sea
MSANTKKINSTLSIPIYLDYSSTTPVDKRVADKMSECLTLDGAFGNPASRSHSFGWDSDHLIKTARANVANLLKCDSKEIVWTSGATESNNLAIKGAAHFYKSKGDHLITLTTEHKAVLDTMRQLELEGYNVTYLDPEPNGLVDLKKLEDAITEKTLLVSIMHVNNEIGVIQDLESIGKLCKKHKILFHVDAAQSPGKVDIDVNKFNIDLMSLSAHKVYGPKGIGALFIRRKPRVRLEAQMHGGGHERGFRSGTLPTHQIVGMGEAFRIANEEMEVDNIRIRKLRDKFLDSTKRC

SEQ ID NO: 137850 - protein, 409 aa, Unknown
  Bacterial polypetide isolated from the Sargasso Sea
MKGVTLRGRPLYLDMQATTPLDPRVLDAMLPFFTERYGNPHSRTHMYGWETEDAIERARGELAALIGANPKEIVFTSGATESNNMALKGVARFYGEKKRHIITTTTEHKCVLDSCRQLEREGYEVTYLPVRENGLVDLKELEAAMREDTAVVSVMAVNNEIGVIQPLKEIGELCRSRKIFFHTDGAQALGKVPVDVNEMKIDLMSISGHKFYGPKGIGALYVRRRPRVRMEPIINGGGQERGLRSGTLPTPLIVGIGEAARVAKEEMEHDEAHVKRLAKRLIEGIESRVEHTQLNGDRDARYPGNVNMSFAYVEGESMLMGLKEIAVSSGSACTSASLEPSYVLRALGVNEEMAHTSVRYGLGRFTTEEEVDRAIEATVRQVEKLREMSPLWEMVQEGIDLKTIEWTQH

SEQ ID NO: 137851 - protein, 400 aa, Unknown
  Bacterial polypetide isolated from the Sargasso Sea
MSTQSTIYLDYASTTPVDPRVASKMMEFLTPEGEFGNPASRSHRFGWKADEAVEEARSHVANLVNCDPREVVWTSGATEADNLAIKGVARFYKSKGNHIITSKIEHKAVLDPCRQLEREGFEVTYLDPDDKGVISPEAVKAAIKDSTVLVSIMHINNELGTVNDISKIGDVTRDKGIFFHVDAAQSTGKVNIDLEKMSVDLMSFSAHKTYGPKGVGALYVRRKPRVRLEALIHGGGHERGMRSGTLATHQIVGMGEAFRLANKEMEEDHKKISKYHEKFLDKVKEIDHVYINGDLNNKVPNILNVSFNFVEGESLIMGLKDIAVSSGSACTSASLEPSYVLRALGRKDELAHSSIRFSFGRFTSDDDVNNTLDILGNVVQRLRELSPLWEMHLDGIDLDT

SEQ ID NO: 137852 - protein, 126 aa, Unknown
  Bacterial polypetide isolated from the Sargasso Sea
DGLKDMEEVYLNGDENLRAAGFLNVSFNYVEGESLIMALKDIAVSSGSACTSASLEPSYVLRALGLKDELAHSSIRFGIGRFTTEEEVDYTIDLVKDSVEKLRKLSPLWDMYKDGVDLDSVEWMAT

SEQ ID NO: 137853 - protein, 404 aa, Unknown
  Bacterial polypetide isolated from the Sargasso Sea
MKQPIYLDYNATTPTDPRVVEAMLPFFTEIYGNAASRNHSFGWTAEEGVSKARNIIGEAIGATGKEIVFTSGATESDNMAVLGAAEFYHEKGKHIITSPIEHKAVVDPCQALEQKGYEITFLDVDEHGRIDLKQLEASIREDTVLVSLMAGNNEIGTLNPLTEIGQMTRERGVLFHCDATQGVGKIPIDVETMNIDLLSMTAHKIYGPKGIGALYVRRKKPRVRITPIMFGGGHERGFRSGTLNVPGIVGFGKAIELAMEEISSEAERQIGLRQHLYKRLTDELDYVFLNGHPTERLPNNLNLSFGYVEGESLMMGISEIAVSSGSACTSASLEPSYVLRSMGVGDDLAHSSVRFGFGRYTTMEEVNYAADKVIGAVKRLREMSPLYEMVQEGVDLSKVTWTSH

SEQ ID NO: 137854 - protein, 163 aa, Unknown
  Bacterial polypetide isolated from the Sargasso Sea
MQLPIYLDYASTTPVDPRVVKKMQDCLSMDGNFGNPASRSHAFGWKAEEATEQARQHVADLVNCDPREIVWTSGATESDNLAIKGSARFNKSKGNHIITSKIEHKAVLDSCRQLETEGFEVTYLDPTDKGIITPQMVADAITNETILVSLMHLNNEIGVINDI

SEQ ID NO: 137855 - protein, 410 aa, Unknown
  Bacterial polypetide isolated from the Sargasso Sea
MKQNNSLTIPIYLDYSSTTPVDPRVAAKMSECLTKEGVFGNPASRSHSFGWESEKLIDEARGHVAKLIKANKKEIVWTSGATESDNLAIKGAAHFYKEKGNHLITLTTEHKAVLDTMRHLETEGFEVTYMNPKDNGLVDIDELKSLIKPTTTVISIMHVNNEIGVIQDLETIGKICRDNKIVFHVDAAQSPGKVDIDVDKYNIDLLSLSAHKVYGPKGIGALYVRRKPRIRLQPQMHGGGHERGFRSGTLPTHQVVGMGEAFKIAEEEMESDNKRISILRDKLWNGLNSIEEIYLNGDMKQRIPGNLNVSFNFVEGESLIMAIKDMAVSSGSACTSASLEPSYVLRALGRSDELAHSSLRISIGKYTTEEEIDYSVSLIKEAVAKLRELSPLWEMYKDGIDLNSVKWSAH

SEQ ID NO: 137856 - protein, 404 aa, Unknown
  Bacterial polypetide isolated from the Sargasso Sea
MKLPIYLDYAATTPVDPRVAEKMFQYMTMDGIFGNPASRSHRYGWQAEEAVDVARSQVADLINADHREIVFTSGATESNNLAIKGVAHFYNKKGKHIITSKTEHKAVLDTCRQLEREGFEVTYLEPDANGIIPMERLEAAMRDDTILVSIMHVNNEIGVIHDVDAIGELCRSKGIIFHMDAAQSAGKVPIDVQRTKVDLISISGHKMYGPKGIGALYVRRKPRIRLEAQMHGGGHERGMRSGTLPTHQIVGLGEAAAIAKAEMATDDARIAKLRDKLWNGIKHIEETYINGDMTQRVSGSLNVSFNYVEGESLMMALKDLAVSSGSACTSASLEPSYVLRALGLNDEMAHSSIRFSIGRFTTEEEIDHAIEVITQSIDKLREMSPLWEMFKDGIDLNQVQWAHH

SEQ ID NO: 137857 - protein, 364 aa, Unknown
  Bacterial polypetide isolated from the Sargasso Sea
MAKCLTLDGNFGNPASRSYRFGWMAEEAVDVARNQISDAINCDPREIVFTSGATESNNLAIKGVAEGYANKGKHIITVNTEHKAVLDTCEFLQSQGFEVTYLEVLPNGLIDLNDLENALRDDTILVSVMHVNNELGVIQDIQAIGQLCRDKGVLFHIDGAQSVGKIAIDLAELPIDLLSISAHKIYGPKGMGALYVRRRPKINLVAQIHGGGHERGMRSGTLATHQIVGMGEAIALASSKMEEDSARILALRESLWQGLQQLDDVYLNGHATQRIPGILNVSFAGVDGESLMMGLNDIAVSSGSACTSASLEPSYVLKAIGRSNELAHAGIRFSVGRFTTQEDIDYVIQKVVDVTTRLRQAVSA

SEQ ID NO: 137858 - protein, 385 aa, Unknown
  Bacterial polypetide isolated from the Sargasso Sea
MKTYLDFASTTPIASEVIEQMHAVMSEASYGNPSSLDHQFGLSANKIVEESRESVASLINANPDEILWTSGATESNNMAIVGFHQFQYKGQSMRFLSSHLEHKSVIESMHSIKDLGSNVCFIQPNEHGRIDFETFVNQMKKDVIYVSCMHVNNETGLINDIKEIGKYCRKNEIIFHVDAAQSIGKIPIDVKDMCIDLMSMSAHKVYGPKGIGALYINKETVGRVKSIILGGGQERGMRSGTLPTHQIAGMAKAYDLSKERMDDDHKNIKQCRDIFIKTISRINGWKINGADKDAYPGIMSICFPDLYSESLIYAMEHFAISRGSACSSDHDEPSHVLKGMGLLDHEINGTIRISFGRNTTLNEAESAASELIKAVSHLRNLKGDN

SEQ ID NO: 137859 - protein, 359 aa, Unknown
  Bacterial polypetide isolated from the Sargasso Sea
MSRYMDIEGVFGNPASRTHEFGWQAEEAVENARVQVAKVLKADPREIVWTSGATESDNLAIKGLAEKTDKNHIITSKIEHKAVLDTCHFLEEKGFNVTYLQPDSKGCCSADQVERALTDETFIVSLMHVNNELGAINDIAKIGKVCSNRDVVFHVDAAQSFGKIPIDVRALGIDMISISAHKIYGPKGIGVLFVNRESNIGLQPMIHGGGHEFGMRSGTLATHQIVGIGEAAELMYLEGRKDFDAHLRFREILFSSLNQIPDIHINSDLETSIPSIINVSFADVNGETLMSALDNVALSSGSACNSELVEPSYVLKGIGLSNELADSALRFSFGRYTIEEEVQAVGKQVAKVVGALRSS

SEQ ID NO: 137860 - protein, 408 aa, Unknown
  Bacterial polypetide isolated from the Sargasso Sea
MSTKVTLPIYMDYASTTPVDPRVAKKISDHLTLDGNFGNPASRSHKFGWKAEESVEEARSHVANLVGCDPREIVWTSGATEADNLAIKGIANFYKSKGKHIITSKIEHKAVLDPCRQLERDGFEVTYLEPNEGGLITDEAILNAIREDTILISIMHINNELGTINDLESIGKIAREKGIFFHVDAAQSTGKVPIDLTTLPVDLMSFSAHKTYGPKGVGALFVRRKPRVRIEAQIHGGGHERGMRSGTLATHQIVGMGEAFRIAKEEMDKDIKKVQSLHNKFYDSVSKIEEIYVNGDMNNKVSNILNISFAYVEGESLIMALKDIAVSSGSACTSASLEPSYVLRALGRKDELASSSIRFSFGRFTTEEDVDYTLSLINHAVDRLRELSPLWEMYLDGVDLDTVEWQTH

SEQ ID NO: 137861 - protein, 401 aa, Unknown
  Bacterial polypetide isolated from the Sargasso Sea
MKPLYFDYASTTPVDQRVIEKMKSCLSIDGNFGNPGSRSHAFGWQAEELVEEARINVAELLNCDPREIIWTSGATESDNLAIKGAAYFYKDKGKHIITSKIEHKAVLDTCRQLESEGFEVTYLETNEKGLVSLESIENNLRDDTSLVSLMHINNEIGVLNDIDEIGELCRDKGVIFHVDAAQSAGKVNIDLSKLKIDLMSFSAHKIYGPKGIGALYVRRKPRIRLQPLFHGGGQERGIRAGTLPTHQIVGMGEAFKLANSEMKNDFKTISSFRDLLWNGLKDMEEIYINGCLETGYPGIFNLSFNFVEGESLIMALKNIAVSSGSACTSASLEPSYVLRALGRPDELAHSSIRFSFGRFTKKEEVEFTINLVKDSVSQLREISPLWEMYQDGVDLDKIEWA

SEQ ID NO: 137862 - protein, 376 aa, Unknown
  Bacterial polypetide isolated from the Sargasso Sea
MSDKIFLDYQSTTPVSKEVLEKMIPFFSENFGNPHSNNHEFGIMANNVVEEARGNVANLINAQKSEIIFTSGATESNNFAIKSIANNFFEKDCQIITVKTEHKCVLESCHTLDQEGFDVFYLDVNEDGLINLDELENLLKKRKSLVSVMSANNEIGVLQPIKEIGNLCKKYNSIFHSDVAQSLGTQKIDVDELNIDALSISAHKIYGPKGIGALYISNEIKNSLRPLISGGGQEMNLRSGTLSPALCIGLGEACKDLKFNREKYVQHFKELKSKLLSELVISKLDFVINGSVENRIPNNLNISIKGKVAEQLFNFLPNFALSSGSACTSGTIERSHVLSALTEDESRIDGSFRISTGRETTKEEIKYLIESLSKLK

SEQ ID NO: 137863 - protein, 198 aa, Unknown
  Bacterial polypetide isolated from the Sargasso Sea
MSSEINLPIYMDYASTTPVDPRVAKKISDHLTLDGNFGNPASRSHKFGWKAEEAVEEARSHVANLVNCDPREIVWTSGATEADNLAIKGIANFYQKNGKHIITSKIEHKAVLDPCRQLERDGFEVTYLEPNEGGLITPEAVLNAIREDTILISIMHINNELGTINDLSGIGKIARENGIFFHVDAAQSTGKTAIDLSS

SEQ ID NO: 137864 - protein, 249 aa, Unknown
  Bacterial polypetide isolated from the Sargasso Sea
GTLNPLTEIGQMTRERGVLFHCDATQGVGKIPIDVEAMNIDLLSMTAHKIYGPKGIGALYVRRKKPRVRITPIMFGGGHERGFRSGTLNVPGIVGFGKAIELAMEEISSEAERQIGLRQHLYKRLTDELDYVFLNGHPTERLPNNLNLSFGYVEGESLMMGISEIAVSSGSACTSASLEPSYVLRSMGVGDDLAHSSVRFGFGRYTTMEEVNYAAEKVIGAVKRLREMSPLYEMVQEGVDLSKVTWTSH

SEQ ID NO: 137865 - protein, 407 aa, Unknown
  Bacterial polypetide isolated from the Sargasso Sea
MSEQVKPIYLDYASTTPVDDRVANKMMEFMKMDGQFGNPASRSHYYGWTAESAVSEARKHVADLVNADPREIVWTSGATESDNLAIKGAAHFYQKKGKHVITVKTEHKAVLDACRQLEREGFDVTYLEPMGNGLLDIQELKSEIREDTILISVMHVNNEIGVIQDIESIGNICREKGIIFHVDAAQSAGKIPIDLQKLNVDLMSFSAHKIYGPKGIGALYVCRKPRVRLEAQIHGGGHERGLRSGTLPTHQIVGMGEAFRIAMLEMDKDFQHISSLKHRLWDALKDMEEVYLNGDENERYPGIMNISFNFVEGESLIMATKDIALSSGSACTSASLEPSFVLRAIGRSDELAHSSLRMSIGRFTTEREIDHTVEVVKVAVKKLRELSPLWEMYKDGIDINKIEWAAH

SEQ ID NO: 137866 - protein, 406 aa, Unknown
  Bacterial polypetide isolated from the Sargasso Sea
MSTQSTIYLDYASTTPVDPIVASKMMEFLTPEGEFGNPASRSHRFGWKADEAVEEARSHVANLVNCDPREIVWTSGATEADNLAIKGVARFYKSKGNHIITSKIEHKAVLDPCRQLEREGFEVTYLDPDEKGIISASAVKDAIKDTTVLVSIMHVNNELGTVNDIANIGEITRKNGAFFHVDAAQSTGKVKIDLGKMPIDLMSFSAHKTYGPKGIGALYVRRKPRVRLEALIHGGGHERGMRSGTLATHQIVGMGEAFRIAKEDMEKDSLKISKIHEKFLEKVKEIDHVYINGDLKNKVPNILNVSFNFVEGESLIMGLKDIAVSSGSACTSASLEPSYVLRALGRKDELAHSSIRFSFGRFTSDDDVKNTLDILGNVVHRLRELSPLWEMHLDGIDLDKVEWNMH

SEQ ID NO: 137867 - protein, 407 aa, Unknown
  Bacterial polypetide isolated from the Sargasso Sea
MIQDTLHLPIYMDYSATTPVDPRVVDKMVPYLREQFGNPASRSHAYGWDAERAVEEARENVAALVNADPREIIWTSGATESDNLAIKGAANFYKGKGKHIITVKTEHKAVLDTCRELERDGFEVTYLDVKDDGLIDLDVFKAALRPDTILVSVMHVNNEIGVIQDIETIGEICREKGIVFHVDAAQSTGKVAIDLAKLKVDLMSFSAHKTYGPKGIGALYVRRKPRVRIEAQMHGGGHERGMRSGTLATHQIVGMGEAFRIAREEMATENERIRMLRDKLLRGLSQIEETYVNGDMERRVPHNLNISFNFVEGESLIMAIKDVAVSSGSACTSASLEPSYVLRALGRNDELAHSSIRFTVGRFTTEQEVDFVINLLNSKIAKLRELSPLWEMHQEGIDLSTIEWAAH

SEQ ID NO: 137868 - protein, 98 aa, Unknown
  Bacterial polypetide isolated from the Sargasso Sea
FAYVEGESLIMALKDVAVSSGSACTSASLEPSYVLRALGRKDELAHSSIRFSFGRFTSNEDVDHTLSILSHAVERLRELSPLWEMHLDGVDLDKVEWN

SEQ ID NO: 137869 - protein, 326 aa, Unknown
  Bacterial polypetide isolated from the Sargasso Sea
MKLPIYLDYASTTPVDPRVLEVMKNHLSLEGNFGNPASRSHSFGWKAEEAVEDARFKVASLVNCDTREIIWTSGATEADNLAIKGVAKFYKSKGNHIITSKIEHKAVLDSCRQLEREGFEVTYLDPDENGLISPDTVKNVITDRTILVSLMHINNEIGVINDIKSIGEITREKGIIFHVDAAQSTGKVKIDLTDLKVDLMSFSAHKTYGPKGIGALYVSRKPRVRLEAQIHGGGHERGMRSGTLPTHQIVGMGEAFHIANQEMELEVERIKGLRDKFWNGLKDIEEVYLNGDLEQRAAGFLNVSFNYIEGESLIMALKDIAVSSGS

SEQ ID NO: 137870 - protein, 315 aa, Unknown
  Bacterial polypetide isolated from the Sargasso Sea
MTSPEQLMNNDTLHLPIYMDYSATTPIDPRVVDKMIPYLREQFGNPASRSHQYGWDAERAVEEARENVAALVNADPREIIWTSGATESDNLAIKGAAHFYKSKGKHIITVKTEHKAVLDTCRELEREGFEVTYLDVKEDGLIDLEKFKAALRPDTILVSVMSVNNEIGVIQDIEAIGEITREKGIVFHVDAAQATGKIEIDLQKLKVDLMSFSAHKTYGPKGIGALYVRRKPRIRIEAQMHGGGHERGMRSGTLATHQIVGMGEAFRIAREEMATENERIRMLRDRLLRGLSEMEETYVNGDMEKRVPHNLNISF

SEQ ID NO: 137871 - protein, 151 aa, Unknown
  Bacterial polypetide isolated from the Sargasso Sea
EAFRLAKEEMKIDSEKVTEFHEYFLEEVKKIDEIYINGDIQNKVPNILNVSFNFIEGESLIMGLKDIAVSSGSACTSASLEPSYVLRALGRKDELAHSSIRFSFGRFTTKDDIRNTLKLLLNVVDRLRELSPLWEMHLDGIDLDTVEWQAH

SEQ ID NO: 137872 - protein, 83 aa, Unknown
  Bacterial polypetide isolated from the Sargasso Sea
VSSGSACTSASLEPSYVLRALGRKDELAHSSIRFSFGRFTSDDDVKNTLDILGNVVHRLRELSPLWEMHLDGIDLDTVEWNMH

SEQ ID NO: 137873 - protein, 404 aa, Unknown
  Bacterial polypetide isolated from the Sargasso Sea
MKLPIYLDYSATCPVDPRVAEKMMQCLTMDGLFGNPASRSHRFGWQAEEAVDLARNQVAELIGADPREIVFTSGATESNNLAIKGVAHFYAGKGKHIVTSKTEHKAVLDTCRQLEREGYEVTYLEPMPNGLFTLEQIEGALRDDTILVSIMHVNNEIGVVQNIAAIGELCRSRKILLHVDAVQSVGKIPVDVEALKVDLLSMSAHKVYGPKGIGALYVRRKPRVRLEAQMHGGGHERGMRSGTLPTHQIVGMGEAFRIAKEEMVSEGQRIMALRQRLWDGIKDIEEVYINGDLEQRVPGNLNVSFAYVEGESLIMALKDLAVSSGSACTSASLEPSYVLRALGLNDELAHSSIRFSMGRFTTEEEIDYAIKLIRDSIGRLREMSPLWEMYKDGVDLNTVEWAHH

SEQ ID NO: 137874 - protein, 405 aa, Unknown
  Bacterial polypetide isolated from the Sargasso Sea
MKNKAIYFDYAATTPVDPRVAKKMHECLLLDGNFGNPASRSHEFGWKAEEVVEKARLQVADLINADSREIVWTSGATESDNLAIKGAAKFYKDRGNHIITSKIEHKAVLDPCRQLEREGFEVTYLDPNEDGIVTVEQLKKHVKENTILISLMHINNELGSINDIEKIGNFAREKNIIFHVDAAQSIGKVDIDLSKLNVDLMSFSAHKCYGPKGMGALYIRRKPRVRLEALIHGGGHERGFRSGTLATHQIVGMGEAFNLAKKEMAKDNKKIKELSELFWNEISDIEEIVLNGNKKNKVANITNVSFSYVEGESLIMALKDVAVSSGSACTSASLEPSYVLRALGRPDELAHSSIRFSFGRFTTPEEVKMVAETTKRVVGQLRELSPLWDMYLDGVDLEKVEWAPH

SEQ ID NO: 137875 - protein, 404 aa, Unknown
  Bacterial polypetide isolated from the Sargasso Sea
MKLPIYLDYASTTPADPRVVKKMQDCLSLDGNFGNPASRSHAFGWKAEEATEEARQHVADLVNCDPREIVWTSGATESDNLAIKGAARFYKTKGDHIITSKIEHKAVLDSCRQLEREGFQVTYLDPDSNGIISPDLVKENLTDKTILVSLMHINNEIGVVNDIESIGKITREAGVIFHVDAAQSTGKLPIDLSTLEVDLMSFSAHKTYGPKGIGAMYARRKPRVRLEAQIHGGGHERGMRSGTLATHQIVGMGEAFRIAKLDMEEDNKRIESLRNKFWNAIKDMEEVYLNGDELSRAPGFLNVSFNYVEGESLIMALKDIAVSSGSACTSASLEPSYVLRALGLKDELAHSSIRFAIGRFTTEEEVEYTINLVRDSVEKLRTLSPLWDMYKDGVDMESIEWAES

SEQ ID NO: 137876 - protein, 127 aa, Unknown
  Bacterial polypetide isolated from the Sargasso Sea
MKQIYLDYASTTPVEKGVVNKMTDFMSFDGNFGNPASRSHSFGWKADEAVEEARNNLATLMGCDPREIIWTSGATESDNLAIKGAARFYKNKGNHLVTSKIEHKAVLDPFRQLEEEGFEVTYLEPKF

SEQ ID NO: 137877 - protein, 385 aa, Unknown
  Bacterial polypetide isolated from the Sargasso Sea
MKPIYLDYQSTTPTNKDVLEKMIPYFSEVYGNPHSSNHKYGLIAHEAIENGRKKIAKAIGSQPEEIIFTSGATESNNLAIKGSFLYRLKKHNRKKIIIAATEHKCVLEAANSLASLGAKLTIINVNNLGEINLKQLESEMSDEVALVSIMLANNEIGIIQPIKEISNICNKNNVWLHTDAAQAVGNIDVKVNDLGVDLMSISSHKLYGPKGIGCLFVRRRPRIRLLPQIDGGGQERLLRSGTLPTPLIVGFSEAMYKANKNLNKNIIQLKFLRDRLHNHFIEFDKNIKLNGTDINKNRLPNNLNYFVNGVNALELTESLGNYVAFSTGSACSTGNIEPSYVLSSIGLKKEEALSSFRISVGLESTQEDIDKAAKIICNKISLLRK

SEQ ID NO: 137878 - protein, 406 aa, Unknown
  Bacterial polypetide isolated from the Sargasso Sea
MSTQSTIYLDYASTTPVDPRVASKMMEFLTPEGEFGNPASRSHRFGWKADEAVEQARSHVANLVNCDPREIVWTSGATEADNLAIKGVARFYKSKGNHIITSKIEHKAVLDPCRQLEREGFEVTYLDPDDGGVISPEAVKSAMKDSTILVSIMHINNELGTLNNLTEIGEIVREKGAFFHVDAAQSTGKTEIDLTKMPVDLMSFSAHKTYGPKGIGALYVRRKPRVRLEALIHGGGHERGMRSGTLATHQIVGMGEAFRIAKIEMEKDLAKVNAFHKRFLEKVEEIDHIYINGDLNNKVPNILNVSFNFVEGESLIMGLKDIAVSSGSACTSASLEPSYVLRALGRKDELAHSSIRFSFGRFTSDEDVDNTLKILGNVVHRLRELSPLWEMHLDGIDLDTVEWNTH

SEQ ID NO: 137879 - protein, 356 aa, Unknown
  Bacterial polypetide isolated from the Sargasso Sea
MSTQSTIYLDYASTTPVDPRVASKMMEFLTPEGEFGNPASRSHRFGWKADEAVEEARSHVANLVNCDPREVVWTSGATEADNLAIKGVARFYKSKGNHIITSKIEHKAVLDPCRQLEREGFEVTYLDPDDKGVISPEAVKAAIKDSTVLVSIMHINNELGTVNDISKIGDVTRDKGIFFHVDAAQSTGKVNIDLEKMSVDLMSFSAHKTYGPKGVGALYVRRKPRVRLEALIHGGGHERGMRSGTLATHQIVGMGEAFRLASKEMEEDHKKISKYHEKFLDKVNEIDHVYINGDLNNKVPNILNVSFNFVEGESLIMGLKDIAVSSGSACTSASLEPSYVLRALGRKDELAHSSIR

SEQ ID NO: 137880 - protein, 153 aa, Unknown
  Bacterial polypetide isolated from the Sargasso Sea
MGEAFRLASKEMEEDHKKISKYHEKFLDKVKEIDHVYINGDLNNKVPNILNVSFNFVEGESLIMGLKDIAVSSGSACTSASLEPSYVLRALGRKDELAHSSIRFSFGRFTSDDDVNNTLDILGNVVHRLRELSPLWEMHLDGIDLDTVEWNAH

SEQ ID NO: 137881 - protein, 406 aa, Unknown
  Bacterial polypetide isolated from the Sargasso Sea
MSKSKPIYLDYASTTPVDERVAEKMLEYMTFNNNFGNAASRSHSFGWQADEAVELARSHVANLVNCDPREIVWTSGATEADNLAIKGIANFYKTKGKHIITSKIEHKAVLDPCRQLERHGFDVTYLEPNEGGVITPDAVKEAIREDTILVSIMHINNELGTINDIASIGELTRDNGIFFHVDAAQSTGKVNIDLATLKVDLMSFSAHKTYGPKGVGALFVRRKPRVRIEAQIHGGGHERGMRSGTLATHQIVGMGEAFRLAKEEMKSDSEKVNEFHEYFLEEVKKIDEIYINGDIQNKVPNILNVSFNFIEGESLIMGLKDIAVSSGSACTSASLEPSYVLRALGRKDELAHSSIRFSFGRFTTEDDVRNTLNLLSNVVERLRELSPLWEMHLDGIDLDTVEWQAH

SEQ ID NO: 137882 - protein, 405 aa, Unknown
  Bacterial polypetide isolated from the Sargasso Sea
MKTKAIYFDYASTTPVDPRVAKKMHECLLLDGNFGNPSSRSHEFGWKAEEVVEKARFQVADLINADSREIVWTSGATESDNLAIKGAAKFYKDRGNHIITSKIEHKAVLDPCRQLEREGFEVTYLDPDKDGVVTLEEIKKHVKETTTLISLMHINNELGSINDIGKIGDFAREKNIIFHVDAAQSIGKINIDLSKLNVDLMSFSAHKCYGPKGMGALYIRRKPRVRLEALIHGGGHERGFRSGTLATHQIVGMGEAFSLVKKEMARDNKKIKELSEFFWDQISGIEEIVLNGNKKNKVANIINVSFSYVEGESLIMALKDVAVSSGSACTSASLEPSYVLRALGRPDELAHSSIRFSFGRFTTKEEVKMVAETTKRVVGQLRELSPLWDMYLDGVDLEKVEWAPH

SEQ ID NO: 137883 - protein, 404 aa, Unknown
  Bacterial polypetide isolated from the Sargasso Sea
MKLPIYLDYAATTPVDPRVAEKMFQYMTMDGIFGNPASRSHRYGWQAEEAVDVARSQVADLINADHREIVFTSGATESNNLAIKGVAHFYNKKGKHIITSKTEHKAVLDTCRQLEREGFEVTYLEPDANGIIPMERLEAAMRDDTILVSIMHVNNEIGVIHDVDAIGELCRSKGIIFHMDAAQSAGKLPIDVQTTKVDLISISGHKMYGPKGIGALYVRRKPRIRLEAQMHGGGHERGMRSGTLATHQIVGLGEAAAIAKAEMATDNARIAKLRDKLWNGIKHIEETYVNGDMTHRVSGSLNVSFNYVEGESLMMALKDLAVSSGSACTSASLEPSYVLRALGLNDEMAHSSIRFSIGRFTTEEEIDHAIETITQSIDKLREMSPLWEMFKDGIDLNQVQWAHH

SEQ ID NO: 137884 - protein, 406 aa, Unknown
  Bacterial polypetide isolated from the Sargasso Sea
MSKSKPIYLDYASTTPVDERVAEKMLEYMTFNNNFGNAASRSHSFGWQADEAVELARSHVANLVNCDPREIVWTSGATEADNLAIKGITNFYKTKGKHIVTSKIEHKAVLDPCRQLERHGFDVTYLEPNEGGVVTPEAVKEAIREDTILVSIMHINNELGTINDIASIGELTRDNGIFFHVDAAQSTGKVNIDLSTLKVDLMSFSAHKTYGPKGVGALFVRRKPRVRIEAQIHGGGHERGMRSGTLATHQIVGMGEAFRLAKEEMKIDSEKVTEFHEYFLEEVKKIDEIYINGDIQNKVPNILNVSFNFIEGESLIMGLKDIAVSSGSACTSASLEPSYVLRALGRKDELAHSSIRFSFGRFTTKDDIRNTLKLLLNVVDRLRELSPLWEMHLDGIDLDTVEWQAH

SEQ ID NO: 137885 - protein, 194 aa, Unknown
  Bacterial polypetide isolated from the Sargasso Sea
KGIGGLICKKKPRVRLEALIHGGGHERGMRSGTLATHQIVGMGEAFRIAKEDMEKDSLRISKIHEKFLEKVKEIDHVYVNGDLKNKVPNILNVSFNFVEGESLIMGLKDIAVSSGSACTSASLEPSYVLRALGRKDELAHSSIRFSFGRFTSDDDVKNTLDILGNVVHRLRELSPLWEMHLDGIDLDKVEWNMH

SEQ ID NO: 137886 - protein, 325 aa, Unknown
  Bacterial polypetide isolated from the Sargasso Sea
NLAIKGVARFYKSKGNHIITSKIEHKAVLDPCRQLEREGFDVTYLDPDEKGVISPSAVKSAIKDTTVLVSIMHINNELGTVNDIEEIGNITRDNGSFFHVDAAQSTGKVDIDLEKINVDLMSFSAHKTYGPKGIGALYVRRKPRVRLEALIHGGGHERGMRSGTLATHQIVGMGEAFRIANKEMNQDCNKISKFHEKFLDKVKEIDHVYINGDLDNKVPNILNISFNFVEGESLIMGLKDIAVSSGSACTSASLEPSYVLRALGRKDELAHSSIRFSFGRFTSDDDVNNTLDILANVVYRLRELSPLWEMHLDGIDLDTVEWNAH

SEQ ID NO: 137887 - protein, 381 aa, Unknown
  Bacterial polypetide isolated from the Sargasso Sea
MLSTPILLDYQSSTPCSKDVVDSMKPFWSEIFSNPASKSNLAGINASAILEASREKIEQSLFLKNKKVIFTSGATESNNLALLGFARNFYKKTGNYGHIITLKTEHKAVLEPLNQLKKEGFMVTEINPEKDGLISEEQFKKNIREDTFLVSVMLANNEIGVIQPIENISKICQSRGITFHSDFAQCLGYMALDNLLSDVNMITMSSHKIYGPKGIGLLLMDEEINLEPLIVGGGQEYGLRSGTLPLPLVVGFAKAIEIAVFNQKNNAEKLLFYRNDLLEGLLKNNSGLLINGSIEKRLPHNLNLTVLDLNGAKFHKLLKSKIICSSGSACSNGEPSHVLLALGRSFKEAESSIRLSIGLSTNSKDIKQAIQILTHTIKSLR

SEQ ID NO: 137888 - protein, 403 aa, Unknown
  Bacterial polypetide isolated from the Sargasso Sea
MQSRPIYMDYSATTPVDPRVVDKMVPFLHEQFGNPASRSHSYGWEAEQAVEEARAHVAALLGADPREIVWTSGATEGNNLAIKGAAHFYQGKGKHLVTVKTEHKAVLDTCRELERQGFDVTYLDVREDGLLDLDAVQQALRADTILVSVMLANNETGVIQPVAEIGALCRARGIVFHCDAVQAAGKIPVDVNALNVDLLTVTAHKVYGPKGIGALYVRRKPRVRIEAQMHGGGHERGMRSGTLPTHQIVGMGEAFRLAKEEMAEESRRVGALRDRLLAGLSTLDEVYVNGDLSRRIPHNLNVSFNFVEGESLIMGIKGVAVSSGSACTSASLEPSYVLRALGRSDELAHSSIRFTLGRFTTEAEVDSVIAQVRDTVGKLRELSPLWDMHLDGVDLNTIEWAAH

SEQ ID NO: 137889 - protein, 130 aa, Unknown
  Bacterial polypetide isolated from the Sargasso Sea
EYFLEEVKKIDEIYINGDIQNKVPNILNVSFNFIEGESLIMGLKDIAVSSGSACTSASLEPSYVLRALGRKDELAHSSIRFSFGRFTTKDDVGNTLKLLSNVVDRLRELSPLWEMHLDGIDLDTVEWQAH

SEQ ID NO: 137890 - protein, 275 aa, Unknown
  Bacterial polypetide isolated from the Sargasso Sea
MKQPIYLDYNATTPTDPRVVEAMLPFFTEIYGNAASRNHSFGWTAEEGVSKARNIIGEAIGATGKEIVFTSGATESDNMAVLGVAEFYHEKGKHIITSPIEHKAVVDPCQALEQKGYEITFLDVDEHGRIDLKQLEASIREDTVLVSLMAGNNEIGTLNPLTEIGQMTRERGVLFHCDATQGVGKIPIDVETMNIDLLSMTAHKIYGPKGIGALYVRRKKPRVRITPIMFGGGHERGFRSGTLNVPGIVGFGKAIELAMEEISSEAERQIGLRQH

SEQ ID NO: 137891 - protein, 406 aa, Unknown
  Bacterial polypetide isolated from the Sargasso Sea
MSTRSTIYLDYASTTPVDPRVASKMMEFLTPDGQFGNPASRSHRFGWKADEAVEEARSHVANLVNCDPREIVWTSGATEADNLAIKGVARFYKSKGNHIITSKIEHKAVLDPCRQLEREGFEVTYLDPNDKGVIDPEDVKSAIKDTTILISIMHINNELGTVNNISKIGEIARERGIFFHVDAAQSTGKTLIDLEKMQIDLMSFSAHKTYGPKGIGALYVRRKPRVRLEALIHGGGHERGMRSGTLATHQIVGMGEAFRIAKEEMDTDHKKVSEFHKKFLEKVKEIDHVYINGDLDNKVPNILNVSFNFVEGESLIMGLKDIAVSSGSACTSASLEPSYVLRALGRKDELAHSSIRFSFGRFTSDEDVENTLDILGNVVHRLRELSPLWEMHLDGVDLDKVEWNLH

SEQ ID NO: 137892 - protein, 498 aa, Unknown
  Bacterial polypetide isolated from the Sargasso Sea
MSDTTPLHYLDYAATTPADPRVIEAMTACLGFDGIFGNPASSSHAAGRLAKDKVEQARAQVAALIGADADEIVWTSGATESNNLALKGYAENATGKRHLITSRIEHKAILDTMANLAKHGASVTFLAPTRDGEITADSVAAAIGPDTGLVSLMLVNNELGTLTDIGAISRIVHDAGALLHVDAAQALGKTPIDVRALGIDMLSMSAHKVYGPKGIGALFVRRDIAHRIAAQIHGGGHERGLRSGTLATHQIVGMGVACELAADKLDGEAARIAALGARLTDALVALGDVTQNAATARRIPHTLSLTVNTPGFFPFMLGEALAVSSTSACNSTSGAPSHVLTAIGLDAETAGRTVRVSFGRFTTEQDVDFAIACFRHAIEQCRATAANGFSASRQITPADLKAIRNAGFRSVICNRPDGEGDAHPAFDEIAAAARELGLEARYLPVERDGIGDAEIDAFGELIDTLQKPVLAYCRSGSRSGLLWSRLSARRTAEAPASV

SEQ ID NO: 137893 - protein, 315 aa, Unknown
  Bacterial polypetide isolated from the Sargasso Sea
KVIFTSGATESNNLALLGFARNFYKKTGNYGHIITLKTEHKAVLEPLNQLKKEGFMVTEINPEKDGIISEEQFKKKIREDTFLVSVMLANNEIGVIQPIENISKICKSRGIIFHSDFAQCLGYMALDNLLSDVNMITMSSHKIYGPKGIGLLLIDEEINLEPLIVGGGQEYGLRSGTLPLPLVVGFAKAIEIAVFNQKNNAEKLLFYRNNLLEGLLKNNSGLLINGSIEKRLPHNLNLTVLDLNGAKFHKLLKSKIICSTGSACSNGEPSHVLLALGRSLKEAESSIRLSIGLSTNSKDIKQAIHILTNTIRSLR

SEQ ID NO: 137894 - protein, 265 aa, Unknown
  Bacterial polypetide isolated from the Sargasso Sea
CDVLVENFAPGAMERMGFGWEEIQKLNPRMIMASVKGFGPGPYEDCKVYENVAQCAGGAASTTGFLDGPPTVTGAQIGDSGTGLHLALGIVTALYQRHETGKGQRVLAAMQDGVINLCRVKLRDQQRLAAGPLTEYSQYGEGIDFGETTPRAGNDSGGGQPGRILKCKGWETDPNAYTYFITQAAAWPKICKAIGKSSWVDDPEYATPNARLTRLNEVFDAIESWTMTKTKFEVMQICNPLDIPVGPILSMKEISEEEAYEKREQ

SEQ ID NO: 137895 - protein, 239 aa, Unknown
  Bacterial polypetide isolated from the Sargasso Sea
GIVTALFHREHSGKGQRVECAMQDGVLNLSRVKLRDQQRLTRGPLKEYSQFGQGIEFGEATPRAGNDSGGGQPGWILKCKGWETDPNAYVYFITQAAVWGNICDLIGKSEWKEDPDYAKPSDRLDKIKPIFDAIEEWTMTLDKFEVMNLCNPLNIPCGPILSMKELAEETSLRETGTIVEVDHPERGKYLTVGNPVKLSDSPSEVERSPLLGEHTEEILRTVVGLTDEEIEGAREEGAI

SEQ ID NO: 137896 - protein, 415 aa, Unknown
  Bacterial polypetide isolated from the Sargasso Sea
MSKALDGVRILDFTHVQSGPTCTQLLAWFGADVIKVERAGAGDITREQLRDIPDVDSLYFTMLNHNKRSITIDTKNPEGKLVLEALIQKCDVLVENFAPGALDRMGFTWERIQELNPRMIVASVKGFGPGPYEDCKVYENVAQCAGGAASTTGFDDGPPVVTGAQIGDSGTGLHLALGIVTALYQRTQTGRGQKVLAAMQDGVLNLCRVKLRDQQRLERTGVMKEYPQYPNGTFGEAVPRAGNASGGGQPGWILKCKGWETDPNAYIYFITQAPVWAKICNVIGKEEWATDPNYATPAARLPHLKDIFAEIERWTMTKTKFEAMQILNKYDIPCGPILSMKEIAEEPSLRKTGTIVEVDHPTRGKYLTVGNPIKLSDSPTEVKRSPLLGEHTDEVMAELGYSPEQINALRTAGAI

SEQ ID NO: 137897 - protein, 367 aa, Unknown
  Bacterial polypetide isolated from the Sargasso Sea
DVPGADSLYFTMLNHNKRSLTLNTKNETGKRILERLIKKCDVLVENFAPGAMERMGFGWEQIQKLNPRMIMASVKGFGPGPYEDCKVYENVAQCAGGAASTTGFLDGPPTVTGAQIGDSGTGLHLALGIVTALYQRHETGIGQRVLAAMQDGVINLCRVKLRDQQRLAAGPLTEYSQYGEGIDFGDTTPRAGNDSGGGQPGRILKCKGWETDPNAYTYFITQAAAWPKICKAINKPAWVDDPNYATPNARLTRLNEVFDAIESWTMTKTKFEVMQICNPLDIPVGPILSMKEISGEESLRETGTIVEIDHPERGKYLSVGCPVKLSASPAEVKRSPLLGEHTKEILRSELGYTDNELDEILESGAVG

SEQ ID NO: 137898 - protein, 337 aa, Unknown
  Bacterial polypetide isolated from the Sargasso Sea
SKIFTKLIKECDVMVENFAPGALDRMGFSWEKIQEINPRMIYASVKGFGPGKYEDCKVYENVAQCAGGSASTTGMLGEVPLVTGAQIGDSGTGLHLALGIVTALFHREKSGKGQRVSAAMQDGVLNLCRVKLRDQQRLSRGPLKEYSQFGENIPFDDATPRAGNDSGGGQPGRILKCKGWETDPNAYTYFITQAAVWEKVCDVIGKPEWKEDESYSTPALRLPKLNEIFNTIEAWTMTKTKFEVMDICNPLDIPVGPILSLKELAEDQGLRDTNTIVEVDHPERGKYLTVGNPIKLSDSPAKVERSPLLGEHTDEILKEFCQMSEDEIKAVREAGAV

SEQ ID NO: 137899 - protein, 253 aa, Unknown
  Bacterial polypetide isolated from the Sargasso Sea
AAALGDSNTGMHLAIGILTALIGRDKTGKGQKVAVSMQDSVLNLCRVKLRDQQRLERVGYLEEYPQYPHGEFSDVVPRGGNAGGGGQPGWVLKCKGWETDPNAYIYFTIQGHAWEPICKALGKPEWIDDPAYKTAEARQPHIFEIFGTIEAWLADKTKFEAVDILRKFDIPCAPVLTMKELANDPSLRASGTIVEVPHKKRGAYLTVGSPIKFSDMKPEVTASPLLGEHTDEVLASLGYSQQDIFNLREIKAV

SEQ ID NO: 137900 - protein, 164 aa, Unknown
  Bacterial polypetide isolated from the Sargasso Sea
SENGMLGMGPFPTKDQVDADLINAGKQTVTELARTSYFNSADSFSMIRGGHIDMAILGAMEVSEKGDLANWMIPGKLVKGMGGAMDLVAGVKRVVVIMDHTNKNGETKLLNKCTLPLTGRQVVDRIITNLGIFDVVSGGLKIAEIAKDVTLSQIEKMTEAQLIN

SEQ ID NO: 137901 - protein, 209 aa, Unknown
  Bacterial polypetide isolated from the Sargasso Sea
MPWTREEMCSIAAMELKDGYYCNLGIGMPTKVANYIPEGVNVTLQSENGMLGMGPFPKKNQVDADIINAGKQTITELPETSYFDSSDSFAMIRGGHIDLSILGALQVSEEGDLANWMIPGKMVKGMGGAMDLVAGVKKVLILMEHNAKDGQPKLLKKCTLPLTGKSVVNTVITDLGKFDILPNGVKINQAAPNVGIDEIRSRTEATIID

SEQ ID NO: 137902 - protein, 213 aa, Unknown
  Bacterial polypetide isolated from the Sargasso Sea
MAWNRDQMAARAAKELQDGFYVNLGIGLPTLVANHVPEGVEVWLQSENGLLGIGPSPTEDEVDADLINAGKQTVTTLPGSSIFSSADSFAMIRGGHINLAILGAMQVSKQGDLANWMIPGKMIKGMGGAMDLVAGVKRVVVLMEHVAKGDQHKILEECNLPLTGVGVVDLIITDLGVIEVTPNGLKVLELADGVSVDEIKAKTGAPLDVSAVG

SEQ ID NO: 137903 - protein, 308 aa, Unknown
  Bacterial polypetide isolated from the Sargasso Sea
AVYISLNTIAEGKEVIVSRGQLVKIGGSFRIPDMIAKSGCRLVEVGTTNRTHISDYENAINKNTGAILWVHTSNYIISGFTKEVKIEELVTLGKKKRVLVMTDLGCGEVLNLSKQGIPTNIIVEDVVKKGSSVTTFSGDKLLGGPQSGIIVGKKPLIQKIKNNPIARTVRCDKWTISLLEETLRSTQKESIKDNLTLSLLMSSRKKIQMRAEKVFRLIPPKIFKDYKISLDETLVEAGSGTLPSVKFESVAFRITSKKYSASTISSRFRNAKQPVVGFIKNNNFYLDFKSIIPSQEKFLILSITEALD

SEQ ID NO: 137904 - protein, 143 aa, Unknown
  Bacterial polypetide isolated from the Sargasso Sea
KKNPLKRALRADKLTLTILSKVLRLYEDPETLDQKLPLLKTLTIPLPELENRAKKLKSAFGKKFSIEISKSAVQIGSGALPDRTVESLALVVEHKEMKPENLLSKLRTLSTPIIGRIKEDRVWLDLRGAEPLEELSKVIEELG

SEQ ID NO: 137905 - protein, 326 aa, Unknown
  Bacterial polypetide isolated from the Sargasso Sea
TNLGRAPLNIGNRDEAFRFSNLELDLETGERGSRHDKTSKLIARSCGAESALVVNNCASAVLLVIAALAQNRGVAVSRSELVEIGGGFRIPEIIEQSGAKLIEVGTTNRTRRKDFEKAVNKNEVSLVLKVHQSNYRIVGFTETTEISEMKDLGIPLLADIGSGLLDAACPWLDDGPPKWLIGEPAARQSLESGADIVTFSGDKLFGGPQAGIIAGKTELIDLCMQHPLSRAFRPGNLIMSVLQEVTLSYLEREGSSIPFWKMATTSVDELFDRAKNIEPKFATKTFATPGGGTLPGVEIPSAGLHLEGNHVEFFRQQDPPIILPYG

SEQ ID NO: 137906 - protein, 276 aa, Unknown
  Bacterial polypetide isolated from the Sargasso Sea
MEKISINALVNEVISDLPREILIYIAQNLKVDTLEKNEIIEYFKNEVSYYSGKVQKKVINCTGTLLHTNLGRSQIDTNYSGESTNIEFDLFNQKRGVRNEFLNEFMSLLLNSEDVCFVNNNASSLYITLKTLKNEFEINTVIISRGEIIEIGGSYRLPEIIQETGLNMIEVGTTNKTRLKDYQKALEKNKNSLILKVHRSNYSIEGFTEDVDIKELRSLADKNDALLLHDIGSGLVISRKFLEKENISIFNTEPTIQESLEDGSDVVMFSGDNYLV

SEQ ID NO: 137907 - protein, 265 aa, Unknown
  Bacterial polypetide isolated from the Sargasso Sea
KEVGTTNRTHIEDYENAISDKTKLILWVHTSNYVVKGFTKEVPLKTLVDLGNKHKIPVLADLGSGSFVDLSQSYGFTENPVKSFVKQNPDIITFSGDKLLGGPQSGLVIGKKELIDSLSKNSLYRALRCDKITISLMDEIIRSYRSKSFSSDNFSLKMLTSSRKSLLYRAKKIYSGLSPRTIRKLGISIEESFVEAGSGSLPEKKIPSIALKFKPETENLTDLSKKFRCGQIPVVGYISAGNFYIDLKAVLPNQLKKIIIAISEI

SEQ ID NO: 137908 - protein, 266 aa, Unknown
  Bacterial polypetide isolated from the Sargasso Sea
MIEVGTTNRTHIYDYENAINSKTKLLLQVHTSNYVVKGYTKSVELSDMVELGEKYQIPVMSDWGSGTLIDMNNYFRSNEIPIKKIMKTRPSLITFSGDKLIGGPQSGLIVGQRKYIEMLKKNTLYRTLRCNKITIALLEEILRSFKIDSFKKYNLSLELLTSSQKDLKSKGLLMLDSLKKQQIKKLNIKLKDSEVEAGSGSLPEKKIKSVAFTFKSQKYKAEELAYFFRNADYPVVGYILNDTFHIDLKAIIPNQFQKLVETINKL

SEQ ID NO: 137909 - protein, 259 aa, Unknown
  Bacterial polypetide isolated from the Sargasso Sea
MDNYPPSVNELVEAHSNSGIPRPLLVEEVRRAIDEGKWESLDERVETLRKLALQEVINATGVLLHTNLGRASWPTTFSGNPVNLELDLSSGSRGSRQGYLGHLFANLCETEAAMVVNNCSSAVLLILSALANEKGVAISRGEMVEIGGGFRVPDVLELSGAYLVEVGTTNKTRREDYERSINAHRDVSMIMKIHQSNYKIVGFTESAEIRELTDLGVPLVADIGSGLLDENCFWLESGPPQLAYWRTQVLAKRSLKELT

SEQ ID NO: 137910 - protein, 190 aa, Unknown
  Bacterial polypetide isolated from the Sargasso Sea
MQLRNIPSVESVIKTPELDALSLEYPREWIIDVIREKISNNREDVLVGKDVKDAQAISREVEKHIQKLIESKPKEVINATGVIIHTNLGRAPLSSASVKAAVNCAAGYSDLELDLETGKRGGRLGTIKSLLTQLTGAEDALVVNNNAAALLLALSALCIGKEVIVPRSEAIEIGGGFRIPDVLVQSGAKL

SEQ ID NO: 137911 - protein, 124 aa, Unknown
  Bacterial polypetide isolated from the Sargasso Sea
MTTINTPKKIPSVNILMNTPSVQKLVSMHGVVLVTRCVQRVLINIRQSILAGGSTNMDALVELVLAETDRILAPSIQPVYNLTGTVLHTNLGRALLPESAIRAMVNVAQRASNVEFDLKTGKRG

SEQ ID NO: 137912 - protein, 280 aa, Unknown
  Bacterial polypetide isolated from the Sargasso Sea
MVEEVKSNLPREIIVSIAQSCLNEKKDSQTTIKKFENEIYKYTLKVQKKVINCTGTLLHTNLGRAQTDIDFNGESTNVEYDILNNRRGVRNEFLNESMNLLLGSEDVCFVNNNASSLYITLKTLKNVYGKKSLIISRGEIIEIGGSYRLPEIIQETGLKMVEVGTTNKTKITDYKKALKDNKDSLILKVHRSNFSIEGFVEEVNLKDLKSLTEKENSILIHDLGSGLVASRKFLEKENIDIFDDEPTVQESLIQGVDLVMFSGDKLFGSLQSGVIAGDKK

SEQ ID NO: 137913 - protein, 271 aa, Unknown
  Bacterial polypetide isolated from the Sargasso Sea
MTKNFRNIPSVNSVLESEKIQSLLKMYSTELVTELIRKHLNQIRKDISEKDSKVNAEEIIEFISKTINERWDEWPKIILNGTGVILHTNIGRSPLSHNAIQAGIRAANGYTNLEIDLSTGKRGSRQSKVQNLLCDLTGAESAIIVNNNATAVTLGLAAISKGKEIIISRSESVEIGGGFRIPDVLEQSGSTLKEVGTTNRTYAQDFKNAISPNTGAIMSIHASNFKIIGFTSTPSTKELSEISQNHNIPLLHDVGSGCLLDSSQFGLTKEP

SEQ ID NO: 137914 - protein, 303 aa, Unknown
  Bacterial polypetide isolated from the Sargasso Sea
VIISRGELIEIGGSFRLPDIMKSANCILKEIGTTNRTNFSDYEEAVKPKTGLIFKAYWSNFTINGYTKSVDEKNLVSLSKKTNLPLVIDLGSGTAIDLRKIGLKFEPTPYEKLKLGVDLVTFSGDKLMGGPQCGIIAGRADLINKINKNAMKRAMRCDKFTIAALYSILKIYQDPKKAIKEIPTLRFLDRTKVDIKEQAERIYSKIEPFFRHKMKVKIINCFSQIGSGALPNLSIPSVGICFQQNTKKNNGLFPMKFAKKLRKLPTPVIGRINDGAFVLDLRCLEKDIDLIKPLQSLKLDEDF

SEQ ID NO: 137915 - protein, 451 aa, Unknown
  Bacterial polypetide isolated from the Sargasso Sea
MNLKKIPSVNDLLISKKFSKKNIRRDLLKNIINKELDLVRKILKNDDLASISKAEIESNILLRIDSLSNSYLRKIINGSGVILHTNLGRAPLSKGISKNIYEVISNYSDLEMNITTKTRNSRLDNISKLLNLITGAEKAAVFNNNALALIVTLASLGKGKEILVSRSESIEIGGGFRIPEIIKLSGLKIVDIGTTNKTYVKDYEENITKNTVGFLKVHKSNYKIKGFTNEISIKELSELSKEKNIPLIHDLGSGTLVNTEKFDLPYEPTVVDSVNNGADITLFSSDKLLGGPQSGIVLGKKKLIEKINSSPLSRAARIDKLNLSILNDTLINYLKNDYQETIPVWNLINLSKDSLKKRANDIIHKIPKNTFTIREDIKSTIGGGTFPDTFIDSVGISIGKTHKISDLENYLLNLSNPIVGRIENDEFLLDLRTIFEEYDNYLISNINKYFK

SEQ ID NO: 137916 - protein, 239 aa, Unknown
  Bacterial polypetide isolated from the Sargasso Sea
IKGVTSAISETELSALARENNLQFVSDLGSGTLIDIAKYGLPKEPTVSDALKDGADVVTFSGDKLLGGPQAGLIVGKKSLIQKIKQNPLKRALRVDKVTIAALAEVLKLYTDPDRLPERLPLLKSLVRDPKEIQELAEKLLPFFVRALASVAEVTIKPCKSQIGSGALPLDLLESSSLVLKPLASEGKTDVKLQSLAKKFRGLSTPVVGRLHDGKLIFDLRCLENESELLDLLNSTSWS

SEQ ID NO: 137917 - protein, 291 aa, Unknown
  Bacterial polypetide isolated from the Sargasso Sea
SRTCSPSKDLFENLLPRLCSYSNLEFELETGKRGSRDSVLRNLLRNLSGAEEAMVVNNNASAVFLMLRALTEGKEVIVSRGELVEIGGSFRIPDIMRESGAMLVEVGTTNRTRFSDYEQAISENTAAILKVHPSNYIIEGFTESVEIPKLVELAKKHGLYCFHDWGSGTFYQFAQKGLRSYPTAQQETQKGIDILCFSADKLLGSVQGGIILGRKNPVEKMRKHPLYRALRADKVTLGLLESVLGAYFEPESLKEKITGIRLLERSKDEIRDQVNRMMDEIHPESNSEWKV

SEQ ID NO: 137918 - protein, 205 aa, Unknown
  Bacterial polypetide isolated from the Sargasso Sea
ELVEIGGSFRLPDIMARAGSKLVEVGTTNRTHAEDFERAISNKTALLLKVHTSNFEIKGFVNSVSEKKLSEIAIRYDLPFITDLGSGTLIDMCAYNLPHETTVVEAIKAGADLVTFSGDKLLGGPQAGIIVGRPDLINKLKLNAINRAVRPDKITLAALQSVLQLYMNPSRLETELPLFRWLSRDLLDIKRLANKLIKPLQKHCK

SEQ ID NO: 137919 - protein, 309 aa, Unknown
  Bacterial polypetide isolated from the Sargasso Sea
MRNLSGAEEAMVVINNASAVFLMLKALTAGKEVIVSRGELVEIGGSFRIPDIMRESGATLVEVGTTNRTRLSDYEQAISENTAAILKVHPSNYIIEGFTESVEIPKLVELAKKHGLYCFHDWGSGTFYQFAQKGLRSYPTAQQEIQKGIDILCFSADKLLGSIQGGIILGRKNPVEKMRKHPLYRALRADKVTLGLLESVLGAYFEPESLKEKVTGIRLLERSKDEIRDQAIRMMDEIYTESDPEWKVKIEETDSRTGGGALPELPLPSCALVISHPEFKAQHIQDWLRSEPIPIIVRVQEESVWLDFR

SEQ ID NO: 137920 - protein, 284 aa, Unknown
  Bacterial polypetide isolated from the Sargasso Sea
LTNIINGTGIVLHTGFGRAPFQASTLVNLAKRMEGYVNLEFNLENGKRGDRQNHVRDYINAICESESSLIVNNNAAAVMLAINELGKNGEVIVSRGQLVEIGGSFRIPDIINKSGCILKEVGTTNRTHENDYVSAISNKTKLILWVHTSNYVIKGFTHAVSLKKLVTIGKKFKIPVMVDWGSGSLLDMRNLNVANEVKIREIMKVQPDILTFSGDKLIGGPQSGLIIGKQEIITSLQSNPIYRTIRCDKITIGLMEETLRNYKAESFSKDNLALTLLTTSRKKL

SEQ ID NO: 137921 - protein, 209 aa, Unknown
  Bacterial polypetide isolated from the Sargasso Sea
MKTKDQLLKQFNLNVPSIDTICRWKSVTIFSDEYGKPLVTEGIKEIIQGLREDAKLDPEAAIKSLKEECLIDLLRIWLESLTQPSLKPVINLTGTVLHTNLGRAYLPEVALQAINSVAKGPSNLEFDLESGGRGDRDAHMESILCKLTGAEAATVVNNNAAAVFIVVNTLANRKEVPVSRGELVEIGGSFRLPDIIKRAGGKLVDIGTT

SEQ ID NO: 137922 - protein, 170 aa, Unknown
  Bacterial polypetide isolated from the Sargasso Sea
MTTDMRSLYSQLPAIDRLLRDSAFPALRESHGHTRVVDLLRHMLDEARDAIRDTHALPAWCEDWAQEASARLERESQSALRPVINLTGTVLHTNLGRASQAEEAIEAVVQAMRTPVTLEYSLDDAGRGHRDRALADLLCRLTGAEDACIVNNNAAAVLLMLAATANGKEV

SEQ ID NO: 137923 - protein, 266 aa, Unknown
  Bacterial polypetide isolated from the Sargasso Sea
RENHIEKKLCSLIGAEAVTIVNNNAAAVMLILNTLARRKEVLISRGELIEIGGSFRLPDIMKSSDCILREIGTTNRTNFSDYEDAVNTKTGLIFKAYSSNFTINGYTKSVDEKDLVTLSQKTNLPFVIDLGSGSIIDLSKMGFKFEPTPYDKLRLGVDLVTFSGDKLMGGPQCGIIAGRLDLIKKINKNAMKRAMRCDKYTIAALYSLLKIYQNPKKAIDEIPTLKFLTRKKDEIREQAERIYNKIEPLFSEQIKVRIIDCFSQNG

SEQ ID NO: 137924 - protein, 292 aa, Unknown
  Bacterial polypetide isolated from the Sargasso Sea
QGASNVEFDLKTGKRGDRHKHAEILICQLTGADAALVVNNNAAAVLLTLNCLARRKEVPVSRGELIEIGGSFRMPDIMARAGCKLVEVGTTNRTNEADFESVISSKTALIMKVHTSNFEIKGFTESVPERELSRIAHKHDLPFIIDLGSGTLVDLESYNLPHETTVSDALKSGADLVTFSGDKLLGGPQSGIIAGRSDLIGKIKRSPMTRAMRPDKVTLAALQAVLCLYTDTTRLVKELPTLRLLTRDPVEIEKLAHRLAKALQECLELCEVTVESTYSQVGSGALPVDRLQ

SEQ ID NO: 137925 - protein, 275 aa, Unknown
  Bacterial polypetide isolated from the Sargasso Sea
MGESLSFKNIPSITECDKFLINQKLPHGKQVREYVISVLDKVRQEISKDSSGTFYSDNSEIMKRVADEVRIQSESIKRVINATGIVIHTNLGRAPLSKDLILKILPKICSYSTLELDLLTGKRGMRDSRIRSMLRTLSGAEDAMVVNNNAAATYLMLKGLTKSQHEGFLPEVIVSRGELVEIGGSFRVPDIMSEAGVKMVEVGTTNRCRISDYEKAFTKNTAAILKVHPSNYKILGFTESVSVKNLSKLAHSRGIPCFYDWGSGSFYQFKNSSCA

SEQ ID NO: 137926 - protein, 277 aa, Unknown
  Bacterial polypetide isolated from the Sargasso Sea
KKVADKLDGYVNLEFDVINNIRGDRQSHIDQHIASICGSERSLIVNNNAAAVLLSINTLASNSEVICSRGQIVEIGGSFRISDIIEKSGALLKEVGSTNRTHLKDYENAISKNTKLILWVHTSNYVVKGYAKEVSLEELVTLGKKYDIPVMADWGSGTFLSLEDYGVPSDLPIRNIVEKGPDLVSFSGDKMLGGPQSGVILTSKKILKKIKTNSIYRTVRCDKITIALLEQVIRTYRIHGFSNFNLALSLLTRSRDKLRALANNIIRDLPKKNINQL

SEQ ID NO: 137927 - protein, 289 aa, Unknown
  Bacterial polypetide isolated from the Sargasso Sea
MYELRDLPGVDALMKDESLEVALRRFGPAAVKQAIRDIQREIRNSKKVPEWSIDPSGYLSPIFQALDSQTYRTIFNLTGTIIHSNLGRALIDPSIIEEITPLLSRPINLEYNLDTGSRGQRDAFVEAQLSRLTGCEAAAIVNNNAAALMLVLNTFALGKFVPVSRGELVEIGGSFRLPELMTKSGSNLIEVGTTNKTHIEDFESVVEESAMLLKVHPSNYHISGFSEEVEAKELAKLANSQGIPSCVDLGSGALIDLSKWSLPSEPTPQSVLSQGIDLVTFSGDKLLGA

SEQ ID NO: 137928 - protein, 194 aa, Unknown
  Bacterial polypetide isolated from the Sargasso Sea
MTQVPDTPQALYRALPSMDSLLADAALAPLLQRYGKAAVKAVLDSQLRTARELIAQERRLPAWCANPALLNGYLVDQLSKDYSHSLKPVWNLTGTILHTNLGRAQQSEAAIRAVTSVMRYPTPLEFELAAGERGHRDNAISGLIQRLTGAEACCVVNNNAAAVLLMLSAVAAGKEVIVSRGELVEIGGAFRIPD

SEQ ID NO: 137929 - protein, 284 aa, Unknown
  Bacterial polypetide isolated from the Sargasso Sea
FAQLCGTESAMVVNNCSLAVLLVLSALASERGVAISRGELVEIGGSFRVPEILELSGAYLVEVGTTNKTRLADYQRAIDAHRNVAMALKVHQSNYKIIGFTEETAVEDLASLDIPLVVDIGSGLLDSNCPWLRSDPPTWLVGEPAAKQTLQSGADLVTFSCDKLLGGPQAGIIAGKSDLINKCLSHPFARVLRPGSHTLISLQDLALRYLHRDGDQIPFWRMASANLEELGARAESMNVGEVVSVNSIPGGGTLPSVVIPSIGLKLSGDRSWELRRGFDRGLPV

SEQ ID NO: 137930 - protein, 402 aa, Unknown
  Bacterial polypetide isolated from the Sargasso Sea
NRAINKYRNKIKNNQLSMSPSELLSNITEMVIKDSSQSLVNIINGTGIVLHTGFGRAPFESKLLKSIAKRLEGYVNLEFDLDSGKRGNRQVHIRQHLSSICGSESSLCVNNNAASVMLSINEMAYGGEVLVSRGQLVEIGGSFRIPDIIQKSGANLKEVGTTNRTHFSDYEKAISNKTKLILWVHTSNYVVKGFTRSVPLSDLVQLGKSKNIPVMVDWGSGAILDMKSLGLANEIPIRMIMRDKPDILTFSGDKLIGGPQSGIIIGKEKLINAMQKNSLYRVLRCDKITIGLLEEILRSYRSNYFTKSNLSLRMLTTKRSTLINRGKKVINGLTIKKIKDFSISLENSKVEAGSGSLPENLIESMALSFSHKNIPPHELARKFRTGRIPVVGYIKSNKFFID

SEQ ID NO: 137931 - protein, 431 aa, Unknown
  Bacterial polypetide isolated from the Sargasso Sea
MENISVNNLVEEFESSLPREISISIAKNILNSKISKENAISEYKKNIGLLEKKIQRQVINCTGTLLHTNLGRAQINPRFTGGASNIEYDLDQHKRGERNEYLTSSMNLLLNSENVCFVNNNAAALFITLSTVKNSSNIKNVIISRGEIIEIGGSYRLPEIIESSGLKLQEVGTTNKTDIKDYEKALKSNPDSILLKVHRSNFSIKGFTKEVSIKELKTLSTKYNAHLFHDLGSGLVIDRNFLEAKEIDIFNSEPTVQESLEDGSDLVMFSGDKLFGSVQSGIIAGKENLVKEIKNDPLFRTYRCSPLILFELQNTVNKYIDKNEMSIPIWSSLLMKYEELLARVDDISKKISIDHKIFDSESLIGGGTMPDKKLLTPAIGIPSKNIDEDLRILSNQEIPLIPRISEDKIIIDVRSCPVEDDEKIIELLNKL

SEQ ID NO: 137932 - protein, 157 aa, Unknown
  Bacterial polypetide isolated from the Sargasso Sea
MLRALTAGKEVIVSRGELVEIGGSFRIPDIMRESGATLIEVGTTNRTRLSDYEQAISENTAAILKVHPSNYIIEGFTESVEIPKLVELAKKHGLYCFHDWGSGTFYQFAQKGLRNYPTAQQEIQKGIDILCFSADKLLGSVQGGIILGRKKPVEKMR

SEQ ID NO: 137933 - protein, 319 aa, Unknown
  Bacterial polypetide isolated from the Sargasso Sea
SESSLVVNNNAAAVMLAINELSQGGEVVVSRGQLVEIGGSFRIPDIIEKSGARLVEVGTTNRTHIKDYENAITDKTKLILWVHTSNYVVKGFTKQVPLKKLIAIGKTYKLPVMVDWGSGAFLDMRSLDLADETPVNILMKYGPDILTFSGDKLIGGPQSGIIIGKNKFINLLQKNTLYRVVRSDKITIGLLEHTLRSYKSNSFTKDNFSLKMLTTSSNTLKNRGQKIIKYQSKTKIKALGIKLEPSKVEAGSGSLPENKIDSMALSFRPRSIKVNELSKMFRCGSIPVVGYTSANTYYIDLKAVLPNQITTLAKAIKEI

SEQ ID NO: 137934 - protein, 453 aa, Unknown
  Bacterial polypetide isolated from the Sargasso Sea
MPQVEQLLQQPFLAGFIEALSRPLVTQAVRDTLSELRQSETFRQHGVTAERLEAMIAKRCQQQLRQRQTRVINATGTLVHTNLGRSPLSSDLWDEVRDLNTGYNNLELDLATGKRGGRKGLIAPLLRCLTQAEDSLVVNNNAASLFLLLQEVAKGREVIVSRGEQIQIGGGFRIPDILALSGAKLVEVGTTNITTAKDYLDAITDQTALVLMVHRSNFAIRGFTESPDIGELARALPEHVVLAVDQGSGLTTEEFAPDETSVRQYIKAGADLVCYSGDKLLGGPQAGIISGRSDLIKRLEKHPMMRTFRSSRIIHSLLERLLIHKLNKSPVGEGIAQRVLSNPAAMQARASQLMAALPGCFVPVPAQLVVGGGTLPDEFYPAPALECTDPRPAQQLLDALRELPVPVIATVRQQKVLLNMATLLPAEMDLLIAQLKELLLPAPLNATNATEEP

SEQ ID NO: 137935 - protein, 184 aa, Unknown
  Bacterial polypetide isolated from the Sargasso Sea
MERVADEVRIRSDSVKSVINATGIVVHTNLGRAPLSKDLIMKALPKLCSYSTLEFDLVTGKRGNRDSKIRTMLRVLSGAEDAMAVNNNAAAVYLMLKGLTINQQEGILPEVIVSRGELVEIGGSFRVPDIMREAGVKMIEVGTTNRCHLSDYEKAITKNTAAILKVHPSNNKILGFTESVSVEN

SEQ ID NO: 137936 - protein, 455 aa, Unknown
  Bacterial polypetide isolated from the Sargasso Sea
MNETTLKDLPSVDKVLLYIKDNIYLHDKYIKYLINRELDLLRVDIKKGEISKTSKELFEYVVNQVHLKSAPSLTNVINGTGIVLHTGFGRAPFYARTLKKIADRMEGYVNLEFDLVSGKRGDRQAHIREHLSAICGSESALVVNNNAAAVMLAINGLAQGGDVVVSRGQLVEIGGSFRIPDIIEKSGANLVEVGTTNRTHIQDYEKAITKKTKLILWVHTSNYVVKGFTKNVPLNELVLIGKRFKIPVMVDWGSGALLDMRSLKLANEIPVNKIMNSEPDILTFSGDKLIGGPQAGVIIGKNKYIKLLQKNTLYRVLRSDKISIGLLEHTLRSYRSNSFTKDNFSLKMLTTSQKTLKNRGKKIIEYQSKKKIKQLGINLEPSNVEAGSGSLPDDKIESMALAFRPRVMKVYDLAKLLRCGSIPVIGYTSSKTYYIDLKAVLPNQIIKLAKAIKEI

SEQ ID NO: 137937 - protein, 456 aa, Unknown
  Bacterial polypetide isolated from the Sargasso Sea
MINKQLKEIPSISQVLLEIDQSISLHNRYIKNIINSEIKFYRKLAKDNKLNYNRRDIINKIILEIERLDISSIKNIINGTGIVLHTGLGRAPISKKIIERVSAKLEGYINLEFDLISGKRGHRQDHLSRMSNAIFGSQASLLVNNNASAVLLALNSLAEGKDVIVSRGQEVEIGGSFRIPDIIQKSHSNLIEVGTTNRTHLFDYEKAISASTGAILWAHTSNYVVKGFTKQVPLKDLALLSKKKRIPLVVDLGSGTIISTDDHNLPSEKNIQEISKTGADIVTFSGDKLIGGPQCGFIIGKKNYIKKISENPLHRTYRCDKWTIALMEETLKTFHSDQKFDSRNLSLKLLTSSRKELMNRGKRIINKIPKNKLKSLGITLEESLVEAGSGSLPLKSIPSAALKFIPKEMSVSSLAKAFRLGAQPVVGYTKRNIYYIDLKAVLPSQIANLIESIKQV

SEQ ID NO: 137938 - protein, 453 aa, Unknown
  Bacterial polypetide isolated from the Sargasso Sea
MQLRNIPSVESVIKTPELDALSLEYPREWIIDVIREKISNNREDVLVGKDVKDAQAISREVEKHIQKLIESKPKEVINATGVIIHTNLGRAPLSSASVKAAVNCAAGYSDLELDLETGKRGGRLGTIKSLLTQLTGAEDALVVNNNAAALLLALSALCIGKEVIVPRSEAIEIGGGFRIPDVLVQSGAKLVDIGTTNRTYIQDYQNAITEDTGAFLKAHSSNFVISGFIHEVAVSELSALGREFEVPVMHDVGSGAFIDTRKYGLAYEPTPQSSVSEGADLVFFSGDKLLGGPQAGIIVGKAKYISILERHPMMRAIRMDKINLAALSATLGHYVKNEAESEIPVWRMISADQEVLLNRLNIWKDINHDNLEIIPSESAIGGGSLPGETIPTHVLRINTDKMSLNAMQIQSRLRQCHVPIIVRIEDEDVIIDPRTVLPENDGHISLGIKSIIN

SEQ ID NO: 137939 - protein, 456 aa, Unknown
  Bacterial polypetide isolated from the Sargasso Sea
MKKKDLLNLPSVSEVLLKVKKTKSINIEYIKYIIKDEIAQFRSLAKQGKLELDRNQIIEFILLKLSKLSVASIKPVINATGIILHTGLGRAPIDKKIINIVSKRLSGYVNLELNLETGKRGQRQDHISGQIASIAGAEDAIVVNNNAAAVLLSLNELAEGREVIVSRGQLVEIGGSFRIPDMITKSGCKLVEVGTTNRTHISDYEKAINSNTGLILWVHTSNYVISGFTKQVEIDELVLLGKKRRIPVMSDLGCGEVLDLSNKGVPTNMLVQDVVKSGSSITTFSGDKLLGGPQCGLIVGKKSLIKRIKVNPIARTVRSDKWTLALLEEALRSLRIDSLKDNLTLSLMTTTRNQLHKRATKTLSYVSTKIKSSHNISIRETLVEAGSGTLPGATFESIAFKINSKNYSSAKLSYKFRNSKNPIVGYIKGNSYYIDFKSIIPTQDKIVIESILEVLG

SEQ ID NO: 137940 - protein, 370 aa, Unknown
  Bacterial polypetide isolated from the Sargasso Sea
TGFGRAPFRGEDLKKVADKLDGYVNLEFDVINNTRGDRQSHIDQHIASICGSESSLIVNNNAAAVLLSINTLASNSEVICSRGQIVEIGGSFRISDIIEKSGAILKEVGTTNRTHLKDYENAISKNTKLLLWVHTSNYVVKGYAKEVSLAEVVTLGKKYDIPVLADWGSGTFLSLEDYGVPSDLPIRNIVEQGPDLVVFSGDKMLGGPQSGVILSSKKILKKIKINSIYRTVRCDKITIALLEQVIRTYRIHGFSNFNLALSLLTRSRDKLRALANKIIRDLPKKNINQLGLTIEDSLVEAGSGSLPEKNIESIALRFIPVSLSVNKLSSAFRDLDNPVIGYINRNSFFIDLKAVLPSQISTLIKSIKNL

SEQ ID NO: 137941 - protein, 268 aa, Unknown
  Bacterial polypetide isolated from the Sargasso Sea
MNKFTAQKSNADDARRNIPSVDAIINKSGNLIDRWGHQRVTAVTRNILNDVRIKRGLDNSDLVSVELLVEEVERTLNAADKSSFKEIINLTGTVLHTNFGRAVLPREAIDAINRVAESPTNLEYDLSNAGRGERDDHVEQLVCELVGSEAATIVNNNAAALLLVLNTLAENGEIPVSRGELVEIGGSFRIPDIMQRSGCSLVEIGATNRTHLKDYSQAINSRTSLLMKVHTSNFKIEGFTAEVKEKELAQLAKKEGIPFVCDVGQWKI

SEQ ID NO: 137942 - protein, 316 aa, Unknown
  Bacterial polypetide isolated from the Sargasso Sea
REIMEDLRSRILAGEEISKDVSMSAISEEASRRLKALTTPSLKTVLNLTGTVLHTNLGRAPLPIEALDAMVDVAKGASNLEYDLLTGGRGQRDDHLSNLICRLTGAEAACAVNNNAAAVLLILNTFAVGREVLVSRGELVEIGGAFRIPDIMSQAGAVLREVGTTNRTNEGDYESAINENTALIMKVHTSNFEIRGFTASVSEAKLAQIAHRHKLPVIVDLGSGSLVDFSADNIPKEVTVSESFQNSIDLICFSGDKLIGGPQAGFIAGSASMVKKINANPMKRAMRLDKIRIAGLMAVLQLYLNPETLPARLPAL

SEQ ID NO: 137943 - protein, 290 aa, Unknown
  Bacterial polypetide isolated from the Sargasso Sea
MKDYEPVQKVINATGVVVHTNLGRAPLPKDLFEKLLPRLCSYSNLEFELETGKRGSRDSVLRNLLRNLSGAEEAMVVNNNASAVFIMLRALTAGKEVIVSRGELVEIGGSFRIPDIMRESGATLVEVGTTNRTRLSDYEQAISENTAAILKVHPSNYIIEGFTESVEIPKLVELAKSHGLYCFHDWGSGTFYQFAQKGLRSYPTAQKEIQKGIDILCFSADKLLGSVQGGIILGRKKPVEKMRKHPLYRALRADKVTLGLLESVLGAYFEPESLKEKVTGIRLLERSKDE

SEQ ID NO: 137944 - protein, 152 aa, Unknown
  Bacterial polypetide isolated from the Sargasso Sea
DEERLCRLTGGEAATIVNNNAAAVMLLLNSLANRKEVPVSRGELVEIGGAFRIPDIMSRSGSKLIEVGTTNRTHLRDYAAAIGPRTALLMKVHTSNYEIQGFTAEVSEKALAELAHSHELPMVVDLGSGALTDMTRFGLPHERTPMETLADG

SEQ ID NO: 137945 - protein, 289 aa, Unknown
  Bacterial polypetide isolated from the Sargasso Sea
MNELNAVLARVPSVERVLSSAPLQPLLADYGRTRVLNAVRAELERWRTAAQHDPAAAEPLDEPRIAAAVAHALAAQSAGAVRAVFNLTGTVLHTNLGRALLPDDAVRAVVDVLTRPVNLEFDLATGRRGDRDDLIDDLLCELTGAEAATVVNNNAAAVLLALSALATKREVVVSRGELVEIGGAFRIPDIMSRAGARLREVGTTNRTHLRDYADAIGPRTALLMKVHCSNYAISGFTKEATLAELAPLAREHGLPVAVDLGSGTLADLSQMGVCRTRRPCRKPLPPAQT

SEQ ID NO: 137946 - protein, 162 aa, Unknown
  Bacterial polypetide isolated from the Sargasso Sea
MKDFEPVQKVINATGVVVHTNLGRAPLPKDLFENLLPRLCSYSNLEFELETGKRGSRDSVLRNLLRNLSGAEEAMVVNNNASAVFLMLKALTAGKEVIVSRGELVEIGGSFRIPDIMRESGATLVEVGTTNRTRLSDYEQAISENTAAILKVHPSNYIIEGF

SEQ ID NO: 137947 - protein, 304 aa, Unknown
  Bacterial polypetide isolated from the Sargasso Sea
MIAKGEKTLLQAITSDSYLNEFCCEVANDVRASVSSSLVPVINLTGTVVHTNLGRARLPEEAIAAMTKVATQATNLEFDLETGKRGDRDSHIDESICQITGAEAATVVNNNAAAVLLVLNTLAFRKDVVISRGELVEIGGAFRIPDVMKSAGCTLVEIGTTNRTHLRDYEAAINSNTGMLMKVHTSNYEIRGFTNSVSEEEISQLAQEAGVTFVSDLGSGTLVDLNKFGLPHEPTVTETLEKGAEVVTFSGDKLLGGPQAGIIVGKRELIAAIKKNPLKRALRVDKITMAALSSVVIYIEILSD

SEQ ID NO: 137948 - protein, 303 aa, Unknown
  Bacterial polypetide isolated from the Sargasso Sea
KEVLVSRGELIEIGGSFRLPEIMTSANCKLKEVGTTNRTHIEDFESEIKKQTGLILKAHTSNFVIKGFTSNINHKDLAKLSKRHGLPFMVDLGSGSLIDLKLLGLPRESMPKEVLSNGADIVTFSGDKLVGGPQCGIILGKKDLIHKINKNPLKRALRCDKMTIAAFASILKLYNDTDKAIEEIPTLRMLNRKKKEIYDTAKRVFKDINTQLKKIAKVEIVDCKSQIGSGSLPVELIPSCAIKIRMNSNKHLSKLYTEFRKLPIPVIGRIHNNSILFDLRCLENESQFLSQLKKLNLKIFEIK

SEQ ID NO: 137949 - protein, 246 aa, Unknown
  Bacterial polypetide isolated from the Sargasso Sea
MVQLRHQIANKTLQPDLLDSPSRESFLQWILENLKDYAPVQKVINATGVVVHTNLGRAPLPKDLFENLLPRLCSYSNLEFELETGKRGSRDSVLRNMLRNLSGAEEAMVVNNNASAVFLMLRALTAGKEVIVSRGELVEIGGSFRIPDIMRESGATLVEVGTTNRTRLSDYEQAISENTAAILKVHPSNFIIEGFTESVEIPKLVELAKSHGLYCFHDWGKRDLLPVCTKRIKKLPHCPTGNTERY

SEQ ID NO: 137950 - protein, 474 aa, Unknown
  Bacterial polypetide isolated from the Sargasso Sea
MNELNAVLARVPSVERVLSSAPLQPLLADYGRTRVLNAVRAELERWRTAAQHDPAAAEPLDEPRIAAAVAHALAAQSAGAVRAVFNLTGTVLHTNLGRALLPDDAVRAVVDVLTRPVNLEFDLATGRRGDRDDLIDDLLCELTGAEAATVVNNNAAAVLLALSALATKREVVVSRGELVEIGGAFRIPDIMSRAGARLREVGTTNRTHLRDYADAIGPRTALLMKVHCSNYAISGFTKEATLAELAPLAREHGLPVAVDLGSGTLADLSQWGLPHETTVQETVAAGANVVTFSGDKLLGGPQAGLIVGDRALIAKIKKHPLKRALRVGKLTLAALEPVLRLYQSPEFLRDRLTTLRLLTRPQREIAEAAERVRPALQAALGSGFDVTVEPMFSQIGSGALPVDQLPSAGLVVRTADGKRGGRALAQLEKRLRAWPRPVIGRVADNALRLDLRCLEAADEAVFVAQCVPLAGPAA

SEQ ID NO: 137951 - protein, 472 aa, Unknown
  Bacterial polypetide isolated from the Sargasso Sea
MTQVPDTPQALYRALPSMDSLLADAALAPLLQRYGKAAVKAVLDSQLRTARELIAQERRLPAWCANPALLNGYLVDQLSKDYSHSLKPVWNLTGTILHTNLGRAQQSEAAIRAVTSVMRYPTPLEFELAAGERGHRDNAISGLIQRLTGAEACCVVNNNAAAVLLMLSAVAAGKEVIVSRGELVEIGGAFRIPDIMRQAGCTLVEVGSTNRTHLKDYEQAITENTAAIMKVHTSNYHISGFTASVDEARLGQLCRDRGVALISDLGSGSLTDLRRFGLKQEPTPQAMLADGVDLVSFSGDKLLGGPQSGLIVGKQALINKLQSHPLKRALRCDKLILAALEATLIHYLNPETLDRELPIMAKFARSQAELRQIGERLQRALAPLFAPSYGIELVECQTQVGSGSQPDTFLPSIALCFNAQEGGSLTLLEQHFKQAQRPVIGRMTQDQLRLDLRGIDDEAELLAELSTLGVQL

SEQ ID NO: 137952 - protein, 316 aa, Unknown
  Bacterial polypetide isolated from the Sargasso Sea
VLNSLAKRKEVLISRGELIEIGGSFRLPEIMKSAGCKILEVGTTNRTHFEDFENSIGKKSAMIFKAHKSNFYVEGYTSEVEEKEIVKLSKKNGIPFMIDLGSGSLIDLKYMGITKVQSPADTLAKGVDLITFSGDKLLGGPQCGIIAGRKDLITKIKKNPLKRALRCDKMTIAAFSTLLKLYENPERAKLEIPTLRLLNRKEKDIYEVAEKLYPSIKSKISNIAEVKIIKCKSQIGSGSLPVELLPSYGIEISAKNLKRNSNKLLQSISKKFRELPIPIIGRLSKNSLIFDCRCLEDTTLIIKQLEKINSKYFLNT

SEQ ID NO: 137953 - protein, 301 aa, Unknown
  Bacterial polypetide isolated from the Sargasso Sea
MAHFDDESELFIFRGVPYAKPPVGNLRWKSPVPVKRKTQIDARSFKPGCMQDTYITEWYHDVIDSFGQDKSLFQHVENVSEDCLYLNIWTSSVNKNEKKPVMVWVHGGADTGGWSYEPDYLGHHLAKKDVVVVSIGYRLNVFGFFKHPEMNEETGNFGLEDEILALKWIKENIADFGGDPSNVTYFGESAGGAHVSYLATSPEAKGLFKRGIIQSGGYNLFNWRSIDEAHELAIRTQSISGTIDLNDLKSLDENALLQASRNLYHPYRPIIDGKIITDNLAKKYIEGSINDVDLMIGSNKN

SEQ ID NO: 137954 - protein, 322 aa, Unknown
  Bacterial polypetide isolated from the Sargasso Sea
VTIFGESAGGHNVTALFASPLAAGLFHKVIVQSGVSSVSSITASESYLPDNREAPTDSSLDIFNKIVVSQKLADNLQEARSVQEGMSEAQQKEFLYKASPEELTQALLNDRPAKVGMPRVFPDGHVILKGGFQEAYTDSNFNKVPIIFGTNKDENKFFNSMNPNFVEWKPAKGLFKTAGIDVMPTKIIDPDYYDAINFYGSGFWKNSAVDIPASSLVKSGHLDTYAYRFDWDELKEVNGVELSKLVGAAHALEILFVFGTFENFIIRSFLFGRGSYAPAVQLSKDIQSYWAEFAYTGNPGKGREKNLPLWSSWSETGDKYLI

SEQ ID NO: 137955 - protein, 309 aa, Unknown
  Bacterial polypetide isolated from the Sargasso Sea
ESQMSWSEPKNATQFGKACPQGALGLSGSEDCLFLNIWSSQSEGSSKPVMFFIHGGGNVIGSADQGGLYDGQRFASEHEVVLVSINYRLGPLGWFSHPALREIESRAFAEEDNSGNYGTLDIIAGLKWVQKNISSFGGDPDNVTIFGESAGGWNVMSMVVSPLASSLYHKAIVQSGGLKLTDMGEAQEYREDGGLPRSSREEMNRILRLDGRATNSDEAEQIQNAMSSAEISEYLRGAELSLVFGTLGGDRDLAEQKEPRSGPGKPFILWSGMDDMPPNLLADGYVLPGNTDIFEVLSDPTQFNATPIM

SEQ ID NO: 137956 - protein, 229 aa, Unknown
  Bacterial polypetide isolated from the Sargasso Sea
MRDQLAALQWVQENIAAFAGDDKQVTIFGESAGGFSVCSLLACPQADELFQAAIVQSGGADFVLAPDQVRKVTNAFVAALPGDGSAAEKLLSADNKGWIKAQNAAVKVLVDRGLRTTTPQFAMNFLPMVDGDVLPQLPVDAIAAGAAANKRVMAGVCRDEFNFFQYAGVLAGTTTMDALREISDEEIVSRFERALPGNGRRAFDYYQTAVEPDARRSRLDWLAAMNPIV

SEQ ID NO: 137957 - protein, 306 aa, Unknown
  Bacterial polypetide isolated from the Sargasso Sea
MAAKDFHNQSVNPPVVRASTILFKNLQEIEKTEKKYLKDPRSGNFNYGRQGTTTTYALQKILQEMEQCYKVYLTPTGFGAVFLAVLSLVEPGDEILVTDSVYSPTRLLTQDYLKKFNIKSIFYDPNKFDDIKNKISKKTKLIFVENPGSNTFEFQDLKKIISLAKKFNIYTAIDNTWGTPYLIKPIKLGFDMSIVSATKYYSGHSDVMGGTLAINKKVFKLVESTNRVTGLRLSPDDAYLILRGIRTLDVRMDKHHFNALKVAKFLSKQKKISKVYYPYKKNSQYYKLWKKYYSGASGLMGLKINS

SEQ ID NO: 137958 - protein, 266 aa, Unknown
  Bacterial polypetide isolated from the Sargasso Sea
MKLLLTITICFLNLTIYASEVKFKISTTSGEVVGSIKKNIIIYEDIPYAKPPVDQLRWKAPRSITNKVEIKPKENNFCIQRPSNLGGVDSENFYVGSEDCLYLDIFVPKKASKDLPVMFWIHGGGNTSGLKDIYDFSKMVSKHDVIVVRMNYRLGPFGWFTHPAIQNYQYDEDKSSNFGTLDLIMALKWVNKNISSFGGDEDNVTIFGESAGGHNVLSLLVSSKAKGLFHKAISMSGYTTSISIDDAYKSDPKTSTSAYSTHNVTK

SEQ ID NO: 137959 - protein, 225 aa, Unknown
  Bacterial polypetide isolated from the Sargasso Sea
MGKILSIAKSKKIYTAIDNTWGTPYFLKPIKLGFDLSIVSGTKYYSGHSDVMGGSLAVSQRVFRRVLQAHNMTGLRLSPDDAYLIMRGLRTLDVRLDKHQENTNRIARFLSQKKNIEVLYPFKKNTKNYKLWKKYYSGSSGLMGLKITSKNKKSVDKFVNSLNHFGHGYSWGGFESLALHQEIKEQGNRKFLKLKSNEYIVRLHIGLEDLEDLIIDLKKSLKHIR

SEQ ID NO: 137960 - protein, 302 aa, Unknown
  Bacterial polypetide isolated from the Sargasso Sea
VVLVTINYRLGVFGYLAHPELSKESNSSGNYGTSDQIEALRWVKANISAFGGDPENVTIFGESAGSWSVNHLVASPKAAGLFHRAIGQSGGSFQVLPHLKKGDGSGEERGRQFQKKLKKSSILEMRNLDASEILKKSDDQFHGGIVDGRFIPDQLYRLFDIGQFNRVPVMLGYNAEEGTTMGALQSLPKNSADYANKMRQIFGKNAEGILGLYPASNYRDSYLRLSSDSGFGWNMHYWATHSAKHGVKTFMYYFTHRPLGNELAAFHAAEIVFAFNNAQHVEMFDSPINRKLAEEISDFWVQ

SEQ ID NO: 137961 - protein, 281 aa, Unknown
  Bacterial polypetide isolated from the Sargasso Sea
KDTKLIGSLHQNNEVEMFLGIPFAVPPFNDLRWEKPVAWTPENKKEITANKFRPGCIQNQRIVNWYKRLIFDFGGDPGTFDIPEFSEDCLYLNLWRPRGLKNNLPVIVYIHGGSNKAGWSYEPNYLGHNIANKDFILISIPYRLGVFGFFSHPDIESPNLALYDQILALEWIQKYVSFFGGDPSNVTLVGESAGAGGISHLMASPLSKNLFHKAVHQSGGSSFTYPTSSSDVRKLANSFANSFEDPSLKNLKNISAEEILEVSEEVYAEHYFNYVDDGISM

SEQ ID NO: 137962 - protein, 153 aa, Unknown
  Bacterial polypetide isolated from the Sargasso Sea
MQQNILKIFTFLLTISLNASIDSYPTVIVQETKFIGDIHPDNKVEMFLGLPFAKPPTGKFRWKKPEAWEPLQSSEILVKDFKPACYQNQRIVDWYKRLIEDFGGDPLSFVIPEFSEDCLYLNLWRPKGSHTNLPVIVYIHGGSNKAGWAYEPN

SEQ ID NO: 137963 - protein, 167 aa, Unknown
  Bacterial polypetide isolated from the Sargasso Sea
KKVFKLVESTNKVTGLRLSPDDAYLILRGIRTLDVRMDKHHVNTIKVAKFLSKHRKVLNVYYPYKKNSQNYKLWKKYYSGASGLMGIKIKSKNKKSVKNFVNSLKLFGYGYSWGGFESLALYQTVNQLGVRSFTKLKNDEHIIRLHIGLEDTKDIINDLKQALKKIK

SEQ ID NO: 137964 - protein, 246 aa, Unknown
  Bacterial polypetide isolated from the Sargasso Sea
CLFLNIWSSQSESSSKPVMFFIHGGGNVIGSADQGGLYDGQRFASEHEVVLVSINYRLGPLGWFSHPALIEMESRAFAKEDNSGNYGTLDIIAALKWVQKNISSFGGDPDNVTIFGESAGGWNVMSMVVSPLASGLYHKAIVQSGGLKLMDMGEAQGYREDGGLPRSSKEEMNRMLQLDGRAANSDEAKQTQNAMSSTEIIEYLRGADLSLVFGALAADRDLAEQEEPRSGPGKPFILWSGMDDMP

SEQ ID NO: 137965 - protein, 285 aa, Unknown
  Bacterial polypetide isolated from the Sargasso Sea
IADPIYSPTRNLTENYLKEFKIKTNFYYPHDLRTLQHSINNKTKLIFVENPGSNTFEFQDLKKILTIAKKNKIFTAIDNTWGTPYYLKPIKLGFDMSIVSATKYYSGHSDVMGGSLAVNKKVFFKVKAAEKILGLRLSPDDAYLITRGLRTLDVRLDRHQQNARKVAAFLSKNKKIKLLYPYKKNSINFRMWKKYYSGASGLMGLKIKSKNVNSIRRFVNSLKLFGYGYSWGGFESLVLHQEIRETGKRKYINLDKDEHLVRLHIGLEDPSDLIADMKQALKHIK

SEQ ID NO: 137966 - protein, 288 aa, Unknown
  Bacterial polypetide isolated from the Sargasso Sea
VRWSEDCLTLNISVPIAVRDEEEKGNRSVLVWIHGGGYRTGQGAIPWYNGTSFAKNHDVIVVSMNYRLGALGFADLTHLGEGFATSNVNGMLDQIAALEWVRDNIANFGGDPNRVTIAGESAGGFSVGALMGCPSAKGLFCRAIPQSGAASHTLPPHAAATVGAHFQKELGARSSIEVMAADVESILSAQTKTAAYFEGFGDEQKSLGTTVSPFYPTHGTKLLPESPLTAIRGGLSKGIALLTGSNGDETTLWGYGKVDQDRLDAIIQMYRAQPVLDALNKELPGASL

SEQ ID NO: 137967 - protein, 281 aa, Unknown
  Bacterial polypetide isolated from the Sargasso Sea
PVGELRWRPPQPVTPWAGVKETTDYGNDCMQLPFPSDAAPLGKMPAEDCLYANVWAPKDADGSTPVLVWIYGGGFVNGGASPAVYDGSEFAKNGVIFVSFNYRLGRFGFFAHPALTAEAKAAGDMLANYAYMDQIAALKWVNENIAAFGGDVNNVTIMGESAGGGSVHAMMQAEQVRGLFDRAIIMSGGGRSLFGNRKVSEPTPGSLAGEQYGLNYAEKHGITGTDAEALAALRELSPEDIVDGFNLAALFNPTPTDKPTWAGGPMQDGEIITATTEEALR

SEQ ID NO: 137968 - protein, 283 aa, Unknown
  Bacterial polypetide isolated from the Sargasso Sea
MYVGTEDCLYLDISAPARSMSDSLPVMFWIHGGGNTSGLKDLYDFNKMVKKHDVIVVRANYRLGPFGWFYHPSIQGYQDGLDKTSNFGTLDLIEALKWIKTNISKFGGNPNNVTIFGESAGGHNVLSLLVADKSKGLFHKAISMSGYTTSIEQADAYIQEEKSSTSMHTSSEIVKNIIENLKGSISEYTDDEIRNILLGLSTEEFFQYYAERKSYEEIPLLASDGIVIPKIGLKAALSSKDFVNSVPTIAGSNIDEVKLWLATAEYFVELDFSAIGSVLIFQK

SEQ ID NO: 137969 - protein, 139 aa, Unknown
  Bacterial polypetide isolated from the Sargasso Sea
MSKILNKTIVALVFLMLLLVNTLYAEESYIFKTNKTEFIGSVAKEKGDKKTISFVGIPFAKPPVGDLRWKAPRELDGYPETFKATTLPNRCMQVSNFYDSMDGIEGESIIGSEDCLYLNIYLSEKAYKSKEKLPVVFLD

SEQ ID NO: 137970 - protein, 174 aa, Unknown
  Bacterial polypetide isolated from the Sargasso Sea
MKSLINLLTLLVTSSVLAEINEPIEISSGKISGITLDTGVQAFLGIPYAAAPVGDLRWKAPQPAIPWKGVKVADRHGAACMQRGDSYMSEDCLFLDIWTNGQDSDKLPVMVWIHGGGWTFGSNSQDIYDGEAFAENGVVLVSVNYRMNSFGWMAHPELSQESEDGVSGNYGILD

SEQ ID NO: 137971 - protein, 177 aa, Unknown
  Bacterial polypetide isolated from the Sargasso Sea
MANYDEENELLIFRGIPYAEPPVGNLRWKSPVPIELKSQIDARSFKPACMQDTYITDWYHDVIDSFNEDKSLFQHVEAVSEDCLYLNIWTSSIDRNQKKPVMVWVHGGADTGGWSYEPDYLGHNLAKKDVIVVSIGYRLNVFGFFKHPEMSDETGNFGLEDEILALKWIRDNIEDFG

SEQ ID NO: 137972 - protein, 305 aa, Unknown
  Bacterial polypetide isolated from the Sargasso Sea
VVEYFWPKDLYDFDKMASKHQVIIVRINYRLGPFGWFTHPAIQDLQEGIDKTSNFGTLDIIAALKWVKNNISLFGGDPNNVTIFGESAGGHNVYSLIASKKADGLFHKAISMSGYTTSISTKDAYKQSKRSATSDFTSWEVVERLTNNNQSNLSKKEIRDMLLNMPATEFFEIYANRESYQEIPLLTADNIVISEIGLRKSLSETNLINNVPVIAGSNADEVKLWLATAEYFVDLDYSFLGSIFGIPKVVLNNEESFEAFNYYRSSAWKIRGVDNPLQSLSKAGNNKLYSYRFDWDDHTKFIVGD

SEQ ID NO: 137973 - protein, 286 aa, Unknown
  Bacterial polypetide isolated from the Sargasso Sea
PSNLGGVEGKDFFVGSEDCLYLDIFAPKKTNNKKLPVMFWIHGGGNTSGLKDLYDFSKVVSKHDVIIVRINYRLGPFGWFTHPAIQRFQNGEDKTSNFGTLDIVMALKWVKDNISKFGGAPDNVTIFGESAGGHNVFSLLVSSKAKGLFHKAISMSGYTTSISLENAYKPKKTSSTSNYSSSIVVDKLNKKFNTSVDSVEDILQRERKMLLSISARDFFEIYSQRDTYDEIPLLTNDAIVIPKIGLKEALSNKEHLNIVPTIAGSNKDEVKLWLATARYFVDLDYS

SEQ ID NO: 137974 - protein, 262 aa, Unknown
  Bacterial polypetide isolated from the Sargasso Sea
MPKKRLLKWKNSHCVIHGGAGTILKKNMTEEKELEYRKTLNESLMAGYNILSAGGASEDAVEAAIVVMEDSPLFNAGRGSVFNSDGKNEMDASIMDGKTRNAGAVAQVNNIKNPIQAARAVMNHSPHVMMVGDGAITFAKEQNLEMVDSAYFYDERRWKQWEKLRGSNEQQLDHSEERSDVNQEQLDIEFNEKVDHKFGTVGAVAIDQSGNITAGTSTGGMTNKMYGRIGDSPIIGSGTYADNNTCGVSSTGHGEFFMRAVV

SEQ ID NO: 137975 - protein, 276 aa, Unknown
  Bacterial polypetide isolated from the Sargasso Sea
VNPPLVRTSTMVFKSMSDLRQTQKKSLKNPRGGYFDYGRQGTSTTLELEKLLTKLEESYHTFLTPTGFGAVFLTLFSILRPEDELIIADPVYSPTRNLTEKYLKDFNILAKFYNPNDLSTIKKNITKKTKLIYVENPGSNTFEFQDLGKILSIAKSKKIYTAIDNTWGTPYFLKPIKLGFDLSIVSGTKYYSGHSDVMGGSLAVSQRVFGRVLQAHNMTGLRLSPDDAYLIMRGLRTLDVRLDKHQENTIKIARFLSQKKNIEVLYPFKKNSKNYK

SEQ ID NO: 137976 - protein, 268 aa, Unknown
  Bacterial polypetide isolated from the Sargasso Sea
KEFDIKAKFYDPNNLNTIKTNLTKKTKLIYVENPGSNTFEFQDLGSILKIAKKFNIYTAIDNTWGTPYFLKPIKLGFDMSIVSATKYYSGHSDVMGGSLGVSKRIFKKVMEAQNMTGLRLSPDDAYLIMRGIRTLDVRLDKHQENANIIAKFLSKKKNIKVLYPIVKGSKNFKLWKKYYSGSSGLMGIKIKAKNKKFVDKFVNSLSLFGHGYSWGGFESLALHQEIREQGNRKYLKLDKNEYIVRLHIGLEDPKDLINDISKSLKHIK

SEQ ID NO: 137977 - protein, 252 aa, Unknown
  Bacterial polypetide isolated from the Sargasso Sea
SLKKKINKKTKLIFVECPGSNSFEFQDLSKILSIAKKYKLFTAIDNTWATPYFFKPISLGFDMSIVSATKYYSGHSDVMGGSLAVNKRVFKHVKKANDIAGLRLSPDDAYFIIRGLRTLDVRLDKHQENARKVAAFLSRNKKVKLLYPYKKDSFNFRMWKKYYSGASGLMGLKIKARNKSSVLKFVNSLKLFGYGYSWGGFESLALHQSKREQGDRQFLKLEKNEHLVRLHIGLEDSKDLIDDLKKSLKFIK

SEQ ID NO: 137978 - protein, 210 aa, Unknown
  Bacterial polypetide isolated from the Sargasso Sea
RDVPGECSEDCLFLNIYTPAPDNKARPVMVWIHGGAFVRGSAIEYDGSVLAMQGDIVVVTVNFRLGVFGFFGLSDFGSEYAGSESNGVRDVLLALEWVRDNIADYGGDPGNVTISGESSGATMVMSLLAVPAADSLYHKAIGHSATCVFREKTDRTEQLSDCIGVEPNQLLDRLKTMPANEIANINFPIGVYVDGNVISRSTMDAIRDRG

SEQ ID NO: 137979 - protein, 277 aa, Unknown
  Bacterial polypetide isolated from the Sargasso Sea
LFQHAKEVSEDCLYLNIWTSSIDRNQKKPVMVWVHGGADTGGWSYEPDYLGHNLAKKDVIVVSIGYRLNVFGFFKHPEMTDETGNFGLEDEILALKWIRDNIEDFGGDPTNITYFGESAGGAHVSYLTASPEAKGLFKRGIIQSGGYNLFNWRSVDEAHELAIRTQNISGTVDLNDLKSLDENALLQASRNLYHPYRPIIDGRIITDNLAKKYIEGNVNDVDLMIGSNKNEDLLYVDDDPTLEKFSEEIAEYYPDRVDEILAMLDMSDLRLAMDHFG

SEQ ID NO: 137980 - protein, 113 aa, Unknown
  Bacterial polypetide isolated from the Sargasso Sea
MTVGVYGSTDYQPTTFIKDTKLIGSLHQNNEVEMFLGIPFAVPPINDLRWEKPIAWTPEDKKEITANKFRAACIQNQRIVNWYKRLILDFGSDPKTFDIPEFSEDCLYLNLWR

SEQ ID NO: 137981 - protein, 297 aa, Unknown
  Bacterial polypetide isolated from the Sargasso Sea
GTSTTHILEKMLTKMEESYHVFLTPTGFGSVFLAIFSIVRPGDEILVADPVYNPTRILTEDFLKDFKIKTIFYDPHDLETLKKKITKKTKMIFVENPGSNSFEFQDLSKIVSIAKKNKIFSAIDNTWGTPYFLKPIKLGFDMSIVSATKYYSGHSDVMGGSLAVNKKVFKYVQKATKITGLRLSPDDAYFIIRGLRTLDVRLDRHQENAKKVAGFLSKNKKVKLLYPHKKGSINFKMWKKYYSGASGLMGLKIKAKNKKSVIKFINSLKLFGYGYSWGGFESLALHQDLMERGDRKF

SEQ ID NO: 137982 - protein, 174 aa, Unknown
  Bacterial polypetide isolated from the Sargasso Sea
MGGSLAVNKKLFKKVLIAQNMTGLRLSPDDAYFIMRGIRTLDVRLDKHQENAKKIANFLSRKKNIEVLYPISNKSKNYLFWKKYYSGSSGLMGIKIKSKNKQSVDRFVNSLKLFGHGYSWGGFESLALHQEIKEQGQRKYLNLKKNEYLVRLHIGLEDIEDLIKDINKSLKYIK

SEQ ID NO: 137983 - protein, 291 aa, Unknown
  Bacterial polypetide isolated from the Sargasso Sea
SGPVVGFRDRGVDVWLGIPFARPPEGDLRWRAPRLPVPWSDAKEVLDYGPECPQNMMGLSGQEDCLYLNVWSPSEAAEPLPVMFFIHGGGNHIGSANAGGLYDGQRFASNHDVVMVSINYRLGPLGWFSHPSLAVEETDEFSKKDNSGNYGTLDILAALEWVQGNIKNFGGDPGNITIFGESAGAFNVLSMMVSPLAEGLYHKAISQSGGIRLIPMEVAQHYQEEGSGHPLSAREITSRMLLKSGLAVDQEDARGVQEMMSDGAIRIFLLNQSAESILLAQDDSESDANDS

SEQ ID NO: 137984 - protein, 175 aa, Unknown
  Bacterial polypetide isolated from the Sargasso Sea
MKNSILIFLLAVIPASTYASLDEPIQLQAGQISGTLLANGVQAFLGVPFAAPPVGDLRWRPPQPAVPWSGIREMDRKGPDCMQGRNTNFMSEDCLYLNVWTKAESSSDKLPVLVWIHGGGWRFKATYDGDAFAANGAVLVSVNYRMNAFGWMAHPALSDESEHNVSGNYGVLDHL

SEQ ID NO: 137985 - protein, 313 aa, Unknown
  Bacterial polypetide isolated from the Sargasso Sea
LKQVGKDYQNQSVNPPVVRASTIIFKTLQDIKQTQSNYKKNPLSKNFDYGRKGTSTTFALQELLRKIENAYQVYLTPTGFGAVFLGVISVVRPGDEIIITDSVYSPTRFLTEDYLKKFNIKAVFYDPKNLDDLKKKITNKTKLIFVENPGSNTFEFQDLKKILSFAKNKNIYTAIDNTWGTPYLIKPLDLGFDMSIVSATKYYSGHSDVMGGSLAIKKRLFKEVELSQKAVGLRLSPDDAYLIMRGLRTLDIRLDKHQDNTIKVANFLSKQKKVKEVFYPLKKNIKQYKMWKKYYTGSSGLMGVKIFLKIKTL

SEQ ID NO: 137986 - protein, 270 aa, Unknown
  Bacterial polypetide isolated from the Sargasso Sea
MYVGTEDCLYLDISAPARKKSELLPVMFWIHGGGNTSGLKDLYDFNKMVRRHNVIVVRINYRLGPFGWFTHPSIQDFQTDLDKTSNFGTLDIIAALHWVKENISLFGGDPDNVTIFGESAGGHNVFSLLVSDKSKGLFHKAISMSGYTTSISPKDAYVQNDKSSTSSYTSSEIVKKIIKELSNEKETYSNEEIRDILLNLSTQEFFEHYANRETYEEIPLLTSDNIVIPEAGLRASLFNKDIVNKVPTIAGSNRDEVKLWLATARVFCRI

SEQ ID NO: 137987 - protein, 263 aa, Unknown
  Bacterial polypetide isolated from the Sargasso Sea
KLIGSLHQNNEVEMFLGIPFAVPPINDLRWEKPVAWTPENKKEITANKFRPGCIQNQRIVNWYKRLILDFGGDPGTFDIPEFSEDCLYLNLWRPRGLKNNLPVIVYIHGGSNKAGWSYEPNYLGHNIANKGFILISIPYRLGVFGFFSHPDLESPNLALYDQILALEWIQKYVSFFGGDPSNVTLVGESAGAGGISHLIASPLSKNLFHKAVHQSGGSSFTYPTSGSDVRKLANSFANSFEDPSLKNLKNISAEEILEVSEEV

SEQ ID NO: 137988 - protein, 261 aa, Unknown
  Bacterial polypetide isolated from the Sargasso Sea
MVRTSTMVFKSMSDLRKVQRKNLKNPRGGHFEYGRQGTATTFELEKILTNLEESYHTFLTPTGFGSVFLCLFSILRPNDEIIIADPIYSPTRLLTENYLKEFDIKTKFYDPNNLDTIKKNFTKKTKLIYVENPGSNTFEFQDLGKIISFAKKHKVLTAIDNTWATPYFLKPIKMGFDLSIVSATKYYSGHSDVMGGSLAVSKRVFNKVIKAQNMTGLRLSPDDAYFIMRGIRTLDVRLDKHQDNAIKIAKFLSKKKNIEVL

SEQ ID NO: 137989 - protein, 302 aa, Unknown
  Bacterial polypetide isolated from the Sargasso Sea
MAGCATNKNLEIRSSNQSAHRSIPVGELIGYVHENRAHAWLGIPYAKPPIGDLRWKAPRPKASWEGVLNATEFGAPCTQIGSTFGDPEAKVGSVHGSEDCLYLNIFAPLNIGENEKLPVMLWIHGGSNTIGTAKLYDPSVLASSQRVIVVTLNYRLGIFGWFYHPSIKNLSESPEDGSGNYGTLDQIQSLKWIRQNISHFGGDNENITIFGESAGGHNVYTLLFSPLAEGLFHKAISQSGSTKTLSIDQAVSIDDATKNNSDGTSSKEILNQLIIAGGLARDRNSAIEMQNSMQDHEIVNFF

SEQ ID NO: 137990 - protein, 273 aa, Unknown
  Bacterial polypetide isolated from the Sargasso Sea
MKKILVTILILFVFTGAQSFSNEVVDESKVVLGDVEIVGTKINEEDQKDIYAWYGIPYAKAPEGDLRWKAPRDFEFTSNRFDATKLPNRCVQVSNFYDELITGQKEGTIFGSEDCLYLNIFAPADSFKSNKKLPVMFWIHGGGNTWGYSASPMYIPTNFLKFHDVILVSINYRLGPFGWFSVPNLNSNSNEPLDQSPNFGTLDMIKSLEWVNQNISSFGGDPNNITIFGESAGARNVLSLYLAEPAKNLFQRGIVQSGYLVSDNLEYSRNNPN

SEQ ID NO: 137991 - protein, 291 aa, Unknown
  Bacterial polypetide isolated from the Sargasso Sea
MLANYDDENGLFIFRGVPYAKPPVGKLRWKSPQPVEEKSQIDARSFKPACMQDTYITDWYHDVIESFGQDKSLFQHVENVSEDCLYLNIWTSSVNKNEKKPVMVWVHGGADTGGWSYEPDYLGHHLAKKDVVVVSIGYRLNVFGFFKHPEMTEETGNFGLEDEILALKWIKENIADFGGDPSNVTYFGESAGGAHVSYLATSPEAKGLFKRGIIQSGGYNLFNWRSVDEAHELAIRTQNISGTVDLNDLKSLDKNALLQASRNLYHPYRPIIDGKIITDNLAKKYIEGSIN

SEQ ID NO: 137992 - protein, 327 aa, Unknown
  Bacterial polypetide isolated from the Sargasso Sea
HQDLSLESGKCTSGNYGTLDQIAALQWIQENIQEFGGDPNQVTIFGESAGGESVAHMLTSPLADGLFARAIIQSGANSGQMHHQKESVLGHESGELRGERFADNFTSSPNQIDALRRVPASEIMAHIRSEDDFELRSFFPVIDGYILPMSPFESFRQGKQSNVPLLVGSNSDEGSLFAPHIPIPLIEYRGLEPSPAEMDRLLSREFLDDADLIKELYPGIEDSNYLSKQEMLGDSLFGAPAFYYARLHAQKNPNTFLYYFNQQPPSKTQTAGAYHAAELGYVFDLRSPIFPKSKTGKQLAKTINRTWAEFARSGGPNNKTLPTGRLC

SEQ ID NO: 137993 - protein, 258 aa, Unknown
  Bacterial polypetide isolated from the Sargasso Sea
CATNKNLEIRLPNQSTHRNIPVGELIGYVHENRAHAWLGIPYAKPPIGDLRWKAPRPKASWEGVLNATEFGAPCTQIGSTFGDPEAKVGSVHGSEDCLYLNIFAPLNIGENEKLPVMLWIHGGSNTIGTAKLYDPSVLASTQRVIVVTLNYRLGIFGWFYHPSIKNLSESPEDGSGNYGTLDQIQSLKWIRQNISHFGGDNENITIFGESAGGHNVYTLLFSPLAEGLFHKAISQSGSTKTLSIDQAVSIDDSMKNNS

SEQ ID NO: 137994 - protein, 313 aa, Unknown
  Bacterial polypetide isolated from the Sargasso Sea
LILTLIVAFCSYVALADFVVETSSGIVDGYKKNRAIYWDDIPYAKPPVGNLRWKAPRKIINSKIEIISRDDNFCVQRPSSLGGVDGDGPFVGSEDCLYLDITAPKKTQSGLFPVMFWIHGGGNTSGLKDLYDFNKIVKRHDVIVVRINYRLGPFGWFTHPSIQQYQDGIDKSSNFGTLDIIAALEWVQENIKLFGGDPNNVTIFGESAGGHNVLSLLVSKRSTGLFHKAISMSGYTTSIKPIDAYNQSKKSSTSAHTSSEIVKKIIESKNFDNVSYSDIDIRNILYNLTTDEFFQHYYERESYEEIPLLTSDG

SEQ ID NO: 137995 - protein, 227 aa, Unknown
  Bacterial polypetide isolated from the Sargasso Sea
MLKAFARIVVILFAVGVYGSIDYQPTAFIKDTKLIGSLHQNNEVEMFLGIPFAAPPVDDLRWEKPVPWIPSLNKKIIANEFKPACFQNQRIVNWYKRLILDFGGDPETFDVPVFSEDCLYLNLWRPKDVKNYLPVIVYIHGGSNKAGWSYEPNYLGHNIANKGYILISIPYRLGVFGFFSHPDIESPNLALYDQILALEWIQKYVSFFGGDPSNVTLVGESAGAGGI

SEQ ID NO: 137996 - protein, 162 aa, Unknown
  Bacterial polypetide isolated from the Sargasso Sea
KKVLHAQNMTGLRLSPDDAYFIMRGIRTLDVRLDKHQQNAKQIAKFLSTKKNIEVLYPLKKNSKNYKLWNKYYSGSSGLMGIKITAKIKKSIDKFVNSLKLFGHGYSWGGYESLALHQEIKEQGKRKFLKLKKNEHIVRLHIGLEDSNDLIQDLRKSLKFIK

SEQ ID NO: 137997 - protein, 112 aa, Unknown
  Bacterial polypetide isolated from the Sargasso Sea
MANYDAENELLIFRGIPYAEPPVGNLRWKSPVPIELKSQIDARSFKPACMQDTYITDWYHDVIDSFDEDKSLFQHVGEVSEDCLYLNIWTSSIDRNQKKPVMVWVHGGADTG

SEQ ID NO: 137998 - protein, 309 aa, Unknown
  Bacterial polypetide isolated from the Sargasso Sea
MFISRCFIPNESFEKQLPVMFWIHGGGNTSGLKDLYDFSKMVSRHNIILVRINYRLGPFGWFTHPAIQGFQEGDDKSSNFGTLDIIKALEWVSLNISAFGGDPSNVTIFGESAGGHNVLSLLVSKKAKGLFHKAISMSGYTTTVTLEDAFNPKIESSTSNYSSKKIVQEIFKKFNEKDISVTQSDNKTRQMLYEISTEDFFSIYSQRETYDEIPLLTADGIVIPKIGLKKALSDENHLNIVPTIAGYNRDEVKLWLATAKYFVDLEFSVFGSVLNIPKVKLNDEDSFEAFNYYRSAAWQIRGVQEPLNA

SEQ ID NO: 137999 - protein, 316 aa, Unknown
  Bacterial polypetide isolated from the Sargasso Sea
KLPNRCVQVSNFYDELINEQKEGTIFGSEDCLYLNIFSPADSFKSDKKLPVMFWIHGGGNTWGYSASPMYIPTNFLKFHDVILVSINYRLGPFGWFSVPDLNSNSNEPLDQSPNFGTLDMIKSLEWVNRNISSFGGDPNNITIFGESAGARNVLSLYLAESAENLFQRGIVQSGYLVSDDLEYSRNNPVSGSMTFVKSSLNKKNSNMNPMTLKETLEDVDNLGDYLRDLSKEEIISFYRVREDSGGLIDVPNVIPDRIIIPEEGIFESYVRGKFQDKEIILGTNRDENKLFISGDKRFVKTVLPGFIANMHPTLGL

SEQ ID NO: 138000 - protein, 266 aa, Unknown
  Bacterial polypetide isolated from the Sargasso Sea
RTFIKHTAKDFHNQSVNPPVVRASTIIFKNLQEIEKTEKKYLKDPISGNFNYGRQGTSTTFALQKILQEMEECYKVYLTPTGFGAVFLAILSLVEPGDEILVTDSVYSPTRLLTQSYLKKFNVKSSFYNPSNLNDLKNKINKNTRLIFVENPGSNTFEFQDLKKIISLAKKNKIYTAIDNTWGTPYLLKPIKLGFDMSIVSATKYYSGHSDVMGGSLAINKKVFKFVEPTNRVTGLRLSPDDAYLVLRGIRTLDVRMDQHHLNAKK

SEQ ID NO: 138001 - protein, 181 aa, Unknown
  Bacterial polypetide isolated from the Sargasso Sea
MTLLGNDLGLERDNERTDALLVVLVDGMGAAKILPTPVRRELIEHYIGFAVWDVLTFSITNWSDLDEFDEIRVDRLSPDDAQTLRKGDATATLKGIQFHHFGAFFSRAYRENDYLWGRLHAVDRLMDIVLDAAHIEGIGDDINIINLKAQAFRAILDNEQHNLPGCRDLIHILQKEAAELS

SEQ ID NO: 138002 - protein, 231 aa, Unknown
  Bacterial polypetide isolated from the Sargasso Sea
MVFLFSFPQYSIASKNLQQIPKKIIEKCIAKENLDKIKIAQRQRRPGPRGGMGQRGRMSRPRGGMGPRGGMGQRGRMSRPRGGMGPRGGMGQRGRMSRPRGGMGRQNGGGEASMSESAGGASEMQSDQSMGEVEPGSSSPTRGSKFRNKRRMRNRMRQRMQRRGRGPQSQALGQDGGGEASMSESAGGASEMQSDQSMGEVEPGSSSPTRGSKFRNKRRMRNRMRQRMQRR

SEQ ID NO: 138003 - protein, 384 aa, Unknown
  Bacterial polypetide isolated from the Sargasso Sea
MKTNLRTFIKHTAKDFHNQSVNPPVVRASTIIFKNLQEIEKTEKKYLKDPRSGNFNYGRQGTSTTYALQRILQEMEECYKVYLTPTGFGAVFLAVLSVVEPGDEILVTDSVYSPTRLLTQDYLKKFKVKSIFYDPSNFNDLKSKVTNKTKLIFVENPGSNTFEFQDLKKIISLAKKYKIYTAIDNTWGTPYLIKPIKLGFDMSIVSATKYYSGHSDVMGGTLAVNKKVFKLVEPTNRVTGFRLSPDDAYLILRGIRTLDVRMDKHHINALKVAKFLAKQKKVAKVYYPYKKNSQIYKLWKKYYSGASGLMGLRIKSKNKKSVKSFVNSLKLFGYGYSWGGFESLALYQSQKQLGTRSFVNLKNDEHIIRLHIGLEDPMDIINDL

SEQ ID NO: 138004 - protein, 320 aa, Unknown
  Bacterial polypetide isolated from the Sargasso Sea
MRPIVDTNTGPVEGLEEEYNGIKGYSFKGIPYAADTSGQNRWRAPQDVEPWTTPLDASSFGPQCPQFRMGEGGFRGFIAGAYEAEIPEEEPIQESEDCLRLNVYSPDLNPKEKAPVMFWIHGGALRYGSGDVYLPDGIVPKGNVLVTINYRLGELGFFAHPSINDSDQKYKTNFGLLDQIKALHWVKENIENFGGDPSNVTIFGESAGGFSVAALLVSPPSKGLFHKAIVQSGGFARMALHSSDNSDNGYSASDLGTRFGELCDIPTGPDQLKNMRDLPVEKIIDVGKIGFSSSFFVDGQSILSPVMKSFEDGLNHKVPT

SEQ ID NO: 138005 - protein, 392 aa, Unknown
  Bacterial polypetide isolated from the Sargasso Sea
MVNSVKTFLKQVGKDYQNQSVNPPVVRASTIIFKTLQDIKKTQSNYKKNPLSKNFDYGRKGTSTTFSLQELLRKIENAYQVYLTPTGFGAVFLGVISVVRPGDEIIITDSVYSPTRFLTEDYLKKFNIKAVFYDPKNLDDLKKKITNKTKLIFVENPGSNTFEFQDLKKILSFAKNKNIYTAIDNTWGTPYLIKPLDLGFDMSIVSATKYYSGHSDVMGGSLAIKKRLFKQVELSQKAVGLRLSPDDAYLIMRGLRTLDIRLDKHQENTIKVANFLSKQKKVKEVFYPIKKNIKQYKMWKKYYSGSSGLMGVKIISKNKNSVIKFLNKLKLFAHGYSWGGFESLALYQDKLALGNRSYTKLSNNEHIIRLHIGLEDPNDLIADIKQAIKSVR

SEQ ID NO: 138006 - protein, 290 aa, Unknown
  Bacterial polypetide isolated from the Sargasso Sea
MLANYDDENGLFIFRGVPYAKPPVGKLRWKSPQPVEEKSQIDARSFKPACMQDTYITDWYHDVIESFGQDKSLFQHVENVSEDCLYLNIWTSSVNKNEKKPVMVWVHGGADTGGWSYEPDYLGHHLAKKDVVVVSIGYRLNVFGFFKHPEMTEETGNFGLEDEILALKWIKENIADFGGDPSNVTYFGESAGGAHVSYLATSPEAKGLFKRGIIQSGGYNLFNWRSIDEAHELAIRTQSISGTIDLNDLKSLDENALLQASRNLYHPYRPIIDGKIITDNLAKKIYRRKS

SEQ ID NO: 138007 - protein, 502 aa, Unknown
  Bacterial polypetide isolated from the Sargasso Sea
MGIKIKSKLIICLFVSFTVCADYSIKTESGITDGKLKNKVIYWYDIPYAQPPVGELRWKAPREIINSDINIIPRDDNFCVQKTSSLGGSAQLSSENISGTEDCLYLDILAPKNKTSNSLPVMFWIHGGGNTSGLKDLYDFDKMASKHQVVIVRINYRLGPFGWFTHPAIQDLQEGIDKTSNFGTLDIIAALKWVKNNISLFGGDPNNVTIFGESAGGHNVYSLIASKKANGLFHKAISMSGYTTSISTQDAYMQSKRSATSDFTSWEVVERLTNKNQSNLSKKEIRDILLNMPATEFFEIYANRESYQEIPLLTADNIVISEIGLRKSLSETNLINNVPVIAGSNADEVKLWLATAEYFVDLDYSFLGSIFGIPKVVLNNEKSFEAFNYYRSSAWKIRGVDYPLQSLSKAGNNKLYSYRFDWDDHTKFIVGDFKKLIGAAHATEIPLLTGNSKLVDGFPLSLLIYPPSSSKRYLSKNMMKFWSNFAKYGKPGDSSNLVTWQS

SEQ ID NO: 138008 - protein, 283 aa, Unknown
  Bacterial polypetide isolated from the Sargasso Sea
MTVGVYGSTDYQPTTFIKDTKLIGSLHQNNEVEMFLGIPFAVPPINDLRWEKPIAWTPEDKKEITANKFRAACIQNQRIVNWYKRLILDFGSDPKTFDIPEFSEDCLYLNLWRPRELKNNLPVIVYIHGGSNKAGWAYEPNYHGHNIANKGFILISIPYRLGVFGFFSHPDIESPNLALYDQILALKWIQKYVSFFGGDPSNVTLVGESAGAGGISHLIASPLSKNLFHKAIHQSGGSSFTYPTSGSDVRKLANSFANSFKDPSLKNLKNVSAEEILEVSEKV

SEQ ID NO: 138009 - protein, 241 aa, Unknown
  Bacterial polypetide isolated from the Sargasso Sea
NKNSPYKLDRTYNFGTLDLIKALEWVNKNIENFGGDKNNVTIFGESAGARNVMSLMISPQSENLFHRAISQSGYLNSDTLELAINKTRAGSKEFISHSVKKTSHQITNAELNDFMSQTNKVAGLLRSLSTKDVISFYRIREGVGGLIDVPNVIPDEVVIPKAGLYGAYKKGLAHDIPIIFGTNRDEHKLFMFDNPEFVESKGFFFLEKIFRELDFRYVPKGLTLLSGLFKIHVDVLEDRWC

SEQ ID NO: 138010 - protein, 392 aa, Unknown
  Bacterial polypetide isolated from the Sargasso Sea
MVNSVKTFLKQVGKDYQNQSVNPPVVRASTIIFKTLQDIKKTQSNYKKNPLSKNFDYGRKGTSTTFALQELLRKIENAYQVYLTPTGFGAVFLGVISVVRPGDEIIITDSVYSPTRFLTEDYLKKFNIKAVFYDPKNLDDLKKKITNKTKLIFVENPGSNTFEFQDLKKILSFAKNKNIYTAIDNTWGTPYLIKPLDLGFDMSIVSATKYYSGHSDVMGGSLAIKKRLFKQVELSQKAVGLRLSPDDAYLIMRGLRTLDIRLDKHQENTIKVANFLSKQKKVKEVFYPIKKNIKQYKMWKKYYSGSSGLMGVKIISKNKNSVIKFLNKLKLFAHGYSWGGFESLALYQDKLALGNRSYTKLSNNEHIIRLHIGLEDPNDLIDDIKQAIKSVR

SEQ ID NO: 138011 - protein, 191 aa, Unknown
  Bacterial polypetide isolated from the Sargasso Sea
QQFRIVDKQLELSFLALSTKDTLLNLTNHCYFNLNNDSSSIENHQLQLTATHYLPTDEHAIPTGERRAVAGTAFDFSKAKLVGPALRQQDQQLALANGFDHCFIWQEADAAELKLMAVLSSSQSGRQLEVLSTQPGLQLYTGNFLAAPFTPRQGICLEAQGWPDAINQLGFPTTQLKAGELYQQLIVYKFS

SEQ ID NO: 138012 - protein, 442 aa, Unknown
  Bacterial polypetide isolated from the Sargasso Sea
FRHPAIQSLQDGIDKSSNFGTLDIIMALKWVQKNIHNFDGDKNNVTIFGESAGGHNVMTMLATPLSNGLFHKAISQSGYTTSYTAEQSLGISSNNSVINDFGSLNVFSNASVSRITDSVIKNFNELDLQSQRRFLKNLKAEDFLSIYLELEKETFDYIPLVNRDGIVIPIEGILSALGNKKYAKNVPVIFGSNKDELSLWLGVNNYFSERTYPFTRLIPISKIELKNPELYRLWLSVRSEAWKLRGVDEPLLQLEKAGYKNTYAYRFDWDDQKKSFFADFPNMIGAAHGLEIAFLTTEYKFGPVSSYVYPKTDERDQMEETFLSAWSNFAKKGQPIIENTKVQWEKYTSSKQVFLVLDNLNELRSISDKKNMDDILSFANTNVATDLEKCLLVRETVINIGDPNLSLLNNWNNGSCNRFDLEFELRKIEDDLISKYGQVSVF

SEQ ID NO: 138013 - protein, 360 aa, Unknown
  Bacterial polypetide isolated from the Sargasso Sea
MSCSSLTDRPDKSLKKVSAPSGDFFGIENEENYIFKGIPYAQAPVGDLRWKAPREYTPTKSIYATDFGNECVQPGDDYVLGVYRRSNTIGEEDCLYLNIFIPKKGEVLESNSFPVMFWIHGGANIYGSANTYDFQNLIKKDVIVVSINYRLGPFGWFSSDFIRDDASGLDLTSNFAHLDMIQALKWVKQNISKFGGDPNNITIFGESAGGHNILALLASPLSKGLFQKAISQSGYSSTYSLEEATSLSTLSSEKVFEEDIKFMTKSSEIVEYLKELSHQEIYARYEEASDREVYPILPVTVRDGIVIPKKGILRSLEQVDPNVTVLAGTNRDEMNFYYIRSDYFYDTTLEIRRNLKRSEE

SEQ ID NO: 138014 - protein, 395 aa, Unknown
  Bacterial polypetide isolated from the Sargasso Sea
LLDQIKALEWLRDNIENFGGDSNNITIFGESAGGQNVIALYVSPIAKGLFHRAISQSGGITLTSIADAEDIDRVVFPLNGNYKYRHKTTKEFINNLLNEGIINTHLNETGNIEELINLKATDLMLSWTTGGVWEGATQMARIIGDGYVLPKDSILDALKDKNRHANVPIILGVNKDENKTFNLFNEELVTNILNLTFIAKDPFFYDLKSDYQSLAWRSNAVDTPADAIVGGGYPNVYAYRFDWDEQPSILGMDFSFLLGAGHGLEIPFVMGDFDFGRQTRFLFTKKNEHERNKLSKVIMQYWANFAKEGYPSSESENITPWNKWPKGGINQNRIMILDTEQSNAPRMSNGYVPHNKLVSIFESDERSLKVDNKCYFLEDVYSWVDNWKIKNNICQ

SEQ ID NO: 138015 - protein, 279 aa, Unknown
  Bacterial polypetide isolated from the Sargasso Sea
SPTRILTEDYLKEFNINAKFYDPNNLDTIKKNFTNKTKLIYVENPGSNTFEFQDLGKIISFAKKKKILTAIDNTWATPYFLKPIKIGFDLSIVSATKYYSGHSDVMGGSLAVSKRVFKRVIRAQNMTGLRLSPDDAYFIMRGIRTLDVRLEKHQDNAIKIAKFLSKKKNIEVLYPFKKNKKNYKFWKKYYSGSSGLMGLKIKVKNKKSVDRFVNSLKLFGHGYSWGGYESLALHQEINEQGNRKYLNLDKNEYIVRLHVGLEDPKDLIKDISNSLKFLK

SEQ ID NO: 138016 - protein, 372 aa, Unknown
  Bacterial polypetide isolated from the Sargasso Sea
PFGFFAHPELSSESANGVSGNQGFRDQIAALEWVRDNIENFGGDPDNVTIFGESAGSWSVSVMQASPLARGLFHKVIGQSGARFIPTPDLTEDRWGIPSAESWGEKLGSKFTNNDGASLETLRSLPAQEIMDVYAKDPEVLMNFDYLTIVDGAVLPEEVDNIFKSGAQADVPALIGSNEDEATTFDPALLNPQATDLDYGEALRAQVAMMLPAGDATIFDLYSTEPEVAQNSWVEFSTDAMFTQPMRLWADYMQNVSSPAYLYWWTWAPIVDGSDKYGAFHAAEVPFVFGDLSGFSMTSRPEDKEFSDLMMTIWTNFAKTGDPSVDGILDWPAYDSERATTAVLGKDLTLEPGIRSERVEKITAAYTAQRNK

SEQ ID NO: 138017 - protein, 508 aa, Unknown
  Bacterial polypetide isolated from the Sargasso Sea
MLKAFARIVIILFTVGVYGSTDYRPSAFIEDTKLIGSLHQNNEVEMFLGIPFAAPPINDLRWEKPVAWIPENKKEIIANKFRPGCVQNQRIVNWYKRLILDFGGDPGTFDIPEFSEDCLYLNLWRPKGLKNNLPVVVYIHGGSNKAGWSYEPNYLGHNIANKGFILVSIPYRLGVFGFFSHPDIESPNLALYDQILALEWIQKYVSFFGGDPSNVTLVGESAGAGGISHLIASPLSKNLFHKAVHQSGGSSFTYPTLGSDVRKLANSFANSFEDPSLKNLKNISAEEILEVSEKVYAEHYFNYVDDGFSMIGNLSDTFKSGNIENVDLLIGSNNDEWSLYFDGNVNISLWLDKETTPEKKIKLLQLLDHIKDPVRKMDLLITAKNFVCPSLFMAEELMKKGGKTWVYQFNRVRDNELAKKYGAFHGAELPYVFDTHDEWLPTNEKDKELTREIQSYWLSFAKTGNPNNDDAVLWPEYDSSNDSTLVLDDEIYQRSHESSEICKVLKLF

SEQ ID NO: 138018 - protein, 391 aa, Unknown
  Bacterial polypetide isolated from the Sargasso Sea
MKKSFKTILKQTSKDFKNRSVNPPLVRTSTMVFKSMSDLRQTQKKNLQNPRGGYFDYGRQGTSTTLELEKLLTQLEESYHTFLTPTGFGAVFLTLFSILRPGDELIIADPVYSPTRNLTEKYLKDFQILAKFYNPNDLSTIKKNITKKTKLIYVENPGSNTFEFQDLGKILSIAKTKKIYTAIDNTWGTPYFLKPVKLGFDLSIVSGTKYYSGHSDVMGGSLAVSQRVFRRVLQAHSMTGLRLSPDDAYLIMRGLRTLDVRLDKHQENTNKIARILSQKKNIEVLYPLKKNSKNYKLWKKYYSGSSGLMGLKITSKNKNSVDKFVNSLNHFGHGYSWGGFESLALHQEIKEQGNRKFLNLKSNEYIVRLHIGLEDLDDLIRDLKKSLKYIR

SEQ ID NO: 138019 - protein, 511 aa, Unknown
  Bacterial polypetide isolated from the Sargasso Sea
MNNKTETITISTHLGDVVGVKKYNGSYFKGIPYGADTSGKNRWRSPQEPEMWSEPFDASSFGPQCPQFRMGEGGFRGSIAKAYGVEVPPEETPAESEDCLRLNVFSPDTNSKEKLPVMFWIHGGALRYGSGDPYLPEGILSKDIVLVSINYRLGELGFFAHPALKEEGNVPRTNFGLLDQIKGLEWVQKNIENFGGDSSNVTIFGESAGGLSVAALLVSPLSKGLFHKAIVQSGGFARMALNAYELNEMGATGSMVGKSFCNVCGVEDGPDQIDKMRDLPVQEIIQKGIGFPSSLYVDDISMLSPVIQGFEEGINHKVPTIIGTNADEGTALYWGSPLADETPPVNSVERYLDIIKERFGEDSEKMLSIYPASDKEEMIDSSKRLLGDSLFGAPSYFASKAMAERNEEIYFYHFNQKPSGEAGELLGSFHAYEIGYVFGLGGLGPIENTELSDCMLSYWTNFSKFGDPNDSNLPNWRKMQPNKDTWYELGPSIGEKDISRLEIYDLLKKVI

SEQ ID NO: 138020 - protein, 242 aa, Unknown
  Bacterial polypetide isolated from the Sargasso Sea
MKLFFIFLINIFLLNSLNLNASNDFVYTQSGVVEGLKKNRFVLYQDIPYAQPPVGNLRWKAPRTLKSSDKILPKDENFCIQRPSNLGGAEGDDFFAGSEDCLYLDIYTPSKVKNDLPVMFWIHGGGNTSGLKDLYDFSKMVSKHDVIVVAINYRLGPMGWFTHPAIQEFQDGDDKTSNFGTLDIIHALKWVNNNISKFGGNPDNVTIFGESAGGHNVLSLLVSDKAKGLFHKAISMSGYTTS

SEQ ID NO: 138021 - protein, 535 aa, Unknown
  Bacterial polypetide isolated from the Sargasso Sea
MSNIIADYEVATNSGIVQGYKKNNIVYWDDIPYAKPPINELRWKAPRQINQPKKLILPRDNNFCVQRPSSLGGASGDGMYVGTEDCLYLDVVAPANKNSVLKPVMFWIHGGGNTSGLKDLYDFSKMAKKHDVLIVRVNYRLGPFGWFTHPSIQELQEGLDKSSNYGTLDIIEALRWVKENIHLFGGDPNNVTIFGESAGGHNVYSLIASSEARGLFHKAISMSGYTTSVSPKDAYKPSKQSFTYNHSSFNVVNKILESQIKSNPSKKFSNEEIRDILLNLSTEDFFQQYSDRKSYEEIPLLTADDIVIPSVGLKGALSDPTLINIVPTIAGSNRDEVKLWLGTAEYFVELDYSFFGSMLNIPKVVIKNEDSFEAFNYYRSSAWKIRGVDIPINALREAGNKNLYSYRYDWDDHRKYLVADFKKLIGAAHATEIPILAGNSLLVGGYPLSDLIYPPGKSKFYLSRNMMIFWTQFAKSGTPGESTNSIEWKKNMISQEANSSYLILDNKKNLRMEADNNTLKSLSEELYYDDRLTEI

SEQ ID NO: 138022 - protein, 416 aa, Unknown
  Bacterial polypetide isolated from the Sargasso Sea
VEGDGDWGGSEDCLYLNVWTPELTPEEIKDSKTQLPVMMWIHGGANVVGSAHVYDPSLLVAKHKVVVVTIQYRMGPLGWFRHPALSLDGASEKDKSGNYGTLDTIKALEWINKNIGNFGGDPNNVTVFGESAGGHNTAAIFASPLAEGLYHKAIVQSGIMSTGSIDAAESFTPEDRIAPTTSGLEVFSRILIANDMASDMEEANVLQSEMTDEEIRRVFYSQEASDLFGAASDSSPKRNGMTRVFPDGHVIHKGGIQESFTNSNLSRVPIITGTNKDENKFFNSLNRNFVEWGPSTGLYKTAGIDEMPLEIIDPDYYEALNFYGSSFWKQRAVDTPSKQLIDSGHQNTYAYRFDWDELSTINGMDLSQLIGAAHAMEILFVFGSFDSYIIKNFLFGEGAYPAGKKLSDQIQSYWAE

SEQ ID NO: 138023 - protein, 364 aa, Unknown
  Bacterial polypetide isolated from the Sargasso Sea
MTANPSFYVNNTEIVGITAEDVDIYLGIPYAEPPIDSLRWEVTQPKIFETKKYVADKFAPACMQGPRIVNWYKGVAAGFGGDPNYIKTPEISEDCLYLNMWVPNNLDNKEKIPVLIYIHGGSNRAGWSFEPNYIGKNLSRKGVIVITVSYRLGVFGFYSHPNLDASNFALLDLIESLNWVKENIAKVGGDPENITISGESAGATNVAHLIASPLAKGLFNKAIHQSAGWSIAEKDIDYDIQTELSDKLSIKLIGKTNKSNNLKELRAVDSVTLLYSAEDIFGYVGYYPVIDNFSIFEPLYKSYEQGSYNHVDLIIGTNSDEELMYLDKDYYLYDFYNERESWGFYTETEELDSLTSNINKKRRN

SEQ ID NO: 138024 - protein, 271 aa, Unknown
  Bacterial polypetide isolated from the Sargasso Sea
MTFGVYGSTDYQPTTFIKDTKLIGSLHQNNEVEMFLGIPFAVPPINDLRWEKPIAWNPENKKEITANKFRAACIQNQRIVNWYKRLILDFGSDPRTFDIPEFSEDCLYLNLWRPRELKNNLPVIVYIHGGSNKAGWAYEPNYHGHNIANKGFILISIPYRLGVFGFFSHPDIESPNLALYDQILALEWIQKYVSFFGGDPSNVTLVGESAGAGGISHLIASPLSKNLFHKAIHQSGGSSFTYPTSGSDVRKLANSFANSFKDPSLKNLKNI

SEQ ID NO: 138025 - protein, 603 aa, Unknown
  Bacterial polypetide isolated from the Sargasso Sea
MDSLRSTDQGELIGLNGENNTYTWKGIPFATPPVDDLRWKATQEAKPWNGRLEATEFRQACFQRGSVFENSESQWSGSEDCLYLNIWTPKLSKEQIEQFSDQLPVMMWIHGGANVVGSAHTYDPSSLVSNHNVIVVTIQYRMGSLGWFRHPALHNEDSSLEDRSGNYGTLDTIMALRWINKNIHHFGGDPNNVTVFGESAGGHNSAAIFASPLAQGLFHKVIVESGIMSVSSIEAAESYLPEDGIAPTVSGLEILNHLLIQDGKANNIKAAKEIQLNMTREEIKAFLYAQPPEALMNAMNDAGPKRDGMTRVFPDGLVVLQGGIEEAFNNSNFKRVPIITGTNKDENKFFNSMNRNFVEWGPATGLYKAAGIEEMPLKIIDLDYYEAINFYGSSFWKQRAVDTPSRLLAESGHENTYAYRFDWDELSTIDEMDLSKLIGAAHAMEILFVFGSFDSYLVRNFLFGEEAYPAAKKLSEQIQSYWAEFAYTGSPGKGRNNDLPEWKKWSLAPKEKYIVFDSENDQGIFMEDTEYSIDYLLNKLESDPRLDNQQKCETLFGLSYGDGNGVSDEEFNSFMNGSCASRDYSSILDMIESVEEELINNQD

SEQ ID NO: 138026 - protein, 511 aa, Unknown
  Bacterial polypetide isolated from the Sargasso Sea
MNNKTETITISTHLGDIAGIKESKVFSFRGIPYGADTSGNNRWRAPQEPEPWSEPFDASSFGPQCPQFRMGEGGFRGSIAKAYGAEVPAEETPTESEDCLRLNVFTPNTNPEKKLPVMFWIHGGALRYGSGDPYLPEGILSKDVVLVSINYRLGELGFFAHPALKEEGNVPTTNFGLLDQIKGLEWVQKNIENFGGDSSNVTIFGESAGGLSVAALLVSPLSKGLFHKAIVQSGGFARMALNAYELNEMGTTGSMVGKSFCNVCGVEDGPDQIDKMRDLPVQEIIQKGIGFPSSLYVDDISMLSPVIQGFEEGINHKVPTIIGTNADEGTALYWGSPLADEAPPVNSVEKYLGIIKERFGDDEEKILSIYPASDKEEMIDSSKRLLGDSLFGAPSYFAAKAMAERSEEIYFYHFNQKPSGEAGEVLGSFHAYEIGYVFGVGGLGPIENQELSDCMLSYWTNFSKGGDPNDSGLPSWEKMQSERDTWHELGPSIGEKDISRLEIYDLLKKVI

SEQ ID NO: 138027 - protein, 292 aa, Unknown
  Bacterial polypetide isolated from the Sargasso Sea
MTRFFIIFLLLICLPLQSGEVDITVNANDAEVLAHFDDESELFIFRGVPYAKPPVGKLRWKSPQPVEEKSQIDARSFKPGCMQDTYITDWYHDVIESFEQDTSLFEHVKEVSEDCLYLNIWTPSVDKTKKKPVMVWVHGGADTGGWSYEPDYLGHNLAKKDVVVVSIGYRLNVFGFFKHPEMSDETGNFGLEDEILALKWIQENIEDFGGDPNNVTYFGESAGGAHVSYLAASPEAKGLFKRGIIQSGGYNLFNWRSIDEAHELAIRTQNISGTIDLNDLKQLDANALLLAS

SEQ ID NO: 138028 - protein, 260 aa, Unknown
  Bacterial polypetide isolated from the Sargasso Sea
MKKNIFTTIFLSIFFLTSCETIDSIKPSRDIVKTSPDSLRLTNSGPVIGVDGEEGIHIWFGVPYAEAPVDKLRWKAPRNVNSWDKVYEATNFSSPCLQIQSSLTGGGLAKPGDIIGDEDCLYLNIYAPSYSVTSVPKEINKLPVMVWIHGGGNTSGMTSEYNPERFVASQNIIVVTISYRLGLFGWFSHPELRNKSDGIDVSPNFGLLDQIKALEWLRDNIEGFGGDKNNITIFGESAGGQNVIALYVSPLAKGLFHRAI

SEQ ID NO: 138029 - protein, 344 aa, Unknown
  Bacterial polypetide isolated from the Sargasso Sea
RWRAPKDLPRSSEPIFAVDYKSSCVQPGGGDFNFSFTREVYSGDEDCLYLNIFVPQNQTVFEKNNFPVMFWIHGGANIYGAGSDYDFSKLATSQQVIIVTMNYRLGLFGWFTSEHLKDTSEGLDKSSNFGQLDIIKALEWVQSNIDYFGGDSSNVTIFGESAGGHNILTLLASPLGKGLFHRAISQSGYIESYSLEFAKRGSPLSSEKLFEDDIKSLINSEDIAEKLREIPAGEIYERVIKISQESDWAEIPKTTRDGIVVPFKGLYSGLRDVDPDIVIVAGTNRDELNYYFIQSEYFYDTTFDLKRSLKRSEENLKSWIKYRSEIWRFRGAEEPLREMSKNNN

SEQ ID NO: 138030 - protein, 199 aa, Unknown
  Bacterial polypetide isolated from the Sargasso Sea
MFLDHIKKFIIIILASYLASCSIPKTDLSLDQATLLEINEGKIIGSDNGKTYQWLGIQYGSIPDSSYRWKRGAETEKWDGVYEALEFGNTCVQKGSLINTTKRRNWGDIVGSEDCLYLNVWAPRDVFDDLSQSKPVMVWIHGGSNVSGNADFYDPSELVSSQDVIVVSINYRLGPFGWFRHPDITSNAESPDDQSGNYG

SEQ ID NO: 138031 - protein, 275 aa, Unknown
  Bacterial polypetide isolated from the Sargasso Sea
MSEDCLLLNVHTRADREEDALPVMVWIHGGALVTGSGSEYPGELLTSKGVVLVTINYRLGRFGFNAHELLSQENLSGVSGNQGLRDQIFALEWVRDNISKFGGDPQNVTIFGESAGSLSVSLLQASPLAKGLFHRVIGQSGGAFQPMAFRAEARNGHQSAESIGADCAAAMLGDSADETSLEALRAVPAASIIERTMQNAENPTSLCTAYDSLAIVDGEVIPEEVESIFNQGLQSDVPTMIGSNADEATTFLPMFKALSEDPSDSKAGMMMQARI

SEQ ID NO: 138032 - protein, 285 aa, Unknown
  Bacterial polypetide isolated from the Sargasso Sea
MVFLFIFGGGPDKETIRSTDSGKVVGSVEGDNYVWRGIPFAKPPVGDLRWKAPIKPDGWEGTLEALESSEACFQPDGMSMLGQGGGWSGSEDCLYLNVWSPKDANDKKLPVMMWIHGGGNRMGSASGYDPQAMVSKQDVVVVVVQYRMSTLGWFRHPSLRDKTTSEEDNSGNFGTLDTIMALRWIKENISAFGGDSSNVTIFGESAGGHNVAALYASPLAQGLFHKAIVQSGIVSTASAVQAESYYPETRISGTVSSKEMVNSLLIADNLASSADEAIKVQESMS

SEQ ID NO: 138033 - protein, 162 aa, Unknown
  Bacterial polypetide isolated from the Sargasso Sea
MFLDHIKKFIIVILASYLASCSIPKTDLSLDQATLLEIKEGKIIGSNNGKTYQWLGIQYGSIPDSSYRWKRGAEIEKWDGVYEALEFGNTCVQKGSLINTTKRRNWGDIVGSEDCLYLNVWAPSDVFDDLSQSKPVMVWIHGGSNVSGNADFYDPSGIVSSQ

SEQ ID NO: 138034 - protein, 234 aa, Unknown
  Bacterial polypetide isolated from the Sargasso Sea
MKNIRIFKSVSIGIIFWITTLEIASDNLQLSVQTSSGLVAGSKESKIILFEDIPYAEPPVNELRWEPPQPIKNPGKSIEPKESNHCYQETDSLQDIQNFGTEDCLYLDIRVPQSQNKNLPVMFWIHGGGNTSGTKDFYNFSRLVAKKEVIVVSINYRLGIFGFFTHSAIQTAGVEPSNFGILDIIEALKWVQKNIKNFGGDPDNVTIFGESAGGHNVYALLVSKQAKGLFTKQF

SEQ ID NO: 138035 - protein, 220 aa, Unknown
  Bacterial polypetide isolated from the Sargasso Sea
MKNIRIFKSLSIVIIFWITSLEIASDNLQLSVQTSSGLVTGIKESKIILFEDIPYAEPPVNELRWQPPQPIKNSGKSIKPKESNHCYQETDSLQDIQNFGTEDCLYLDIRVPQTQNKNLPIMFWIHGGGNTSGTKDFYNFSRLVAKKEVIVVSVNYRLGIFGFFTHSAIQTAGVEPSNFGILDIIEALKWVQKNIKNFGGDPENVTIFGESAGGHNVYAL

SEQ ID NO: 138036 - protein, 155 aa, Unknown
  Bacterial polypetide isolated from the Sargasso Sea
MEQPIQLDVGQITGTSTESGVQAFLGIPFASPPVGDLRWREPQPVIPWSGVKVMDRKGPDCMQSRNTNLMSEDCLYLNVWTGAQSSADKLPVLVWIHGGGWRFKATYDGDAFADNGAILVSVNYRMNAFGWMAHPALSEESENGVSGNYGVLDHL

SEQ ID NO: 138037 - protein, 287 aa, Unknown
  Bacterial polypetide isolated from the Sargasso Sea
KPGDIIGDEDCLYLNIYAPSYSVTSVPKEINKLPVMVWIHGGGNTSGMTSEYNPERFVASQNIIVVTISYRLGLFGWFSHPELRNKLDGIDVSPNFGLLDQIKALEWLRDNIEVFGGDKNNITIFGESAGGQNVIALYVSPLAKGLFHRSISQSGGITLTSIEDAEEIDRNIHPLGKDYRYRHKTTKELVNSLLNEGIINTHFHETGNIEELMNLDSHDLMRNWSKGKVWEGTTQLARIIGDDFVLPKDSILAALSDKNRHANVPIILGVNKDENKTFNLFDEELVT

SEQ ID NO: 138038 - protein, 293 aa, Unknown
  Bacterial polypetide isolated from the Sargasso Sea
LDSGVRAYLGIPYAAAPVGDLRWKAPEPPIPWRGVKVVDRHGPACIQRRDVYMSEDCLFLDIWTSSQKGKKLPVMVWIHGGGWTFGSNSQDIYDGEAFADNGVVLVSVNYRMNSFGWMAHPELSRESKEGVSGNYGVLDHIAALKWVQENIESFGGDKNNVTIFGESAGGGSIYALLATPQADGLFHKAISESTWIHPNNVTNLKKPNGFQDSAESLGKIAIEKVLGSSDENILTRMRSMSPEEVLGLEHSVALIVDGWLFEQDPIETFLAGKHNNVPIISGYNDGEGLMFVR

SEQ ID NO: 138039 - protein, 278 aa, Unknown
  Bacterial polypetide isolated from the Sargasso Sea
SDGKDTEIISLPQGDLVGFAKGETDYFLGIPYAEPPIGANRFEPPKSHKGWSDVLKAKEAEKQCMQPQGEEGELSEFFEVFLTKSGMKWWEQIILENAAWLFASLDFEKQQSEDCLFINIIKPSKIDNGSLPVMVWFHGGGYNFGNGDGLYITDRFAKRDVILVTMNYRLGPFGFFAHPLLSETSKMGVSGNYGTLDQIQALKWVQTNIHLFGGDPDNVTIFGESAGGASVETLVSTKLAKDLFHKAIAQSGYTVGRARNIREQRGDLISAESLGEKF

SEQ ID NO: 138040 - protein, 276 aa, Unknown
  Bacterial polypetide isolated from the Sargasso Sea
MAHFDDESELFIFRGVPYAEPPVGNLRWKSPVPVEIKNQIDARSYKPGCMQDTYTTDWYHDVIDSFGQDKSLFQHIDNVSEDCLYLNIWTSSVNKNEKKPVMVWVHGGADTGGWSYEPDYLGHNLAKKDVVVVSIGYRLNVFGFFKHPEMTEETGNFGLEDEILALKWIKENIADFGGDPSNVTYFGESAGGAHVSYLASSPEAKGLFKRGIIQSGGYNLFNWRSVDEAHELAIRTQSISGTIDLNDLKSLDENALLQASRNLYHPYRPIIEEKSS

SEQ ID NO: 138041 - protein, 265 aa, Unknown
  Bacterial polypetide isolated from the Sargasso Sea
MTGNGLLEGKCEAGVRVWRGVPYATPPVGALRWRAPQPPSNWQGIKQAYAYGPASWQDEEYCRELGGGDPGSFSEDCLYLNIWAPATPSVHPLPVMVWLHGGGFTIGAGGLPPYEGHGLTRRGVILVTVNYRLGHLGFFAHPALDGEDPRGPVHNFGLLDQIAALDWVRDNIAAFGGDAQQVTLFGESAGARSVMSLMTSPLARGLFHRAIIQSGYTLPDTPRPDALQNGEQVSAVLGLKHATAEQLRELPGDAFWPLAAPYSPT

SEQ ID NO: 138042 - protein, 301 aa, Unknown
  Bacterial polypetide isolated from the Sargasso Sea
ITNSGPVIGIEGEEGIHIWFGVPYAEAPVDKLRWKAPRNVNSWDKVYEAKNFGSPCVQIQSSLTGGGLAKPGDIIGDEDCLYLNIYAPSYNVTSVPKEINKLPVMVWIHGGGNTSGMTSEYNPERFVASQNIIVVTISYRLGLFGWFSHPELRNKSDGIDASANFGLLDQIKALEWLRDNIEGFGGDKNNITIFGESAGGQNVIALYVSPLAKGLFHRAISQSGGITLTSIEDAEEIDRNIHPLGKDYRYRHKTTKEFVNSLLNEGIINTHLHETGNIEELMNLDSYDLMRNWSKGKVWEG

SEQ ID NO: 138043 - protein, 235 aa, Unknown
  Bacterial polypetide isolated from the Sargasso Sea
MLVSTLYAEESYIFKTNKTEFIGSVAKEKGDKKTISFVGIPFAKPPVGDLRWKAPRELDGYPETFKATTLPNRCMQVSNFYDSMDGIEGESIIGSEDCLYLNIYLSEKAYKSKEKLPVVFWIHGGGNTWGYSASNIFTSGDFILDHDVILVTTNYRLGPFGWFAYSGLNQDSENPLDSTANFGTLDIIKSLEWVNKYISFFNGDPENITIFGESAGARNVISLMSSPLSKDLFSR

SEQ ID NO: 138044 - protein, 500 aa, Unknown
  Bacterial polypetide isolated from the Sargasso Sea
MLKAFARIVIILFAVGIYGSTNYQPTAFIKDTKLIGSLHQNNEVEMFLGIPFAVPPINDLRWEKPVAWTPENKKEITANKFRPGCIQNQRIVNWYKRLILDFGGDPGTFDIPEFSEDCLYLNLWRPRGLKNNLPVIVYIHGGSNKAGWSYEPNYLGHNIANKGFILISIPYRLGVFGFFSHPDLESPNLALYDQILALEWIQKYVSFFGGDPSNVTLVGESAGAGGISHLIASPLSKNLFHKAVHQSGGSSFTYPTSGSDVRKLANSFANSFEDPSLKNLKNISAEEILEVSEEVYAEHYFNYVDDGFSMIGNLSDTFKSRNVQDVDLLIGSNNDEWSLYFDGNVNIGLWLDEETTPEKKIKLLELLDDIKDPIRKMDLLITAKNFVCPSLFMAEELKKKGGSTWVYQFNRVRDNELANKYGAFHGAELPYVFDTHDEWLPTNETDIELTREIQSYWLSFARTGNPNNDDAVLWPEYDSSDDSTLVLDDEIYQRSHESSE

SEQ ID NO: 138045 - protein, 366 aa, Unknown
  Bacterial polypetide isolated from the Sargasso Sea
MVFQFIFGGGPDKETIRSTDSGEVIGSIEGDNYVWRGIPFAKPPVGDLRWKAPIKPDSWEGTLEALESSEACFQPDGMSMLGQGGGWSGSEDCLYLNVWSPKEANDKKLPVMMWIHGGGNRMGSASGYDPQAMVSKQDVVVVVVQYRMSTLGWFRHPSLRDGTTSAEDDSGNFGTLDTIMALRWIKENISAFGGDSSNVTIFGESAGGHNVAALYASPLAQGLFHKAIVQSGIVSTASAVQAESYYPETRISGTVSSKEMVNSLLIADDLASSADEASKVQDSMSNEELSEYLRNKSPAQILEAEVKAEPRLGGMTRAYNDGHVIRSDGIEAIFSDASATRGPIIFGTNRYETKLFNMWNPSLVRS

SEQ ID NO: 138046 - protein, 601 aa, Unknown
  Bacterial polypetide isolated from the Sargasso Sea
MKKNILTVTFLSIFAFTSCTTIDSIKPSSDIIKTSPDTVRSTNSGPVIGTEGEEGIHMWLGIPYAKPPIEKLRWKAPRNVSSWDKVYEAINFASPCVQIQSSLTGGGLAKPGDIVGNEDCLYLNIYAPAFTINSVPNENNKLPVMVWIHGGGNTSGMTSEYNPQKLVESQNVIVVTISYRLGIFGWFSHPELRNRSDGLDASANFGLLDQIKALEWLRDNIENFGGDNNNITIFGESAGGQNVIALYVSPIAKGLFHRAISQSGGITLTSIADAEDIDRAAYPLNGNYKYRHKTTKEFINNLLNKGIINTHLNETGNIEELINLKATDLMLSWTTGEVWEGTTQMARIIGDGYVLPKDSILDALKDKNRHANVPIILGVNKDENKTFNLFNEELVTNILNITFIAKDPFFYDLKSDYQSLAWRSNAVDTPADAIVEGGYPNVYAYRFDWDEQPSILGMDFSFLLGAGHGLEIPFVMGDFDFGRQTRFLFTKKNEHERNKLSKVIMQYWTNFAKEGYPSNESENITPWNKWPKGGINQNRIMILDTEQSNAPRMSNGYAPHNKLVSIFESDERSLKVDNKCYFLEDVYSWVDNWKIKNNVCQ

SEQ ID NO: 138047 - protein, 392 aa, Unknown
  Bacterial polypetide isolated from the Sargasso Sea
MFLDHIKKFIIIILAGYLASCSIPKTDLSLDQSTLLEIKEGKIIGSNNGKTYQWLGIQYGSIPDSSYRWKRAAETEKWDGVYEALEFGNTCVQKGSLINTTKRRNWGDIVGSEDCLYLNVWAPNDVFDDLSQSKPVMVWIHGGSNVSGNADFYDPSELVSSQDVIVVSINYRLGPFGWFRHPDITSTAKNPKDQSGNYGNIDSIQALEWVQRNIGFFGGDSSNITIFGESAGGYNVAALLSAKQANGLFHKAIIQSGGIRPGDIEHSESYLKKNLPWKNYSSRELINELLVMNEMASDRNSAAILQENLSQKEIEALMRNASSTEIYEAYLATKANTDDMLRPFPDGNLLSELGILGSLESGFNIDVPIMIGTNRDEMKLFLLNNPRLTREF

SEQ ID NO: 138048 - protein, 389 aa, Unknown
  Bacterial polypetide isolated from the Sargasso Sea
MKKNIFTTIFLSIFFLTSCETIDSIRPSRDIVKTSPDSLRLTNSGPVIGIEGEEGIHIWFGVPYAEAPVDKLRWKAPRNVNSWDKVYEAKNFGSPCVQIQSSLTGGGLAKPGDIIGNEDCLYLNIYAPSYNVNSVPKEINRLPVMVWIHGGGNTSGMTSEYNPERFVVSQNIIVVTISYRLGLFGWFSHPELRKKSDDIDASANFGLLDQIKALEWLRDNIEVFGGDKNNITIFGESAGGQNVIALYVSPLAKGLFHRAISQSGGISLTSIEDAEEIDRNIHPLGKDYRYRHKTTKELVNSLLNEGITNTHFHETGNIEELMNLESHDLMRNWSKGKAWEGTTQLARIIGDDLVLPKGSILAALRDRDRHANVPIILGVNKDENKTFIF

SEQ ID NO: 138049 - protein, 375 aa, Unknown
  Bacterial polypetide isolated from the Sargasso Sea
MKSIIQIILAILVLAACSSGLALKDSSSFIQVNAPAGNFLGEEEESFYVFRGVPYAEPPVGDLRWRAPRAPSVSNDVIDATKFKSECIQPGTEGLIPNRNVSVGNEDCLYLNIYIPKNQTEINKNKFPVMFWIHGGSNIWGSGDFYDFSKLATTQQVIVITVNYRLGLFGWFSSEHLRNTATGLDKSSNFGQLDLIKGLEWVQENISAFGGDKENVTIFGESAGGHNVLTLLASPLSKGLFHKAISQSGYVSSYTQKFAEEESELSSKKIFEDDIKFLVNDIEVADYLRSLSSEEIYQKFKAKAEEHIYPITPITIKDGIVVPLSGIHKSLETIDENLVVVAGTNKDEMNFWYVRSNYFYNSTGGVVLRLQRSEE

SEQ ID NO: 138050 - protein, 585 aa, Unknown
  Bacterial polypetide isolated from the Sargasso Sea
MTIDKGSIIGSNNGNTYQWLGIQYGSIPDSSYRWKRGAEAEKWDGVYEALEFGNTCVQKGSLINTTKRRNWGDIVGSEDCLYLNVWAPKDVFDDLSQSKPVMVWIHGGSNVSGNADFYDPSELVSSQDVIVVSINYRLGPFGWFRHPDITSTAQNPEDQSGNYGNIDSIQALEWVQRNIEFFGGDSSNITIFGESAGGYNVAALLSAKQANGLFHKAIIQSGGIRPGDIEHSESYLEKNLPWKNYSSRELVNELLVMNELASDRNSAATLQENLSQKEIEALMRNASTTEIYEAYLATKTNTDDMLRPFPDGNLLSELGILGSLEGGFSMDVPIMIGTNRDEMKLFLLNNPRLTREFLRIPRIRDLDLWNAVSKHRSNSWKYLAVDEPAQTLTSSGRSNIYAYRFDWDDEPRKYGVDLKNLLGAAHAFEIPFVMGNFDEDALTKYILSRKNLEEVKTLSQSMMSYWAEFAYNGDPDKGREGNLIDWQAWDPREGSEKYIIFDSTHDGGIRMTKDYLTEGKLIEMLAADNQIKDYKWKCEILDAAIMFDHLTTQNVLNDFNNNQCSDLDPSTEWRKYWYDEKEQRY

SEQ ID NO: 138051 - protein, 585 aa, Unknown
  Bacterial polypetide isolated from the Sargasso Sea
MEINEGKIIGSDNGKTYQWLGIQYGSIPDSSYRWKRGAETEKWDGVYEALEFGNTCVQKGSLINTTKRRNWGDIVGSEDCLYLNVWSPKDVFDDLSQSKPVMVWIHGGSNVSGNADFYDPSELVSSQDVIVVSINYRLGPFGWFRHPDITSNAEKPDDQSGNYGNIDSIQALEWVQRNIGFFGGDSSNITIFGESAGGYNVAALLSAKQANGLFHKAIIQSGGIRPGDIEHSESYIEKNLPWKNYSSRELVNELLVMNEMASDRNSAASLQENLSQKEIEALMRNASTTEIYEAYLVTKTNTDDMLRPFPDGNVLSELGIMGSLESGFNSNVPIMIGTNRDEMKLFLLNNPRLTREFLRIPRIRDLDLWNAVSKHRSNSWKYLAVDEPAQSLTSSGRSNIYAYRFDWDDEPRKYGVDLKNLLGAAHAFEIPFVMGNFDEDALTRYILSRKNLEEVKTLSQSMMSYWAEFAHNGDPDKGREGNLTDWQAWDPREGNEKYIIFDSTHDGGIRMTKDYLTEEKLIEMLASDNQIKDYKWKCEILDAAIMFDHLTTQNVLTEFNNNQCSDLDPSTEWRKYWYDEKEQRY

SEQ ID NO: 138052 - protein, 138 aa, Unknown
  Bacterial polypetide isolated from the Sargasso Sea
MAFDYKPSDSTNIQTPDTLFTGTILEETNNNKLYAYFGIPYAQPPVGELRWKAPRDVNEYEETRLAVERPNRCPQLAGTIDSIEEGFTVGEIIGSEDCLYLNIFVSEKAKNSETKLPVMVWIHGGSNVSGYGAECDLY

SEQ ID NO: 138053 - protein, 480 aa, Unknown
  Bacterial polypetide isolated from the Sargasso Sea
FAVDYKSSCVQPGGGDFNFSFTREVYSGDEDCLYLNIFVPQNQTVFEKNNFPVMFWIHGGANIYGAGSDYDFSKLATSQQVIIVTMNYRLGLFGWFTSEHLKDTTEGLDKSSNFGQLDIIKALEWVQSNIDYFGGDSSNVTIFGESAGGHNILTLLASPLGKGLFHRAISQSGYIESYSLEFAKRGSPLSSEKLFEEDIKSLINSEDIVQKLREIPAGEIYERVIKISQESDWAEIPKTTRDGIVVPLKGLYSGLRDVDPDIVVVAGTNRDELNYYFIQSEYFYDTTFDLKRSLKRSEENLKSWIKYRSEIWRFRGAEEPLRAMSKNNNNLYSYRFDWDEEANSNLFGNYQLFLGAPHGMDIPFVSGEFDLGPINFYIKPIIFPSESEEGRLALNDLMMKYWANIAKYGDPNAFLNGPKWEKFSKDKQQFLILDNPIDNELSMVQDPVDIDVLLSEVESDSSLEIAERCIIGWIAANERN

SEQ ID NO: 138054 - protein, 277 aa, Unknown
  Bacterial polypetide isolated from the Sargasso Sea
MTRTITGLFIIFTLAALGCAERREQETLTPIQSTILVSGGLIEGKITETGLRTFMSVPYAAPPVGELRWAPTASVIPWQGVLLAKEAGPACMQPEGLGGDFYGETGIEMDEDCLLLNVWTRAKNEEDQLPVMVWIHGGGLVIGQGSTYPGDLLTSKGVVLVTVNYRLGRFGFFAHPELTDENPNKVSGNQGLRDQIASLKWVRDNIERFGGDPDNVTIFGESAGSLSMSLLQASPLAKGLFHKVIGQSGGAFQPMTYRDQVRSYSPMHSEAIGEKFG

SEQ ID NO: 138055 - protein, 558 aa, Unknown
  Bacterial polypetide isolated from the Sargasso Sea
GIPFAKPPVGDLRWKAPRELDQLPNTFEATTLPNRCMQVSNFYDAMDGIEGGSIVGSEDCLYLNIYLSEKAYNSNEKLPVMFWIHGGGNTWGYSASNLFTSGDFIMDHDVILVTTNYRLGPFGWFAYGDINKNSDNQLDQSANFGTLDIIKSLEWVNENISDFNGDPNNITIFGESAGARNVISLMTSPLSENLFQRGISQSGYLGSDSLEYAENNDRAGSKSLLRHLITSKNASMSDEEILNIMDDQMLSIDLLKSADANEIISYYRPRPDAAGLIDVPNVIPDGIVIPSKGIYGAYRDGDMHDKPMIFGSTRDEDKLFMFMNDEFVNRPLSFLSPISEYLDLYVKPKDPKYYDIYARYMAESWKHGAVDLPSDFTSIYKKSNVYAYRFDWDEQNVYLGVDLPNLLGAAHAMELAFIFKSGGLLGESSDAINDIMYNENNRATDLDLSTKIGQYWVNFAHDGDPNNVPYDVPTEWKPWNKTNNNERFIVFDSVNDKGIAMFNNTLSANSILQGISSESIAVDQKCYIIDRMFNRTTLTDEEVDEIYRTFMSGKCTRA

SEQ ID NO: 138056 - protein, 526 aa, Unknown
  Bacterial polypetide isolated from the Sargasso Sea
MFLDHIKKFIIIILASYLASCSIPKTDLSLDQATLLEIKEGKIIGSNNGKTYQWLGIQYGSIPDSSYRWKRGAETEKWDGVYEALEFGNTCVQKGSLINTTKRRNWGDIVGSEDCLYLNVWAPRDVFDDLSQSKPVMVWIHGGSNVSGNADFYDPSELVSSQDVIVVSINYRLGPFGWFRHPDITSNAEDPDDQSGNYGNIDSIQALEWVQRNIGFFGGDSSNITIFGESAGGYNVAALLSAKQANGLFHKAIIQSGGIRPGDIEHSESYVEKNLPWKSYSSRELVNELLVMNEMASDRNSAASLQENLSQKEIEALMRNASTTEIYEAYLVTKTNTDDMLRPFPDGNVLSELGIMGSLESGFSSNVPIMIGTNRDEMKLFLLNNPRLTREFLRIPRIRDLDLWNAVSKHRSNSWKYLAVDEPAQSLTSSGRSNIYAYRFDWDDEPRKYGVDLKNLLGAAHAFEIPFVMGNFDEDALTRYILSRKNLEDVKTLSQSMMSYWAEFAHNGDPDKGREGNLTDWQAWDP

SEQ ID NO: 138057 - protein, 377 aa, Unknown
  Bacterial polypetide isolated from the Sargasso Sea
MVTMNYRLGPFGFFAHPLLSETSKMGVSGNYGTLDQIQALKWVQTNIHLFGGDPDNVTIFGESAGGASVETLVSTKLAKDLFHKAIAQSGYTVGRARNIREQKGDLISAESLGEKFFYSISGIDNPSVEDIKNLPADLFFETEKFEKENDSEQAGWFPIEDKWVFDSPTQISFTEGKTNDVIYVAGFNANEGTNLSPFVFGEKLNENDWIKQTWEMSDFSYLPLPDDVKAYGESLEYSKERSANELWGDLAFGGDGFFMVNQFASNGGEAYLYYFEKGPSSDTQTLDAAHGLELFYLFDNIVPFWPWKKIDDEIRDTMLKDWTDIAKYGKPRSDWQKFDPNNPKAMHYGQRIEFKTPEKLSLYKSLEKVYLEEGKNF

SEQ ID NO: 138058 - protein, 325 aa, Unknown
  Bacterial polypetide isolated from the Sargasso Sea
MLVSTLYAEESYTFKTNETEFIGSVAKEKGDKKTISFVGIPFAKPPVGDLRWKAPRELDSYPDTFKATTLPNRCMQVSNFYDSMDGIEGESIIGSEDCLYLNIYLSEKAYKSKKKLPVVFWIHGGGNTWGYSASNIFTSGDFILDHDVILVTTNYRLGPFGWFAYSGLNQDSENPLDSTANFGTLDIIKSLEWVNKYISFFNGDPENITIFGESAGARNVISLMSSPLSKDLFQRGISQSGYLGSDSLEYSENNERAGSLSLLKHLIKSENPNIADEELSSFMGNKFLSKEFLRSANANDIISYYRVRNDTGGLIDVPNVIPDGV

SEQ ID NO: 138059 - protein, 481 aa, Unknown
  Bacterial polypetide isolated from the Sargasso Sea
MANYDEENELLIFRGIPYAEPPVGNLRWKSPVPIELKSQIDARLFKPACMQDTYITDWYHDVIDSFDEDKSLFQHVGEVSEDCLYLNIWTSSIDRNQKKPVMVWVHGGADTGGWSYEPDYLGHNLAKKDVIVVSIGYRLNVFGFFKHPEMIDETGNFGLEDEILALKWIRDNIEDFGGDPTNITYFGESAGGAHVSYLTASPEAKGLFKRGIIQSGGYNLFNWRSVDEAHELAIRTQNISGTVDLNDLKSLDENALLQASRNLYHPYRPIIDGRVITDNLAKKYIEGNVNDVDLMIGSNKNEDLLYVDDDPTLEKFSEEIAEYYPDRVDEIIAMLDMSDLRLAMDHFGSNQETTCPSVLIARSMAKTGNHVYQYFFTREREGSEKILAYHGAEIPYVFNTHDAYLPTNEDDLKLTDQMMEYWTQFAKKGTPNSIENPITWYDFGENENYLILDTEIENGQRLESMLLHIMIEELTQRSQSE

SEQ ID NO: 138060 - protein, 606 aa, Unknown
  Bacterial polypetide isolated from the Sargasso Sea
MYAEVSYTFKVKNTEFIGSVEKEKDGKKTISFVGIPFAKPPVGDLRWKAPRELDIYPDTFEATTLPNRCMQVSNFYDEMDGIEGGSIIGSEDCLYLNIYLSEKAYNSKEKLPVVFWIHGGGNTWGYSASNIFTSGDFILDHDVILVTTNYRLGPFGWFAYSGLNQDSDNSLDNTANFGTLDIIKSLDWVNEHISHFNGDPDNITIFGESAGARNVISLMSSPLSKDLFQRGISQSGYLGSDSLEYSENNDRAGSLSLLKHLIKSKNPNVLDEELSNFMSNKMMSTDFLRSASAKDIISYYRVRNDSGGLIDVPNVIPDGVVIPMKGIYGVYRDGEMHDKPMIFGSTRDEDKLFMFANDEFVDRPLAFLRPVSEYFNLYVKPKDPKFYDVYARYMAESWKYGAVDLPSDFTSLNKESNVYAYRFDWDEQNRDLGLDQIIGINIPGINLNLDLPRLLGAGHAMELAFVFKSGGLLGESFDAINDVMYDENNRATDLDLATKMGKYWVNFAYDGNPNSLPYNVDTEWLPWDANNQNERFMVFDTVNDKGIKMFNNTLSEDSILQGIASENITVNQKCYIIDKMFNRTTLTNEEVDEIYRTFMSGKCAKA

SEQ ID NO: 138061 - protein, 565 aa, Unknown
  Bacterial polypetide isolated from the Sargasso Sea
MFERNTDRDFQVETNAGTIIGIDEGDHYSFKGIPYAKPPVGDLRWRAPRDLLRSDEPIYAIDYKSSCVQPGDGSLSLGSSGKVYSGNEDCLYLNVFVPQNETKFEKNNFPVMFWIHGGANIFGAGSQYDFSALATSQQVIIVTMNYRLGIFGWFTSNHLRDTSEGLDKSSNFGQLDIIKALEWVKSNINYFGGDSSNVTIFGESAGGHNTLALLASPLSKGLFHRAISQSGYVESFPIKFAEKDSLLSSEKLFEEDIKFLIDSEEIAEKLREVSAEEIFTRIAKIREENIWAKMPLTTRDGIVVPKKGIYSGLRNVDPDIVVVAGTNKDELNLYYIDSDYFYDTTLELGKSLKRSEENLKSWNKYRSEIWRFRGAEEPLRAMSENNNNLYSYRFDWDEQLNSNILGNYQLFVGAAHFMEIPFVSGKFDYGPINFVLKPILFPSESTEGRLALSELMMKYWANIAKYGDPNAFTDGPKWEKFTKEKQQYLTLDNPINNKLSMVEEPVDINLLLTEVESNSSLEIAERCVIGWIAANDTNELKQAHSLDQLQDPPYNFVQISKMNTF

SEQ ID NO: 138062 - protein, 297 aa, Unknown
  Bacterial polypetide isolated from the Sargasso Sea
MLFISSCSLLFERNTDRDFQVEANAGTIIGIDEGDHYSFKGIPYAQPPVGDLRWRAPKDLPRSSEPIFAVDYKSSCVQPGGGDFNFSFTREVYSGDEDCLYLNIFVPQNQTVFEKNNFPVMFWIHGGANIYGAGSDYDFSKLATSQQVIIVTMNYRLGLFGWFTSEHLKDTTEGLDKSSNFGQLDIIKALEWVQSNIDYFGGDSSNVTIFGESAGGHNILTLLASPLGKGLFHRAISQSGYIESYSLEFAKRGSPLSSEKLFEEDIKSLINSEDIVQKLREIPAGEIYERVIKISQE

SEQ ID NO: 138063 - protein, 299 aa, Unknown
  Bacterial polypetide isolated from the Sargasso Sea
REQGWRLLYWQQKLSAGLAAESMADFVRQRQRWANGTLQSLRLPQGPLQARGLSLGQRLAYLEGVVHWLNNLPRLVLLLMPLSYGLLGITPILLDQRAIVELMLPLWGTVLLSIGWLNRHSRSALLTELTSWVLTVPLVVTLISHVLGSSMGFRVTPKHRHRSQGGWAWFLALPLILLSLLNLANLFGLIQQLILQGWDELGPLQLGLVWAALNLLGTVVALRACWDPPQSDPSPWLSLDHAAELTDAGGHRHPCRITAISESGVELAFATALPPFVASSQLQWTPNVTPLPVVVLKAQ

SEQ ID NO: 138064 - protein, 289 aa, Unknown
  Bacterial polypetide isolated from the Sargasso Sea
MPPRPSANGDGSLPAAVVPWQGVRSTDTFGADCMQAVNENSPAERPRSEDCLFLNVWAPAKSGRHPVFVWIHGGGSRVGSGAQPTFDGSAFARKGIVVVTINYRLGPLGFLSTPELSARSGYDASGNYGFMDVIAALGWVRRNIGRFGGEPGRVTIGGESSGSVATSVMMASPLAKGLFVQAIGESGSSLRRAEPASMGATTLAFEEKRGTALMQDLGASDLAALRRVPAERVLASAARLANGQFYNLPVVDGHLLPDAPWRIFASGKFNDVPLLAGWNADEGSLTLLG

SEQ ID NO: 138065 - protein, 318 aa, Unknown
  Bacterial polypetide isolated from the Sargasso Sea
LMSLVKSKAERFQGLFEDHCHQFFGIPYAKYDQRWDESILIEKELDFKALEKGNSAPQTRSDDQSQPGTSFFQDNSLSKQSEDCLSLNICTHDISAKNPVMIWIHGGALVTGGSSSIMYDLKHLARRGVVAVSINYRLGPLGFLRLDDATQGQIKSSGNEGLIDQRNAIRWVKDNISSFGGDPNNITIFGESAGSWSCNLQIAASDDGLFQKAICQSGGLDAIATKEKANQWAELFIEQFKRDGHKVSDLKSCDWELITNTAKKLKHSKLSHGKIWIFPEVGFLPVIDNKFIKDDYIETYSSSSVHLIAGTTLDEYKL

SEQ ID NO: 138066 - protein, 207 aa, Unknown
  Bacterial polypetide isolated from the Sargasso Sea
MSLIECKAGRFEGLFKNECYHFYGIPYATYEHRWSESTLIEDELIFKASEKGNSAPQTRSDDQAQMGTSFFQDNSLSKQSEDCLTLNICSNDIKAKNPVMIWIHGGALVTGGSSSIMYDLQHLANRGVVVVSINYRLGPLGFLKLDEVTDGEIKSTGNEGLIDQRNAIKWVKENISSFGGDPNNITIFGESAGSWSCNLQIAAGNEG

SEQ ID NO: 138067 - protein, 276 aa, Unknown
  Bacterial polypetide isolated from the Sargasso Sea
MGTSFFQDNSLSKQSEDCLTLNICSNDIKAKNPVMIWIHGGALVTGGSSSIMYDLQHLANRGIVVVSINYRLGPLGFLKLDEVTHGEIKSTGNEGLIDQRNAIKWVKENISSFGGDPNNITIFGESAGSWSCNLQIAAGNEGLFQKAICQSGGLDAVASKDKANLWAELFIEQFEEDGHKVSDLRSCQWELIIDTAKKLKHSALSDGKRWIFPEVGFLPVVDNKFIKDDYLATYSSSNIHLIAGTTLDEYKLWSAFHPRIGKNDERYITRRLSKML

SEQ ID NO: 138068 - protein, 174 aa, Unknown
  Bacterial polypetide isolated from the Sargasso Sea
VAQYLAMNQHPNMLALITIASTPKFQMADAWPGIKPEVLSMFTEQLSLNHHKTLSRFLAIQMMGVENAKALIKQISASIDSLPTPHPSALAAGLEILQHADLRQDIGRIVVPTLRLYGRLDSLVPHSAINQIQHLQPNSQTLIFKHASHAPFLTDAKVFAEHLRGFISAMLLHS

SEQ ID NO: 138069 - protein, 315 aa, Unknown
  Bacterial polypetide isolated from the Sargasso Sea
MYDLQHLANRGVVVVSINYRLGPLGFLKLDEVTDGEIKSTGNEGLIDQRNAIKWVKENISSFGGDPNNITIFGESAGSWSCNLQIAAGNEGLFQKAICQSGGLDAVASKEKANQWAELFTDQFKKDGNKLSDLRSCDWELIINTAKKLKHSKLSDGKRWIFPEVGFLPVVDNKFIKDDYLETYSFSSIHLIAGTTLDEYKLWSTFHPRIGKNDEEYITRRLSKMFESSKLSEIISAYREYLKINELGEIYSAILTDICFGIPTHNTLQKKEGNSFGYLFSTQSEILRGKLGCFHASELPYVFGGHSKKTLFKLGP

SEQ ID NO: 138070 - protein, 246 aa, Unknown
  Bacterial polypetide isolated from the Sargasso Sea
MHTNGELVTRTKGTGVDLVFLHGWGMNSGAFTSFLPYLSDNFRVTTIDLPGFGENAGIVPSPYNADSLAQAVVNKLPERCVVVGWSLGGLVAQKLALLAPEKLTGLVTIASTPRFIAGPCWPGIAADLLSMFEAQLEKNYQKTLERFLAIQAMGSETAKQDIKAIREQVTQFPAPAEEALKKGLRMLSTEDMRQDVGRITVPTLRLYGRLDSLVPTSGIDRICELHPQADTVVLPHASHAPFISHP

SEQ ID NO: 138071 - protein, 357 aa, Unknown
  Bacterial polypetide isolated from the Sargasso Sea
MNEKKIILGIETSCDETAVSMIEEDKNGKIKILSNVVSSQFDIHKEFGGVVPELAARSHVEKIDLIAKKAISESGVNLNDVSAIASTSGPGLIVCLTVGLNFGKALSASLNVPFIGVNHLEGHALSPKLSTSLDFPYLLLLISGGHTQYLSVNGLGKYKRLGTTIDDALGEAFDKTAKLLGIEFPGGPKLEGYAKQGDANKFKLPKPIINKGGCNLSFAGLKTAILRISSTLKSKQEKYDLAASFQKTIEEILEVKTQIAFDEFKKTCKKKNKTFVIAGGVAANKGIRKKLIKVCNKNDFKPIFPEPKLCGDNAAMIALVGLEKYKIKKFDNLGLPASPRLPLDEKAKFLKGAGVRL

SEQ ID NO: 138072 - protein, 497 aa, Unknown
  Bacterial polypetide isolated from the Sargasso Sea
MSIVECEAGQFQGVLKDNCHQFFGIPFAKYKQRWDESLLIEKELNLKVTEIGNSAPQTRSDDQSQLGTSFFQDNSLAKQSEDCLTLNICSNDIKARNPVMIWIHGGALVTGGSSSIMYDLQHLAKRGVVVVSINYRLGPLGFLKLDEVTAGEINSTGNEGLIDQRNAIKWVKQNISSFGGDPKNITIFGESAGSWSCNLQIAAGNNNLFQKAICQSGGLDAIATEEKANLWAELFIEQFENDGHKISDLRSCDWELIINTAKKLKHSALSDGKKWIFPEVGFLPVIDNKFIMDDYLETYSSSSTHLIAGTTLDEYKLWSAFHPKIGKNDEGYITRRLSKMFESSKLPELISAYSEYLKNSELGDIYSAILTDICFGIPVHNTLQKKEGNSFGYLFSTQSEILKGKLGCFHASELPYVFGVHSKKPYSSWGPIESQEISDNFQIPWTNFSKTSDPSFGDFSWNNYNNSFELALIGNKVRALRNPFLERYELIEKYKIF

SEQ ID NO: 138073 - protein, 421 aa, Unknown
  Bacterial polypetide isolated from the Sargasso Sea
SKQSEDCLTLNICSNDIKAKNPVMIWIHGGALVTGGSSSIMYDLQHLANRGVVVVSINYRLGPLGFLKLDEVTDGEIKSTGNEGLIDQRNAIKWVKENISSFGGDPDNITIFGESAGSWSCNLQIAAGNEGLFQKAICQSGGLDAVASKEKANQWAELFIEQFEEDGHKVSDLRSCEWELIIDTAKKLQHSKLSDGKRWIFPEVGFLPVVDNKFIKDDYLETYSSSSIHLIAGTTLDEYKLWSTFHPRIGKNDEEYITRRLSKMFESSKLSEIISAYREYLKINELGEIYSAILTDICFGIPTHNTLQKKEGNSFGYLFSTQSEILRGKLGCFHASELPYVFGVHSKKPYSSWGPKESQKISDNFQIPWTNFSKTNDPSFGDFSWSNYNDSFELALIGNKVRALRNPFLERYELIEKYKIF

SEQ ID NO: 138074 - protein, 412 aa, Unknown
  Bacterial polypetide isolated from the Sargasso Sea
MSLVECKAGQFEGVLQDDCHQFFGIPYAKYEQRWDESFLIEKELNLKAIEIGNSAPQTRSDDQSQSGTSFFQDNSLAKQSEDCLTLNICSNNIKAKNPVMIWIHGGALVTGGSSSIMYDLKYLARRGVVVVSINYRLGPLGFLKLDEATDGKINSSGNEGLIDQRNAIKWVKDNISSFGGDPKNITIFGESAGSWSCNLQIAAGDDGLFQKAICQSGGLDAIATEDKANSWAKLFIEQFEKAGNKISDLRSCKWELIINSAKKLKHSSLSDGKRWIFPEVGFLPVIDNKFIKDDYLETYSSSDIHLIAGTTLDEYKLWSTFHPRIGSNDEGYISRRLSKMFESSKLSELISAYSDYLKINELGNIYSAILTDICFGIPTHNILQKKCGNSFGYLFTTQSEILRGKLGCFHAS

SEQ ID NO: 138075 - protein, 237 aa, Unknown
  Bacterial polypetide isolated from the Sargasso Sea
MRNIKSFKLIIVIFCGTVVGVPEEITNPPTYDYYQDKGDSFNYIGTKTYKGDFIQTTSGKVLSQRAEGILYWEDIPFALPPLGNLRWKAPVAFVAEDFHINPKENNFCHQEIGGQIQEINQAGSEDCLYLDIRAPHGSRDNLPVMFWIHGGGNTSGHKDFYNFSELVKRKDVIVVSPNYRLGPLGFFTHPAIQDYHSGIDKTSNFGILDLVLALKWVNENIASFGGDPNNITIFGES

SEQ ID NO: 138076 - protein, 237 aa, Unknown
  Bacterial polypetide isolated from the Sargasso Sea
MHGWGLNHQVWSQLVLALPAELTIHTPDLPGFGLSPCPVSYDIDSVLAQLAEQIPDQSTVVGWSLGGLLAIALASRYPDKVKKLGLIASSPCFMAKDNWPGMESRVMQQFAGQLQRDLALTVERFLAIQAMGSSTARQDIKPLKQAVLSLALPSATALQGGLELLATLDLRQEFAALTQPVFSILGRLDSLVPVAIAPLLQNLLPDLQIGILPKASHAPFISHQQEFISLLQPHLSA

SEQ ID NO: 138077 - protein, 266 aa, Unknown
  Bacterial polypetide isolated from the Sargasso Sea
MHTNGELVTRTQGTGVDVVFLHGWGMNSGAFTSFIPYLSDNFRVTTIDLPGFGENAEFVPSPYNVETLAQSIVNQLPDQCVLVGWSLGGLVAQKLALLAPEKLTGLVTIASTPRFIAGPCWPGIAADLLSMFETQLEKNYQKTLERFLAIQAMGSETAKQDIKAIREQVTQFPDPAEEALKKGLRILSTEDMRQDVGRITTPTLRLYGRLDSLVPTSGIDRICELHPQADTVVLPHASHAPFISHPQQTADILFRFAAGVYQQKAS

SEQ ID NO: 138078 - protein, 253 aa, Unknown
  Bacterial polypetide isolated from the Sargasso Sea
MHIETIGQGPDLVMIHGWGVNCAVFTPLHEQLSEYRVHYVDLPGFGLSQPIAGDLSAWVDALISSLPANAIWAGWSLGGLVATQAAIRYPLQIKGLVTIASSPCFMAREEEAWPGIPPQVLSMFGEQLGQNLPKTIERFLAIQAMGSETAKDDIKQLRDLVLARPLPDAAALTQGLDMLNQIDLRPQLSAIQQPWLRIWGRLDGLVPKRVQPQMPTASHITDVMLAKASHAPFVSHRKEFLQAITPWLAQFKD

SEQ ID NO: 138079 - protein, 253 aa, Unknown
  Bacterial polypetide isolated from the Sargasso Sea
MHIDIRGQGPDLVILHGWGVNSAVFTPLHEQLSEYRVHYVDLPGFGLSQPIAGNLSTWVDALIHALPANAIWAGWSLGGLVATQAAISYPSHVKGLMTIASSPCFMAREEEAWPGIPPQVLSMFGEQLGQNLPKTIERFLAIQAMGSETAKDDIKQLRDLVLARPLPDAAALTQGLDMLNQIDLRPQLSAIQQPWLRIWGRLDGLVPKRVQPKMPTASHITDVMLAKASHAPFVSHREEFVQAITPWLAQFKD

SEQ ID NO: 138080 - protein, 252 aa, Unknown
  Bacterial polypetide isolated from the Sargasso Sea
MRNIKPFKLFIVLFCGSVLGIPEEITNPPTYDYYQDKGDSFNYIGAKTFKGDFIQTSSGKVLSQRTEGILYWEDIPFALPPLGNLRWKAPVAFVAKDFHINPKENNFCHQEVGGQIQEINQAGTEDCLYLDIRAPHGDRDNLPVMFWIHGGGNTSGHKDFYNFSELVKKKDVIVVSPNYRLGPLGFFTHPAIQDYHSGIDKTSNFGILDLVLALKWVNENIASFGGDPNNITIFGESAGGHNVLSLLVLSKL

SEQ ID NO: 138081 - protein, 265 aa, Unknown
  Bacterial polypetide isolated from the Sargasso Sea
MNYDYLRENGDDFFSQGVVTYKGDFIQTSSGKVITQRKEGILYWEDIPFALPPVGNLRWKAPIAFVSEDFNINPKKNNFCHQEIGGQIQAINQTGSEDCLYLDIRGPHGRRDNLPVMFWIHGGGNTSGHKDFYNFSELVKRKDIIVVSPNYRLGPLGFFTHPAIQDFNSGTDQTSNFGILDIVLALKWVNENIASFGGDPNNITIFGESAGGHNVLSLLVAQQAKGLFHKAISQSGYTKSSSLQNAYRSENFNQEGISDSWTVLN

SEQ ID NO: 138082 - protein, 210 aa, Unknown
  Bacterial polypetide isolated from the Sargasso Sea
MGTKTYKGDFIQTSSGKVLSQRTEGILYWEDIPFALPPLGNLRWKAPVAFVAEDFHINPRENNFCHQEIGGQIQAINQTGSEDCLYLDIRAPHGNRDNLPVMFWIHGGGNTSGHKDFYNFSELVKRKDVIVVSSNYRLGPLGFFTHPAIQDFHSDLNKTSNFGILDIVLALKWVNENIASFGGDPKNITIFGESAGGHNVLSLLVQSKQK

SEQ ID NO: 138083 - protein, 189 aa, Unknown
  Bacterial polypetide isolated from the Sargasso Sea
FLHLDTVTNGAIPATGNEGFLDQVAALEWVRDNIAGFGGDPDNVTIFGESAGGWSVTALMAMPKAKGLFHKAIAQSGVSNAALTLDHAADLGREFLNEVANDPTDAEALRAIPADKVLSAGSSFVRSIAALLTGQGEANRYHRAVIDGKVLPGSVLDLIGDGSSSEVLLMAGTTRDEMAAAVAPGASSE

SEQ ID NO: 138084 - protein, 296 aa, Unknown
  Bacterial polypetide isolated from the Sargasso Sea
PKQNNFCHQEIGGQIQEINQSGSEDCLYLDIRAPHGNRDNLPVMFWIHGGGNTSGHKDFYNFSELVKRKDVIVVSPNYRLGPLGFFTHPAIQDFHSDIDKTSNFGILDIVLALKWVNENIASFGGDPNNITIFGESAGGHNVLSLLVSKQAKGLFHKAISQSGYTKSSSLQNAYKSKNFNEEGISDSWTVLNKIIVDKQLANDLNEANTFQLNSDKETLRTILYETNAQELVNLYGDTFETPLLTNDGLVIPEIGLKESLRSKEYLNKVPTIAGSNKDEIKLWLGFSKVFHRNQSE

SEQ ID NO: 138085 - protein, 76 aa, Unknown
  Bacterial polypetide isolated from the Sargasso Sea
VVLPGFGNRPLAGGIEYSLPWLAEQVETFLPEQCHLLGWSLGGLVASQLALSLPERLHSLITVASSPCFMARGDWP

SEQ ID NO: 138086 - protein, 186 aa, Unknown
  Bacterial polypetide isolated from the Sargasso Sea
MNETIKSDSPIANTKYGEVAGRFRNGVELFAGVPYASPPIGDLRFAAPAPLESWEGVRDAKRFSPASPQLPGEGLTDRFPVLWDEDCLYLNVVTPASDEKKRPVYVWIHGGAYRRGQGGVAWYDGTSFASRGDVVVVTINYRLGAFGFTELGKHFGEKFASSGLNGFLDQIAALQWVKENIASFGG

SEQ ID NO: 138087 - protein, 579 aa, Unknown
  Bacterial polypetide isolated from the Sargasso Sea
MGTKTYKGDFIQTTSGKVLSQRTEGILYWEDIPFALPPLGNLRWKAPVAFVSEDFHINPKENNFCHQELGGQIQEINKAGSEDCLYLDIRAPHGKRDNLPVMFWIHGGGNTSGHKDFYNFSELVKRKNVIVVSTNYRLGPLGFFTHPAIQDFHSGTDKTSNFGILDIVLALKWVNENIASFGGDPNNITIFGESAGGHNVLSLLVAQQAKGLFHKAISQSGYTKSSSLQNAYKSENFNEEGISDSWTVLNKIIVDKKLASDLSEANTFQLKSNKEVLRKILYETNAQELVNLYGDTFETPLLTNDGLVIPEIGLKESLRSEEYLNKVPTIAGSNKDEIKLWLGFSKYFIETNQSFLSKGIGIPRVEIKDEEKYQFYNGIRSKGWQLRGVQEPLENMFVAGNEDLYAYRYDWDNLRDFFVGDFGKIIGSAHALEIPMISGDFSLAEEFAWIIYPRSPSRRFVSKNMMSFWTDFAKNGVPGKSSNDIIWNKYNPETDKSILHIDEKKNLRIDNLDLSMQELVNEILSSQIIDNEEKCILLYETTNYIGDNSFDDFVKDVDFNCSRDEALRISKKNSETIDF

SEQ ID NO: 138088 - protein, 486 aa, Unknown
  Bacterial polypetide isolated from the Sargasso Sea
MKSALRKTRLGMVRGSEREGVERYLGLPYAAPPIGHLRWREPQPAEPWRGTFDASQFPNRCLQASAPDVLHDRATPGEMSEDCLYLNIYTPAGEGAGRPVMFWIHGGAFILGSANSYDGTMLARDHDVVVVALNYRLGIFGFQNIAGLAEVYQGSGNRGLQDQVAALRWVHDNIADYGGDTNNVTIFGESAGGTSVLTMHAIPSARGLFHRSICFSGTDVNVGPIDGIAPLHEHFELEGDDLLAAALAASPNELLEIQQKIGGPASPQVDGVVVTETATQALLACGAVGPPLIAGCNKDEGTMFSSYNEEAGIDAAMVESMLPMFSARVNADHPADYETWVKTALSDVAVGKQMERWWYDVFRAAALRNAAAAHRAGAGGWVFNFNVPTDNPLGVAHGSEIVFTFNTFADDRATGLFTHDKSVTNEELARLWSSMMVQFARSGNPNGPDLPEWPQYGDDAACLIFDDAPHVVHDPDGAEVRAAYGV

SEQ ID NO: 138089 - protein, 448 aa, Unknown
  Bacterial polypetide isolated from the Sargasso Sea
MKDFNINPKENNFCHQEIVGQIQEISEAGSEDCLYLDIRAPHGNRDNLPVMFWIHGGGNTSGHKDFYNFSELVKRKDVIVVSPNYRLGPLGFFTHPAIQDFHSGIDKTSNFGILDIVLALKWVNENIASFGGDPNNITIFGESAGGHNVLSLLVARQAKGLFHKAISQSGYTKSSSLQNAYKSENFNEEGISDSWTVLNKIILDKQLASDLSEANSFQLNSNKEALREILYETNAQELVNLYGDTFETPLLTNDGLVIPEIGLKESLRSKEYLNKVPTIAGSNKDEIKLWLGFSKYFIETNQSFLSKGIGIPRVEIKDEEKYQFYNGIRSKGWQLRGVQEPLENMFVAGNEDLYAYRYDWDNLRDFFVGDFGKIIGSAHALEIPMISGDFSLAEEFAWIIYPRSPSRRFVSKNMMNFWSEFAKNGVPGKSSNDIIWEKYNPKTDKSIL

SEQ ID NO: 138090 - protein, 248 aa, Unknown
  Bacterial polypetide isolated from the Sargasso Sea
MSDKPTLVLLHGWGMNQGVWRSVTSQFEHKVSLLTPDLPGFGLSQQYPIPYQLNAVIELLAEQIPDDSYLCGWSLGGLLAISLAKRFPHKVKQLGLVAASPCFVADAHWPGMAEHVLQQFAQALSNNLTQTIERFLAIQAMGSSNAREDIKALRQAIMAYPAAQPEAVVGALQLLKLDLRAEFAALTQPISGIFGRLDALVLADVVDALQLLNRNAQLSVIEHASHAPFISHPEAFNHWLSDWVGVKL

SEQ ID NO: 138091 - protein, 246 aa, Unknown
  Bacterial polypetide isolated from the Sargasso Sea
MQKELVLLHGWGMNQGVWQLIQPELENLYTGQVRSLDLPGFGNSATTLPTPYNLHDAAMQLSQQLKPHSILMGWSLGGLFALYIAKHWPEKVSKVILVASTPYFAEQSEWPGISEKVLTQFKDQLVNHREKTIERFLAIQAMGSESARDDIKQLKQLLNQYSAPNSEALTAGLDILQNDDLRDLFATCPVKIMGVFGRLDALVPYKAIAKMSVLNAEFEYQVIDKASHAPFISHKNEFLSIVKSML

SEQ ID NO: 138092 - protein, 186 aa, Unknown
  Bacterial polypetide isolated from the Sargasso Sea
MLLFVGLGNPTPDSENNRHNVGFKIIDAINKKFSLSKQKPKFKGLLTTGNIGNVKVYAIKPLTFMNNSGICIRELIEYFKIDAQDVIVFHDDLDVEFGKIKAKFGGSSAGHNGIASIDKFIGKDYSRVRIGIGKPKGNIEVADYVLQNFDEDESLGIEKISNHINDSISFLVEKKLDLFSSTVNNK

SEQ ID NO: 138093 - protein, 49 aa, Unknown
  Bacterial polypetide isolated from the Sargasso Sea
MLLLVGLGNPGSNYTNTRHNIGFKIIDAINNHFKLSKQKPKFKGLLTTR

SEQ ID NO: 138094 - protein, 60 aa, Unknown
  Bacterial polypetide isolated from the Sargasso Sea
MLLFVGLGNPTPDSENNRHNIGFKIIDAINKKFSLSKQKPKFKGLLTTGNINSKKVYAIK

SEQ ID NO: 138095 - protein, 150 aa, Unknown
  Bacterial polypetide isolated from the Sargasso Sea
MILLVGLGNPTPDSNDNRHNVGFKIIDAINQKFSLSKQKPKFKGLLTTGNISNKKVYAIKPLTFMNNSGICIRELIEYFKIDAEDVIVFHDDLDVDFKKIKAKFGGSSAGHNGIESIDKFIGKEYSRVRVGIGKPENKIEVSDFVLTNFS

SEQ ID NO: 138096 - protein, 64 aa, Unknown
  Bacterial polypetide isolated from the Sargasso Sea
MILFVGLGNPTPDSQNNRHNIGFKIIDAINQNLGLSKQKPKFKGLLTTGNIGERKGLRYKTSYV

SEQ ID NO: 138097 - protein, 186 aa, Unknown
  Bacterial polypetide isolated from the Sargasso Sea
MLLLVGLGNPTPNSQDNRHNVGFKVVDAINQKFGLSKQKPKFKGLLTTGNIGEKKIYAIKPLTFMNNSGICIRELLEYFKIDAEDVIVFHDDLDIEFGKIKAKFGGSDAGHNGIASIDKFIGKEYSRVRIGIGKPDNSISTSDYVLNDFNEDEKEYLKTITDNIIESISILIDKKLDLFSSTVNNN

SEQ ID NO: 138098 - protein, 92 aa, Unknown
  Bacterial polypetide isolated from the Sargasso Sea
MKEIFLIGLGNPGKKYSKSRHNIGFLLLEQLSKKYNSNFLLKDKLKSSCSEFQINDSTFRLFLPNTFMNNSGDAVRAIVDWYKINLDQIFII

SEQ ID NO: 138099 - protein, 43 aa, Unknown
  Bacterial polypetide isolated from the Sargasso Sea
MENFLVVGLGNPGSRYANTRHNAGTDFVHMLCEKYDVELTEKK

SEQ ID NO: 138100 - protein, 186 aa, Unknown
  Bacterial polypetide isolated from the Sargasso Sea
MLLLVGLGNPNPNNSNNRHNVGFLVIDAINEKFKLSKQKPKFKGLLTTGKINEQKVFAIKPLTFMNSSGVCIKELIDYFKISVKDVFVFHDDMDIDIGKVKVKFGGSNAGHNGIDSIDKNIGKNYSRIRIGIGRPTKNSTGADHVLDNFSSDEKGNVEEVTKNIIESLSILINKDLDLFSSKINQK

SEQ ID NO: 138101 - protein, 184 aa, Unknown
  Bacterial polypetide isolated from the Sargasso Sea
MIALIGLGNPGTKHKNNRHNVGYLFIDQLLEDYNDAMIEKKFDGELASFLIGKKKIYTFKSNNYMNECGKSIATFLNFFKIKSNFTYVIHDDLDITLGKIKIKLGGSSAGHNGLKSIDSKIGKNYNRIRIGINHPGNKEMVNKHVLSNFRKSELEVINELNIKMSENIKILFDGEKSKFINNLK

SEQ ID NO: 138102 - protein, 186 aa, Unknown
  Bacterial polypetide isolated from the Sargasso Sea
MLLFVGLGNPTPDSENNRHNVGFKIIDSINKKFGLSKQKPKFKGLLTTGNIGNEKIYAIKPLTFMNNSGICIREVIEYFKINVEDVIVFHDDLDVEFGKIKTKFSGSSAGHNGIASIDKFIGKDYSRVRVGIGKPKNNIEVADYVLQNFDEDEIVGIEKISKNITNSISILIEKKLDLFSSTINNQ

SEQ ID NO: 138103 - protein, 186 aa, Unknown; identical to SEQ ID NO: 138092
  Bacterial polypetide isolated from the Sargasso Sea

SEQ ID NO: 138104 - protein, 186 aa, Unknown
  Bacterial polypetide isolated from the Sargasso Sea
MLLVGLGNPNPNNTNNRHNVGFLVIDAINEKYKLSKQKPKFKGLLTTGKIDEQKVFAIKPLTFMNSSGVCIKELTEYFKIETKNVFVFHDDMDIGIGKIRVKFGGSNAGHNGIESIDKNIGKNYSRIRIGIGRPKKNSSGADHVLDNFSIDEKQSVEEVTGSIINALSILIKKDLELFSSKVNQKS

SEQ ID NO: 138105 - protein, 91 aa, Unknown
  Bacterial polypetide isolated from the Sargasso Sea
MLLFVGLGNPTPDSENNRHNVGFKIIDSINKKFSLSKQKPKFKGLLTTGNIGSQKVYAIKPLTFMNNSGICIRELIEYFKIDAEDVIVFHD

SEQ ID NO: 138106 - protein, 80 aa, Unknown
  Bacterial polypetide isolated from the Sargasso Sea
HGGHNGLRDITNKIGSANFLRLRIGIGHPGSKDEVTNWVLNKFTPNEKRHLAQSYSRFVDVFELITYNNIKEAQKLLHTK

SEQ ID NO: 138107 - protein, 126 aa, Unknown
  Bacterial polypetide isolated from the Sargasso Sea
MLLFVGLGNPTPDSENNRHNVGFKIIDAINKKFSLSKQKPKFKGLLTTGNIGNVKVYAIKPLTFMNNSGICIRELIEYFKIDAQDVIVFHDDLDVEFGKIKAKFGGSSAGHNGIASIDKFIGKRLF

SEQ ID NO: 138108 - protein, 121 aa, Unknown
  Bacterial polypetide isolated from the Sargasso Sea
MNECGGSIAKLINFYKLSLDSVYVFHDDLDISLGKVKIKNGGSPAGHNGLKSIDSCIGKNYNRVRVGIDHPGSRELVNRHVLGNFKKKELEIVDQLKISISSHLKLLISENKSQFLNNIKL

SEQ ID NO: 138109 - protein, 75 aa, Unknown
  Bacterial polypetide isolated from the Sargasso Sea
MILLVGLGNPTPDSNDNRHNVGFKIIDAINHKFGLSKQKPKFKGLLTTGNIANKKVYAIKPLTFMNNSGICIREL

SEQ ID NO: 138110 - protein, 140 aa, Unknown
  Bacterial polypetide isolated from the Sargasso Sea
MTIVGLGNPGEQYSNTKHNAGYWVLDKLANELNLNFKLGKGEYVHSKNANIRLVKPLGFMNNSGIGLKSYMDYFNIDIDDILVVYDDADLPLGKIRFKTHGTSGGQKGIDSIIYQLKNDQFLRLKVGVSTDSKQKSLASY

SEQ ID NO: 138111 - protein, 141 aa, Unknown
  Bacterial polypetide isolated from the Sargasso Sea
MEKLAVIGLGNPGPEYEKSRHNLGFWLLDALAEREDLRFKTNTRFHAQVAQMERKSNKYLLIKPMNFMNDSGRFLSSLLSYFGCASGRSVVVHDEMAFPLAHLKISQNKGDGGHNGVKSVVSAIGSSLVRFRIGIGTKPDP

SEQ ID NO: 138112 - protein, 133 aa, Unknown
  Bacterial polypetide isolated from the Sargasso Sea
MILVGLGNPGTKYSSTKHNFGYWVIDSMIEKSSLKLKAGKGDYLYAKHGESLFIKPTSYMNNSGLAIKQVLDYYKASIEDLIVIYDDIDLPLGTIRFKNKGGPAGHRGIENIIYQLQSESFLRLRLGIAMKDC

SEQ ID NO: 138113 - protein, 186 aa, Unknown
  Bacterial polypetide isolated from the Sargasso Sea
MLLFVGLGNPTPDSENNRHNVGFKIIDAINKKFSLSKQKPKFKGLLTTGNIDGMKIYAIKPLTFMNNSGICIRELLEYFKFNAEDVIVFHDDLDVEFGKIKAKFGGSSAGHNGIASIDKFIGKDYSRVRVGIGKPKTSMEISDYVLQNFDEDELMRIDKISENITESIGDLIKKKLDSFSSTVNNK

SEQ ID NO: 138114 - protein, 154 aa, Unknown
  Bacterial polypetide isolated from the Sargasso Sea
MQNNYPVQKVFILGIGNPEEKYNNTRHNIGKDWVEKIAKDHELTFVKKSKLKCSICEVEPHVYLVVPDVYVNESGKVASLLKRYLNAKPEHILVFHDDIDIQIGDAKFKSGGGDGGHNGLKDLSNVIGKDFKRLKIGVGHPGKKNEVTNWVLGK

SEQ ID NO: 138115 - protein, 177 aa, Unknown
  Bacterial polypetide isolated from the Sargasso Sea
YTNTRHNIGFKIIDAVNTHFKLSKQKPKFKGLLTTGNIESKKIYAIKPLTFMNNSGTAIKELIDYFKIDAKDVFVFHDDMDIDFGKIKAKFGGSSAGHNGIQSIDKFIGKDYSRVRIGIGHPKQKKKVNNHVLEDFKEDEEERIKEITDNIVKLLPTLIEKKIDLFSSKVNQNLNGI

SEQ ID NO: 138116 - protein, 107 aa, Unknown
  Bacterial polypetide isolated from the Sargasso Sea
EKIQINNLIVVVDDLNINFGKSRLKASGSDGGHNGLKDIVNSLNTSNFTRLRFGIGNNFKKKDQVDFVLSKWNNEESNNLRHLIDKNVEIIFSSIKQGLDFTMNKYN

SEQ ID NO: 138117 - protein, 145 aa, Unknown
  Bacterial polypetide isolated from the Sargasso Sea
MLLLVGLGNPNPNNKDNRHNVGFFVIDAINQKFKLSKQKPKFKGLLTTGTIEQQKVYAIKPLTFMNSSGVCIKELTEYFKIDANNVFVFHDDMDIDVGKVKVKFGGSSAGHNGIESIDKNIGKNYSRIRIGVGRPNNNSNAADHV

SEQ ID NO: 138118 - protein, 86 aa, Unknown
  Bacterial polypetide isolated from the Sargasso Sea
MLLLVGLGNPTPNSQNNRHNVGFKIVDSINQKFGLSKQKPKFKGLLTTGNIGEKKIYAIKPLTFMNNSGICIREILEYFKIEAENV

SEQ ID NO: 138119 - protein, 158 aa, Unknown
  Bacterial polypetide isolated from the Sargasso Sea
FKLSKQKPKFKGLLTTGNIESKKVYAIKPLTFMNNSGTAIKELIDYFKIDAKNVIVFHDDLDIDFGKVKAKVGGTSAGHNGIKSIDKFIGTDYSRVRVGIGHPKEKKRVNSHVLEDFKDDEEERIKEITENIVKLVPTLIDKKIDLFSSKVNQNLNGI

SEQ ID NO: 138120 - protein, 186 aa, Unknown
  Bacterial polypetide isolated from the Sargasso Sea
MLLLVGLGNPTPNSQNNRHNVGFKILDAINLKFGLSKQKPKFKGLLTTGNIGEKKIYAIKPLTFMNNSGICIRELLEYFKIDAENVIVFHDDLDVEFGKIKAKFGGSSAGHNGIASIDKFIGKEYSRVRIGIGKPDNKISTSDFVLNDFNDDEKEHLETITKNIIDSISILIDKKLDLFSSTVNNN

SEQ ID NO: 138121 - protein, 186 aa, Unknown
  Bacterial polypetide isolated from the Sargasso Sea
MKLLAGLGNPGREYECTPHNVGFQVLDLLTEHLGISTFQSKFQSEICSLTISGESCFFIKPQTYMNKSGVAIAEIVNFYKIPLDKIVIISDDVDLMPGKVRFRNEGGHGGHNGLRSIIESLGGRNFHRIRFGVGRPVKKENLVGHVLGRWSDAEKKLTINAFNLVLKEIVNFLETSQFKNVSFSVT

SEQ ID NO: 138122 - protein, 176 aa, Unknown
  Bacterial polypetide isolated from the Sargasso Sea
IQPPDSQNNRHNIGFKIIDAINQKFCLSKQKPKFKGLLTMGNIGEEKVYAIKPLTFMNNSGTCVRELIEYFKIDSSDIIVFHDDLDIEFGKIKTKFGGSDAGHNGIASLDKFIGKDYSRVRIGIGKSDKIKVNDFVLSDFNEEEQIKLNEISKKIISSLSILIEKKLDLFSSNVNN

SEQ ID NO: 138123 - protein, 147 aa, Unknown
  Bacterial polypetide isolated from the Sargasso Sea
MLLFVGLGNPTPNSENNRHNVGFKVIDSINKQFGLSKQKPKFKGLLTTGNISNKKIYAIKPLTFMNNSGICIRELLEYFKIEPENVVVFHDDLDIEFGKIKAKKGGSDAGHNGIASIDKFIGKEYSRVRIGIGNQRQNIISDYVLTD

SEQ ID NO: 138124 - protein, 152 aa, Unknown
  Bacterial polypetide isolated from the Sargasso Sea
MLLFVGLGNPTPDSENNRHNVGFKIIDSINKKFRLSKQKPKFKGLLTTGNVADQKIYAIKPLTFMNNSGICIRELIEYFKIDAEDVIVFHDDLDIEFGKIKAKFGGSSAGHNGIASIDKFIGKDYSRVRIGIGKPKNNIEAADFVLQNFDER

SEQ ID NO: 138125 - protein, 154 aa, Unknown
  Bacterial polypetide isolated from the Sargasso Sea
TNKFRGLLCECLLNNQKFLLLKPNTFMNNSGLAVTEIVKFYKINLSDLIVFQDDLDISFGKIKIKKDGGHAGHNGIRSIHLGLGPSYVRVRIGIGRPSSKTMVSSYVLSDFSDHEHPKLDLIFHAFQTNLEHLLHGDLESFSTLFNNSIKLLEK

SEQ ID NO: 138126 - protein, 100 aa, Unknown
  Bacterial polypetide isolated from the Sargasso Sea
LTYVIHDDLDITLGKIKIKLGGSSAGHNGLKSIDSKIGKNYNRIRIGINHPGNKDMVNKHVLSNFKKSELEVINELNIKMSENIKVLLDGEKSKFINNLK

SEQ ID NO: 138127 - protein, 173 aa, Unknown
  Bacterial polypetide isolated from the Sargasso Sea
MILFVGLGNPTPDSENNRHNVGFKIIDCINKKFNLSKQKPKFKGLLTTGNIASKKVYAIKPLTFMNNSGICIRELIEYFKIDAQDVIVFHDDLDVEFGKIKTKFGGSSAGHNGVASIDKFIGKDYSRVRIGIGKPKDSMEVADYVLQNFNDDETIGIDKITENITESISILVD

SEQ ID NO: 138128 - protein, 185 aa, Unknown
  Bacterial polypetide isolated from the Sargasso Sea
MLLVGLGNPNPNNSNNRHNVGFLIIDAINQKFKLSKQKPKFKGLLTTGKINEQKVYAIKPLTFMNSSGVCIKELIEYFKIDVKNVFVFHDDMDIDLGKIKTKFGGSSAGHNGIESIDKNIGKFYSRIRIGIGRPKDNSTGADHVLDNFSKDEKKSIEDVTNNILESMPVLINKDLDLFSSKINQK

SEQ ID NO: 138129 - protein, 186 aa, Unknown
  Bacterial polypetide isolated from the Sargasso Sea
MLLFVGLGNPNPNNKNNRHNVGFHVIDAINQKFKLSKQKPKFKGLLTTGTIEEQKVYAIKPLTFMNSSGVCIKELAEYFKIEVKNIFVFHDDMDIDVGKVKVKFGGSSAGHNGIESIDKNIGKNYSRIRIGVGRPKNNSTGAEHVLDNFSTEEQQSMEDVTKNIIESLSSLIKKDLDLFSSKINQN

SEQ ID NO: 138130 - protein, 80 aa, Unknown
  Bacterial polypetide isolated from the Sargasso Sea
MLLFVGLGNPTPDSENNRHNVGFKIIDTINKEFNLSKQKPKFKGLLTTGNINNQKVYAIKPLTFMNNSGICIRELIEYFK

SEQ ID NO: 138131 - protein, 67 aa, Unknown
  Bacterial polypetide isolated from the Sargasso Sea
MFLICGLGNPGKEYNNTRHNIGFNLVDKLESFYNFDPFKKDTKKEIYKGIIANNTCLLMKPLNFMNL

SEQ ID NO: 138132 - protein, 174 aa, Unknown
  Bacterial polypetide isolated from the Sargasso Sea
NNLNNRHNVGFLVIDAINEKYKLSKQKPKFKGLLTTGKIEEQKVLAIKPLTFMNNSGVCIKELIDYFKIDIKNVFVFHDDMDIDIGKVKAKMGGSDAGHNGIGSIDKNIGKNYSRIRIGVGRPKKNSTGAEHVLDNFSGDEKQTVEKVTKDIIESISILINKDLDLFSSKINQK

SEQ ID NO: 138133 - protein, 115 aa, Unknown
  Bacterial polypetide isolated from the Sargasso Sea
MLLFVGLGNPTADSENNRHNVGFKIIDSINKKFSLSKQKPKFKGLLTTGNIENQKVYAIKPLTFMNNSGVCIRELIEYFKIDPQDVIVFHDDLDIEFGKIKAKFGGSDAGHNGVA

SEQ ID NO: 138134 - protein, 62 aa, Unknown
  Bacterial polypetide isolated from the Sargasso Sea
VASLLRRYLNAKPEHILVLHDDIDLQIGDAKFKSGGGDGGHNGLKDLSNVIEKRFQKIKNWR

SEQ ID NO: 138135 - protein, 48 aa, Unknown
  Bacterial polypetide isolated from the Sargasso Sea
MFLICGLGNPGKEYINTRHNVGFNLVDKLASFYNFDPFKKDTKKEIFK

SEQ ID NO: 138136 - protein, 186 aa, Unknown
  Bacterial polypetide isolated from the Sargasso Sea
MILLVGLGNPTPDSNDNRHNVGFKIIDAINQKFGLSKQKPKFKGLLTTGNIANKKVYAIKPLTFMNNSGICIRELMEYFKIDIDDVIVFHDDLDVDFGKIKAKFGGSSAGHNGIESIDKFIGKEYSRVRVGIGKPDKKIPVSDYVLNNFNEEEKIQLGQITMNIIESIPILIDKKLDLFSSTVNNK

SEQ ID NO: 138137 - protein, 178 aa, Unknown
  Bacterial polypetide isolated from the Sargasso Sea
NNNNNRHNIGFKIIDAINKQFNLSKQKPKFKGLLTTGNIEDKKVYAIKPLTFMNNSGTCIKELIEYFKIDSKNVIVFHDDMDIDLGKVKAKFGGSSAGHNGIESIDKSIGKDYSRVRVGIGHPKEDKKVNSHVLEDFSDNEDEKIQDVTKNIVDLVPMLIKDKIDVFSSKVNQNINGI

SEQ ID NO: 138138 - protein, 140 aa, Unknown
  Bacterial polypetide isolated from the Sargasso Sea
MLLFVGLGNPTPDSENNRHNVGFKIIDAINKKFSLSKQKPKFKGLLTTGNIGNVKVYAIKPLTFMNNSGICIRELIEYFKIDAQDVIVFHDDLDVEFGKIKAKFGGSSAGHNGIASIDKFIGKDYSRVRIGIGKPKGNIE

SEQ ID NO: 138139 - protein, 122 aa, Unknown
  Bacterial polypetide isolated from the Sargasso Sea
MFLICGLGNPGKDYINTRHNVGFNLIDELINYFEFSLLKKDNKKEIFKGKIDEYSCLLMKPQSFMNLSGQPIQEVMNFYKIQKKNIYVIHDDLDLELGKVKIKLGGGNGGHNGLSNIDAMIG

SEQ ID NO: 138140 - protein, 175 aa, Unknown
  Bacterial polypetide isolated from the Sargasso Sea
NTRHNIGFKIIDAINAHFKLSKQKPKFKGLLTTGSIDEKKIYAIKPLTFMNNSGTAIKELIDYFKIDAKDVFVFHDDMDIDFGKIKAKFGGSSAGHNGIESIDKFIGKDYSRVRIGIGHPKQKKKVNNHVLEDFKEDEEDKINEITENIVKQLPTLIEKKIDLFSSKVNQDLNGI

SEQ ID NO: 138141 - protein, 84 aa, Unknown
  Bacterial polypetide isolated from the Sargasso Sea
DSGGHGGHNGLRDIANKIGSANFLRLRIGIGHPGSKYEVTNWVLNKFTPNEIKHLAQTYSRFVDVFELITSNNIKEAQKLLHTK

SEQ ID NO: 138142 - protein, 47 aa, Unknown
  Bacterial polypetide isolated from the Sargasso Sea
MFLIVGLGNPGKFHKNNRHNIGYKIIDNIRDIYNFPGFSKKFKSEFS

SEQ ID NO: 138143 - protein, 186 aa, Unknown
  Bacterial polypetide isolated from the Sargasso Sea
MILFVGLGNPTPDSENNRHNVGFKIIDCINKKFNLSKQKPKFKGLLTTGNIASKKVYAIKPLTFMNNSGICIRELIEYFKIDAQDVIVFHDDLDVEFGKIKAKFGGSSAGHNGIASIDKFIGKDYSRVRIGIGKPKNSMEVADYVLQNFNDDETIGIDKITENITESISILVDKKLDLFSSTVNNK

SEQ ID NO: 138144 - protein, 80 aa, Unknown
  Bacterial polypetide isolated from the Sargasso Sea
GSPAGHNGLKSIDSCMGKNYNRVRVGIDHPGSRELVNRHVLGNFKKKELEIVDQLKISISSHLKLLISNNKSQFLNNIKL

SEQ ID NO: 138145 - protein, 132 aa, Unknown
  Bacterial polypetide isolated from the Sargasso Sea
MLLFVGLGNPTPDSENNRHNVGFKIIDAINKKFSLSKQKPKFKGLLTTGNIGNVKVYAIKPLTFMNNSGICIRELIEYFKIDAQDVIVFHDDLDVEFGKIKAKFGGSSAGHNGIASIDKFIGKDYSRVRIGI

SEQ ID NO: 138146 - protein, 186 aa, Unknown
  Bacterial polypetide isolated from the Sargasso Sea
MLLFVGLGNPTPNSEDNRHNVGFKIIDAINQKFSLSKQKPKFKGLLTTGKIEEHKIYAIKPLTFMNNSGICIRELIEYFKINASDVVVFHDDLDIDFGKIKAKFGGSNAGHNGIASIDKFIGKDYSRVRVGIGKPNNKIDVSDYVLNNFNEEEKEKLISITNNILDCIPILIDKKLELFSSTVNNK

SEQ ID NO: 138147 - protein, 186 aa, Unknown
  Bacterial polypetide isolated from the Sargasso Sea
MLLLVGLGNPTPDSENNRHNVGFKIIDSINKKFKLSKQKPKFKGLLTTGNIGNKKVYAIKPLTFMNNSGICIRELIEYFKINAEDVIVFHDDLDVEFGKIKTKFGGSSAGHNGISSIDKFIGKDYSRVRIGIGKPQGNIEVADYVLQNFNEEENLGIEKISAHITDSITILIEKKLDLFSSTVNNK

SEQ ID NO: 138148 - protein, 87 aa, Unknown
  Bacterial polypetide isolated from the Sargasso Sea
MFLICGLGNPGVKYFNTRHNVGFQLIDKLIVKYNFETYKKDKKKEIFRGSIGKHICLLIKPLTFMNLSGIAVKEVLDFYKIKKIICM

SEQ ID NO: 138149 - protein, 131 aa, Unknown
  Bacterial polypetide isolated from the Sargasso Sea
AIAECARYFKILSEKILVISDDLDLPAGKARLRVSGGHGGHNGLRSVIQCLGTDQFLRARIGIGRPDSSSSGKEASVSQYVLGKMEETKAELCLQAMEKVVDMLVHFVRQSRFQSTSISIPTPALPATGQG

SEQ ID NO: 138150 - protein, 111 aa, Unknown
  Bacterial polypetide isolated from the Sargasso Sea
MNKFLIVGIGNIGDKYTNTRHNIGFLVIDEIAEVLKSPLSSVKHGHRAEASYKGKKVILLKPSNYVNNSGKSLLYWKNKERIPNKNILVVCDDLNLYFGNIKLKANGTSGG

SEQ ID NO: 138151 - protein, 186 aa, Unknown
  Bacterial polypetide isolated from the Sargasso Sea
MLLFVGLGNPTPDSENNRHNVGFKIIDSINKKFGLSKQKPKFKGLLTTGNVANQKIYAIKPLTFMNNSGICIRELIEYFKIDAEDVMVFHDDLDVEFGKIKAKFGGSSAGHNGIESIDKFIGKDYSRIRIGIGKPKKNIETADYVLQNFDEDETAGIEKISNNINESISILIEKKLDLFSSTVNNK

SEQ ID NO: 138152 - protein, 188 aa, Unknown
  Bacterial polypetide isolated from the Sargasso Sea
MPEETLLLVGLGNPGEKYKNNRHNVGFMVLDYVTNQLKFGRSRTKFLGRTSMGSYENIKLISFKPQTFMNESGRAVREASNFYKINPERIFVFHDDIDLSFGDVKLKKGGSNAGHNGLASIDENIGNNYIRLRIGVNHPGDKEKVTGHVLGDFSKEENEEFEKIQTKIVKNFDLLIDTNIKKFQSNMK

SEQ ID NO: 138153 - protein, 97 aa, Unknown
  Bacterial polypetide isolated from the Sargasso Sea
NLFFGNIKIKPNGTSGGHNGLKDIEDNLGTSNYARLRVGISNNNKIPKSDYVLGKWSSYEMSNINTLTISSIEIIFSFIQTGIEETMNLYNKKNFIK

SEQ ID NO: 138154 - protein, 186 aa, Unknown
  Bacterial polypetide isolated from the Sargasso Sea
MLLFVGLGNPTPDSENNRHNVGFKIIDSINKKFGLTKQKPKFKGLLTTGNIDSKKVYAIKPLTFMNNSGICIRELIEYFKIEPENVIVFHDDLDVEFGKIKAKFGGSSAGHNGISSIDKFIGKDYSRVRIGIGKPKGPLEVSDYVLQNFDDEEIMGVEKISKNITESLSILVEKKLDLFSSTVNNK

SEQ ID NO: 138155 - protein, 155 aa, Unknown
  Bacterial polypetide isolated from the Sargasso Sea
SNKKPKFKGLLTTGNIESKKVYAIKPLTFMNNSGTAIKELIDYFKIDAKNVIVFHDDLDIDFGKVKAKVGGSSAGHNGIKSIDKFIGTDYSRVRVGIGHPKEKRRVNSHVLEDFKDDEEEKIKEITESIVKLVPTLIDKKIDLFSSKVNQNLNGI

SEQ ID NO: 138156 - protein, 52 aa, Unknown
  Bacterial polypetide isolated from the Sargasso Sea
MLLFVGLGNPTPNSENNRHNIGFKIIDAINQKFGLSKQKPKFKGLLTTGTIN

SEQ ID NO: 138157 - protein, 190 aa, Unknown
  Bacterial polypetide isolated from the Sargasso Sea
MLLLVGLGNPGANYTNTRHNIGYKIIDAINLHFKLSKQKPKFKGLLTTGNIESKKIYAIKPLTFMNNSGTAIKELIDYFKIDAKDVFVFHDDMDIDFGKIKVKFGGSSAGHNGIDSIDKFIGKDYSRVRVGIGHPKQKKKVNNHVLEDFKEDEQEKIKEITDNIVKLIPTLIEKKIDLFSSKVNQNLNGI

SEQ ID NO: 138158 - protein, 168 aa, Unknown
  Bacterial polypetide isolated from the Sargasso Sea
MDAVQRVVSLPWRPETRFFGDLADTRVGQQRVRFLRPASFMNECGGAVASVCGYFDIPAEALLVVHDDLDLPPGTVRVKQGGGHGGHNGLRDIFSKLGSREFIRLRIGIGHPGNSDDVSDWVLRKPSSGDRTAILDAIDRALGQIDPMMSGNLEPVMKALHTQPKGQS

SEQ ID NO: 138159 - protein, 191 aa, Unknown
  Bacterial polypetide isolated from the Sargasso Sea
MLHLCIVGLGNPGDKYSKTRHNAGYDFLDIIAKEFTTDFKYLKKIDADYVEIDFKDQKIALIKPREFINRSGKTLELVRKYKVKDTKDILVVHDDMDLEPGDVKLKLSGGHAGHNGLRDILKAIGNDFVRLRFGIGHPPNKEQTDSWVIKKPNPQEKKEMANAFERAINNIDKILLKDWMIIMNDLHSNEH

SEQ ID NO: 138160 - protein, 189 aa, Unknown
  Bacterial polypetide isolated from the Sargasso Sea
MTIFVGLGNHESKYLDTKHNVGYWVLDSFAEKYGLEFKPGKGNYFVAKKGSSFMLIKPTTGMNNSGAIINEVLSFYKAKKEDLVIIFDDVDLPLGEIRFRTDGGDGCHNGMKSVLKYVSSEKINRLKVGIAADDYKRPSEKYVLKPFNKRYQSLVQDVIIFANEAMKSFLDNGQEFTMNNYNNQTIGVA

SEQ ID NO: 138161 - protein, 199 aa, Unknown
  Bacterial polypetide isolated from the Sargasso Sea
MNSTNNPPLLIVGLRNPDPKYLKTRHNIGFWFLDLFAEKYNLSFNDNLKKGYLDSTYQDDNITIKILKPMTFINDSGSPLVKFIKNTNISPKDIIVAYDDLDLSPGKVRLKFSGGSGGHNGIKDITEKIGTKDFWRLKIGIGKPMHKDDVISYVLGKPSPEDKASINSGIDKILANSKDIISGNYKNFMNNINGGGNGV

SEQ ID NO: 138162 - protein, 186 aa, Unknown
  Bacterial polypetide isolated from the Sargasso Sea
MLLFVGLGNPTPDSENNRHNVGFKIIDSINKKFSLSKQKPKFKGLLTTGNVADQKIYAIKPLTFMNNSGICIRELIEYFKIDAEDVIVFHDDLDVEFGKIKAKFGGSSAGHNGIASIDKFIGKDYSRVRVGIGKPKDNIEISDYVLQNFDDDEMTGLEKITNDITDSISILVDKKLDLFSSTVNNK

SEQ ID NO: 138163 - protein, 188 aa, Unknown; identical to SEQ ID NO: 138152
  Bacterial polypetide isolated from the Sargasso Sea

SEQ ID NO: 138164 - protein, 186 aa, Unknown
  Bacterial polypetide isolated from the Sargasso Sea
MLLFVGLGNPTPDSENNRHNVGFKIIDAINKKFSLSKQKPKFKGLLTTGNIENVKVYAIKPLTFMNNSGICIRELIEYFKIDAQDVIVFHDDLDVEFGKIKAKFGGSSAGHNGIASIDKFIGKDYSRVRIGIGKPKGNIEVADYVLQNFDEDESLGIEKISNHINDSISFLVEKKLDLFSSTVNNK

SEQ ID NO: 138165 - protein, 186 aa, Unknown
  Bacterial polypetide isolated from the Sargasso Sea
MLLFVGLGNPTPDSENNRHNVGFKIIDSINKKFGLSKQKPKFKGLLTTGNVGDKKIYAIKPLTFMNNSGICIRELIEYFKIDAEDVIVFHDDLDVEFGKIKAKFGGSSAGHNGVASIDKFIGKDYSRVRIGIGKPKDNMEVSDFVLENFDEDEMVGLEKITNNITESISILIEKKLDLFSSTVNNK

SEQ ID NO: 138166 - protein, 186 aa, Unknown
  Bacterial polypetide isolated from the Sargasso Sea
MLLFVGLGNPTPDCENNRHNVGFKIIDSINKKFGLSKQKPKFKGLLTTGNIGDKKVYAIKPLTFMNNSGICIRELIEYFKIDVENVIVFHDDLDIEFGKIKTKFGGSNAGHNGIASIDKFIGKDYSRVRIGIGKPKNNIQVSDYVLQNFNEDEAISIEKISENISESISILVEKKLDLFSSTVNNK

SEQ ID NO: 138167 - protein, 186 aa, Unknown
  Bacterial polypetide isolated from the Sargasso Sea
MLLFVGLGNPTPDSENNRHNVGFKIIDSINKKFGLSKQKPKFKGLLTTGNVGDKKIYAIKPLTFMNNSGICIRELIEYFKIDAEDVIVFHDDLDVEFGKIKAKFGGSSAGHNGIASIDKFIGKEYSRVRIGIGKPKDNIEISDFVLQNFDEDEMVGLEKITNNITESISILIEKKLDLFSSTVNNK

SEQ ID NO: 138168 - protein, 100 aa, Unknown
  Bacterial polypetide isolated from the Sargasso Sea
LRVSGGHGGHNGLRSVIQCLGTDQFLRARIGIGRPDSSSSGKEASVSQYVLGKMEETKAELCLQAMEKVVDMLVRFVRQSRFQSTSISIPTPALPATGQG

SEQ ID NO: 138169 - protein, 189 aa, Unknown
  Bacterial polypetide isolated from the Sargasso Sea
MLDLCIVGLGNPGDKYNHSRHNAGYDYLDLICNQLSVELKKSNKIEGLLGETTYKDLQIGFVKPNEFINNSGRTLSLIKKYKVKELNDVLIIHDDMDLEPGEVKLKIGGGHSGHRGLKDIINKVGDDFVRLRLGIGHPPIKEETNAWVIKKPTPSEKEGLNNAFTKANESLDQLLNKEWLIAMNDLHTK

SEQ ID NO: 138170 - protein, 186 aa, Unknown
  Bacterial polypetide isolated from the Sargasso Sea
MLLFVGLGNPTPNSEDNRHNVGFKIIDAINQKFSLSKQKPKFKGLLTTGKIEEHKVYAIKPLTFMNNSGICIRELIEYFKINANDVVVFHDDLDIDFGKIKAKFGGSDAGHNGIASIDKFIGKDYSRVRVGIGKPNNKIDVSDYVLNNFNEEEKEKLISITNNILDCIPILIDKKLELFSSTVNNK

SEQ ID NO: 138171 - protein, 186 aa, Unknown; identical to SEQ ID NO: 138092
  Bacterial polypetide isolated from the Sargasso Sea

SEQ ID NO: 138172 - protein, 199 aa, Unknown
  Bacterial polypetide isolated from the Sargasso Sea
MKNQKKKKKLQNNYPVQKVFILGIGNPEEKYNNTRHNIGKDWVEKIAKDHELTFVKKSKLKCSICEVEPHVYLVVPDVYVNESGKVAALLKRYLNAKPEHILVLHDDIDIQIGDLKFKSGGGDGGHNGLKDLSNVIGKDFKRLKIGVSHPGRKNEVTNWVLGKFKPAETQLLEELYKKVMVHKNKIFSLEIENLQNLVN

SEQ ID NO: 138173 - protein, 186 aa, Unknown
  Bacterial polypetide isolated from the Sargasso Sea
MLLFVGLGNPTPDSENNRHNVGFKIIDSINKKFGLTKQKPKFKGLLTTGNIDSKKVYAIKPLTFMNNSGICIRELIEYFKIEPENVIVFHDDLDVEFGKIKAKFGGSSAGHNGISSIDKFIGKDYSRVRIGIGKPKGPIEVSDYVLQNFDDEEIMGVEKISKNITESLSILVEKKLDLFSSTVNNK

SEQ ID NO: 138174 - protein, 186 aa, Unknown
  Bacterial polypetide isolated from the Sargasso Sea
MLLFVGLGNPNPNSENNRHNVGFKIIDAINQKFKLSKQKPKFKGLLTTGNINDKKVYAIKPLTFMNNSGVCIRELIEYFKIDASDVIVFHDDLDIDFGKIKAKFGGSSAGHNGITSIDKFIGKEYSRIRIGIGKPTTKSEIVDHVLNDFDEEEIKQLEKITNSITTSLPILLDKKLDLFSSTVNNQ

SEQ ID NO: 138175 - protein, 171 aa, Unknown
  Bacterial polypetide isolated from the Sargasso Sea
MKNQKKKKKLQNNYPVQKVFILGIGNPEEKYNNTRHNIGKDWVEKIAKDHELTFVKKSKLKCSICEVEPHVYLVVPDVYVNESGKVASLLKRYLNAKPEQILVLHDDIDIQIGDAKFKSGGGDGGHNGLKDLSNVIGKDFKRLKIGVSHPGRKNEVTNWVLGKFKPAETQL

SEQ ID NO: 138176 - protein, 97 aa, Unknown
  Bacterial polypetide isolated from the Sargasso Sea
MFLICGLGNPGKEYINTRHNIGFNLVDKLESFYNFEPFKKDTKKEIFKGIIANNACLLMKPLNFMNLSGQPIRDVISFYKIEKNKIFIIHDDLDLEL

SEQ ID NO: 138177 - protein, 186 aa, Unknown
  Bacterial polypetide isolated from the Sargasso Sea
MLLFVGLGNPTPDSENNRHNVGFKIIDTINKKFSLSKQKPKFKGLLTTGNIGDKKVYAIKPLTFMNNSGVCIRELIEYFKIDAEDVIVFHDDLDIEFGKIKAKFGGSSAGHNGIASIDKFIGKDYSRVRIGIGKPKNGIEVADYVLQNFDEDESIGIEKISKDITESISILVEKKLDLFSSAVNNK

SEQ ID NO: 138178 - protein, 199 aa, Unknown
  Bacterial polypetide isolated from the Sargasso Sea
MKNQKKKKKLQNNCSVQKVFILGIGNPEEKYKNTRHNIGKDWVEKIAKDHELTFVKKSKLKCSICEVEPHVYLVSPDVYVNESGKVASLLKRYLNAKSDHILVLHDDIDTQIGDAKFKSGGGDGGHNGLKDISNVIGKDFKRLKIGVSHPGRKNEVTNWVLGKFRPAETQLLEELFKKVMVHKDKIFSLEIENLQNLVN

SEQ ID NO: 138179 - protein, 188 aa, Unknown
  Bacterial polypetide isolated from the Sargasso Sea
MYNLCIIGLGNPSPKYDNSRHNIGKDWVINVSKKFFKEFKEKSKLEALIGESHDNKILWVVPTNYMNDSGKTISKLLRSTNIEIQNCIVIHDDLDLNLGSIRLKEGGGHGGHNGLKDIIEKTGKNNFNRIRIGISHPGIKEEVTNWVLNKFSPEEKIAINNAYVAFEQVFELLIEKKYQDVQKILHTK

SEQ ID NO: 138180 - protein, 184 aa, Unknown
  Bacterial polypetide isolated from the Sargasso Sea
MIALIGLGNPGTKHKNNRHNVGYLFIDQLLQDHDDVMREKKFDGELASFLIGKKKIYTFKSNDYMNECGKSIATFLNFFKIKSNLTYVIHDDLDITLGKIKIKLGGSSAGHNGLKSIDSKIGKNYNRIRIGINHPGNKDMVNKHVLSNFKKSELEVINELNIKMSENIKVLLDGEKSKFINNLK

SEQ ID NO: 138181 - protein, 189 aa, Unknown
  Bacterial polypetide isolated from the Sargasso Sea
MLDLCIVGLGNPGDKYNHSRHNAGYDYLDLICNQLSVELKKSNKIEGLLGETTYKDLKIGFVKPNEFINNSGRTLSLIKKYKVKELNDVLVIHDDMDLEPGEVKLKIGGGHSGHRGLKDIINKVGNDFVRLRLGIGHPPVKEETNAWVIKKPTPSEKEGLNNAFIKANESLDQLLNKEWLIAMNDLHTK

SEQ ID NO: 138182 - protein, 191 aa, Unknown
  Bacterial polypetide isolated from the Sargasso Sea
MLHLCIVGLGNPGDKYSKTRHNAGYDFLDLIAEEFNADFKYLKKIDADYVEIDFEDQKIALIKPREFINRSGRTLQLVRKYKVKNTKDILVVHDDMDLEPGDVKLKLSGGHAGHNGLRDILKVIGNDFVRLRFGIGHPPNKDQTDSWVIKKPNPQEKKEMANAFERAINNIDKIMLKDWMIIMNDLHSNEH

SEQ ID NO: 138183 - protein, 137 aa, Unknown
  Bacterial polypetide isolated from the Sargasso Sea
MKNQKKKKKLQNNYPVQKVFILGIGNPEEKYNNTRHNIGKDWVEKIAKDHELTFVKKSKLKCSICEVKPHVYLVAPDVNVNESGKVASLLKRYLNAKPEHILVLHDDIDIQIGDAKFKSGGGDGGHNGLKDLSNVME

SEQ ID NO: 138184 - protein, 175 aa, Unknown
  Bacterial polypetide isolated from the Sargasso Sea
MLLFVGLGNPTPDSENNRHNVGFKIIDSINKKFGLSKQKPKFKGLLTTGNVADHKIYAIKPLTFMNNSGICIRELIEYFKIDAEDVIVFHDDLDVEFGKIKAKFGGSSAGHNGIASIDKFIGKDYSRVRVGIGKPKENMEVSDYVLQNFDEDEMMGLEKITNDITDSFSILVNKK

SEQ ID NO: 138185 - protein, 186 aa, Unknown
  Bacterial polypetide isolated from the Sargasso Sea
MLLFVGLGNPTPDSENNRHNVGFKIIDSINKKFGLSKQKPKFKGLLTTGNVGDQKVYAIKPLTFMNNSGICIRELIEYFKIDAEDVIVFHDDLDVEFGKIKAKYGGSSAGHNGIASIDKFIGKEYSRVRIGIGKPKENIEVGDFVLQNFDEDEMPGIEKISNNIIESISLLVDKKLDLFSSTVNNK

SEQ ID NO: 138186 - protein, 189 aa, Unknown
  Bacterial polypetide isolated from the Sargasso Sea
MTIFVGLGNHETKYHSTKHNVGYWVLDSFAKKYGLEFKPGKGNYFVAKKGSSFMLIKPATGMNNSGAIINEVLSFYKAKKEDLVIIFDDVDLPLGEIRFRTDGGDGCHNGMKSILQYVSSDKVKRLKVGIAASDYKRPSEKYVLKPFNKRFNPLVNEVLIFANEAMQSLLDNGEEFTMNNYNNQTIGVA

SEQ ID NO: 138187 - protein, 189 aa, Unknown
  Bacterial polypetide isolated from the Sargasso Sea
MLDLCIVGLGNPGDKYNHSRHNAGYDYLDLICNQLSVELKKSNKIEGFLGETTYKDLQIGFVKPNEFINNSGRTLSLIKKYKVKELNDVLVIHDDMDLEPGEVKLKIGGGHSGHRGLKDIINKVGDDFVRLRLGIGHPPVKEETNAWVIKKPTPSEKEGLNNAFTKANESLDQLLNKEWLIAMNDLHTK

SEQ ID NO: 138188 - protein, 186 aa, Unknown
  Bacterial polypetide isolated from the Sargasso Sea
MLLFVGLGNPTPDSENNRHNVGFKVIDCINKKFGLSKQKPKFKGLLTTGSVGDQKVYAIKPLTFMNNSGICIRELIEYFKIDAEDVIVFHDDLDVEFGKIKAKSGGSSAGHNGIASIDKFIGKEYSRVRIGIGKPKENIEVSDFVLQNFDDDEMLGIEKISNNIIESISLLVDKKLDLFSSTVNNK

SEQ ID NO: 138189 - protein, 167 aa, Unknown
  Bacterial polypetide isolated from the Sargasso Sea
NVGKDWLIDISQQYFKEFQNKPKYEAEFGESHNAETLWITPSNFVNESGRTISKILRSHNLNTNMFLIIHDDLDLEPGELKIKEGGGHGGHNGLRDIIKRTGKSDFIRLRVGIGHPGMKNEVTNWVLNKFSPNEKKSIDNAYSRFVDVFELIINNQLQKVQKILHTK

SEQ ID NO: 138190 - protein, 189 aa, Unknown
  Bacterial polypetide isolated from the Sargasso Sea
MIIFVGLGNHETRYHNTKHNVGYWVLDSFAKKYGLEFKPGKGNYFVAKKGSSFMLIKPTTGMNNSGAIINEVLNFYKAKKEDLVIIFDDVDLPLGEIRFRADGGDGCHNGMKSVLQYVSSDKVKRLKVGIAASDYKRPSEKYVLKPFNKRFNSLVDEVLIFANEAMQSLLDNGEEFTMNNYNNQTIGVA

SEQ ID NO: 138191 - protein, 186 aa, Unknown
  Bacterial polypetide isolated from the Sargasso Sea
MLLFVGLGNPTPNSENNRHNVGFKIIDSINKKFGLSKQKPKFKGLLTTGTIAEKKVYAIKPLTFMNNSGVCIRELLEYFKIEAENVVVFHDDLDVEFGKIKAKFGGSNAGHNGIASIDKFIGKDYSRVRVGIGKPKKEIEISDYVLQNFEDEEINKLELLTNNIINSISILIEKKLDLFSSTVNNK

SEQ ID NO: 138192 - protein, 133 aa, Unknown
  Bacterial polypetide isolated from the Sargasso Sea
MKSHSSVYKLCIIGLGNPGSKYNNTRHNIGKDLLLNLSKSFVEEFKNKSKFEADVAESHNGDILWVVPDNYVNNSGKTVIKILKKTSLKITDILIIHDDLDLDIGELRLKEDGGHGGHNGLRDIITKLGDYNF

SEQ ID NO: 138193 - protein, 199 aa, Unknown
  Bacterial polypetide isolated from the Sargasso Sea
MNPENNKTLFVGLWNPQDKYSKTRHNIGADILIRFCKKNNLEFKLDKNSIYNFSFAEINGSNVEIILPMVSMNNAGDALKSYFKYNNKENTEILIVHDDIDLAFGRLRIKKGSSDGGHNGIKSTNRVLNTEDYYKLKVGVGRPPQGIDPADFVLSKFYNEEKEEVDFLIEDSVDILSTFLKDKELAIKDASERRIIDVI

SEQ ID NO: 138194 - protein, 189 aa, Unknown
  Bacterial polypetide isolated from the Sargasso Sea
MTIFVGLGNHETKYHNTKHNVGYWVLDSFAKRYGLEFKPGKGNYFVAKKGSSFMLIKPTTGMNNSGAIINEVLNFYKAKKEDLVIIFDDVDLPLGEIRLRADGGDGCHNGMKSVLQYLSSDKVTRLKVGIAASDYKRPSEKYVLKPFNKRFNTLVDEVLIFANEAMQSLLDNGAEFTMNNYNNQTIGVA

SEQ ID NO: 138195 - protein, 40 aa, Unknown
  Bacterial polypetide isolated from the Sargasso Sea
MLLFVGLGNPSPNSENNRHNIGFKIIDAINQKFGLSKTKT

SEQ ID NO: 138196 - protein, 190 aa, Unknown
  Bacterial polypetide isolated from the Sargasso Sea
MLLLVGLGNPGPNNTNNRHNIGFKIIDAINSQFSLSKQKPKFKGLLTTGNIEDKKVYAIKPLTFMNNSGVCIKELIDYFKINAKDVIVFHDDIDIDLGKIKAKFGGTSAGHNGIESIDKFIGKDYSRVRVGIGRPKQKNKVNNHVLEDFNENEEEMIKDITENIVKLVPTLIKKEIDLFSSKVNQNLNGI

SEQ ID NO: 138197 - protein, 186 aa, Unknown
  Bacterial polypetide isolated from the Sargasso Sea
MLLLVGLGNPTPNSHNNRHNIGFKVVDAINQKFGLSKQKPKFKGLLTTGNIGEKKIYAIKPLTFMNNSGICIRELLEYFKIDAEDVIVFHDDLDVELGKIKAKFGGSNAGHNGVASIDKFIGKDYSRVRIGIGKPENKMSVSDFVLNDFSDDEQEHLEKITHNIIDSIAILIDKKLDLFSSKVNNN

SEQ ID NO: 138198 - protein, 83 aa, Unknown
  Bacterial polypetide isolated from the Sargasso Sea
MLLLVGLGNPTPDSENNRHNIGFKIIDAINKKFGFLKQKPKFKGLLTTGNVGDQKIYAIKPLTFMNNSGICIRELIEYFKNRL

SEQ ID NO: 138199 - protein, 186 aa, Unknown
  Bacterial polypetide isolated from the Sargasso Sea
MILFVGLGNPTPDNENNRHNIGFKVIDAINKKFQLSKQKPKFKGLLTTGKIGEKKIYAIKPLTFMNNSGICIRELIEYFKIDAEDVFVFHDDLDINVGKVKAKFGGSDAGHNGIASLDKFIGKEYSRIRIGIGRPNGKIAVADHVLNDFNDEEKELLELITKNILSSIQILLDRKLELFSSTVNNK

SEQ ID NO: 138200 - protein, 186 aa, Unknown
  Bacterial polypetide isolated from the Sargasso Sea
MILLVGLGNPTPDSNDNRHNIGFKVIDAINNKFSLSKQKPKFKGLLTTGNISNKKVYAIKPLTFMNNSGICIRELIEYFKINSEDVIVFHDDLDLDFTKIKAKFGGSSAGHNGIASIDKFIGKEYSRVRIGIGKPDSKIDVSDFVLTNFTDEEKVKLENVIQNIIESIPILIDKKLDLFSSTVNNQ

SEQ ID NO: 138201 - protein, 131 aa, Unknown
  Bacterial polypetide isolated from the Sargasso Sea
MVSMNNSGDALKSYFKYNNQENTEIVVVHDDIDLAFGRLRIKKGSSDGGHNGIKSTNRVLNAEDYYKLKVGVGRPPQGIDPADFVLSKFYNEEKEEVEFLIEDSVDILNTFLKDKELAIKDASERRIIDVI

SEQ ID NO: 138202 - protein, 149 aa, Unknown
  Bacterial polypetide isolated from the Sargasso Sea
MISEDNPPALIVGLGNPDSKFLNTRHNIGFWFIDSLVDSLRIHFNDNLKKGFCDTDYQSEGIDIKLLKPMTFINDSGTPLKNFIKNKNIVPSQIIVAYDDLDLAAGKIRLKFSGGSGGHNGIKDIIEKIGTKDFWRLKIGIGKPAHKDD

SEQ ID NO: 138203 - protein, 87 aa, Unknown
  Bacterial polypetide isolated from the Sargasso Sea
GGGHAGHNGLKDITSKLGNNANFYRLRLGIGHPGHKDLVTGYVLGKAPQSEQKLIDEALDESMRCFELWLSDGLIKAQHRLHSFSAA

SEQ ID NO: 138204 - protein, 145 aa, Unknown
  Bacterial polypetide isolated from the Sargasso Sea
MLLLVGLGNPGSNYTNTRHNIGFKIIDAINAHFKLSKQKPKFKGLLTTGNIDEKKIYAIKPLTFMNNSGTAIKELIDYFKIDAKDVIVFHDDMDIDFGKVKAKFGGSSAGHNGIESIDKFIGKDYSRVRIGIGHPKQKKKVNNHV

SEQ ID NO: 138205 - protein, 186 aa, Unknown
  Bacterial polypetide isolated from the Sargasso Sea
MLLLVGLGNPTPNSHNNRHNIGFKVVDAINQKFSLSKQKPKFKGLLTTGNIGEKKIYAIKPLTFMNNSGICIRELLEYFKIDAEDVIVFHDDLDVEFGKIKAKFGGSSAGHNGVASIDKFIGKDYSRVRIGIGKPENKMSVSDFVLNDFSDDEQEHLEKITHNIIDSIAILIDKKLDLFSSKVNNN

SEQ ID NO: 138206 - protein, 186 aa, Unknown
  Bacterial polypetide isolated from the Sargasso Sea
MLLFVGLGNPTPNSENNRHNIGFKIIDAINQKFGLSKQKPKFKGLLTTGTINGKKVYAIKPLTFMNNSGVCIRELIEYFKIDADNVIVFHDDLDIDFGKIKTKFGGSSAGHNGIESIDKFIGKDYSRVRIGIGHPKSKVEVADHVLNDFNDEEKIELNTITKSITESLPILLDKKLDLFSSTVNNK

SEQ ID NO: 138207 - protein, 199 aa, Unknown
  Bacterial polypetide isolated from the Sargasso Sea
MNQENNKTLLVGLWNPQSKYLKTRHNIGADILEKFCNKNSIEVKLDKSGSFKIGQASIENSKIDIIFPMVSMNNSGEALKTYLKYSNVEASDILVIHDDIDLGFGRLRLKSGSSDGGHNGIKSINSYLQSNEYFRLKVGVGRPPKEVNPADFVLSRFYNNEEEEVEFLIEDSVDIIEMFLNDRESAVKAASERRIIDVI

SEQ ID NO: 138208 - protein, 115 aa, Unknown
  Bacterial polypetide isolated from the Sargasso Sea
MLLLVGLGNPTPNSHNNRHNIGFKVVDAINQKFGLSKQKPKFKGLLTTGNIGEKKIYAIKPLTFMNNSGICIRELLEYFKIDAEDVIVFHDDLDVEFGKIKAKFGGSSAGHNGVA

SEQ ID NO: 138209 - protein, 77 aa, Unknown
  Bacterial polypetide isolated from the Sargasso Sea
MPALRLIVGLGNPGNEYLNTRHNVGAEWLDGLATSYDAQFKENSKLEGWFAKAKIEGIECLLLKPMTYMNGSGSSVR

SEQ ID NO: 138210 - protein, 118 aa, Unknown
  Bacterial polypetide isolated from the Sargasso Sea
GISINKILKTNNFDLKQIIIIHDDLDLPLGTLKLKIGGGHGGHNGLKSIISYAGKSFIRLRVGIGHPGSKVDVTNWVLGKFKTAEKDLVIKSYYEFNHIIELLSNNDIHTAQLKLHTE

SEQ ID NO: 138211 - protein, 99 aa, Unknown
  Bacterial polypetide isolated from the Sargasso Sea
MLLLVGLGNPGSNYTNTRHNIGFKIIDAINAHFKLSKQKPKFKGLLTTGNIDEKKIYAIKPLTFMNNSGTAIKELIDYFKIDAKDVIVFHDDMDIDLEK

SEQ ID NO: 138212 - protein, 110 aa, Unknown
  Bacterial polypetide isolated from the Sargasso Sea
MLLLVGLGNPGPNNTNNRHNIGFKIIDAINQQFNLSKQKPKFKGLLTTGNINNKKVYAIKPLTFMNNSGTCIRELIEYFKIDAKDVFVFHDDMDIDLGKVKAKFGGSSAG

SEQ ID NO: 138213 - protein, 178 aa, Unknown
  Bacterial polypetide isolated from the Sargasso Sea
MLLFVGLGNPTPNSQNNRHNIGFKIVDAINLKFGLSKQKPKFKGLLTTGNIKEKKIYAIKPLTFMNNSGICIRELIEYFKIEAEDVIVFHDDLDIEFGKIKAKFGGSDAGHNGIASLDKFIGKDYSRVRIGIGKPKEKISAADYVLNDFSEEEKENLEKITNNIIESISILIDKKLEL

SEQ ID NO: 138214 - protein, 144 aa, Unknown
  Bacterial polypetide isolated from the Sargasso Sea
MKTNKWLIIGLGNPEIKYENNRHNIGYKLVDYILKKNETEKIKNKYSQLNKLILEGNLIYLAKPFFYINESGIPVKKLVDEFSINLNNILIIVDDMNLDIGNIRIREKGKDGGHNGLKSIEYYLNTNEYPRLRIGIGSPNSKKD

SEQ ID NO: 138215 - protein, 139 aa, Unknown
  Bacterial polypetide isolated from the Sargasso Sea
MLLLVGLGNPGSNYTNTRHNIGFKIIDAINAHFKLSKQKPKFKGLLTTGNIDEKKIYAIKPLTFMNNSGTAIKELIDYFKIDAKDVIVFHDDMDIDFGKIKAKFGGTSAGHNGIESIDKFIGKDYSRVRIGIGHQNKRR

SEQ ID NO: 138216 - protein, 192 aa, Unknown
  Bacterial polypetide isolated from the Sargasso Sea
MDNWIILGVGNPGDKYANTKHNVPWWILDNLQKKLSLYKKYQKKEKNYLEVRFDLDEYSIYTIYPTTFVNNSGLAIKDLLDKDKFSLDKTIVISDDINLEEGRIRIRRKGSSGGHNGLKSIINHLGTENFVRLRVGIGKPHQNEDQIKYVLSKVKNEKLVNKSCQDASDACINIIENGITKSMEKFNGEIDV

SEQ ID NO: 138217 - protein, 186 aa, Unknown
  Bacterial polypetide isolated from the Sargasso Sea
MYLFVGLGNPTPNSQDNRHNIGFKIIDAINQKFNLSKQKPKFKGLLTTGNVENKKVYAIKPLTFMNNSGICIRELLEYFKMEAQNVFVFHDDLDIDFGKIKAKFGGSSAGHNGIESIDKFIGKEYSRVRIGIGKPENKMSVSDFVLDNFNNEEKEILEIITSNIVEYFPILLDKKLDLFSSTVNNK

SEQ ID NO: 138218 - protein, 199 aa, Unknown
  Bacterial polypetide isolated from the Sargasso Sea
MNSTNNPPLLIVGLGNPDPKYLKTRHNIGFWFLDLLADKYNLSFNDNLKKGYLDSTYQDDKSTIKILKPMTFINDSGSPLVKFIKNTNIRPNNIIVAYDDLDLSPGKVRLRFSGGSGGHNGVKDIIEKIGTKDFWRLKIGIGKPLHKDEVVSYVLGKPSPEDRESINSGINNILTNSKDIISGNYTNFMNNINGDSNGV

SEQ ID NO: 138219 - protein, 70 aa, Unknown
  Bacterial polypetide isolated from the Sargasso Sea
MLLLVGLGNPTPDSENNRHNIGFKIIDAINKKFGLSKQKPKFKGLLTTGNVGEQKVYAIKPLTFMNNSGI

SEQ ID NO: 138220 - protein, 58 aa, Unknown
  Bacterial polypetide isolated from the Sargasso Sea
MLLLVGLGNPGPNNTNNRHNIGFKIIDAINSEFSLSKQKPKFKGLLTTGNIQDKKVYA

SEQ ID NO: 138221 - protein, 120 aa, Unknown
  Bacterial polypetide isolated from the Sargasso Sea
MFLICGLGNPGKKYENTRHNIGFKFVDKIINQFELNKLKIDKFKELYSGEINNFKILIIKPLTFMNLSGQPIQEIVNFYKIKLDNVFVVHDDLDLDFGENKIKQGGGNGSHNGLSSIDDC

SEQ ID NO: 138222 - protein, 171 aa, Unknown
  Bacterial polypetide isolated from the Sargasso Sea
MLLLVGLGNPGPNNVNNRHNIGFKIIDAINQQFSLSKQKPKFKGLLTTGNINNKKVYAIKPLTFMNNSGTCIRELIEYFKIDAKDVFVFHDDMDIDLGKVKAKFGGSSAGHNGIESIDKSIGKDYSRVRVGIGHPKTDKKVNTHVLEDFSDNEEERIQNITENIVKLLPTL

SEQ ID NO: 138223 - protein, 190 aa, Unknown
  Bacterial polypetide isolated from the Sargasso Sea
MLLLVGLGNPGPNNLNNRHNIGFKIIDAINQQFNLSKQKPKFKGLLTTGNINNKKVYAIKPLTFMNNSGTCIRELIEYFKIDAKDVFVFHDDMDIDLGKVKAKFGGSSAGHNGIESIDKSIGKEYSRVRIGIGHPKEEKKVNNHVLEDFNETEEEKIQDITENIVKLIPTLIDKKIDTFSSKVNQNLNGI

SEQ ID NO: 138224 - protein, 162 aa, Unknown
  Bacterial polypetide isolated from the Sargasso Sea
MLLFVGLGNPTPNSQDNRHNIGFKIVDAINLKFGLSKQKPKFKGLLTTGNIKEKKIYAIKPLTFMNNSGICIRELLEYFKIDAEDVIVFHDDLDIEFGKIKAKFGGSSAGHNGIASIDKFIGKDYSRVRIGIGKPKDKISVEDYVLNDFNDEEKENLEKITT

SEQ ID NO: 138225 - protein, 186 aa, Unknown
  Bacterial polypetide isolated from the Sargasso Sea
MLLLVGLGNPTPNSLNNRHNIGFKIVDAINQKFGLSKQKPKFKGLLTTGNIKEKKIYAIKPLTFMNNSGICVRELLEYFKIDAEDVIVFHDDLDVEFGKIKAKFGGSNAGHNGIASIDKFIGKDYSRVRIGIGKPKDKIPVADYVLNDFSEEEKENLEKIINNIIDSISILIDKKLELFSSKVNNY

SEQ ID NO: 138226 - protein, 100 aa, Unknown
  Bacterial polypetide isolated from the Sargasso Sea
MLLFVGLGNPTPDSQNNRHNIGFKVIDAINQKFGLSKQKPKFKGLLTTGNIGDKKIYAIKPLTFMNNSGICIRELIEYFKMDAADVIVFHDDLDIDVGKI

SEQ ID NO: 138227 - protein, 201 aa, Unknown
  Bacterial polypetide isolated from the Sargasso Sea
MPALRLIVGLGNPGNEYLNTRHNVGAEWVDGLATSYDARFKENSKLEGWFAKAMIEGIECLLLKPMSYMNGSGSSVRLAARYFQIPLDAILVAHDEMAFNPGTVRIKLGGGANGHNGLRSLFSELSNNREFYRLRIGVGHPGDASKVTPYLTRYKIPPDEQLSIANALDFSPTLMSEIVNADWEKAMTRLHSEPTSINRSL

SEQ ID NO: 138228 - protein, 111 aa, Unknown
  Bacterial polypetide isolated from the Sargasso Sea
MFLFVGLGNPTPNSENNRHNIGFKIIDAINSKFKLSKQKPKFKGLLTTGNINEKKVYAIKPLTFMNNSGICIRELIEYFKIEAENIIVFHDDLNIDFGKIKTKLEVLVRVT

SEQ ID NO: 138229 - protein, 137 aa, Unknown
  Bacterial polypetide isolated from the Sargasso Sea
KKIVIIKPNNYVNNSGRSLLYWQKKEKVSPEKILVVCDDLNLFFGNIKIKPNGTSGGHNGLKDIEAKLGTSIYPRLRIGISNNNKISKSDYVLGKWSSYEMSNINNLTISSIEIIFSFIQTGIEETMNLYNKKNFIK

SEQ ID NO: 138230 - protein, 118 aa, Unknown
  Bacterial polypetide isolated from the Sargasso Sea
KINLDQIFIIVDDKDLPLGKIRFRRKGSSGGHNGLKSIIEQFQTQNFKRIRIGIGSPPQIQGKNNFNTISHVLGNISLEEKSILDKVYKRVIESLEQLNIKKEEYIINELNSFDKDQP

SEQ ID NO: 138231 - protein, 144 aa, Unknown
  Bacterial polypetide isolated from the Sargasso Sea
MLLLVGLGNPGSNYTNTRHNIGFKIIDAINAHFKLSKQKPKFKGLLTTGNIDEKKIYAIKPLTFMNNSGTAIKELIDYFKIDAKDVFVFHDDMDIDFGKIKAKFGGSSAGHNGIESIDKFIGKDYSRVRIGIGHPKQKKKVNNH

SEQ ID NO: 138232 - protein, 86 aa, Unknown
  Bacterial polypetide isolated from the Sargasso Sea
MQLIAGLGNPGEKYQDNPHNIGFRTLDQLMKALDLEGFQRRFNSEFQRTLENGQVTLMLQPETYMNRSGEAIAECARYFQIPSEKI

SEQ ID NO: 138233 - protein, 190 aa, Unknown
  Bacterial polypetide isolated from the Sargasso Sea
MLLLVGLGNPGPNNINNRHNIGFKIIDAINQQFNLSKQKPKFKGLLTTGNINNKKVYAIKPLTFMNNSGTCIRELIEYFKIDAKDVFVFHDDMDIDLGKIKAKFGGSSAGHNGIESIDKSIGKDYSRVRIGIGHPVDKKKVNNHVLEDFNENEEEKIQDITENIVKLVPTLIEKKIDTFSSKVNQNLNGI

SEQ ID NO: 138234 - protein, 99 aa, Unknown
  Bacterial polypetide isolated from the Sargasso Sea
KIRFRKKGSSGGHNGLKSIIEQLQTQNFKRIRIGIGSPPLVKEKNNFNTISHVLGNISIEEKSILDKVYKRVIESLEQLNTKKEEYIINELNSFNKDQN

SEQ ID NO: 138235 - protein, 121 aa, Unknown
  Bacterial polypetide isolated from the Sargasso Sea
NKSGISINKILKTNNFDLEQIIIIHDDLDLPLGTLKLKIGGGHGGHNGLKSIISHAGKSFIRLRVGIGHPGSKVDVTNWVLGKFKTAEKDLIIKSYYEFNHVIELLSNNDIHTAQLKLHTE

SEQ ID NO: 138236 - protein, 186 aa, Unknown
  Bacterial polypetide isolated from the Sargasso Sea
MILFVGLGNPTPDSENNRHNIGFKIIDAINQKFSLSKQKPKFKGLLTTGKIGSQKVYAIKPLTFMNNSGICIRELMEYFKIDSKDVIVFHDDLDVDFGKIKTKFGGSSAGHNGIASIDKFIGKDYSRVRIGIGKPNEKDDAADHVLKDFNEEEKTEIENITENITNSLPILLDNKLDLFSSTVNNI

SEQ ID NO: 138237 - protein, 186 aa, Unknown
  Bacterial polypetide isolated from the Sargasso Sea
MFLICGLGNPGKEYINSRHNIGFNLVDKLASFYNFDPFKKDSKKEILKGIISNNSCLLMKPLNFMNLSGLPIREVVNFYKIEKNKIFIIHDDLDLELSKIKIKFGGGNGGHNGLASIDEMIGNDYYRIRVGIDHPGMKHLVSNYVLNKFNADEIKKIDNLLNNITKNFETLLNDTGLFLTKLAEEK

SEQ ID NO: 138238 - protein, 68 aa, Unknown
  Bacterial polypetide isolated from the Sargasso Sea
MLLLVGLGNPGPNNTNNRHNIGFKIIDAINAEFQLSKQKPKFKGLLTTGNIEDKKVYAIKPLTFMNNS

SEQ ID NO: 138239 - protein, 59 aa, Unknown
  Bacterial polypetide isolated from the Sargasso Sea
MLLLVGLGNPGPNYDNNRHNIGFKVIDAINQQFSLSKQKPKFKGLLTTGNIDNKKSLCN

SEQ ID NO: 138240 - protein, 187 aa, Unknown
  Bacterial polypetide isolated from the Sargasso Sea
LVGLGNPGSNYTNTRHNIGFKIIDAINLHFKLSKQKPKFKGLLTTGNIDDQKIYAIKPLTFMNNSGTAIKELIDYFKIEAKDVIVFHDDMDIDFGKIKAKFGGSSAGHNGIESIDKFIGKDYSRVRIGIGHPKQKKKVNNHVLEDFKEDEEEKIKEITENIVKQIPTLIEKKIDLFSSKVNQNLNGI

SEQ ID NO: 138241 - protein, 183 aa, Unknown
  Bacterial polypetide isolated from the Sargasso Sea
WLVVGLGNPEPKYEKNRHNIGFWVMDFSYDNLEKEKIKNKYSGLFKSIVNFNEVYFSKPFFYINESGIAVKKIADQLNIEPSKIIIVVDDMNLDLGEIRVRTKGGHGGHNGLRSIEYELGTNEYNRLRIGIGKPGSKNDHIDYVLGDFSKNEESIALKSIESAYLCILEIINNGFSKAMEKFN

SEQ ID NO: 138242 - protein, 158 aa, Unknown
  Bacterial polypetide isolated from the Sargasso Sea
MLLLVGLGNPTPDSENNRHNIGFKIIDAINKKFGLSKQKPKFKGLLTTGNVGDQKVYAIKPLTFMNNSGICIRELIEYFKIDSEDVIVFHDDLDVEFGKIKAKFSGSDAGHNGIASIDKFIGKDYSRVRIGIGKPKDKMEVSDFVLQNFDEDEVLGLE

SEQ ID NO: 138243 - protein, 97 aa, Unknown
  Bacterial polypetide isolated from the Sargasso Sea
MLLLVGLGNPTPNSQNNRHNIGFKIVDAINQKFGLSKQKPKFKGLLTTGNIGDKKIYAIKPLTFMNNSGICIRELLEYFKIDAEDVIVFHDDLDIEF

SEQ ID NO: 138244 - protein, 151 aa, Unknown
  Bacterial polypetide isolated from the Sargasso Sea
MNSNKRTYDSWIGKLYGETIVIGKSKTYMNDSGLAARALLKDYKASPNCLLVIYDDMDIAPGNIRLKKQGGPGGHNGMKSIQEYIGTNDFPRLRIGIGRPSKHQDTVSYVLSSPSLTESQSISSILEKTDEVLNSIISQGLDATMEWANRS

SEQ ID NO: 138245 - protein, 85 aa, Unknown
  Bacterial polypetide isolated from the Sargasso Sea
MLLIVGLGNPTPNSQNNRHNIGFKIVDAINQEFGLSKQKPKFKGLLTTGNIKEKKIYAIKPLTFMNNSGICIRELLEYFKIDAED

SEQ ID NO: 138246 - protein, 162 aa, Unknown
  Bacterial polypetide isolated from the Sargasso Sea
MLLIVGLGNPTPNSQNNRHNIGFKVVDAINQKFGLSKQKPKFKGLLTTGNIGNKKIYVIKPLTFMNNSGICIRELLEYFKIDAEDVIVFHDDLDVEFGKIKAKFGGSSAGHNGIASIDKFIGKEYSRVRIGIGKPQNKISVSDYVLNDFSDDEQEHLEKITQ

SEQ ID NO: 138247 - protein, 105 aa, Unknown
  Bacterial polypetide isolated from the Sargasso Sea
MLLLVGLGNPGSSYTNTRHNIGFKIIDAINAHFKLSKQKPKFKGLLTTGNIDEKKIYAIKPLTFMNNSGTAIKELIDYFKIDAKDVFVFHDDMDIDFGKIKAKFG

SEQ ID NO: 138248 - protein, 190 aa, Unknown
  Bacterial polypetide isolated from the Sargasso Sea
MLLLVGLGNPGSDYTNTRHNIGFKIIDAINIHFKLSKQKPKFKGLLTTGNIEEKKIYAIKPLTFMNNSGTAIKELIDYFKIDAKDVIVFHDDMDIDFGKIKAKFGGSSAGHNGIESIDKFIGKEYSRVRIGIGHPKQKKKVNNHVLEDFREDEEEKIKEITENIVKQIPTLIDKKMDLFSSKVNQNLNGI

SEQ ID NO: 138249 - protein, 167 aa, Unknown
  Bacterial polypetide isolated from the Sargasso Sea
MILFVGLGNPTPDSQDNRHNIGFKIIDAINKKFTLSKQKPKFKGLLTTGDIENKKIYAIKPLTFMNNSGICIRELIEYFKIDAEDVIVFHDDLDVDIGKIKTKFGGSSAGHNGIESIDKFIGKDYSRVRIGIGKPGPKMSTSDYVLNNFNEDEKKELDKIVSNIINS

SEQ ID NO: 138250 - protein, 98 aa, Unknown
  Bacterial polypetide isolated from the Sargasso Sea
MLLLVGLGNPGSNYTNTRHNIGFKIIDAINVHFKLSKQKPKFKGLLTTGNIESKKIYAIKPLTFMNNSGTAIKELIDYFKIDAKDVIVFHDDMDIDFG

SEQ ID NO: 138251 - protein, 175 aa, Unknown
  Bacterial polypetide isolated from the Sargasso Sea
MLLLVGLGNPGSNYTNTRHNIGFKIIDAINLHFKLSKQKPKFKGLLTTGNIDSKKIYAIKPLTFMNNSGTAIKELIDYFKIDAKDVFVFHDDLDIDFGKIKAKFGGSSAGHNGIESIDKFIGTDYSRVRVGIGHPKTKKKVSNHVLEDFKEDEEEKIKEITENIVKLIPTLIEKK

SEQ ID NO: 138252 - protein, 160 aa, Unknown
  Bacterial polypetide isolated from the Sargasso Sea
MYLFVGLGNPTPNSQDNRHNIGFKVIDAINQKFNLSKQKPKFKGLLTTGNIESKKVYAIKPLTFMNNSGICIRELIEYFKMEAQDVFVFHDDLDIDFGKIKAKFGGSSAGHNGIESIDKFIGKDYSRVRIGIGKPENKMSVSDFVLDNFNNEEKVELETI

SEQ ID NO: 138253 - protein, 90 aa, Unknown
  Bacterial polypetide isolated from the Sargasso Sea
MLLLVGLGNPGPNNTNNRHNIGWKIIDAINSEFSLSKQKPKFKGLLTTGNIQNKKVYAIKPLTFMNNSGVCIKELIDYFKIDVKNGNSFS

SEQ ID NO: 138254 - protein, 69 aa, Unknown
  Bacterial polypetide isolated from the Sargasso Sea
MKYLIVGLGNPGVKYKNTRHNIGFKVLDELASSSNVFFNTDRLGDIASFKFKGRSIYLLKPKYFYEFER

SEQ ID NO: 138255 - protein, 114 aa, Unknown
  Bacterial polypetide isolated from the Sargasso Sea
MFLICGLGNPGKEYIDTRHNIGFALIDKLVSFYNFVSYKKDSKKEIFKGVINNNSCFLLKPLNFMNLSGQPIREVMNFYKIEKNKLFIIHDDLDLELGKVKVKVGGGSGGHNGL

SEQ ID NO: 138256 - protein, 186 aa, Unknown
  Bacterial polypetide isolated from the Sargasso Sea
MLLLVGLGNPTPDSENNRHNIGFKIIDAINKKFGLSKQKPKFKGLLTTGNVGDQKVYAIKPLTFMNNSGICIRELIEYFKIDAEDVIVFHDDIDVEFGKIKSKLGGSDAGHNGIASIDKFIGKDYSRVRIGIGKPKDKMEVSDFVLQNFDEDEMLGLERIINNITDSISILIDKKLDLFSSTVNNK

SEQ ID NO: 138257 - protein, 191 aa, Unknown
  Bacterial polypetide isolated from the Sargasso Sea
TPRTEYEGTRHNAGAFFVRLLAKRHGLTFTADRNALGESARGVIAGHDLRLLIPETFMNESGRSVAAMSRYYRIEPDAILIAHDELDIPAGESRFKRDGGHGGHNGLRHIIPALGGHRNFWRLRIGIGHPGSAKEVSAWVLSKASAEDQTSIEASTEAAISVLPMLLDGEDVKAMTALHSESYAATPSQED

SEQ ID NO: 138258 - protein, 190 aa, Unknown
  Bacterial polypetide isolated from the Sargasso Sea
MLLLVGLGNPGPNNSHNRHNIGFKIIDAINEQFSLSKQKPKFKGLLTTGNIENKKVYAIKPLTFMNNSGVCIKELIEYFKINAKDVIVFHDDMDIDLGKVKAKFGGTSAGHNGIESIDKSIGKDYSRVRVGIGHPKQKGKVNNHVLEDFNENEEERIKDVTDNIVKLIPTLINKEMDLFSSKVNQNLNGI

SEQ ID NO: 138259 - protein, 186 aa, Unknown
  Bacterial polypetide isolated from the Sargasso Sea
MLLLVGLGNPTPNSQNNRHNIGFKIVDAINIKFGLSKQKPKFKGLLTTGNIGEKKIYAIKPLTFMNNSGICIRELLEYFKITAENVIVFHDDLDVELGKIKAKFGGSSAGHNGIASIDKFIGKDYSRVRIGIGKPDSKISISDYVLNDFNEEENEHLEKITNNIIESISILIDKKLDLFSSTVNNN

SEQ ID NO: 138260 - protein, 97 aa, Unknown
  Bacterial polypetide isolated from the Sargasso Sea
MLLLVGLGNPGPNNTNNRHNIGFKIIDAINQQFSLSKQKPKFKGLLTTGNIENKKVYAIKPLTFMNNSGVCIKELIEYFKIDAKNVIVFHDDLDIDL

SEQ ID NO: 138261 - protein, 71 aa, Unknown
  Bacterial polypetide isolated from the Sargasso Sea
MLLFVGLGNPTPNSENNRHNIGFKIIDAINEKYGLSKQKPKFKGLLTTGNINNKKIYAIKPLTFMNNSGIC

SEQ ID NO: 138262 - protein, 189 aa, Unknown
  Bacterial polypetide isolated from the Sargasso Sea
MLLLVGLGNPGSNYTNTRHNIGFKIIDAINAHFKLSKQKPKFKGLLTTGNIDEKKIYAIKPLTFMNNSGTAIKELIDYFKIDAKDVIVFHDDMDIDFGKIKAKFGGSSAGHNGIESIDKFIGKDYSRVRIGIGHPKKKRKVNNHVLEDFKEDEEEKINEISDNIVKQLPTLIEKKIDLFSSKVNQDLNG

SEQ ID NO: 138263 - protein, 186 aa, Unknown
  Bacterial polypetide isolated from the Sargasso Sea
MLLLVGLGNPTPNSQNNRHNIGFKIVDAINLKFGLSKQKPKFKGLLTTGNIGDKKIYAIKPLTFMNNSGICIRELLEYFKINAENVIVFHDDLDIEFGKIKAKFGGSSAGHNGIASIDKFIGKEYSRVRIGIGKPESKISVSDYVLNDFDEDEQTHLESITNNIIESLNILIDKKLDLFSSTVNNN

SEQ ID NO: 138264 - protein, 199 aa, Unknown
  Bacterial polypetide isolated from the Sargasso Sea
MSHIKLLVGLGNPELQYGLTRHNAGFWLLNSLAEQKNLVWKTDSKFKAELTNFSSNHLGIEKFWLMKPSLYMNESGISVSSFCSFYKLKVDEVLIVHDELDLKPGVLRIKKGGSNAGHRGIQDIQQRLGADDFWRLRLGIGHPRTIESPIKNVSDFVLSKPSDVDKLNIHRAINSCLNNLCDLLDCNIDNIQNDLSKGR

SEQ ID NO: 138265 - protein, 176 aa, Unknown
  Bacterial polypetide isolated from the Sargasso Sea
MGNKYNGTRHNIGKDWVKNVAIDTDLNLQVKKKIESTVGLSGNEKILWGYPNQYVNESGISINKILKTNNFDLKQIIIIHDDLDLPLGTLKLKIGGGHGGHNGLKSIISYAGKSFIRLRVGIGHPGSKVDVTNWVLGKFKTAEKDLVIKSYYEFNHIIELLSNNDIHTAQLKLHTE

SEQ ID NO: 138266 - protein, 123 aa, Unknown
  Bacterial polypetide isolated from the Sargasso Sea
MLLLVGLGNPGSDYTNTRHNIGFKIIDAINSHFKLSKQKPKFKGLLTTGNIDEKKIYAIKPLTFMNNSGTAIKELIDYFKIDAKDVIVFHDDMDIDFGKVKAKFGGTSAGHNGIESIDKFIGK

SEQ ID NO: 138267 - protein, 158 aa, Unknown
  Bacterial polypetide isolated from the Sargasso Sea
MIGLGNPELKHRYNRHNIGFLIVDKIAQEFQFPPFRNRFKGLLSENLMNGSNIKLLKPSTYMNNSGESIVQAMRFFKLGPSQVFVFYDDLDLSPGKCRIRLGGGTGGHNGLRSIEQHIGPDYWRVRIGIGHPGRKELVLAHVLNDFSEQEKNGWVEKI

SEQ ID NO: 138268 - protein, 185 aa, Unknown
  Bacterial polypetide isolated from the Sargasso Sea
MFLICGLGNPGVKYTNTRHNIGFKLADKLISYFNFNKVKEDKTKKLYSGEINNCKILILKPLNFMNLSGRPLLETVNFYKIKKNNIFVIHDDLDLELAKIKIKNGGGNGGHNGLASIDEYLGENYNRIRIGIGHPGDKDLVSTYVLNNFLEEEKEILEKKLTIMTNNFDLALSNIPLFLTKISEI

SEQ ID NO: 138269 - protein, 186 aa, Unknown
  Bacterial polypetide isolated from the Sargasso Sea
MLLFVGLGNPTPDSQNNRHNIGFKIIDAINQKFGLSKQKPKFKGLLTTGNIGDKKVYAIKPLTFMNNSGICIRELIEYFKMDAADVIVFHDDLDIDIGKIKAKFGGSSAGHNGIESIDKFIGKDYSRVRIGIGKPESKISISDYVLNDFNDEEKEKLENITENIITSLNILLDKKLELFSSTVNNK

SEQ ID NO: 138270 - protein, 164 aa, Unknown
  Bacterial polypetide isolated from the Sargasso Sea
MAAISLVCGLGNPGAQYEATRHNAGFWFLDALQRVVPLPWRPETRFLGDLADTRVEQQRVRFLKPATFMNECGGAVASVCGYFDIPAEAVLVVHDDLDLPPGTVRVKQGGGHGGHNGLRDIFSKLGSREFVRLRIGIGHPGNSDDVSDLVLRKPSAEDKTAILD

SEQ ID NO: 138271 - protein, 199 aa, Unknown
  Bacterial polypetide isolated from the Sargasso Sea
MEPLLIAGLGNPGDEYDGTRHNAGTDFIDLLCEKYSVNLKKQKKIFAHSAEVVFDSYKLILLKPSLYMNESGLSITKAKQFYNLNCSQMLIIHDELDLPNATIRLKESGGHGGHNGIRSIIDHLNGDNSFKRLRVGIGHPGKGKDIIAYVLKKAPPEQRKELFNSMNEFLEIGEKIMIDGWQKTVMYYHSGNEEELNES

SEQ ID NO: 138272 - protein, 55 aa, Unknown
  Bacterial polypetide isolated from the Sargasso Sea
MADVLRLVVGLGNPGPKYEGTRHNIGFMALERMGSREGFSFRQQTKLHGLAAEQG

SEQ ID NO: 138273 - protein, 111 aa, Unknown
  Bacterial polypetide isolated from the Sargasso Sea
MLLFVGLGNPTPDSENNRHNIGFKIIDAINKKFSLSKQKPKFKGLLTTGNINSKKVYAIKPLTFMNNSGICIRELIEYFKIDAENVIVFHDDLDIGFGKIKAKLADQVLGT

SEQ ID NO: 138274 - protein, 190 aa, Unknown
  Bacterial polypetide isolated from the Sargasso Sea
MLLLVGLGNPGSNSVNNRHNIGFKIIDAINLHFKLSKQKPKFKGLLTTGNIESKKIYAIKPLTFMNNSGTAIKELIDYFKIDAKNVFVFHDDLDIDFGKIKVKFGGSSAGHNGIESIDKFIGKDYSRVRIGIGHPKEKKKVNNHVLEDFKEDEEEKINEITENIVKLIPTLIDKKMDLFSSKVNQNLNGI

SEQ ID NO: 138275 - protein, 175 aa, Unknown
  Bacterial polypetide isolated from the Sargasso Sea
MEPLLILGLGNPGKDYALTRHNAGADYVDLLCSKYSLTLKKERQIHGQFAELINENQKLIFVTPSTFMNESGLCVSKTKKFFNLRTEQILIAHDELDLPNSEIKLKESGGHGGHNGLRNIIDHLKGDSSFKRLRIGIGKPDKDKDIISYVLKKASVEEREKLMSNLINYLDLGEK

SEQ ID NO: 138276 - protein, 186 aa, Unknown
  Bacterial polypetide isolated from the Sargasso Sea
MLLLVGLGNPTPDSENNRHNIGFKIIDAINKKFGLSKQKPKFKGLLTTGNVGDQKIYAIKPLTFMNNSGICIRELIEYFKIDAEDVIVFHDDLDVEFGKIKAKFGGSHAGHNGIASIDKFIGKDYSRVRIGIGKPKDKMEVSDFVLQNFDEDEMLGLEKITNNITDSISILIDKKLNLFSSTVNNK

SEQ ID NO: 138277 - protein, 142 aa, Unknown
  Bacterial polypetide isolated from the Sargasso Sea
ESTVGLSGNEKILWGYPNQYVNESGISINKILKTNNFDLEQIIIIHDDLDLPLGTLKLKIGGGHGGHNGLKSIISHAGKSFIRLRVGIGHPGSKVDVTNWVLGKFKTAEKDLIIKSYYEFNHIIELLSNNDIHKAQLKLHTE

SEQ ID NO: 138278 - protein, 190 aa, Unknown
  Bacterial polypetide isolated from the Sargasso Sea
MLLLVGLGNPGSNYTNTRHNIGFKIIDAINAHFKLSKQKPKFKGLLTTGNIDEKKIYAIKPLTFMNNSGTAIKELIDYFKIDAKDVIVFHDDMDIDFGKVKAKFGGTSAGHNGIESIDKFIGKEYSRVRVGIGHPKQKKKVNNHVLEDFKDDEEEKINEITENIVKLIPTLIDKKIDLFSSKINQNLNGI

SEQ ID NO: 138279 - protein, 90 aa, Unknown
  Bacterial polypetide isolated from the Sargasso Sea
MLLFVGLGNPTPDSQNNRHNIGFKIIDAINQKFSLSKQKPKFKGLLTTGNIGDKKVYAIKPLTFMNNSGICIRELLEYFKIDPENVIVFH

SEQ ID NO: 138280 - protein, 190 aa, Unknown
  Bacterial polypetide isolated from the Sargasso Sea
MLLLVGLGNPGSNYTNTRHNIGFKIIDAINNHFKLSKQKPKFKGLLTTGNIDEKKIYAIKPLTFMNNSGTAIKELIDYFKIDAKDVIVFHDDMDIDFGKIKAKFGGTSAGHNGIESIDKFIGKDYSRVRIGIGHPKQKKKVNNHVLEDFKEDEEEKIKEITENIVKQIPTLIEKKIDLFSSKVNQNLNGI

SEQ ID NO: 138281 - protein, 186 aa, Unknown
  Bacterial polypetide isolated from the Sargasso Sea
MLLFVGLGNPSPNSENNRHNIGFKIIDAINEKYGLSKQKPKFKGLLTTGNINNKKIYAIKPLTFMNNSGICIRELIEYFKIDAEDVIVFHDDLDVDFGKVKAKFGGTSAGHNGIESIDKFIGKDYSRVRIGIGKPATKTDVSEYVLKNFDEEEIKELKKITSNITEYLSILVDKKLDLFSSTVNNK

SEQ ID NO: 138282 - protein, 190 aa, Unknown
  Bacterial polypetide isolated from the Sargasso Sea
MLLLVGLGNPGPNSLNNRHNIGFKIIDAINNHFKLSKQKPKFKGLLTTGNIDSKKIYAIKPLTFMNNSGTAVKELIDYFKIDAKDVIVFHDDLDIDFGKIKAKFGGSSAGHNGIESIDKFIGKDYSRVRIGIGHPKEKAKVNKHVLEDFKEDEEDKIKEITENIVKSIPTLINKKIDLFSSQVNQNLNGI

SEQ ID NO: 138283 - protein, 185 aa, Unknown
  Bacterial polypetide isolated from the Sargasso Sea
MIALIGLGNPGEKHSLNRHNIGFIIIDELIDNNEIIKSEKKFNGDLTTLSIGRKKIVTFKSCDYMNECGGSIAKLINFYKLGLDSVYVFHDDLDISLGKVKIKNGGSPAGHNGLKSIDSCIGKNYNRVRVGIDHPGSRELVNRHVLGNFKKKELEIVDQLKISISSHLKLLISENKSQFLNNIKL

SEQ ID NO: 138284 - protein, 89 aa, Unknown
  Bacterial polypetide isolated from the Sargasso Sea
MLLLVGLGNPGPNNTNNRHNIGFKIIDAINSEFSLSKQKPKFKGLLTTGNIQDKKVYAIKPLTFMNNSGVCIKELIDYFKIDAKNVIVF

SEQ ID NO: 138285 - protein, 190 aa, Unknown
  Bacterial polypetide isolated from the Sargasso Sea
MLLLVGLGNPGSDYTNTRHNIGFKIIDAINSHFKLSKQKPKFKGLLTTGNIDEKKIYAIKPLTFMNNSGTAIKELIDYFKIDAKDVIVFHDDMDIDFGKIKAKFGGSSAGHNGIESIDKFIGKDYSRVRIGIGHPKQKKKVNNHVLEDFKEDEEERIKEITENIVQQIPTLIDKKMDLFSSKVNQNLNGI

SEQ ID NO: 138286 - protein, 135 aa, Unknown
  Bacterial polypetide isolated from the Sargasso Sea
MQLIAGLGNPGEKYKDNPHNIGFRTLDQLMKALDLEGFQRRFNSEFQRTLENGQVTLMLKPETYMNRSGEAIAECARYFKIPSEKILVISDDLDLPAGKARLRVSGGHGGHNGLRSVIQCLGTDKFLRARIGIGR

SEQ ID NO: 138287 - protein, 136 aa, Unknown
  Bacterial polypetide isolated from the Sargasso Sea
MFLLVGLGNPGPNNTNNRHNIGFKIIDAINQQFSLSKQKPKFKGLLTTGSIDNKKVYAIKPLTFMNNSGVCIKELIEYFKIDAKNVIVFHDDIDIDLGKIKAKFGGSSAGHNGIESIDKFIGKDYSRVRVGIGKPD

SEQ ID NO: 138288 - protein, 70 aa, Unknown
  Bacterial polypetide isolated from the Sargasso Sea
MPDQPIKLIVGLGNPGPQHEKNRHNAGVIFLHHLCKAYGNNLRVEAKFFGEFSSIVIDGADIKLLFPDNF

SEQ ID NO: 138289 - protein, 186 aa, Unknown
  Bacterial polypetide isolated from the Sargasso Sea
MILLVGLGNPTPDSNDNRHNIGFKIIDAINQKFGLSKQKPKFKGLLTTGNISNKKVYAIKPLTFMNNSGICIRELIEYFKIDSENVIVFHDDLDVDFTKIKTKFGGSSAGHNGIASIDKFIGKDYSRVRIGIGKPEKRIEISDFVLTNFSEEEKTELEKVIKNIIDSMPILIDKKLDLFSSTVNNK

SEQ ID NO: 138290 - protein, 190 aa, Unknown
  Bacterial polypetide isolated from the Sargasso Sea
MLLLVGLGNPGSNYTNTRHNIGFKIIDAINNHFKLSKQKPKFKGLLTTGNIDSKKIYAIKPLTFMNNSGTAIKELIDYFKIDAKNVFVFHDDMDIDFGKIKVKFGGSSAGHNGIESIDKFIGKDYSRVRVGIGHPKTKKKVNNHVLEDFKDDEEEKIKEITESIVKLIPTLIDKKIDLFSSKVNQNLNGI

SEQ ID NO: 138291 - protein, 134 aa, Unknown
  Bacterial polypetide isolated from the Sargasso Sea
MLLLVGLGNPGPNYDNNRHNIGFKVIDAINQQLSLSKQKPKFKGLLTTGNIDNKKVYAIKPLTFMNNSGTCIKELIEYFKIDAKNVFVFHDDLDIDLGKVKAKFGGSSAGHHGIESIDKSIGKDYSRVRIGIGH

SEQ ID NO: 138292 - protein, 151 aa, Unknown
  Bacterial polypetide isolated from the Sargasso Sea
KKDKQKEIYKGKIKNINIYIIKPLTFMNLSGIPIGNFLNYYKIPIKNLLVVHDDIDLSLGKVKIKIGGGNGGHNGLHSVDKMIGKMYYRLRIGIGRPKSKDLVNKYVLKKFKKDEKKIIETILDFSLDSIDLLLENKELFLTKIYTFIQKI

SEQ ID NO: 138293 - protein, 190 aa, Unknown
  Bacterial polypetide isolated from the Sargasso Sea
MLLLVGLGNPGPNYDNNRHNIGFKVIDAINQQFSLSKQKPKFKGLLTTGNIDNKKVYAIKPLTFMNNSGTCIRELIEYFKIDAKDVFVFHDDLDIDLGKVKAKFGGSSAGHHGIESIDKSIGKEYSRVRIGIGHPKNGKKVDNHVLDDFNENEEERIKDITDNIVKLIPTLIEKKMDTFSSKVNQNLDGI

SEQ ID NO: 138294 - protein, 158 aa, Unknown
  Bacterial polypetide isolated from the Sargasso Sea
AGFLILDLLAKELNVAWSKNKHGAFEAKAELWGQKVLFLKPQDFMNLSGKAVAKFVHFHKLEEESIAILHDDVDVPAAKVKMRKGGSPGGHNGILSIQKELGFSGFYRIKLGVGKAPPSSFLSTSNWVLGKFTQEEIDILSEEMYLAVKERLRSLWSS

SEQ ID NO: 138295 - protein, 186 aa, Unknown
  Bacterial polypetide isolated from the Sargasso Sea
MLLFVGLGNPTPDSQNNRHNIGFKVIDAINQKFGLSKQKPKFKGLLTTGNIGDKKVYAIKPLTFMNNSGICIRELIEYFKMDAADVIVFHDDLDIDIGKIKAKFGGSSAGHNGIESIDKFIGKDYSRVRIGIGKPESRISISDYVLNDFNDEEKEKLENITENIITSLNILLDKKLELFSSTVNNK

SEQ ID NO: 138296 - protein, 201 aa, Unknown
  Bacterial polypetide isolated from the Sargasso Sea
MQLIAGLGNPGEKYQDNPHNIGFRTLDQLMKALDLEGFHRRFNSEFQRTLENGQVTLMLKPETYMNCSGEAIAECARYFKIPSEKILVISDDLDLPAGKARLRVSGGHGGHNGLRSVIQCLGTDQFLRARIGIGRPDYSSSGKEASVSQYVLGKMEETKAELCLQAMEKVVDMLVRFVRQSRFQSTSISIPTPALPATGQG

SEQ ID NO: 138297 - protein, 166 aa, Unknown
  Bacterial polypetide isolated from the Sargasso Sea
MLLLVGLGNPGSNYTNTRHNIGFKIIDAINAHFKLSKQKPKFKGLLTTGNIDEKKIYAIKPLTFMNNSGTAIKELIDYFKIEAKDVIVFHDDMDIDFGKIKAKFGGTSAGHNGIESIDKFIGKDYSRVRIGIGHPKQKKKVNNHVLEDFKEDEEEKIKEITENIVK

SEQ ID NO: 138298 - protein, 186 aa, Unknown
  Bacterial polypetide isolated from the Sargasso Sea
MIALVGLGNPGKKYKYNRHNIGYLVLDKIVKSLDIDNQKTKFNGKFYKSSIGQKNIILFKSNDYMNECGYSISQIISFFKVQNEDLYIFHDDLDLEVGKIRIKNGGSSAGHNGLKSIDTYIGKNYNRVRIGIGHPGEKKLVEKYVLSNFKKEEWSNLSLINQNISENIDLLVNNKHSSFLNKIKLS

SEQ ID NO: 138299 - protein, 186 aa, Unknown
  Bacterial polypetide isolated from the Sargasso Sea
MLLFVGLGNPTPESENNRHNIGFKIIDAINQKFGLSKQKPKFKGLLTTGNIGDKKVYAIKPLTFMNNSGICIRELLEYFKIESEDVIVFHDDLDINVGKVKAKFGGSTAGHNGIESIDKFIGKDYSRVRIGIGRPDAKISVSDYVLNDFNEEEEEELEKITSNITDSIAILIDKKLELFSSTVNNK

SEQ ID NO: 138300 - protein, 120 aa, Unknown
  Bacterial polypetide isolated from the Sargasso Sea
MLLLVGLGNPTPDSENNRHNIGFKIIDAINKKFGLSKQKPKFKGLLTTGNVGDQKVYAIKPLTFMNNSGICIRELIEYFKIDAEDVIVFHDDLDIEFGKIKAKFGGSDAGHNGIASIDKF

SEQ ID NO: 138301 - protein, 199 aa, Unknown
  Bacterial polypetide isolated from the Sargasso Sea
MNSTNNPPLLIVGLGNPDPKYLKTRHNIGFWLLDLLAEKYNLSFNDNLKKGYLDSTYQDDNFTIKILKPMTFINDSGSPLVKFIKNTNISPKDIIVAYDDLDLSPGKVRLKFSGGSGGHNGIKDITEKIGTKDFWRLKIGIGKPMHKDDVISYVLGKPSPEEKASINSGINKILANSNDIISGNYTNFMNNINGGGNGI

SEQ ID NO: 138302 - protein, 49 aa, Unknown
  Bacterial polypetide isolated from the Sargasso Sea
MIVGLGNPGPKYYLTRHNAGAELVRTLAATLHSPLKPESKFFGETARVN

SEQ ID NO: 138303 - protein, 153 aa, Unknown
  Bacterial polypetide isolated from the Sargasso Sea
MNKYLILGIGNIGSEYDDTRHNIGFQIVDELAKCLETKFDSLKLAQRAEGSFKGKKIVIIKPNNYVNNSGRSLVYWQKKEKVSLENILVVCDDLNLFFGNIKIKPNGTSGGHNGLKDIEDNLGTSNYARLRVGISNNNKISKSDYVLGKWNSF

SEQ ID NO: 138304 - protein, 111 aa, Unknown
  Bacterial polypetide isolated from the Sargasso Sea
MLLLVGLGNPGPNYDNTRHNIGFKVIDAINQQFSLSKQKPKFKGLLTTGNIDNKKVYAIKPLTFMNNSGTCIKELIEYFKIDAKDVFVFHDDLDINLGKVKAKFGGSSAGH

SEQ ID NO: 138305 - protein, 155 aa, Unknown
  Bacterial polypetide isolated from the Sargasso Sea
MFLICGLGNPGENFINTRHNVGFKLIDKLSSFYSVLPFKNDSKKVVLKGKINHHSCMLMKPLNFMNLSGKPIQEIVNFYKIEKEKIYIIHDDLDLELGKVKLKFGGGNGGHNGLCNIDKMIGNSYNRIRIGIDHPGTKNLVSNYVFNKFTNDEMK

SEQ ID NO: 138306 - protein, 135 aa, Unknown
  Bacterial polypetide isolated from the Sargasso Sea
MLLVVGLGNPGAKYANNRHNIGFMAVDDIVRRHSFSRSRAKFQSEIAEGNIAGEKILAMKPSTYMNESGRSVQAAMVFYKLPPEDVIVIHDEIDLAGGKVRVKRGGGHAGHNGLRSIHARIGANYARVRLGVGHP

SEQ ID NO: 138307 - protein, 186 aa, Unknown
  Bacterial polypetide isolated from the Sargasso Sea
MLLFVGLGNPTPDSENNRHNIGFKIIDAINKKFGLSKQKPKFKGLLTTGNIKGKKVYAIKPLTFMNNSGICIRELIEYFKIEAENVIVFHDDLDIDFGKIKAKFGGSSAGHNGIESIDKFIGKDYSRVRIGIGKPKKNSDVLDHVLKDFDEEEIKDLKKITSNITESLSILLDKKLDLFSSTINNK

SEQ ID NO: 138308 - protein, 72 aa, Unknown
  Bacterial polypetide isolated from the Sargasso Sea
MTHSPLKLIVGLGNPDKNLLKTRHNVGFWFVDYYADLISKKFKIINKYESEILESGVHENINIIKPVNYINN

SEQ ID NO: 138309 - protein, 86 aa, Unknown
  Bacterial polypetide isolated from the Sargasso Sea
MLLLVGLGNPGPSSTNNRHNIGFRIIDAINKHFKLSKQKPKFKGLLTTGNIESKKVYAIKPLTFMNNSGTAVKEIIDYFKIDSKDV

SEQ ID NO: 138310 - protein, 203 aa, Unknown
  Bacterial polypetide isolated from the Sargasso Sea
MKKKPKKITQKKVNKVYKLCIVGLGNPGNKYNGTRHNVGKDWLIDISQQYFKEFQNKPKYEAEFGESHNAEILWITPSNFVNESGRTISKILRSHNLDMNMFLIIHDDLDLEPGELKIKEGGGHGGHNGLRDIIKSTGKSDFMRLRVGIGHPGMKNEVTNWVLNKFSPNEKKSIDNAYSKFVDVFELIINNQLQKVQKILHTK

SEQ ID NO: 138311 - protein, 186 aa, Unknown
  Bacterial polypetide isolated from the Sargasso Sea
MLLLVGLGNPTPDSENNRHNIGFKIIDAINKKFGLSKQKPKFKGLLTTGNVGEQKVYAIKPLTFMNNSGICIRELIEYFKIDAEDVIVFHDDLDVEFGKIKAKFSGSDAGHNGIASIDKFIGKDYSRVRIGIGKPKDKMEVSDFVLQNFDEDEMLELEKITNNITDSISILIDKKLDLFSSTVNNK

SEQ ID NO: 138312 - protein, 190 aa, Unknown
  Bacterial polypetide isolated from the Sargasso Sea
MLLLVGLGNPGPNYDNNRHNIGFKVIDAINQQFSLSKQKPKFKGLLTTGNIDNKKVYAIKPLTFMNNSGTCIKELIDYFKIDAKNVFVFHDDLDIDLGKVKAKFGGSSAGHHGIESIDKSIGKDYSRVRIGIGHPKNGKKVDTHVLEDFNENEEDRIKDITESIVKLIPTLIEKKIDIFSSKVNENLDGI

SEQ ID NO: 138313 - protein, 186 aa, Unknown
  Bacterial polypetide isolated from the Sargasso Sea
MILLVGLGNPTPDSNDNRHNIGFKIIDAINQKFGLSKQKPKFKGLLTTGNISNKKVYAIKPLTFMNNSGICIRELIEYFKIDAEDVIVFHDDLDVDFKKIKTKFGGSSAGHNGIASIDKFIGKDYSRVRIGIGKPEKKIEISDFVLTNFSEEEKTELEKVIKNIIDSMPILIDKKLDLFSSTVNNK

SEQ ID NO: 138314 - protein, 197 aa, Unknown
  Bacterial polypetide isolated from the Sargasso Sea
MFLHVGLGNPGFEHKLNRHNIGFMAIDHLLNFYKINDIYKNKFNGHYYKLSQKNRSIFFLKPQTYMNQSGSCVSSLIKFFSIKPSSVIVWHDEIDLDKGKIKAKFGGGHGGHNGIRHIIKHIGENFLRVRIGVGRPENNIDPSKWVLSSFHKNDFDGWVNDLLSIMASEVELLHLNNSIDFMNKVSILRNKQNIEIK

SEQ ID NO: 138315 - protein, 186 aa, Unknown
  Bacterial polypetide isolated from the Sargasso Sea
MLLLVGLGNPTPNSQNNRHNIGFKIVDAINKKFSLSKQKPKFKGLLTTGNIGEKKIYAIKPLTFMNNSGICIRELLEYFKIDAENVIVFHDDLDVEFGKVKAKFGGSSAGHNGIASIDKFIGKEYSRVRIGIGKPENKISVSDYVLNDFNEDEQIHLDLITNNIINSLNILIDKKLDLFSSTVNNN

SEQ ID NO: 138316 - protein, 186 aa, Unknown
  Bacterial polypetide isolated from the Sargasso Sea
MLLFVGLGNPTPNSENNRHNIGFKIIDSINKQFGLSKQKPKFKGLLTTGSIENTKVYAIKPLTFMNNSGICIRELLEYFKIEPDNVVVFHDDLDIEFGKIKAKKGGSDAGHNGIASIDKFIGKDYSRVRIGIGKPDNKISVSDYVLDNFSEEEQKKIEEITDNITECLSMLIDKKLDLFSSSVNNK

SEQ ID NO: 138317 - protein, 186 aa, Unknown
  Bacterial polypetide isolated from the Sargasso Sea
MLLLVGLGNPTPNSQNNRHNIGFKIVDAINQKFGLSKQKPKFKGLLTTGNIGDKKIYAIKPLTFMNNSGICIRELLEYFKIDAEDVIVFHDDLDIEFGKIKAKFGGSSAGHNGIASIDKFIGKEYSRVRIGIGKPENKISVSDHVLNDFNEDEQVHLDSITSNIIESLTILIDKKLDLFSSTVNNN

SEQ ID NO: 138318 - protein, 186 aa, Unknown
  Bacterial polypetide isolated from the Sargasso Sea
MLLLVGLGNPTPNSQNNRHNIGFKIVDAINQKFGLSKQKPKFKGLLTTGNIGDKKIYAIKPLTFMNNSGICIRELLEYFKIDAEDVIVFHDDLDIEFGKIKAKFGGSSAGHNGIASIDKFIGKEYSRVRIGIGKPENKISVSDYVLNDFNEDEQVHLDSITSNIIESLTILIDKKLDLFSSTVNNN

SEQ ID NO: 138319 - protein, 186 aa, Unknown
  Bacterial polypetide isolated from the Sargasso Sea
MLLLVGLGNPTPNSHNNRHNIGFKVLDAINQKFGLSKQKPKFKGLLTTGNIGEKKIYAIKPLTFMNNSGICIRELLEYFKIDAEDVIVFHDDLDVEFGKIKAKFGGSNAGHNGVASIDKFIGKDYSRVRIGIGKPENKMSVSDFVLNDFSDDEQEHLEKITHNIIDSIAILIDKKLDLFSSKVNNN

SEQ ID NO: 138320 - protein, 190 aa, Unknown
  Bacterial polypetide isolated from the Sargasso Sea
MLLLVGLGNPGPNYDNNRHNIGFKVIDAINHQFSLSKQKPKFKGLLTTGNIDNKKVYAIKPLTFMNNSGTCIKELIEYFKIDAKNVFVFHDDLDIDLGKVKAKFGGSSAGHHGIESIDKSIGKDYSRVRIGIGHPKNGKKVDAHVLEDFNENEEDRIKDITENIVKLIPTLIEKKIDIFSSKVNENLDGI

SEQ ID NO: 138321 - protein, 129 aa, Unknown
  Bacterial polypetide isolated from the Sargasso Sea
MFLICGLGNPGIKYANTRHNIGFKLADKVISHFDIPKIKEDNSKQLYSGQISGLKIFVLKPLTFMNLSGKPLLEIVNFYKIIKSNIFVIHDDLDLELAKIKIKKGGSNGGHNGLASIDGYLGENYNRIR

SEQ ID NO: 138322 - protein, 186 aa, Unknown
  Bacterial polypetide isolated from the Sargasso Sea
MLLLVGLGNPTPNSHNNRHNIGFKVVDAINQKFGLSKQKPKFKGLLTTGNIGEKKIYAIKPLTFMNNSGICIRELLEYFKIDAEDVIVFHDDLDVEFGKIKAKFGGSSAGHNGVASIDKFIGKDYSRVRIGIGKPENKMSVSDFVLNDFSDDEQEHLEKITHNIIDSITILIDKKLDLFSSKVNNN

SEQ ID NO: 138323 - protein, 206 aa, Unknown
  Bacterial polypetide isolated from the Sargasso Sea
MKRNPQRKVENKKNFTFIGLWNPQKKYEKTRHNIGADCLVKLSEKNNISLKTHKSGKFQLGSYEEDGYEIDIVIPMVSMNNSGEAVKEYIKNKNMDYENLVVLHDDIDLGFGRLRLKKGSGDGGHNGIKSINYIINATDYFRLRIGVGRPPSGIDPAEYVLSRFLSDEIEEIKFLVEDAIDIVKVFPKDKEMAIKQASERRIIDVV

SEQ ID NO: 138324 - protein, 190 aa, Unknown
  Bacterial polypetide isolated from the Sargasso Sea
MLLLVGLGNPGTNSVNNRHNIGFKIIDAVNAHFKLSKQKPKFKGLLTTGNIESKKIYAIKPLTFMNNSGTAIKELIDYFKIDAKNVFVFHDDMDIDFGKIKAKFGGSSAGHNGINSIDKFIGKDYSRIRIGIGHPKQKNKVNNHVLEDFKEDEEEKIKEIAESIVKLIPTLIEKKMDLFSSKVNQNLNGI

SEQ ID NO: 138325 - protein, 139 aa, Unknown
  Bacterial polypetide isolated from the Sargasso Sea
MLLLVGLGNPTPNSHNNRHNIGFKVVDAINQKFGLSKQKPKFKGLLTTGNIGEKKIYAIKPLTFMNNSGICIRELLEYFKIDAEDVIVFHDDLDVEFGKIKAKFGGSSAGHNGVASIDKFIGKDYSRVRIGIGKPENKM

SEQ ID NO: 138326 - protein, 186 aa, Unknown
  Bacterial polypetide isolated from the Sargasso Sea
MLLLVGLGNPTPNSHNNRHNIGFKIVDAINQKFGLSKQKPKFKGLLTTGNIGDKKIYAIKPLTFMNNSGICIRELLEYFKIDAEDVIVFHDDLDIEFGKIKAKFGGSSAGHNGIASIDKFIGKEYSRVRIGIGKPENKISVSDYVLNDFNEDEQVHLDSITSNIIESLTILIDKKLDLFSSTVNNN

SEQ ID NO: 138327 - protein, 205 aa, Unknown
  Bacterial polypetide isolated from the Sargasso Sea
MQNQQKKVENKPNFVLVGLWNPQPKYINTRHNIGADILFSYCQKKGKEFQLDSSGSFQSTKYEFEDKLVNLLIPMTSMNKSGQGLKAFLMSTGIRDYELVVIHDDIDLAFGRFRIKKASSDGGHNGIKSMDSSLGHSNYWRFKIGLGRPPSTVDPADYVLSKFNNDETEEVEFIIEDSMEIIDSFLENSENGIKKASERRIIDVI

SEQ ID NO: 138328 - protein, 83 aa, Unknown
  Bacterial polypetide isolated from the Sargasso Sea
MLLFVGLGNPTPNSENNRHNIGFKIIDAINNKFKLSKQKPKFKGLLTTGSINNKKVYAIKPLTFMNNSGICIRELMEYFKIDA

SEQ ID NO: 138329 - protein, 186 aa, Unknown
  Bacterial polypetide isolated from the Sargasso Sea
MLLFVGLGNPTPNSENNRHNIGFKIIDAINQKYGLSKQKPKFKGLLTTGTIDGKKVYAIKPLTFMNNSGICIRELIEYFKIEAENVIVFHDDLDIDFGKIKTKFGGSSAGHNGIESIDKFIGKEYSRVRIGIGHPKEDIEVSDHVLQDFNEDEKEEISSITESITESLSILIDKKLDLFSSTVNNK

SEQ ID NO: 138330 - protein, 186 aa, Unknown
  Bacterial polypetide isolated from the Sargasso Sea
MVGLGNPGEKYESTRHNIGFSFLDSYSKQIQCPILDTKFDSYYGNFSKDGNKILLLKPQTFMNESGLAVKKAKNFFKINDENIIIIYDDLDLQIGQIKIKMGGGSGGHNGINSIIENIGNNNFSRIRIGIGKPREKSMTNKYVLSKFTKEEGKIVNNINNLAEDIISAIVFQSISFAMNTFNSKIQ

SEQ ID NO: 138331 - protein, 191 aa, Unknown
  Bacterial polypetide isolated from the Sargasso Sea
MNKYLILGIGNIGSEYDDTRHNIGFEIVDQLSQNLDTKFESVKLAQRAEGSFKGRKIIIIKPNNYVNNSGRSLVYWQKKEKVSLENILVVCDDLNLFFGNIKIKPNGTSGGHNGLKDIEDNLGTSNYARLRVGISNNNKIPKSDYVLGKWSSYEISNINSLTISSIEIIFSFIQIGIEETMNLYNKKNFIK

SEQ ID NO: 138332 - protein, 186 aa, Unknown
  Bacterial polypetide isolated from the Sargasso Sea
MILFVGLGNPTPDSQDNRHNIGFKIIDAINKKFTLSKQKPKFKGLLTTGDIENKKIYAIKPLTFMNNSGICIRELIEYFKIDAEDVIVFHDDLDVDIGKIKAKFGGSSAGHNGIESIDKFIGKEYSRVRIGIGKPGPKMSTSDYVLNNFNEDEKKELDKIVNNIINSISILLDRKLDLFSSTVNNK

SEQ ID NO: 138333 - protein, 186 aa, Unknown
  Bacterial polypetide isolated from the Sargasso Sea
MILFVGLGNPTPDNENNRHNIGFKVIDAINKKFQLSKQKPKFKGLLTTGKIGEKKIYAIKPLTFMNNSGICIRELIEYFKIDAEDVFVFHDDLDIDVGKVKAKFGGSDAGHNGIASLDKFIGKEYSRIRIGIGRPNGKIAVADHVLNNFNDEEKELLELITKNILNSIQILLDRKLELFSSTVNNK

SEQ ID NO: 138334 - protein, 186 aa, Unknown
  Bacterial polypetide isolated from the Sargasso Sea
MLLFVGLGNPTPDSQNNRHNIGFKVIDAINQKFGLSKQKPKFKGLLTTGNIGDKKVYAIKPLTFMNNSGICIRELIEYFKMDAADVIVFHDDLDIDVGKIKAKFGGSSAGHNGIESIDKFIGKDYSRVRIGIGKPESKISISDYVLNDFNDEEKEKLENITENIITSLNILLDKKLELFSSTVNNK

SEQ ID NO: 138335 - protein, 188 aa, Unknown
  Bacterial polypetide isolated from the Sargasso Sea
MPEETLLLVGLGNPGEKYKNNRHNVGFMVLDYVTNQLKFGRSRTKFLGRTSMGSHENIKLISFKPQTFMNESGRAVREASNFYKINPERIFVFHDDLDLAFGDVKLKKGGSNAGHNGLASIDENIGNNYIRLRIGINHPGDKEKVTGHVLGDFSKEENEEFEKILKKIVKNFDLLIDANIKKFQSNMK

SEQ ID NO: 138336 - protein, 186 aa, Unknown
  Bacterial polypetide isolated from the Sargasso Sea
MLLLVGLGNPTPNSQNNRHNIGFKIVDAINQKFGLSKQKPKFKGLLTTGNIGDKKIYAIKPLTFMNNSGICIRELLEYFKIDAEDVIVFHDDLDIEFGKIKAKFGGSSAGHNGIASIDKFIGKDYSRVRIGIGKPENKISVSDYVLNDFNDDEQVHLDSITNNIIESLSILIDKKLDLFSSTVNNN

SEQ ID NO: 138337 - protein, 204 aa, Unknown
  Bacterial polypetide isolated from the Sargasso Sea
MNQQRKVENKPKTILVGLWNPQPKYINTRHNIGADILFSYIQKNNLKIDLDNSGQFQFGKFEIMNHEILLVIPMTSMNNSGQGLKSFLIDENIKDFNLLVIHDDIDLAFGRFRLKKGISDGGHNGIKSLDSALGTNDYWRLKIGLGRPPTSQDPADYVLSKFNNDQTEEVEFIIEDSMEIIDLFFKDIEFAIKKASERRIIDVV

SEQ ID NO: 138338 - protein, 195 aa, Unknown
  Bacterial polypetide isolated from the Sargasso Sea
MIAGLGNPGEEYTLTRHNAGADYVKLLCDKKSLALKKEKQINGSFAELTTEKYKLIFVIPSTYMNESGLSVAKSKKFFNLETDQILIAHDELDLPISEIRLKESGGHGGHNGLRNIIDHLQGDNSFKRLRIGIGKPKNNIDMISYVLKKAPKKDREELMLKLHHYLDLGERIILDGWQKTVMKYHSSEEEERNES

SEQ ID NO: 138339 - protein, 126 aa, Unknown
  Bacterial polypetide isolated from the Sargasso Sea
MKLLVGLGNPTPDSHDNRHNIGFKIIDAINLKFKLSKQKPKFKGLLTTGNISDKKVYAIKPLTFMNNSGICIRELIEYFKIDSENVIVFHDDLDVEFAKIKAKFGGFSAGHNGIESLDKFIGKDYS

SEQ ID NO: 138340 - protein, 184 aa, Unknown
  Bacterial polypetide isolated from the Sargasso Sea
MILFVGLGNPTPDSHNNRHNIGFKIIDAINQKFSLSKQKPKFKGLLTMGNIGNEKVYAIKPLTFMNNSGTCIRELIEYFKIDSSDIIVFHDDLDIEFGKIKTKFGGSDAGHNGIASLDKFIGKDYSRVRIGIGKPEKIKVNDFVLGDFNEDEKIQLDEMSKKIMSSLELLIEKKLELFSSKINN

SEQ ID NO: 138341 - protein, 131 aa, Unknown
  Bacterial polypetide isolated from the Sargasso Sea
MLLLVGLGNPTPNSQNNRHNIGFKIVDAINQKFGLSKQKPKFKGLLTTGNIGEKKIYAIKPLTFMNNSGICIRELLEYFKIDVEDVIVFHDDLDIEFGKIKAKFGGSSAGHNGIESIDKFIGKEYSRVRMA

SEQ ID NO: 138342 - protein, 190 aa, Unknown
  Bacterial polypetide isolated from the Sargasso Sea
MLLLVGLGNPGSNYTNTRHNIGFKIIDAINSHFKLSKQKPKFKGLLTTGNIESKKIYAIKPLTFMNNSGTAIKELIDYFKIDAKDVFVFHDDMDIDFGKIKAKFGGSSAGHNGIDSIDKFIGKEYSRVRIGIGHPKQKKKVNNHVLEDFKEDEEEKIKEITENIVKLIPTLIDKKMDLFSSKVNQNLNGI

SEQ ID NO: 138343 - protein, 195 aa, Unknown
  Bacterial polypetide isolated from the Sargasso Sea
MNENIRLVVGLGNPGTPYQSTRHNAGRWFVDLFSNDLCASAPLESKFGYYKACLSPQGDKVYFFESKKYMNECGLSIAGFAKYYKIAAHQILVAYDEMDLPPGVIRLRRGGGCAGHNGLKDCIKHIKGDFYRLRIGVGRPLKGIDPANYVLSSPTYDEQNRINAIITDACHDARYVLEGSIELFMNKLHKINHGI

SEQ ID NO: 138344 - protein, 186 aa, Unknown
  Bacterial polypetide isolated from the Sargasso Sea
MLLFVGLGNPTPNSENNRHNIGFKIIDAINQKFGLSKQKPKFKGLLTTGTINGKKVYAIKPLTFMNNSGVCIRELIEYFKIEADNVIVFHDDLDIDFGKIKTKFGGSSAGHNGIESIDKFIGKDYSRVRIGIGHPKNKVEVADHVLHDFNDEEKIELDTITKSITESLPILLDKKLDLFSSTVNNK

SEQ ID NO: 138345 - protein, 199 aa, Unknown
  Bacterial polypetide isolated from the Sargasso Sea
MKNQKIKKKPQNNYSVQKVFILGIGNPEEKYNNTRHNVGKDWVEKIAKDHELTFVKKSKLKCGICEVEPHVYLVTPDVYVNETGRVALLLKRYLNAKPEQILVLHDDIDTQIGEAKFKSGGGDGGHNGLKDLSNVIGKDFKRLKIGVSHPGRKNEVTNWVLGKFKPAETQLLEDLYKKIMVHKDRIFSLEIEKLQNLVN

SEQ ID NO: 138346 - protein, 194 aa, Unknown
  Bacterial polypetide isolated from the Sargasso Sea
MNKFLIVGIGNIGDKYTNTRHNIGFLVIDEIAEVLKSPLSSVKHGHRAEASYKGKKVILLKPSNYVNNSGKSLLYWKNKERIPNKNILVVCDDLNLYFGNIKLKANGTSGGHNGLKDIEEYLKSINYPRLRVGILNSKNFNKTDYVLGEWTDKEKDDLVNIISSSSETVLSFIHNGIDQTMNTHNTKNLIDENI

SEQ ID NO: 138347 - protein, 206 aa, Unknown
  Bacterial polypetide isolated from the Sargasso Sea
MKRNPQRKVENKKNFTFIGLWNPQKKYDKTRHNIGADCLFRLSKRNNINLKTHKSGKFQLGSYEEDGYEIDIVIPMVSMNNSGEAVKEYIKNKNMDYENLVVLHDDIDLGFGRLRLKKGSGDGGHNGIKSINYIINATDYFRLRIGVGRPPSGIDPAEYVLSRFLSDEIEEIKFLVEDAIDIVKVFPKDKEMAIKQASERRIIDVV

SEQ ID NO: 138348 - protein, 188 aa, Unknown
  Bacterial polypetide isolated from the Sargasso Sea
MPEETLLLVGLGNPGEKYKNNRHNVGFMVLDYVTNQLKFGRSRTKFLGRTSMGSYENIKLISFKPQTFMNESGRAVREASNFYKINPERIFVFHDDIDLSFGDIKLKKGGSNAGHNGLASIDENIGNNYVRLRIGISHPGDKEKVTGHVLGDFSKEENEEFEKIQTKIVKNFDLLIDTNIKKFQSNMK

SEQ ID NO: 138349 - protein, 184 aa, Unknown
  Bacterial polypetide isolated from the Sargasso Sea
MILFVGLGNPTPDSKNNRHNIGFKIIDALNVKFCLSKQKPKFKGLLTMGNILDKKVYAIKPLTFMNNSGACVRELIEYFKIDPSDIIVFHDDLDIEFGKIKAKFGGSDAGHNGIASLDKFIGKHYSRVRIGIGKPEKIKVNDFVLGDFNDEENVELDEIFKKIISSVDLLIEKKLDLFSSKINN

SEQ ID NO: 138350 - protein, 199 aa, Unknown
  Bacterial polypetide isolated from the Sargasso Sea
MNLENNKTLLVGLWNPQLKYLKTRHNIGADILEKFCIKNSIEVKLDKSGSFKIGQVSFENSDVDIIFPMVSMNNSGEALKAYSKYNNVEATNILVIHDDIDLGFGRLRLKSGSSDGGHNGIKSINTYLQSNDYFRLKVGVGRPPKEVNPADFVLSRFYNNEEEEVEFLIEDSVDIIETFLNDRESAVKAASERRIIDVI

SEQ ID NO: 138351 - protein, 186 aa, Unknown
  Bacterial polypetide isolated from the Sargasso Sea
MLLFVGLGNPTPDSENNRHNIGFKIIDAINKKFSLSKQKPKFKGLLTTGNINNKKVYAIKPLTFMNNSGICIRELIEYFKIDAEDVIVFHDDLDINFGKIKAKFGGSSAGHNGVESIDKFIGKEYSRVRIGIGKPKAKSSVVDHVLKDFDEEEKIELEKITDNITSSLEILIDKKLDLFSSAVNSK

SEQ ID NO: 138352 - protein, 201 aa, Unknown
  Bacterial polypetide isolated from the Sargasso Sea
MPALRLIVGLGNPGNEYLNTRHNVGAEWLDGLATSYDAQFKENSKLEGWFAKAMIEGIECLLLKPMTYMNGSGSSVRLAARYFQIPLDSILVAHDEMAFNPGTVRIKLGGGANGHNGLRSLFSELSNNREFYRLRIGVGHPGEASKVTPYLTRYKIPPDEQLSIADALNFSPALMSEIVNADWEKAMTRLHSEPTTMNRSL

SEQ ID NO: 138353 - protein, 98 aa, Unknown
  Bacterial polypetide isolated from the Sargasso Sea
IRFRRKGSSGGHNGLKSIIEQWQTQNFKRIRIGIGSPPLIKGKNNFNTISHVLGNISLEEKSILNKVYKRVIESLEQINTKKEEYIINELNSFDKDQP

SEQ ID NO: 138354 - protein, 136 aa, Unknown
  Bacterial polypetide isolated from the Sargasso Sea
MVVIPMTSMNNSGQGLKTFLLENELKDYELFVVHDDIDLGFGRFRIKKSSSDGGHNGIKSIDLAIGNNDYWRFKVGVGRPPSTKDPAEYVLSKFNSDETEEVEFIIEDSMEIIDLFLKDVESAIKTASERRIIDVV

SEQ ID NO: 138355 - protein, 142 aa, Unknown
  Bacterial polypetide isolated from the Sargasso Sea
MYKLCFVGLGNPGSKYQNTRHNIGKDFLKKISIEYSLKFSKKIKFEAEISESHSGNILWVIPDNYVNQSGRTVSKILKSTNLTSENIIVIHDDLDLKVGDLRLKENGGHGGHNGLRDIIEKINSKDFYRLRVGIDHPGKKRM

SEQ ID NO: 138356 - protein, 194 aa, Unknown
  Bacterial polypetide isolated from the Sargasso Sea
MNKYLILGIGNIGPEYQNTRHNIGFDTLDKLATELKVSFDAVKLAFRAEAKYKGKKLILIKPNNYVNNSGKSLSYWMKKEKVDANNILVVCDDLNLYFGNIKIKSKGNSGGHNGLKDIEEYLGNSNYSRIRIGISNNKNVSMTDYVLGKWTEEEQSRIPLLTNKSIEIIFSFLQTGLERTMNFYNKKNFIDENL

SEQ ID NO: 138357 - protein, 198 aa, Unknown
  Bacterial polypetide isolated from the Sargasso Sea
MNTLLLVGLGNPGKEYENTRHNAGSDFVRMLCNDYQVSLAKEKLVHGCYAKFIINDFSIILCIPDTFMNESGISVSKAKKFFKVDSHEILIIHDELDLHNGCIRLKDSGGHGGHNGLRSIIDHLNGDSSFKRMRIGIGHPGKNKDIVSYVLNKPSESERKNMEDKMKSALPLIESLVVNGWEKTIMKLHSSVEKKDES

SEQ ID NO: 138358 - protein, 188 aa, Unknown
  Bacterial polypetide isolated from the Sargasso Sea
MYKLCIVGLGNPGKKYDSTRHNIGKDWLLRLSKCYNIDFISKLKFEAEIGESHSGSILWIIPTNYVNNSGRTLSKIIKSTNLKPENCLIMHDELDLDIGSLRIKDSGGHGGHNGLRDIANKIGSANFLRLRIGIGHPGSKYEVTNWVLNKFTPNEIKHLAQTYSRFVDVFELITSNNIKEAQKLLHTK

SEQ ID NO: 138359 - protein, 175 aa, Unknown
  Bacterial polypetide isolated from the Sargasso Sea
MLLLVGLGNPGSNYTNTRHNIGFKIIDAINNHFKLSKQKPKFKGLLTTGNIDEKKIYAIKPLTFMNNSGTAIKELIDYFKIDAKDVFVFHDDMDIDFGKIKAKFGGSSAGHNGIESIDKFIGKDYSRVRIGIGHPKQKKKVNNHVLEDFKEDEEEKINEITENIVKQLPTLIDKK

SEQ ID NO: 138360 - protein, 190 aa, Unknown
  Bacterial polypetide isolated from the Sargasso Sea
MLLLVGLGNPGPNYDNNRHNIGFKVIDAINQQFSLSKQKPKFKGLLTTGNIDNKKVYAIKPLTFMNNSGTCIKELIEYFKIDAKDVFVFHDDLDIDLGKIKAKFGGSSAGHHGIDSIDKSIGKDYSRVRIGIGHPKNGKKVDDHVLEDFSENEEEKIKDITENIVKQIPTLIEKKIDTFSSKVNENLNGI

SEQ ID NO: 138361 - protein, 187 aa, Unknown
  Bacterial polypetide isolated from the Sargasso Sea
MILITGLGNPGKEFLKTRHNVGFDIVDSIHSEFNFPKFSEKFNSLYSKKTIYDKIIVIQKPMSYMNLSGGPIKKIFNFFKINDTQDIIVFHDDLDLEFSSLRIKNSGGHGGHNGIKSIIGLIGPNFNRIKFGIKNSLYKEKNIDADKFVLDKFNLEELKMIETIKKKIIINFELLIKKDFSSFKNNF

SEQ ID NO: 138362 - protein, 188 aa, Unknown
  Bacterial polypetide isolated from the Sargasso Sea
MYKLCIVGLGNPDKKYNNTRHNIGKDWLKELSKAYEINFITKTKFEAEIGESHNGSILWVIPNNYVNNSGRTLYKIIKSSNLKPEDCLILHDELDLDIGSLRLKYAGGHGGHNGLKDISNKIGSLKFLRLRIGIGHPGSKDEVTNWVLNKFTPNEKKQLIESYSKFVEVFELITSKKIQEAQKLLHTK

SEQ ID NO: 138363 - protein, 190 aa, Unknown
  Bacterial polypetide isolated from the Sargasso Sea
MLLLVGLGNPGPNNTNNRHNIGWKIIDAINLEFKLSKQKPKFKGLLTTGNIDSKKVYAIKPLTFMNNSGTAIKELIDYFKIDVKNVIVFHDDMDIDFGKVKAKIGGGSAGHNGIESIDKFIGKDYSRVRIGIGHPKEKTKVNSHVLEDFKEDEEEKIQEITNNIVKLIPTLIEKKIDLFSSKVNQNLNGI

SEQ ID NO: 138364 - protein, 186 aa, Unknown
  Bacterial polypetide isolated from the Sargasso Sea
MLLLVGLGNPTPNSQNNRHNIGFKIVDAINRKFGLSKQKPKFKGLLTTGNIGDKKIYAIKPLTFMNNSGICIRELLEYFKIDAEDVIVFHDDLDIEFGKIKAKFGGSSAGHNGIASIDKFIGKEYSRVRIGIGKPENKISVSDYVLNDFNEDEQVHLDSITNNIIESLTILIEKKLDLFSSTVNNN

SEQ ID NO: 138365 - protein, 123 aa, Unknown
  Bacterial polypetide isolated from the Sargasso Sea
MNLSGNAVQKVKTFYNIDKNNVIIIHDDIDLELGRIKLKDGGGDGGHNGLKSIAKMIGSEFIRIRVGVGRPEKIDVSSYVLNNFLENEVSLLKKIILKSCEGIKLLIADENEQCKKLFSERTL

SEQ ID NO: 138366 - protein, 59 aa, Unknown
  Bacterial polypetide isolated from the Sargasso Sea
MKIIVGLGNPGPKYLNTRHNIGFSIIDAFANQITIEKKERKAKCIMQFGDHNDTDIVLV

SEQ ID NO: 138367 - protein, 191 aa, Unknown
  Bacterial polypetide isolated from the Sargasso Sea
MISHQDLSHYCAESYRESDFEEANIEVIVRENVFAFRGTDEPKDAIRDLRILPLWTRELGWCPAGFLRASKRLVNKVTSVCLERDIDHKKIELTGHSLGGAVALIVGALMTRDEIPPLQIVTFGAPRCGRLKILDGVPVTQYRHGKDIVPLVPPLMRRHTKLLEFGKPGKSYIKDHFMLNYVKMNKSPDYY

SEQ ID NO: 138368 - protein, 254 aa, Unknown
  Bacterial polypetide isolated from the Sargasso Sea
MGPQRWRCFPCPRPRRPPRGQCRPGRDSAAPHGAWDRGSRGTPARSSLLFRGRPRASCQLSALGAAAVARLSLPTPQAPSPRPVQARKRLGRAPWRLGSRQPRHTRAVKFTLSRPPPRFLSTFGTWGRSGGAAVPAHAPGAVPAASAGPEETRPRPMAPGIAAAAAHPRGQVYSFAAAPALPVNFRHLGPQRWRCFPCPRPRRPPRGQCRPGRDSAAPHGAWDRGSRGTPARSSLLFRGRPRASCQLSALGAAA

SEQ ID NO: 138369 - protein, 245 aa, Unknown
  Bacterial polypetide isolated from the Sargasso Sea
MDEMIEKVKNGYILNIYKDKLELSKAVFKFIESHIIHTLKKKDRFQFCLSGGSTPKSVYKLLSKSDLRWDMVDVFLGDERCVDPNSELSNSLMLKNSLLTNFGSKAFFYEIFNDLNADDEATKNQFISKLFEKCGSNPPTFDLTLLGLGDDGHTASLFPYQKNNNVDDFVIFNEGKGLKRISLTPKVLSASSKIVFLVSGASKRIALERLLDEKEPSDRTPSKLIKSINQISIFCDQESAKELEI

SEQ ID NO: 138370 - protein, 229 aa, Unknown
  Bacterial polypetide isolated from the Sargasso Sea
MLWLTHLPTRRSRRNLPYRVAAVSQYELITLADRDSLAKRAAETVAQVIDLTLAECDRVQIALSGGSTPEATYHLLGREHLAWDRVDLLMGDERYVPADDPLSNARMVRNSLMAEGPGKHACFHPVPTDGGDVNADVARFNSSLEQICGSSPPQFDLILLGLGDDGHTASLFPGTAATQVKDHWVTVGEGKGIPRITLTPPVLCAARQVVFLVAGAAKQQALARLLDAS

SEQ ID NO: 138371 - protein, 208 aa, Unknown
  Bacterial polypetide isolated from the Sargasso Sea
MTNYRIQRAKDPQDLARQACETVAAQIDLALDQRDRCQIALSGGSTPASAYSLLGQERLPWDRVDVVLGDERWVAADDASSNAGMLRRTLLAPGPGASAAFHPVPTVELDSPEASAQAFADQISQLCSGAPPVFDVMLLGLGDDGHTASLFPGTEAPAVLDRWTTIGRGKGLDRITMTAPVLSAARQVIFLVSGAGKQEALRRLVDPS

SEQ ID NO: 138372 - protein, 231 aa, Unknown
  Bacterial polypetide isolated from the Sargasso Sea
MTKYRIERARDSHDLARKASEMIAAQIDLALDQRDRCQIALSGGSTPARAYSLLGQERLPWDRVDVVLGDERWVAADDESSNAGMLRRTLLSPGPGASAAFHPVPTVELESPEASAQAFADQISQLCSGAPPVFDVMLLGLGDDGHTASLFPGTEAPAVLDRWTTISRGKGLDRITLTAPVLSAARQVIFLVSGAGKQEALRRLVDPSESFDRTPARLVQPASDVLVLADQ

SEQ ID NO: 138373 - protein, 245 aa, Unknown
  Bacterial polypetide isolated from the Sargasso Sea
MDEMIEKVKNGYILNIYKDKLELSKAVFKFIESHIIHTLKEKDRFQFCLSGGSTPKSVYKLLSKSDLRWDMVDVFLGDERCVDPNSELSNSLMLKNSLLTNFGSKAFFYEIFNDLNADDEATKNQFISKLFEKCGSNPPTFDLTLLGLGDDGHTASLFPYQKNNNVDDFVIFNEGKGLKRISLTPKVLSASSKIVFLVSGASKRIALERLLDEKEPSDRTPSKLIKSINQISIFCDQESTKELEI

SEQ ID NO: 138374 - protein, 82 aa, Unknown
  Bacterial polypetide isolated from the Sargasso Sea
MKQTVYTASPESQQIHVWSLDLEGNLKLVQVVDAPGQVQPMVVSPNKEYLYVGVRPEFRVLAYRIAPDNGALTFAGEAALPG

SEQ ID NO: 138375 - protein, 237 aa, Unknown
  Bacterial polypetide isolated from the Sargasso Sea
MTNYRIERASDAESLARRASDTIAAQISLVLDQRDRCRIALSGGSTPAKAYSFLGQDHLPWDRVDVFLGDERWVAADDDSSNASMLRRTLLADGPGRSARFHAVLTVELADAEASAAAFGDLVAQHCPGEPPVFDLMLLGLGDDGHTASLFPGTEAPTITDRWATVGRGKGLDRITLTAPVLSAARQVIFLVSGAGKQEALRRLVDPSESSERTPARLVQPASDVLILADQDATASL

SEQ ID NO: 138376 - protein, 125 aa, Unknown
  Bacterial polypetide isolated from the Sargasso Sea
DPHGKIECVQTLDMMPADFTGVRWAADIHLTPDGRHLYACDRTASLITIFSVSEDGSVLSIEGYQPTEAQPRGFNLDHSGKYLIAAGQKSHHIAVYEIAGEQGLLTEKGRYAVGQGPMWVVVNAY

SEQ ID NO: 138377 - protein, 215 aa, Unknown
  Bacterial polypetide isolated from the Sargasso Sea
MKQIVYTASPESQQIHVWQLDTSGDLTLRQVVDVAGQVQPLVISPDRRFLYAGVRPEFRVIAWHISPEDGTLSDAGHAALPGSPTHISTDHTGRFLFCGSYNGGCVSVTPLNDGLPGEVVEVIEGLEGCHSANISPDNKTLWVPALKQDRICLFTLEDSGKLTPQKPAEVTTVEGAGPRHMVFHPGGQFAYCVNELNGTVNVWALSDPHNQIACV

SEQ ID NO: 138378 - protein, 248 aa, Unknown
  Bacterial polypetide isolated from the Sargasso Sea
TVLPLAFYFEYSNFKIIFSNKKLIILSITTGFVLFLGMGLQQYALQISQISNVAFLTALYVPIVGIISRFIFKTRLHWVIWIAVLLCLYGSYLLSSNQSIEIQKSDSLIFIAAICFALHIILIDVFIKKINSPFTFGCTQYFIVFIISLIIALIYEQPTLENISIEWFEILYTGILSAGIGYTLQIIAQHKASPTPAAIILSMEAVFAALAGWILINQTLDTNKILGCIAIFIGVIIVQIVPKMRKSK

SEQ ID NO: 138379 - protein, 180 aa, Unknown
  Bacterial polypetide isolated from the Sargasso Sea
MCFTTGNSYSWEKVLVPDSVDKKTKSPWNFFEDFENEKVGRLRTNKFTTNDKGTGLKPFEIKEDPDGNTYLAVTVKDGWNVDQAGWTKETTERAEFQVFPKKALGKEIWISFKTRLPEDFTHIDDRVLFFQFKNMISTGKVSPLIGLRYYKNGNRLKIGGQTGGNARRSMSQKEKDLYRI

SEQ ID NO: 138380 - protein, 282 aa, Unknown
  Bacterial polypetide isolated from the Sargasso Sea
RHLDLNEISKKINCVSYENFFQKDYDWVYISSIPSKNFEFSKKCLKNGWHVLCEKPSFLSKDNYSEIIEIAKTQKLLFMENYTHTLHPRYSLLKKILSNQQSEVKYIDFKFFYPGPNDKKNFRYHESMGGGVQFDSLGYLIDTLIYLSIIDKPFDFKISQSQKNGCVNFINIASKEGNKFISLTTGIDLQYDASISFSGDNWKIVLHRAFAIDKNHTSEIVIQNGFNETKQLVDSSDQFKNMINLFINIIKSKEDIKFGLFSHHLNTYNVRSTILKNIYNKL

SEQ ID NO: 138381 - protein, 255 aa, Unknown
  Bacterial polypetide isolated from the Sargasso Sea
MNANGIHDQDNLGHWSDQNKPAACDACDANATCDNIAGSHVCTCNTGYSGDGQTCYDNDECASGDNTCHATFATCTNTDGSYQCACNEGYQGNGIECEDFNECYNDPCHADGNCANNDGSFVCTCHDGYTGDGFECVDDNECDDGSNNCHADAACANSPGSFQCTCNDGYSGDGVNCVDNNECASDDLNECHKWATCSNVPGSYECACNGGFSGDGYGCTDNDECTNDDNNCNADATCTNNDGSFTCACNARIFW

SEQ ID NO: 138382 - protein, 539 aa, Unknown
  Bacterial polypetide isolated from the Sargasso Sea
MFSRRYIAMWCAVLLFVAVAALAARHTIAWLWLVIPAALVALGLYDLKQDRHAILRNYPLWGHFRFLFEFIRPEIRQYFVEDDTDEKPFSRAQRSLVYQRAKNVADNRPYGTELNVKAVAHEWISHSLAPTKLPNHDFRIRVGANRAQPYDISIFNISAMSFGSLSANAIRSLNLGAKKGGFAHDTGEGSLSKYHRENGGDIIWEIASGYFGCRNDDGTFNPDKFAKQAADPQVKMIEVKLSQGAKPGHGGVLPAAKITPEIAETRGVPMGKDCISPATHSEFSTPRGLLEFVERLRTLSGGKPTGFKLCIGHPWEFFGIAKAMLETGIVPDFIVVDGAEGGTGAAPLEFTDHVGVPLQEGLLLVHNTLVGIGVRDRVKLGASGKIITAFDIARTLAIGADWVNSARGFMFAVGCIQAQHCHTDRCPTGVATQDPVRQRALVVPDKAERVYNFHRNTLHALQELVQAAGLAHPSELRAHHIVQRVAPHEVRLMSQLLKYLKPGALLDGQTCGFSLYDKWWPIARSDSFTLGEAVYASIE

SEQ ID NO: 138383 - protein, 503 aa, Unknown
  Bacterial polypetide isolated from the Sargasso Sea
MSDDIVEFNWKEPVFCAEGMELFPRDTLDRARYASFLHNYLAVNAIDGGYVLNLNAKWGSGKTYFINRWMESIKDTHPVVYIDAWKQDYSDDPMLTVISSLINALSEQLPAENEILSNITEKSARFIKAAAPALLKGLVKKTVGLNLDDIKVEGEPKSDDKFISDTLSESAAAVAQCLVKDHNDKLQSVNYLRNEIKALITAVIAHKQGALKMPAFIFIDELDRCRPSYAVEMLEVVKHFFELDNIAFIVATDTEQLQHAVKAVYGDGFDAQTYLGRFFRRRYSLTELSRYEFVSHITENKVTYNPKWKEFVPSLAELDDFTNVVSIVADRFRLSLRETEQLVDKFLSVLSNAQKTLNPYLLLILFVLRDKHYSLYDEWMEAINKEASFGQSIGKLTYRMDIFPMFYKSSDQVFFPREKRADSLVDLQQSLDMILSIMNKVCSPWNQREKDKFIDNLEGALYSSSSPNLTVRANKLYQISLMSLKANKSDYKNWVELAVSFDK

SEQ ID NO: 138384 - protein, 151 aa, Unknown
  Bacterial polypetide isolated from the Sargasso Sea
KLAAAVTSFAGLGLCGCRALDIGASTGGFTEVLLANGAGHVVAIDVGQGQLHERLAADARVTVLDHTNARYLTASMLPFAPDVIVCDASFISLKKLLPAVLDLAVAGARLIVLIKPQFEVGKGLVGKRGVVRDPALHQHVVADIANWLQTD

SEQ ID NO: 138385 - protein, 252 aa, Unknown
  Bacterial polypetide isolated from the Sargasso Sea
IDDIWSNKKNLSYKKLSLHSRLVIRTSLSLILFGSLGFFITESLLNSQFFNDLNFFERLSSSIFETVSARTAGFTNYPISLNSISDTGLLLLMTLMFIGASTGGTGGGIKTTTFIALMAATRSTLRGQKDVIISNRLISDKVILKAVGITVGSLLFVLLMAMLLSTTNTFVKKESFTFLEILFTCISAFATVGFDIGLTAKLNHFGQFILIVGMFVGRLGILLLLSALWQALYKSRIDRQKRIGYPRADLYV

SEQ ID NO: 138386 - protein, 103 aa, Unknown
  Bacterial polypetide isolated from the Sargasso Sea
MLVRLDKELVRRGLVQTRAKAQFLIQSGVILVNERIVIKQSYAVNKDDDLRLVRNPNPWVSRAGLKLEYAIRRFKLGPLDGIALDIGASTGGFTDVLLFYGCK

SEQ ID NO: 138387 - protein, 206 aa, Unknown
  Bacterial polypetide isolated from the Sargasso Sea
SLHSRLVIRTSLSLILFGSLGFFIIESLLNSQFFNDLNLFEKVISSIFETVSARTAGFTNYPISLNSISDTGLLLLMTLMFIGASTGGTGGGIKTTTFIALMAATRSTLRGQKDVIISNRLISDKVILKAVGITVGSLLFVLLMAMLLSTTNTFVKKESFTFLEILFTCISAFATVGFDIGLTAKLNHFGQFILIVGMFVGRLGIL

SEQ ID NO: 138388 - protein, 124 aa, Unknown
  Bacterial polypetide isolated from the Sargasso Sea
MLSELLNYKTFFQGFKIKKERIDKLMVSNGLAKSREQANSLLMSGNVFVNEKRVEKPGQQVQTDLIIEIKGKTYPWVSRGGLKLEKAILEFNLNCNLIIALDIGASTGGFTDVLLSKGQKNLCS

SEQ ID NO: 138389 - protein, 261 aa, Unknown
  Bacterial polypetide isolated from the Sargasso Sea
VMGGLGWRVIDDIWSHKKNLSYKKLSLHSRLVIRTSLSLIFFGSLGFFVTESLLNSQFFNDLNLFQKLLSSIFETVSARTAGFTNFPISLNSISDTGLLLLMTLMFIGASTGGTGGGIKTTTFIALMAATRSTLRGQKDVIISSRLISDKVILKAVGITVGSLLFVLLMAMLLSTTNTFVKKESFTFLEILFTCISAFATVGFDIGLTAKLNHFGQFILIVGMFVGRLGILLLLSALWQALYKSRIDRQKRIGYPRADLYV

SEQ ID NO: 138390 - protein, 51 aa, Unknown
  Bacterial polypetide isolated from the Sargasso Sea
KGCYTIAQDEATSAVYGMPKAAAAIGAASAILPLERIAPQLISRITRPLRD

SEQ ID NO: 138391 - protein, 244 aa, Unknown
  Bacterial polypetide isolated from the Sargasso Sea
RLWSSIFHSISAYNNAGFSLWSNSIEDYRTNFLVNTVFVFLIVMGGLGWRVIDDIWSNKKNLSYKKLSLHSRLVIRTSLSLILFGALGFFITESLLNSQFFDDLNLFERLLSSIFETVSARTAGFTNYQISLNSISDTGILLLMTLMFIGASTGGTGGGIKTTTFIALMAATRSTLRGQKDVIISNRLISDKVILKAVGITVGSLLFVLLMAMLLSTTNTFVKKESFTFLEILFTCVSAFATVG

SEQ ID NO: 138392 - protein, 162 aa, Unknown
  Bacterial polypetide isolated from the Sargasso Sea
MDIGASTGGFSDVLLSKNAKKIFCVDVGFNQLHEKLVSNPKIINIQKTNAKLLNNKIITDKIDLIVCDVSFISMKKVIKPSLNFLKNYGIIIGLIKPQFESSKKEIKKGGVILDSEVHKRICDSFVEWFKIECKMDVMGLIESPLKGPKGNTEFLICARKKL

SEQ ID NO: 138393 - protein, 299 aa, Unknown
  Bacterial polypetide isolated from the Sargasso Sea
GLWEAFFTSTSAITVTGLTIIDIGVDLNFFGQVCLAFMLLSGGLGLMAITTFLQGFVVKGTKLRTRLDKGKTLDEFGVGGIGRTFQSIAITATCIISLGAIVLYSFGFVDIQNHWQRLWSSIFHSISAYNNAGFSLWSNSLQDYRTNFLVNSVFIFLIIMGGLGWRVIDDIWSNKKNLSYKKLSLHSRLVIRTSLSLILFGSLGFFITESLLNSQFFNDLNLFEKLLSSIFETVSARTAGFTNYPISLSSISDTGLLLLMTLMFIGASTGGTGGGIKTTTFIALMAATRSTFRGQKDVI

SEQ ID NO: 138394 - protein, 146 aa, Unknown
  Bacterial polypetide isolated from the Sargasso Sea
MLRDEGRLAAETDVSGEDARENRRTTRTSAKKGDKKSVLIVDDVACVRKFHAGQIGRLGYQSIEAGEGTEALRLYGENHAGIQGILLDLMMPVMDGYSTANEIRALEEKQDLRRMPIIAVTSLTDQEMKANSKSTAFDGHVDKPTS

SEQ ID NO: 138395 - protein, 238 aa, Unknown
  Bacterial polypetide isolated from the Sargasso Sea
MNKILIVTPTYNELANIEHLFISIFDRHPDVHILVVDDSSPDGTGDFIKKHKLYEKSLFLISRPGKMGLGSAYCDGFNWALSRDYDKIIQIDADFSHNPKYLSNMLETSSNYDLVIGSRYINGVNVVNWPMNRLILSYLANLYCRIILGIKIKDFTGGFKCFNRKVLESINFENVKSEGYSFQIEINLKAFSNHMSIKEIPIIFNDRARGTSKMSKKVILEAIYMVPLLKFKKIFKLL

SEQ ID NO: 138396 - protein, 315 aa, Unknown
  Bacterial polypetide isolated from the Sargasso Sea
LCVKGTKLRTRLDKGKTLDEFGVEGIGRTFQSIAITATCIISLGAIVLYSFGFVDIQNNWQRLWSSIFHSISAYNNAGFSLWSNSLQDYRTNFLVNSVFIFLIIMGGLGWRVIDDIWSNKKNLSYKKLSLHSRLVIRTSFSLILFGSLGFFVTESLLNSQFFNDLNLFEKLLSSIFETVSARTAGFTNYPISLSSISDTGLLLLMTLMFIGASTGGTGGGIKTTTFIALMAATRSTFRGQKDVIISNRLISDKVILKAVGITVGSLLFVLLMAMLLSTTNTFVKKESFTFLEILFTCISAFATVGFDIGLTAKLN

SEQ ID NO: 138397 - protein, 183 aa, Unknown
  Bacterial polypetide isolated from the Sargasso Sea
GISGATIFGDGSVVIILDIHSLIRAAHVQTTALISDEAVPALPQEPEEEALPQRETPLVMVTDDSVTVRKVTTRLLERNGYEVVTAKDGMDAIAKLEDIRPDVMLLDIEMPRMDGFEVASHVRHDSRLQNVPIIMITSRTGEKHRERAFDIGVNCYIGKPFQESELLSTIRELLGELQEVDNG

SEQ ID NO: 138398 - protein, 193 aa, Unknown
  Bacterial polypetide isolated from the Sargasso Sea
ARHVSSWKRRYYRRKRYCEGNVTLGNNVSIGANCILRDCHITDNAVIEANSIIEQANVGEACVVGPYARLRPGAVMHKNAKVGNFVEMKKTVLGEGAKANHLTYLGDAEVGANANIGAGTITCNYDGVNKSKTIIGENAFIGSNSSLVAPVNVGDNATVGAGSVITSAVDDSALAVARGKQRNIANWPRPTKK

SEQ ID NO: 138399 - protein, 43 aa, Unknown
  Bacterial polypetide isolated from the Sargasso Sea
MTIKVLVVDDSALIRNLLGKMIEADPEFSLVGMAADAYMAKDM

SEQ ID NO: 138400 - protein, 285 aa, Unknown
  Bacterial polypetide isolated from the Sargasso Sea
ARNGEEALTKAVEFEPDCITLDINMPVMDGMTCLAMLKKLYPCPIIMVSSLTQKGATITLEALALGASDFVLKTGGTVSRDISDLEAPLINKIHALAKTGKPQRPTIKPPPVVTQKVVRHKTSVPFEVVLVGVSTGGPKKLEHLVANLSPAFPVPIVISQHMPASFTSALAKRLDGISPLNVVEVNAKMPIKAGNVYLAKGDADLAFSKVGGEVSARPVPSSPSFLWHPSVDRMVDSALNCYKPLSMLCVQLTGMGCDGVAAMSKAFKEGATTIAESEATSVVFG

SEQ ID NO: 138401 - protein, 289 aa, Unknown
  Bacterial polypetide isolated from the Sargasso Sea
GGIGRTFQSIAITAISIISFGAIVLYSFGFVDIQNNWERIWSSIFHSISAYNNAGFSLMSNSLQDYRTNYLVNSIFVFLIVMGGLGWRVIDDIWSNKKNLSYKKLSLHSRLVIRTSLSLILFGSLGFFITESLLNSQFFSDLNLFERLLSSIFETVSARTAGFTNYPISLNSISDTGLLSLMTLMFIGASTGGTGGGIKTTTFIALMAATRSTLRGQKDVIISNRLISDKVILKAVGITVGSLLFVLLMAMLLSTTNTFVKKESFTFLEILFTCISAFATVGFDIGLTA

SEQ ID NO: 138402 - protein, 285 aa, Unknown
  Bacterial polypetide isolated from the Sargasso Sea
FGQVFLAFMLLSGGLGLMAITTFLQGFVVKGTKLRTRLDKGKTLDEFGVGGIGRTFQSIAITAISIISLGAIVLYSFGFVDIQNNWERLWSSIFHSISAYNNAGFSLMSNSLQDYRTNYLVNSVFVFLIVMGGLGWRVIDDIWSHKKNLSYRKLSLHSRLVIRTSLSLILFGSLGFFITESLLNSQFFNDLNLFERLMSSIFETVSARTAGFTNFPISLNSISDTGLLLLMTLMFIGASTGGTGGGIKTTTFIALMAATRSTLRGQKDVIISNRLISDKVILKAV

SEQ ID NO: 138403 - protein, 220 aa, Unknown
  Bacterial polypetide isolated from the Sargasso Sea
FGSLGFFITESLLNSQFFSDLNLFERLLSSIFETVSARTAGFTNYPISLNSISDTGLLLLMTLMFIGASTGGTGGGIKTTTFIALMAATRSTLRGQKDVIISNRLISDKVILKAVGITVGSLLFVLLMAMLLSTTNTFVKKESFTFLEILFTCISAFATVGFDIGLTSKLNHFGQFILIVGMFVGRLGILLLLSALWQALYKSRIDRQKRIGYPRADLYV

SEQ ID NO: 138404 - protein, 184 aa, Unknown
  Bacterial polypetide isolated from the Sargasso Sea
ARTAGLYKLSNIRELYIYTGLLLLMTLMFIGASTGGTGGGIKTTTFIALMAATRSTLRGQKDVVISNRLISDKVILKAVGITVGSLLFVLLMAMLLSTTNTFVKRESFTFLEILFTCISAFATVGFDIGLTAKLNHFGQFILIVGMFVGRLGILLLLSALWQALYKSRIDRQKRIGYPRADLYV

SEQ ID NO: 138405 - protein, 440 aa, Unknown
  Bacterial polypetide isolated from the Sargasso Sea
MFIIFLGTLILSSPLCSSSKVGLWEAFFTSTSAITVTGLTIIDIGVDLNFFGQVFLAFMLLSGGLGLMAITTFLQGFVVKGTKLRTRLDKGKTLDEFGVGGIGRTFQSIAITAISIISLGAIILYSFGFVDIQNNWERLWSSIFHSISAYNNAGFSLMSNSLQDYRTNYLVNIVFVFLIVMGGLGWRVIDDIWSHKKNLSYKKLSLHSRLVIRTSLSLILFGSFGFFITESLLNSQFFNNLNLFERLLSSIFETVSARTAGFTNYPISLNSISDTGLLLLMTLMFIGASTGGTGGGIKTTTFIALMAATRSTLRGQKDVIISNRLISDKVILKAVGITVGSLLFVLLMAMLLSTTNTFVKKESFTFLEILFTCISAFATVGFDIGLTAKLNHFGQFILIVGMFVGRLGILLLLSALWQALYKSRIDRQKRIGYPRADLYV

SEQ ID NO: 138406 - protein, 362 aa, Unknown
  Bacterial polypetide isolated from the Sargasso Sea
AFMLLSGGLGLMAITTFLQGFVVKGTKLRTRLDKGKTLDEFGVGGIGRTFQSIAITAISIISLGAIVLYSFGFVDIQNNWERLWSSIFHSISAYNNAGFSLMSNSLQDYRTNYLVNSVFVFLIVMGGLGWRVIDDIWSHKKNLSYKKLSLHSRLVIRTSLSLILFGSLGFFITESLLNSQFFNDLNLFESLMSSIFETVSARTAGFTNFPISLNSISDTGLLLLMTLMFIGASTGGTGGGIKTTTFIALMAATRSTLRGQKDVIISNRLISDKVILKAVGITVGSLLFVLLMAMLLSTTNTFVKKESFTFLEILFTCISAFATVGFDIGLTATLNHFGQLILIVGMFVGRLGILLLLSALWQ

SEQ ID NO: 138407 - protein, 1188 aa, Unknown
  Bacterial polypetide isolated from the Sargasso Sea
MDQREEQVERHVLQIDLLLESSIRAVKSLRDVAVDHLRLGELVRKERLPQYGKFNESGQYFTLEPNYAKGGKPFTNMGRITGAGSLDGRSDKFYQELEMLFELSLSFPVAKEAAPKASAIYYLSRQRMMSYFPWTNGDQRFRDELLNKKQFQYATPAMNPQRSVFWSEAYVDSTGKGLLTTLGVPVYLDDEFMGSINLDMTLASLARQIRVYFKMPGTVILLDQQNNILSHSDFDGSDINRVYHISQRIPSELHSLPESELFDAHEGIIRNGYYIHSVALHNAPWRLLYLQNEDDLFQDSVEKLQLTFILVVIALSVLVTIVHWQTRRSFVSPASRLLSHLEGCSQEPRKPPEKITPGWEPWFLLVSRIFEENKQYTHHLAEQNKRLDKLVARRTERLKDATERREREYALLRSLLDSIPEAIVFKDKEGNYLGCNKAAERMLGYTESEMIGLSSEDLTSPEMGIRIRAEDEQILKDRTPLRYQEKVELAGKPVLLDTLKLPFYNRRGELQGLIAVWRDVTREYESAEQLRLSEERYHLAMDAVEDGLWDWYLDSEHIICNPSYYSMLGYKPNEFPALVSAIDQLTHPDDRIRVEEYRNQYLQNPVDAYEIEFRILGKNGSYHWVLSRGRVVEFTADGQPKRMVGTHKDITRHKSNEVALLEAKQDAELANLYKSEFLANMSHEIRTPMNAIIGMLQLAQRTSLTAQQKDYLEKAGFSAQSLLRIINDILDFSKIEAGKLELERVPFPLDKVLDHALDLNALKAQEQGVELLLYAPVTAGLILKGDPLRLGQVLINLLSNAVKFTQSGEIELGCEDVGERDHRITLKFWVRDTGIGISKDQQEKLFDAFAQADGSTTRKYGGTGLGLSISKHLVSMMGGKMQVQSELGVGSTFSFTISFEIAEEAKVEPLVVPEKLNNLRTLVVDDNPTALQIYSALMRDFHFEVDTAASGAEALYKLSRDPIDLLLLDWMMPEMDGGDVITAIDTMVAEGRIAKRPIIIMMTAYAAEPLQHEVDSANVFAVLQKPFKASSLFDEIIAAFADEPRLNVVQPIAEVPVEEGEHTGLVLLVEDNFINQQVATELLKSAGYEVVVAGNGQIALDIIDSRPFDAVLMDIQMPVMDGLTAARALRERFSADVLPIIAMTAHAMSGDREKSLAAGMNAHITKPIVLTELFETLSHWIKHKNNHH

SEQ ID NO: 138408 - protein, 380 aa, Unknown
  Bacterial polypetide isolated from the Sargasso Sea
MADKKVEVFAAIIIGCVGVFFVFGMPFFVGGIISELGLSQSQANLVSSAEIAGMALSSMLGFFWIQRYEWKTIAYFGITVIILGNFISSIGFSEEPSFSLLVMVRFLTGLFGHGVCFSLGVAAIGRTNNPDKNFAYSVAAQVIMGSLTALLVPMAMSKYGISGMTIPAIFLALIGLFFVKYLFVNNPSETNDGQTQDGSQIIFLPLIGLLIMVVWQMGVGPFFNNLVPYGIGNGISSDAIGIALFVSTAMSIIGPISASMLIDKVDRSHAIFGALTVQILIILSFTGEITWIGFMLRAICFQVAWNFVGPFLMGMIAAVDRSGNYSVMIPASQLGGISIGHAVIASLLNSGNPSLINYYSGSFIALSILIYFILFKNRSE

SEQ ID NO: 138409 - protein, 245 aa, Unknown
  Bacterial polypetide isolated from the Sargasso Sea
MKKRADLLLVEKKIVESRSKAQAVIMAGQIFIDGKKVLKSGELHNIESDIDYRSLHPQWVSRGGLKLLKALSHFQIKPDGYICLDIGASTGGFSDVLLSKNAKKIFCVDVGINQLHEKLVSNPKIINIQKTNAKLLNNEIITDKVDLIVCDVSFISMKKVIKPSLNFLKNYGIIIGLIKPQFESSKKEIKKGGIILDSEVHKRICDSFVEWFKIECNMDVMGLIESPIKGPKGNTEFLICARKKL

SEQ ID NO: 138410 - protein, 67 aa, Unknown
  Bacterial polypetide isolated from the Sargasso Sea
VLLTGMGRDGAIGLKAMRTKGYHTIAQDEATCAVYGMPKAAAALDAAAAILPLPRIAAALAAAIGAG

SEQ ID NO: 138411 - protein, 242 aa, Unknown
  Bacterial polypetide isolated from the Sargasso Sea
MRKRLDLILFERGFFSSRNKAQIHILAGEVFVNNEKITSSSRLIDETAEIEIKLLKDNFVSRGGLKLDEALNHFKININNLVCLDIGASTGGFTDCLLRKKAKKVFCVDVGYGQLDYKLRENTKVKNLERTNARYLTKEEIGEKIDLIVMDVSFISITKFESFFKEFAYKNSLFIGLIKPQFELSRDKLGKNGIVRNPKYRQEAIENIINFLNGFYLNILEPIESPIKGSKGNIEYLVCGRN

SEQ ID NO: 138412 - protein, 208 aa, Unknown
  Bacterial polypetide isolated from the Sargasso Sea
MAAQSGAGAVAGESQAQVHLVRHRQSATVFHVLADGPALGPLGQAASTFCVQPELVAGGLQGSHRGRRRNGRSGRTGSVLIVVIGKNMSKILVVDDSSTVRDEVAGFLKKNGLDVDTAVDGKDGLAKLKASPGIKLVISDVNMPNMDGLTMVEKIRGELANTTVNVIMLTTESSPAMKERGKAAGVKGWIVKPFKGDAVLETFRKLAS

SEQ ID NO: 138413 - protein, 165 aa, Unknown
  Bacterial polypetide isolated from the Sargasso Sea
MAIRCAQPVPTWRQHPTPPAAGGTGKAVVSQQLSGPSQVPLVLVVDDSITVRRVTQRLLQREGYRVALAADGLQALERLQEERPTVVLSDIEMPRMDGFDLARNIRADGALRDLPIIMITSRIAEKHREHAMELGVNHYLGKPYSDEELLSLIQHYARIAAAAEA

SEQ ID NO: 138414 - protein, 334 aa, Unknown
  Bacterial polypetide isolated from the Sargasso Sea
MRIAIANDMPLAVEALRRALAAEPEYQLIWVAGNGEEAVSRCRDDLPDLLLMDMLMPGMDGVEATRRIMHDTPCAILIVTSDVERNMSRVFDAMGAGALDVVAAPSLGPQQVLDAATVRRKIHNIAWMIGHKTSRSVKPTPVRSADNRGKSLVAIGASAGGPASLVELLRQIPADFPASIVLVQHVDEVFAAGMAQWLGSESHIPVRLAREGEVLQPATVLLAGTNNHLYLAPEGRLVYRREPADQVYRPSIDVFFESVATYWRGDAIGVLLTGMGRDGARGLKLMRERGFHTIAQDQASSAVYGMPKAAVALGAAAEVLALDRIPARLIERLG

SEQ ID NO: 138415 - protein, 245 aa, Unknown
  Bacterial polypetide isolated from the Sargasso Sea
NPDNSNKVVIVTDFNKMANGFLIDSVSRIHRVSWEDVESPSQFLEAGENDCVVAVVRRDGNLIMILDFEKIIADINPELSMEKYDVTQDRKVIIDDRMMAMRQAKTILVVDDSAFIRKMIETTLRTAGYNVVTAKDGGDGLEMLMEFDRLSQEEKIPVAEFVSGIITDVEMPRMDGMHLLKRLRDTPAFKTTPIVMFSSLMSDDNRHKALQLGANDTITKPELGRMVGMMDNFLLGIPIPRPGNL

SEQ ID NO: 138416 - protein, 107 aa, Unknown
  Bacterial polypetide isolated from the Sargasso Sea
MSSTDEDKIRLDQLLVLNGLVRSRTHAKDLILRGQVICDQEVAKKANRLVSTKSELKVINLSKEWVSRGGFKLVGAIEHFKIELKNKICLDIGASTGGFTHVLLRGG

SEQ ID NO: 138417 - protein, 1236 aa, Unknown
  Bacterial polypetide isolated from the Sargasso Sea
MKSSEPDLQLKSPIQKNYNRAVFYTYIGVIVLSLLTAWMFFDRQKSQQMDQREEQVERHVLQIDLLLESSIRAVKSLRDVAVDHLRLGELVRKDRLPQYGKFNESGQYFTLEPNYAKGGKPFTNMGRITGAGSLDGRSDKFYQELEMLFELSLSFPVAKEAAPKASAIYYLSRQRMMSYFPWTNDDQRFRDELLNKKQFQYATPAMNPQRSVFWSEAYVDSTGKGLLTTLGVPVYLDDEFMGSINLDMTLASLARQIRVYFKMPGTVILLDQQNNILSHSDFDGSDINRVYHISQRIPSELHSLPESELFDAHEGIIRNGYYIHSVALHNAPWRLLYLQNEDDLFQDSVEKLQLTFILVVIALSVLVTIVHWQTRRSFVSPASRLLSHLEGCSQEPRKPPEKITPGWEPWFLLVSRIFEENKQYTHHLAEQNKRLDKLVARRTERLKDATERREREYALLRSLLDSIPEAIVFKDKEGNYLGCNKAAERMLGYTESEMIGLSSEDLTSPEMGIRIRAEDEQILKDRTPLRYQEKVELAGKPVLLDTLKLPFYNRRGELQGLIAVWRDVTREYESAEQLRLSEERYHLAMDAVEDGLWDWYLDSEHIICNPSYYSMLGYKPNEFPALLSAIDQLTHPDDRIRVEEYRNQYLQNPVDAYEIEFRILGKNGSYHWVLSRGRVVEFTADGQPKRMVGTHKDITRHKSNEVALLEAKQDAELANLYKSEFLANMSHEIRTPMNAIIGMLQLAQRTSLTAQQKDYLEKAGFSAQSLLRIINDILDFSKIEAGKLELERVPFPLDKVLDHALDLNALKAQEQGVELLLYAPVTAGLILKGDPLRLGQVLINLLSNAVKFTQSGEIELGCEDVGERDHRITLKFWVRDTGIGISKDQQEKLFDAFAQADGSTTRKYGGTGLGLSISKHLVSMMGGKMQVQSELGVGSTFSFTISFEIAEEAKVEPLVVPEKLNNLRTLVVDDNPTALQIYSALMRDFHFEVDTAASGAEALYKLSRDPIDLLLLDWMMPEMDGSDVISAIDTMVAEGRIAKRPIIIMMTAYAAEPLQLEVDSANVFAVLQKPFKASSLFDEIIAAFADEPRLNVAQPIAEVAVEEGEHTGLVLLVEDNFINQQVATELLKSAGYEVVVAGNGQIALDIIDSRPFDAVLMDIQMPVMDGLTAARALRERYSADALPIIAMTAHAMSGDREKSLAAGMNAHITKPIVLSELFETLTHWIKHKHNHH

SEQ ID NO: 138418 - protein, 202 aa, Unknown
  Bacterial polypetide isolated from the Sargasso Sea
MDLAELETSNSYDLILLGASTGGPEALKQIIGKLKPNMPPILVVLHMQPKFLVRYCERLTRITTLKVKRFMDHEKVIPNSIYIADGSNHMEISKTGSDYFLNKGNAEKVKGHCPSVDVLFNSAAKIKNSNLLAILLTGMGSDGAEGLNSLKNSGAFTVTQNEETSEVYGMPKAALEIGAAKCVLSLEQITEILSAQEVQFSC

SEQ ID NO: 138419 - protein, 87 aa, Unknown
  Bacterial polypetide isolated from the Sargasso Sea
DVFFNSVADGWQGEAFGVLLTGMGRDGALGLKAMRAKGCYTIAQDEATSAVYGMPKAAAAIGAASAILPLERIAPQLISRITRPLRD

SEQ ID NO: 138420 - protein, 172 aa, Unknown
  Bacterial polypetide isolated from the Sargasso Sea
DSPAIVITQHMPPGFTTSFAARLNGLCQITVKEAVQGERILPGHAYIAPGGKQFSIARSGANYVAVVNDEPPVNRHKPSVEVLFKSVAACVGRNAFGVMLTGMGADGAAAMREMKDAGSYNYVQDEASCIVFGMPREAIAHGAADEVLPLTQIASALLGKLRTSPDHVRHRI

SEQ ID NO: 138421 - protein, 164 aa, Unknown
  Bacterial polypetide isolated from the Sargasso Sea
ITQHMPPGFTTTYARRLNSLCEIEVREAKGGERLLPGHAYLAPGDKHLVVERSGADYRIALSDGPRESGHKPSVDKLFRSLADSAGANAVGVLLTGMGRDGAQGLLQMKQRGATTFCQDEKSCVVFGMPKVAIEMNAACHITPLASIADAILDTLESIGVGTRL

SEQ ID NO: 138422 - protein, 74 aa, Unknown
  Bacterial polypetide isolated from the Sargasso Sea
EAFGVLLTGMGRDGALGLKAMRAKGCYTIAQDEATSAVYGMPKAAAAIGAASAILPLERIAPQLISRITRPLRD

SEQ ID NO: 138423 - protein, 235 aa, Unknown
  Bacterial polypetide isolated from the Sargasso Sea
VLKGFAKSREQANSILMTGNVFADNKRVKKPGQQVSQNSKIEIKGKTHPWVSRGGIKLNKAISEFNLDCNSIIALDIGASTGGFTDVLLTNGASKIYAVDVGYGQLDWKLRQDERVIVKEKTNARYLTNEIIQDPLDALVCDASFISLKKVLPSGLGFLKSHGWLVALIKPQFEVGKGLVGKGGVVKDHKLHEAVINNITKWIEFEIKMNVSGVIESPILGPSGNKEFLIVATKI

SEQ ID NO: 138424 - protein, 96 aa, Unknown
  Bacterial polypetide isolated from the Sargasso Sea
MNDKRKIQVLCIDDSALIRSILKEIINSQPDMEVVGVAPDPIIARDLIKQTNPDVLTLDVEMPKMDGLDFLEKLMRLRPTPVVMISSLTERGSETT

SEQ ID NO: 138425 - protein, 113 aa, Unknown
  Bacterial polypetide isolated from the Sargasso Sea
MNASGNSIQVLIVDDSALVRKVMTEILSSDSLIEVVGTAPDAQIATRQIRKLNPDVITLDIQMPGMNGLDYLERLMKSQPRPVVMVSSLTQKGAPEALKALELGAVEVIGKLD

SEQ ID NO: 138426 - protein, 339 aa, Unknown
  Bacterial polypetide isolated from the Sargasso Sea
MNIGIVNDLPLAVEALRRVIALRTDHRVLWVATDGDEAVDFCVAHPPDVVLMDLVMPKVDGVAATRQIMARAPCAILIVTASVSANTSSVYEAMGAGALDAVDTPTLALGLSTDASPQALLAKIDQIGRLLESRTAALVPPGPAPERGQPTLVAIGASAGGPTALTALLRALPGDFPAAIVIVQHVDQAFALGMAEWLDGYTRLPVRVARQGSVPQAGEVLLAATNDHLTLSPRGVLGYTRHPVETPYRPSIDVFFNSVADGWQGEAFGVLLTGMGRDGALGLKAMRAKGCYTIAQDEATSAVYGMPKAAAAIGAASAILPLERIAPQLISRITRPLRD

SEQ ID NO: 138427 - protein, 154 aa, Unknown
  Bacterial polypetide isolated from the Sargasso Sea
PTHARKFTKSFAERLDHHCRLTVKEAESGERICPGTAYLAPGDQHLLLKNQDKGYCVELNDGPLVCRHRPSVDALFRSAAQVARHHATGVILTGMGDDGAQGMLEMKEAGSFNIAQDEASSVVYGMPKMAFSKGGVDEVHSLNEIPHVLVKHSH

SEQ ID NO: 138428 - protein, 83 aa, Unknown
  Bacterial polypetide isolated from the Sargasso Sea
ARNAGANALGVILTGMGKDGAVGMLEMRNAGAYNVAQDEASCVVYGMPKEAVAHGGVHEVLPLSQIGPHVLAKLSAHGRVTRV

SEQ ID NO: 138429 - protein, 370 aa, Unknown
  Bacterial polypetide isolated from the Sargasso Sea
MPCRPAADAVRRRRTGNPFHEPGPPPTLRTDRRIPLVNIGIVNDLPLAVEAMRRAIARRPEHRVLWVATDGAQAVELCAAQPPDVVLMDLIMPKFDGIEATRRIMRSERPCAILIVTSCIGANAWRVFEAMGAGALDAVDTPRLGDGAAGDTTRLLLAKIDQIGRLLDAPGGTRLAGTASRAGGGPLIAIGASAGGPGALASILGGLPADFSAPIVIVQHVDRAFAEGMAQWLDGQTPLTVRVAHEGDRPQPGVALLAATDDHLRITRAGTLEYTREPAATPYRPSVDVFFNSLTEHWPGRVIGVLLTGMGRDGAIGLKALRMKGYHTIAQDEATSAVYGMPKAAATLGAARAILPLGRIAGELAALARI

SEQ ID NO: 138430 - protein, 258 aa, Unknown
  Bacterial polypetide isolated from the Sargasso Sea
PVDASRARGVLEAGHDDLQRLKLAGEQDAALERFMLDGVAGLAQGYRHYLDVLHRQRPATDAPSPQWDSWARAVLGAFDRFQLLCAVRKGSWGVEEMNLRIARALQRAGLLVADHGWYEGRPVLVTRNDYSLGLMNGDIGIALNLPDDELGRQVLRVVFPRNDGSGELRHILPSRLSSVETVFAMTVHKSQGSEFEHCALLMPDALNPVLTKELVYTGITRARRWFSLIESRAGIFEQAVLRRVERRSGLREALEATE

SEQ ID NO: 138431 - protein, 269 aa, Unknown
  Bacterial polypetide isolated from the Sargasso Sea
KQKESLLNSWEAQRGLRDVMTFLRGIGISHSFAQKIYAKHGLNSIPLIKANPYLLTEFSGIGFLTADGIALNLGFDKNSPYRASAGLLYMLEQQVQKGHTCYPLSDLLEKTASELLIEKNTLGIPLNQLIEDRLIHCNEQNFENEGEKKFISRIRYYRSEQRIAENIFRILNSKAYTIFQRESSIIEEQERKVGLKLDLTQREAVRAVLKNKVLIVTGGPGTGKTTLVRFILGLISPKIPSIALAAPTGRAAKRITETTGSSSSTIHRL

SEQ ID NO: 138432 - protein, 710 aa, Unknown
  Bacterial polypetide isolated from the Sargasso Sea
MNNATALAANWYNAGALRLKAPLAELLKYWEKERLITALDRHFALEMARLHPNDAQEPLFMLLCALLSQQLSAQHTCLVLEYIVPTNPMAESINRCQIRLSLTELIDALQHFDTIGAPNSNKPLIFEDGRLYLERYHHFETQVASALTRLSATALSLTPSQPLASDNQSLLQLRRQLDCLFPSAAHTVEANIDWQKVATATALGRKLAVITGGPGTGKTTTVTKLLLLQQLGLPKQIRLVAPTGKAAARLSESIKASKARLEQELKQAQATNELAQNHETQALLAALKQVPEEASTLHRLLGVIPNSAHFRHHQGNPLRLDLLIVDEASMVDLPMMYKLLSALPEHAGLILLGDQDQLASVEAGAVLADICAGLKQASTQHTEWKMRYSQAQAEQLTALTGFNLTPFIHAEPKIGDSLCMLTHSHRFKGDAGIGLLASAVNRADLAGILAVWQRGLAELTWLEHSVDHSQTQAKISEPSSNTGLKALLAQACEQYGDYLRLLQPTHATTIHTSEPFCPPSAMEAIAKFNQYRMLCAMRTGDYGVEGINLAVTKALAQAKLIQPQQEFYLGRPIIIQSNDYNLGLFNGDIGLILQDEERADRLMAHFIKADGELLKVLPARLPSHETCYAMTVHKSQGSEFNRVALVLPPNPSLVQWQLLTKELIYTAITRAKQHFSCLGTQQVFERASLQATQRASGLADRLWRDKSIIN

SEQ ID NO: 138433 - protein, 674 aa, Unknown
  Bacterial polypetide isolated from the Sargasso Sea
MIERLKALALAGRIRQLDLQFAKLVADLGGSPELVLGAALACFELGRGHVCLPLEMLTVGSLRPFGLDPDQSRDLLADLADPARWPALFAESPLVGTEQDEGLAPRWPLRLWHGRLYLTRYHDHEQGVARHLRALSERAEWPEIAPALSRLFARDYGLVFGALLKARLAPDFSARHFIEKYLDLVFPSEVDWPAIEGLLASAQAASDLSKLDALVPEALCCNGQKLAAATAAARPFAVISGGPGTGKTTTVAKLLAILVETGLQAGKAPAIRLVAPTGKAAARLTESIGSALQALDLPPEWVEAIPTEAGTLHRLLGVIPGRSQFRHHAGNPLHLDLLVVDEASMVDLPMMARLLDALPSHARLILLGDKDQLASVEAGAVLGDICSFIEQGISPAQADWLSRQTGYRLQGSPAGAPVRDSLCLLAKSWRFDQHSGIGQLARACNSGDATAVESVWGAGFADISLHPWAGEAYDALIAQGVAGYGSYLKAARAGEAPAAVFKAFNSFQILCALRDGPFGVEGLNERLELALSRAGLIARDGDWYAGRPVMVVRNDHGVGLYNGDMGLCLPDESGRLKVWFEQPDGTLRALLPSRLPPHETVYAMTIHKSQGSEFAHTVLVLPDSPSPLLTRELVYTGITRAKARLDLYGDRALLAQAVRKKTERYSGLAERLGE

SEQ ID NO: 138434 - protein, 706 aa, Unknown
  Bacterial polypetide isolated from the Sargasso Sea
MNHSTELTPPKESTQWVEAGALRLKAPLAELLKYWEKERLITPLDRHFALEMARLHPNDAQEPLFMLLCALLSQQLSAQHTCLVLEHIVPANPMAETVNHCQIRLSLPELIARLQNFEAVGEPYSNKPLIFDGGRLYLERYHHFETEVASALTRLSSSQPINATDKDSDASLRRQLDYLFPNAASSHAAPALEPNIDWQKVATATALGKKLAVITGGPGTGKTTTVTKLLLLQQLGSPKQIRLVAPTGKAAARLSESIKASKARLEQELKQAQATNEQVQSHETQALLAALKQVPEEASTLHRLLGVIPNSAQFRHHQGNPLRLDLLIVDEASMVDLPMMYKLLTALPEQAGLILLGDQDQLASVEAGAVLADICAGLKYESDQHSEWRMRYSQAQAEQLSKLTGFDLRAYIHREPKIGDSLCMLTHSHRFKGDAGIGLLASAVNRSDLAGILAVWQRGLAELTWLEHSMDLSQTQAKISEPANNSGLHALLTQACEQYAEYLRPLQISEPSSVPSAIEAIARFNQYRILCAMRSGDYGVEGINQAVTKALSQAKLIHPQQEFYLGRPIIIQSNDYNLGLFNGDIGLILQDEDRPERLMAHFIKADGKLLKVLPARLPSHETCYAMTVHKSQGSEFNSVALVLPPNPSLVQWQLLTKELVYTAITRAKQHFSCLGTQQVFERASQQATQRASGLADRLWRDKAMTD

SEQ ID NO: 138435 - protein, 752 aa, Unknown
  Bacterial polypetide isolated from the Sargasso Sea
MPEPADFGIALAEGFARRIGDLARRAGAPAAAARWAARAAFATSRATAGGHVCVALGALAQRYEAPLDEVRSALAASGVVAFRTLARGDERPLIVDRHDHLYLSRYFDYERRLADALVAQAGVAAPDEGLAPDRLRDSLARYFGPATGEVDWQRVAAIVALTGRVTIVSGGPGTGKTTTVVGVLACLLDAHPGLRVALAAPTGKAAQRMQEALHARAGDLPPELAARLPETSFTLHRLLGGGGAAGFRHHRDNPLPYDLIVVDEASMIDVALAAHLLDALAPGARLVLLGDKDQLAAVEAGAVFAELSARPAFTAAARTRIAQALGIDEAAFVAALPVQDEAATAAIHVAHPASAVARAPAPAAAATPKPASRRKVDERQASLFDDEPQEDEVSPTSVAPPPVAGPVPTETGEPGEAGAAGEAPAWIEVDELAWLDAVELPPFDAGDAALASVTSLLPGEPAAAPATPAAPAPAPLADCVVWLERNYRFGLDSPIGRLSLAIRSGDVQAALDALPADDSAAASFHDDAGESLASSTVERLARRFGAYLDALRDTLAAPVPDPLPLFDALNRFRILCATRSGLRGAEHVNALVAAHVRHAARVPLAVGAHWFTGRPIMVTRNDYALGLFNGDIGIALPDAQGVLRVWFRRADGTARAVSPAALPPHETAFALTVHKSQGSEFDEAALVLPASFGRVLTRELVYTAVTRARTRVQVIGPRRVLAQAVATRTQRDSGLAARVDEALARRRTEASR

SEQ ID NO: 138436 - protein, 233 aa, Unknown
  Bacterial polypetide isolated from the Sargasso Sea
GVGNINNAVMARLGENPDIPPFMMYSEVLQESVVHLLETGKVRGASASSLTVSDKALRKIYDNMDFFAERIVLRPQEISNNPEIIRRLGVIALNVGLEFDIYGHANSTHVAGVNLMNGIGGSGDFERNAYLSIFMAPSIAKEGKISTIVPMCSHVDHSEHSVKVIITEQGIADLRGLSPIERARTIIENCAHPLYRDYLHRYLQSTSGGHIHHDLSRVFELHTSLLKTGSMLG

SEQ ID NO: 138437 - protein, 337 aa, Unknown
  Bacterial polypetide isolated from the Sargasso Sea
WERASADRCRSLRSARAGSMGGIPNLGNSCYMSSTLQLLRSMKSFVKDVGVAASLEKPTLSALKDFFESDLGELSAAGVKLAMSHVRDEFGEYDQHDAMEFLTVLLETIENEIGDAAACPSRKNFLWRIDHELKCAACGKANTIQETMYALTLQIEPDERESVETLLERFFATESVHRKCDDEACRHETSQSSRRIVSQPKILLLHLKRFSATYERGEMHLHKLSASIRLPRSVSLRLFADESEDRSPGVETPRADSHSPSSTVGTPMNDTYALLSVISHFGSSIQTGHYVCHRREDRSSSWRTFDDERVTPYVARNDDDGARALISAQEFERECYV

SEQ ID NO: 138438 - protein, 245 aa, Unknown
  Bacterial polypetide isolated from the Sargasso Sea
MSKGFTNLGNTCYMNSALQCLSHLELLNPGCNDLTVDCTKRSNKNNYDLMGEWMKLQKAMWDRSNNDVINTIGILKEFIRRCQSDNIYFESFQQNDCGDFINTFLDLLHNSIKRRVIVEITGTPKNKYDELKIKSIHSWKSFFENSYSHIIKNFYSELLSITCCPKCKYMTTNHEPIMNITLTMKENYDSIYDCFDEFVKEITLDTGEEWTCDKCNEKVRPQKKLTLKELSPVLILSVKQYRVDN

SEQ ID NO: 138439 - protein, 54 aa, Unknown
  Bacterial polypetide isolated from the Sargasso Sea
MENKHIDKGLTGMSNLGNTCYINSVIQIISNTHELGEYLINVDKLRNVNEHIIQ

SEQ ID NO: 138440 - protein, 190 aa, Unknown
  Bacterial polypetide isolated from the Sargasso Sea
MALRDVCEGDPHPRFLVEVQSASGAWPRDASSQQQQPPASFLSPDRAGAAGFPSPSSVSYSDGEAAMQINNSNSNSNNNNNNNNNNNNNNNNKRARPSLPVLPYPPPPQGVGLVNLGNTCYMNATLQALAHTRLFNDYFTLRAAAPPAPASPAASPNKGAASTDDEEVDPASSFSGAIEGSSVGPEANDE

SEQ ID NO: 138441 - protein, 196 aa, Unknown
  Bacterial polypetide isolated from the Sargasso Sea
MTDKYNEYKDKGLTGLSNLGNTCYLNSCMQILSHCYDLNIILDKLDLNKLNKIDDSILLIEWINLRNLMWSKNCIISPNRYVNTIQNISNKKNIELFSGFAQNDLPEFLVFLIDCFHNSLKRKFEMNISGKCINKKDELAISCFNMIKTMYSDSYSEILNLFYGIQISFLYSDDNKTILSNKPEPYCLIDLPIPIN

SEQ ID NO: 138442 - protein, 77 aa, Unknown
  Bacterial polypetide isolated from the Sargasso Sea
MDQSYFYKKGLCGLRNLGNTCYINSITQCINNDRTFVEYFLTGRYKEDSNKKVSMNLLNEFINIVKNLYKENACVEP

SEQ ID NO: 138443 - protein, 210 aa, Unknown
  Bacterial polypetide isolated from the Sargasso Sea
MNGLINLGNTCYMNSIIQCISHLDFLSYDNEKLLTNCGKTVHRNDFDLMQSWLKLDKSLKISKTGRINPTDFYRTFIEKLQKNDYYFIGFDQNDAGEFMTIFFDLLHKTIEHKIRLEISGTIKNKRDKIAVDSIRDWRRFFEDKYSYIVSSTYSQLLNITSCNECDYMTTNHDPIQIITLHLKPDSSTIYDLLRDYVKLERLDEWKCDQC

SEQ ID NO: 138444 - protein, 260 aa, Unknown
  Bacterial polypetide isolated from the Sargasso Sea
PLAVKLGTITPAGADVYSYAADEDDMVTDAKLAEHLAHWGIDVMRMEKTEKSMAELQIDLNKGFEFDKITEAGAELAQASGARRVGLKNLGNTCYVNSVLQCLKEVAAYEQRYCAGADAIFESSPADPTGDFCTQMAKIAVGLVTDRYAKGSGPGDDAPVAAVQPRMFKAIVGKGHPEFSTGRQQDAVEYFQHLLEVMTRAERAETGRAGASDGSKFTASQFEFEVEERVACVESGKVRYVTRRENVLPLEVPVEWPRTR

SEQ ID NO: 138445 - protein, 227 aa, Unknown
  Bacterial polypetide isolated from the Sargasso Sea
LCTNLWLNLTDGSLLCGRKNWDGSGGNGHALEHYNETKYPLCVKLGTITPEGADVFSYAEDEMVTDPKLAEHLAHWGIDIQKQKKTDKSLAEMELEINKSVGAEYAAIMESGESLEPAYGPGRTGIVNLGNTCYISSILQALFALDEFKEVFGKKNEFEPEPVNNIKTQISRIGSGLIGGDYAKPISTPDGKKLNDEQMGISPGLFKSVVAQGNADFVGNQQQGTDL

SEQ ID NO: 138446 - protein, 267 aa, Unknown
  Bacterial polypetide isolated from the Sargasso Sea
MTPKNDVSTCEDAAKVGTRGKAGLSNLGNTCFMNSGLQCLSHCSLLTDYFLSDKYEADINTDNPISLGGELAKEYANLIGALWRDGALTVTPRKFKSSLARFAPQFSGYMQQDAQELLAFLLDGLHEDLNRVKNKPYITEKDSDGRSDEDIATESWEAHTARNNSCIVDTFQGQYRSTLVCPSCGNKSVKFDPFMYLSIPVPSARERMIKVTLVTYGDEVSAVTYGLKLPKTGDVAMLLSALCEAADIDTMDERVVLCEVYNHRLER

SEQ ID NO: 138447 - protein, 446 aa, Unknown
  Bacterial polypetide isolated from the Sargasso Sea
MADSPNNLAHEHPSLEHYWMPFTANRQFKASPRLLAKAEGMYYTDINGNKVLDSTAGLWCCNAGHGRREISEAVSKQIREMDYAPSFQMGHPIAFELAERLTELSPEGLNKVFFTNSGSESVDTALKMALCYHRANGQASRTRFIGREMGYHGVGFGGISVGGLSNNRKAFSGQLLQGVDHLPHTLDIQHSAFSRGLPSLGAEKAEVLEQLVTLHGAENIAAVIVEPMSGSAGVILPPQGYLKRLREITQKYGILLIFDEVITAFGRVGAAFASQRWGVIPDIITTAKAINNGAIPMGAVFVQDYIHDTCMQGPTELIEFFHGYTYSGHPVAAAAALATLSIYENEQLFERSFELERYFEEAVHSLKGLPNVIDIRNTGLVAGFQLAPNNEGVGKRGYRVFERCFHQGTLVRATGDIIAMSPPLIVEKHQIDQMVNSLSDAIHAVG

SEQ ID NO: 138448 - protein, 325 aa, Unknown
  Bacterial polypetide isolated from the Sargasso Sea
HRNEDFISGAVALANQTGADIYHGKYADEPIEYARKAGNGDKFEIGKWTLEVIATPGHTKDSICVLAIDNEQDGQPIGVFTGDTLFVSEVGRTDFYPEEMEKMAGQLYDSLQTLANLGDDIIVYPAHGAGSVCGSGMAEREFTTIGIEKRQNPGYQCTSKKAFIERKLKENHYIAPYFSKMEQSNVTGMDTPLPPVACQKLAQDAQSAWQKSAERPGVLIDVRSHAQFRDCHYPGSLNLPGGLLSAYGGWFLDYSTPIALVADSHQQATESSEQLWRMGYQQISGYLTMVPKPDTIEAYHRQHVNAVNADKVDERIRAPRANWQL

SEQ ID NO: 138449 - protein, 216 aa, Unknown
  Bacterial polypetide isolated from the Sargasso Sea
ARELQTQLARQVRLEDDYPPLRHLAGVDVGFEEGGAITRAAALLLDADTLEPLAECVARIPTSMPYVPGLLSFRELPALLRALAGLPDEPDLIFVDGHGIAHPRGLGIAAHLGVVSGLPTIGVAKKILTGHHAELAEARGARVELLNRMGEQIGWVLRSKDRVRPLIISPGNRVSLERAPELVMACVRRHRLPEPTRLADRLASRRDARRDQPSLF

SEQ ID NO: 138450 - protein, 207 aa, Unknown
  Bacterial polypetide isolated from the Sargasso Sea
MAASPFADWDGSPAAARELQTQLARQVRLEDDHPPLHHLAGVDVGFEEGGAITRAAAVLLDADTLEPLAECVVRIPTSMPYVPGLLSFRELPALLQALAGLPQEPDLIFVDGHGIAHPRGLGIAAHLGVVSGLPTIGVAKKILTGHHAELAEARGACVELLSSRGEQIGWVLRSKDRVRPLIVSPGNRVSLERVPELVMSCVRLTVA

SEQ ID NO: 138451 - protein, 207 aa, Unknown
  Bacterial polypetide isolated from the Sargasso Sea
MANLNTLDLNNKPSGQIELNDQILETEYHPQAIKQAVVGFLAANRQGTHSTKTRAEVSYSTKKLYRQKGTGNARSGSNKSPLRRHGGITFGPSPRNYSIRSNKKFRKLALRSAIAEKIRQNQLVILEKLKLEDHKTRNLKKVLATLEAPKALIVTENMSRELMLASRNLQGVHAINQQSINVYELLRFPKVIFVKDAMESLNARLSG

SEQ ID NO: 138452 - protein, 154 aa, Unknown
  Bacterial polypetide isolated from the Sargasso Sea
MRILGIDPGLARVGYGVIDTTGGQQRMLDCGIIRTDPGRPDGERMVEIAGDLRQLIRRWRPQLAAVEKFFFYRSSNTISVVQARGVVMMTLARFKVPVVEFPPMQIKLALAGFGHADKDEVLEAVMRELNLSDPPRPDDAADALAVALTGWFQR

SEQ ID NO: 138453 - protein, 126 aa, Unknown
  Bacterial polypetide isolated from the Sargasso Sea
TIFTDLCAVIHKYRPEEAAIEDVFMGKNAGSALKLGQARGVALAACLANDLYTYEYSARKVKQSIVGTGAATKAQVNRMVQILLGINENIAEDSADALAIAICHANTQSRLIRLSGAKSFSKKRLR
